United States Patent Application Publication US 2004/0029129 A1 - sequence listing, part 7

SEQ ID NO: 18974 - DNA, 378 bp, Chlamydia trachomatis
atgtttgggatagggactgacattatagaaattgataggattcgcagagcttatcacacttatggggatcgattcctaaacaaaatttttacgaaaggggagcaggcttactgtttttctaagtcggatccctatgcttctttggcagtgcgttttgctgctaaagaggctgtatccaaagctttgggtacgggtataggtaaatctttgaaatggaaagaaatcgaaatatctagggggactcaacacccccaagtttccgttccggagtctttgctggctttgctggaggtgaaaagaatccttctttccatgagtcactgtcgagagtatgccaccgcagtagctattgcagaagtaactaatagtagtaaatag

SEQ ID NO: 18975 - DNA, 897 bp, Chlamydia trachomatis
atgagtttagataagttattagttacagatattgacgggacaattacacaccaaccacaccaacttgatgatcgagttatagaagctttgtatcagtatcacgaagccgggtgggatttgttttttttaacaggaagatatttttcttacgcatatcctctttttcaaaacttgtctgttccttttttattaggtagtcaaaatggctcttccgtatggtcctccacagaaaaggaatttatttattttcagaatatgccccgagattttcttcgggttttagaaagatattttgaaggcttagatcttattgtgtgcatagagtccggagcttctaatcgggatacctattttcgacaaggattagggaataaaactcgtgaacttaaagcgattcttgatactgtatatttcccttcggaagaatctgcagaattgctcgttgatgttcagggatgtctatcggacgagtttacttatgaaaattttgctgttgctaaattttttggcagacgagaagaagttaaaaaaattatggatagatttgttgaagcgccggaagtgtcttcgcgtgtaacgatgaattacatgcgttggccttttgattttaattatgcagtgcttttgctcaccttaaaagatatttctaaggggtttgctgtagatcaagtggtccatacgttctataaagggaacaagccttttataatggcttctggggatgatgctaatgatatagatttattgtctcgaggggattttagaattgttatgcagacagctccagaggaaatgcatggattagcagactttttagctcccccagcgaaggatcttggcattctctccgcttgggaagctggtgaactgcatcataagcagcttcttaatccttag

SEQ ID NO: 18976 - DNA, 897 bp, Chlamydia trachomatis
atgttgaaaattgatttaacaggaaaaattgcgttcatagcaggtataggtgacgacaatggatatggctggggcattgctaaaatgttagcggaagccggcgccaccattcttgtgggcacttgggttcctatttacaaaattttctcccaatcctgggaactaggaaaacttaatgaatctcgcaaattatcaaatggagagctgcttactcttgctaaaatctatccaatggatgccagtttcgacaccccagaagatgtccctcaagatatcttagaaaataaacgctacaaagacctttctggctatactgtatccgaagtggtagagcaggtaaaaaaagatttcgggcatatcgatatccttgtccattctcttgcgaatagccccgaaattgccaaacctttacttgatacttcacgcaaggggtatcttgcagctctaagcacatctagctattcctttattagccttctttcccatttcggacccattatgaatgaaggcgccagcacaatctctttgacatatctcgcttctatgcgtgctgttcctggatatggtggcgggatgagcgctgcaaaagctgctttagagagtgacacaaaggtattggcttgggaagctggtagacgttggggaattcgcgtaaataccatttcggcaggacctttggccagccgagctggaaaagcgattggatttattgagcggatggtggattactatcttgattgggcgccactaccatctccaatggaagctgaacaagtgggcgccgcggcggcattccttgtttctcctttagctaatgccattacaggagaaactttatatgtagaccacggagccaacattatgggcataggtccagaaatgcttcctaaggattaa

SEQ ID NO: 18977 - DNA, 1635 bp, Chlamydia trachomatis
atggtcgctaaaaatattaaatataacgaagaagccagaaaaaaaattcaaaaaggagttaagactctagctgaggctgtaaaagtcactctggggcctaaaggaagacatgttgtcatagacaaaagctttggttctcctcaagtaaccaaagacggagttactgttgcaaaagaagttgagctcgccgataagcatgaaaatatgggcgctcaaatggttaaagaagtcgctagtaaaactgctgacaaagctggggatggaaccacaacagccactgttcttgccgaagctatctatacagaagggttacgtaatgtaacagctggagcaaacccaatggacctcaaaagaggtatcgataaagctgttaaagtcgttgtagatcaaattaaaaaaattagcaaacccgttcaacatcacaaagaaattgctcaagtagccactatttctgcaaacaatgatgcagaaattggtaatcttattgcagaagcaatggaaaaagttggtaaaaacggatctattactgttgaagaagccaaaggattcgaaacagtcttagatgtcgttgagggaatgaatttcaatagaggatatctctctagctattttgcaacgaatccagaaactcaagaatgtgtattagaagacgctcttgttttgatttacgacaaaaaaatatctggaattaaagatttcctccctgttttacaacaagttgcggaatcaggccgtcctcttcttattatagcagaagacatcgagggagaagctttggcgacattggttgttaaccgaattcgcggaggattcagagtttgtgctgttaaagctcctgggtttggagatagaagaaaagctatgctggaagacatcgctattttaactggcggtcagcttatcagcgaagaattgggtatgaaattagaaaatgctagcttagcaatgcttggtaaagctaagaaagttatcgtttctaaagaagacacgactattgttgaaggaatgggcgaaaaagaagctttggacgctcgttgcgaaagcattaaaaaacaaattgaagacagcacttccgattacgacaaggaaaaactccaagaacgtcttgctaaactttctggcggcgtagcggtcatccgcgttggagcagcaacagaaatcgaaatgaaagagaaaaaggatcgtgtagacgatgctcaacatgccacaatcgctgctgttgaagaaggaattcttcctggcggtggaacagcattaattcgttgcattccaactcttgaagctttcttgcctatgttgacaaatgaagatgagcgaattggagcccgtattgttttgaaagctctctctgctcctttgaaacaaattgcagcaaatgcaggaaaagaaggtgctattatcttccaacaagtaatgtcccgttctgcaaatgaaggatacgatgctctacgtgatgcctatacagacatgatagaagctggtatcttggatcctgctaaggttactcgttccgctttggaaagtgcagcatctgtagctggtctactattgacaacagaagctctcattgcagaaattccagaagaaaaacctgctgcagctccagcaatgcctggtgcaggaatggattattaa

SEQ ID NO: 18978 - DNA, 2604 bp, Chlamydia trachomatis
atggagaagttttcagacgcggtcagcgaggccttagaaaaggcttttgagttagccaaagatgctaagcattcttatgtaacagaaaatcatttgctaaagagtcttttgcaaaacccaggttctttgttctgtttagttatcaaggatgtgcatgggaatctaggactattaacttctgctgtggatgacgctttgcatagagagccaactgtggttgagggtgcagctattcccaaaccatcgccaagtttacagcaattattgctaaacgctcaagaagaagctcgaagtatgggggatgaatatctctctggagatcacttgttattagctttttggaaaactaccaaagagccttttgcttcatggagaaaaacagtaaaaacttctccggaagctttgaaagaattaatcatcaaattaagacaaggaagtcgtatggactcgcccagtgccgaagaaaatctaaaagggttagagaaatactgtaaaaatctgactattcttgcaagagaaggcaaattggatcctgtgatcggtcgagatgaagagattaggcgtacgatacaggtcctttctagacgaaccaagaataatcccatgttgataggagagcctggggttggaaagactgcgattgccgaaggacttgctcttcggattgtgcaaggagatgttccagaaagtttaaaggataagcatctctacgtgctagatatgggagcgctgattgctggtgcgaaatatcgaggagaatttgaagagcgtttgaaaagcgttctgaaaggagtagaagcttcggaaggagcatgcattctatttatcgacgaggtacataccttagttggggcaggagccacagatggggctatggatgctgcaaatttattaaagccagctttagctcgaggaacgttgcactgtattggggcaacgactttgaatgaatatcagaagtacatcgaaaaggatgctgctttagaaagacgtttccaacctatttttgtcaccgagccctccttggaagatgccgtttttattcttcgaggattacgagaaaagtacgaaatttttcatggggtacgcattacagaaggagctttgaatgctgctgtagttctttcttatcgttatattacggatcgttttcttccagacaaggcgattgatttgatcgatgaggctgctagtttgattcgtatgcagataggaagtttacctttgcctatcgatgaaaaagagcgggaattgtcagctttgattgttaagcaagaggctattaagcgggagcaggctcctgcttatcaggaagaagccaatgaaatgcaaaaagctatcgatcgcgttaaagaagagctggcggctttacggttgcgctgggatgaagaaaaagggttaattgcgggattaaaagagaaaaaaaattctttagaaaatttaaaatttgcagaagaagaagctgagaggaccgcggactacaacagagtagcggaacttcgctatagtctcattccttcacttgaaaaagaaattcgtttggcggaagaagctttgaatcagagagatgggcgtcttttgcaggaagaggtggatgagcggttaattgctcaagttgttgccaattggactgggatccctgtgcaaaaaatgttagaaggagagtctgagaagttattagtcttggaagaatctttggaagaacgggtggtaggacagccgtttgcgattactgctgttagtgattctattcgatctgctcgagtaggtttaagcgatccacagcgtccactaggtgtgtttctctttttagggcctacaggagtcgggaaaacggaacttgctaaggccttagcagagcttttattcaataaagaagaagctatgattcggtttgatatgaccgaatatatggaaaaacattctgtttcaaaattaataggctctcctccaggatatgtaggttacgaagaggggggtagcctttccgaagccttaagaaggcgtccttattctgtagttctttttgatgagatagagaaagctgacaaagaagtatttaatattttgttacaaatttttgatgacggaattcttactgatagcaagaaacgtaaagtaaactgtaagaatgctcttttcattatgacatctaatattgggtcacaagaattggcggattattgtgcgaagaaggggactatagtcgataaagaggctgtgttatctgtcgttgctcctgcactaaaaaattattttagtccggaatttatcaaccggatagatgaaatccttccatttgttcctttgactacagaagatattgtcaaaatcgtaggcattcaaatgaatcgagtggctttgcgtttgttagaaagaagaatttcattaacttgggatgattctgtggttctatttcttagcgagcaaggttatgatggtgcttttggggctcgtcctttgaaacgtttgattcaacaaaaagtggtgactatgttgtctaaggctcttttgaagggggatattaaatccggcatgtcagtagagcttactatggccaaggatgttgttgtttttaaaactaaaacaaattctgtggtgtag

SEQ ID NO: 18979 - DNA, 492 bp, Chlamydia trachomatis
atggatttaaagcagatagaaaaactcatgattgctatgggccgcaataaaatgaagcgcatagcgattaaacgtgacggttttgagctggagttagagagagacaccgggccaaatattcaagaacctgttttttatgataatcgattgtttgctgggtttactcaagaaagacctatcccttcagatcaaaatcttggtaatccgattgtcaaagaagtaggggagaagaaggaagataaacctgttgagggagattttattgtttctccattggtaggcactttttatggggctccttctcctgaatctccggcatttgttaagcctggagatattgtttctgaagatacggttgtttgtatcgtagaagctatgaaggtgatgaatgaagtgaaggcaggaatggctggtcgtgtagaggaggtattaattaccaacggcgatccagttcaatttggttctaagttattccgtatagttaaggcttag

SEQ ID NO: 18980 - DNA, 1374 bp, Chlamydia trachomatis
atgaagaaagttttaattgcaaatagaggcgaaatagctgttcggatcattcgggcatgtcatgatttgggattgtctactgttgccatatattctgtagcagaccaagaagctctacatgtgcttctagctgatgaggctgtttgtattggtgaagcacaggctgccaagtcttatctcaagatcgcaaatattttagctgcttgtgagattaccggagcagatgccgtgcatcctggttatggctttttaagcgaaaatgcaaattttgcgtctatttgtgaaagttgtgggttaacatttattggccctagtgcggaatctatagcaactatgggagataaagttgctgctaagcagttggcaaaaaaaattaagtgtccggtcatccctgggtctgatggtgtcgttaaggatgaagtcgaagggataagaattgctgaaaaaatagggttcccaattgttatcaaagccgtcgcaggaggcggagggcgagggatacgcatcgttagagaaaaagatgaattttatagggcttttactgctgctcgagctgaggctgaatctggctttaacaatcccgatgtgtacattgaaaaatttattgaaaacccaaggcatttagaggtccaggtcattggggataaatacggaaactatgtgtatcttggcgaacgagattgtactgtacaaaggcgtcgacaaaaattaatagaagagactccgagccccattttaacccctgaaatgagagctaaggttgggaaggttgctgttgatttagcaagaagcgcggggtatttttctgttggaactgtggaatttttattagacgcagagaaacgattttacttcatggaaatgaatacccgtattcaggtggaacacactattacggaagaaataacgggaatagacttgctaaaagcacaaattagcgttgcaaaaggagaaaaacttccttggaagcagaagaatattgaatttacaggacatgttattcaatgccgaatcaatgccgaagatccatgtaataattttgctccatctccggggcggttagattactaccttcctccagcaggcccctcagttcgagtagacggagcttgttatagtggttacgcgatacctccttactatgattcaatgattgctaaagtgatcacaaaagggaaaactcgagaagaagcaatagccattatgaaaagagctttaaaggagtttcatattggcggcgttcattccacgattccttttcaccaatttatgttggataatcctaaattcatccactctgattacgatatcaattatgtagatcggcttttagcagaaggcagtacttttttgaagttagcagaaggtgactaa

SEQ ID NO: 18981 - DNA, 453 bp, Chlamydia trachomatis
atggaaaaaagaaaagatacgaaaacgaccctagcgaaggcttcggacgatcaaaacaaagcctggtatgtaattaatgccgaagggaagaccttagggagactatcttcagaagtcgcgaagatcctgagaggtaagcataaagttactttcactcctcacgtagcgatgggagatggtgtcatcgtgattaacgctgagaaagtgcgtttgactggcgcaaaaagagctcagaaggtgtatcactattacacaggatttatttccggaatgcgagaagttccttttgagaacatgatcgcaagaaagcctgcgtatgttatcgaacatgctgttaaaggaatgttgcctaaaactaaacttggaagacgtcaaatgaagtctttgagagttgtgaaaggtagttcttacgcacagtatgaagccatcaaaccaattgttttagacgcgtaa

SEQ ID NO: 18982 - DNA, 402 bp, Chlamydia trachomatis
gtgacaaaaaatacgatacaagagtctgtagcaacaggaagaagaaagcaggctgtttctagcgttcgcctccgttctggaaatggaaagattgatgtaaatggaaaaactttagagcaatatttcccactagaggtacagagagcaacgattttggctccgctcaaaatgctcggagatgtaaatagttttgatttgattatccgagtaagtggtggtggcgttcaaggtcaagttattgctactcgattagggttggccagagctgtcttacaagaaaaagaggatatgaagcaagagttgaaatctcaaggatttttaactcgagatcctcgtaagaaagaacgtaagaaatacggtcgcaagaaagctcgtaagagtttccaattctccaaacgataa

SEQ ID NO: 18983 - DNA, 762 bp, Chlamydia trachomatis
atggatcgatcccccctctttcttatcatcatgggagccccgggatccggaaaaggcacccagtcaaagttattagcatctcaattgtctctccagcatatcagctccggggacttactcagaaatgcggtttcccaaaacacaccacttggccaagaaatcaaatcctacttagatcagggcaaattgttaccagatcaattagtctggaagttagtccatgaaaaacttgatgagttacaacaagatactttattacgaaaactttcctttttatctcgttcagaaaatggcgccattttagatggcttcccaagaacagtcgctcaagccaaactgttgaatgagtttctctgctcctatttccctgattataaaatcatccttttagatatttctgatgaagaagtcctcaatcgcttaacttctcgctacatctgtccgtcttgtcagggtatttataacaaacaacaaggattctctcgatgtcctaaatgtttagtagagctaactcgtagatctgatgacactccagaagtgattcttgatagaattcagacctataaacaagaaacacagcctgttttggattattatgcagctctgcaaagactcatcactattgatgctaatgctcccacccagcaggtgtttaagaacattttagatgctcttcctgaatctaactataccattcataagaaaagttgttgcgattgttgtgactgtgactgctatgatggttgtgactgcgaagagtag

SEQ ID NO: 18984 - DNA, 948 bp, Chlamydia trachomatis
atgatagtggatatgcattgtgacatgttatctcatgaaaatttttctcctgcaaatccagccgtaagaagttctcccgaccaattaatagaagggggagttaatgtacaggtatgtgctctattcactgaatcacaagagttcacaacgttagatcaacaaaatcaattgtttttttcgttaatagaacaagatgagagattgacgccaatagcttatgagccacagatggaaggctccttgcaaatgatccgtagtgtagaaaatgcttcgggattgggttcggataagattcccttacaagctctgtttcagaagcttttgattttacacagtcaggggcctttagcatatgtaggtctcgtctggaatttcgcgaatcgttttggtggaggggttttagagcccaaacggttgtctaaggatggaaaaaatcttttagagttcttgtatgctttggcgattcctgtagatcttagccattgctcagatcagctaacagaagatattttagattttactgtagacaagcttcctaatatgtttatattagccagtcattctaattttcgtaaggttcagggagttgcgcgcaatttgttggatgttcatgctaaagaaattttcgcaagaaatggagtaattgggctgaatggagtcaactactttgtgggagagtctttagaagatatgagaaagcatatcgcctatgcccaagagttaggtatcttagatggcttagtgttaggaacagactttttttatacggacgaagagaaatttttccccaatttttccacagccaaagaccaccctaaattacaagctttgattgaagacactctttcagttaatcaggcgcgggctttgttagcaggaactgcccaacagtttttaacaaaggttgttactgctcaaaagagcgttgtgaatacaattacactttaa

SEQ ID NO: 18985 - DNA, 1983 bp, Chlamydia trachomatis
atgagagctttgtctcaagactattatattgctttatgtacagagttgatagagcatgatcggcgttattatgtgttggatcgacctacaatttctgattacagttatgatatgaagatgcgagagcttcaaaaaatagaagctcaacatccggagtggaaggtgccttggtcgccaaccatttatttgggagatcgtccttctggtcagtttcctgtagttcctcattcacatcctatggtgtctatagcgaatgtgtactctttagaggaattagaggaatttttttcccggacagaaaagctgcttggttatttccctacatattctttagaactcaaaattgatggaatcgctgttgcgattcgttatgaaaacaggacgtttgctcaggctttgagcagaggaaatggagttaaaggggaagatattacagctaacgtaagtacgatacgttctttgcctatgactcttcctcaagatgcaccagaagaggtagaggttcgaggagaggtatttctttcataccaggcttttgagaagctcaatatttgtcagcgagaacaagggaaattagaatttgcgaatcctcgcaatgctgctggagggactcttaagctgttgtcttctagggaggcagctaaaaggaatctggacttatccatttatggactcatcacgaatcgtgaagagcattctcactttgaaaatcttggtctatgtgctcattggggatttcctatcgcaggcatgcctaaacagtgccgcacgaaagaagaggttatagaacgcatacgagaagttgaaggaatgcgatcgcggcttcccatggccatagatggggtggtcgttaaggtcgatagtgttgccgagcagcatcgtttaggattgactagcaagcattatcgttgggcgatagcctacaaatatgctccggaaagagcagaaaccattttacaagatattaccgtgcaggttggtaaaacagggattttaactccagttgccgaactaactcccgttttgctgtctgggagccgagtgtctagagcatctctatacaacgaggatgaaatagagaagaaggacattcgcataggagattctgtttacgtagaaaaaggtggagaaattatccctaaaatcgttgggattaatttagctaagcgttctcctgatagtaaaccttggaaaatgccaagcctatgtcctatgtgccataatccagtcattaaagaaagagtgtctgttcgttgtacaaaccctctttgccttgggggaatgttagaaaagatttgtttctttgcaagtaagggagctttgaatattgatcatttaggcgagaaggttatagccaaattatttgaaatggggctgattcgttcttgttccgatgtgtttgcgcttacagaaaatgatttgaagcaggttccaggatttaaggaccgttctgtccacaatttattagcgagtattgcaggagccaaagaagtgactttggatcgatttttgacagcgctttccataccttttgtagggagttctggggctatagctctagcggaccattttggaactttagataaagtaatgaaagcttccttggatgaattactctctatagaaggtattggtcaaaaagttgcagcgtctatcatagatttcttttctaaaactgagaatgtagaagagatttgtcgtatgcaagagttgggggttcgcattcttcctaaacaggtagatagatgggcccctttacagggtaagatttttgttcttacagggactcttcaggagatgacgcgattacaagccgaggagcgtattcgttcgttaggaggaaagattagttcttctgtatcgaagaatacctatgctgtagttgtgggaagagaagctgggtctaagttaaaaaaagctcaggaattaggggtgcaggttctagaagaaagtgatttgttaaaaattcttaatcaaaactag

SEQ ID NO: 18986 - DNA, 159 bp, Chlamydia trachomatis
atggccagcaaaaaccgcgaaattattaaattgaaaagcacagaaagttctgaaatgtattggactgttaaaaacaaaagaaaaacaaccggtcgactagaacttaaaaaatatgatagaaagctgcgtaagcacgttatcttcaaagaagctaagtag

SEQ ID NO: 18987 - DNA, 1521 bp, Chlamydia trachomatis
atgggtgtcatgaagttagaattattattagcctttaagtatctaattccaagaagaaaaagtttttcctcttccatagtttcggttttttccgtagggatcgttgcccttgttgtgtggttgtccgtggtctttatgtctgtgatccacggactacagcaaagatgggtgggggacctcgcgaggttgcacgcttccattagaattgagccctccgataaatattatgagtcctattactatcagattgactctcatgccgaagcttcgcaatacatttataagaccataggggaaaagcttctttctgatcagacagatccatatgatccagatgtggattttgcgcttccagaaacatttccggctccagagttctctgtgagtggaaagattgtggatcctgttcatatagctaatgaaaagatgctttcttttcttccttcccggaaaggctcttttgttgagttcgaagaggggatggggtatgtgcatatggacagagcttctcaaagtagtaggatagagcctcgctctctgtctcagtacattgcgtattcttcagaagccttttatcagcaacgcgttcttcctttcgaagaaacggactactcaacagaggttctaaatcgcttcaatgcttcgtccgaaggttggttagctgattttcttcttcttcaagagaaatttcgaggtgtgtcagtcattcttcccgtccattatcgagacctcggttatcgagttggggatacagcatcgttgtctatcttttctgtaaaaaaagaaggggaggtccgattccctttgcgggtaattggattctataatccaggtgtttctccctttgggggaaaaacaatttttattgataaagatcttgttgcatctattcgttcagaatctgagggactaggtatgcacaatggatggcaagtatttcttccagatattaaagagatttctgttgtcaaaagaacccttcaaaaattgttacaggaagctgacgtttcctcatattgggaagtatcttctttgtatgattatgagttctttaagcctattttagatcagcttcaaagcgatcaggttttattttctatagtttcttttattgtgttgatagtggcttgttccaatattgtgaccatgtccattttgttagtgaataacaaaaaacgagagattggtattttgaaggccatgggagtttcttcctcgcgcctgagattggtgtttggagtatgtggagcctgttcagggatgctgggtgctttattgggatctattttagcagcattgacattaaagaatttgggagttttgactcattggttgagcgtattgcagggaagagaagcttttaatccgtccttctttggcgaacaacttccccaagatttccaccttccaacggttatctgcctttcattaggagcctttgttttagcagcaatttctggggctcttcctgcgcagcatgttgcacgcatgcaggtttctgatatcttaaaagctgagtag

SEQ ID NO: 18988 - DNA, 1539 bp, Chlamydia trachomatis
ttgagtaatattctcattcttgattttggctcccaatatacgaatgttctagcaaaaaaaatacgtctgctttccgttttttgtgaggttctcccttggaatacacctttagaaaagattcttcaaaagtctccctcaggtttaattttttcaggaggaccacattcggtttatcagaataatagtccagaagttgataaggaaatctataacagcaacatccctatacttggagtgtgctatggcatgcagctgattgctagagattttggaagtgaagttcagggggggaagagcgaatttggttatacacctatagtgttttatccaagcgaactttttaaaggtcttgctgatcaggatgcttttcatacagaaattcgaatgagtcattgtgattgtgttgttgttcctcctaaagatttctttgttatagcgagttctcagcactgtcccattgccgctatagaatgcccaaagaaaaaactttttggtcttcaatttcatcctgaagtttcagattctcaagacataggggataaaattttatcaaattttgtgaagcatatttgccagacttcagaaacttggaaaattgaaacaatagaaaaacaacttattcaaggcattagagaaaaagtgggagaaacagaacgtgtccttctcggcctatctggaggcgtagattcttctgttttagctgttttacttcataatgctctaggtgatcgtctgtcttgtgtcttcgttgatactggactattacgaaaaaatgaagtggaagaagttaaacaacaattttcttctctagggttagagatccttgtggtagatgcttctgaaaaatttttccatgacctatccggaatagaagatcctgagcaaaaacgtaaagtcataggagccgcctttatcgaagtttttgatgaagcctctaaaaatctcgatgttcaatggttagctcaggggactatttattctgatgtaattgaatctgcaaaatcttgtgatgcaacacaagtaatcaagtctcaccataatgtaggtggacttccagaaaagttgaatttgaagcttttagaacctctgcgttttctttttaaagatgaagtcagagctttaggtaaagttctgggtttgccggacgtcctaatatcccgacatccttttcctggtcctggtttaggagtccgagttcttggagaagttcgtcgggaatatgtagaaatagtaaaaaacgcggacagcatttttattgaagaactaaaaaaagcgaatttataccacaaggttagccaagcatttgctgttttcttgccatgtaaatctgttgctgtaaaaggtgactgccgtcattacggttatacgatagctttacgtgcagtagaatctactgattttatgacagcatgctggccatctttatctagagaatttcttaaccgttgttcctcacgtatcattaatgaaatccctgaagtttgcagggtagtttacgatatttccgataaaccaccggcaactattgagtgggaataa

SEQ ID NO: 18989 - DNA, 1611 bp, Chlamydia trachomatis
atgtccttcaaaagtatctttttgaccggaggcgtggtttcttctttagggaaagggctaaccgcggcttctttagctctcctattagagagacaaggcctaaaagtcgccatgcttaagttagatccttacttgaatgtggatcctggaaccatgaacccttatgagcatggagaggtgtatgttactgatgatggcgtagaaacagatcttgaccttgggcattatcaccgtttttcttccgttcagctgtccaaacattctactgctacctctgggcaaatctatacccgagtgattactaaagaacgaaatggggaattcttaggaagtacagttcaagtcatccctcatgtcaccaatgaaattatcaatgtcattcaagcatgtgcagaacatcataaaccagatgttcttattatagaaatcggagggactattggtgatattgaatctcttccttttctagaggcagtaaggcaatttcgctgtgaacatcctcaggattgtctcagcattcatatgacttatgtcccttatctaaaatcagcaaaggaaattaaaaccaaaccaacacaacattctgttcaaaatttacggagtatcggcatctctcctgatgtaatcctctgccgttctgaggtgtcccttagttcagaagtgaaaagaaaaattagcctattttgcaacgttccagagaacgctgttttcaatgcgatagacttagagaactccatttatgaaatgcctctgctcttggctcgagaaaatattgtagacttcttattgtccaaatttggtttttcgcctaaatccttagatcttactgattggcaaaatcttgtaacgactttgtgtgatgggaatcggcatcttgttcgtataggactcgttggtaagtatttagaacacaaagatgcttacaaatcagtgtttgaatcgctctctcatgcttccatccctgcaaactgttccctcgagatagttcctatttctcctgaatctgaagctcttactaatcaactctctcaatgcgacggctgtttaattcccggagggtttggaaccagaagctgggaagggaaaattgctgctgcgcgctattgcagagataacaacatcccttgcttcgggatttgtttaggaatgcaggcattagtagttgagtatgcaagatatgctttaagccttcctcttgctaattccttagaaatggatcctaacacaccagatcctgttgtctgtatgatgcaggggcaagataccatgattaaaggagggaccatgagactaggcgcctatccttgccaaattacgcctaaatctttagccttcgaagcttataagacagatcttgtccaagaacgtcacagacatcgttatgaagtgaaccctgcttatgtagatcttctacaaaaaaatggattaagaatagtgggagtttgtcctcagggagatctttgtgagattattgaaatccctaatcacagatggatgcttggtgtacaattccatcctgaatttttatcaaaactagctgctccccatcctctttttgtaaaatttcttagcgctgctctagactattctttggagaaaggtcgtgaatag

SEQ ID NO: 18990 - DNA, 447 bp, Chlamydia trachomatis
gtgaatagcatgaaacaaaaagaggcttttttaggagtggattatgggaaaaaacgtattggtctagcctttgctagcgctcctcttttgatcacgctacctataggaagcattaatacctgttcatcccttgctttaacagctcaagctcttattactattattaaagagcgcgctgtcactactgtagtgtttggaaatccgttgcccatgcaaaaaagctatgcttctagcgtgcagtcagaaattcaggagttagccgcgctcgttcgagatatgacctctttagaggtcatcctttgggatgagcgcctgtcctcagcacaagccgaacgtatgttaaagaacgattgcggtctaagcagaaaacaacgtaaaaattcttctgatagtcttgctgcaacattaatcctttctagttttttagattctcgcaaattatattag

SEQ ID NO: 18991 - DNA, 1524 bp, Chlamydia trachomatis
gtggaagaaataaaagaaatggggcccacattaccagcctgccctccttgtgtcatggttatttttggggctacaggagacttgactgcaaggaagctttttcccgctttatacaatttaacaaaagagggacggttatctgaaaactttgtttgcgtgggatttgccagaagacccaaatctcatgagcaatttcgtgaagaaatgagacaagctattcaaaatttctctcattcatcagaaattgatattcgtgtttgggagagccttgaacacagaattttctatcatcaggcgaatttttccgaagcagaagggtattcttctttaagatctttcttagagagcgtggatcaaaaatatgggacaaaaggaaatcgtcttttctacctctccactcctccagattatttccaagaaataatccggaacttgaacagacaccaactattttatcatgagcaaggagcccaacagccctggtctaggctaattatagaaaagccttttggagttgatttacaaactgctcaagagcttcagcaatgcattgatgctaatatcaatgaagaatctgtttatcgaatagatcattatcttgggaaagaaactgttcaaaatattctgaccatacgttttgctaatacgctattcgaatcttgttggaactctcaatatatagatcatgtacagattagtgttagtgaatcgattggtataggctctcgagggaacttttttgaaaagtctggcatgctaagggatatggtgcaaaatcacctgatgcaattactgtgtctacttactatggagcccccttctgaattttcttctgcagagatcaaaaaagaaaaaattaagattctaaaaaaaatccttcctattcgagaagaagacgtaattcgtggtcaatatggtgaaggagttgtgcaaggcgtttctgtttctggctacagagaagaagaaaatgttgatccaaattctttggtagaaacttacgtagccttgaaattattcattgataatcctcgctggaaaggggttcctttttatttacaagcagggaaacgtcttcctaaaaggacaacggatattgccgttatctttaaaaaatctagttacgacttgtttaattcagaaaattgccctctgtgccctttagagaatgatttgctcatcatccgcattcaaccagatgaaggagttgctctacaatttaactgcaaagttccagggacaaataaactcgttcgtcctgtgaaaatggatttccgttacgatagttattttaatacagttactccagaagcttatgaacgattgttgtgtgattgtatccttggcgataggacccttttcactagcaatgaagaagtcttagcatcttgggaactattttctcccttattggagcaatggtctaagatccgtcccattttccctaattatattgcaggatctttgcgcccgcaaggagctgatgagctattatctagagatggaagagcatggcgttcttactaa

SEQ ID NO: 18992 - DNA, 612 bp, Chlamydia trachomatis
gtgtttattgtagtagaaggcggagaaggtgctgggaaaacccaatttacacaggcactttctaaacgtttaatggaagaagggaaagaggttgttttaacaagggagccaggagggagtgctcttggagagcagcttcgagatcttgtattggatgtaacacaggagatatcttcctacgcggagttattactgtttctggcagcgcgagctcagcacattcaagaaaaaatattgcctgctcttgaatctggaaaaacagttatatgtgaccgttttcatgattctactattgtataccaaggaattgctggggggctaggagaggccttcgttacggatttatgttatcgtgttgtaggggatgagccttttcttcccgacatcacgtttttattggatttgccagaaaaagaggggttgctaagaaagactcgtcaaaagaatcttgataggtttgagcaaaaacccacatcttttcaccgggctgctcgagaaggatttatttctttagcagaaagatccccagacaggtataaaattttagatgcattattaccaacagaggtatctgtcgatcaagctcttttacagattcgagcattgatatag

SEQ ID NO: 18993 - DNA, 2502 bp, Chlamydia trachomatis
atgctaaataaagaagaaatcatcgtccctaaaaatcttgaagaggagatgaaggagagctaccttcgctactctatgtctgtaattatttcccgagctttgcctgatgttagggatggattaaagccttctcagcggcgtattttatacgctatgaaacaattgaatttgactccaggagcgaaacacagaaagtgcgcaaaaatttgtggagacacttctggggattatcaccctcatggtgaggctgttatttatcctacattggtgcgaatggctcaagactgggcgatgcgatatccgctagttgacggtcaagggaattttggatccatcgatggagatcctgctgctgcgatgcgatatacagaggcccggttgactcatagttcgatctttttattagaggacctagataaagatactgtagacatggtccctaactatgacgaaacaaagtatgagcctgtcgttttcccctcaaagtttcctaatctactttgtaatggttcttcaggaatcgctgtaggtatggcgactaatattcctcctcataatttaggagaattgattgaagctacgctgttagttttagctaacccacaaacttctattgaggaaattttggaagttatgcctggtcctgatttccctaccggaggaattatttgtggaacggaaggcattcgttctacttattacacaggaagagggaaattacgtttgcgtgctcgtatacacgtagaggaaaactctgataagcaacgggagaatatcattctcacggaaatgccctataacgtaaataaatcgcgattagttgagcagatagcagaactgattaatgaaaaaactttaacagggatatctgatgttcgcgatgagtctgataaagacggtattcgtgttgtattggagttgaaaaaaggcgaatcttctgaagtcattatcaatcgtttatataagttcacggatgtacaagtgacatttggggctaatatgttagcgttggataaaaatcttccgcgaactatgagtatccatagaatgatttctgcttggatccgtcatcgtatggacgttattcgacggagaactcgttacgagttaaataaagcagaaacacgcgcacatatattggaaggctttttaaaagctctttcttgtatggatgaagtggtcaaaactattcgtgaaagctcgaacaaagagcatgcgaagcagcaattggttgaattgtttggcttttcggaagcacagtctcttgccattctcgaattgcgattataccaactcactggcttagaaatagacaaagtacagaaagagtataacgagcttttagagaagatcgcctactatcgcagagttttggcagaagaagaacttgtcaaagatattattcgtgaagagcttcaagaattacataaagttcataagactcctcgacgcaccacaattgaaatggatgcgggagatgttcgagatatagaagatatcattgcggacgagtcagtaatcattactatttcaggtgatgattatgtgaagcgtatgcctgtgaaagttttccgtgagcagaaacgaggtgggcaaggagtgactgggtttgacatgaagaaaggctcagacttcttgaaagcagtttattctgcatcaacaaaagattacttgctgatctttactaatatgggtcaatgttactggttaaaagtttggcaacttcctgaaggagaacgacgtgctaaaggcaagcctattatcaactttttagaaggtattcgtcctggcgaacaggttgctgcggtccttaatgtgaagcgtttcgaacaaggagaatatctccttttagctacgaagaaaggtgtggttaaaaaagtctctttagatgccttcggtagcccacgtaagaaaggaattcgtgcattagaaatagatgatggcgatgaacttattgcggctcgtcacatagtgaatgacgaggaaaaggttatgttatttactcgtttaggaatggctgttcgcttccctcatgataaagtacgtccaatgggacgtgcagctcgaggagtccgtggtgtttctttgaagaatgaagaagactttgtggtcagttgtcaagttgttacagatgatcaaagtgttttagttgtttgtgataatggattcggaaagcgttctttagtttgtgattttagggaaactaaccgaggtagcgttggcgttcgctctatcttaattaatcaaagaaatggagatgtattaggagctatttcggtaacagactttgatagtatattgcttatgtctgctcaagggcaggctatccgaatcaatatgcaggatgttcgggtaatgggaagagctactcagggagttcgtcttgtaaatcttcgagaaggggatactctggttgctatggaaaaattatcagtgaatacagagtctggagaaacagaagaaagcgttagcatccaagttggacatgcggtagaggaatag

SEQ ID NO: 18994 - DNA, 2415 bp, Chlamydia trachomatis
atggacgcacaagaaaagaaatacgatgcatcagccattaccgttttagaaggattacaagccgttcgtgagcgtcctggaatgtatattggggacacaggcgttactggattgcaccatctggtttacgaagttgttgataacagcatcgacgaggctatggcggggttttgtaccgaggttgttgttcgtatattggaagatggaggcatctctgtctcggataatggtagagggatccctgttcaaattcatgaaaaagaatccgccaagcaaggtcgagagatttctgctttagaagtcgtccttactgtattgcatgccggagggaagtttgacaaagacagctacaaagtttccggagggttgcacggggttggggtgtcatgcgttaatgctttatctgaaaaatttattgctaacgtatttaaggatgggcaagcgtatagcatggagttttcaaaaggggctccactaacagctctacaagtattgggatctacggataaacgagggactgagattcttttttatcccgacccaactgtattctctacatgcgtttttgatcgcgcgattctaatgaagcgtttgcgagagttggcatttttaaatcgtggaataacgattatttttgaagatgatcgtgatgcaggttttgataaagtcaccttcttttacgaggggggaattcaatctttcgtcagctatttaaatcagaacaaagaaagtcttttcccgacccccatttatattcagggatcaaaacgtggagatgatggggatatagagtttgaagctgctttgcagtggaattcaggctattctgaactcatttattcttatgcgaacaatattcctactcggcaaggggggactcatttaacaggattttctacagctttgacaagagccgttaactcctatattaagtctcacaacttagctaaaagcgataaattgtctctgactggagaagatattcgagaggggttggtagcgattgtttcagtcaaagttccaaatcctcagttcgaaggacaaacaaagcagaagttaggaaatagcgacgtaggctctgtagctcagcaaattagtggcgaagtattaacaacatttttcgaggaaaatcctcaaatagccaaaactattgtagacaaagtctttgttgctgcccaagcaagagaagctgctaaaagagctagggagttgactatccgaaaaagtgctttggatagcgcccgtttaccaggaaagttagtggattgtttagaaaaagatcctgaaaaatgtgaaatgtacatcgtagagggagactctgcaggggggtcagctaagcaaggaagagaccgacgattccaggctattctgcctattcggggtaaaattttaaacgtagaaaaagctcgtctacagaaaatttttcagaaccaagaaatcggaagtattatagctgccctaggctgcggtattggaacggataattttaacctgagtaaattgcgttataaacgtgtcattatcatgacagatgctgacgttgatggctctcatatccgaaccttattattgacgttcttctatagacatatgtcagcattgatagagaacggatgtgtttatatcgctcagcctccattatatcgggtaagtaagaagaaagatttccgctatatcctctctgaaaaagagatggatggctatcttttaaatttaggaacacgagaaagccgagtggttttcgatgatacggcaagagaactagagggaacagctttagaatcgtttgttaaccttattttggaagtggaaagctttattattgctctagagaagagagcgattccattttctgagtttttagatatgttccgtgatggggcgtaccccttatattattaccctccagaaagtggaaaacagggaggaaattatctttattcgaatgaagaaaaagaggcagcagttgccgctaatgaagaagctgcggcaagaatcatagagttatataaggcttcagcctttgaggagattcagcataatttgaatgagtacggctatgatattcgccactatcttcatccaaaagggacgggaatcacggtttctacagaagattccaaaactcctaattacacttgttatactttgaaagaagttatagattacttgaagggccttggacgaaagggaattgagattcagcgatataagggacttggagagatgaatgctgaccagctgtgggataccacaatgaatcctgaacaaagaacgcttgttcgcgtctctttgaaagatgctgtggaggcggatcatatctttacaatgttaatgggagaagaagtccctccgcgacgtgaatttattgaaagccatgcgctatccattcggatgagtaatttagatatttag

SEQ ID NO: 18995 - DNA, 1119 bp, Chlamydia trachomatis
gtggctttgcgattcgagattttgcatcaatcgaaaaaatctagagctcgggtaggccgaatagaaactgagcatgggtgtattgatacccccgcttttgttcctgtagctacaaatggagcgttaaaaggggtgttagaccatagtaatatccctctgatgttttgcaatacataccatcttattgttcacccaggagcagaagctgttgctgctatgggcgggttacatcaatttattggtagaaatgcccctattattactgattctggagggttccaaatttttagtttagcttacggctctgtcgctgaagagatcaaaagttgcgggaaaaagaagggtgagaatagcattattaaaattaatgacgagggggtttggtttaaatcttatcgggatggacgcaagctttttttgtctccagaagtttctgtgcaagcacaaaagcatctgggggccgatattatcatccctttagatgaattgctcccctttcatacagatcccgcatattttcaacaatcatcccagcgcacttacgcttgggaaaaacgatctttggattatcatctagcaaatcccgggtatcaatccatgtatggagtgattcatggaggaactttccctgatcaaagaaaactggggtgtcaatttgtagaagatttgccctttgatgggtcagctattggcggcagtcttggaaaaaatcttcgggacattgtgggagtagtcgatgtgactacggcgaatctttctatagaaaggcctcgacatttattgggaataggagatttgccctctatttgggcaaccgttgggtttgggatagactcttttgatagttcttatccaactaaagcagcgcgacatgggatgattctgacatcacaggggtctttaaaaattaacaatcaacggtacgcttcggatttgaatccgatagaaccagggtgtgcttgtcccgcatgttcacaaggtatatcgcgagcttatttaagacatttgtttaaggtgcatgagccaaatgcgggtatctgggcctccattcataatatgcattatatgcaaaaaataatgagtaaaattagagaaaagattttaaatgatcaactgtaa

SEQ ID NO: 18996 - DNA, 1473 bp, Chlamydia trachomatis
gtgggagagcaaaatagaaacgaagagaaattggatgttgcgctgacttccggtaaccttatggattctaaaaccagtcatcttgatgatgaattgagttttaaactagaagaagcgtttgacactctaacagcaggggagcattcgcaggatcttacatcgatagttagcgcatataaccccatcgacttggcttacgctgtgtcgtgtctcccttccgattcgcgctctattctttacaaaagccttgatagtatagcctctaaaatagccttcattattaatacagattccgcgtcgcgatgggctatttttcgtaacttatcggatggggaaatttgtgctctcatagaacaaatgcctcctgatgaagcgatttgggttctcgacgatattccggatcgacgctatcgccgtattttagatttgattgatgtcaaaaaagccctgaaaatccgtgatttgcagaaacatggcagaaatacagccggccgactcatgacgaatgagttttttgcttttttaatggaaaccaccgttaaagaggtggcgacctgcatacgaaataatcctggggttgatctcaccagactcgtgtttgttttagattttaaaggagagttacaaggatttgtgactgataggagcttgattatagcttctcctgaaatgcctttaaaacagatcatgcgccctgtagagcataaggtgttagccgataccactcgggaagaagttgtagaccttgtagagagatataaagttgctgtccttcctgttgtggatgaggaaaattttttgataggggctattacttatgaagatgtggttgaaacgatagaagacattgctgacgagactattgctagaatggcgggtacaacagaggatgtgggatatcatgattgtcatgttgtgcaaaggtttttgttgagagccccttggctgcttattactttgtgtgctggtttagtcagtgcttctgtgatggcttattttcaaaaaattgctccgacattgttagccatggtgattttctttattccattggttaatggactttcagggaacgttggggtgcagtgtagcacaattcttgtccgtagtatggcaacagggactctttcctttggaagacgaagagagacaatactcaaggaaatgagcattgggctgttaacaggggttgcgttagggattctttgtggtctagttgtttgctgtatgggatgcttgggacttgggttattttccacgggaggcgttcagttaggggttacggtttccgtaggtatattaggagcttcattaactgcaacaactctaggcgtcctttctcctttcttttttgcaaaaattggcgtggatccagctttggcctcaggcccgattgttacggctcttaacgatattatgtcgatggtcattttcctgctaattacaggcactttaaacgttttgttcttcaaataa

SEQ ID NO: 18997 - DNA, 1023 bp, Chlamydia trachomatis
atgctaacactaggcttagaaagctcttgcgatgaaacctcttgtgctcttgtcgagaatggaaaaatccttgcaaataggatagcatctcaggacattcatgcggcttatggaggcgtaatccctgagctagcttcccgtgcacatctacaaatattcccaaaacttttggccgctgtagctcaagatgccgaagtttctttagaagatgtcgaattaatttctgtagccaatacccccggccttattggcgcgctttctgttggcgttaacttcgcaaagggactagctagcgggttaaaaaaaactcttataggagtcaaccatgtagaggcacatttatatgctgcctgcttggaagaaccttccattcgcttccccgctctaggcctagctatttcgggagcacacacttctttattcttaatgcctaatgccacaaccttccttttaataggcaaaactcgagatgatgctataggagaaacttttgataaagtagctcgattccttgggctcccctatccaggaggacaaaaattagaggaattggctcaagatggcgatgaagaagcttaccccttttcacgagccaaagtttctggaaacgatttctcttttagtggattaaaaaccgccgtattatatgccttgaaaggtaacaatagctcggccaaagcacctttcccagaagtctctgaaacgcaaaaacgaaacatcgctgcatctttccaaaaagcagctttcatgactattgctcaaaaacttcctgatattgtaaaagcgttttcttgcgagtctttgattgttggtgggggcgtagcaaacaaccgttacttccgtcgcctgctgaatcaaacgtgctctcttcctacatatttcccttcttcgcagttgtgctctgataatgctgcaatgatagctggattaggagagagactgttttgcaatcagacatatgtttctaaggaggttattccatgcgcaaggtatcagtgggaatctgcttgcttatcgcattag

SEQ ID NO: 18998 - DNA, 1647 bp, Chlamydia trachomatis
atggagttactctctgtaaataagagttattttgaactacaaagattacattatcgtccagtcactctagcattgttggataatttatgttctcttcatattaaagaatcagcttcttctgaacctaatccaggtttattagccaagcatattccacatctatgtgcccttcctaatttaacgattcaaaaaggggatcgctcttcttctgagcctttacgtatcggagttttactttcaggaggacaagcaccaggaggtcataatgtagtcatagggttatttgaaggactacgagcttttaataaagaaactaaactttttggatttattaaaggccccttggggcttattagagggctatataaggacctagacatctcagttatctatgattattacaacgctggtgggtttgacatgctttcctccagtaaagagaaaatcaaaactaaagagcaaaagagtgctattctctctaccgtaaaaaaaatgaaactacacgggctgcttattgtgggcggagataactccaataccgatacagcaatgctagcagaatattttatcgagcacaactgtcctacggctgtaattggagttcctaaaaccattgatggagatttgaaaaactcttggatcgaaacccctctaggattccatacatcatgccgaacttattcagaaatgattggaaatttggaaaaagatattctgtccactcggaaatatcatcattttgtcaaattaatgggggaacaagcctcgcacagcactttggagtgcggtcttcaagctcttcctaatattactctaataggagaggaagtagctattcaccacacatctttaagaagtttaagtcatcatattgcacgaggacttattaaacggttccgtaaagataaaaactatagcacgattcttatcccagaaggtttgatcaaacagatccctgacacaaaactgttaattcatgaattaaacgctctgatagctgaaggacaattttcggttaatcattttgaccaacaattatcgcctatggctcttcaaactttctcttcgcttccagaaaatattcgcgagcagctacttcttgacagagactcgtatggaaatgttcgcgtgtctaaaattgctatagaagagctgctagcatctttagttagtgatgaaatagctaaactagaaccaactatgccctttgctcctgtaacacattttttaggctatgaatcgcgcgcgagttttccttcaaattttgattcaaattatggtttagccttaggaattgcagcttctcttttcttagtaagaggtaaaactggatacatggtgactataggcaacttagcggaagaatatgctcactggacaatagcagcaactcccctatacaaaatgatgcatttagaaaaacggtttaatgaagagacaccagtaattaagacagattctgtatctccacactcccccatggtgcaatacctgcacaaaataaaagaggcctgcctgctagaagatttataccgatttcctggacctttgcaatactttgaagagcaagcactaattgaccaacgcccactaacacttctttgggaaaaaggcgctttatcagaaaacaatgctaacagattataa

SEQ ID NO: 18999 - DNA, 2460 bp, Chlamydia trachomatis
atgcgctatgatcccagtctcatagaagagaagtggcaaaagttttggaaagaagaacagacttttagagccgaagaggatgagactaaaacaaaatactatgttttagatatgttcccttatccatcaggggcgggattgcatgttgggcacttgattggttatacggcgacagatattgttgcgagatacaagcgtgctaaaggattttctgttttgcatcctatgggatgggatagctttgggctacctgccgagcagtatgctatacgtacagggacgcatccaagagaaaccacggagaagaatattgctaattttaaacagcagttgacttcaatgggattttcctacgatgaaagccgcgaatttgctacttcggatccagaatactataaatggacacaaaagctttttttgatcctttatgagaaaggtctagcctatatggctgatatggccgttaactactgtcctgagttgggcactgttttgtctaatgaagaagtagaaaatggtttttctgttgaaggaggatatcctgttgaaagaaggatgctccgccagtgggtattacgtataacagcttttgcggatcagttattaggtggattagatgagctagattggcctgaaagtgttaaacagcttcagagaaattggatcgggaaatccgtaggagcatctgtccattttgaaacagaacacggtgttctggaagtttttacaacaagaccagatactctgataggggtttcttttttagtgttggctcccgagcatcctttggttgatcttttaacttctgatgagcagaaaactattgtggctcaatatgtcaaggagacgcaaagtaaaagtgaaagagatcgcatcagtgaaatgaaaacgaaaagcggggtctttactggagcttatgcgaaacatccggttactcaaaatcctattcctatttggattgcggattatgtgttaatgggatacggttcaggcgcagttatgggagttcctgctcatgacgaccgagatttattattcgcgcaacagttcgatttaccgataatctctgttgttagtgaagatggcgtctgtattaatagttgccatgaggattttagtctggatgggctatcaggagaagaagctaagcagtatgtgattaactttttagaaaagaataatttaggttctgcaaaggttgcgtataagctgcgagattggttgttctctcgtcaacgctattggggagaaccgattccagtcatccattttgaagatggttcatgtcgtcctttaaaagacgatgagcttcctttacttccccctgaaatccaggattatcggcctgagggggttggccagggtcctctagccaaagtaaaagaatgggtgaatgtttttgattcagagacgcaaaaagaaggtaagcgtgaaacgcataccatgcctcagtgggctggctcttgctggtactatttgcgtttttgtgatgctcataactcctgtgctccttgggcagaggaaaaagaacagtactggatgccagtagatctttatattggaggggctgaacatgctgtgttgcacctgttatacgcacgtttttggcatcaggtattttatgaagccggcattgtttctactcccgagccattcaaaaaattagtcaatcaggggttagttttatcaacatcctatcgtattcctgggaaaggatatatagctcccgaaatggctaaagaagagaatgggcaatggatttctccttcaggggaattacttgacgttcgccaagaaaaaatgtcgaaatctaagttgaatggagtagatccaaaggttttgatagatgaattcggagcagatgcggttcggatgtacgccatgttttctggaccattagataaaaataaactctggtcgaaccagggggttgctggctgccgacgatttttaaaccgtttttatgaaatggcaacttcttctcgggtaaaagacgaggatatttttgagggaatgtccttagcacacaaacttgtgcaacgtgtaacggatgacattgaaaaattgtctttgaatacgataacgtcttcttttatggagtttatcaatgaatttgtaaaacttcctgtatatccaaaaaatgctgtagaaatggctgtacgagctttagctcccattgctcctcatattagtgaagagttatgggtgttgttagggaatgcttcgggtattgaaaaggctggttggcctaaagcactccccgagtatttagaggggaaaatcgtgaccatcgtagtccaagtaaatgggaagcttcgagctcgattagatattagtaaggatgcaatagaggaagaggttgttgcattggctaaagaagctgtatctaaatatttggaaggtggggtagtgagaaagactatttttgttctgaaccgactagttaacttcgtgatataa

SEQ ID NO: 19000 - DNA, 1050 bp, Chlamydia trachomatis
atgacaacgattcttgatcttcttggcaaagacgccgactatctccttaatcaccaatgcattataaaaaaagaggctctaacgcttccctccggagacttcgtatcgcgagtttttgcagaatcagacagaaataatcgtgtgctccgttctcttcaacaaatgtttgatcatggacgcttaggtggtagcgggtacctttctattcttcctgttgatcaaggtgtcgaacatacggctggtgcatcttttgcgaagaatcctatgtatttcgatccagaaaatattgtacgtcttgctatagaatcaggctgttctgctgtagcttcttcttatggagttttgagcatattagctagacggtatgctcataaaattccttttttactcaaattaaaccacaacgaactgctatcataccctacgacatatcaccagatcttcttcagtcaagtcgaagatgcttataatatgggtgctgtcgctgttggagcaactgtctactttggatcagagtcttccaatgaagaaatcgtctctgttgctaaagctttttcaagagctagagagcttggcttagctaccgttttatggtgttatttgcggaatccgcacttcactaggaatggagtagattaccataccgcggccgatttgacagggcaagcagaccatcttggcgcaactttgggagcagacattgttaaacaaaaactcccaaccttacaagaaggatttaaaacgatcaatttcagtaaaacagatgatcttgtgtactcagagctttcatcaaaccaccctattgatttatgccggtaccaagtactcaatagctattgcgggaaagttggattaattaattccggaggtccttcttctgggcaaaacgactttactgaagcagctaaaacagctgtaattaataaacgagctggtggcatggggctgattttaggtagaaaagccttccaaagacctttctctgaaggagttcagctacttaatttaattcaagacatttacttagatccgaccatctccatatcgtaa

SEQ ID NO: 19001 - DNA, 1401 bp, Chlamydia trachomatis
atgcatcatcgcaaatcttccaccccgttagggacttttactgtggggatgttatccctcgcagtagttattagtttaagaaatcttcctttaaccgcaaaacatggcttgtctaccctgtttttttatgccatttctgtagcttgttttatgattccctatgctcttattgcagcagagttggcttctttcaagcctcagggcatttatgtgtggacacgtgatgctttagggaagcgctggggattcttcgccatatggatgcagtggttccataatatgacttggtatccagctatgttagcttttattgctagtacgcttgtttatcaaatcagcccggatcttgcaaataatcgtctctatctggcctctgttattcttttaggtttttggggcctaactttctttaattttctaggaattggaacatccgctcttttcagttctatctgcgtaattataggaactctcattcccggagccattttagtcgctttcgcagcttactggattcatagtggaaaccccattgcaattactttttcttggggagagctcttcccagacttctcttctctttcttcttttgttcttctatccggaatgcttcttgcattatgtggattagaagctaatgccaatttagcctcagatatggaggatcctaagagaaattatcccaaagcagttttcattggagcagtggctacgcttgctattttagtgctaggatcattggcaattgctattgtaatccctaaagaagaaattagtttagtctccggacttattcgagcattctctcttttctttgaaaaatacaatctttcttggatgacagggattatcgttgcaatgacgatagctgggtctttaggagaattgaatgcttggatgtttgctggcactaaagggttattcatttctactcaaaatgactgcttacctaaaattttcaaaaaaactaattctaggaatgtccccacaaatcttatgcttttccaggcgattgtggttactttattcacattcatattcatctatgtggactctgcagacctcgcttactggattttgagcgctcttagcgtgcagatgtaccttgtcatgtacatttgcttatttatatctggccctgttcttagaattaaagagcctaaagctcaaagactctattgtgtgcctgggaaacttgtgggaatgtgtattctgtctgctttagggattctctcttgcttgtttgctttaggcattagcttccttcctcctcaggcagtaatttcctcatcaactatgggaggcgggtttggttatacagcgctcctgctcttagcctttactattaattgttgcattccttttggaatgtactattcccataaaaaattaattaaataa

SEQ ID NO: 19002 - DNA, 234 bp, Chlamydia trachomatis
atgagtttagaagatgatgtaaaggcaattatagttgatcagctcggagtaagtcctgaggacgtcaaagaaagttcctctttcatagaggatcttaatgccgacagtttggacttaacagagttgattatgactttagaagagaaatttgcttttgaaatttctgaaaatgatgccgagcaactccgtacggttggtgacgtaattaagtacatccaagagcgtcaaaactaa

SEQ ID NO: 19003 - DNA, 747 bp, Chlamydia trachomatis
atgaatagcttattggtaaacaaagctgcaattgtaactggcggttctaggggaattggttttggcatagcaaaactattcgctgagcatggggctaatgttcaaatctggggaatcaatgaggaggctgggaaatctgctgcccaggatctttctgataaaaccggaagcaaggtgtcgtttgctcttgttgatgtcagtaaaaacgatatggtttctgctcaagttcaaaaatttttagcagaatatggaactattgatgttgttgttaataatgcaggcattactcgcgattctcttttaatgagaatgtctgaagaagagtggtcgtctgtaattgatacgaacttgggatctatatacaacgtttgttctgcagttataaggcctatgattaaggctaggtccggggcgattgttaatattagttctattgttgggttaagaggaagtcctgggcaaacaaattatgctgctgctaaagcaggaattattggatttagtaaagccttatctaaagaagttggaagtaaaaatattcgagttaactgtatagctccaggattcattgatactgatatgactaaggggttaagtgataatttaaaaaatgagtggcttaagggagttcctttaggacgagttggtactccggaagaaattgctatggctgctttgttcttggcttctaatcaatcttcatacattacaggacaggttttgagtgttgacgggggtatggcttaa

SEQ ID NO: 19004 - DNA, 927 bp, Chlamydia trachomatis
atggagcgtatagggttgctattccctggtcagggtagtcaattcgttggaatgggcaaggatctttatcaacagtatccagaagtgacacagttgttcgctcaagcagatgagtttcttggattctctttgtcttccattatgttcgaaggtccagaagaaactttattgaaaacaacaaatagtcagttagctatttatcttcatagtttggctgtattagagattttatcagcacgctgttcttttaaccctgttttggtttctggtctaagtttaggagagtatactgctttaacggcatctaaacgtataagtttggaagatggacttcgtgttgtacaaaagcgagctgaacttatgaatgcagcttgtgaacagtccctaggagcgatggctgcagttttaggcttaactgcagatattgtgctgccagctttagagtctttaggtagtgggatttgggtggctaattacaatgctcccaagcagattgtcatcgcaggggttcgggataaagtagaagaagctgctgtagttctccgagagttaggagccaaaaaagtagtcatgttaaaagtatctggagcgtttcatactccacttatgcaatctgctcaagacgaattggctccctatttatatcagttagctatcagagattcgagcatagcattcgcgtctaatgtagtaggggagttggtacaagagagcgaaatgattcgttctttaatggttaaacaaatgacttctccaacgttatggtatcaaacttgttttcaaattgattccaaagtagatttatttcttgaacttggatctggaaatgttttgacggggctttgtcggtctataggacttgcctctccttgtaaacatttaggatctgtagaagatatagagaatttttgtcggagttttgaatga

SEQ ID NO: 19005 - DNA, 984 bp, Chlamydia trachomatis
gtgagagcgtcgatctggggaaccggttcgtatttgcctaaaaaagttttgacaaacgcagatttggagaaaatggttgagacttctgatgaatggatctcgactaggacagggattaaagaacgtaggatagcttcggctgaagagttttcatcctttatgggagcaaaagctgcggaaaaggctatagaggcggctaaaatctccaaaagccagatagattgcattgtgtttgctactgcagctccagattatattttcccatctagtgccgctttagcccaggcctatttagggattaaagaggtgcctgcttttgattgtttagttgcatgtacgggctttctgtatgggttgtctatagctaaggcgtatgttgaagctgggatgtatcagtgtgtccttgtgattgcagcagacaaattatcttcctttgtcaattacgaagatcgtaatacttgtgtattgtttggagatgggggttcggcttgtgttgtcggtccttcaagaccaggatctttaaaaatatccaaagtgaacttgggagcggatggaaaacaaggagaccttttacggctaccagcaggaggaagtcgttgtccagcctctcaggataccatacaaaatcagcaacatttcattaccatggaaggtaaggaggtgtttaagcatgcagtgcgtcgaatggagtttgctgctaaaacatgcattacggaagctggtttgcaagaggaagatatagactggttggttcctcatcaggcgaatgaacgtattattgatgcaattgcaaaacggtttgcggttgaggattcacgagtgtttaaaactctcgctaaatatgggaatactgcagcttcttctgtaggaattgcattagacgagctattgcgtacgcacgatattcattcgaaagagcgactattgttagttgcctttggagggggattgtcttggggagctgtgattttacagcaaatgtaa

SEQ ID NO: 19006 - DNA, 612 bp, Chlamydia trachomatis
ttgaaagacatgttaaaatatcccgactacatttctaaactcatctcatttttaaaaaaactacctggcattgggtttaaatcggcagaaaaaattgcatttgaattattagaatgggatccttctcaagtcgaagcaatgggactggcaatgcaagaattttctgcttcgcatgccacatgcccagactgcttttgcttaaagactagcaaaacttcctcttgtgatttttgtagcgaatctagagattcttcgtttttatgcatcgttgcaacacctaaagacgtcttttcttttgaaaaatcaaaaatttttaaaggacgttacttcgttttaggaaatctcctttcccctattacaggaaaacatctatctttagaaaaactaaacatcctcaagcaacgaatagaagattttgctccaaaagaaatgattatcgcccttgatgcaacattggaaggagatgctacagccttgtttttaaaacaagagttctcccatcttcccataaaaatttctagattggctctcggcatgcctgttgggttatcttttgattttatagattccaacactcttgcaagagctttttctggaagaaattgtttttaa

SEQ ID NO: 19007 - DNA, 1065 bp, Chlamydia trachomatis
atgtctcaacccgtttattctcttaaacaattagctgattttttaaatgtcgagtttcaaggaaatggagccacacttctttccggtgttgaggagataggagaagcaaaagcggcacacgttactttcttggacaatgaaaaatatgctaaacatttaaaatcatctgaagctggcgccatcattctttctcgaacgcagtttcaaaaatatcgagaattgaacaaaaatttccttatagtttcagaatccccctccctagttttccaaaaatgcttagaactattcatagctcctgtcgactctggatttccaggcattcatcctactgcagttattcatccaacagcaattattgaagaacatgtgtgtatcgagccttatgttgtgatttgtcaacatgctcgtattggagcggcttgtcatattggaacaggaagtgtcatcggagcccattcttctattggagaacattcttatatttatcctcgcgttgttgttagagaaagggtttctatcggcaaacgcgttatcatccaaccgggagcaatcatagggtcttgcgggttcggttatgttaccagtgcttttgggcagcacaaacatttgaagcacctaggaacagtaatcattgaagatgatgtagagatcggtgctaacacgactattgatagaggaagatttaagcatagcattgtacgtgaaggctctaaaattgataatcttgtacaaatcgcacatcaagtcgaggttggtcagcacagtatggtagtagcgcaggctgggattgcagggtcaactaagataggcaaccacgtgattatcggcggacaagctggtgtaacaggacatatttgcattgctgatcatgttatcatgatggcgcaaactggtgtcacaaaatccattacctctccagggatctatggaggagctcccgctcgtccatatcaagaggttcatcgtcaagtcgccaaaatacgcaatcttcctcgccttgaggagcgtatcgcatcgcttgaaaaattggtacagaagctagaagctctttctgaacaacattaa

SEQ ID NO: 19008 - DNA, 2364 bp, Chlamydia trachomatis
atgagaatgaataaacgaacgttattatttgtttccttagtgagcgcagcatttttgggctgccagattttctttgggtatcaggatttgaaatcttgtcaggatctggcggaaaaacagcgtgctatttctgagcaaatattagcttcaacagagcagttgagtgtagttccttggacggcttctgcagaagaaagcgaatcggttaatcaatatgctgttcgtttagggaatcgacttctcgttttaacaaaaggaggagctcattctgaggtacattctaaaggaacctcctggaagctaatagatcaaactagtaccttcggggggattctggtttctttgtatggagaggatgggcaggaggttttatcaaaaggcggttccgtatatctccctaatcaacaagatgcactccctgttttagtggccgagtttcgcagaaaccaagaacctcttgtgtttttcggagagtataaaaatggcaagctttctaacaaagcagggactatctatgggacttcgttagtttttcttaatacagggaatgaatttgttcctttaggcatttacaattctaaagaagagtgtgtggaatctctggatcttcctatggcaagagctgtagtttttgccgataaagagaacctgacaacgtcaggcagttattacatgctcgctaatgaatatatgcaagttatagtctctcaggaaagtggagctattgaggggattaatcttccttttgcttctgatcgagaagggaataagagcattgtcaatgaaattggatttgatagagaattagcagccggctctccatctgaggcttctttccctggagttcaagctattgattctcagcgtcaaaatgtatcgagtgttgtaggtggatactatcctttgcttagacgagggactctatctgataccagaaaaatggtttcccctcagtatcaagccttaaacatagtctctgggagagagttgtcttctcctgtcgcaacgggttttcgtgtagtttcgtttgataataaaacgttagttttggaaagcggggatgggggcattcggaaaacgtatacccttggagaacaaccttacgcttttgaccttgaaattcaaactactagaggacaagaagacttatggataacttcaggagtgcctgaagttgagatcatgtctaatgcttttgtccctgcagttaagtatcatgcagtgaaaaaaaataagagtgacctcattaatgtgaagttacccaaagcaaaagactctttgttagtacgtaatgacgcttcccctcaatggattttaaattccaatggatactttggagtcattcttactccgaagacccctcttcctacgggatatgcttcttctttcattcctgggaatgcagttcctacgcgacttactcaactttccccaaaagatcaggcttacccagcttcgaaatatcctggttatactgcaatgcttcctttgcctaaagaagctggccgttatcagtttatggtgtatgcgggtcctttatcagagcctactttgaaggctttagatcgagctcacacgaatcataagggagagtctcctgagtatgttgatgcgattgcatttagaggtttctttagttttataacagaaccttttgcagctttgttatttattataatgaaatttttccaatttctaactggatcttggggaatttcgattattttattaacgattgtacttaagcttgtgctttatcccttgaatgcttggtctattcgatctatgcgtcgtatgcaaaagttatctccatatattcaagatattcagcagaaatacaagcgagagcctaagcgagcacaaatggaaattatggccttgtataaggtcaataaagttaatccaataacaggctgtcttcctctaattattcagatcccatttcttatagcaatgttcgatcttctgaaatcttcgtttttattgagaggagcgagctttattcctggatggattgataatttaactgctccagatgttcttttttcttgggaaaccccaatatggttcattggaaaggaattccatctccttcctattttgttgggtattgttatgttcgctcaacaaaagatttctgctattaaaagatctgggcctgtttcggatcaacagcgtcagcaagaggctatggggactatgatggcgctattatttactttcatgttttataatttcccttcagggttaaatatttactggctttcttccatgttactcggcgttattcaacagtgggcaacaaataaaattttggatgaaaaacatttacagcatgaagtgattgttaataagaagagatag

SEQ ID NO: 19009 - DNA, 384 bp, Chlamydia trachomatis
atggaagaaagtcatatcttacagttggcagcagtttcacgagcaatggcattgcaaggagtttgtccttggacgaatctgcaaagtattgattctatgttacgatatatattgggagagtgccaggagttagcagatgctgtgaaagagaataaggcctcattagaaattgcttcggaagcaggagatgttcttactttagtattaactttgtgttttttattagagcgagaaggaaaacttaaagccgaggaagtttttgctgaagctatagcaaaacttcgacgtcgatctcctcatgtttttgatccagataaccaaatttctttggaagaggcggcagagtattggtctcgcatgaaagagcaagaaaaaatttcttag

SEQ ID NO: 19010 - DNA, 1239 bp, Chlamydia trachomatis
atgttctctccagtaattattgttttaactgcagttttcgtcctgtgctcggggtttatttctttatcgcacattgctctattttctctcccctcgtctcttattgcacactataatcactccaagaacaaacagcttcgacaaatcgccaatctcatggcttaccccaatcatttactcattaccctggtctttttcgacatagggattaatattggggtacaaaattgtatagcaacgttagtcggagactctgcatcatttctaatgaccgtaggagttcccctcgctttaacgcttgttttaggagaaattattcctaaagtcattgctattccttacaatgttcgaatcgcacgtcttgtaactcccattatctttgtctcaactaaaagcttccgtcctatttttgattgggctatttcaggcattaattttatcattcaaaaaatgttagttcatcaagagggtgattttattcaacctcaagaactaaaagaagtcttgcgcagttgtaaagactttggagtcgtaaatcatgaagaaagtaggttactgtttggatacctctctatggaagagggaagtattaaagaaagaatgaaacccaaacaggaaattgttttttatgatgtccttactcctattgaaaatttatatcggctattttctggacaacgctactcaagaattcttgtctgcaaagatggactacaaaatcttttaggagtttgctctgctaaatctcttgtcctccataaggaacagttacaatcttcagaagatcttcttcctcttcttagaaaacctcattatattcctgaaactgtatctgctaaaacagctttatatcacctagctaaagaagatagtggattaggtatcattattgatgaatatggatctatagaggggttaatcacccaaaatgatctatttgaaattgtttctaatgaagtttcccatatccgtcctgcttccaaacagttcgctcactcagataaaaatgttatcatcgctgcagggacctatgagctttctgatttctatgatctttttggagtagatcttcctaccacttctaattgtgttacaatcggtgggtggcttacagaacaattaggagaaatccctgaaacaggaacaaaatttgcctggggacaatttgtatttcaggtactagatgcagctcctaattgtgtaaagcgagtgtatataaggaaaacacatggaaactga

SEQ ID NO: 19011 - DNA, 1944 bp, Chlamydia trachomatis
atgaaacttcttctgaaagcagttctgaggcataaaaagcatttagttctgctcggtttttctcttttatccatattaggactgacgataacgtctcaagcagaaattttttctttgggacttatcgctaagactggtcccgatacctttctcctttttgggaaacaggatcataatacgttagttaaaagcaaagaactctcaaaagaacagcttctggagcagtgggatagtatagttggagatggcgatacgctttctctggctcaggcaaatgcctatattgctaaacattcaggtggctcccaatcaataacaaaaagactttcagcttatctttcggggtgttttgatctttctaggctgcaatatctagccctttttcttgttgttgttgctattttgaagtcaacaacgctcttttttcaaagatttttggcgcaacttatcgctattcgtgtgagctgttctttgcgtaaggactattttttagctttgcaaacactgccgatgacattcttccatgctcatgatatggggaatttaagtagtcgagtgatagcggattcttctatgattgcattggctatcaatgcacttatggtgaattatatacaagcccccattactatggcgttagccttagtggtttgtttgtctatctcttggaaattttgtgcttgcgtttgtttggcattccctattcttattttacccatcattatagtcgctaagaaaatcaaatccttagctaaacggattcaaaaaaatcaggatcattttacagcagtgttgctggattttttgttagggatccttacagtaaaagtatttagaaccgaacagttctctttccacaaatattgtcagaaaaatgatgaaattgcgcgcttggaagaacgcagcgcagcatatagcttaattccaagacctcttctgcatacgattgcggctcttttctttgcttttgttgtaatgatcggattatataaatttcatattccacctgaagagctcatcgttttctgtgggttgttatatcttatctatgatccgattaaaaagtttgctgatgaaaatgctactattatgaggggctgtgcagcagcagagcgattttacgaagtattagatttgtcgaaacagcagaccactgtttccgaacagttaaatgaatttcaagggttgcagcacagcattcagttttgtaatgtgtcttttggttattcagaagacagtcttgtactttcggattttaatttagtattgaaaaagggtgaagctattggaattgttggcccaacaggatctggaaaatctacaatagctaaattattgccacgactttatgagatttctcagggtgaattacttgtagattcactccccatcacaagttatagcaaaaattctctcagaaaacatatcggttgtgtgttgcaacagccattcttattctatgataccatttggaataatctgacttgcggaagagatttttcggaagaagaggtttttgaatccctaaagcaatctcgtgcttatgaatttgtttgtaagatgcctcagggagtgcatagtttattagaagagtctggaaaaaacttatcaggtgggcagcagcaacgtttgactatagccagagctttgcttcataacacttcaattctattacttgatgaagcaacatcttctcttgacgccattagcgaaaattatatcaaagaaatggttgggaaattgaaaggccgatgtactcaaattattattgctcataagctttccacccttgaatatgtagatcgtattgtctatctagaacagggtaagaaaattgcggaaggaacaaaggaagaactgttggtttcttgtcctgcttttcaacgaatgtgggttttatccggtgcaaaggattgggagcttagtcccgttatgaacccatag

SEQ ID NO: 19012 - DNA, 975 bp, Chlamydia trachomatis
gtggaactacttcctcatgaaaaacaggttgtcgaatacgaaaaaacgatcgccgatttcaaagaaaaaaataaagaaaacagtctgctttcttcttcagagattcaaaaattggaaaatcgcttagatagactaaaagaaaaaatttattcgaatcttactccttgggaaagggtacaaatttgccgacacccttcgagaccccgcacgattaattatattgaagggatgtgtgaagagtttgttgagctttgtggagatcgaacattccgtgatgatcctgcagttgtcggaggatttgcaaagattcagggacaacggtttatgctcatagggcaagaaaaaggttgtgatacgacatctcgtatgcatcgcaattttggaatgctttgtcctgaaggatttcggaaagctttgcgcttagctaaaatggctgaaaaatttggtcttcctattatcttcttagtggacaccccaggggctttcccaggactaacagctgaagagcgtgggcaggggtgggctattgcaacgaatttgtttgagcttgccagattagctactccaattatcgtagttgttattggagaaggatgttcaggaggagctttagggatggctataggagatgttgtagcaatgctagaacattcttattattccgtaatttctcccgaaggatgtgcttctattttgtggaaagatcccaaaaaaaatagcgatgccgcagccatgttaaaaatgcatggagaggatcttaaaggatttgctattgtagacgcagtgattaaagagcccataggtggggcgcatcacaatcctgtggctacatatcgtagtgttcaagaatatgtcctgcaagaatggcttaaattgaaagatctaccggtagaagagttgctagagaaacgataccagaaattccgaacgataggtctatatgaaacttcttctgaaagcagttctgaggcataa

SEQ ID NO: 19013 - DNA, 303 bp, Chlamydia trachomatis
atggcaacgatgactaagaagaaactaatcagtacgatatctcaagatcataaaatacatcctaaccacgtgagaactgttatccaaaattttttggataagatgacagatgctctggttcagggggatagattagagtttagagattttggcgttctgcaggttgtagaaagaaaacctaaagttgggcgtaaccctaagaatgcagcagtgcctatccatatccctgctagaagagccgtgaagttcactcctggcaaaagaatgaaacgtttgattgaaacaccaacaaaatcttcttag

SEQ ID NO: 19014 - DNA, 807 bp, Chlamydia trachomatis
ttgcagggaagggacatgaggtatatcagatcttcaaacatcagacgattgtctttgatgatcgagaggttgtgtgtgaagctttggcctcgatttattaattcaaaattcttgtttttactgcttgctttgggtgtcggtccggataagtgtttttcggatgctgtaaatactcctgttgttcccaaggtaagtcgaaatgagcttattgtgatagatcctggccatggtggtaaggatgaaggaactgcggataaggagctgcgatataaagagaagtctttagctttatcaatagctttaagtgtgcaggggtatctacgccgaatgggatataagacgatcatgacaagatccacagatgtttatgtggatttgaataagcgagcggcgatagcaaaccaaaacaaagcagatgtttttgttagtatccattgtaattactcctctaatacctctgctttaggtacagaggtctatttttataatgataaaaatgtattgagaactaaaaaatcagagaaccttgggaaatcgattctagctttcatgcaaaagaatggggctttgcgggagcgtaaggttaaagagggtaattttgcagttatccgagaaacctccatgcctgcggtcctggtagaaacagggttcctctctaatccaaaagagcgagcagctcttttagactcccgttatcgttcgcatttagctaaaggtatttctgaaggaatacatgcctttattcttaatcgacagattaaaaagactacagcggggaattcgggagtaaaaaaagtgtataaataa

SEQ ID NO: 19015 - DNA, 1461 bp, Chlamydia trachomatis
gtgttcggcatgcatttagaccagcttcttcgggatattccggctaaaatctatgggaaagttgagtctattcctgttagaaatttgactcgagactctcgttgtacgggggtgggagatatttttattgctcgccaaggtcaaatgtgtaatggaaacgactattcaggccaagctgttgagaatggcgcaattgccattctttcttctttatataatccctttctatcagttgttcagattgttacagaagatcttactgctttggaggcttgtttagcagcacgattctataatgatccttcgaaacgcctggatgttataggggttacaggaactaatgggaaaacaacggtttctgctttagctagagagctcatggagtataaagggcgatgtacagggcttgttgggactatagagcatattttaggagaacaccgaattatagatagttttacgactccagatgctatcttattgcaaaagtactttgctgaaatggttaaacagaacttatcatcagctgttgtggaagtatcctcgataggacttgctcttggtagggttcgcgaaacggaatttttagcaggggttctgactaatgtctcgttagatcatttagattttcatggttcttttgaggagtatgttgttgctaaaaagcagttatttgtttctctcccagagcatggggttgcggttgttaattcggattgtgagtatgcgcaaagctttttagaaatttctcctgccagaggagtttcttatgccgtacatcaagaggcggattatcgcgctgtaaatctgaaattttcttctttggggtccactttcgatatcttatatcagggaaatgttttctcttgtgagacctctttggtaggggaacataatgtgtacaatgttttagctgctctgtcagtagtccatcaaattctgggaggagattttgcagagctagtacattatgttcgttatttatctgctccaaaagggcgtttggagccagttctatctggtccttgtcctatttatatcgattatgcacatactccagatgcattggataatgtatgtaaaatcttatcgcaactgcttcctgcagatggacggttaattattgtattcggatgtggtggggatcgggatcatagcaagaggcctattatggcaaaggttgctgagacttatggtttttctgttgtcacttcagataatcccagaactgaagatccagatcagatcattgctgatatatgttcaggattttcaacagatcgctatgttattgaaagtgatagaagattagccatcgttaaagcaatatcaatggctttggataaggatattgtgttagttgcagggaagggacatgaggtatatcagatcttcaaacatcagacgattgtctttgatgatcgagaggttgtgtgtgaagctttggcctcgatttattaa

SEQ ID NO: 19016 - DNA, 1971 bp, Chlamydia trachomatis
gtgaggagaaaatcagcgttttatcttatgaattaccgtagacaattaactctaatcgttgttggggttttgtctctatacgcacttttaatagttcgttattacaaaattcaaatttgtgatggagagcgttgggctatggaggcggcaaatcaacatgaatttcgtgttgaggacccttttcaaaggggaactttttttgctaatacaagtttgcgtaaaggcgaaaaagagcagtttcaaccgctagccattgatgttactaagtttcatttgtgtttggatgcggttgttgtccctgaagaataccgtgatgagatcgctcatatggttgtcgtcatggtaggagaaggagattatcaaagtatccgtaatgagtttgataggaaatcgcgttaccgtaagctatatgtttctttagactcttccatcagagatcgtattttatcttggtggaagccattcgctatcaagcataaaatccctactaacgcgctattttttattagtgactaccagcgttcttatccttttggacagctattgggacaagttttacatactctccgagaagtgaaagatgaaaaatcaggcgaagctttccctacaggaggattggaagcttattttaatcatctgttgaaaggagaaaacggtgagcgtaagctattgcgatctcctttaaaccgtttggatgtcgataaagtaacaaaaattcctagagatgggagtgatgtttatttaacaatagatgccaacattcaaacaattgcagaacaagaaatagctataggagtattagaggcaaaggctcgcagtgggcgagttgttgtgcttaattcacatacgggagagattcttgctttagcacagtatcctttctttaatccagtagggtatcgagagttttttaattgtgaggaccggatagaagataccaaggtcaaagcagttagtgatgtttttgagcctgggtctattatgaagccgctgactatcgctattgccttattggcaaatgaagagtcgcaaaaacgttatggagaagttctttttgatccttatgcgccgatagatgttagccgacgtttgtttcctgggcgtcaaaaaatgcctctccgagacattgtgaataatcgatacttaaatatgtacatggcgattcaaaaatcttccaatgtatatatggctcaacttgcagatcgtattgtgcaaaagttgggggcagattggtatgagcagcgtttacaggattttggttttggaaagaaaaccgggatagaattgcctgcagaggctgtaggtttggttccttcaagaaagcgttttcatagaaatgggtccccagagtggtctttatcaactccgtattctttagctatgggctataatttattggctacaagtatgcaaatggtgcaagcatatgcggtttttggtaatggcgggtttttagtgcgtcccacattagtaaaaagagttgtttctccttctggagaagaaataatcttttccgaaaagccggaaaaaattcgtttgctttctgaaacaattgtttcagatgttgtgcgtgccatgcgctttacaacttgtttaggagggacaggatttcgtgcagctcctaaaggctattctagtgctgggaaaacaggtacaactgaaaagcttgttaatgggcgatatgataagaaacggcatatcgcctcattcatcggacttgcgcctataactgctttgtcggaaacagctgttcctttggtgattcttgtttctattgatgatcctgcccacggggtaagagaagatggtactaaaaattacatgggcgggcgatgtgctgccccagttttttctagaatagcgtctcgaatattgccgtatctaggtgtgccggaagatcaacaacaaaacgattggaaagaagaaattactcagttgaaaattttgtataacgattggaatggcaaatag

SEQ ID NO: 19017 - DNA, 909 bp, Chlamydia trachomatis
gtgactgattccattcctcatattcccgttttggtaaaagagagtctttcattatttcaggaccagcatcctactactttttgtgacgttactgtcggcgcaggtggtcatgcagaagcttttctaacttcattcccctcaatagaacattatgatgggtccgacagagatctgtctgctctggctttgtcagagaaaaggttgcttcctttcaaggggcgagtgtgtttgcgtcatgcctcgtttgatgaggttaacgcgctaactcctgatgggatgtatgatggggtgcttgctgatttaggagtttcctctatgcaattaacggaccttgaacgaggatttagttttcaaggggaggatcaccccttagatatgcgaatggatacttctcgaggtattactgctagtgaggtgctgaattctttaagagaagaggaaataggagaaattttccgaaaatatggagaagagcctctttggaggagcgctgcaaatgctgtggttcattttaggaaaaagaaaaagattttaacggttaaggatctaaaggatgcaacgtcaggggttttcccatcctatcgattaagaaaaaaaattcatccattaacattgatatttcaagctttgcgcatttatgttaatcaagaaggggcgcaattaaaagttttattggattccgctttgcgttggctgcgtcctggtggtcgtttagctatcatttctttttgtagtttagatgatcgtcctgttaagtgggcttttagagaagctgaggcaagaggagaggggcgagtattgaccaaaaaggtaatcatgccaacttatgaagaaactaggaagaatcctcgatcacgctcggctaagttgcggtgttttgagaagagtttaaagataagtgatgaatag

SEQ ID NO: 19018 - DNA, 1368 bp, Chlamydia trachomatis
atgttaacttgcaacgattgcagtacgtgggaacagttcgttaattatatcaagacccgctgctccaaaacagcttttgaaaactggattgctcctatccaagtattagaagaatctcgagaaaaaattcggttagaaattccgaatatatttgtccaaagttatctgttagataactacaaaaaggatctttgttcttttgtgcctcttgatgcagaaggcaatcctgcgttggagtttgttgtttcggagattaagcgttcttctccccaaatagccgcgtctgttactaagcctgccgtcgaagtttcagaagaaaataaagattttcaactcaaacttaatggagcttatcgctttgataatttcattgaaggtccctccaatcagtttgtaaaatctgctgccttagggattgctgctcgcccaggaagatcttacaaccccttatttattcatggcggagtgggattaggtaagactcacctacttcatgctgttggacattatgttcgcgaacaccataagaatctccgcatacactgcattacaacagaagcttttatcaatgatttagttcatcatttgcgagttaaatctattgataagatgaaaaatttttatagatctttagatcttctccttgtcgatgatattcagttcttacaaaaccgacaaaattttgaagaagagttctgtaacacttttgaaactctaatccacctgtccaaacagattgttgtaactagtgataaacccccaggccaactcaaattgtccgaacggattattgctagaatggaatgggggctcgttgctcatgttggagttcctgatttagaaacccgtgttgctattttacaacataaggctgaacaaaaaggacttaacattcctaacgaaattgctttttacatagcagaccacgtttatggaaacgttcgtcaacttgaaggagcgattaataaacttactgcatattgtcttttatttaataagcctctgacagaaaccactgttcgggatactttaaaggagcttttccgtaccccatctaaacagaaagtttctgttgagagcattttaaagagtgttgctacagtatttcaggtaaaaattcaggatcttaagggaacttctagagctaaaaatgtgcctttagctagacaagttgccatgtatctggctaaaactctaattaccgattctcttgttgcgattggtgccgcttttggaaaaactcactcaacagttctttatgcatgcaagacaatcgaacaaaaaatagaaaaagacgctctgctaaaaaatcagattagcttatgcaagaataatatagcgatagactcaccacaacactttgtgtag

SEQ ID NO: 19019 - DNA, 2613 bp, Chlamydia trachomatis
atgtcgtatatgctgaagagtattccacctcgccatattcaggtttttatgtttgagaagtttaccaatcgcgcaaagcaagtgattaagttggcgaaaaaagaagctcaacgactcaatcacaactatctaggaaccgagcacatcttattgggattactaaaactaggccaaggagtggctgttaatgtattacgcactcttggcgttgacttcgacacagcaaaaaacgaagtagaaagactcattgggtatggaccggagatccaagtgtatggagatccagctctaacaggtagagtgaaaaaatcttttgaatcagctaatgaagaagcctctattttagaacacaactatgtcggaacagaacatcttttactcggaattctcaatcaagctgatggtgtggctctgcaagttttagaaaacttgcatatagatcctaaagaaatccgaaaggaaattttaaaagagctagaaacgtttaatttgcagctccctccttcttcctctattaccccaagaaacacgaatagttcttcgtcttcctcttcaaaatcttcttctttaggaggacattctttaggtggggataaacctgaaaagctttccgctctcaaagcgtatggatatgacctaacagaaatgttcaaagaggctcgtctagatcccgttattggtcgatctgcagaagtcgaacgattaattttgatcctttgtcgtcgtagaaaaaacaacccagttttaattggagaagctggtgtaggtaaaacagctatcgttgaaggattagcccaaaaaattgtctctggagaagttcctgaagctcttcgtaaaaaacgattgatcaccttagatttggctctgatgatagctggaaccaaatatcgaggtcaatttgaagaacgaatcaaagcagttatggatgaagtccgtaagcatggcaatattcttcttttcattgatgagcttcacaccattgttggcgcaggggctgctgaaggagcgatagatgcttcccatattttgaaaccagccttagctcgtggagaaattcagtgcataggggctacaactctagatgaatatcgaaaacacattgaaaaagatgctgctttggaacgtcgattccaaaaaattgttgttcaaccacccagtgttgatgagactgtagaaattcttagaggcctgaagaaaaaatatgaagagcatcataatgtcttcatcaccgatgaagctctcgttgctgctgctaaactatccgaccaatacgttcacggtcgctttcttcccgacaaagctattgaccttttagatgaagctggagctcgtgtacgtgtcaatacaatggggcaaccttcggagcttttacgtttagaagctgaaatagaaagcaccaaacaggctaaagaacaggctataggaactcaagaatatgagaaagctgccagccttcgtgatgaagagaaaaagcttagagaaaaactaagcaacatgaaacaacagtgggaatcaaataaagaagaacatcaagttcctgttgatgaggaagctgttgctcaagtggtttcagtacaaactggtattcctgcggctcgcttaacagaagcagaaagcgaaaaattattaatgctagagaatactctacaaaagaaagtaattggccaagatcaagctgttgctagtatttgtcgagctattcgtcgttcaagaactggcattaaagatcctaatagacctatgggatccttcctatttctaggtcctactggagttgggaaaactttgctagctcaacaaattgctgttgaaatgtttggaggagaagattctcttatccaagtagatatgtccgaatatatggagaagtttgctgcgaccaaaatgatgggatctcctccaggatatgtaggtcacgaagaaggcggacatttgacagaacaggttcgccgtcgcccttattgtgttgttctctttgatgaaattgagaaagctcatccagatattatggatcttatgttgcagattcttgaacagggccgtctaacggattcctttggacgcaagattgatttccgtaataccattattattatgacttccaatttgggagctgatttaattcggaagactggagagataggttttggtcttcgttcccatatggattatggagtgatcaaagagaaaatagatgctgcagtcaaaaagcatctaaaaccagaatttatcaaccgtctagatgaaagtgttatctttaaacctcttgagaaggaagccctttctgaaattattcatctagaaattaataaactgggatctcgtctacaaaaccaccaaatggctcttaatattcctgattcggtggtctcattcttggtagataaaggacattctccagaaatgggcgcccgaccattaagacgtgtagtggagcagtacttggaagatcctttagcagagatgctattgaaagagtcgtgccgacaagaagcaagaaaattatgcgctcgcctaatagaagagcgtgttattttcgagcgggaagacgaaatttctgctttagctgtagagggggatggccccgcctctgttacagctgatgaatcatag

SEQ ID NO: 19020 - DNA, 1122 bp, Chlamydia trachomatis
ttgtatttaaacttcaataaaccaaagacgttccctaggttcattgtgcgtaagactgttattgttgctatgtccggaggagtagattcctctgttgttgcttatctcctaaagaaacaggggaagtatgatgttattggcctctttatgaaaaattgggaggaacaagatgaaaatggtgaatgtactgcaacaaaagattttcttgatgtagaacaaatagctgaacagctgtccatcccttattacacagtttcattcgctaaggaatataaagagagggtgttctctagatttcttaaagagtatactaatggttatacccccaatcccgatgtattgtgcaatcgagagataaaatttgatttattgcagaagaaagtgcgtgagctgaaaggagactttttagctaccgggcattattgtcggggagggttggatggaacaggtttgtttagaggggtagatccgaataaagatcagagttattttttgtgtgggactcccaaagaagctctatccaatgttcttttccctttagggggaatgtataaaacagaggttcgtcagcttgctatagaagctgggttggcaactgcaacaaaaaaggatagtacagggatttgcttcatagggaaaaggccttttaagagttttcttgagcaatttgtgccaaattcccccggagatattgttgatttcgatactcagaaagtagtcggctgtcacgaaggagctcattattatacgattggacagcgaaggggactaaacgtagggggaatggaaaagccttgttatgttctcggtaaggatatgcaaaagaatgtggtttatattgtgcgaggagaggaccaccctttgctttaccggaaagaacttatagccaaggaacttaattggtttgttccattgcaaggttcgattacatgcagtgctaaagtgcggtacagatctccggacgagaaatgctctgtgtatcctttagaagatgggactgtgcaagtggtattcgatatccccgtgaaagccgtcacccctggacagacagtagccttttaccagggggacgtttgtttaggaggaggagtaattgccgtgcctatgattcatcagctgtaa

SEQ ID NO: 19021 - DNA, 498 bp, Chlamydia trachomatis
atgtcttgcatttccgaccatgagccagcttttactctaagttcattactctcatcggatttagtcgcttttttgcattcagatactcgggaagacattctctttgaactctcagaattggcttttaaagctggttttctggaggatagggagagtttttttcgcgctttgctggctagagaaagaatcatgtctacgggtatcgggatgggagttgcgattcctcatgggaaaattgacggaaatgcagatttttttatcgcgttaggtattcattctgaaggtgtcttatgggatgccatagatgggttgtccgtgcgtcttgtctttcttattggaggaccgtctgatgctccttcgaaatatttgaaattgttatcagcattaacacaatctttacgagatgaagctagaaggtcacaacttctacaggtgcaaactgttgaagaagtgatgagcatttttcaggagtctagttatggatttgcgattagatga

SEQ ID NO: 19022 - DNA, 852 bp, Chlamydia trachomatis
gtgcgtttattttcttatgataaaccaaagatcaaagtgcaaaaaataaagaccgatagtttcaatggctggctaaaatgtacgcattgtagcgagatgatccatgctaatgagttagggcagaactttaattgctgccctaagtgttcttaccactaccgcattagtgcttcagagcggatagctctgttggctgatgaaggttcttggaatcctttgttctcagaattaaaatctcaagatcctttgcattttgttgacacagatacctattctaatcgcttagagaaagctcgaaaaaataatcctgatagcgaaggagttttagtagggaactgtacgattggagggcattccgtcgctctggccgttatggatttcagctttatggcaggttccatgggtgcagttgttggagagaaattgactcgtttaatagagaaagctatagattctagatggcctgtgattattgtttctgcttcgggaggagctaggatgcaagaatctgtattctccctaatgcaaatggccaaaacctccgctgctttggccaaattacatgaagccaagcttccttatatttctgttttgaccaaccctacttctggaggagtcactgcctcatttgcttccttgggagatgtcattattgcagaacctaaggctcttatttgcttcgcagggccacgagtggtttctcaagtaataggagaagatcttccagaaggagctcagaagtctgagtttttattggagcatgggatgatcgataaggtcgtggagagaaaacagctcaaagcaactttggaaagcttgttaaattttttcaattgtcaggcgtattcctaa

SEQ ID NO: 19023 - DNA, 1782 bp, Chlamydia trachomatis
atggaaattccaaaaaagaaaattgaggaaatgtttgatcctcaaactgccaaaaatattttatcttggttgcaggataatgcatgtgataacaccttgattttagatttactggataaggaccctgaaaaattaaaagaacggttcggagatattttaacttttgggacagccggattgcgcagtcttatgggagtgggcacaaatcggttaaatgtgtttaccgtccgcagagccacgcaaagtttagctcaggtactaaagcaacgatatcctgatgaggatatcagtgttgtggttggatatgatacacgacaccattctttagagtttggacaagagacagcgaaagttttggccgggaatggtattcttacttacttgtttcaggtgcctgagcccttagcgcttgtttcttattcagttcgagaatttcaagctaaagctggagttatgatcacagcatcacataatcctcctgcttacaacggctacaaagtatacatgtcgacaggagggcaggttttgcccccaatggatcaggaaatcgtgaaagaatttcaaatgattgatcaagtattgtcagtggatactttagatcacccttgtattcgtttgattcaagaggaaatagaagctgattacgagaaagccttacatcaactgcagttatgtagggaagacaatcgtcagcacggttctttactacggatgagttactctccattacacggcactggagtgtcaatggtcccaaggattttgaaagactggggattctcttcggtctgtttagttgaaaagcagatgattcctgatggggatttccctactatagttcttcctaatcctgaagatccggaagcgttggttctgggtattcagcagatgctagatcagaaggatgatttgttcattgcaacagatcctgatgcagacaggataggcattgtttctttggaaaaagatggtccttatcggtttaatggtaaccagatagcatgtttgttagcagctcatattctcagtagagaatctcaaaaagctcctttaggggttgaagataaggtagtcaaaagcattgtaacaacagaacttttgacggccattactgagtcgtatggaggtagtgttgttaatgttggagctggatttaaatatataggcgagaaaatagaattatggcggtctggtatggaacgctttattttcggagccgaggagtcttatgggtatttgtatggttctcatgtagaagataaagatgcaatgatatctgcagctctcattgctgaaacagctttacagcagaaactgcgcggatatacgttgcgagatgctttgttagaactgtatgagatccatggatattatgctaatttaacagagtctattgatctccctgtggatcaacctaatcaaaagcaggagttattagagcgttgggagactcaggatcctctttatatgtctttacctggtcgcaaactggttgcctttgaaaattataaaactggagaagggtgtgatctagttacaggaattacatacaaattagccttacccaaaatgtcgatgctttgtttctactatgaaggatcgggtagagtgattgtgcgtccctccggaacagagccaaaaataaagttatactttgaattaaaacaccatttttcagaattttctaaagagcgtacggttcgagaatctcgagagaaagaaagttttgaggcgttagagaattttgttaaagaaacaaaaatgcgtctttttcgtacctag

SEQ ID NO: 19024 - DNA, 1485 bp, Chlamydia trachomatis
atggcactcctggataccatgtacaagtcttcgttaatgaaaaactttggggagagggctttgctggatcaaaaaaggaagcagaaaaacttgcagctaaacaggcgttatcaacacatgacgacaacaaaaattaaaacacaatgggcatgttcagaatgcggctcctattctccaaaatggttaggacaatgccctggatgctttcaatggaatactttagttgaagaaatacattcttctaaactgaaaacctcttcttatcctctcagctctacaactccagttcctcttaacactgtaaaatttcaagaagagataagaatttccactcgttccaaaggatggaatcgccttcttggagggggaactgtatgtggtagtcttactttactaggaggagaacctggaataggaaaatccaccttattacttcagatctcttcgcaatttgctgagcaaggctataaagtattgtatgtttgtggagaagagtctgtatcccaaacttcattacgagcacaacgcctacaaatctctagcagcaatatttttctatttccagaaacaaaccttgaagatatcaagcaacagatctccgatcttgctcctgatatcctaatcattgattctattcagattattttttccccatcactaagctctgctccaggatcagttgctcaagttcgagaaactacagcagaactcatgcatattgcaaaacaaaaacaaattacgacttttattattgggcatgttactaaatcaggggaaatcgcaggaccacgtattcttgaacatttagtagataccgtcctttattttgaaggcaatgcgcacaccaattatcgcatgatccgctctgtcaaaaatcgttttggcccaacaaatgagttattaattttatctatgcaaacggatgggctgcatgaagtggaaaatccttcagggttctttttacaagaaaaagttgtggaaacaacaggctcgacaattatccctattgtagaaggatctgaaacgcttcttgtagaagtgcaagctctagtttcttcttctcctttctctaatccagtacggaaaacttcaggatttgatcctaatcggttttctttactcttagctgttttagaaaaaagagcgaatgtcaagttatacacgtctgatgtctttctttcgatagccggtggtttaaaaattacccaaccttctgcagatttgggagcggttctatcagttgtctcctctctatataatcgctacctacccaagaattatacctacactggggaaattggactgggcggggagattcgtcacgtcacacatatagagcatcgcataaaagagagcattatcatgggatttaagggtatcgtcatgccctctgggcaaataaaaggcttacctaaagaatatttggatcaaattgatattattggagtaaaaacaattaaagatgctgtccgcctactacaatga

SEQ ID NO: 19025 - DNA, 729 bp, Chlamydia trachomatis
atgctgtccgcctactacaatgacccttttctatccgatttttgtttagggaagatccctttacgtttagcatctcggaagtctcctttagccgttctacaagcccatgaatgcctaagaagactccaaacatttttccctaggttatgggggcaggttatcacagaaacaacacaaggtgatcttgaccaacacacccccttacattccgtagaaaacaccggtttttttacagatgatatcgattttcttgttcaatctgggaaatgtgatcttgccatacattctgctaaagatcttccagaaaaaccaaaggcaagggtcattgccattacagcaagtatagatcctcgagatatcttggtatttcaagaaaaatatctattgcagcctttcccatcccgattacgcatcgggtgctcttctgatcgcagaagagcacttatctcttctctatacccctctgctgttatcacagatattcgcggaaccatccaaactcgattggcactcttggatcagcaaaaatttgatgctattgtgatggctaatgcagctgtttctcgactgggattacgccttccttgcacagtagtcctgccccccccataccatccttttcaaggacgtttagcaatcacatcctgccaccatatagcaagttgggagaaattattcttaacctgtaaaataacagaaaatataaacctgctccattttttctcataa

SEQ ID NO: 19026 - DNA, 2805 bp, Chlamydia trachomatis
ttgcaacggtacgaattaattaggctaataggcagaggaggcatgggcgaagtctatttagcccatgataaggcttgctctcgtagggtagctctaaagaagatacgtgaagatctgagtgataatcctttgctgaggaaacgctttcttcgggaagcaaaaatagccgcagacctcatacatcctggtatcgttcctgtatactccatatgtagtgatggcgaatctgtttattatacaatgccttatatagagggattctctttaaaacacttattaaagagcgtttggcaaaaagagatcctttccaaggaattggaagaaaaaacttctgtgaaggcttttcttccaatttttgataaaatttgtgccactgtagaatacatccattcaaagggggttttacatcgggatttaaagccggataatatcctgctgggcttgtttggagaagtcgttattgttgattggggagctgctatctttaagcatgctaaagagttgcagcaagaaaaagatgaagaaggtttttcttcatatggtcagaaaaatatctgttattccagtatgacagttcctggaaagattgtggggactcctgattatatggctcctgaaagcttattaggagccgaggcttcggagaagaccgacatttatgcattaggtcttatcctttatcaaatgttgactttatctttcccatatcggagaaaaaaagggcggaaactgccttatgaagacagtattttgtctcctatagagatggcgccttatcgagaaattcccccttctttatctcaaattgctatgaaagcaatagctgttgatcctgtacagaggttttcttctgttcaagagttgcgtaaagctttgcagccacatcttcaaggggaatcagaatggacaactagagatattttatcgactaaggataggaaaaattggaaatattacgaaccgattttactttcccgttattttcctgtattagccagctccccggctcagtggtacaattttatgctctctgatatggaagtgaattcttccgttcgtgttgagtgctcggtaacaaaaagctctgttcaagaaggagtcggtatttttttccccccttccaaggaagctgataaaggagagttttattgtggttatggattgtggttctcttctcaaaataacgagctctcggtctctcttatcaaaaatggaatagagatccagaaagaatcccaaggcattattcctcaacagtcccgttttgcaatctcgatagaaaaatctaataacaaaattacagtctttgttgatcaaatcttatttattttacacatagattatcttcctagtttaggggagcgtatagagataatcattcaagatctacaaggaattagcaatattacgattttagaaagcattggggcgttacgagtgagttgcctggctgtccctgatgcgtttttagctgaaaaattatatgaccaagctgctcgcttttatcgtaaaatccgagattccttcccaggtagaaaagaaagttatgaagcacagtttcgcttaggggtgactttactgactcagatagaggagcagggcggggatctcatgcaagctcttagcacttttgatcttttgcatggaagcactggagctccattggagtatcttggaaaggctttggtttatcagcgaaacggcagttttgtagaagagatacggagcttgctgttagctttaaaaagatatcctcaacatcctgagattcctcgtctaaaggatcatctttgtttccgtttgtatgatagtctgcataagcatcgcagcgaagctttagttttcatgctgttaattttatggattgccccagaaaagattggtcttcgagaggaagagcgttttctcgaatttcttcatcatagacagcaatccactttgttctgtcgtatagataagacccctttgcagtttaagtcctctaagatggagcttttccttagcttttggacaggatttaccttattccttcctgaattgtttcaaagggctagagatttacgggattatcaagctcttatagatatcttctatgttgtatgtgcttcagggaataaagaagttttctcacaattcgctgaagatttagccattttcgttgatgaagttgttttccccaaatctttgcacaatcagaggggcgaagaactagtgttatttgtccaagggttagcggctttgcaaaatagagagtataggcaagcaaaggagtttatatcagcagttccttttgccttacagctgtatgctttggatttatttagcttacaagcctttatagatgaagaagtaaaggtgttttctgattttctacaagatatctacaattctgctagtgcagaggatcacaagcatgttctagtttatatgatccaagtctctttgtggaatcaagacttgaagcaagcttatgaactgttgagcaagaactttcctcaggataaagggcttatagagtattcagaagcttttgttctttggggatgctatttagccttaacaggagatcggagcgctgttaaagcgcatttctctcgttgtcaatttaagtacggaagatcagctttgattgggaaatgtattgatgatgattcactggactatttagaaggacttgtttggtgggaaaagaaaaaaactctttttcaaagttatttcttgcttcgttgtttacatgctccgaaagaacggtacgaagtttaccgacaagcctatatttctatggaaaacagtttttttggataa

SEQ ID NO: 19027 - DNA, 2820 bp, Chlamydia trachomatis
atgaacgaagatcaatttcctaaagcgtatgaccctaaaagttcagagtctggggtgtattcgttttgggagcgctctgggatgtttatagcggatgctaatagtaaaaaaccggcgtattcgatagttatgcctcctcccaatgttacagggatcctgcatatgggccacgctcttgtgaatacattgcaggacatgcttatccgttataagcgtatgaaaggatttgaggtttgctgggttccaggaactgatcacgcagggattgctacgcaaactgttgtggaaagacatctgcgatcttcgcttggtaaacgacgaacggatttttctagagaagaatttttgaaacatgtttgggagtggaaggagaaaagtcaaaatgtcattctttcgcagcttcgtcagctagggtgttcttgtgattggtctaggcagcggtttacaatggatcctgaagccaatcgtgctgtaaaaaaagcttttaaagttttgtttgataaaggcgttatctataggggatactatctagttaactgggatcctattttgcaaacggctttagcagatgatgaagtcgagtatgaggagcgagaaggatggttgtattatatccgatatccagttgtgaattctgaggagtttattacggtagctactacacgtccggaaactctgttaggagacacagcgattgcagtttctcctgaagacgaacggtatagccatttgataggagctaaggtaattgttccttttgtagatagggaaatccctattattggtgatttttctgttgatgcgtcttttggaactggagctgttaagatcaccccagctcatgataaagatgattatcggacagggatgaatcatcggcttcctatgatcaatattttgactccaactggagaaattaatgagaatggggggatttttacaggcttagctaaagagtcggctcgagagaatattatcacttctttagaggctttaggcttgtttgttcggaaggaagcctattcatctcgagtaggagtctcttatcgttcaggagcgattattgaaccttacctttcaaaacaatggtttgtttctgttgattcattcagagaatctctcagagaatttgtaaatagcaaagaaattaatcttttccctccggaattcattagaaattaccttacttgggtaaataatctcaaagactggtgcattagtcggcagctttggtggggacatcgtattcctgtttggcataataagcatgatgaagagtatgtgatttgtttcgatggagatggagtccctgaggaggtagcgcaggatcctgagtcatggtatcaagatcctgatgttttagatacctggttttcttccggattatggcctttgacatgttttggttggccggaagaaagtgcggatttaagaaagttttatcctacctctgtcttagtaacaggacatgatattctctttttctgggttactcggatggtattgatgtgttctgcaatggttgataccaagccttttgctgatgtctttttacacggattgatttttggtaagtcctataagcagtatgatgacaatggggaatggacttatgtctctggggatcagaaacgtgagtatgataaagggaaagctcttccaaaaaatgtagttgctaaatgggaaaaactttctaaatcgaaaggtaatgttattgatcctattgagatgatcgatatgtatggtgccgatgctgtgcgctttacgctttgctcctgtgcgaatcgcggagagcaaatcgatctcgattatcgtttgtttgaagaatataagaatttcgttaataagttgtggaatggcgcacggtttattttcggacatatttccgagctaacaagtcgagatttagaagaaggagtcaataaggatcttcttggattagaagatttttatattttagataggtttaatgaactattagctcttatagatagccactacaactgttattctttcgataaaatagctgctttagcttatgacttctttaaaaatgatttgtgctctacttatctcgaaatcatcaaacccacattgttcggaaaacagggtaatgacgaacaacgagctactaagcgcaagcttttagcgactttattggttaatattttgggagtattacaccccattgttccgtatattactgagacgcttttccaaaagataaaaacaacactaggtgttgtaggtgatggattaggggatgctgttactggacatgctgtgagtatgttacggtctgaagcctgtatgattgcaggatatcctcaacctatagagctgtctttccctcagggattaagagaatcatttgctatagcggaaaagctggtttatacgattcgtaatattcgaggagagatgcaattggatcctagggatcttttacaagcatttatcattagttcagagaaaaaggaattgctcgatgcttgtattccaatcatgtgtgcattgggaggaattaaaactatagaacagctttcagaagctccaaaagattgtatttttagtttgggggttgtggaaggaattcaagtgggggtaattcttcctgctgaacatcttgctaaggagcatgcacgtctagaaaaagaaaaaattcgtttagagaatagtatagaaagtttgtctaagctattagcgagcgaggatttccgaactagagctaatcctaacttggtacaagctaaagaagacgctctaagaaatagccgtcaagagttgcaaagtattttggataaaatagcatcgctttaa

SEQ ID NO: 19028 - DNA, 984 bp, Chlamydia trachomatis
atgtctagccagttcgatcagcttaagctttggagtgtccttgttggagattctggagatcctgatttaattaagactttagatgttcaggacgctacaacaaatccttctttgatcttaaaggttgctcaagagcctaagtatcagtcaatgttgacagaggctatttcttggggaattagacagaatggtgatgatgttcagacacttacttttgttttagataagatccaagtcaatttaggccttgagattctaaaatatgttcctgggcgggtttcattagaaatcgacgctcgtctttcttttaatacagaagcaatggttcaacgggcgattttcttgtcccaactatttgaaaaaatggggggagataagaagcgtttgttaattaaaattcctgggacatgggaaggtattcgtgctgcagaagtattagaaaaccaagggattgcctgcaacgtgaccttaatttttagtcttgtacaagcgattgcggcagcgaaagcaaaagtaacattggtttccccttttgttggtcgaatttatgattggtggattgcggcttatggtgcagaggggtattctattgaagcagatcctggagtcgcttcagtcgcgaatatctattcatattataagaaatttgatattccaacgcagatcatggcagcttctttcagaacaaaagaacaagtgttagctttagctgggtgtgattttttaactatctctccaaagatattagaagaactcaaaaaagagcaacaacctgttgaaagaaagctaagtgttgaagaagctaaaaaattagatattcaacctgttgagctatcagaaagtgtgttccgatttttgatgaacgaagatgctatggcaacagagaaattagccgagggaattagaatcttttctggagatactcaaattttagaatctgcagttactgagtttattagacaaattgctgctcaagaagcctag

SEQ ID NO: 19029 - DNA, 4191 bp, Chlamydia trachomatis
atgttcaaagaaggttctcgagacgatgcagccctagcaaaagaagggttgtttgataagttagaaattgggattgcttcagatgtgactattcgcgacaagtggtcttgtggcgaaattaagaaacctgagacgatcaattatcgcacattcaagcctgaaaaaggcggattgttttgtgagaagattttcggtcctactaaggactgggaatgttactgcggtaaatacaagaagattaagcacaaaggtattgtgtgtgatcgttgcggagtggaagtcacgctgtctaaggtgcgacgagaaagaatggctcatattgaattagctgttcctattgttcacatttggtttttcaaaactactccatctagaattggtaatgttttgggaatgacagcttcggatttggagcgtgtaatttactacgaagaatacgttgtcattgatccaggtaatactgatcttgtgaaaaaacaacttctgaatgatgcaaaatatcgagaagttgttgagaaatggggtaaagatgcttttgtcgccaaaatggggggagaagctgtttatgatcttcttaaatccgaggatttagaaagcctccttggtgagcttaaagatcgtttgagaaaaacaaaatcccagcaagcaagaatgaagcttgctaagcggttgaagattgtagaagggtttgtatcttcctctaaccgtccagaatggatggtcttgaagaacatccctgttgttccaccagatcttcgtcctttagttccattggatggagggcgttttgctacttcagatctgaacgatttatatcgtagggttattaatcgaaataatcgtttgaaagctatcttgcgcttgaagactcctgaggtaattgttcgcaatgagaaacggatgttacaggaagctgtggatgctctgtttgataatggacgtcatggacatcctgttatgggagcaggaaatagaccccttaagtctctatcagagatgttaaaagggaaaaatggtcgtttccgacaaaacttattaggtaaacgagtagactactctggccgttctgttattattgttggtcccgagttgaagtttaatcaatgtggtttgcccaaagaaatggcgttagagttgttcgagccattcattatcaagcgactaaaagatcagggtagtgtttatactatccgttcagcaaagaaaatgattcaacgaggcgcaccagaggtttgggacgttcttgaggaaatcattaaaggacacccagtcttattgaaccgagctcctactttgcaccgattgggaatacaggcttttgagccagtgttgattgaagggaaagcgattcgggttcacccattagtgtgtgcagcgtttaacgccgatttcgatggagaccaaatggcggttcacgtgcctctttctattgaagctcagttagaggcgaaggtgttaatgatggctcctgataacattttcttgccatcttctggaaaacctgttgccacaccttctaaggatatgacattgggcatctattatttgatggctgatccaacgtattttcctgaagaacacggagggaaaactaaagtatttaaagatgaagtagaagtacttcgtgctttgaatgctggaggttttatccttaaggatgagatatgtggttctcgtcgggatgaaactggacgagggattcatattcatgaagccattaaagttcgaattgatggtcaaattattgagaccactcctggccgcgtatttttcaacacaatcgttcctaaagaacttggcttccaaaactatagtatgccaagtaaacgtatcagtgagctaatcttgcaatgctataagaaagttggtttagaagctactgtacgctttttggatgatttgaaagagctaggtttcgtgcaatctacgaaagctgcaatttctatgggattgaaggatgttcgaattcctgaaattaagaaagagattttgaaagacgcttacgataaggttgctgtcgttaagaaacaatatgaagacggtattattaccgatggggagcggcattccaagacaattagtatctggactgaagtttccgatcttttatctaatgcgttgtatgctgagatcaaaaagcaaaccaatagcaaacataatccgctgttcttaatgattgattctggagctagaggaaacaaatctcagttgaaacagcttggagctttgcggggattgatggctaaacctaacggagccattattgaatctccaattacttctaacttccgagaaggattgacagtgcttgagtactctatttcttctcacggagctagaaaaggattagcagacacagcgcttaaaactgcggattccggatatttaacccgtcgtttggtggacgttgctcaggatgttatcattacagaaaaagattgtggtacattgaatcatattgaggtgtcgacaatccgtcaggggtctgaagaattactgcctttgaaagaccgtatttatggacgtacagtttctgaaaatgtctatcagccaggagataaaagtaacgttttagcctatgctggggatgtattaacttcttcccaagctgaggctattgatgatgcaggtattgatagcgtaaaaatccgatctacgcttacttgtgaaagccggcgaggagtttgtgccaagtgttatggtttgaaccttgctaatggccggctgattggattaggagaagctgttggtattattgctgctcaatccattggggaacctggaactcagttaacaatgagaacgttccaccttggggggattgctgcgacatcctcaactccagaaatcgttgccgagtgtgatggaattcttgtttacttagacttacgctttgttgtagaccaagaaggtaataatcttgttctgaataagatgggagctcttcacttggtccgtgacgaaggacgaagtttgagtgaatacaagaagcttttgagtacgaagtccatcgaaagcttagcgacattcccagtagaattgggagctaagattttggttgatgacggtgcagctgtcacggccggacaaagaattgctgaagttgagctccacaatatcccaattatctgtgataagccaggattcgttcactatgaagatttagtggaaggagtttccacagagaaagtcacgaataagaacacgggtcttgtcgaattaattgtgaaacaacacaggggagaattgcatcctcagattgctatatatgctgacgccaatatgcaggaattggttggtacatatgccattccttctggggctattatctctgttgaagaggggcaacgtattgctccaggaatgttgttagcgagattgcctcgaggagcaattaaaacgaaggatattactggtggtttgcctagggttgcagagttagtagaagctcgtaagcctgaagatgccgcggatattgctaagattgatggggttgtagacttcaaaggtatccagaagaataagcgtattcttgttgtgcgtgatgaagttacgggaatggaagaagagcatctgatttctttgaccaaacacttgatcgtgcaacgtggagatagcgtaatcaaaggtcagcagttaacggacggtttagtcgttcctcatgaaattcttgaaatttgtggggttcgtgaattgcagaaatatttggttaatgaggttcaagaagtataccgactgcaaggtgtggacattaatgacaaacacattgaaattattgttcgacagatgttgcagaaagtgcgtattactgatccaggtgatacaaccttgttgttcggagaggatgtcgataagaaagagttttatgaagaaaaccgccgtacggaagaggatggagggaaacctgctcaagctgttccagtgctgcttggaatcactaaagcttctttgggaacggagtcctttatttccgcggcctcattccaggacacaactcgagttttaacagatgctgcttgcagtagtaagacagattatctgctaggattcaaagagaatgtgattatggggcacatgatccctggtggtacaggatttgatacgcataaacgtattaagcagcacctcgaaaaagagcaagaagacttggtctttgacttcgatagtgagtttgagtctgtagcaggctaa

SEQ ID NO: 19030 - DNA, 3759 bp, Chlamydia trachomatis
atgttcaagtgcccggagcgggtcagcatcaaaaagaaagaagatattttagatcttcctaatcttgtcgaagttcaaatcaagtcgtataagcagtttcttcaaattgggaagctagctgaagagcgagaaaacattggtttagaagaagtcttcagagaaattttccctatcaaatcatacaatgaagctacgattttagagtacctctcttataacttaggagtgcccaaatactccccagaagagtgtattcgtcggggaattacttatagcgttaccttaaaggttcgtttccgtttgactgatgaaacgggaattaaggaagaagaagtctatatgggaactattcctattatgactgacaagggaacctttattatcaatggagcagaaagggtcgttgtttctcaagttcaccgttctccagggattaactttgagcaggagaaacattctaaagggaatgttttgttctcttttagaattattccttatcgaggaagttggttagaggcttcttttgatattaatgacctcatctatattcacattgataggaaaaaacgtcgtagaaagattttagctatgacgtttattcgagcattggggtattcgacagatgctgatattatcgaagaatttttcgctgtagaagagcactctctgcgttcagaaaaagattttgttgctttagttggtaaagttttagcagacaatgtagtagatgcggattcttcgttagtttacgggaaggctggagagaaactcagtactgctatgctgaagcgcattttggatgctggggtacaatctttaaaaattgccgttggagctgatgaaaatcatccaattatcaagatgttggcaaaagatcctacagattcttacgaagctgctcttaaagatttttaccgcagattgcgtccaggtgagccagcaactttagctaatgctcgttctacgattatgcgtctatttttcgattctaaacgttataatttaggtcgtgttggacgttataaattaaataaaaaattagggttccctctagatgacgaaacactgtctcaagtgactttgagaaaagaagatgttattggagctctaaagtatctaattcgtttgcgaatgggtgatgagaagacgtctatcgatgatatcgaccatttggcaaaccgacgtgtccgttctgttggagaattaattcagaatcattgccgatcaggattggctagaatggaaaaaatcgttcgagaaagaatgaatctcttcgatttttcttccgatacgttaactcctggaaaaattatttctgccaaagggctagttagtgtcttgaaagatttctttagccgttcccagttgtcccaatttatggatcaaacgaatcctgttgcggaattgacacataagcgtcgattatctgcattaggacctggaggattgaatagggaaagagccggttttgaagttcgagacgttcattccagccactatggtagaatttgtccaattgaaactccagaaggaccaaacattggattgatcacttccttgtcctcttttgctaagatcaatgaatttggctttattgagactccttatcgcgttgtgcgtgatggcatcgtaacagatgaaattgagtacatgactgctgatgttgaagaggattgtgtcatcgctcaggcatctgcggagcttgatgaatataacatgtttaaggattctgtatgttgggctcggtataaaggagaagcttttgaagcggatacgagtacggtcacacatatggacgtctctcctaaacaattggtgtctgtagttaccgggcttattcctttcttagagcatgacgatgctaaccgagctcttatgggatcgaacatgcaacggcaggctgtgcctttattgaaaacggaggctgctattgtcggaactggattagaaggacgtgcagctaaggattctggagctattgttgttgctcaagaagatggggttgttgaatatgtcgacagttacgagattgttgtagcgaagaaaaataacccaacgctgaaagatacatatccacttaaaaagttcttaagatctaactctggaacatgcatcaaccagactccgttatgttctgtcggagatgtagtgacacatggggatgttttggctgatggacctgcaacggataaaggagaacttgcacttggtaaaaacgtgctagtagcctttatgccttggtatgggtacaacttcgaagatgcgattatcatctctgaaaaattaatcaaacaggatgcctatacttctatctacatagaagagtttgaactgacagcccgagatactaaacttggtaaagaagaaatcacaagagacattccgaatgtttctgaggaagttttagcaaatttaggagaagacggaattgtccgtattggtgctgaagttaagcctggggatattcttgttggtaaaatcactccaaaatctgaaactgagttagctcctgaagaacgcttattgcgagctatttttggtgaaaaagctgctgatgttaaagatgcttctttaacggttcctcctggtacagaaggggtcgtgatggatgttaaagtcttcagtagaaaagatcgcttgtctaagagtgatgatgaactggttgaagaggctgtgcatcttaaagacttgcaaaaagagtataagagccagcttgctcagttgaagatggaacatagagagaagttgggagctttattgcttaatgagaaagctcctgcggcaatcattcatcgacgctctgcagatattttagtgcaggaaggggctgtttttgatcaagaaactatagagcttttagaaagagagtctttagttgatctcctaatggctccttgtgatatgtacgatgttttgaaagacattctttctaactatgaaacagctgttcagcgtttggaagtaaattacaagacagaggctgaacacataaaagagggtgatgccgatttagaccacggggtaatccgacaagttaaggtctatgtagcctccaaacgaaaattacaagttggggataaaatggctggacgtcacggaaacaaaggggttgtttccaagattgttcctgaagcggatatgcccttcttggcgaatggagagacggtacagatgatcttgaacccattaggggtgccttctcgaatgaaccttggacaggttttggaaacgcatctgggatatgctgcaaaaacagcaggtatctatgttaagactcctgtctttgaagggttccctgaatcgcgtatttgggacatgatgatcgagcaaggcttacctgaagatggtaaatcctacttattcgatggtaagactggagagcgtttcgacagtaaagtggttgttggatacatctatatgttgaaattgagccacctgattgcagataagatccatgctcgttcgataggaccttactctctcgttacccaacagcctctcggaggaaaagctcagatgggaggacaaagattcggggagatggaagtttgggccttggaggcatatggagtagctcatatgttacaagagatcctaaccgtgaaatctgacgatgtttcgggaagaactcgtatctatgagtcaatcgttaaaggagaaaacttacttcgttctggaacgcctgagtcgttcaatgttttgattaaagaaatgcaaggtctagggctcgatgttcgccctatggtagtagatgcttaa

SEQ ID NO: 19031 - DNA, 393 bp, Chlamydia trachomatis
gtgacaacagaaagtttggaaactttagtagaacagttgagcggcttgacggtgcttgaattgtctcagcttaaaaaaatgttggaagaaaagtgggacgttactgctgctgctcctgtagtagctgtcgctggtgctgctgctgctggtgatgctcctgcttctgcagagcctacagagtttgctgtaattctggaagacgttcctgctgataagaaaatcggggttctgaaagttgttagagaagttactggattagctttgaaagaagctaaagaaatgactgaaggattacctaagacagttaaagaaaaaacttctaaaagtgatgcagaagacactgttaagaagttacaagaagctggtgctaaggctgttgctaaaggactgtaa

SEQ ID NO: 19032 - DNA, 519 bp, Chlamydia trachomatis
atgaaagaagagaaaaagttgctgcttcgcgaggttgaagaaaagataaccgcttctcaaggttttattttgttgagatacctaggttttactgctgcgcattctagaagctttagaaacaatctttccggtgtttctgctgaatttgaagttttgaagaagaaaatattctttaaggctttagaatcttctggggtggaaatggatccagaagatagtgaggggcatctcggggttgtgtttgcctacggcgatcctgtgtctgcagcaaagcaagtattagattttaataaacaacataacgattctctggtttttctggctggaagaatagataatgcttctttgtctgggaaggaagttgaggccgttgctaaactgccttctatgaaagagctcagacaacaggttgttggactcattgctgctcctatgtctcaagttgtaggaatcatgaattcggttctttctggtgttatttcttgtgtcgaccagaaagcagaaaaaactcaagagtag

SEQ ID NO: 19033 - DNA, 699 bp, Chlamydia trachomatis
atgacaaagcatggaaaacgcattcgtggtatccaagagaaatacgatttcacaaagccgtattccttaggtgaagcgatagatattttaaaacagtgtcctgctgtgcgttttgatcaaacagttgatgtgtctgttaaattgggaatcgatcctagaaagagcgatcagcaaattcgtggttcggtttctttgcctcatggtacaggtaaagttttgcgaattttagtttttgctgcaggagataaagctgcagaagctattgaggctggagcagacttcgttggtagcgacgacttagtagaaaaaatcaaggggggatgggttgactttgatgttgctgtcgccactcctgacatgatgagagaagtcggtaagctaggaaaagttttaggcccaagaaatcttatgcctacgcctaaatctggtactgtgacaactgatgtggtcaaagctatcgcggaactgcgaaaaggtaaaattgaatttaaagctgatcgagcaggtgtatgcaacgtaggagttgcgaaactttctttcgatagtgcgcagatcaaagaaaatattgaagctttgtgcgctgctttagttaaggctaaaccagcaactgctaaaggacaatatttagttaatttcactatttcctcgaccatggggcctggtgttaccgtggatactagggagttgattgcgttataa

SEQ ID NO: 19034 - DNA, 426 bp, Chlamydia trachomatis
atgtcgaataaaaaaattattaaaatcattaaattgcaaatccctggagggaaagccaacccagccccaccaattggtcctgctttaggtgctgcaggcgtaaacattatgggattttgcaaagagtttaatgcggcaactcaagaccgtccaggtgatttgcttcctgttgtaatcactgtatattcggataaaactttttcttttgtgatgaaacagcctcctgtttcttcattaatcaagaaagctttgggactagaatctggatctaagattcctaatagaaacaaagttggtaaattggctcgagcacaaattacagcgattgctgagcaaaagatgaaagatatggatgttgttctcttagagtctgccgaaagaatggttgaagggactgcccgaagcatgggtgtggatgtagagtaa

SEQ ID NO: 19035 - DNA, 549 bp, Chlamydia trachomatis
atgtttaagtggtatgtcgtccaagtttttacggctcaagagaagaaagtaaaaaagtctttagaggattttaaagaagcctcagggatgtctgattttattcagcagattatcctcccttccgagaatgtcatggaagtaaaaaaaggcgaacataagattgttgaaaagtatatttggccgggctacctcttagttaagatgcatttaacagatgaatcttggtcctatgtaaagaaaactcagggtgtagttgaatttcttggaggaggggctcctgtagctttgtccgaagaagaagtaaaaaatattctagcagatctagaagagaagaaatctggagttgttcagaaacataaatttgaagtgggatcccaagttaaaattaatgatggtgtttttgttaattttgttggggttgtttcagaggtatttcatgacaaaggacggcttagtgtcatggtttctatctttggaagagagactcgtgttgatgatttagagttctggcaggtagaagaagtcgctccaggacaagaaagtgagtga

SEQ ID NO: 19036 - DNA, 249 bp, Chlamydia trachomatis
atggggcaggatcatcgaagaaagtttctcaagaaagtgtcttccgcaaaaaagcaagcagcttttgcgggtgactttatggaagaaattaagaagattgaatgggtaactaagcgagatcttaaaagatatgtcaaacttgttttgatgagtatttttggctttggcttttccatttattgtgtggatttagttcttcgaaagtctctttcattgttaggtaaagtaacaagctttttctttggttga

SEQ ID NO: 19037 - DNA, 1200 bp, Chlamydia trachomatis
ttgaggatttttgagatgtcaaaagaaacttttcaacgtaataagcctcatatcaacatagggaccattggacacgttgaccatggtaagactacgttgacagctgctattacgcgtgcgttgtctggagatgggttggctgattttcgtgattatagctctattgacaacactcctgaagaaaaagctcgcggtattacaatcaacgcttctcacgttgagtacgagactcctaatcgtcactatgctcacgtggactgccctggtcacgccgactatgttaaaaacatgattactggtgcggctcagatggacggagctattttagtagtttccgcaacagatggagctatgcctcaaactaaagagcacattcttttggcaagacaggttggggttccttacatcgtcgttttcctcaataaaattgacatgatttccgaagaagatgccgagcttgttgacttggttgaaatggagttgtctgagcttcttgaagaaaaagggtataaaggttgcccaattatcagaggttctgccctgaaagctttggaaggggatgctgcttacatagagaaagttcgagagctgatgcaagctgtcgatgacaatatccctactccagaaagagaaattgataaaccattcttgatgcctattgaggacgtcttctctatttctggacgaggaactgtagtaactggacgtattgagcgtggaatcgttaaagtttccgataaagttcagttggttggtcttagagatactaaagaaacgatcgttactggagttgagatgttcagaaaagagcttccagaaggtcgtgctggagagaacgttggattgctcctcagaggtatcggtaagaatgatgtagaacgaggaatggttgtttgtttgccaaatagcgttaaacctcatacacaatttaagtgtgctgtttacgttttacaaaaagaagaargtggtcgtcataaaccattctttacaggatatagacctcaattcttcttccgtacaacagatgttaccggtgttgtaaccttacctgaaggggttgaaatggtcatgcctggtgataacgttgaatttgaagtgcaattgatcagccctgtagctttggaagagggaatgagatttgctattcgtgaaggcggccgtacaatcggtgctggaactatttctaagatcattgcataa

SEQ ID NO: 19038 - DNA, 222 bp, Chlamydia trachomatis
atggcaaaaaaagaagatacgatcgttctagaaggtagagtggaagaattattgcccggaatgcattttagggtgatgttggagaacggagtccctattactgcgcatttgtgtggtaaaatgcgcatgagcaatatccgcttgctggttggagaccgcgtaactgtcgagatgtctacttatgatttgacgaaggctcgcgttgtctatagacatcgttag

SEQ ID NO: 19039 - DNA, 627 bp, Chlamydia trachomatis
atgaaggtgaaaatttgtggtgttacgcatcctgatgatgcttgggaagctgctaaagctggagctgactatgttggcatgatttttgctaaagattctcaaagatgcgttaccaaagagacggcaaagtgcattgtagaagcaatacgagatggtggttcggaacctgtaggagtgttttcagagcattctataggggaaattatcgctatttcctcggcaactggaattactagtattcagttgtctggaaggaacattgattttaaattttctcaattacgagagttgttttccattttttatgttgtgtctgtctattctaatggtcagccatcagcagcgatccctccaatgagtaacacggttactgtgatatatgatcacattggaggagaaagggggacaccttttgattggagagcattttctccattccaacatgacaactggatgttaggaggcggagtgaatcctggaaatgttggggaggcagtgagacttcttagtcccagggggattgatgtatcttcaggagtagagcgtcctggtgttttacggaaagatgttaccctcatgcaggctttgatagattctgccaaaggagtggggaatttgacatcgtaa

SEQ ID NO: 19040 - DNA, 1551 bp, Chlamydia trachomatis
atgtcgataacatctcctcctgtagaagtctctgtccttacagattctattaagaatcttttagaaaaaaattttcttcgggtagtggttaaaggagaactcagcaacgtctctttgcaaacgagtggacacctttactttgctatcaaagatagtaaggctgttctcaatggagccttttttcatttccgcagcaaatactttgatcgtaggcccaaagacggagattacgtgattcttcacgggaaactcaccgtctatgctcctagaggtcaatatcaaatcgtagcctatgcccttaccttctctggggaaggcaatttgctacaacaattcgaagaacgtaaacaacgtctcgctgcggaaggatatttcgatcccaaacgtaagcgtcagattccttctgaagctagaacaataggggtcatcacaagccctacaggagctgtcattcaggatattttacgagttctttctcgacgctgtcaccaatttcaagtgatcctatacccagtcactgtacaaggtcctactgctgctcaagaaatttctcgagccattcaagttttcaatcaagaaaacattaaaatcgacacgctcattgttgccaggggtggtggtagcatcgaagatctttgggcctttaatgaagaaatcctagtcaaagctattgcagcaagttctatccctattatttctgctgttggtcatgaaaccgattttactctttgtgactttgctgcagatgttcgcgcaccaaccccctcggctgcagcagaaattgtatgtaaaagcagtgaacaatatcaccaagagcttcaaaatttacttcgacatctctcatcccactcgagacaatttattgctgcaaaaaagaatcttctctctcattggaaaaagcatcttgctacagcagatttttaccatacagcacaacaaactttggattacacccgactatccttagaaagaactctagatgctaaactcgaacattataaacagcatctcgcacaatataagcgttggctaaagagcgatatcctaatccgtgtagaaaaacacctgtctaatctcaatcaagctcttgaatcagctattaaaaataaactttattctaataaagtctctttacatcagctatatacttctcgtttcaaaaatgaattacctaatttacaacatcgcactcaacacgcaaaacatcttttaaaccaactttctcgtagattgcactttgtaatggcaaactcacaagaaacgaaattacaaaggtttgctcgcttacaagaagaattttctttcatgatacagcaccttttaaccaaagctaaggaacgctgccagtccgtacaagaacagatggcctctctgaatccaaaaaatgttttgaaaagaggttttgcccagctctttgactttaataaacactctgttatcatttcagctgaatctcttaagcaaagcgatcttgtgcgggtctgcctccaagacggtgaagcagttttatcagtaaaagaagtttggctgaacaatgacaaaaaaggctaa

SEQ ID NO: 19041 - DNA, 1446 bp, Chlamydia trachomatis
atgatcgctagaacaaaaattatttgtacaataggccctgcaacaaacaccccagaaatgcttgaaaaacttcttgatgcggggatgaatgtagcgcgtcttaacttcagtcatggtacccacgaaagccacggccggaccattgctattcttaaggaactacgcgaaaagcgccaagtccctttagctattatgttggatacaaaaggaccagaaattcgtttaggccaagtagaatctcctataaaagtgaagccaggagaccgtctcactttaaccagtaaagaaattttgggatccaaagaagctggagtcactctttatcctagctgcgtgttccctttcgttcgcgaacgcgctcccgtcctgattgatgatggatatatccaagccgtagttgtcaatgctcaagagcatctcattgagatagaatttcagaattcaggagaaatcaagtctaataaatcacttagcatcaaagatatagacgtagccctccccttcatgacagagaaggatatcacggatctaaaattcggggtcgaacaagaacttgaccttatcgcagcatcttttgtccgatgtaacgaagacatcgatagcatgcgtaaagttttagaaaacttcggccggccaaatatgccgatcattgccaaaatagaaaatcatttaggggtacaaaatttccaagaaatagccaaagcttctgatggaattatgatcgcacgaggagatctcggcatcgaattatctatcgttgaagtccctgccttacaaaaatttatggctcgtgtgtccagagaaacaggccgtttttgtatcaccgcaacacaaatgctcgagtcaatgattcgcaatccccttcctacacgagccgaagtttccgatgtagctaatgctatccacgatggaacttccgctgtgatgttatcaggagaaactgcttcaggaacttatcctatagaagctgtaaaaactatgcgctcgatcatccaagaaacggaaaaatcctttgattaccaagcctttttccaactcaatgacaaaaatagcgctctcaaagtctctccttatcttgaagcaataggcgcttcagggatccaaatcgctgagaaagcttctgctaaagcgattattgtatacacccaaactgggggatctcccatgtttctttctaaatatcgtccctatctccccattattgccgttaccccaaaccgcaatgtatactatcgcttagcagtagaatggggcgtataccctatgctaacctcagaatctaaccgaacagtttggcgccaccaagcttgtgtctatggagtagagaaaggaatcctttcaaactatgataaaattcttgtttttagccgaggagcagggatgcaggacacgaataaccttactctgactactgtaaacgatgttttatctccttctcttgaatga

SEQ ID NO: 19042 - DNA, 5364 bp, Chlamydia trachomatis
atgccttctattgttagactttccggtatcaccgtaagaaacttaaaaaatgttacggtagaattctgtcccagagaaatcgttttattcactggggtctctggctctggaaagtcttctcttgctttcaatactatttatgcagcaggcaggaaacgttacatcacgaccctgccctcctttttcgcaacaagaatacactctctaccagaccctgctgtaaaaaaggttgaaggattatctcccaccgttgctgttaaacaaaatttttttgctcaacacgtacatgcgactgttggcagtacaacggaaatcaactcttatctagctttactgttctcgttagacggacaagcctacgatcccattacgctacgccctttaaccttgtacagcaaagaaaaaatattagctgaaatagcggctattccagatggaactcaactcactctactagctccattgcccgcaggagatatactgagagtccgagaatgtctccgccagggcttcacaaaaatcttaatcgatggagagatctctcctattcacaaatttcttgcaacaggagttcctgttccttctcagctcattattgatacgctgatcaaaaatgcttctaatactccacgcttaaaagtcagcttattcacaacgctagacattggtcatggagaatgttgcttgcacttcgacaatcaaaaacgtgtcttttctacacaaaccactcttccagaaacacaaaacacctacacgccattatccccagatcttttttcttctcatagccataaggatcgttgccctcaatgccatggctctggaatttttgtatccattaacgatccctctatcattcagcaaaacctctctatcgaaaagaactgctgtcctttcgctggtagctgctccattcttttatacaaaacaatctatcaatctttagccgataacttaggatttagtcttagtactccatggcaggatctgtctcctgaaatccagcatatcttcttatatgggaaagaaggcctctctttgccagtcaaactgtttgacggaactttaggaaaaacaactcaaacgcataagcagtggaaaggcgtgctgaacgaaattggagaaaaaatccgatttgcaaataagccttctcgttatctccctaaggggacctcttacactgaatgtcctagatgtcaaaaaactgggctcagcgattatgctaatgctgctaaatggcatggcaagagctttgcagatctgcaacagatgtctcttcaagagttatttatttttctgaaccagcttcctccaaaagatcctgctatagaagaggtcattcagggactaaaggctcgccttgccatgctgatagacttggggcttccctatctctctcccgaaagatccgtaaacactctttccggaggagaacaagagcgcacggcattggctaagcacttaggagccgagcttatgggtgtcacctacgttttggatgaaccctcaattggactacatccacaagatacctataagctaatggatgtcatcaaaaaactccgtgaccaaggaaatacaatcctactcgtcgaacatgatgaacaaatgatctcccttgcagatcgagtcattgatgtcggaccaggagccggaatttttggtggggaagtggtttttaatggaacccctaaggaatttttagcaaacagccactctttaacagcgcaatatcttcgtcaagagcaacaaattcctatccctgctaaacgccagacctctttaggttctataaccctatcccgggcaaataaacacaaccttaaaaacctgactgtttccattcccttgggacaattaactgtcgtaactggggtttctggctccgggaaatcttctcttattaacgacacgctggtcccctgcgtggaagaatttatcgaacaaggttcctgccccaatcttgctgttcaagggaaactatcccggctggtgcatatcaatagagatctccctggaagatcacagcgctctatctctttaacttatatcaaagcttttgatgaactccgtcagttatttgctgagcaacctcgctgcaaacctctagggttaacaaaaagtcactttagcttcaatactcccttaggagcttgctcagaatgtggcggtcttggatccataactgctatggataaccaggattccataacatgtccttcttgttcagggaaaagattccttcctcaggtcttagaaatccgttataaaaacaaaacgatcgcagatattcttgaaatgacggcttatgaagctgaaagtttctttttagatcaacccagcattcataacaaaattcaagctttgtgtaccttaggattacaatatcttcctcttggaaggcccctctatagtttatctggaggggaaattcaaagattaaagcttgcatgcgaactatctaatcctgttaaacaccctactctttatgttctagatgagcccacaacaggtctccacactcatgacgtcaaacaattgattcatgttttacaatccctaactgaccaaggacattctgttgtgattatcgaacataacatgcatgtagtaaaaattgctgactacgtgctggaacttggaccagagggaggaaataaaggggggtgtctcatagcctcttgctctcctgaagaactcattcataagcatacccctacatccttagcccttcgtccttttctatctcaacaccaagaacttccccatcttccggatctgagacaacagcctcctattcctgcggcaatcattattacaaatgctcatcaccataatctcaaacatatcgatgtttctattcctcgctatgcgctaacaacagtgacaggcccttcagcttcaggaaaacattccttggtatttgatgtacttcatgctgcaggcaatatctcctatgcagaactatttcctccctatatccgacaagcactcataaagaaaactcctcttccttccgtggacaaggtaatagggttgtctccagttatcgctatagaaaaaaatagtgcaaaaaactcgagtcactctgtggcatcagcgttagaaatctctgatatgctagaggagctttttacccaaataggacgcccttattcccctgtctcaggagatctattaaaagaagtctctcctcagactatcgcagaagaattgctagaaaattacgctcaaggatacgtaacaatcaccatccccttccctccagaagaagattttttctcttatactcaagaaatgctgcgggagggattcttaaagctttatgctaacgaacagctctatgatctagaagggccgttcccagattgtttagagtccccagctcttgtcattcatcatgtaaaaattcttgaaaaaaacatcccatccattctgtcttcgctctctttggcctttagcaaatcctcctccatccgtcttcatattgaaaactatggaataactacttctaaaacttaccaattaggattacaagactccttagggaactcattccccagtaatgataacacaacgcatctgtgtcctttttgtcatggaaacggctctttaagcacattttctatacttccatataaaaaccgctttgcagaacatacccctctatccctattcactagcctcttccctaatcaggatcctactccaatctatcctcttctcgaagaattgggaattccatcgattgctctatttcaagaaatggatgaccattcttttcaaaagctctgtttaggaactctgcaaaacccaggttttgatgctttatgtacgaaagctatgctagcgcatcctacaacgaatttcccgacctaccttatctcagaaactccatgtaaccaatgtcaagggaacggcacctatacctacgagcattgtactcgtattcacgacatctctttatcagatatttatcaatcagatgtcccctttcttaaaaagttccttctttctttagggaaagatctccctcttgtttcagatattttccagaaactggagcttctcgaacgcgttggtctgagccaggttatcctaggacaagagcaaagttctttaagtgatggggagcgttaccaacttttactggcaaaagccttttcttcaggacttacagatgtgatctacctcttagaggatcccttggcaggtattcatcctaaagatgcgccttccttgctatctgttattaaagatctcgtagccaatcataacactgtagtagtaacagatagagagggatctctttccaaacacgcagatcacgttatccatctaggccctgaaccaggtcctaacggaggctacctattagagactagtgctttcagagatctccaacctatatcccaaagcacatacatctctgaccaaattccaaaactatctgtctctgtattaacctcagctatccaaatagacaacctttctattcctttacgcagcctctcaaccatttctggagtatcaggatctgggaaaactactttactattagaagggatttacaaaagcggctgcgctatgcttgaaaaagatccttctctattctctgaaattatttttctagattcccatcctcaacccgcttcttctcgctccgatatcagtacttatttcgatattgctccatcattacgaaactttttttcttccttaacacaagcaaaagcgctaaatatttctgcttccatgtttagtcccaacacaaaacaaggacagtgctccgattgttggggacttgggtatcaattaatagatcgagccttttatgctatggaaaaacgttcctgcccaacatgcggaggatttcgcgtacaaccgcttgttcaggaagttgtgtatgaaggcaagcatttcggacagttgctacagtcatcactaaatgaagttgccaaggatttctctttcttaaaaaaagttcaaaaacctttacaaactctcatcgccaatggactaggatacctgcctttagggcaaaacatgtcttctctttctttgagtgaaaaaattgctataaaaataactaaatacttattccttccccccaaacatcccactctattcttgctagatggagtagctacttctctcgataaccaacaaaagtacactttactttctcagctaaaaaccctggtatccttgggacatactgtggttattatcgaaaatcaccctgccttctctcaatatgcagattttttgatacaaatggggcataaaacagataaaaccagtagtcgaatcattttttcagggattaatcaatctccctccctttcgaataagttagagtag

SEQ ID NO: 19043 - DNA, 1398 bp, Chlamydia trachomatis
atgacctcttatcaagtttcttcaagaagacatcgtcccaatactttttcagagattcttggacaagatatggtcgtgtccatactcaaaaattctcttcgactcaatcgttccgcccatgcctatatattttctggaattcgcggaactggaaaaacaacattagcacgagtatttgctaaagccttaaattgccagtccccaacagaaaatcaagaaccctgcaaccagtgtgctatttgtaaagaaatctctcttggcacctcaatggatgtcatggaaatcgatggagcttctcatcgaggaatcgaagatattcggcaaattaatgaaactgtcctctttgttccttcaaaatcccgatataaaatttatattatcgatgaagtgcacatgctgaccaaggaagcttttaattcattactgaagacattagaagaacctcctgcacatgtaaaatttttccttgctactacagaaattgcaaaaattcctaataccatatccagtcgctgtcaaaaaatgctcttaaaacgtattcctgaagagactattattgataaactgacaaccatcgcaaaattaggaaaaatagaagcttctcgagaagctcttcttcccattgccaaggccgcacaaggaagcctccgcgatgccgagtcgctttatgactatgtagtaggccttttccctgagtcattcaccccagaagacacagctaaggctcttgggattctttccgatgacacgctataccaaatagcagaagccatcaccacccaaaactatgaacaagctctttccccagtctccgacgctatgcatatgggggtggcaccagctcactttcttcaagatctgacattgcttttccgcagcttacttttaaaacagcattctcaaaaatttgattctatagctgttaagtactcttctgaaagtttactagaaattcttgattttctgggcgagtctgctcgacatgtcaatcttgcactttttgaaaaaacatttttagaaacagtgattattcgccttctgcgaatctattctcgccctacgctttctcaacttgtctcgcaaataaaacaacccgcccaatctccattacgcccaatcccttcttccccagtgctagatcctggcccctcccccaccaaatctatcgttaaagaggaagtaaaagcattaccacaaccagtagaagccaaattttctcaggggagcttactaaccccacccccttcgcagcctaagaaagaaacccttaatcaagaagtatctgctccttcatcgagcaccccttcctgttctgaagctgctgctattgatacgttattacaatttgctgttgtagaattttctggagttttaactaaggagccgaaacatgggtag

SEQ ID NO: 19044 - DNA, 291 bp, Chlamydia trachomatis
atgggtagcggttacgctaaaaagaaaaaagaagccaaattaatggaacgccaatttatggaaatggaagcctctctcgagcaaaaacgtttctctggagaggctggaaatggtcttgtatctgtgaccattaatgggaaatgcaatctagttgatgttaaaatcaaacctgattgtctagatcctgaagatcccgaagttgtagcagacctatttcgtgcagcatttaaagcagcaaaagctgctttggatagcgaaatgtccgctatgcacatgggaatgcctttctaa

SEQ ID NO: 19045 - DNA, 1704 bp, Chlamydia trachomatis
atgggcgctacgagtcaaaaggaattgcagcaagagtttgtgattgtaggagagcctgttgttcctggaataggattgggtaaatctttattgctaggaaaatcttctttacgaatacgagagttgactctccctcaggaagaagtggagcatgagatcaatcgttactataaggctttaaaagaatctcgatcagatcttgctgctttggaaaaaaaagctaaggggaagcaagggtatcaggaaattgcttctattttacaggcacatctggaaattataaaagatcctcttcttacggaagaagttgttaaaaccattagaaaagatcgtaagaatgccgagtttgttttttcttctgtaatgggggagatagagaaatctttatgtgctgtgcaaaaaacaacagctatagctgtagatcgtattcaggatattcatgatatttctaatcgtgtgattggacatttatgttgtcagcataaaagttccttgggagagtccgatcagaacttgatcgttttttcagaagagctcactccttcggaagctgccaatgcaaatcccaagtacataaggggatttgtatctttagagggttcaaaaacttcgcatacagcaattgtgtcattagcgaaaaatattccttatgtggctaatttttctgccgagtcttggcaaagaatcagagaatataacggaaacttagttctgattaatggggagaaaggagagataacgtttaatcctaagttgagtacgatccaagcctattatcgtaagcaatcagcagtgtcaatgactgtccctattcagatagaaaaaacacagcctctcatttctctttctgcccaaatagtaggagtggatgaattagggtctatttcaagagagtttccaggaactactatcggtttattccgttcggaattcatggcattttctttaggaaggcttccttttgttgaggaacaagttgctgaatataccaaattagttcagttttcctgttctgatatcaatgtgctgcgattatttgattttggagaggataaggtgtgtccttttatagcctctgctcatcggtctgtacgttggctattggagcaagagactattttaagaggacaattgcaagcgatcgctatagcttctcgacaagggaaattaaaagttctgattccaggagttctggatgcttctgagattattttagtgaagcagatgtttcaagaggaagtgcagttacagaatgggattagtgagaatatcatttggggaagtatgatagagatcccctctgcagtttggatgatagaggagatcctacaggaaagttcttttattgctttaggaacaaatgatcttgctcagtatacactgggaatgtctagagaacgctctctcccaggtaattggaaacaagtgccccacccttctgtcattagaatgattcattatgttgccgcgcgagcaaaacaaagaaatattccagtatccgtatgtggggagatggctggagatcatctccttttgcccatgttcatagggtttggagtgcgggaattatctgttgtggctcccgcaatacattctttaaaaatgagattgttagccttgaattcaaaggagtgctctcgactagcaaaacagctattgcgggcaagaacatatgaagaggttcacaaactcctgaacatgtaa

SEQ ID NO: 19046 - DNA, 315 bp, Chlamydia trachomatis
atgagcggtggggatgatttagttcttcataatcctgtagaggatggagaactctctgctattttcatgatacgaaacccttcaggaatacatgtacgtccggcaggaactattgttaaattatttgatggcgaagattgtgaagcaactttcacttatttaggaaaaacagtgaatgctaggagtgtcatgagtattcttatgttaggagcttcttataatggagagatcactgtgcgaataaaaggcccttcggcttctcgtgtaatgcaaaaactagcagaggtttttaattctggattcggagagttataa

SEQ ID NO: 19047 - DNA, 2037 bp, Chlamydia trachomatis
gtgagacactccatatatcaattagattctgctgttgagaatgtatttaggttggcatggactttaagattctctgagcggaagatgttgttgttatctcgtcaaagtggttcgggcggctcctttcaactatcttgcgctggtcatgagcttgcaggcgttgtggcggcaaagagtttgattccaggcaaggactgggcatttccttactatcgggaccaaggattccctctagggttaggatgtgatctttctgagatttttgcttcttttttagctcgaacgacacaaaatcattctgatggcagaatgatgccctaccattattctcataaaaaacttcgtatatgttgccagtctagtgtagttgggacacagtttttgcaagcagctgggcgtgcctgggcggttaaaaattctgggaaaaatgaagtcgtttatgtatcgggaggggacggatctacttcgcaaggggaattccatgagatgttaaattttgcatctttgcatcagctcccgcttgtgattgttatacaaaataatcaatgggcgatttcagttccttttgctgatcaatgtggagcagatttggtagcgcttgggaagagctattctggccttgcgacatacaaagtagatgggggggatctgtctgcgttgacacaaacttttgattgcgcagtttctgatgcaagacatcaccatattcccgccttagtaatcgtcgatgttgtgcggttggagtctcatagcaattcagataaccagactaaatatcgttctgaagaagaattgctgtactgtcaagaacaagatcctttggttcgtttagaaaaatctctgattgatgattttggagttgctcaagagactattgagcaaattaaggaagagcttcaagaaacgattagcaaggcttgtgagcttgctgagtctacgcctttccattgtaaaggggctaccaaacatgaggtttttgctccctataatgtttccttgatcgactatgaaaattccttagagtccgcttctttacagggatcagagcctcgggttatgcgtgatgcgataaccgaggctttggttgaagagatgcatagagatcccggtgttgttgtttttggtgaagatgttgctgggaataaaggaggggtttttggggttacaagaactctgacggagcgatttggaagaaatcgttgtttcaatacacctttggcggaagctaccattattggaactgcgattggaatggcttttgatggcttccataagcctgttgcagagattcaatttgctgattatatctggccaggtatcaaccagttgttttctgaggcagcgagtatctattatcgctccgcaggagagtgggagatgcctattgtgataagaactccttgcggagggtatattcaaggggggccttatcattctcagaatatagaagcttttcttgcccattgcccaggattaaaggtagcatatccttcaaatgctgctgatgcgaaagctttattgaaagcagctattcgtgatcctaatcctgtagtgtttttggaacacaaggccttgtatcagcgacgggcatttagtacaacgcctgtattttcttctgattatgttcttccttttggtaaagctcgtattgtgcactcaggaacggatttaacgattgtttcttggggaatgtccctagttatgagtgtagaggttgcgaaggatcttttaggattaggggtctctgtcgaggtgattgatttacgaacaatcgttccctgtgattttgctaccgtgtgtgaatctgtgaaaaagacagggaaattgctggttgttcacgaagcttcagagttttgtggctttggtagcgagcttgtggctttggtagcggaaagagcttatagatatctagatgctccgatcaaacgtataggagggcggcattcccctattccttattccaaggtgttagagaatgaagttcttccacagaaagaaatgatctttcaagaagcgaaatcattggcagagttttag

SEQ ID NO: 19048 - DNA, 177 bp, Chlamydia trachomatis
atgcccagtgttaaagttagagttggagagcctatagatcgagctctaagaattttgaagaaaaaaattgacaaagaaggaattttgaaaacttctaagtctcatagattctacgacaaaccttctgttaaaaaacgagcaaagtctaaagctgctgccaagtatcgtggtcgttaa

SEQ ID NO: 19049 - DNA, 2460 bp, Chlamydia trachomatis
gtgaactcgacgaataatacagactctcaaaatctggatccgaatgcttcagaagtcgaaaaacttcttgatgaatccgctgaggcagaagagaagacagatgaccatactcccccctcagaactttttattcttcccctgaataaacgtcctttcttcccaggcatggcagccccactgctaatagaagcaggtcctcattatgaagtgcttactctgcttgctaaatcttcccaaaaacatatcggtctcgttctaactaaaaaagaagatgccaacaccttaaaaattgggtttaatcaacttcatcgagtcggcgtatctgcgcgcattttacgcattatgcctatcgaaggaggcagcgcacaggtattattgagtatagaggaccgtattcggatcgttaaacccgtacaagacaaatatctaaaagccaaggtcgcataccataaagaaaataaagaactgactgaagagctaaaggcttactctattagcatcgtatcgattattaaggaccttttgaagctcaacccactattcaaagaagagcttcagattttcttggggcactccgattttactgaacctggtaagttagcagatttttcagttgctctaactacagcaacacgagaagagcttcaagaagttttagaaacgactgatatgcacgatcgcatagacaaggctcttgttttacttaaaaaagaacttgatctaagtcgactacaaagcagcattaatcaaaaaattgaagcaaccatcacaaaaagtcaaaaagagttcttcttgaaagaacaactaaagactataaaaaaagaattaggtcttgaaaaagacgaccatgctgttgatctcgaaaaatttatggaacgtttaaacaaacgagatgttcctcagtatgcgatggatgttatccaagatgaaatggataaactacagacattggaaacctcttcagcggaatatgctgtctgccgcaactatctcgattggttaaccattgtgccttggggaatccaaaccaaggaataccatgatttgaaaaaagctgaatctatcttaaacaaagaccattatggtttagaagatatcaagcagcgtattcttgagttaatcagtgtaggcaagttagcgaacggaatgaaaggaagcatcatttgcctagttggtcctccaggagtagggaagactagtattggtcgaagcattgcaaaagttcttcaccgtaaattcttccgattttctgtaggaggaatgcgcgatgaagctgagattaaaggccatcgtcgaacctatattggggccatgccaggaaagcttgtgcaagctttgaaacagagtgctatcatgaatccggtcattatgattgatgaggtcgataagatcggttccagctatcatggagaccctgcttctgcgcttcttgaagtattggatcctgagcaaaacaaagatttcttagatcattatttggacgttcgcgttgatctgtccaacgtgcttttcattttgacagcaaacgtattggattccattccagacccgttattggaccgtatggaagtattacgtttatccggatacattctggaagaaaaattgcagatagctaccaaataccttgttccgcgagcaaggaaagaaatgggactttccgcacaaaacgtctccttccagcctgaagctctcaaacatatgatcaataactatgctagggaagcaggcgtgcgtacacttaatgaaaacattaagaaagtattgcgaaaagtggctctaaagattgttcaaaatcaagagaaaaatccttctaagaaatctcggtttacaattacgccaaaaaatctacaggattatctcggcaaacctattttttccagtgatcgtttctacgaaaaaactccagtaggagtcgctacgggcctggcctggacttctttaggaggagccaccctatacatagaaagcgttcaagtcccctcgtcatcaggtaaagctgacatgcatctaactggtcaagctggagacgtcatgaaagagtcgtcacagatagcctggacgtaccttcacagcgctctagaacgttatgctccaggacgaccattctttgaaaaatctcaggtccatattcacattcctgagggagctactccgaaggatggcccttctgcagggatcactatggtaacctcgttactttctttacttttggatgttcccgtcctgaataaccttggcatgaccggggaactcaccctaacgggaagagtattaggcataggcggtatacgagagaaactcattgcagcaagaagatctaaactcaatgttttgattttccctgaagataatcgccgagattatgacgaactccctgcctatcttaaaaaaggcttgaaggtacacttcgttacgcactatgacgatgtgttcaaaatagctttccctggggtctaa

SEQ ID NO: 19050 - DNA, 1587 bp, Chlamydia trachomatis
atgagtattgttcttgataaaatcggcaaaacattagggacacgagtcttattcgatgatgtctctgtagtatttaacccaggaaatcgttacgggttgacaggccccaacggagctggaaaatccaccctattgaagattattactggagtaatagaaccttctcggggaactatctctcttcctaaaaaaattgggattctgcgtcaaaatattgatagcttcagtgatgtcgtcgtattggattgcgttatcatggggaattcccgtttgtgggaagctatgcaacgtcgcgatgctctttatgcagaggagttcacggatgctgtagggatggagctcggagaaattgaggaaattatcggtgaagaggatggctatcgcgcagagtctgaagccgaagaattgcttttaggtattggtattccagaggagttcttttctcaaaaaatggctaccattccgttggatttgcaattccgcgtcctcttgtgtcaagctttgtttggacatcctgaagcactgcttttggatgagcctactaaccacttagatctacactctatcaattggcttgggaacttccttaaagactataatggcacggtcattgtagtcagccacgaccggcattttttgaatacgatcacaacacatatcgccgatatcgattacgatacgattattatctacccaggcaattacgatgccatggttgaaatgaagactgcttctcgagagcaagaaaaggcagacatcaagtctaaagagaaaaaaattgctcaattaagagagtttgtagctaaattcggcgccggatcacgagcaagccaagtgcagtctcgcttaagagaaatcaagaaattacaacctcaagagctgaaaaaatctaacattcagagaccttatattcggttccctgtatcagacaaagcttctggaaaagtagttttttctatagaaggtatcagcaaaacttatgatgctgatcctttattcaaccccttctctttagagatttatcagggcgataagatcggtgtgatcgggaataatggtctggggaaaactacgttaatgaagttattagcgggagtggagcagccttcagctggccaaatcaagctaggtcacaacgtagccttttcatacttccctcagaatcacgctgatgtcttgagggactgtggagaagaaactctttttgaatggttgcgtagacgtaaaacaggaattacagatcaagaaattcgaagtgttttagggaagatgctttttggaggagatgatgccttcaaacaagtcaaagctttatctggaggagaaacagcccgattgcttatggcgggaatgatgctggaaaatcataacatgcttgttcttgatgaagccaataaccatttagatctggagtctgtttctgctttagcttgggctattaatgattaccctggaacggctatttttgtttctcacgatagaacattgatagaagagtgtgcaacaaaactactgatctttgataaaggagtgatttctttctttgatgggccaatgtctgagtatttggcaagcaagaagaaataa

SEQ ID NO: 19051 - DNA, 834 bp, Chlamydia trachomatis
gtggcacggagttctatagagcagttaacttcttttctcaaatcggtcaacgggcgggccaagaaggctctttcccaaaattttttagtggacgggaacattttacgaaaaattctggcaactgcggatgttcagcctggggattgggttcttgaaataggtcctggatttggagcgttatccgaagttctggtctctcaaggagcaaatgtcattgctctggaaaaagatcccatgtttgaagagtctttatctcaactgcctatcgatattgagattacggatgcttgtaagtatcctctagcctctttagacgataaggggtggaaagggaaaggacgtatagtagcgaaccttccataccatattaccactcctttattaacaaagttctttttagaatgccctaatcgttggaagacggtcactgtaatgattcaagatgaagtggctcgtcggattaccgccaatcctggggacaaggattacagttcgttgacggtttttttgcgatttttcgctgatgtgcaatatgcctttaaagtgagcccaaactgtttctatcctaagccgagtgtgagttcggctgtcgttcatatgcgtgtgcatgaggattttcctttaagtggttctgagatagacgagttttttgcgttaactcgggcagcatttggacaaagacgaaaactactagcaaactctttgaaaaatctgtatccaaaagataaggtctttcaagtgttggagcatctagggttttctgagaaaactagaccagagactatttctctagaggaatatttaaaaatttttcgtttgttaaaagatttttag

SEQ ID NO: 19052 - DNA, 1005 bp, Chlamydia trachomatis
gtgacgatgcgcattgcaattttgggtgctacaggccttgtcggacaaaagctaatcgctttgttacaaaggcataagcagtgggagattgccgaattgagtgcttctcctaagaagcactcattgcgttatgagtctgcgtgtttatggcaagagcctttaatggccatgccagaatctgttcaagatcttacaattcgttctattgaagagattgaatccgatattgttgtgtcttgtcttcctacatccgttgctttttctgcagaaaccgcttgtctgtcctcagggaaaatcgtgttttccaactctggcgcttatcgaatgcatgaatcggtgcctattttaattcctgaggtcaatagtgatcacatatcccttctagatgatcagccttttttagggaaaatcgttaccaattctaactgctgtgtctcgggtattgctttagctcttaggccactgcttccatttgatatcgaacatgtgcatgttgttactttacagtctgctagtggggctggatatccaggagtttcttctttggatttaattgggaatacgattccgcatatcctaggagaggaagaaaaaatacatcaggagactttaaaaattttaggcagccccagttctcctgcagaattttccataacggcatctgttcatcgtgttcccgttatgtatgggcatgtcatctcgatgcatgtaatgtttgcccaagaagtttctttggaaaagatcttttgttgttacgaaaaatattctgatacgtatgtcctttatgattctccttggcatcctcaggtgcaaaaagatctccttcacgatgatatgcgcttacatataggtcctatctctcatggtggaagtgcgaaaacaattaaaatgtgcgttcttcttcataatttggttcgaggcgctgcaggagccttaatatcgaatatgaattttctccaggatagggtgaatcttttctatcaagaggggctggcacatgtttaa

SEQ ID NO: 19053 - DNA, 741 bp, Chlamydia trachomatis
atgaaaaaaagcgtgggtcttattggaaatactgggaggatgggggggctgttaacagaagcgttgcgttctcaccctcgttgtcttttggggaagggattttcaagaagatcgcagactttgttgaaagaagtcgttttagaaaatgatattcttatagacttttcagctcctgaagttacagaaacgcttatggatattttattggtaacgcctaagcctgtaattattggaaccacaggattttccgataatagcgttattagggacaaattgtctttgttatcggaatatgttcctgtcatttttagcccaaacatgagtttgggcgcctatgtgcagagaagactaactgcttgtgcggctaagttattcgatgcttcttatgatgtacgtatcttagagactcatcatcgcacgaaggtagatgccatttctggtacagcactttcgttagcagaggctatctgctctgcaaaaaaagaccattttggggatgagcaggaaccttgtatcgagatgttcggttctcgtgtcggcaacatttttggagaacacgaagtatcttttgtggggaaaaacgagcgttttgttattcgtcatgaggccttctctcggcagactttttctgatggagtgctgatcattttaaggaaaattatggaagaaaggttgcctgcagggtattacacttctgatgttttgtatgaaagtctatttcaggaagttgtttttgattaa

SEQ ID NO: 19054 - DNA, 1074 bp, Chlamydia trachomatis
atgcataatcaatatggatccctattttctattactacctggggagaatctcacggtccctctatcggagtcgttattgatggttgtcccgctggacttcctttagcaccagaagattttcttcccgctatgaaaagaagaagacctggacaactccacacctctcctcgccaagaaacagactcggtgaccattttatctggtgtctaccaacaaaaaacaacgggaacccccatttctcttcttattcaaaacgaggatgcatccagtacttcttacgagcaactaaatgactgctaccgcccaggacatgcacaatttgcttacgaaggtaaatacggttttgcagataaccgcggaggaggacgatcctccgctagagaaacagctgctcgagtagcagcaggcgtggttgctaaaaaaattctctcatctcagggaatcaaaacactcgccttcctttctggattcggtcccttagaaaataaaacctacccaaaactcaccgatcctctaatacgaaaggtctattcatctcccttttataccatcctctctcaagaggaaattcaaaatcttcttctccatgatccagaagattccttcggagggatcgtttcttttatcacttctcccctacctataggcctaggagagcccgtgtttgggaaactcccagctcttttagcggctggtatgatgagcatccccgcaaccaagggatttgaaataggagaagggtttgcttcagcacatatgacaggctctacttatctagattcttttattgctaaggaaggagagatatctttccaaacgaatcgatgcggaggaactttaggaggcattagcatcggacaacctcttgaaggccgagtagcctttaaacccacttcatctattcgaaaaccttgtccctccgtatcaaaggatggagagcccatcacatataaaacccctaaacaagggcgtcatgatccctgcgtggcaattcgagctgttaccgttgttgaagccatgcttgatctcactttagtagaccttctccttcaacaccgctgtgctaaattatga

SEQ ID NO: 19055 - DNA, 1437 bp, Chlamydia trachomatis
atgctatgcacgatcattagaggcccttctttccttgaagccagaaatcagctattgcgctctttaaaaaaatgccgttgctttgaaatgcgtgcagatcttcttactgtatccgatgcagaactacaaaaactgattctcctagctcctatttctgtccttacatggaaaaaacccccatcctgtacgccacaagcctgggtaaaaaaaatacaatcactagctaagcttcatccaacctatttggatttagataaagatttcccagaagaagagattctgcacattcgtcatcttcatcctaatattaagatcatacgctccttacacaccagcgagcataccgacattacacaactatatacacagatgctggcttcatctatcgattactataaacttgctgtttcccctgcttctactacagatctcctgaatatctgccgtcaaaagcactctctccctcagaatacaactgtgctctgcttggggaaaatcggccagtcttcgcgtatactctctcctattttacaaaatccctttacctacacaatccctacaggggctgatcctgtagccccagggcaactctcccttaaccatcactacttttacaatttcacaaacctttctccccaatcccagatctgcgctctcattggagacacttcaagaagcataggacacctcactcataatcctttcttctctcagctgagcattccctgcccctatgttaagcttcctctaaccccacaagaacttcccgaatttttctcctctattcgagctcttccctttctaggaataagcgtaacctcccctctcaaaactgctatcatcccgtttcttgacaaacaagattcctctgtaaaactctctggatcttgtaatacacttgttattcgacaaggagaaattataggctatgatactgacggagaaggtcttttttcagtcctgactcaacacaacatggatttaagcaaccaacgcgttgctatcttaggagccggaggagcagcacgatccatcgcagcacgattgagtagaaccggatgcgagcttctcatttttaatcgaaccaaaatccatgccgaagctattgcttctcgttaccaagcgcaagcttttgatataaaagatcttccgctacattctgtttctcttatcatcaactgccttcccccttcctctatcattcctcaagctctagctcctcttatcgtagacatcaatacccttcctaaacacaactcgtttactcagtatgctcggttgaaaggatgttccatcatctatggccatgaaatgttcgcgcaacaagcgcttttacaattccgcttatggtttccaacacactcttttaaccatctagaaaaaaacttttctcgtagagccgctgttctagcctctcttttttccatcgcagcataa

SEQ ID NO: 19056 - DNA, 1452 bp, Chlamydia trachomatis
atgttcttgaaaaaacgctcctcttcaggaattttagggacattgtctcttactggagttgtgatcagctccatggttggaggggggattttcagtcttcctcagaatatggcagcctctgcaagcgcaggggctattatcattgcctggcttctctccggaataggaatattttttatcgcaaatacctttaaaactctttcccttgttcgtcctgacttaaaggccggtatctatacctatagtagagaaggatttggcccctacgtaggatttacaatagcatggggatactggctttgccaaatttttggaaatgtcggctatgccgtaattaccatggatgccctaaactatttctttcccccctatttcgaaggaggaaatactctccctgctattctattaggatctatccttatttgggtattcaattccatcgtcttacgaggcatccgtcaagctgcttttatgaatgtgattggtgtaatttttactctaattcctctacttattttcattctcattacagctctatttttcaaattctcaatatttaaaaccgatttttggggaactgctccccaacaccatctgggatctatcggctctcagcttaaaagcaccatgttagtcaccctctgggcctttatcggaattgaaggcgccgtagtcatgtctggaagagcctcaaatccctcttctgtcgggaaagctacgatcctagggttttccggatgcttactcatttatgtccttctttctttacttccttttggatctctatcccaatatcaacttgctaagattgctgacccctccactgctggggtactgaaatttctagttgggaaatggggagaagtccttatgaatacaggacttttaattgctgttttaacaagctggttatcctggactattcttactgctgaaattccttacgcagcagcaaaaaatggcactttcccagaatgctttgcaattgaaaatgctaaacactcacctgcattctctttattcattacaagcggcttgatgcaaattaccatgctgttagtgtatttttcctctaatgcttggcataccatgttagaaatcaccagtgttatggttcttccggcttacttaactagctctcttttccttgttaagctcagcttaagtaaaaaatatcctaaacaggcacccatcaaggcccgcgttgcaatattcacgggaatattagggacgctatattctctatggctaatctatgctggaggattacagcacctatttatggtcgctgttctccttgctttaggaattccgttctacatagactcgggaataagacatgatcaagaaaagacattcttgaaccgtaaggaagtcatgaaaatgactaccttagctcttatagctttgcttgctgtatttttattctctgcaaataaaattcatttataa

SEQ ID NO: 19057 - DNA, 1575 bp, Chlamydia trachomatis
atgggtaaaagtttcttagattgtgagtcattaattgctttgcaagagatagctacgaatccagttgatttgactttaccaggaactttgtcccaagatcggatacagcagtatgctttgtctgcggaagggtttacttatagttatgctacggagcgcgtggatgatcgtagccttaatgctttaagaatgcttgccgaggaaagggagctaataaagcagatggagagtatgcaacaaggcgctgtcatgaattatatagaggggtttcagagcgagtcccgttctgtgttacatacagcaacgagagcttgggttcgagaccatgatcttaaggatgaggcggcatctatagccaatcattctgaacgagaggctcatcgtcttgcagagtttttgtatgcagcccgttctaaattttctacgcttgtgcagataggtattggcggatcagaattgggccctaaagctatgtattttgctatgcaggggatttgtccatctgataaacgtatcttttttgtttccaatattgatccagataatgctgcagaggtcttaaaagaagtagatctcaagcaaaccctaattgttgtcgtgtctaaatcagggacaactttagaaccttcagtgaatgaggaattatttaagcgagcttatcaagacaaaggattgtctgtagcagatcattttgtagcggtaactgctgagggtagtcccatggatgataaaacccattatttggaagttttccatctttgggatagtgttggtggaaggttctcggctacctctatggtgggaggggttgtacttgggtttgcttttggctacgaagtcttttttgagttcttgcagggagcagcttctatggatgctcatgcattgactccaattatggaaaagaatttgcctcttttatctgctatgctcggtatttggaaccgcaatgtattaaaatatcccacgacagctgtgatcccctatgcaacaggattgaaatattttactgcgcatttacaacagtgcggaatggaatccaatgggaaaagcatttctagacaagggaaagaggtgcattttgcgacatctcctattatttggggagacgttgggactaattgtcagcattcctttttccagagtcttcatcaaggaacagatattgttcctgtggaatttattggatttctacagaatcaacgaggtattgactgtgtattatcggggagctcttcttctcagaagttgtttgctaatcttgttgcacaatcgctagctttagctcaggggagagacaacgataatcctaacaaacgatttaaagggaatagaccctcttcgatattggttgcgcagcaactctctcctcgtattgctggaggattactggcattttatgagcataagtttgcttttcaaggtttttgttggggaatcaattccttcgatcaggagggagtttcattagggaaagaattagccactcaaattataggcttgatgtctggggctgctccgatagaatttcctgaggcaagagaattgttaagactttttaatgttttgcaatga

SEQ ID NO: 19058 - DNA, 780 bp, Chlamydia trachomatis
gtgagtatgtatataaaaagaaagaaagcttggatgactttcttagcaattgtctgtagtttctgtttggcgggctgttcaaaagagagcaaagactctgttagtgaaaaatttattgtaggaactaacgcaacgtatcctccttttgagtttgttgatgaaagaggtgagacggttggctttgatattgatttagctagggagattagtaaaaagctagggaaaaaattagaagtccgagaatttgcttttgatgcactcgttctcaatttaaaacagcatcgtattgatgcaattatggcaggggtgtccattacgtcttctcgattgaaagaaattttgatgattccctactatggcgaagaaataaagagtttggttttagtgtttaaggatggagactcaaagtctttaccactagatcagtataattctgttgctgttcaaactggcacgtaccaagaggaatatttacagtctcttccaggggtgcgtattcgctcttttgatagtactttagaagtgcttatggaagttttgcatagcaagtctcctatagctgttttagaaccgtctattgcgcaggtcgttttaaaagattttccgacgctcactactgaaacgatagatcttcctgaagataaatgggttttagggtatggaattggagttgcttctgatcgaccatctctagcttctgatatagaagctgctgtacaagagatcaagaaagaaggagtgttagcagagttagagcaaaaatggggtttgaacggctaa

SEQ ID NO: 19059 - DNA, 1182 bp, Chlamydia trachomatis
atgaagagaaatcccaatttcacatctttaacacagaattacttgttttcagatttacgcaatcgaattgctcagtttcattcagaaaatccccagcatcaagtaatcaatttatctattggagataccactcaacctttggatactagtgtcgcagaagctttttcccaggctattgcacgctttagttctccatcaacttattgtggatatggaccggattttggattgccttccctaagacaaaaattatctgaaaagctttatcatggctgtgttaatgcagaagaaatcttcatttctgatggagcaaaagtcgatctttttcgcttactgtcttttttcggcccgaatcaaatagttgctgttcaggatccctcttatcccgcttatatcgatattgctcgcttaacaggtgcaaaagagattgtttctctcccttgcttacaagagaatgattttctccctgtatttccggaaaacacccacattgacattctatgtctatgctccccgaataatccaacgggaacggctttaaacaagaatcaactgcgggcgattgtacgctatgcaatagagcataatattcttattttgttcgatgctgcttacagtgcttttatttcggccccttctcttcctaaaagcatctttgaaatccctgatgcacggttctgcgccatagaaatcaattctttctctaaatcactcggatttgctggcattcgattaggctggacagtcattcctaaagagttgacttacgaagatggacagcccattatccgtgattggaaacgttttctatcaacaacttttaatggtgcttccatcccagcacaagaagctgcgactgctggactctctactctttctaaacttgaagcagtccattattacaaagaaaatagccatttgctgaaaacctctctattgaaagccggatttcaagtattcggcggagaacatgccccctatttatgggtcaaacctacgatagaaactgttccttatagagatctttttgactttttcttacaagaataccatatcgcaattacacctgggattgggtttggtctttgtggttctgggtttgttcgcttttcctctcttggaaagcgagaagacgtattagtagcctgtgaacgtttacaaatgactcctgctctacaataa

SEQ ID NO: 19060 - DNA, 1740 bp, Chlamydia trachomatis
atgaaaacatccctcttgttttatagaacctctaaaaacgctaataaagaagcctctgttctttcttacgaacttcttgaaaaggccggctatctttttaaaacatctaaagggatttactcatatactcctcttttccaaagagttatcttgaaaatgacggagattattcgagaggaactcaatgcgattggcggacaagaagtctgtcttccccttctgcaatctgcagaattatggcaaaaaacaggtcgctgggaagcctttctatcagaaaaactcctctatgttcttaaagacagagaaaacaaggagatgtgcttagctcccacccatgaagaagtggtctcagagttcgtgtcacaatggctgacaggaagaaagcaactccctgtccacctatatcaaattggcaccaaattccgggatgaaattcgacctcgttttgggctcatgcgagcaaaagaatttctaatggaggatagctatactttctcagactctccagaacagatggaagagcagtatgcaaaacttcgtttggcatatcaacgcatctttgatcgattgaacctcaagtatgtcattgttactgctgatggaggaaaaatcggcaaaggtaaatctgaagaatttcatgtcctctgctcgctaggagaggacacgatctgtgttagtggctcttacggagctaatatagaagctgcccaggctatccccccatcctacacttactcctctgaactccttcctatgaaagaggtcgccacacccaatgttcgtactattgaagacttagagacctttttcaacacccctagacagcaaatcattaaaaccttagttgtaaaagttcacaaaaaaggcagcgaacagttctttgctatttgcattcgcggggatcgtcaggttaacttaactaaagtgtcctctttcctacaagctgacgactgcgaactcgcttccgatgaagagattattaaacatcttcatgttgaaaagggattcattggaccgctacactgtcccgttccctgctacgctgatgaaaccactcgccctatgacgaactttatctgcgcaaataatcaaaaagatattcactgtagatacgtaaactgggaaagagacattcctcttcctatttttggagattttcttctagccgaatcaggagacctttgccctcaaaataatgaagctccctatgaaattttccagggtgtcgaagtggctcatatttttaatcttgggacacgatatacggaatgtttctctgtaggattccaagatgagaatggggagaagcagctctgttggatgggcacatatggaatcggagtaggaaggactcttgctgcttgcatagaacaacttgccgatagcaaggggatcgtttggccattagccgttgctccattctctattacaatcctctataacgggggcgataccgaaggagaggctgttgcttcacaattttatcaaagcctaaacactgcgggattcgagccattacttgacgatcgtaatgagcgccttggctttaaattgaaagatagcgatctacttggaattccctataaattgatcattgggaagtctttccaaaagactggcatgttagagatcgaatctcgatctggagaaaaatataacatctctcctgaaaatctgttagattggtgctctaaaaatcttccttgtcatacaagaaaaatccctcctattcgagagtaa

SEQ ID NO: 19061 - DNA, 1977 bp, Chlamydia trachomatis
gtgttcaatatgagcgaaaaaagaaagtctaacaaaatcattggtatcgacctagggacgactaactcttgcgtctctgtaatggaaggtggccaacctaaagttattgcctcctctgaggggactcgcactactccttctatcgttgcttttaaaggtagcgaaactctcgtggggatccctgcaaaacgtcaagcagtaacgaacccagaaaaaacattagcttctactaaacgattcattggcagaaaattctctgaagtcgaatctgaaatcaaaacagttccctataaagtagctcctaactccaaaggagacgctgtttttgaagtagaaaacaagctgtacactccagaagaaattggagctcaaatcctcatgaaaatgaaggaaacagcagaagcttatcttggagagactgtaactgaagctgtcatcactgtacctgcttattttaacgactctcaaagagcctctacaaaagatgctggacgcattgcaggactcgatgttaaacgcattattcctgagccaacagctgctgctcttgcttatggtattgacaaagagggagataaaaaaattgccgtctttgacttgggaggaggaactttcgatatctctatcttagaaattggtgatggagtctttgaagttctctcaacaaatggtgacactcacttgggtggagatgatttcgatgaagtaatcatcaactggatgttaggtgaattcaaaaaacaagaaggcattgatctaagcaaagacaacatggctttgcaaagattaaaagatgctgctgaaaaagcaaaaatcgaattatccggtgtatcttctacagaaatcaatcagccattcatcacaattgatgctaatggtcctaaacacttagctttgactctaactcgtgctcaattcgagcatctagcttcttctctcattgagcgaacaaaacagccttgtgctcaagctttgaaagatgctaagttgtccgcatctgatatcgatgatgttcttcttgttggaggaatgtctagaatgcctgcagtacaagcagttgtaaaagagatttttggtaaggagcctaataaaggcgtcaatccagatgaagtagtggcaattggagcagccattcaaggaggagttcttggtggagaagtgaaagatgttcttctgcttgatgtcattcccctctccttaggaattgaaactctaggaggagtcatgactcccctcgtagagagaaacacaacgatccctacgcagaaaaaacaaattttctctacagcagctgacaaccagccagcagtaactattgttgtgcttcaaggtgagcggcctatggctaaagacaataaggaaattggacgttttgatctaacagacattcctccagctcctcgtggccatcctcaaattgaagtaaccttcgatattgatgctaacggaatcttacatgtatctgctaaggatgctgctagtggacgtgaacagaaaatccgtattgaagcaagctccggattaaaagaagaagaaattcaacaaatgatccgagatgctgaactcaataaggaagaagataagaaacgcagagaagcttcggatatcaaaaatgaagccgatggaatgatctttagagcagaaaaagcgattaaagactaccaagataaaattcctgcagatcttgttaaagaaattgaagagcaaattgagaaagtacgtcaagctgtaaaagaagatgcttcaacaacagctattaaagcagcttctgatgaactaagtgctcgcatgcaaaaaatcggggaagctatgcaggctcaatcagcctctgctgcaaatgctcagggagggccaaatattaactccgaggatctgaaaaaacatagtttcagcacgcgacctcctgcaggagacaactcgtcttctacagataacattgaagacgcagatgttgaaattgttgataaacctgaataa

SEQ ID NO: 19062 - DNA, 987 bp, Chlamydia trachomatis
atgtacgtgcctgatgttgcagaagacctttgtttagatatttttcataagcaaaagcaggttatttcgcggtacttcgccaactttcattgtgatgttgttcgccaacttacagaaagattgctttgtcatcagggagcggtatttttttctggaatagggaaaagtggttgtattgcgcgtaaattagttgccacgatgcaatcatttggagagaaggctttttttctttcaggtgatcttcttcacggggatttaggcgttgtttcttcaggggatattgtttgtctattttcgaatagtggggagaccagagagattttagaatggattccacatttaaaaaatcgacaagtttttctagttgggatcacttcttctccttgttctagtttagctgttttttccgattttgttgtgatgttgcctaagctagaagagctagatccttttaaccttattcctacaacgtcaactacatgtcagttgctcttttccgatcttttagcgatgacagttttacgttgtcgcaagatctctttgtcagattatgggaagaatcatcccagtggacagataggtttaaaagctaatgggaaagttagagattatctttctccaaggacggaagtgcctttttgttctccttcaatcactgtgtccgaggctcttactgtactttcttcatatgggtatggatgtgtttgtgtagtgaatgagcaattcgaattgttagggatattcactgatggagatttacgacgggggctttctgaatgtggcggtgctatcttggaatgtccattagagcaggttatgacaagaaagcctaaagtaatttctgaagactctgatgtgttattagggttagaaatgatggaatctggcaatccggtgactgtgcttcctgtagtagatgctcaacaccaacgttttattgttgggctattacatatgcatacgctagcacgagcgggattattatag

SEQ ID NO: 19063 - DNA, 1233 bp, Chlamydia trachomatis
ttgccttcacttcatgttgagttgaaaaacactaaaacgtttactagttcagagataaggggattcatgtttgagtttcgatttccaaaaataggggagaccgcatctgggggtatagttgtccgatggttgaaacaggtcggggattctattcagaaagatgagccattgatcgaggtctcaacagataagattgcaacggagttatctccttcgcaagcaggtgttttagaagagtgtttagttcaagaaggggaggaggtttcccctggagatgttttagcgcgtttgcgagaaatttcacctgtagatacatcggtacccacttccgtagaagaaagtcctattaaggaagaatctcttgtaaacagagagaatcagtggttatctcccgcagttctaggaatcgtgcaaagagaaggactagatctccaagaattgcaaaagatttctggtacgggagagaatagtcgaattactcgaaaagatgtagaacgttatctttctgataaaagagaggctagagctccaatctgttctaaggaagaaaatagaatccctatgtctcccttgcgtcgggctatcgcttcttctttgcgacagtcctcggaagaggttccgcatgcctctttagttgttgatgtggatgtaacagatttaatgaatcttatctctttagaacgggagcgttttgcggccgctcatggagttaagcttacaattacaagcttcattatacaatgcttagccaagtctttggaacaatttcccttgctcaatggatctttagatggagatacgattgttttaaagaaagctgtgaatgtaggtgtagctgtaaatttaaataaagaaggcgtggttgtgcctgtcattcataattgtcaggatagaggattagtgagtatcgccaaagcccttgctgatctctcttctagggctcgagctagtaagttagatgcttcagaagctaaaggagggagtgtcaccctaactaactttggtatgacaggagctcttattggtatgccaattatccgttatccagaagtggcgatcttaggaataggaaccatccaaaaacgtgttgttgtgagagaggatgattcgttggctattagaaaaatgatgtatgttactttgacatttgatcatcgagttttagatgggatttacggcggagaatttttaaccgctttgaaaaatcgtttagagtctgttacgatgagctaa

SEQ ID NO: 19064 - DNA, 1230 bp, Chlamydia trachomatis
atgaaattatggatgaaaatctttataggcctaatcatcggagttgtttctggcttggttctagaagacaaagcagtttttgttaagccttttggggatatatttttaaatctactgagcatggtggtgtatcctttagttttttgctctatggttctaggaattgcttcgattagtgatatgaaaaaattggggcgtataggcttgagaagcctaggattgtatttagggaccactgctgttgcgattggcatcggcttggcctttgctcttttcttttgcccggggaggggatgcgatcttcagggatttaatgggatagatttttctgctggtcaacctagtgagatcaattttttaactgcatttgcacaggttttcccttccaaccccatgcgttcttttgttgaaggaaatattttgcaaatcattatattcgctttatttacaggaattgccctgcgtttggcaggagaggtagctcgtcctgtagaacaggtgatccacggatgtaacgaaattatgttacgaatggtcaatatgatcatgtcttttgctccttatggggtagcagcaagtatggcctggatatctggaaatcatgggttaaccgttttacttcaattagggaagttccttgtcgtctattatatcgcctgtatttgtcatgccgtgttggtgtttggtggtttagttcggttgggatgtagacgttcgttcagcggctttttgtcgtcgatgatggacgcgatttcttgtgctgtatctactgcaagtagttctgcaacactacctgttaccatgcgttgtgtttcaaaaaatcttggtgtttcttctgaaatatcgggatttgtgcttcctttaggagcaactgtaaatatgaatggtacagcgatttttcaagggatggccgcagtgtttatcgctcaggcatataattgccctctttctttaacaagtttgcttcttttagttgtgacagcaacattttctgctgtaggcagtgcaggggttcctggaggaggaatgattacgctaggttctgttctagcctctgtaggactacctatccaagggattgcagttttagctggtattgatcgcttacgagatattatcggtactcctatgaacattttaggagattctgttgttgcgttatatgtcgctaatggagaaggagagttggcttctccagaagaagaggaagctcttcctcaaaatggttag

SEQ ID NO: 19065 - DNA, 798 bp, Chlamydia trachomatis
atggagtttataggaaaaaataatgctcgtgttaaagcggctcttgctttaaagcgacagcgagcacgtaatagttcatactttttattagaagggttccgcgagattcaccgggccttgatttccgggtaccattgtttacatgtgttttgcggagaattgatatctgataaggagcgggatcttgataaagagctaactgctcttggcatcgaaaaattaccttgtcctaaagagatattagagaggctctcttttaaggagcatccggataatttcattgctgtttttgaaaaaaaacggctctcttgccaagagtttttgagattacagcgcaagaatcagcaacccttttatttgattgttgagcaagcagaaaaaccagggaatattggggcattgttgagaattgctgatggagctggagtcgatggagtcattctttgtgatcccgtagtggatttatataatcctaatgtcattcgctcctccttaggcgctgtgttcacagtacctatttggcaggcctctttggaggaagttttggctctagttcgtgaacaagagtggaaaatttttaccactactccatctactcaaactttttattttgatcaaaatttttgccaaccattggctgtggtgtttggctcagaaaaggatggactttccccctcttggttagatggaagtttttgtaacatcgctttgcctatgctagggaaagcggattcattgaacctctcttcttctgttgcagcagttgcttatgaggttgtgcgtcaaagaagtagatga

SEQ ID NO: 19066 - DNA, 828 bp, Chlamydia trachomatis
atgatggattacgaattattagatagcggggatggtaagaaacttgagcgatttaaggatgttgttttaattcgtccttctgctacggctatttggccaaaaacttcaccagctttgtggaaacaatattctgctgagtttgttcgtgttggggagaaaggagagtggaaataccgcaattcacatcttaaggaatggtggataactattgattctgtgtcatgcttgttgaagcttactccctttggtcatgtggggattttccctgagcatgctacattctggcaagatctaagcccctctttatcgaagccttcttgtaaggtcttgaatttatttgcttatactggagcttcttctattttttgtgcccagcagggggctgctgtctatcatgtagatgcttctaaggctgctgtaaaatgggctcaaaaaaatgtggaagggaattctttttcagaaaaaagaattttttggatcatagaagatgttttttcatttctaaaaaaagaaattcgtaggggaaaaacctatgatgtgattcttttggaccccccaacttatggacgaggtcctgatggagaaacctttaaaatagatcgggattttttcccattattggaggcctgttcacagctgctttctagttctttttcgcatatgttgattacttcgcatacgccaggacatacccctgaatttttgcattgcttagctaaaagggcgcttcctatgctttcttcccaaaaatggcggttgggagagaatttttgtggtgagggagatcaacggttgccttcgggagtttttgcgcaatggagtttatag

SEQ ID NO: 19067 - DNA, 597 bp, Chlamydia trachomatis
atgttttcaggcattattcaagaggtagcacgtgtagaccttattcatcattacggggattccatggagataggaatttttgcacgtaatctagtagatggggttccgggaagtagtatcgctgttgatgggatctgtttgactttagtcaaaagagaattcgaattactattttttgatgtgacagaagagaccatggcttgtaccacgattaaaaattacaccgtggggagtatggtgaatttagagcgttctgttcgattaggggatgaaataggtgggcattttgtttctggtcatgtctgtggtgtgggtaccatcattgccgtagaaaaatcttatatgttttttaaggctccaacaaatttggtgccttatgtactcgaaaaaggctttatcgctattgatggtattagtttgacgatcgctcaggtaaggggagatatcttttccgtcagcgtgattcctgaaactcgagctcggacttctttgggttacaaacaggttggttctcacgtaaatatggagcccgatatgatgacaaaaatgcaggtggatacagttatgcggttccaggccgaaaagataggcaaatga

SEQ ID NO: 19068 - DNA, 405 bp, Chlamydia trachomatis
gtgaaaaataaatacgaaaaggagaattttatgcccctaacggacgaagaaatagccgattttaaaacacgtcttctagaaatgaaggcaaaattgtctcatactttagaaggaaacgcccaagaagttaaaaaacctaatgaagcaactgggtattcccaacaccaagcagatcaaggcacggatacgtttgaccgaaccatcagcttggaagtgacaactaaagaatataaacttcttagacagattgatcgcgccttagaaaaaatagaagaatcctcttatggtatttgcgatgtgagtggagaggaaattccattagcaagattaatggcaattccttacgctacaatgactgtaaaatcacaagaaaaattcgaaaaaggccttctttccggaaactag

SEQ ID NO: 19069 - DNA, 1824 bp, Chlamydia trachomatis
atgtttccccagaaaatcacgctttggttataccctttaggactttttgctaatcttttctttggtacagccttttgtgtgcagtggttcttaattaagaagaggggctgttcttttgttcctaaaattttctggcatctgtcttgctctggcgctgttttgatgatctgccatggatttattcaaagtcagtatcctattgcgctactccattcttttaatctcattatttatttccggaaccttaacatagcttcctcaaccccgctccccatctccaaaatagtctcattgttggtcgtttctgcaacagccattactctatcttttgcaattggcacacagtaccttccacacatgacgtggatggcttctccaaacattttacacttaaatcttccggaagctaattttttgtggcaactcataggctgcattggattgactatcttttccttaagattttttatccaatggttctacctagaatacaaaaaccaatcctctttacctactcctttctggaaagctagtttggtaggaggatccatctgtctcatttactttttacggactggagacattgtcaatgtcttgtgctatggatgtggcttattcccttccctagcgaaccttcgcatagcttctcgagaagctatccaaaaaccgtttagctgcagttgcttcatctccgcaggagaacatagcggagatactttaggaggaaatttattaaaagaaatccatgcaaaatatcctgatattcactgctttggcgtaggaggcccgcaaatgcgggcgcaaaacttttgcacgcttttttctatggaaaaatttcaaatcagtggattttgggaagttcttcttgccctacccaaactatggtatagacgccgtattctgtataaaacgattcttaaaagaaatcctcaagctgttatctgcattgacttccctgattttcattttttattaataaaaaaactccgttctctcggatataaagggaaaatcgtccactatgtgtgccctagcatatgggcttggagaccatcaaggaaaactactttagaaaagtatttggaccttcttcttttaatacttcctttcgaacaaaaattattcaaagattctccccttcgtacggtatacatagggcatcctctctcagaaactatcaaacttttctgccctaagcagaattggaaagaacggctccatcttccaaccgataaaccctttgtcgctgcctttccgggtagccgtcacagtgatattctgcgcaatcttacgattcaggtacaagcttttcaagcatcagattttgcatccacacatcatttacttgtatcgtccgcgaatcctgcgtatgaccatctcattctagaaatcctacaacaaaatcgctgtttgcatagcaatattgttccttctcaatttcgatatgaactaatgagggagtgtgattgtgctcttgctaaatgcggaaccattgttttagaaacagctcttaatcttactccaacaatagttacctgccaactccgccctctagatacgtttttagcgaaatacatattcaatattatcctcccagcctactctctccccaatattattctaggaagaaccattttcccagagtttataggaggcaaaaaagattttcggtatgaggatgtcgctgctgctctgaacattcttaaaacatctcaagctcaagaaaaacaaaaaaatgcctgtaaggatgtttatcaggcaataaacgaatctgcatcgactataaaagagtgccttcctttcatatttgaagcttcttattaa

SEQ ID NO: 19070 - DNA, 5019 bp, Chlamydia trachomatis
ttgtcgtctatgaaatggctgtcagctactgctgtgtttgctgctgttcttccttcagtctcagggttttgtttcccggaatctaaagaattgaatttctctcgcacaggaacctcttcttctactacttttacagaaactattggagagaacggtacagaatatattgtctctggtaactcgtcatttactaatttcactaatattccagtcaaaaaaccaacgactgatgactcaagtacgtcaacccctaccacatcctctgctgtagatccaacagaaaagattgtcagggcctcttcttcatcttcgcctaattctggggatacgtcagctactcccgatcctaaaggtggcggagctttttacaatgaacactccggaattttatcttttatggcaagatctggagtagaaggttctctcactctatctaatatcaagatgaccggtgatggaggagctatctattcccaaggcgaacttctatttacagatctaactggtttaaccatccaaggaaatctatcccaattatctggaggaggaatctttggaggctctactatttcattctctggaatcaatcaagccacattctcatccaatactgcagaagttgtccctgaagaaactacaccgaacccaaatccaggaactcaaacaacaacctcacaaccatcacccacttccaaggtccaaagtctattcacttactcttcatctactcaagctaatggaaacggtgcagattctcaaactccatcccataaaccgggatctggaggagctatctatgccacaggagatttaaccatttccgactctcaagagatcgttttctccgtaaacaaagctagtaaagatggaggagccatctttgcagaaaaaaatgtttctttcgagaatatcacaacactaaaagtacaaaacaatggagcagaggaaaaaggaggcggtatctatgctagtggagatctgtccattcagtcctctaaacaaagcctttttaattccaataccagcaagcaaggaggcggagctctttatattgaagggaatgtagacttcaaagatctcgaagaaattcgcattaagtacaataaatcaggaactttcgaaacaaagaaagttactttatcgttacccgaagcccagacaaataaaagctctgtaactgctgcttcccagtctggacccaatactacaccaactcctactcctccagtcacggctaaaggtggaggtttatacaccgaaaaaaatctttccatctctaatattacagggattattgaaattactaacaataaagcaacggatgttggaggaggagcttacgtaaaaggaacactcacttgcaaagattctcatcgcttacaatttcagaaaaactcttccgagaaaaaaggaggaggactttacacagaagatacgattaccttatctaacctgacaggtaaaactctattccaagagaataccgctaaagaggaaggtgggggtctttacatccaaggagatgacaaaactttaaccatgacaggactcgatagcttctgtctgatcgataacacttcagcaacccatggtggtggagcctacgtcactaaagagatttctcaaacttatacttccgacgttgaagagttccctggaatcactcctgtgcatggagaaacaatcatctcggggaataaagctactggtggtagtggtggtggagtatgcacaaagcatcttgttttgtccaatctccaaaccatctctatatccgaaaattttgcatcagaaaatggtggtggtgcctgtacatgtccagataatttccctgctcctacagcatctactccttctaccaatcaaactgccgcccctaaagacgataaagactttttaatcgattatgttgttagcacaacgatcgacaagaataaggcaacaaaaaaaggtgccggtgtctatgctaaaaaagctaaactatcccgcatagacgaactcaatatctccgataacgctgctcaagaaacaggaggtggcttctgctgtacggaatctttagaattggataccatcgcctctctatccgtaactaaaaatcttgctgggaaagaaggtggaggactccacgctaaaacattaaacatttctaatttaaaatcaggattatctttctcaaacaacacagcgaactcttcttctacaggagttgcaacgaccgcaactacatcacaatcccctacagtttcctcattcttacctcgagctactgcaggaagttctccagctcctgcgcaaacaactccaacttatgccggagtagtaggtggagctatttacggagaaacggtttccttctccaaatgtagcggactgtgtcaatttacagagaactctgctattgataatactccttctagcccctcgctaaatgttcaaggaggagctatttatgccaaaacatcgttatccatagaggcagaagatcctagtacctcttatgtcttctctaaaaactctgtctctacagggaaagcgcaaacaaccggtcaaatagctggaggagctatctactctccttcagtcacattaaactgtcaaacagtattttccggtaatagcgcctctatggcaacaacaaatcccccctccggaacctcgccaaaagatactattggtggagctattgcaggaaccacaatctccttatctaaaacttctcatttttcggaaaatactgctgatttgggagctgctataggaaccttgtcaggagggtcttcatccaatcttacggaaaaaattaccttatcgaacggatcatttacctttgaaaaaaacaaagcgaataaacgcggagttatctatgctcctagcgtttccattaaagggaacaatattacctttaaccaaaacacatctactcatgacggaagtgcgatctactttactaaggatgcaacaattgagtctttaggatctgttctttttacaggaaacaatgtgactgcagaacaggctagctcaacagcaactggaggacaaaccacaaatactacaaattatggcgcggctatctttggagatcctggtactcaaactactgacaccacattaaaactgatcgcttcctccgggaatattactttcagtaataacagccaaaatactgccacaaataaccctgccactaagttctgtagtatctcaggatacgttaagctcactttacaagcagcacaagggaaaacgatcagcttttttgacagcatccgaacttccaccaagaaaacaggtcaagcacaaaatagttacgaaactttagatatcaataaaacagaaaacagtaatacgtatgctgggactgtgttattctcttccgagctccacgaagtgaaatcctatgtgccacaaaacgtagttctccataacgggacattagttcttaaaaagaatgcagagctgcatgtagtctcttttgaacagaaagaaggctccaaattgatcatggaacccggagcagtgttatctaaccaaaatatagctaacggagcgttggctattaatggattaaccattgacttatccagtttaggagctccacaaacgggagaagtcttctcccctcctgaattacgaattgttgcaacaacttctaactctggaggaggtggtggagttggaggttatgtcacagcctccaaaaatctctccgcagcatcccctaccgttgcagctacaaatccaaccatggcagacaacaaagtcttcttaaccggcgctctgactttgatcgatccagatggaaacttttaccaaaatcctatcttagggacagatttaaccgatgtaccgttaatcaaactccctacaacagcaaatcaagttgatgtttctaacttaacactatccggagacctttctcctaagaaagggtatacaggaacctggacgctaaatcctgatccacaaacaggaaaagttgttgccaactggaaattcgacatgtaccgccgttgggaatacataccaagagataaccatttctatgccaattcgatcttgggctcccaaaactccatgattgttgtgaaacaagggcttattaataacatgttacataatgcccgtttcgatgacgctgcttacaacaacttctgggtctcaggagttggaactttcctatcgcaacaaggtactcctctttctgaagagtttagttattatagccgaggaacttctgtagctatcgatgcaaaaccacgaccagattttatcctgggagctgcttttagtaagatggtaggaagaactaaagcgattaagaaggtacataattattcccataagggatccgaatactcataccaagcctctgtttacggaggtaagttcctgtacttcttacttaataaacaacatggctgggcactacccttcttattacaaggggtcgtatcctatgggcatattaagcatgatacaacaaccctctatccttctatccatgaaaaaaataaaggagactgggaagatctgggttggttagtagatctacgcgtctctatggatgttaaagaaccttccaagagatcttctaaacgcgttgctctttacggagaacttgagtactccagcattcgtcagaaatcattcacggaaattgactacgatcctcgacgctttgatgattgtgcttacagaaacctatcgattcctatgggctgctattttgaaggggctatcatgagttatgatattctcatgtataacaagctttccttagcctatatgccatctatttacagaaataaccctgtctgtaaatattgggtcctatcttcgaatgaaactagcaaagttgtctgtggagtccccacaagaacatccgctcgagcagagtatagtacacaactttatctagggcccttctggaccttatatgggaattacaccatagacgtgggtatgtacacattggcacaaatgacgagttgtggtgcccgtatgattttctaa

SEQ ID NO: 19071 - DNA, 4383 bp, Chlamydia trachomatis
atgaagtttttatcagctaccgctgtatttgctgcagctcttccctctatcacaagtgctagctccgttgaatcccaaatagaaacaaaagatctaaactctagtagaacaggatcctcatcatcgcaatccttcactgaaataattccagaaaatggcgcagaatatagggtatctggagatgtttcattttctgatttttcaaatataccagaagaagcagagactcttgctatatcgcacaaagaacagcctaataacgaagtagtactctccgaagaaaaccaccaagcatcctttcaagattctgcacaaaaccaaactgaaaatgcctctgaaggaaactctcctaatagcgagaatactaaccagtcatctaccacagaaaccgagtctataactactgatgaacaagtgcagaatgataatgaatctgcagcttctgtacctactactgtagaaacagcaacagctatgcgcctcccctcttaccatctacaaacagaatcattagtagaaggggctacagaagaagatcaaaatcaaccgaactctcaaaatacatctagtggcggcggagcattttataactctcaacaaggacctttatcctttatcaatgatcccgataaagacagttctctcaccttatcaaaaattcgagtaataggagagggtggtgccatttactcgaaaggaccattaagcataacaggtcttaaaaaattagctttaaaagaaaacttatcccaaaaggctggaggagctatttgtgcagaatccactatttcaataagtagtgtagattctatcattttttctaagaatacagtcactcctccagctgccaataaacctgaactccctaacgatccctctgggagtaatggtaatgatggttctgatgacagtaactcctcaggtaatactgactcaaatgaaagcaaccctaacaacagcgcttctaataacactggctctgaaaatgagctttcttccagtaccccatccgcacaacttcccaatcccgcaacaccatttttatcatctgtttctacaaactctcaacctatagacacagaaccagaaaatgcatggcatgctgaatcagggtctggaggagctatctattctaaaggcaagctttctatcgcaagctctaaagaagtagtcttcgatcacaactcggccaccaaaaatggaggagctatcttcggagaggaagaaattgctctcgaaaaaatagcgtctctgaaattcgattccaacactaccggtgaaaaaggtggggctattcatgcgaaaacagttacactatctgatatcaaaaacactttgattttcgttaataatacggctaaaacaccggaagaaaactctctaaaatcttctcaactaaacaaccaaaatccttccgaagaagagcaccaagatactagtgagggtgaagaaagccagtctcttgaaacgtcacctataactaatcaagactctgcatcctctcatgtagccattttccgttctatagcagcatcctcctctcaatctaatagcgaaaatatccctaatgcagatgggtctacatctgctgggggagacgcaggaagctcttcacaaccatcgacaccaggatccgattcttcgataaatcatgtgattggaggaggagctatctatggagaggcagtcaaaatcgagaacctctctggatatggaacattctccaacaataacgctgttgatcatcaaatttctggatctacatccgatgttttaggaggagctatctatgctaaaacatcactaactatcgatagcgggaactctagtggaaccattacattctctgaaaataccacttcttccaaatctacaacaggacaggttgctggaggagccatcttctcccctagtgtaaccatcaccacaccagtgaccttttctaaaaactctgcgataaatgccacaaccagttctaaaaaggatacctttgggggagctatcggtgcaatctctacagtttctctatccaaaggagctcgattctcagaaaatattgccgatcttggatctgctattggattagtacctactacacaagatgcagaaactgttcagctaacaacaggttcttactattttgaaaagaataaagcactaaaacgagcaactgtttacgctcctatcgtatctatcaaagctcataccgcaacattcgatcaaaatatctctgcagaagaaggaagcgcgatttatttcactaaagaagccaccattgagtctttgggatccgttctttttacagggaacttggtaaccccaatacaaagcacaacagtgttaacttctggaaacacctcaaaatacggggctgctatttttggacaaatagcgaatgcaagcggatctcaaactgataacctccccctcaaactgatcgcttctggagggaatatcagcttccgaaataacgaataccgtccagatgccactaatactggacaatctactttctgtagtatcgctggagatattaaattaaccatgcaggctgcagaaggcaaagtaatcagtttctttgatgctatacgaacttccactaagaaaacaggaactctggcctctgcttatgacacactagatatcaataaatcgaatgattcagggtccataaattcagcctttacagggaccattatgttctcctctgaattacatgagaacaaatcctatattccacaaaacgtagtcttacacagtggctctctcatattgaaagcaaatacggaacttcatgtgctttcgtttgatcagaaagaaggctcttctcttattatggaacctggatctgttctttcaaatcaagatattgctgatggttctttagtagtaaatagtcttaccattgatttatcgagtgttggaagaaacagtgcctctggagacaatatcttcatgcctccagaattaagaatcgtagatacctctacaaattctggaaacagctcttctaccccgccctcatcgaatacaccaccaaactcaactccgacagcacaagctcctatttccaaaaattttgctgccacaaccacgacaccaacaacacctccgacaacagggaacatcgttttccttaacggagttattaaactgattgatccgaatgggacatttttccaaaaccctgcattaggatctgaccaaaaaatctctctactagtactcccttcagatcaaacaaaactccaagctcagaaagttgtgctaacaggagacatctctcctaagaaaggatacacaggaacattaactcttgatcctcaacaattacaaaatggagtaatccaagctttatggacattcaaatcctacagacagtgggcctatattcctagggataatcacttttatgccaactcgattctgggatcccaaatgtctatggctactgtcaaacaaggattaatcaatgataaattgaatcttgctcgctttgatgaggttgcttacaataatttgtggatatcaggactaggaaccatgctctctcaaagaggaggccagcgatcagaggaaatgacttattacagtagaggagcttctgttgctttagatgcgaaacctacccaagatttgatcattggagcagcatttagtaaaatgatcggaagaagcaaatctttgaaactagagcgtaactacacccacaagggatcggaatattcctaccaagcatcggtttatggaggtagtcctttctatcttacaattaacaaagaagcaggccgatccctccctctcttattacaaggggttatctcctacggatacatcaaacacgatacagttacccactatcctacaattcgtgaattaaacaaaggagagtgggaagacttaggatggttgaccgctcttcgagtctcttccatcttaaaaacacctaaacaaggagactccaaacgcattactgtttacggagaagttgaatattctagcatccgtcaaaaacaatttacggaaacggaatatgatcctcgttacttcagtaactgcacctatagaaacttagcagttcctgtaggattagccttagagggagaattcaaaggtaacgatattttgatgtacaacagattctctgtagcttacatgccatccatctatcgaaactctccagtatgcaagtaccaagtactctcatctggagaaggtggagaaatcgtctgtggtgttcccaccagaaactcctctcgagcagaatatagtacgcagttataccttggtcctctatggactttatatggatcctacacattagaagcggacgctcacacgttagccaatatgattaactgtggggctcgcatgacattctaa

SEQ ID NO: 19072 - DNA, 1008 bp, Chlamydia trachomatis
atgtttgttgatcaaattactttagagttacgcgcagggaaaggcggtaatggtgttgtagcttggagaaaggaaaagtatctccccaaaggaggcccttatggcggtaatggagggaatggtggctctatccttatcgaggctgttacgaacatgtattcgttcgaggaataccgtaaccttcgttttcttaaagcaggtgatggtcaagctggggctagtaataatcgcacgggaaaaaatggcaaagatttcgttttaaaagttcctgaagggactctcttacgagatgctgagactggcgagctaatacacgatttcactaaggatggggagcgtattgttgtttgccagggtggtagaggaggtaaaggaaacgtgttctttaaaacctctactaaccgagctccaacaaaagcgactccaggtaagcctggagagattcgtttagttgaattggaacttaaacttatagctgatattggtcttgtcgggttccctaatgctgggaaatccactttgtttaatacccttgcgcgaacagaagttaaagtgggcgcctatccatttacaacattacacccttctttagggttggttcatcaagaaggatatctttatcaaaagccttggatcatggcagatattcccggtattattgaaggagcttctcaaaatcggggattgggattagacttccttcgtcatattgagcgtacgcgattgttgttgtttgtagtggacatctctgggatagaaagaagctctcctgaaaaagatcttcaaatcttgataggggaactcttagcttataaagaagatctcaagaataaaagtatggtaattgctttaaataagattgaccaactattacccgatgagcgcgaggaacgcttagctcttttaaaacaacagtttccagatcaagagtttattttgctttcaggacttactggagaaggcgtggatgtattacacgatctttttaaaagtaaacttagcgaatag

SEQ ID NO: 19073 - DNA, 252 bp, Chlamydia trachomatis
atggcacataagaaaggtcagggagcaagccgtaacggtcgcgattccgaatcaaagcgtcttggattaaaagttggcgcagggcaaagagtttctactggaagcattttagttagacaacggggaaccaagtggcatcccgcagtaaacgttggtagagggaaagacgatacattatttgctttagtggatggtatcgttgtaatgaaaaaaacagatcgtacttacgtttctgttatacctcaagcttag

SEQ ID NO: 19074 - DNA, 324 bp, Chlamydia trachomatis
atggagccttacgctgtagttcagactggaaataagcaataccaggttcgcaaaggtgatgttatagacgtcgaattgttggatggtatttctgaagagaataaagaagtcctttttcaagaggttttgtttgtttttgatggagagaaagcttccgttggttctccaacagttggcaacgctgtggtgaaaggagagttgatttctttcgttcgtggggaaaaggttgtggcttacaagtacaaaaaacgtaagaattaccacaagaaaataggtcatcgtcaaaattaccttcgggtgaagatttgcgatttggttatgtaa

SEQ ID NO: 19075 - DNA, 1125 bp, Chlamydia trachomatis
atgctgtatattctgctggctaccattattcttttcctttttctcggctcagcaataaatcgcagggtcactaccttagcgtatggaactgatgggatcccagttcccccctcctcttctagattacttcctctgctttgcctactttatgggatactcggagcacctatttatcagtatatcaatactttcttctctattcccttgcctattttttggggtactttcctatttttaatcctagtagcctgtaaatttttaccctccttttatggttgttcgaaaaactggtggggttcccagatcccaatttctacagttaaagctctagaaaaatgtctgatgggattaaaaaaatcctcatcaactacaattccacaacttcctgccccaacaccatccaacgagctatccgcaaatatctcttgccttgaagatatgattgctcgagaaattatgaccccgaaagccgatattttcgctttaccaagcgaaatccctatttctcaagctttccccctaatcatagatgagggatatagtcgcgttcctttattcactaaaaatatcgatgacattacaggaatggttcttgtgaaagacctactccctgtgtattataaggatccacataccacccaaccactatcatccatcgcttatcctcccttgtatactcccgaaatccgtcgcgtctctctgcttttacaagaatttcgacagaaacgttgccacttagccattgttgtaaatgaatacggattcacagagggtctggtttccatggaagacattgttgaagaaattttcggggaaattgcagacgaatacgatgaccaagaagatgttcactacaaaaaagtaggtaatgcttggattgtggatggacgaatgaacatttccgatgccgaagaatattttgggctgcgcatagcacatgagagcagttacgacactcttggcggttatgtttttcataagttaggcgccgtccccgagaaaggaatgaaaatctactatgaagattttgctatcgatattttatcctgctctgaccgcagcgtagaaaagatgaaaattacaccaagaaagcgaaagcctttatcacggaacaaccgattctaa

SEQ ID NO: 19076 - DNA, 720 bp, Chlamydia trachomatis
ttgcaggtttacaacagtttaagaactattatgacaaacttccaagacaagccgaacatccgaatcatgtttgattccctagcacccacctacgataaaattaataaaattctgtcgttaggtttgcacctcacatggaatcattcttttgtttctcttttaggtagatctgaccatttattggatttatgtgctgggactggacacgtggccttgtcctatatccaaaaatatccccaagcttcggcgacgctcgttgatttttcaaccaaaatgctagaaaatgttcaggaatgccatcctttagctcctttctcctacgtcataagcgatgtaacaagcatgcctcttccgaatgacacttttcatttagcttctatggcatatggactccggaatctatcctcccctcttgaagcgctcaaggaggtacatagggttttaaaacctaaaggacgtttaggcattcttgagctgactcgtccagcaacttataacccagtccacctgttacataaactctatcttaatctagttgtccctagtgttggaaggttttattccgggaacagttacgcttactcttacttaaaagaaagcatccgaaaccttccctgcgacacctctctggaaagagtttttcacaaatcagggctacacattatccgaaaacgaaaattgctcttcggaactgcaactatttggattttagaaaaatag

SEQ ID NO: 19077 - DNA, 1494 bp, Chlamydia trachomatis
atgacttctttattagataaatatttgagaaatatttccgggaaaggacagcaaagtttagcatccgtagcttatttagcagcattagatcatctattacactctttcccatccataggacaaagcatagtacaagaattgaaaagtcagcgatctcgtttgaaaatgattgcttcagagaacttttcttctctatctgttcagcttgctatgggtaatttactcacagataagtattgtgagggaagtccattcaagcgtttttattcttgttgtgagaatgtggacgctattgagtgggagtgcgtggagacggcaaaggaattatttggtgcagaaagtgcttgtgttcagccacattctggagctgatgcaaacttactggctattatgtcgattattacgcagaagatccaaagcccagctgttcagagactgggatacaagacaatcaacgatctcccggaacaagagtatgaggctttaaaggccgaaatgtctcaatacaaatgcctaggcccgtctttaaattctggcggacatttaacgcatgggactgtgcgtataaatgttatgtctaaattgatgcattgtcttccttatgaggtcaacttagataccgagttatttgattatgacgtgatagcgaaaatagcgaaagaacataggcctactgttcttattgcgggctactcttcttattctagacgattaaactttgctacactgaagcaaattgcggaagattgcggtgcagttttatgggtggatatggctcatttcgcaggattagttgctggaggtgtttttatcggagaagaaaatcctattccttatgcagatatcgttacaacaactactcataagactctgcgagggccaagaggggggcttgttttagctaaaaaagaatattctgatactctaaacaaagcttgtccgttaatgatgggaggtccgcttcctcatgtaattgctgccaaagcagtggctttgaaagaggctatgacaataaatttcaggaaatatgcgcaccaggttgtcgaaaatgctcgaactttagctgaaatttttcagcgtaatggtttgagattattaactggaggaaccgataatcatatgctgattatcgacctgacttctcttggagttcctggacgtatcgcggaggatatgttaacctctgtaggtattgcggtgaatcggaattctattccatcggatgcttctggacagtggaaaacttcgggtattcggttaggtacacctgctctaacaacattaggtatgggtagtgctgaaatggaggaagttgcgaatattatcgcgaaagtattgcgaaatattactgtgagacgcaatgctgagggcagttctagtaaaagtgagggagtgctatcggaggagatcgctcaagaagcgagacaacgagtagctgatttattaggaagattccctctttaccctgaaatcgatctggaaacgctagtttag

SEQ ID NO: 19078 - DNA, 537 bp, Chlamydia trachomatis
atgtctgaaccatcctcttgttttgttcttccggatcctgaatggatttaccgtgtcggcattgggcaggacagtcaccgttttcttcctagtgacaatcctaaaccttgtgtcttaggagggattatttttgaaaacaccccaggttttgaggcaaattcggacggagatgtcgtttttcatgctatttgcaatgctttttcatctgtaacacatcaagtcattttaggagcattggcggatgaactattaaaagcaaaggggatttctgatagtgcagtttatctgaaggaagcggttgcatctttaaagcctacacaaaagatctctcatctggctattactatagagggacaacgccctaaactacttcctaaaatatctgctatgcgagaaaaaatagcagagatacttcgaatctctttagattctgttaacatcacagcaacttctggagaagggctaacgagcatgggccagggacatggcgtacaatgtttctgcgttttaaccgttatggaattctgcccacgttaa

SEQ ID NO: 19079 - DNA, 318 bp, Chlamydia trachomatis
atgaagcagcaaaaacaaagaattcggattcgcttgaaaggttttgatcaagggcagctcgatcagtctacagcaaacattgttgagactgctaaaagaaccggagctcgtgttgttggtccaattcctttaccaacgaagagagaggtgtatacggttttgcgctcccctcacgtagataaaaaatctcgtgagcagtttgaaattcgtacacataagcgattaattgatattttagatcctacaggaaaaacaatcgatgctttgaagatgttgtctttgcctgctggagtcgatattaaaattaaggctgcttaa

SEQ ID NO: 19080 - DNA, 2085 bp, Chlamydia trachomatis
atgagcgatcaagagttcggtttagacgcgattagaaatatcggtatcatggcgcatatcgatgcaggaaaaacaacaacgacagagcgaattcttttctacgcgggaagaactcataagattggggaggttcatgagggcggagctaccatggactggatggagcaggagcaagaaaggggaattacgatcacctccgctgctacaaccgtattttggttgggatccaagatcaatattatcgatactcccggtcacgtcgatttcactattgaagtagagcgttctttgcgcgtgcttgatggtgctgttgccgtttttgacgctgtttccggggttgagcctcaatctgaaactgtttggcgacaagcaaacaaatatggcgttcctcgagttgcttttgtaaacaaaatggaccgtatgggcgcaaattattttggcgctgttgagtccatgagagagaaacttggggcaaatgctattccagttcactgtccaattggtgctgaaagccaatttgtgggaatggttgatttgatttctcaaaaggctctttacttcctagatgattctttaggagctaagtgggaagagcgggaaatcccagaagatcttcaagagcagtgcgaagtcctaagaatgcagttgcttgaagagttagcaactgttgacgaaactaacgaagcctttatggagaaagtccttgaggctcctgagagtattacagaagaagaaattcacagagtaatgcgtaagggagttattgaaggcaaaattaatccagtcctatgtggaagtgctttcaaaaacaaaggggttcaacagcttcttgatgtgatcgtcaagtggttgccttctcctcttgatcgtggtaacgttcgtggaatgaatttaaagacaggtgaagaagtttgcttgaagccttcgaaagatgggcctttagctgcgcttgctttcaaaattatgacagacccttatgttggtcgtattactttcatccgtatttattcaggaacattgaaaaaaggttctgctattcttaattctactaaggataagaaggaacgtatttcaagactgttagaaatgcatgctaatgagcgtactgacagagatgaatttactgttggggatatcggggcatgtgtaggtcttaagttttctgtaacgggggatactctctgtgatgaaaaccaagagattgtattagagcgtattgaagctcctgagcctgtaattgatatggcaattgagcctaaatctaagggagaccgagagaaattagctcaggctttaagtgctctttctgaagaggatccaactttccgagtttctacaaacgaagaaactggtcagacaattatttctggaatgggagagttacatcttgatattctccgcgatcgtatgatccgagagtttaaagttgaggctaacgttggtaaacctcaggtttcctacaaagaaacgattacgaaagcaagtgatagtgaaacaaagtatgtgaagcagtctggtggtcgaggacagtatgctcacgtttgcttggaaatcgagccaaatgagcctggtaaaggtaatgaggtagtcagcaagatcgttgggggagtaattcctaaagagtacattcctgcggtaattaaaggagttgaagagggattaaattccggagttttagctgggtatggtttggtcgatgttaaggtaagcattgtattcggatcttaccatgaagttgactcgagtgaaatggcctttaagatttgtgggtcaatggctgtgaaagaagcttgtagaaaggcccttcctgtcattttagagcctattatgaaagtgacagttataactccagaagaccacttgggagatgtaattggagatttaaaccgtcgtagaggtaagattctaggccaagaagcttctagaaatatggcccaggtcaatgcagaggtacctttgagtgaaatgttcggttacatgacctcattgagatcattgacttcaggtcgagctacgtcgactatggaacctgcattctttgctaaagttcctcagaaaattcaagaagagattgttaagaagtaa

SEQ ID NO: 19081 - DNA, 474 bp, Chlamydia trachomatis
atgtcaagacgacatgcggctgagaagaaagttattccaggcgatcctgtttacgggagcgtagtcttagagagatttattaacaaagtaatgttgcacgggaagaagagcattgccagaaaaatcgtttacggagctttggagcgcttcgctaaaagattgggcttagaaaatcctttagaaggatttgaagaggctttagagaatgcgaaacctattcttgaagtgcgttcccgtagagtgggtggggctacttaccaggtgcctgttgaagtggctcctgatagaagaagttgtcttgctatgcagtggattattaagcatgcgcgttctaagccaggcaaatgtatggaaattggcctagctaatgaattgatcgattgcttcaacaaacaaggagctacgattaagaaacgcgaggacacccatcgcatggctgaagcaaataaagcatttgctcattataagtggtaa

SEQ ID NO: 19082 - DNA, 372 bp, Chlamydia trachomatis
atgccgacgattaatcagttaatacgtaagaagcgtcagtctggcgcaactagaaagaaatctccagctttacaaaagtctcctcaaaaaagaggggtctgtcttcaggtgaaaactaaaactccgaagaagcctaactcagctttgcgtaaggttgcttgggttcgcttgtccaatggacaagaggtaattgcctacatcggtggagaaggtcataacttgcaggagcacagcatcgttttggtccaaggcggaagggttaaagatttgccaggggtgcgttatcatattgtgcgaggggccttagattgtgctgccgtaaaaaatagaaaacagagtcgttcccgttacggcgcgaagcgtcctaagtag

SEQ ID NO: 19083 - DNA, 1521 bp, Chlamydia trachomatis
atgactttccaaaatgtacgcgttagagtggccccttctcctacaggagatcctcatgtggggactgcttatatggctctgtttaatgaggtttttgcaagaaaatttaatgggaaaatgattttgaggattgaagatacggatcaaactcgaagtcgtgatgattatgaaaaaaatattttctcggcgctcaagtggtgtggaattcgttgggatgaggggccagatatcggaggcccctatggaccttatcgtcaatctgagcgcacagaaatctataaaaaatatgcagaaatccttttgcaaacagattatgcgtataaatgttttgctactcctcaagagctgcaagaaatgcgagcagtggctagtaccttagggtacagaggaggatatgatcgtcggtatcgttacctttccgcagaagaggttcgacaaagagaggagcaggggcaaccatatactattcgcttgaaagtgcctttaactggggagagtgtttttgaagatcagtgtaaagggcgtgtagttttcccttgggcggatgttgatgatcaagttttggtaaaatcggatggattccctacttatcattttgccaatgtcgttgatgatcatttgatggggatcacacatgtgttgcgtggggaagagtggttaagttctacccctaaacatcttcttctttatgaagcttttggttgggaacctcctcagtttttccatatgccgcttcttctaaaccctgatggaagtaagttatcaaaaagaaagaatcctacttctatcttctattatcgagatgctggatataagaaagaggcgtttatgaatttcctaaccctaatgggatatagtatggaaggggacgaggaaatttattccatgcaacgtctgatagaagctttcgatcctaaacgtattggtagatccggagctgtttttgatatccgtaagcttgattggatgaataaacattatctcaatcatgagggatctccggagagtcttttaaaagagttgaaggattggttgtggaatgatgagtttttattgaaaattcttcctctctgccagactcgaatcactacgttagcagatttcatccgattaactagtttcttcttcatggcaattccagagtattctaaggaagatttattgccatcttctcttggtcatcagcaagccgcggtaatgctttatagtttagttaaatatttggagaagaaagatttatgggaaaaagatttcttctatcaaggatctaagtggctggctgaggctttccaagttcatcacaaaaaggctgtaattcctttgttatatgttactattacaggggaaaaacaagggttgcctctttttgattctatggaattattagggaaggctcggacaagagctcggctcactcatgctcaaaatttattgggaggagttccaaagaaactgcagcaacagatcgataaggcattgcaggatcagccattagaagaaatccgttttttggatttctag

SEQ ID NO: 19084 - DNA, 1749 bp, Chlamydia trachomatis
atggaaaaagacaaattatctgcactcggacaaaaatggacgtatcctaagcataatgaggagtttctgaagaagattataaaagaattgtatcttcatcctgtaattgctcaagttcttgtatcgcgagggtttcaatctgtccaagagatccgagattttttgtatccgcaattcccatcgttacatccagcctcttcgtttttggatatggaaaaagctgtcgctcgtctccttaaatctaaggaaaacaatgagcatgttatgatctatggcgatggggatgtagacggcataacaggtgtgactttactcgtagaatttttacaaatgctcggagtaaagacgagctattgttgttccggtactttgtttaaacaacacggagaaattacctctttgatttctcagatgctacaagatggcgtttctctcttaattactgtggattgtggaattactgcaggaagggaagttcgttccattaacaaacagggtatagatgttattgtcacagatcatcatacgcctacagggaaacttccccattgtattgccacgttgaatccgaaattagataaaaattcttatccaaataaggagctgaccggggttggggtagcttttaagttagtatgtgcaacttatgaagaactgattaagcaggatgcttcttggaaagataaaatagatctgttgcattttttagatttagtgagtttaggaacaattgcagatgttggcagactttccggggagaatcgtattttagtttcctatggaattaaagaaatcacaaaaggaaagcgtttaggcttaaaaaagctttgttctttgtcaggggttgataaatcggatatttcttcaacaaatttaggaattagaattacccctaaattaaatagcttaggaagattagcagattctagtcagggcgttaagttattattatctcaagatcctcgaactgtgggaacaatcgtttcggagcttgctattgtgaatcaggagcgtcagagaatagaggctgaagtgctccgtgatgtagaaagaattttggcagcaaatcctaagctaactgctcaatctgccattgtattggcatctccttattggcattctcgagtcatcccgattatttctgctcgtttggcacgtacctataacaaacccgtagcaattattgctcttcaagatggtataggaaaaggttctttacgtacgataggggcgttccctttattaggagtgcttcgtaaatgcgaatcgttttttctatcctatggaggacatgattttgcagcagggcttatgatcaaagaggagcagatagaagggttcaggaaaaaattcatccatttagtgaattcctccttaaggaaagacgaggctacgttaaccttgcctttggatgtatgcatggatttctctcaaattagccaagatctgatctcttctatggagcttctggagccttttggtaaggggaatccgtctccagttttttatacaagggccatacaagtacgttatccaaagctattatctgggaatcacgtaaaattatatttaaatagtggggaaagaaatttggagggcacggcttttggtcagggagataagattagtttgctcaaggctaattggaatatgcctctagatatcgcttatacactgcgtgttatgaagcggtctgttcatggggcggttcgtcttcttattcaggactttcgtatacaggctccttga

SEQ ID NO: 19085 - DNA, 762 bp, Chlamydia trachomatis
atgtctctagctttagaacaggcgaacccaattcaagaaaattttctacgagagccccctctccctaagcatatcgccatcatcatggatggaaaccgtcgatggcaaaagaaacatgaacaattttgtaaaagcaatgccatctccggtcaccgtcgaggagctgacagcatcccgcaaattgttgatacagctgcactcctaggagtagaagctctcaccttgttcgcgttctctacagaaaacttttctagatcaaaaacagaagtcgctgaattattttccttatttaactcacagttgcatagtaaactctcttttctgcacgatcgggaaatccggctacgatgtatcggagacttatccaaactccctcaagaattgcaaaataacattgcaaaagcagtctccgccacaacacactactcccatatggaattaatttttgcgattaactatggaagtaaaaacgaattagttcgtgcgttcaaggaattgcatcaggaccttacaaacaaaaaaatctctatcaatgaaatttctgaagagcttatcagctcttacttagacacatctggcctccctgacccggatttgcttattcgtacaggaggtgaaatgcgtgtcagtaattttctcttatggcaaatagcttatacagaactttacgtaacagatgtgttatggcctgatttcacggcccacgacttgttagaagcaattaaaacataccaacaacgatcaaggcgcggagggaaataa

SEQ ID NO: 19086 - DNA, 918 bp, Chlamydia trachomatis
atgttcgactcggataaaaactccattcttcaaagtgatttttgtcagcgcttagttgtccattcgcttcttctggtcttccttgttatccttctctgtacatctctatatcctagttcagccttcatcgtggggcttctttcatcaacctgcgcagcgattgggacatacgaaatgtcttccatggtcagaatgaaattccccttttctttcactcgatatagctccataggctctgctatttttgtcgccctaacttgcctaacagctcgttgtaaaatgctacttccagagcatgtggaccttatcccatggttctttctatttttttggactgttcacctcgtgttcaaaagtcgccactataaactgggcccgataggatctactggccttgctttattctgtatgctttatgtatccgttcctatccgactgtttctgcacatcctttatgggtttgtccataccgacactccatttatagggatttggtgggccatttttcttattgctactacgaagagctctgatatttttggatacttttttggaaaagcttttggaaaaaaacgcattgctccagtcatcagcccaaacaagactgtagtaggtttcgtagctggttgcatagcttctattctagttagtttgatcttctactctcatcttcctaaatcctttgcaaatcagattgcaatgccttggatcctagttgccttagggatcatattaggaattagtggcttctttggagatattatcgaatccacattcaaacgcgatgcgcaaattaaaaacagtagcgatctagaatctattggaggaatgttggatgtcctagactccttgcttctttctacacctatcgtttacgctatccttcttatcactcaaaatgggacatttttaggatga

SEQ ID NO: 19087 - DNA, 651 bp, Chlamydia trachomatis
atgattatcactatagatgggcctgctggaacagggaaaagtacattagcaaaggcattagcaaagacattacagtttaactactgcaatacaggggccatgtaccgaacactcgcttatgctcgcttacaacctgattggcaagaggtccctttagaagactttcttgcctcccccccattttccttctctttttctaaagatgctcctttacaagctttttatgaaaaccgccccctaacctctgaattgatctctcaagaagtggctaattttgcctctattttctcaaaagaacctaaagttcgcgcctatatgcaaacgttgcaaaaaagatatgctagtgtagggagctgcgtttttgaagggcgtgatatgggatctaaggtgttccctcatgctgaagtcaaaatctttttaacagccgagccagagattcgcgcaaagcgacgactaaaggacttacctgaaggctccctatctcaagaagccttgactgccgaactcatagcacgtgatcaagcagatcagcaaagagaactcgatccccttgtcatccctgcagatgctctagttattgactcttctgatttgacaataagccaaattctagagaaaatcgttcctttgatacattctcgtttagcatga

SEQ ID NO: 19088 - DNA, 651 bp, Chlamydia trachomatis
atgatttttactattgcaaagagccttgttcgcttactgtttcctctgttttacagaagaaaaatctttagatccaaagctagtgcttctgtgacaggggctgctattattgctgcgaatcatgtttcgtttcttgatcccataataatacctctctccttccctggtaaaatttatcatttggctaagtctggtttgtttgctaattctttcgcgcattggctttttcacgagttaggatgctaccccattagcaggaatgctggaaattctgcagccttcaaggctgcgcttaatatcttttctcgcggagaaaagctcattatttacccagagggaacccgtcattctgatggagaaattcaccaagggaaagtaggtgtgggaatgctagctcttaaaggaaatgtccctgtcattcctgtttatgttgctggaaccctcgaagcttttggaaaacaccaaaaattccctaagctctggaaaactttgactaccgtgatagggactcctatttcattccaagatctcattgacaaccctgctattgataaaaaagaagcttatcaattagcgaccgaacgcatcatggccaagattgcaaaacttcgtacttggttccagcaaggatgcatcggagaaattccttag

SEQ ID NO: 19089 - DNA, 1692 bp, Chlamydia trachomatis
atgacaacacttctctcttttctgacttcgctatgttcttcagcgattcgtcaagctttccctgaattggaagagcttaccctagatatcactccatccactaaagagcattttggacattaccaatgcaatgatgcgatgaaacttgctcgcgcattacgaaaatctccccgagcaatcgcagaagaaatcgttgcacacattccagctactcctttttcttctatagaaattgctggagcaggatttattaacttcactttctcaaaagaattcctagctaatcagctccaaatcttttctcaagaattagcgaaagggtttcctgtttcctcaccacaaaaagtgatcattgacttctcctctcctaatatcgctaaggacatgcatgttgggcatcttcgctccactatcataggagattgtctggctcgatgtttttcttttgtgggccatgatgtcttacgtttgaaccacattggagattggggaacagcttttggcatgcttatcacctatctacaagaaacagcacaaactgacattcatcagctggaaaatctcacagaattatataaaaaagcccacgtacgttttgctgaagacccagaatttaaaaaacgctctcaatataatgtcgtagccttacaatctggagatcctcaagctcttgcattatggaaacagatttgcgctgtttcagaaaaatcttttcaaaagatttattctatcttagatgttgaacttcatactcgtggagagtctttttataacccctttttggcagatgtggtttcagatctggaatccaaaaaccttgttactctctctgatggggcaaaatgtgtattccacgaagagttttccatccctctaatgattcaaaaaagtgatggtggatacaactatgcaacgacagatgttgcagccatgcgctaccgtatacagcaagaccatgctgacagaattcttatcgtcacagactctgggcaatccttgcacttccaattattggaagctacgtgcttagcagccggatatcttccccataaaggaatcttctctcatgtaggattcggactagttttagacactcaagggagaaaattcaaaacgcgctcaggagaaaatatcaaacttcaagagctgctagatactgctattgaaaaagctaaggaatccttaagagaacatcgcccagaaatttccgaagaagagctagcttatcagggtcctatcctcggcatcaatgcgattaaatacgcagatctttccgcacatagaatcaatgactacgtgttctcttttgagaaaatgctacgttttgaaggaaacacagcgatgtcccttctgtatgcttacgtacgaattcaaggaatcaaacgtagaatgaagctagatactcttcctcaaaaaggacctctatctattcatgaacccgcggaagaaacattagctcttactttactgcgcttccccgaagttttagatttaactttaagagaactctgtccacattttctgacagattacctctacgtgcttacaaataagtttaatgctttcttccgtgattgtcatatagaagggtctgattatcaacaagagcgtctttatctctgcggtctgacagaaaaaaccttggaaacaggcatgcacctattaggtctgaagactctagatcacctgtaa

SEQ ID NO: 19090 - DNA, 1329 bp, Chlamydia trachomatis
atgcctggtattaaagtttttggaggaactgtcctacaagggtccgtacgtgtgtcaggggctaaaaacgctacaactaaattacttgtggcatccttactttcagataagcgtaccattttgaagaacgttcctaatatagaggatgttcaacaaacggttgatctgtgccgggctttaggggcaattgtagattgggacaagcaagcgcaagttattgacattcacacgccacgtattttgttatccaaggttcctccgcaattttcttgcgtaaaccgcattcctattttgctgttaggtgctttgctacgtcgttgtccctatggaatttttgttcctattttgggaggagatgccattggtccacgcacattacattttcatctcgaagggttaaagaaacttggtgcagagattattgtgagtgatgaaggatattgggcagctgctccagatggtctcattggagcgcatattactttgccttatccttctgtaggagctacagaaaatcttatccttgcatctgtcggtgctcaagggagaacgattattaagaatgcagctctggaagtagagattattgatctaattgttttcttacagaaagctggtgtagagatcacgactgataatgataaaacaatcgaaatttttggttgccaggacttttattctgttgaacactctattattccagataaaatcgaagcggcttcttttggtatggctgcagttgtttctcaagggagagtttttgtagagcatgcgcgtcatgagcatatgattcctttcttaaaagccctaagatccataggcggagggttttcagttcaagaaaatggcatcgaatttttttatgataaacctttaaaaggtggggtgctcttagagacagatgtacatccagggtttattacggattggcaacagccttttgctgttttactgtctcaagcagaaggctgttctgttatccatgaaacggtgcatgagaatcgactggggtatctgagtggtttagcaaaaatgggcgctcattgcgatttatttcatgaatgtctaagtgccaagtcttgtcgatactctacagggaatcatccgcatagtgcagtcattcatggaccgactcctttgcaggcaacacatttagtgatccccgatttgcgtgcggggtttgcctatgttatggcagctcttattgccgagggaggggtttctaagattgagaatacaaagatgttagaccgagggtacacagactggctagggaatttagaaagactaggagccaaaatactcacagagaaaacaagatgtgtctaa

SEQ ID NO: 19091 - DNA, 657 bp, Chlamydia trachomatis
atgaaccttagctgttccctcgtattgttaggaggagggagaggcgagcgttttaactccccccaacccaagcaatacactcctctttgtggggagccgctaattcttcatgccctacattcctatcaaagcctccccttcattcaagaaatcgttgttgtctgcgaagaacactaccaagaattgttctccccctactccgtgaaatttgcttcaccaggagctctacgtcaagattccgtcttttctggattacaacaagtttctttgccatgggtatgcgtacatgatggcgttcgccctttcgtctatgcaaatgaagtttctgaagtctgctccgcagctcttaaaactggagcagcagctctcgccacctccgcaacttatacaataaaatctcgtactccagtacgcaccttagatagagatgctgtggcagtaattcatactccccaatgcattaatacagaaatactgaaagaaggtcttcttcttgctaacatgatggattttaccttatctgatgattcggaagccgctgaactacttggtatagaacctactctggtattcagtaacagagtgcaaatgaagattacctaccctgaagatcttttatttgccgaagctcttctctctaaggctcacattcgttaa

SEQ ID NO: 19092 - DNA, 804 bp, Chlamydia trachomatis
atgacaaaaaaaattattttacgaattgcctatcaagggaccgcttactctggatggcaatatcaacctaatgctctctcgattcaagaagtcttagaaactcttcttcagaaaatttctagaacacgaatttctgtaatagcttctgggcgtacagatgcgggagtacatgctcagggccaagttgctcacttttgttgtccagaccatcctcatttttctgatccagggcaaataaaaaaaatgctcaatgctcttttgcctcacgatattgtcattcgagatgttattgcaaccaacgaagactttcactctcgattttccgccatcactaaagaataccattataccctctcgttactacctaagccccttcctcatcaccgactattttgttttagtcctcgccataagttgtgtttagaaagcatgcgagaagcagcaaaatacttagtgggcacgcatgattttgcttcttttgcaaatcttggaagagagtactcttccacggtacgaaccctctatgctctagatttattagaacaagagcatctggtcactgttatatgcaaagggaatgggttcctttacaaaatggtacgcaatattgtaggagctttgcttgacattggcaaaggaaaataccccccagaacatcttcttgaaatgctagaaaaaaaagatcgtaaaaaagggcctccttcagcgcctccttacggtctttctttacatcacgtgtgttatccttccccgtatcactggttttgtaaacacgagcataactcctctaacgaggaaaaatag

SEQ ID NO: 19093 - DNA, 1059 bp, Chlamydia trachomatis
atgccaaagatcgacacctgtgattcttgcgtttccaacgacgagcttttagccattcgtgcacgagtaacccaatcgtacagcgaagctcaaactatcttaacctccattcctgatggaatcatcctactttcagaagttggagaaatcttaatgtgtaattctcaagcacgctctattttgggaattcctgaagatatccaattaatccatcagaagtttcatgattttttccccgataccttttttggattctccgtgcaagaagctctagaaaaagaaatccctccaaaaacgattcgattaactctatctcaagacctttcccataaagaagttgaggtattcgttagaaaaaatatttctaatcaatttctatttcttcttatccgagaccgttccgactatcgacagctagaacaagcgattgaaaaatatcgcagcatctccgaactggggaaaatagccgctacccttgctcatgagatacgtaatcctctgactggaatttctggatttgcaacgattcttaaagaagagctctcttcagaacgtcatcaacgtatgctgaatgctatcatagaaggatcccgatctttaaattctctcgtatcttctatgcttgaatacacaaaaatacagcccctgaatctccgctctatcgacatacaagactttttctcttctttaatccccgagctttcattaacatttccatcttgcacattcagaagaacttactcatcccccatactgcattctatagacccagatcgcttacgatgcgtcatatggaatctcgtaaaaaatgctgttgaagcatctgatgatgaagtttttctagaactacatgaaaaaggcttgtctgtcgtaaatacgggaactcttcccctacatgttcaagaaaaactctttattcctttcttcacaacaaaacctcaggggaatggactaggattagcagaggctcataaaatcatgcgattgcatggaggagatcttattgtttccaatcaagacaatcttatcacctttaccatcctatggactcctgcttaa

SEQ ID NO: 19094 - DNA, 2373 bp, Chlamydia trachomatis
atgctcactcctatccccttattacaaagattcttttcttcccctctttccattaaggaaattttacaagcctgtgatcgcattggaattgaagcggaatgctcgaatgtctttccagactctctaaatacagtcgtaacaggaaaagtattgagcacctccccccatcctgatgccgaacgactttcagttgctattgtttttgatggtaaagaagaacgccaaattatttgtggggcccccaattgtcgcgcaggaatcatcgttcctgttgcgttacccggagctaaaatccgcaatgctttaggagaagtaaccacaatcaaaaaatctaaaattcgtggtctagaatctctaggaatgtgttgtggagcagacgaattagggtttccacatttacaaacaggggagcgcggcatttttgaattcccggaaaatactccccttggagaaagcgcctgcttgctgcttgctggagcttctttggaatgctctttgacccccaatttaggccattgcgcatccctgcttggcctagcaagagaaatctccttcttatctgacacttctcttaccattccagaggaattctcttttagtcctctaccgcaagaatcccattcttgtgatacacataacctcgaagcgagccctgtattctactccgttaaaatctctggattgtcttggaaacaatcccctgaagatttgcaggcatccttgatcgcccttggacagaaacctttgaatgcaatcgtagatatcacaaactatgtgatgctctctttaggacagcccctgcatgcttacgatagccaagccgttgatcaaaaatcgttacacgcaaccactgtacgctctccccaacaacttactcttttgaataaggaaacgtatactcttccagaaggcgctcttgtcgtcgcagatcaacataacattttaggactagctggagtaatgggaagtgccgcatccgcatactctgaaagcacaacagaaattattttagaagcggcttattttcttcctcaagcagttagaaaatatcagcgtactattcagctacatacagaagcggcttatagatttactcgaggtattgatcctcaaggagttttgccagcattgtatgcggccatccacatgattagagccttgttcccagaggcacaaatctccccgattcaaaagattggagagtataaatcggatcctttatcgctaaacatccgcccaaaaacacttaaacgacttctggacctctctctttctccttctgagatagcagagaaactctctcctttaggatttcaaacaatagcagaggaatcttctgttcgtgtagaggtccctctttatcgtcatgatattcaagaagagaccgacctagtagaagagatctgtcgcacaacaccttttgttcaaaagacacaaaaaatacttccgacctatactccaatctatgctttaaaacgctcgttatccacattcttagcagatagtggtttgcaacaattcttcacttgttctctcctggattcagaaatagcagctctctccttacaagaaagctctctcatccctgtgcaaaattcctctctgaaattacgagactctcttctttctgggatgctaaaaagtgcagcaactaatctcaacagacaagctccttatgtttatgcctttgaaattgggaatgtatactcaaaagagcacaatcaataccgagaagaagagcatattgcaattctgctaactcgccaagtaatggatgattcttggcatgtaaaaactcctctttccttttacacaatcaaaagctgggttgagaagttattatgtcatgcaggagtctccatcgaagattttgttcttcaagctagccaacatccgaactttcatccttatcggcaggctgctttataccataaaaaacagttgttaggcgtctttgggacattgcatccgcaattgtgtaagaaaagccagatcaaacacgatgtagtttttgctgagctttctttaaatgttctcctgtctttgaaaaagaaaacggaaccacattatgtcccctatcctatctatccatcttcttctagagacattacaattacaatagataaggatcttccagcggatcttgtacgtagagaacttttaagtttcgaatctaaatggcttgaaagtgttcatattgtcagtgtatatcaagggaaggacgtcacatctcaaagtaaaaatatctcccttcgactggtcttccgtgatcacgaacggaccttgtctgggcaggaaatagaaaaagaatacgaacgtctcactacattactggataagaacttagccaacataggaaaaggcaactcatga

SEQ ID NO: 19095 - DNA, 522 bp, Chlamydia trachomatis
ttgggggctcccatgactgaaaagttctttgttgtttctccaacgtctaagaactttttagcccaggcttgctcccaaggactttctatagataagtatcccccaattcagatcattgtacattttcgaggggattctatttttcactcgcgtctctcattagctccggtttttacttgcttgtttcttggccctggggctcataaggctatggaagggatggtgcattggtgtgaagcttatgcaaaaaaaaatccctccccattatcttttctagacttgtcttctttcaaagaaaaacaactagagatcctaaaagcagtaagccaaatatcctttggcattcgtagtacatatcaggcaattgctgaacagaccgaaacaagtaaagaagaagtgcttgcaacttgcaagcaaaatcccctaccacttctcatcccttgccatcgggtgctttctgtaaaagactatccggggggacaagctctttatgaaatccttacccgatttgaagggatctaa

SEQ ID NO: 19096 - DNA, 732 bp, Chlamydia trachomatis
atgctccgcgtcttagcctatcgacaggttgctttttctaagtttccttatgccctcagatcgtttttagattttttgcactctctcaagcagcattattcgtttattctgcccggagatcctctccctaataggaaagcaatcatactgacattcgattatgcttctgttgatttttacaagcatgtctttccttttcttcagaaattccagattcctgcggttgttggagttgcttggagatacgtatcccgtttagaaagtgaaaatcttcccattgatatgcgaatttcgccatcggattttctagcttttcaagacgaaatattttcttattatcagcccttttgttcggttaaagaactttgtcatatggctcaaagttcgattattcgatttgcctcttcagggtttgctattagaaaccttaaaaactcccctccttatttacatactgaaatttcattgtctaaaattttactagaagaggctatacaggctcctgtggaagtctttttttatccttttggaaaaagtgatttggtgagtcaacattttgttcaggaggtttaccgctattcttttgtgttaggggatgctgcgagttttttttactcgatgcaatcacagcatagcattcctcgtattgatatggctttagatagtcgagggatcccatctctttatcagctctctttccgccaattaaaacgattccttattttgcattaa

SEQ ID NO: 19097 - DNA, 1260 bp, Chlamydia trachomatis
gtggcagtgacaaagattgctaaactacaacgcatgggcattaatgagctgaatgttttagcgcggcaatatggggtgaagaatgtaggttccctgacgaaatcgcaggtagtgttcgaaatcgttaaagctaagtctgaacgtcctgatgagtttttgattggtgagggagttttagaagttctcccagatggctttgggtttctgagatctcctacatacaactatcttccttctgcagaggatatttatgtttctccagcgcagattcgtcgttttgatttgaagaaaggagatactatcgttggaacgatccgttctcctaaggagaaagagaagtattttgctttattgaaagtagataaaatcaacggttcgactcccgataaagcgaaagaaagagttttatttgagaacttaaccccactgcatcctaatgagcggttaatcatggagatggggaaagaaaacctggcggagcgtgtattggatttaacagctccaattggtaagggacaacgagggctgattgtggctccgcctcgttccgggaaaacagtgattttgcagagtattgcgcacgccattgctgtaaataatcctgatgcagagctcattgtattactgattgatgagcgtcctgaagaagttactgatatgattcgtcaggttcgaggtgaagttgttgcatcgacttttgatgaacagcctgatcgacatattcaagttgctgaaatggtaattgaaaaggcaagacgtttagttgagcacggtaaagatgttgtgattttactagattctattacgcgtttagctcgtgcatataacactgtgcaaccacattcaggaaaaatcctcactggaggggtagatgccagtgccttacataaacctaagcgtttctttggtgcggctagaaatattgaaggtggtgggtctctaacgattttagccacagcgttaattgatacggggtcaagaatggatgaggtgatctttgaggaattcaaaggaaccggaaacatggaattagttcttgatcggcacctttctgatcgtagaatttatcctgctattgatttgattaagagcggaacacgaaaagaagaattgctataccatccaggagagttagagaaagtgcggctgttccggcaggctatagctggcttaacagcaatagatgcaatgcagttgcttcttggtcggttgaaaaagacaaatagcaacacagagtttctattgtcattaaaggattaa

SEQ ID NO: 19098 - DNA, 2601 bp, Chlamydia trachomatis
atgaaaaaactttttattttagacgcttcaggatttatttttagggcatattttgctctcccagagatgcgagggccgaatgggggaagtacacaggcggtatttggatttattcgttctttagataagttagtaaatgacctttctccagagtatatggttgcggtattcgatggcccgaataataagcagagtcgtcaggagctatatgcagattataaaagtaatcgagatcggaaattcgaagatctcccagagcaaattgctttagtaaagcaatattgtgagttgattggaatcccttgtttagaaaaagaaggtgtagaggctgatgatgtaatcgctagtgttgctaaaaaagctgttgctgagggttttgaagtgtgtatttgcacagcggataaggacttattgcaattagtgaatagtcaggtctctgttttcaacccatggaaagaacaggaaatcaaatataacgaagttttattacaattcggagtcgctcctgatcagatagctgattatttagctctagttggagattcttcggataacattcctggtgttgtaggttgcggacctaagaaagctcaggcttttctgaaagagtttcaatcggtagaagatttagttgccaatacacagcgtttatctagcaaaaataaacaaatgatagaggagcagatcgagacgctgcttttgagtaaacgtcttgcaactcttcatacagatctcatgatccctctaaaaacagaggagatgtctttttcttcgcagactgctgatgtagcgcaattaaatgcgttttatttgcagcatggatttaaggcattagttaagcatgctcccacatctgaaacctctatttctttacaggttgtaaaagacccctctgttttacagatggttttaaagaacttaaaagggagggaagtagggtattgtgttgcttataccggggagcacttgccttcgttacgtctacatggcgttgctctatctggaggggatgaagttttttacatagagatctctggagatcaagagattgctttgcttaaagcgttttttgcggatgctactactaaattttttggataccgtactaaacgggataaccatgccttaaaaaatcatgggattgatgttcacgtaactgctgatttagtgttagcacaacatttagttaatggaggagcaaaaatttctttccagacgctccttgttgaatcgggtcatattcaagaagcggcattttttgcaaaagaatggggagcaagttctcttcctgtacaaaaccttcctcagaatcctgcacaatactttggaatatttgtttctcggttaccgtctatcaagaattatttgtttgagaagttagaagaaaaaggattaaaaagtatttttaaaaacgtcgaacagccattagaagagattttatttgctatggaatgcgctgggatgcccttagatagcgaggggttactggttttggacagagatttgtccaaagagctcgagacttatacccaagaaatttatgatttggctgggtgtgagtttaatattaaatctcctaagcagttatcggatgttttgtatcaccggttgggaataaagcctgtggataaagcaaaatctaccaaggctgaagtattagaggctttagaggggagccacgagatcatttccaaaattttggctttccgtgcgacagaaaaaatgttgtcaacatatgtgagagctttgcccaggcagatagacttaggaacacatcgggttcatccgacgtttaaccaagtaggaacggtaacaggaagactttcctgtcaggatcctaatcttcaaaatattcctgttcgttatgaaagaggcaaatcgcttcgggaggcttttcgatttacaaaagaaaatgattattttttagctgctgattattctcaggttgagttacggtttcttgctcatcttagccaagatgagacgttgaagcgtgcttttgattctggagaagatattcatactttcactgcttcgcaggtatttaacgttcctttggaccaagtgacagagagacaacgttatcaggctaaagcagttaattttggccttgcgtacggacaacaggcatatggattgtcaaaaaatttgaagattagtgtgaatgaggctcaggggttaatagatgcctattttgctcgttaccctcaagcttccgagtttattacgcacacgatcgagcaggctagtaaagagcagaaagtgacaacgatgctggggagggagcgtattttgagtgattgggaaagctctcctggggcacgagccgcttctggtaggcttgcagttaatacgcgtatacaaggtagtgcagcagaactaattaaattagctatgttaaatatttctcgggaattagtatcaagagggctaaaaagtcgtttattactgcaaatccatgacgagttattatttgaagtcccaaaggaagaattagaggagatgaaagtccttgttcaagagaagatggagtccgcaatgtcgctgtctgttcctttggttgtgaatgtcttaattggaaaaaattgggcggaatgctag

SEQ ID NO: 19099 - DNA, 1419 bp, Chlamydia trachomatis
atggctacccaaacaaagaaaccccactccccccagcttctctcccttcctaattccaaggaatccgaaatgattgtattggggtgcatgctaacaaacgtcaatcacctcaatcttgcagcaaaccttttgcaagaagaagatttctactttttggagcatcgcattatttttcgcgtgctgcaagatgccttcaaatcagatagaccgatggaccctcatcttacaggggaggaactaaaacgtagagaccaacttaacgttattgggggagcctcttatctcatcacgctatccgaatttgctgggacttccgcctatattgaggaatatgcggatattatccgctccaagtcaattttgagaaaaatgatccaagcggccaaagatattgaaaagaaggccgcagaagaacctcgtgatgtaaccacggctctagatgatgctcaaaacttattgttccgcataagccaaacaacaaactttgcgccttacgtccttgtttcggacaaactcaaaggcctttcttctactaaagacaaatccttcttgctagcgctacaagaacgtcaggaagcctttcaagctagttcccatgatgctagaatcccaacactctcagggttccctactcattttttggacctcgataggatgctgaatggattcagcccctctaaccttattattcttgctgcacgaccagctatgggaaaaactgccttagctctcaatattgtagaaaatttttgttttgaaagccgcctaccagtaggcattttttctctagagatgaccgtggaccaactgattcaccgaatcatttgctctcgctccgaagtcgaagccaagaaaattagtgtgggagacatctctggtcgagattttcaacgtgtagtctctgtggtccgagaaatggaagaacatactttactaatagacgactatccgggattaaaaatcactgatctccgagctcgagctcgaagaatgaaagaaagctacgacatccaatttcttgttattgactacctacaactgatctcaagttctgggaacttaaggaattctgattcacgtaaccaagaaatttctgaaatttcccgtatgcttaaaaatttggctagggaactcaatatccccatcctttgtctctcccaattatcaagaaaagtggaagaccgagccaatcataggcccttgatgagcgatttgcgagagagtggaagcattgaacaggatgccgaccaaattatgtttttactccgtcgcgaatactatgatcctaacgacaaacctggaacagcagagttgattgttgctaaaaatcgacatggatcgattggatctgtccaattagtttttgaaaaagactttgctcgattccgaaattatgctggatgtgaattcccaggctaa

SEQ ID NO: 19100 - DNA, 1833 bp, Chlamydia trachomatis
atgtggacatttcctgttgagtacgatgtaatagtcattggtgcagggcatgctggctgtgaggccgcatattgtgctgctaagatgggagcgtctgtcttacttttgacctcaaatttggatactattgcaaaactcagctgtaatcctgccgtggggggcatcggcaaaggacatattgtccgagagattgatgcacttggtggggttatggctgaagttaccgatttatcaggaattcagtttcgtattctcaatcaaaccaaagggcctgctgtacgagctcctcgtgctcaagtagataaacagttgtatcatatccatatgaagcaactattggagcaggttcctggattgcatatcatgcaaggaacagccgaggctcttttagatgacggcgaaaaagtcttaggcgtctccacgaaagaaggatgggcttattcaggggaaactgtggttctgtcttccgggactttcatgcgtgggcttatccatatcggcacccaaaacttttctggggggagattaggagatgcagcgtctttaggtctttccaaagatctaaaacggttaggatttcctttagggcgcttgaaaactgggaccccagctcgtttgctctcttcatctattgatttttccataatggaagagcagcctggagatcaaaacgtttgtttcgtccatcgagaagaagcttttgttcctaagttaccacaagtttcttgtcacatcacttatactacagacaaaacaaaagatcttatagcgaacaatcttcaccgttccgctttgtatgggggacgtatagagggtgtcgggccacgatattgtccatctattgaggataagatcgttaaattcgcagataaagatcgccatcatatttttatcgaaccagagggccttaatacgagagaagtctacgtaaacgggctttccacatcgatgcctttcgatgtgcagtatgagattattcgctctgtagctggcttagaaaacgcagtaattacccgaccagcttatgctatagaatacgactacatccaagggaatgtcatcctcccctctttagagtctaaaattctcgagggattattcttgtgtggtcaaatcaatggaacaacgggttatgaagaagctgctgcgcaaggccttattgcaggagttaatgctgtaaataaagtcttacatcgtccagcttttatccctagccgccaggaatcttatatcggggtcatgctagatgacctcactacccaagtattagatgaaccgtaccgcatgttcacaagtagagcagaacaccgtttgctactacgacaggataatgcgggcatgagactttctcattacggacatgctttaggattactgtccagcgagcgctatgccatgtttcagaaacaaaaaaattgcatagaacatgaaaaagagcgtttagccaaaacttttagaaagtatggcgattcgattgttccattaactaaaattttgtgtcggccagaagtttcttaccaacaacttctaacagagtttccagaagatgttaaagattggggtccaattattggggcctctttggaaatggagattaagtactcagggtatatctctcgacaacagacactaatccgcagcatggagaaagctgagaatactttgattcctgagggaattgattatcacagcatctctgcactgagcttagaagctcgagagaagctttctaagttcactccgcgcacaattggatctgctgccaggatttcaggaatttctgtcgctgacattcaggtgcttatggtctctttgaaaaaagatgcttactga

SEQ ID NO: 19101 - DNA, 1008 bp, Chlamydia trachomatis
atgagaattgtgattaatggttttggacgaattgggcgattagttttaagacagattctgaaaaggaatgctcccatagaagttgtagctattaatgatttggtctcaggagatcttctaacgtatttgtttaagtatgattccactcacggatctttcgcttcgcaggcaacattctctgatggatgtttggttgttggagaaagaaagatccgtttcttagcagagaaagacgttcaaaagcttccttggaaagatttggatgttgatgtcgtcgttgaaagtactgggttatttgttaataaagatgatgccgcaaagcacttggattctggtgctaagcgagtattaataacagctcctgctaaaggagatgtccctacatttgttatgggagtcaatcatcaaaagtttgatccagcaaatgacgtaatcatttctaatgcttcttgcacaaccaattgtttagcgcctctagccaaagttttgttggataattttggtatagaagaagggttgatgacaacagttcatgcggcaacggctacacaaagtgtggttgatggtccttctcggaaagattggagagggggaagaggagctttccaaaatattatcccagcctcaacaggagccgctaaagctgtagggttatgcttgcctgagcttaaagggaaattgacaggaatggcgtttagagtgcctgttgcagatgtttctgtggtagacctgacagttaaattgagttcagctacaacctatgaggctgtctgcgaagctgtgaagcatgcagcaagtacgagtatgcggaatattatgcattacacagaagaagctgtagtttcttctgattttattggttgtgagtattcgtctgtattcgatgcccaagccggggttgctttgaatgatcgatttttcaaattgatagcttggtatgataatgaaataggctatgcaactcgcatagtagatttattagagtacatacaaggaaactcgaaataa

SEQ ID NO: 19102 - DNA, 429 bp, Chlamydia trachomatis
atgcaacacgctagaaaaaaatttagggttggtcgtacttcttcgcataaccgttgcatgttggctaatatgttaaagtctttaattcacaatgaaagaattgagactacattgcctaaggccaaagagttgcgtcgtcatgcggacaagatggttactttagccaagaagaatactttggcagcaagaagattagctgttgggcgtcttatggtcagatacaatactttgactggtaaggaagctcgtcaagttaaagccggagatttgtcggcttacaatgttgatagaagagtcattgggaagttgtttgacgtattagcaaccagattttcttcaagaaatggcgggtatactcgcattctgaagttgcaaaatagggttggtgataatgctcaaaagtgtattatagaatttttagccgattag

SEQ ID NO: 19103 - DNA, 1185 bp, Chlamydia trachomatis
gtgtcgaccaagaaaacgacgaagagtgtagttatagctaaggagtttgggatgtcggataattcacataatttactttataacaaatttgagttgcctgaatcggtgaaaatgtctcccgttgaaggtgcagctggtggcattgataaagtagctcggtttgttgctgatcccttagagaagggaatggggcacacattgggaagcgccttgagacgtgctttattaatcggcctggaagctcctgctattgtctctttttctatgacaggagttttgcatgaatacatggcggtagaggggatcatcgaggatgttaccaatatcgttttgaatttgaaaggctctttgctcaaaaagtatcctttacaagattgtgaaggaggaagagcttcccaaaaattgcgagctacaatttctatcgatgcatccgatttagctgctgctggtgggcaaaaagcaattactttaggggatttgctgcaagaaggcacctttgaagctgtaaatcctgagcatgtaatttttacagttactcgtcctatgcaactagatgttatgttgcgggttgctttcggtagaggatatactccttccgagagaattgttctcgaagaaagagagatgaatgagatcgttttagatgccgccttctctcctgttgttttggtcaattatttcgttgaagatactcgtgttggccaggatacggatttcgatcgtttaatattgcaagtggaaacggatggtcgtgtagctcctaaagaggctgtagcttttgctacgcaaattttgagcaaacatttttctgttttcgaaaaaatggacgagaaacggatcgtttttgaagaagccatttctgtagaaaaagaaaataaagacgatattcttcacaagttagttttgggcattaatgagatagaactctctgtacgatccacaaactgtttgtctaatgccaatatcgaaacgataggagagctggtaattatgccagagcctcgcctgttacaatttagaaacttcggtaagaaatctctttgtgagattaagaataaactgaaagaaatgaaattagaattgggcatggatcttagccaatttggcgttgggctggataatgtcaaagaaaaaatgaagtggtatgccgagaaaattcggtcgagtaagaataccaagggataa

SEQ ID NO: 19104 - DNA, 399 bp, Chlamydia trachomatis
ttggttaaaaatcagacgcaaaaaaaaggcgtaaaaagaaaacaagtaaaaaacattccttcgggcgttgtccatgttaaggctacttttaataatacaattgtaaccataacagaccctgctggtaatgtgatttcgtgggcttctgctgggaaagttggttattcaggctctcgtaaatcttcagcatttgcagcgacggttgctgcccaagatgctgctaagactgctatgagttctgggttaaaagaggttgaagtaagtttgaaaggaactggtgctgggcgggaatctgccgtacgagcgcttatttcttctggacttattgtttctgttatccgagatgaaactcccgttcctcataacgggtgtcgaccaagaaaacgacgaagagtgtag

SEQ ID NO: 19105 - DNA, 369 bp, Chlamydia trachomatis
atgccacgcatcattggaatagatattcctgcgaaaaagaaattaaaaataagtcttacatatatttatggaatagggccagctctttctgaagagatcattgctagattgcagttgaatcccgaagcgagagctgcagagttgactgaagaagaagtcggtcgactgaacgctcttttacagtcggattatgttgttgagggagatttgcgccgtcgtgtgcagtccgatatcaaacgtctaattaccatccatgcttatcgtggacaaagacatagactttctttgcctgttcgtggtcagagaacaaaaacaaattctcgcactcgtaaaggtaaacgtaaaactgttgcaggtaagaagaaataa

SEQ ID NO: 19106 - DNA, 1374 bp, Chlamydia trachomatis
atggctacattgcgacaagtattttcgatttccgaattgcgacaaaaaatattcttcacattttctttgcttgcgttatgtagaatcggggtattcatccctgtaccgggaattaatggagaccgtgctgtagcctattttaaccagctattagggtctagccagaatttgtttcagttagctgatattttttctgggggagcttttgctcagatgacggttatagctcttggagtggttccgtacatctcggcttcaattattgtgcaacttcttgtggtctttatgcctactctgcaaagagaaatgcgggaggctcctgaccaaggaaagcgtaaattggggcgaatgacgaggctcttcaccctgcttcttgcatgtgtgcaatctttgctttttgcgaagtttgctttgcgaatgaacctcgttgttcctggaattgttctccccgcaatgctatctctgaagctgtttggaattccttgtgtattttatttaacaactgttgtggtaatgacaacaggaacccttttacttatgtggattggagaacagatttctgacaagggaattggtaacgggattagcctgattatcaccctaggaatgttagcttcgttcccctctgttttagggtccatatttaataaattaaatttgggatctcaggacccttctgaattcgggatagtctctctcctagttctttgtgcagtcttcgtttttgttctgatggcgactgtattaattattgagggggtaagaaaagttccggttcagcatgcacgtagaattattggaagaagagaggtcttaggaggagggtcttatcttcctctaaaggtgaattatgcgggagtgattccagttatttttgcctcttcgcttctcatgttccccgccactattggacaattcctttcctcagagtcttcttggttgaagcgaatagcaactatgttgtcccctggaagtgtggtttattccattttttacgtgttgcttattatattttttacctatttctggacagctacgcagtttcggccagagcaaatagcttctgaaatgaaaaaaaatggagcttttattcctggtatccgacaagggaaaccaacccagtcctatcttgaatatacaatgaatagggtaactttactgggggcagtatttttagctgttgtagctatattaccttctattttgggaaggattttaagagttgacgcaaacgtcagctactttttgggtggaactgctatgcttatcgtagtcggcgtcgttttggatacgatgaagcaaatagatgcttttcttttagtccgacgttatgacggagttttaaagaaagaccgccccaaaggaagacgttga

SEQ ID NO: 19107 - DNA, 435 bp, Chlamydia trachomatis
atgattaagttagagtatttacaagatccttcgcctcgtaagcgaagaactaaactcttgggaagaggcccctcttctggccatgggaaaaccagtggtcgggggcacaaaggggatggtagccgttctggttacaagagacgttttggatatgaggggggaggagttcctttgtatagaagggtccctactcgaggattttctcataaacgttttgataaatgtgttgaagaaatcacgacacaacgtttgaatggaatctttgaaaacggagaagaagtatctttggagactttaaaacaaagaaaagttatccatagagagacttctcgtgttaaagtgattcttaagggagctctggataagaaattagtctggaaagatgctgcaatagtgttgtcagaaggagtaaaaagtcttatcgagactgtttaa

SEQ ID NO: 19108 - DNA, 498 bp, Chlamydia trachomatis
atgacgctatcaagaaattctcataaggaagatcagctggaagagaaggttctcgtcgtcaaccgttgttgtaaggttgttaaaggaggccgtaagtttagtttttctgcgcttattttagttggcgatagaaaagggcgtttgggctttggattcgcgaaagctaacgagctaacggatgctattcgtaaaggcggggatgctgctagaaaaaatcttgtctctatcaattctcttgagggaggatctattcctcatgaggttcttgtcaatcacgatggagcagagcttttgttaaaacctgctaagccaggaaccggaatcgttgcgggatctcgcattcgtttaattttagagatggccggagtcaaggacatcgtggcaaagagtttgggatctaataatcctatgaatcaggtgaaagctgcttttaaagctctcctgacactctcttgtaaagatgatattatgaaaaggagagccgttatcaatgattaa

SEQ ID NO: 19109 - DNA, 372 bp, Chlamydia trachomatis
atggaaagctctttatataagaaaacttcggggaaagctcgcagagctttaagagtacggaaagccttaaagggaagttctttaaagcctagattatccgttgtaaagacaaataagcatatttatgtgcagctgatagatgatgttgaaggtaagactttagcatctatttcaaccttggctaaaatttcaaaaacttctggattaacgaaaaaaaatcaagataatgccaaggctttaggagtaaaaattgctgaattagggaaaagccttcaggtagatcggattgttttcgatcgaggagctcataagtatcatggcgtagtagctatggttgctgatggagccagagagggtggattacagttttaa

SEQ ID NO: 19110 - DNA, 552 bp, Chlamydia trachomatis
atgtctcgtaaagctcgagaccctattgtacttcctcaaggcgtagaggtctctattcaaaatgatgaaatctcagtaaaaggtcctaaagggtctttgacacaggtgttggctaaagaagttgagattgccgttaaaggtaatgaggtgtttgtttctcccgcagctcacattatagacagacctggtcgtatgcaagggctttattgggctttgatagcaaatatggtcaaaggtgtccaccttggatttgaaaaacgtttagaaatgatcggagttggattcagagcttcggtacaggggtccttcttagatttatcgataggggtttcccatccaacaaaaatgcctattcctacaggattggaagtctctgttgagaagaacacattgatctccatcaaaggtatcaacaagcagttggtaggagaatttgcggcttgtgttcgtgcaaaacgccctccagagccatacaaaggtaaaggaattcgttacgaaaacgaatatgtacgtcgtaaggctggaaaagcagcgaaaactggtaaaaaatag

SEQ ID NO: 19111 - DNA, 402 bp, Chlamydia trachomatis
atgggaattacgagtgattcaattgcaaatttattgacacggattcgaaatgctttgatggcagagcatttatacattgatatcgagcatagtaaaatgcttgaagccattgtaagaatcctcaagcaacacgggttcgttgctcactttttagtaaaagaagaaaatcgcaaaagactaatgagagtctttttgagatatggggaagatcgcagaccagtgattcatgctttgaagcgtgtatctaagccttctagaagggtatatgtttctgcagcaaaaattccttatgttttcggaaatatgggtattgccgtcctttcaactcctcaaggggttttagaaggttctgaagctagagctaagaacgttggcggtgaattgctttgtttagtttggtag

SEQ ID NO: 19112 - DNA, 543 bp, Chlamydia trachomatis
atgagcaggttaaaaaaactatatactgaagagatcagaaaaactcttcaagataagtttcaatatgaaaatgttatgcagattcctgttcttaagaaaatagtcataagtatgggtcttgcagaggctgcaaaagataaaaatctttttcagtcccatttagaagagttggctgttatctctggacaaaaacctttagtaactagagccaaaaattctatcgcagggtttaagttgcgagaaggacaggggatcggggctaaagtcactttacgagggattcgtatgtatgactttatggaccgtttttgcaatattgtctccccaagaattcgagactttagaggattctcttgtaaaggggatggtcgaggttgttattccctaggtttagatgatcagcaaatcttccctgaagttgatttggatcgtgttaaacgatctcaggggatgaatattacttgggtaactacagcacaaaccgatgcggagtgccttaccttgttagagtgtatgggcttgcgtttcaagaaggctcaataa

SEQ ID NO: 19113 - DNA, 336 bp, Chlamydia trachomatis
atgaagagacgtagtgtttgtgtcggtgacactgtttatgtgcttgctggaaacgacaaaggtaagcaaggaaaagttttacgttgtttgaaggataaggttgtcgttgaaggaatcaatgtccgagtaaaaaatattaaacgctctcaagaaaatcctaaagggaagcgtattaatattgaggctcctctccatatttccaacgtacgtttaagtatcgataatcagcctgctagactgtttgtcaaagttacggagaaaggacgggagctttggaataagcattctgatggcagttcttcattataccgattggtaagagagagaaagggttaa

SEQ ID NO: 19114 - DNA, 369 bp, Chlamydia trachomatis
atgatccagcaagaaagtcaattaaaagttgccgataatacgggcgctaaaaaggtaaagtgtttcaaggtcctcggtggatctcgtcggcgttatgcaacagtcggtgatgtgattgtttgctcagtaagagacgttgagcctgatagttccgtaaaaaaaggggacgttgttaaggccgttattgtgcggactcggaatgatattcgtcgtaaagatggttctacactgagatttgataccaatagctgtgtaatcattgatgacaaaggcaatcctaagggaactcgaatttttgggcctgtagcgcgagaaattcgagatcgaggcttcattaaaattagctctctggctcctgaggtgatttaa

SEQ ID NO: 19115 - DNA, 252 bp, Chlamydia trachomatis
atggctagtgatgtgagaggccgtagaaaaaccaaaattggtgtagttgtttcatcaaagatggaaaaaactgttgtcgttcgagttgaaagagtatactcgcaccctcaatatgctaaagtggttagggattctagcaagtattatgcgcataatgagttggatgtgaaagagggagataccgttcgaatccaagagacgcgtcctttgtctaaaacaaagagatggcgggttgtcgatcgggtaaattag

SEQ ID NO: 19116 - DNA, 219 bp, Chlamydia trachomatis
atgggagcaaaaaagaatttattagcggagcttagagaaaaaagctcagaagagttggatgagtttattcgtgataataaaaaagctcttttcactttgcgtgcggaagctgctttacaaaataaagctgtaaaaactcatcagttttctctgtataagaaaagcattgctcgtgctctaacaataaaacaagaaaaaaaggatagagtccatggctag

SEQ ID NO: 19117 - DNA, 417 bp, Chlamydia trachomatis
atgttaatgcctaaacgaacaaaatttcgcaagcagcagaaaggtcagtttgctggattgagtaagggggcaacgtttgttgacttcggcgagtttggaatgcagactttggaaagaggatggattactagccgtcaaattgaggcatgcagggttgctatcaacagatatttaaaacgtaaagggaaagtttggattcgagttttccctgataaaagtgtaacgaaaaaacctgccgaaactcgaatgggtaaaggtaagggagctcctgatcactgggtagctgttgtccgtcccggacgtattttattcgaagtggcaaacgtttcgaaagaagatgctcaggacgctttaagaagagctgctgcaaagttaggaatcagaacacgattcgttaaacgtgtggaaagggtatag

SEQ ID NO: 19118 - DNA, 675 bp, Chlamydia trachomatis
atgggtcaaaaaggatgtccagtagggttccgtacagcggttactaaaaaatggcgatctttatggtatgggaataatcaagagttcggaaaatttcttattgaagatgtaagaattagagaatttttgaaaaagaaaccctcttgtcaaggtgctgcagggttcgtcgttaaacgaatgagcggtaagattgaagttactattcatacagctagaccaggcttagtgattgggaaaaaaggggctgaagtagagtctctaaaagccgaattgaaaaagctaacagggaaagatgtttgggttgaaatcgcagaagttaaacgcccagaattgaacgctcagcttgtagcagatggtattgctaagcagatagaaagacgagtttctttcagaagagctatgaaaaaagcgttgcaatctgtgatggatgccggagctctcggagttaaggttcaagtttcaggccgtttggctggagctgagattgctcgatccgagtggtataagaatggtcgtgtgcctcttcatacgcttagagcagatattgattacgctacagcgtctgcagagactacttatggaattatcggcataaaagtttggattaatcttggtgaaaagaaggccgtccctgcggctaatcatgcaggtgcagcctcaacagctgctgcgtaa

SEQ ID NO: 19119 - DNA, 336 bp, Chlamydia trachomatis
atgtttaaagcgacagcccgatacatacgggttcagccaagaaaagctcgtttggctgcagggttaatgagaaatcgtagcgttgttgaagctcaacaacagcttagcttttctcaaatgaaggctggaagatgtcttaaaaaagttttggatagcgcggttgcgaatgcggaatccaatgagaatgtaaaacgagagaacctttgcgttgttgaagttcgggttgatgccggcccaatgttcaaaagagtaaaatctaaaagtcgtgggggacgagcccctgttttgaaacgcacgagtcatctaactgtgattgttggcgaaagagggcagtag

SEQ ID NO: 19120 - DNA, 267 bp, Chlamydia trachomatis
atgagtagatcgctaagaaaaggtccttttgttgatcatcaccttctcaaaaaggtccgagatatgaacgctttggagaagaaaactccaatcaaaacgtggtctcgtcgttctatgattacccctgaaatgattgggcacacttttgaggttcataacggccgcaaatttttgacggtctttgtgtctgaaactatggttggacacaagttgggagaattttccccaacaagaatgtttaagagccatcccgttaaaaaagggtaa

SEQ ID NO: 19121 - DNA, 855 bp, Chlamydia trachomatis
atgtttaaaaagtttaagccagtaactcccgggacgagacagttgattctgccttcttttgatgagcttactactcaaggggaattagaagggtcctcttctaaaagaagtgttcgtccgaataaaaagctttcttttttcaaaaagagctctggaggacgagataatttaggacatatctcttgtcgccatcgtgggggaggagttcgacgtcattatagagtgattgatttcaaacgtaataaggacggagttgaagcaaaagtagcttctgtagagtatgatccaaatcgttctgcctatattgctctgttaaactatgtagatggcgagaagcgttatattttagctcctaaaggaattaaacgaggtgatcgtgtgatttctggagaaggaagccctttcaaaactggatgctgcatgactcttaagagcattccattagggatttccgttcacaatgtggaaatgagacctgggtctggaggtaaattagttcggtccgctgggctttccgctcaaattattgctaaaaccgatggatatgtcactttaaagatgccttctggcgagttccgtatgttgaatgaaatgtgccgggctaccgttggagaagtttctaacgcagatcataatctgtgtgtagatggtaaagctggacgtcgtcgttggaaaggaatccgacctacagttcgaggaactgctatgaaccctgttgatcacccacacggaggtggagaagggcgacataacggatacatttctcaaaccccttggggtaaagtcacgaaaggattgaaaactcgtgataagcgtaagagtaacaagtggatagttaaggatagaaggaaatag

SEQ ID NO: 19122 - DNA, 336 bp, Chlamydia trachomatis
atgaaagatccttatgatgttgtcaaaagacattatgtgaccgagaaggcgaaaatgctggaaggattaagtctcgggggcggagaaggcaagaaaaaaggtagtttctgtaaagatcctaagtacacatttgttgttgccggggatgcaactaagcctatgattgctgaagccatagaggcaatttattctaataaaggtgtgaaggttaaaaaagtgaacacagtttgtgtaaaacctcagcctacgagaatattccgagggaaaagaaaaggaagaacagccggtttcaagaaggctattgtgacttttgttgatggtcactctattggttag

SEQ ID NO: 19123 - DNA, 669 bp, Chlamydia trachomatis
atggttttattatcaaagtttgatttttctggaaaagagtcagggaaagttgaattgcccgatgccttctttgctgaagggaaagagcaatcagtgaaagattatttagtggccattcaggccaataaacgtcagtggagcgcttgtacaagagggcgatcggaagtcagtcactccactaggaagccttttagacaaaaaggaacggggaatgctcgtcaaggttgtttagctgctcctcaatttagaggaggaggtattgtttttgggcctaaaccaaaatttgatcagcatgttcgcatcaataaaaaagagagaagagctgctattagattgctgttggctcagaaaattcaaacaggcaagctcattgttgcagataattctgtattcattagtagcttaaatgcgcctaaaacaaaagaagctttgagatttttgaaagagtgcaacgtggagtgccgcggagtcttgttcgttgacggactagatcatgttggaagcaacgagaatttgagattgagtgtaagaaatctagctgctgtaagaggatttacttacggagagaatatcaacgggtatgacattgccgctgctagaaatattgtggtttcagagaaagctttggaactacttgtcgagaatcttgtctctacaacaaaagattaa

SEQ ID NO: 19124 - DNA, 666 bp, Chlamydia trachomatis
atgcggtctcagcttagcctaatagggaaaaaggaaggcatgatgcatgtcttcgataagaatggaaatcttgttgcgtgttcggtaattagcatagagccaaacgttgttgcccagctgaaaaccgcatcttcagatggctataatgctgttcaaatgggggcagatgccgtaaaagctcctgaaaaaaccattgaaaagcgtttctctaaagcactactcgggcattttaaaaagtctgggggatgtgcttttcgtgttttaaaagaggttgtcgtttctgaagaggctgttcagtcggtttctttgggcgatgaatttggggtggaaattttcgacggagtatccaacgttgatgtttgcggaatttctaaaggtaaaggtttccaaggggtgatgaagaagtttggattccgaggggggccaaaaagccacggttctggattccatcgtcatgcaggatctattggaatgagatctactcctgggcgatgtttccctggaagtaaacgtccaagccatatgggatgtgatcgggttacagtcaagaatttagaagttgtaaaagttgacttggatagaaaagttatgctcgttaagggtgcaattccaggttttaaaggatccgttgttgttgtgaagcgttcttgcggagtagaagggtag

SEQ ID NO: 19125 - DNA, 843 bp, Chlamydia trachomatis
atgaccaacattcatcctacagctattgtggaagatggggcgcagattggaaataatgtaactatagagccctatgctattgtaaaaaagaatgtgaagctttgcgatgatgtagtggtcaaatcttatgcgtatatcgacgggtttacaacgattggtcgagggacaacgatctggccttctgcgatgatcgggaataaaccccaagatctaaaatttaagggtgaaaagacctttgttgaaattggagagcattgcgaaattcgtgagtttgctatgataacctcctctacatttgaggggactacagtttccataggcaacaattgcttaattatgccttgggctcacattgctcataactgttctgtaggtaacaatgttgtgtttagtacacatgtgcagcttgctgggcatgtgcaggtcggggattgtgtgactataggcagtatggttggagtgcaccagtttgtccgtataggatcttatgcaatggttggtgctatgagtggtattcgccgtgacatacctccttttaccataggaacaggcaatccttatgctttagggggtgttaataaggtcggattgcaacggcgccgtgtgccttttgaaacacgtttggcactaattaagacatttaaacgtgtcttccgttcaggggagtcttttcaagactccttgggaagtgtgttggaagattttggagacgtccctgaagtgcggcatttcgttgaattttgtcggcagccaagcaaacgtggtatagagagaggcatcgattgcgaagcatctttggatgagccgatagataaaaaagaaggagcttttgttgaatcttag

SEQ ID NO: 19126 - DNA, 462 bp, Chlamydia trachomatis
atgagtgaaaagcctgtattaggaatccaagatatacaaaatttgcttccacaccgatatcccttcctattagtggataaaattctttcttatgatttaaatacccgttcgatagtggcccagaaaaatgtaaccattaacgaaccttttttcgtaggacatttccctgaggcacctatcatgcctggagttttgatattagaagctctggcccaagctgctggtgtgttgctaggaattatattggaaaatgatcgagataaaaagatcgcattattcttaggtatccagaaggcaaaatttcgtcagcccgtcaagcctggggatgtattgatcttgaaagcagaattctcgttgatatcagctaaaggagggaaggctatagcacaagcttttgtcggttctcagattgtagctgaaggagagcttagctttgttcttgttaaaaaagagtctatataa

SEQ ID NO: 19127 - DNA, 876 bp, Chlamydia trachomatis
ttgtcaaggttttgcatgttaggtcgagctcagagaacgttaaagcgtaaggtatgctattccggggtgggagtgcattttggaaagccagcgatgcttactcttgagccagcagaagagaatactggagtggttttctcgcgtcatgcagcttctggacagtatattcccgctcgattggctaacgtttgtgggacagggcgtagcactacattgtcttcacaaggtggtgttgtatccactgtagaacatttgttagcagcgctgtactcttgtggtgtagataatgtacgcatccattgcagcgaagacgaaattcccataggcgatgggagctcccaagtgttcgtagacctcatagaccaagcaggagttgaagaacaggggcaaacggttcctatagcgagacttactcaccctgtctattaccagcatcaggatacaattttagcagcattcccttcggaggaatttaagatttcttataccctgcactattcgcataactctgcgataggcacgcaatatcgttcccaggtgatttccgaagaatcttttcgtaaagaaattgctccctgtaggacattcgctctatacaatgaactctgctttcttatggaaaggggacttattggtggaggttgtttaggtaatgctgtgttatttaaagatgatagtgtcattagtttgggcaagctacgtttccctgatgagcctgttcgccataaaatgttagatctaataggagatttatctctaattgggaaaccttttttagcacacattatagctgtggggtcagggcattcttctaatattgccttagggaataaaattttagaggcgttgcagtatgaacaggagttagtaaaatga

SEQ ID NO: 19128 - DNA, 1629 bp, Chlamydia trachomatis
gtgtttaagagtgttttgtatattggcctttcctgggttctagtctgttttgctcagcctgatatcagcactttagcttctgtgatatgctgcatgtgtggatatggattgctttggcgggggcttctttctttagtagatagctcgtcctggaggaagatctggtgtctagcctttttttggacttggtccgttgaaggttttcatttttcatggatgcttgaagatttttatgtagggacaagtatctacttcgtttggtgcctacttatttcttatcttgcagttactttcgcaagtttttcttgtcttgtcgtactctgtttccgcaagcaatattggggggctctgttttggctccccggagtttgggtagctatagagtctgtgcgctattatgggttgctttcgggagtttcttttgatttcattggctggcctcttgcagcaacagcttatggaaggcaatttggaagcttttttggatgggcggggcagagctttgtagtcattgctaccaatttaggatgctgttcggtattagtctttagaaaatctttttcttacggattatggctggtatgctgtgctttcccttattttttaggaggaacttattacgaatatgtaagaaggcatttttctaatgaggaggttcttcgagttgctattgtgcaaccggggtacagtccccatatgcaaggagcaaggaccgctagtgctatttggagtaatctagtttctttatgccaaggtatttgtcctcccgtagatgtcattgttttccctgaggtcagcgttccttttggtttgcataggcaagcatattctttccatgaaaatcaacaagttttagagagtctggttcctaataaattttggaacgagttttttacaaacctagattggattcgtgcactatcagaacgttttcaatgtgctgttatcatggggatggaaagatgggaagataaaaatggggttatgcacttgtacaatgctgctgaatgtttgtctttgcaaggggaagttaccagctatgataagcgcattcttgtgcctggaggggaatatattcccggaggtaagtttggtttttctttatgcaaagccttttttcctgagtttgcgctcccttttcaacggcttcccggggaaaaatctgggattgtacagatcacagagcgaataaaagctgggatctctatctgttatgaagagacttttggttatgcaattctcccatataaaaggcagaaagcggatattttagtgaatcttactaatgatgggtggtacccacattcacggctccctctagtccatttttatcatggtgttttacgtaaccaagaactaggaatgccttgtattcgagcttgtcacacaggggtgtctgcggcagtagattctttaggaagaattgttggagtgctcccttgggagtcaaaaacttgccctgtttgtccagatgttcttcaggtctctgttcctgtttacagttatcctactatatatgcaaagttcggagatgcgccgttattattcgtggcagtaagttccgttttaggagtagtaggttattttttaaagagacggggaaagaccctaacagggagtgacatttga

SEQ ID NO: 19129 - DNA, 480 bp, Chlamydia trachomatis
gtgaggaagaatattaaagataaaaagaaaacagtttctgccagttgtataaacgatcacatctataaaatatttcctaacgacttgaatacaaataatactatctttggcggattactcatgagtttattggatcggttagctttagtggttgccgaacgtcattgtgaaagtatttgtgtaacagctcttgtagatgctgtgcgtttttatgctcccgcttacatgggagaaaatctcatttgctgtgcttctgtgaatcgctcttggcgaacttctttagaagttggagtaaaagtttgggcggaaaatatttataaacaggaacagcgacatatcacttctgcgtattttacatttgttgcggtagacgaaaataattctcctgtggaaattccagagctagtccctgaaacccaagaagaaattcggcgtttccatgaagctgaccagagaagagcttcccgattgaaactgtga

SEQ ID NO: 19130 - DNA, 753 bp, Chlamydia trachomatis
gtggtattgttgaaagatatagagttcgtttgtttggattgtgaaacgacaggattggatgtaaaaaaagatcgagttattgaatttgctgcgattcggtttacattcgatgaagtaattgattctgtggagtttcttattcatccagagcgtgctgtttcagcggagtctcaaaagattcataagatttctgatgccatgttaaaagacaaaccgaaatttagtgaggtattctctacaatcaagggtttctttaaggaacgggattatattgttgggcaccatgtagggtttgatttacaagtgctttcgcaagaaagtgagcgtttgggagagactcttcttccgaagcagcattatgtgattgatactttgcgtttggcgaaagaatatggcgatagccctaataattctttagaagccctagcgaggcatttcaatgttcctcatcaagggaatcaccgagcaatgaaagatgtggaaatgaatgttaaggtgtttaaacacttaacaaaaagattccgtactttgtcccaagtaacacatattctgtctaaacctattaaaatgaaatatatgccattagggaagtataaaggacggttgttcacagatattccgctagaatatctattatgggcttcaaaaatggactttgatcaggaccttttattttctattcgtagcgagatcaaatctcggaaaaagggcacagggtttactcaagcaaataatccttttttaggattgtag

SEQ ID NO: 19131 - DNA, 456 bp, Chlamydia trachomatis
atgcgcatagttcttcataatccggatattcctcaaaatacagggaatattggtagaacgtgtgtagctttgggggccgagctaatattagttcggcccttgggtttttctttagcggataagtttgtaaagagagctgggatggattattgggatcggctttctttgtctgtagttgattctttagaagaggctcttaggggaatccccagagaaaaaattttctgtttaactacaaaaggctcttcctactatggagaacgagagcttccactagatggcacttacatttttggggcagaatcaagaggtttaccacaaacagttctggatgcctattcatctcagtgcttgtatattcctatgattgaagggacgcgatctttaaatttagctacttctgtagggattgttatgtatgaagtggctcgacaaaattatcagaatttattttga

SEQ ID NO: 19132 - DNA, 1749 bp, Chlamydia trachomatis
atgaagtacagaacgcataaatgtaatgagttgtcccttaatcatgttggggaacatgttcgtttgtctgggtgggtgcatcgttaccgtaaccatggtggagttgtttttattgatttgagagaccgatttgggattacacagatcgtctgtcgtcaggaagagaacccagaacttcatcggcttatggatcaagtccggtctgaatgggtgctttgtgtagaaggtcttgtttgcgctcgtttaggaggaatggaaaatcccaatttggttacaggaagtattgaagttgaggtttctcatttagaggtgttgtctcgagctcaaaatttgccattttccatttctgatgagcatattaatgtaaatgaagagctacgattgacttatcgctatcttgatatgcggcgaggggatattgtggacagattgatgtgtcggcataaagttatgttggcttgcagacaatatctagatgaacaaggttttactgaggttgttacccctgttttagggaaatctactcctgaaggagctcgggattacttagtgccttcgcggatatatccagggaatttctatgctcttccacaatctccacagctatttaaacagattttgatggttggagggttagatcgttatttccagatagcaacttgtttccgtgatgaagatttacgtgcggatcgtcaacctgagttttcgcaaattgatatggaaatgagctttggaggaccggaagatctctttccaatagtagaggaattggtcacgcgtttatttgctgtgaaagggattgagttatccattcctttccaaagaatgacgtatcaagaagcaaaagagttttacgggacagataaaccagatttacgctttggtttgcgtcttaaaaattgttgcgaatacgccaaaaaattctccttttccattttcttagatcagttggcacaaggaggaacagttaaaggattttgtgtccctggtggcgctgatatctcaagaaaacagttggatgtctatactgattttgtgaagcgttatggagccatgggattagtgtggattaaaaaccaggatggggggatttcttcgaatgtagcgaaatttgcttcagaagaggttttccatgaaatgttcgaagcttttgaggccaaagatcaagatattttattattgatagcagctccagaggctattgcgaaccagtcattggatcatttacgcagattaatcgcaaaagagcggcagctttatgatgcagaacaatacaattttgtgtggattacagacttccctctttttgctaaggaagaaggcgagctgtgctcagagcatcatccattcacagctccattagaagaggatattcctctgttggataaggatcctctgtccgttcgctcatcaagctatgatttggtgctgaatggatatgaaatagcttccggttctcagcgtatacataatccggatttgcaaaataaaatattttctttattaaggctgtcgcaagaaagtgtgaaagaaaagttcggattttttatcgatgcattaagttttgggacgccgcctcatttagggattgctttaggattggaccgcattatgatggttcttacaggggcagaaactattcgagaggttattgcgtttcctaagacgcagaaagctggagatttaatgatgtcggcaccttcagaaattttgccgatacaattaaaagaattggggctgaaactgtaa

SEQ ID NO: 19133 - DNA, 1287 bp, Chlamydia trachomatis
atgagtaacgtattgccgaaaggcgttttcgatattttcccctatgtaacaaattcaaagaatctttggagaaattcttttctatggaaaacggttgaacatgctgctcaccgtatatgtaatttgtatgggtttgatgagattcgcacgccagtttttgaaaagacggagactttcttacgtgttggtgagcacagcgacattgtaaaaaaggaagtttatacttttttggataaaaaggggcgctctttaaccttgcgtccagaaggaactgcagccgttgttcgagctttgctggatcattctgctgatatgcgtaaagacaataaaatttattatattttgccaatgtttcgttatgaacggcagcaatctgggcgttaccggcagcaccatcagtttgggttagaggctattggtgtgcggcatcctttgcgagatgctgaagttttgtctttactgtgggatttttatgcggcagttgggcttaagcatatgcagatccaagtaaattttttagggggccggaagacccgggctcgttatgatgaggcattgcgagagtttttccgtaaagatttagacaaattatctacgctaagccaagaacggttccatgcgaatttgttgcgcattttagattctaaagagccagaagaccaagcctttattgaacaggctccttctattctagattacgttgatgatcaagatttgaattattttgattcggtgttagctgagttaaaggttttggggatcccttataaaattaatccacggttggttcgcggattagattattacaccgatctagtgtttgaagctgtaactgttgttggtgaccattcctatgcgctaggaggtgggggacgttatgatgagttagtggcacaatccggtggccccgcaatgcctgcttttggtttcggagtggggttagaaagggtaattcaaactttattagaacaaggagctgctttgccaacagctccacgtcgattgcgattgattcctatggatgagagtgcggatgctttttgtttttcttgggcgaagcatttgcgtcatttaggtgttgcaacggaagtagattgggctcataagaaaccaaaaacagcacttaaagatgctgctgatcaacaggtgggctttgtttgctttgtaggcgagcaagagctgtctacgaaacagtttatagttaaagatatgtctctacatcaaagcttttcaggggctcaacaagatgtagaacaaaggttggtttatgaagtacagaacgcataa

SEQ ID NO: 19134 - DNA, 3714 bp, Chlamydia trachomatis
ttgacctggattcctttacattgtcactctcaatactccattctggatgcaacgtgctcaatcaaaaagtttgttgctaaagctgtggagtatcacattcccgcgctcgctcttaccgatcacgggaatttgtttggagcagtcgatttttataaaacctgtaaacaaaacgctattaaacctatcattggctgcgaactatacgtcgctccttcttctcgatttgataaaaagaaagaaagaaaaagccaggtggccaatcaccttatcctactctgcaaagatgaagagggataccgcaacctttgcttactttcctctttagcttacactgaaggcttctactatttccctcgcattgatagagaacttttgaagcagcattcaaagggattgatctgtttatcagcctgtctgtcggggtctattgctcaagcagcattggaatctgaagaagctttagagaaagatcttttatggtatcaagatcttttccaagaagatttttttagtgaagtgcagcttcacaaatcttcggaagaaaaaattgcactttttgaagaagagtggttaaggcaaaactactaccaattcattgaaaaacaactcaaagttaaagatgcggttttaacagtatctaaacgtcttggaatttcttcggttgccaccaatgatatccactatttggatccagacgattggcttgcacatgaaattttgctaaacgtgcaatccagagaacctattcgaacagcgaaacaaaatacttacgttcccaatcctaaacggaaaacgtatcccagtagggaattttatttcaaatctccccaggagatggccgaactattcgcagaccatccagaaactatttccaatactttgatcgttgctgatcgttgtaacttggaactcgactttgttactaaacattatcctatttacgtcccagaagatttacaaaaaaaaggctcctactctgaagaagaacgctataacgcatcttctgcttttttagaacaactgtgcgagcaagggctcaaaaccaaatacactccagaacttttaggacatatcgcacaaaaattcccagagaaagaccctcttacggtagttaaagaacgactcagtctagaatcaactatcattatatccaaagggatgtgcgactatttgcttatagtttgggatattattaattgggcgaaagaccatggaatccccgtcggcccaggccgaggctctggagctggttccgttatgctctttctcttagggataaccgaaatcgaacccattcgctttgatctcttcttcgaacgattcattaaccccgaacgattatcctatccagatatcgatatcgatatctgtatgattggacgagaaaaagtcattaactatgcgatagagcgtcatgggaaagaaaatgtggcccaaattattacatttggcaccatgaaagctaaaatggctatcaaagatgttggaagaactctagatactcccctatctaaagtgaatctcattgctaagaaaattccagatctcaatgctaccattgcttccgcattagagtctgatcctgatttacggcaactctatatagacgatgcggaagcagcagaaatcattgatatggcgaaaaagctagagggctctatccgcaataccggagtacatgctgcgggagtcatcatctgtggggatccactcaccaatcatattccgatttgcgtgcctaaagactcttcgatgatttctacgcagtattctatgaagcctgtcgaaagtgttggcatgcttaaagtggattttttaggtttaaaaaccctaacaagtattcacgttgctacaaaagcgatctacaaaaaaaccggcattttactacaagctgcaacccttccgttaaacgaccgcaatacattttctctccttcatcaaggaaaaaccatgggaatcttccaaatggaatctcgtgggatgcaggaacttgctaaaaacttacgccctgatgcttttgaagaaatcatagctattggggctctctatcgccccggacctatggatatgattccatcatttatcaataggaaacatgggaaagaaaatattgagtacgaccaccccttaatggagcctatcctgaaagaaacttttgggattatggtttaccaagagcaagtcatgcaaattgcaggatcattagcaaaatactccctaggagaaggggatgttttacgtcgagccatggggaaaaaagaccacgaacaaatggtcaaagaacgtgaaaaattttgctcaagagcatccgccaatggcattgatccttccatagccacgactattttcgataaaatggaaaaatttgcgtcctatggatttaacaaatctcatgccgctgcttatgggctcataacctacacaacagcctatcttaaagcaaattatccaaaagaatggctcgcagctcttcttacctgcgattacgatgacattgagaaagttgggaaactcattcaagaagctcatagcatgaatattcccgtccttccccctgacattaatgagtccggccaagacttcgaagcaacacaagaaggcattcgtttttcactaggagctgtcaaaggcgtaggcgtgagcattgtggacagcatcgttgaggagcgagaaaaaaatggcccttatcgaagtttgcaggattttgtacaacgatctgattttaaaaaagttaccaaaaaacagcttgaatccctagtcgatgcaggaagttttaattgctttgaacctaataaggacctagctatagctatacttaatgatctgtatgatactttctccagagagaaaaaagaagctgcaacaggagttctcaccttcttctctcttaatagcatgactaaagatcctgtcaaagtaactatctctcccgaaaatattgttcgacgttcagacaaagaattattaaaacgagaaaaagaattacttggagtctatttaactgctcatcctatggacgcagttaagcacttacttccatttttatctgtagttcagtcaaaagattttgaaggactaccacatggatctgttgttcgaactgtctttttaattgataaagtcacaactaagatttcctctgtagaacacaaaaaatttgcgcttctacaagttagtgatgaagaagattcctatgaacttccgatttggtctgatatgtatgcagaataccaggatctattggaagaagaccgtcttatctatgcaattttaactatagatcgacgtagtgattccctccggctctcctgccgctggatgagggacttatcctctgttaatgatacagtcataacagaatgcgatgaggtttatgatagactcaaaaatcaaaaaatatactcttcaacaaaaaaatcaactggagggcaatcgcaagcaatggtgaaaaaagaagaacctaaggcgatcccgccagtaaccatctctttagatttaaatagactacgtcacagccacttattcactctaaaaggacttatacgtaagtactcgggatcacgcgcgctctctcttgtgttcacaaaagataaccaacggattgcctcaatttctccggattccgatttttttgttacagaagatatctcagccttccttcaagaaattgaaacaacagacatccctgctcgtattctagctactgctgtataa

SEQ ID NO: 19135 - DNA, 912 bp, Chlamydia trachomatis
ttgcacatcataatgaaaactattctcgctactttatgcctaatcttatgcgcttcctgctgttcaaaaggagcttgcgaaactcgcatcaaacacactttttcagaaaaaaaatttcaaaaatactctcccgttcctaaacaccctttgtctgagcaaacccacctgtatgctaaatcgtgttctatagaactagaacagacgcaacttcctacaagtaccctcacacgttacgtctcttcgacccctactgattctttgtcttctaaacctttagcagcagtctatgtactaagccaccctctgatacagcataaagcttcgcttcttcggaataaaaacacgaagtctaaaatattccgtgaatgcctaaaagaaatctctttaggcgtttgctatgaagcaacccgcgatctcgcccttaaaaatatctctattcaaacccccttaatgcaagcagaatgccctcatcttactgggactaaaattgttgttattccagtattaagagctggactcggaatggtggatggattccttgctctggttcctaatgctaaagtaggacttattggcatgagtcgaaatcacgagacattccaaccctcttcctactgttgcaaactacctgaagacattgctgactgccacgtgtttatcgttgatcccatgttagcaactggtggatcggcttcagcaactattcaactagtgaaggaacatggcgctaaaaacattactctactcaatgttttagcagtgcccgaaggaatcgaacgcattcaaaaagatcaccctgatgtaactatctatgtagcctctctcgatgaaaaattgaatgaatccgcttatattcttcctggattaggtgatgccggagatcgtctctgtgggacatccaatccatcctaa

SEQ ID NO: 19136 - DNA, 1107 bp, Chlamydia trachomatis
atgatcccctttcgccttcaccatctttacaccttactagatagtttgttctcttctcctattggagaaagcaacagggtggcagcatacttcaaagaacaccccgcccttggctctaaagatcgtcaatggataaactctcgtattttcactattctacgtcaccgacgtttactagaaaccttgattctagaagagggtaaagagatctcttcacaaacattagtagaaaaagtagaggaaggcgtaactgaaaatattgaacactttcaacacctcccttgggccgtccgctactctgtatctgatgatttagcagaatgtttgtccgcggattacggtgaagaagaagcgatccgcttagctaaaatttttttggaagaagcgccctgttccattcgcgtaaatacaagacgtatttccgtagataaacttcaagaagtcttgcctttctctagccaaagaggcgcagccccttcctctttacgttttgacaagcgctatcctttacaacatacgcgagcattccgtagaggactttttgaaattcaagacgaatcttctcaaattattaccaatgccattcttgttaaagattccgatactgttttagatttttgtgctggagctggagggaagagcctgatttttgcccagagagctcaacacgtaactctgcatgatagccgaccacaagcattagaagaagctcgccaacgcctatctcgttcgggaataaaaaattttactattgcttcccttcctcttaaacaacatggtttctctttagttgtggtagatgctccttgtacaggaagcggagtcttccgacgccatccagaaaaaaaattactcttctcaaaacaactccttaagaataattccgttgctcagggaaaaattttaaaacaagcgcaaacctacgtagctcctcgcggacgattagtttatatcacctgctctcttctaaaagaagagaatgaaaaacataccttacaaatggaagctctaggctggaaatgtattaaagaagtaaagatcccactcatttcccaacaaggggatgcctttttctccacgcactttatccgaagacgggacttctag

SEQ ID NO: 19137 - DNA, 1242 bp, Chlamydia trachomatis
ttgatcatgcataagaaaacacaatcaccttctcaagaaggcttttccgtttggtctattggaggctctatttttgctatgttctttggagcaggcaatgttgtcttccctttggccttgggacaccatttctatcatcatacctcttacgcttgtttaggcatgatgctgacagccgtattgacgcctttgttagggctctttgcgatgatgctatactccggggactaccgttctttcttctcttccattggtagaatgcctggtatgatcgtgatggtggctattctatgcattattggaccttttggaggagtccctagaaccattgctgtatcttacgatacgttggcttcgttaggtaacactcaatctacgctgttaccctctttaccgtggttcagcctagtattttgtgtactcgtctatctttttgtatgtaagcttagcaaactcattcaatggttaggatccgtctttttccctgtcatgcttgcgactttagcttggctaattattaaaggcttgtcgataccaagtcacgcgccatccttagaaaacgagcctttctctaagcaacaagcctttgttgcaggactaacggaaggatttaacacgatggacctgctggcagcgtttttcttctgctctatcgttcttgtgtccattcaacaatttgttgttcagcaagatcacaagtcttctgaagaaaaacccttagaatttcaccatattggtaaggctgaaaaatacaaattagggatgagcttccttctagcagcagctcttcttagccttgtctatctaggctttgcatactgcgcagctcgtcatgcgggcgctcttgtaaatattcaacgaggacaaattttaggtagaatttcagccattattttcggccctaatagtttcttaacggggatatgcgtctttctagcttgcttaaccacagcaatcgcagcgacaggaatttttgcagacttcattgcaagggtagtatcctcacaaaaaatgagctactccaacgcgataatagttactttagttccctcatacttagtatctattctaagttttgagaacattagtaagatcctccttcctatcttagaagtgagttatcccgcactcatcgctttaacttgtggcgtcatagcgaaaaaactttgggggttccgtcaggcaaaaactttattttaccttgtttttgtgttgactctactctataaactatccgtttaa

SEQ ID NO: 19138 - DNA, 480 bp, Chlamydia trachomatis
atgccatttgcaaaagaagcagatctacagcgcacgtgttggaagtgcgaaggcagcgtatccgcttgcatgccccaatgtccctactgcagcgcttttcttcaggatccgcctgtaacgaacaaagggttctcctcttgccatattactttcccttccgaagcttctcaaaaaagtggcgatagtgatctttttgctgtttcttcggaagattgggaagctgtgctcaacagtcaggactcattcgaaactcctgtccaagaacctacctcttctcaatgggaatggctccagtattggccaaccgcggctcttttcttaggctgcggattccttgctttttctctgattattctcttgttttctacagattctggtctcgttctttgttggccaaaaaatcgctcgtatatttatgcactagttggttcttttctggcttatcgaggatatcgctcgcttcccgacagttcaaaataa

SEQ ID NO: 19139 - DNA, 1398 bp, Chlamydia trachomatis
atgaatgaagctttcgactgtgtagtgattggagcagggcctggaggctatgttgccgccattactgccgcccaagcaggattaaaaactgcgctaatcgaagagcgggaagctggaggaacctgtttaaaccggggatgcattccttctaaagctctacttgcatcggcagaaattgttgcccaaatacgccatgctgaccaatttggcattcatattaatggtttcagcattgactatcccgctatggtacaaagaaaggatactgttgttcgcagtattcgtgatgggcttaatggcttgattcgtagcaacaaaatcactgtgttttctggaagaggttccttaatttcttcaacagaagtaaaaattttgggggaaactccttctgtaatcaaagcacaatccattatcctggctacaggatctgaacctagagcctttcctggggtccctttttcccaacaatctcctagaatcttatgctcgacaggagttcttaacctaaaagaaatccctcaaaaaatggctattatcggaggtggggtcattggatgtgaattcgcttccttattccataccctaggatcagaagtttccgtcatcgaagcaagccaacaaattctagccctgaataatccagatatttcgaaaaccatgttcgataagttcacgcgtcatggcattcgctttatgttaggagcgtctgtgtcgagcattgaggatatgggtgatcgcgttcgactaactattaacggaaatattgaagaatacgattacgttctcgtatccataggacgtcgattgaatacagaaaatattggattagataaagccggtgtgatttgtgacgaacgcggagtcatccctacagattccactatgcgcactaacgttcctaatatttatgctattggagatatcacagggaaatggcaacttgcccatgtggcctcccaccagggaattgttgctgctcgaaatatagctggacataaggatgaaatcgattattctgcagtcccttccgtaatttttactttcccggaagttgcatccgtgggactttctccgacatcagctcaacaacaaggaattcctgtcaaagtaacgaaattcccattccgagccattgggaaagccgttgctatgggcgaatccgacggatttgctgccattatcagccatgaaacttctcagcaaattctaggtgcttacgttattggccctcacgcctcttctcttatttccgaaatcaccttagctattcgcaatgagctgaccctcccctgcatttatgaaaccatccatgcacatccaaccttagcagaagtttgggcagaaagtgcactattggccgttgataccccgttacatatgccccctactagaaaatga

SEQ ID NO: 19140 - DNA, 927 bp, Chlamydia trachomatis
atgagtaattccccagaatcctcaactcccaagcagtccatcccagcacgattccccaaatggttgcgacaaaaacttcctctagggaaagtattttctcgaactgatggcactataaaaaataaggggctccccactgtttgtgaagaagcctcttgtcccaatcgcacgcattgttggtccagacataccgctacataccttgcattgggtgatgcatgtacacgtcgctgtggcttttgtgatattgatttcactaaaaaacctcttcccccagatcctcaagaaggagagaaaatcgctgcttccgcaaaagcattgggcctaaaacatatcgtgatcaccatggtttctcgcgatgatttggaggatggcggagcagatgctctagctcgtatcattacaaccttacatatagaacttccagaagctactattgaagttctagcctctgattttgaagggaacattgatgctttacaccatctacttgatgcacgtattgccatctataaccataatgtagaaactgtagaacgactatctccccttgttcgtcataaagcaacctaccgacggtctctgatgatgttagagcaggctgcacaatacctcccagaccttatgattaagtctggtataatggtaggattaggagaacaggaaagcgaaatcaagcaaacgttaaaagatcttgcagatcatggcgttaagatagttactataggacaataccttcgtccttcgcgaagacatattcctgtgaaaagctatgtttctccagaaacatttgattattatcgatccgtaggggaggctttgggtcttttcatttatgcaggacctttcgttcgttctagctttaatgcagatgctgtttttgaagctatgagtcaacgagagcgcctgtccgcttctatacaatag

SEQ ID NO: 19141 - DNA, 1731 bp, Chlamydia trachomatis
gtgtcattgtcctcttctcggattcggttgttagatagtgcaacagttaaccagattgctgctggtgaagttatagaaaatgcggcttctgtggttaaggaattgatagagaacgcattggatgctggtgcggatgaaattagtattgaaacccttggtggtggtaaggggcagattgtcgttcgagacaatggaataggcatggatgcagatgaggtggccgtagctatccagcgtcatgcaacatcgaaaatttctcattttgctgacattttttctcttgcaagtttcggctttcgaggggaggctttaccagccatagcctctatttctaagatggaaattcatacagctaaagtaaatggattgggatctaagactttgatcgaaaagggggagccagtttgttgcgaagcatgtcctagacagccaggaactaccatttcagtaaattcccttttctataacgttcctatgaggcagtcttttcaaaaatctccgcaaatggatcggttagctattcgtcgattactagaaaatagcattctatctacagaaggaattaaatggacttggattagtgagcggcgtcaagagttaaatattgctaaaaatcaaggttttacagaacgcgtggctttggtgatgggggaagcttttgttaacgaggcattccttattgataaacgacagaatgagctccatttaacaggatttttaggatctccgagtatgcatcggtccacaagacagggccagcggttatttatcaataaccgtgctgtggaatcttctttcatatccagaaaggtagcagaagcctatgcttggatgctcccagcacagcggtatcctgcgtttgtgttaaaactctccgtcccccctatgtggtgtgattttaatgtgcatcctcaaaaaacagaggttcgattattacaagaaggacaaataggggctcttcttgtagaggcgatctccgaagtattattacatcgatctccgtctttagaagagaagatggtagagcctactatggagagccctttaatcgagaatggaggattagaaatcccatcgattcgacctgtagcaatctctacgccgctctcttgcccaaattttctccaacagtcttttgtggaaacagaagcaaatagggctttatgtaaagagcaagaaaaccttgctctccctattattgagagggtgcgttttcttgcttctttaggaaaagtgatcttagtagaagattccgaaggggtgcatgccttatttgtacaggctgctcgtaagcacttattttatatttctttattatctaaacgttcggattctcttttagcttgtcagatgtttcttgtccctccaactgtacaaatgactaagttggaagccgattttttacagactcgactggaatcactcgctgcacagggaatagaactatgccgcattagtccggatagttttgcaatagaaagtgcgcctccttttattcaagaagaggaattaaaagagtggattatttctttagctcatgagggagcttttcaggtgaatgagtcttttgaacagcttgttgaaaatactgttcagaaattggctttttctaaaaatacgcgagccttcgatcattcttggatcaatgtattatggcaaataggaaaacctgaaaaagcatttgacggggagacaatacgtcggttagttttggaggaggactttatgtag

SEQ ID NO: 19142 - DNA, 741 bp, Chlamydia trachomatis
ttgttagtagaagttgttattttttattttttaggaattatcgcgatgagcactccatcttctaataattctaaaaaaccttcggcctcttttaataaaaaatcacgtagccgcttggccgagattgctgcacaaaaaaaggctaaagctgaagatttagagcagaaatatcctgttcctacggaagaggaaacaaaaaaagttttactagaaattttgcaagggttaggtgatgggttaactcttcagcaaatcttggggctttctgacgttcttctcgaagagatctacacggtagcctataccttctattctcaaggaaaatatcgggaagcgattggccttttccaaattttaaccgcttctaagcctcagtgctacaaatacatcttggggctaagctcttgctatcatcagctaaaaatgtacgatgaagcagcttttggattcttccttgctttcgatgcacaaccagaaaaccccatcccaccatactacattgcagacagtttaatgcagttggatcaacccgaagaatctcagaatttcctcgatatcactatcgacatgtgcaagaacaaaccagagtacaaagtcctcaaagagcgctgcagcattatgaagcaatctttagatgctatgttgaaaaaagaaaaacgcgcatcagcaaaaagctccgaatccaaaacctctactacaaaagcaaagaaatcatctcctaacaagaaaaaagcaaaataa

SEQ ID NO: 19143 - DNA, 1311 bp, Chlamydia trachomatis
atgacaacaggagtacgtggagataatactccagatccctcattgttagctcaactcacccaaaatgctaactcagcatccgcatcagataaaaatggtgctgcagccaaaactcaacaacaagaagaagcaagttttgaggacttaattcaggactcccaaggaactggaaagagtaagaaggcttccactagtcaaacatcaaaaagtgggaaaagcgaaaaagcacaaaaaagtagtgggacaacaacaacaacatctgttgctcaggctagccaaacagcaaccgctcaagccgtaagaggagcaagaagctccggatttaataatgatggctccgcctctcttccttctccatccaaccccaatgttaatggcgttgttttgaaaaagaatatgggaacgctagcgcttatgggattaattatgaccctactagcccaagcaagcgccaaaagctggtcttcttctttccaacaacaaaaccaagccatccaaaaccaagtagctatggcaccagaaatcgggaatgctattcgaacacaagcaaaccaccaagccgccgctacagaattacaggctaaacaaagcctaatttctgggattacaaatatagtaggctttgctgtttcagtaggaggaggaattttatctgcatcaaaaagtttgggcggattaaaatctgcagcctttaccaatgaaaccgcaacagcagcaagttctgcaacgagtgccgcagcaaaaacagctgtcaatgctcttgatgacgtagcaaacgtagccgctactgctggaactaaagcagcctctggagctgcttctgcagcttcatctgcagccacaaaactgactcaaaatatgacggatacggcttcaaaaacactttctcaaacggcaagtaaagctactggagggttgttcggaaacgcattaaataccccaaattggtctgaaaagatatctcgaggccttaacgttgtaaaaacacaaggaggtcgtgcagcgcaatttgcaggacgagccctctcttctgccatgagcatctcacaaatggtccacggtctaacagctggtgttgatgggattacaggaggaattattggggctcaagtggcaaatgaacaaagagcggcagggatggccgaagctcgcgctgaagaacttaagtccctaaactcagtccaatcgcaatatgcatcccaagcacaacaacttcaagagcagtctcaacaaagcttcaactctgctctgcaaactttgcaaagtatcgcggactcctcactacaaacaacaggagctatgttcaactaa

SEQ ID NO: 19144 - DNA, 1908 bp, Chlamydia trachomatis
atgatccacgtaacttgtaatcaagaagctttcgaactaccagaaggcgcctcagcgatggatcttgcaagcaagatgaaaaactctcattgctttgcaggggcccttattaacgaccaagaaaaggatctttccaccaccttaaaagacggagataccgttctctttctcacttgggatgacccacaaggtcgagaaatctttttacatacttccgcacatatcttagcccaagcagtactacgcttatggccttcagcacaacccacaataggtccggttattgatcaggggttctattacgattttgcaaacctttctatcagcgaagaagattttcctgctatagaagctatggccaaagccatcgcggaagaaaaattggcgatctcacgtcaagttttctcggataaagaggagactctcgcctatttttctgataatccatttaaaatcgaactcatcacggaacttccggaagaagccacgatttccgcttataaacagggagagtttttagacttatgtcgcggcccccatctcccttcaacagctcccgtgaaggcttttaaactgttacgtacatccgcagcctattggagaggagatccttctaaagaatctctaatccgaatatacggaatcgccttcccgacaactaaggagctaaaagaacacctccaccagttggaagaggcaaaaaaacgtgatcaccgtgtactcgggactaaattagatctgttctcacaacaatcctactctgcagggatgccttttttccatcctcgaggaatggtaatttggaacgctttaatcgattattggaaacggcttcatcaacttgctggctatcaacaaatccaaacccctcaacttatgagtagggagttatgggagatttccggccactgggaaaattataaagaaaacatgtacaccttaacagtggatgaagaagattacgcaatcaaacccatgaactgccctggatgtatgttgtattacaagacacaactacatagttaccgggagttcccgctgcgcattgcagaaatcggccatgtgcacagacacgagctatccggagctctatctgggctgatgcgagtacgtacattccatcaagatgatgcccatgtatttttaactcctgaacaagtggaagaagaaactctgaatatccttaatcttgtttccgaactatatggaacctttgggttagactatcacttagaactttccactcgacctgaacaaggaacaatcggaagcgatgatctttgggaactggcaacagaagctttgaagaacgctctggtcaaatcacaaaaaccctttattattagtcctggggaaggcgccttttacggtccaaaaattgatattcatgtgaaagatgccattaatagaacttggcagtgcggcactattcaattggatatgtttctcccagaacgattcgatctgaaatatacgaaccctcaaggggagaaaagcactcctattatgcttcatagagctttatttggatctatagaacgctttttaggtattctgatcgaacactttaaagggcgcttccctctgtggctaagtccagagcacgtacgtatcattactgtagcagatcgccatgaagctcgtgctcaagaattagcaaaatatttcactcaacagggaattcttgccacagtggatcaagcgagtgaatctgtcagtaaaaaaattcgcaatgctcaaaacatgcaagtaaactatatgattactattggcgacaaagagctagaaacccaactactggcggtacgcacacgagacaatcgtgtgttaaatgacatttctgtcgaacatttcactaatacaattcttgaagagcttcgttctttatctttaacctcttcgttgtaa

SEQ ID NO: 19145 - DNA, 768 bp, Chlamydia trachomatis
atgaaaacaatcgctgttaacagttttaaaggcggcacagcaaaaacctctacaacccttcatttgggagctgctctagcccaatatcataaagctcgcgtccttctcattgatttcgatgctcaagcgaatcttacagcaggattgggtctggatcctgattgttatgatagccttgctgttgtcctgcaaggagaaaaacaaataagtgaggtcattcgttctattgactcttcagggctggatctcatccctgccgacacttggctggaacgtgttgaagtctcaggatctctagcagctgatcgctattcacacgagcgattaaaaacgattctttccacaatagaacaccaatatgactacgtcattattgatacccctccctccctatgttggctcaccgagtctgctctaatcgccgctcaacatgcgcttatctgcgccacaccagaattttatagcgtcaaaggtctagaaagattggcaaccttcatccaagggatttcatcacgacatcctcttaatatcttaggtgtcacgctatctttttggaattacagagggaaaaataatgctgctttcacagaactgatccaaaaaacgttccctgggaagcttcttaatacacgtatacgcagggatatcaccatctcagaagccgctattcatgggaaacctgtcttctcaacagctccttcagctcgagcctcggaagactatctaaaattaactgaagaactgctatttttgttaagggacatctaa

SEQ ID NO: 19146 - DNA, 1041 bp, Chlamydia trachomatis
atgaataaaaaacgagttcttactggagatcgtcctacagggaaacttcatctggggcattggattggctctattatgaatcgcctgcagctacaaaacgatcctcgctatgattgtttcttcatcatagcagatttgcatacgctaaccactaaaacacgaaaagaagaagttcttcatatcgatagccatatttatgatgtccttgctgattggttaagcgtaggcatcgatccagaaaagtctgctatctacctgcaatcagctattcccgagatctatgaattaaatctcctcttttcgatgctgactcccttgaatcacatcatgggtattcccagcattaaagagatggctcgcaatgcttctatcaatgaagaaagtctttcccatgggcttataggttatcctgtattgcaaagcgccgacattttacttgctaaagcgcatcttgttcctgttggtaaagataacgaagctcacgtagaattgactcgtgatatcgcaaaaacattcaatcggctgtacggatccgttttcccagagcccgatatcttacaaggagagctaacctctctggtaggcacgaacggtcaaggaaagatgagtaaatccgctaataatgccatttatctttcggatgatgagaagacggtacaagaaaaaatacgaaaaatgtacacagatcctaaccgagttcatgcaacgactcccggaagagtagaaggcaatcccttatttatctaccatgatctttttaatcctcacaaagaagaggtggaagagtttaaaactcgttaccgccaaggatgcattaaagatgtggaagtaaaagcccgcttagcagaagagattaaccttttcctcaatcctttccgagaaaaacgcagcgaattcgtcgctcaacctaagattcttgaagaggctttacagaaaggtacggaaaaaatgcgatcagtagcacgggaaactatggaagaagtccataacaacctaggattaagccgcaagtggcgctctattctagcttcttctaaatga

SEQ ID NO: 19147 - DNA, 1275 bp, Chlamydia trachomatis
atgtttgatgttgtcatctccgatatagaagctagagaaattttagattcccgagggtatcctaccttgtatgttaaagtcattactaatacaggaatctttggagaagcttgtgttccttctggagcatctacaggcattaaagaagctttagaacttcgtgaccaagatcctaaacgctatcaaggaaaaggagttctacaagcagtcgctaatgtggaaaaagttctattacctgccctacaagggttcagtgtttttgatcaaatcacagcagacgctattatgatcgatgctgatggcacctctaacaaggaaaaattaggcgccaatgcgattcttggggtttctttagcattagcaaaggctgctgctgcaactttagagagacctttataccggtatttgggaggagctttctcgcatgttctcccttgcccaatgatgaacctcattaacggtggcatgcatgcaacaaatggcctccaatttcaagaatttatgatccgtcctattagcgctccttccctaacagaagctgtgcgcatgggagcagaagtttttcacactttgaaaaaaatcttacaaaatcggcaactttctacaggagtcggagatgaaggcggattcgctccccaactcgcttccaattcagaggcgcttgaccttctcttggctgctattgaaaaggctggctttatccctggagaggatatttctttagctcttgattgcgcagcttcctcgttttacaatactcaggataaaacttatgatggcaagtccgctgcagatcaagttgctgtactcacagaattatgcgatcgctatcctatagattctatcgaagatggccttgctgaggaagattttgaaggctggaagcttttatcagaaactttaggagatcgcattcaattagtaggagatgatttatttgtcacgaactctgctttgattgccgaaggaattgcgcaaggcctagctaatgccgttcttatcaaacccaatcagatagggacgcttacagaaacagcggaggctatccgcttagcaactacgcagggctatgcgaccatcctatctcacagatcaggagaaacagaagacaccacaatcgcagatcttgcggttgcctttaacacagggcaaattaaaacaggctctctctctcgttccgagcgtattgctaaatacaaccgcttgattgctattgaagaagaaataggcccagaagctgtatttcaagattccaatcctttttctaaagcataa

SEQ ID NO: 19148 - DNA, 792 bp, Chlamydia trachomatis
atggagataaccgatgcgcatgtacatctttcatccgaagaatttatagaagatttcggagaagtgtgtttaagaggtaagacagcgggagtaaccagggttgttaacgtaaccaccacaaaagcagaattattacgttcttttgcttacgcggagcaatatccttcttggcttttttatcatgtggcagggactcctcctcaggatgcacaggaagatattgaggaagattttcaagaattttgtcgagcagcggagggaggaaaacttgccgctattggggaagtcggcctagattatttattcgctgtgcaagagtctgaacaggagcggcagaaggaggtgcttcatcgttatttacaattagctttacagcatgaacttccccttgttgtgcattgtcgaggggcttttgaagatttctttcatatcttagatcatgcatatcgtgcagataaacgagctagacccggtatgttgcactgtttcactggaacgtatgaagaagcaaaagagttattggctcgcgattggtacatttccattagtggaattgtcacttttaaaaatgcgcaggggttgcgagatcttgtgaaggagattcctttagagagattattagtggaaacggatgctccttatcttgcccctacgcctcttcgtgggaagagaaatgagcctgctaatattatttataccttaatgcaaattgcagaaataaaagggatccctcttaacgaattacaggaagcggttagtgctaatgtccaaagatggttgcgaggttcttaa

SEQ ID NO: 19149 - DNA, 723 bp, Chlamydia trachomatis
atgacgaaatttaaatattcaccgtttttttgcacttctgtagctgtacatatagttcttggaggaattctatttttttcttctgctcaaaaaccgaaacctaaattacatccttttaaagaacggatcgtccacttacctccggaaccgaaaatgacttgtccaacgcaaacgccttccgctccttcttcgcaccaaacatcaacccctctacccccaccaaaaaaagtaaataatattcctcccccaacaagcaacaagccatcgaaaactccgctaactcattttcaatcaagatctccccaccctccaaccaaaccaaccccttcaagagaaaagcaacaggcaacgttaaaaaaactggctcagttagctcaccaacttgcagaagaagccgcatctcaggaaacccatatcgcgcaactctcctggccaacacaagtgcaggtctctaccgataccgaatcttgtcaacaagaagccttttgcgcgctctttcagcaatatgtttgtctgccttttccaggagaagtccgtattaaacttgaattttctaaagaaggcaggctcttaatttgctccattctatctgctattagccctactgataaacaacacattatcaagcaaattcagcaaatcccttttcaaaccttctttaatacatacaaaccctcgaaaaatatcgtttttcatattagactgcagggaaattccgcttga

SEQ ID NO: 19150 - DNA, 588 bp, Chlamydia trachomatis
atgggatcactagttggaaagcaagctccggatttttcgggcaaagcgattgtatgtggagaggagaaggagatttctctttctgatttccgtggtaaatatgtgattcttttcttttatcctaaagattttacctacgtttgcccaacagagttgcatgcttttcaagatagattaggtgattttgaagagcgtggcgcggttgtgattgggtgctcagttgatgatatagagacgcactctcgttggctagcagtagaaagaagagcgggaggaatacaagggacccaatatcctttgttagctgatgactctttagaaatatctaaggctttcggggttttgaatcctgaagggtctgttgccttaagagcgacttttttgatcgataaagatggggttattcggcacgcagttattaatgatcttcctctaggacgttcaatagaagaggagcttcgtgttttggactcgcagattttctttgagaatcatggcatggtttgcccagcaaactggcaatctggagaacgtggtatggtgccttctgaagaaggactaaaagaatatttccagacgatagattaa

SEQ ID NO: 19151 - DNA, 630 bp, Chlamydia trachomatis
atgaaaattcttatagccagttcccatggatataaggtacgcgaaaccaaagcttttctaaaaaaaataggagagtttgacatcttctctttagtggactacccctcttacacccctcctaaagagactggtgaaactccagaagaaaatgcgattcaaaaaggagtatttgctgcccaaaccttccggtgttggacaattgctgatgattctatgctaatcattcctgctttaggaggccttccagggaaactatctgcctccttttcaggagagcacgctagcgataaagatcaccgtaaaaagcttctggaggaaatgcttcttttagaaaatcctattgatcgatccgcttattttgaatgctgtgttgttctcgtctccccttttgggaagatcttcaaagctcacgcttcttgtgaaggaaccattgtctttaaagagagagggtcttctggatttggatatgatccgttattttcaaagcatgattacaaacaaacgtacgcggaacttccagaagaaatcaaaaaccaggtatcccatagagcaaaagccttagctaagttacagccctacgtagaaatggcttttgctaatcacttactcgcgaggaatgagagtctctaa

SEQ ID NO: 19152 - DNA, 1905 bp, Chlamydia trachomatis
atgcttacatccgaattaaatgcagcacaagttaccgccgtcactgcgccattacaaccagtccttgttttagctggagctggagctggaaaaactcgagtggtttcccatcgaattctttacctaatcgaagaggctcaactcgatccatcgcaaattttagcaataacattcactaacaaagctgcaaaagaattaaacgaacgagtcctaactcaatgcaactttccagactatcgaggcatacctatggtgagcacctttcatagcttaggtgtttatattcttcgccgatcaatccaactcctagatagacaatcaaattttgctatttatgatcaaagcgattctgaaaaattaatcaagcagtgcttacgtaaactcaatctcgataataaactttgcaatgcaatgcagtttactatctctcaagcaaaaaatcgtctacaagatccagaagatctagattctagagaatatccagatcctgcccgtgcagtttatactgaataccaagaacagttacgcgctgcgaatgctctggactttgatgatctcttatttttgacagaaaaattactccgcatccccgaaatccaacaggaatattccaacctctggaaagccttattaatagatgagtatcaagacactaatcatgcgcaatacctcatcgctaaacgtcttgcagcctctcacaacaatatttttgtcgttggagatccagatcaatccatatattcctggcgaggtgctaacatctctaatattttaaattttgaacaagattatccaaaggctttggtcgttcgtctggaagaaaattaccgttcctgcggaactattttagaggcagcaaatgctctcattcaaaataattctgctcgtttagataaaactttgcgtagtgtgaaaggccctggagataaaattttctgtttcacagggaaaaatgaccgcgacgaagcggaacaagtattagaagaaatttccaatcttcactcatacaaagatattcctctctctcatatctgcattttgtatcgaacaaattttcaatcgcaatcattcgaagcagctcttctcaagcgtggttatccctatgaaattataggaggcatttccttctacaaacgcaaagaaatccaagatattctcgctttcttgcgtctcttttctaacaactacgatatggccgcttttgagcgcactatcggacttaagaaatgcggtattggcgctaccaccctatcgtctctcatgagttatgcgaaaagtatggaccttcctatcctgcaagcatgctgggatgtcctagagaaaaaacccatccgtttaacaaaaaaacaacaacaggggcttttctcttatcttacgcatttccatcagatggaaaaactttatggaaactgcgatcttcatgaatttattaatgagactattcgcattacggattacctcgccattctcaaagaggacccagaaacttatgacgatagaaagaataacctagaacagttactagcagaaacacaaatatggggcaaaagcagtgagaacctcccgaactttttagaagatttagctctaaaaagttcagcagatgaaactgcaagttctcatgatcgtcttaaactcatgaccatccacaatagcaaggggttagaatttcctgtagtcttcttagttggactcgaagaaaacctactccctcatgcaaattccaaaggcatgcacgaaaatattgaagaggaacgaagattatgttacgtgggaattacccgagcacaagagtacctctacttatctcgagcaaaaacccgattcctttgggggacggaacgcaccatggtcccaagcagatttattagcgagctgcctagggctcttttaaaatttgtttaa

SEQ ID NO: 19153 - DNA, 480 bp, Chlamydia trachomatis
atgattcaagcgacaggaatcgttgctatagatcctcgaggagttatggggggggctggaaagctcccatggaactatccagaggatttgcgtttcttttcagagaccattcaggatcacccgatcattatgggtagaaagacttgggagtctcttcctgatagatataagtgtggtcgaaccgttattgttttttctcgacagcatagctgtgctcaaggtatttggatctcttccttagtagagtacgagaagttatctcttaactctccattcttaattggcggagccgagctctttgactggttttttcaatacaatcttctgaaatcttgttttgtgacgcatattaaaagagaataccagggagatacttttttccctgtggagcgtttgtcgggatggaaaagggagagtgttcttaaaacggaggattttaatatttatcattatgaaaattacgccaatcaaaacccgtaa

SEQ ID NO: 19154 - DNA, 1353 bp, Chlamydia trachomatis
gtgactacttggaattttgtgtgtttagggttgggttcgaatttggggaatcgccatgagtacattaaacgtgcttatgagagtttaaagaaggcagggataagaaatttaaaaagttccgtgattcttgagaccaaagctttgctattagaaggatctcccaaagaatgggatcttccatattttaattgcgtggctattggggaaacacagttatctccagatgagctggtcaaagagattaaaatgattgaaaataggctgagcagagactcttcattgaaatgggggcctcggtctattgacatagatgttcttctttatggagacgagagctattcttgttgtagtgaaaggtgcataattccacatcctaggttgttagaaaggcctttccttctttcaatgatggcttccttatgtccttatcgatacttccgtcttaggggatctccttatgatggcaaaacgtttgcagaacttgctgccatctacccattaacagaaaaggatgttctgggaagctttgctcccacgacccaaattatgggaattgtcaacgttaccgatgactcgatatcagatacagggctattcttggaggctaaaagagcggcagcacatgcagagcgtttgtttgcagaaggggcttccattattgatctaggagcgcaagccacaaatcctcgagtaagagatttaggcagtgtagaacaggagtgggagcgcctagaacctgttttgcagatactagcagagagctggaaagacgctaaacaatacccagatgtatcgatagatactttcagaccagaggtcattagacgagctatccaagtatttccgatccgttggataaatgatgtttctggaggatctttagaaatggctcatttagcgaaggatttgggattacggttattaatcaatcattcctgctctttgcccccaaggcctgattgtgtgctttcctatgaagaatctcctgttacgcaaatgttgcgttggggggaatcgcagttagaaacttttgctcaaattggtttggatactagctggcaggtagttttcgatccaggcataggatttgggaaaactccggttcaatcgatgcagcttatggagggtgtggcgaagttcaagcacattttaaagtgtcctgtattgattggacattctagaaaatcctgtttaagtcttttgggacgattcagcagtcaagatcgagactgggaaactatcggatgttctgtggctcttcataatcaaggtgttgattacttgcgtgtacaccaagtggaaggaaatagacgcgttctagctgctgctgcatggtctggaatgcctgtatga

SEQ ID NO: 19155 - DNA, 1716 bp, Chlamydia trachomatis
atgcgcatggatacgctagatagtcaagctgctgatgcagcccaagaagaagaaatccaaagaaagttagaagagctagtcactcttgctaaggatcaagggttcatcacgtatgaagaaattaatgaaattcttcccccttctttcgattcgccagaacagatagatcaagttttaatttttctggcggggatggacgttcaagtcttaaaccaagcagacgtagagcggcagaaagaaagaaaaaaagaagctaaagagctagaagggttggctaagcgttctgagggaacgcctgatgatccagtgcgtatgtatctgaaggaaatgggtacagttcctcttcttacaagagaagaggaggtggagatttctaaaaggatagaaaaagctcaggtacaaatagaaagaattattttacgctttcgttattcgactaaagaagcggtttctattgcgcaatacttaattaatggtaaggaacgatttgataagatcgtttccgaaaaagaggtggaagataagacacattttcttaatcttttgccgaagttaatctctttgctgaaagaagaggactcttacttagaagagcggcttttggctttgaaagatccggcactgtccaagcaagatcaagcaaagttgaacgatgagcttgaaaaatgccgtattcgaacacaagcttatctgagatgttttcattgtcgtcacaatgtcacggaagattttggagaagttgtttttaaagcttatgactcgttcttacagttggaacaacaaatcaatgatttaaaggttcgtgctgaaagaaataagtttgctgcagcaaaactagctgcagcccgacgcaagctttacaaacgagaagttgcagcgggacgtactcttgaagagtttaaaaaagatgtgcggatgttgcagcgttggatggataaaagccaggaagcaaagaaagagatggtggaatccaacttacgtttggtgatctctatcgcgaaaaaatataccaaccgagggctgtctttcttggatttgattcaagaaggaaatatgggcttaatgaaagctgttgaaaaatttgagtatcgccggggttataaattttcaacttatgccacttggtggattcgtcaggctgtgacgcgagctattgccgatcaggcaagaaccattcgaattcctgttcatatgatcgagaccattaataaggtgcttcgtggagccaagaaattaatgatggaaacaggaaaagagcctacgcccgaagaactcggagaggaactaggtttcactccagaccgtgttcgagaaatttataagatcgctcagcatccgatttctttacaggctgaggttggagatagtggagaaagctcttttggagatttcttggaagatacagctgttgaatctccggcagaggcaacaggctactccatgttgaaagacaaaatgaaggaagtgctaaaaacgcttactgatcgcgaacgttttgttttgatccatcggtttggccttttagatggccgtcccaaaactttggaagaggtaggctccgcgttcaacgtgacacgagagcggattcgacaaatcgaagccaaagctttgcgaaaaatgcgtcatcctatccgttccaaacagctacgagcattcttggatttattggaagaagagaagactggttcgggcaagattaagagttataagaattaa

SEQ ID NO: 19156 - DNA, 1260 bp, Chlamydia trachomatis
atgacgtggggttttttgaaacaaggaatttttcgagaaagaagtcgggttggtaagcaaaaattttaccactgtgtttcgcgatattttcattacctgcccccggtattggccatactcttaccagtaggaagttggccctttttgtccgaacagcaatggcgttatagttattttcttttccctgttgtttcttctttagggtggttgtttgccattggattgcgcgagagacagttgcgcgctgctgctggacagctcctcgaaacaaagattcgtaaacttacagagcgtgatgaggggttaaaaaatattagagagaccatagagaagcgccaaaaagaagcgaatcgtttgaaattgcacaatgataagttggtggagcgccttggtcaagcgcgagaagtggttattcaagcaaaaggtcgctatgaccatatggaagaaaaatcgcgaaaattacatgaggaaaacaaacaattgcaaatgcaattggaggctgctgttcgcgagcgcaatgagaaaattttagaaaaccaagagttgagacaagaacttaaggagacgttagcctatcaacaagaattgcatgatgagtaccaagcaacttttgtcgagcaacataatatgctggataagcgacaagcctatattggtaatttggaagcaaaagtgcaggatttaatgtgtgaattacgcaatttattgcaattagaggtgggggcgaaaacggagttacctggacgacctatggcttcccgagatgtggttgctcagcttgtattagaatttcgtaaaattgttttccgtgttgagaccacggaagctgcagattctttgacggctttaaggtacacgcgaaccgatccttcagcgcacaactattctttggcatgtcggcaattattcgatgatttgcgggaagaaaatttgggcatgttgttcatttatgcaccatttgctcaaagagtactctttgctaacgctctgtttaaagattggacggggcatggattagaagattttttaaataaagaaggggatgttgttctagagggatttgcccaatgggagcgagatttattaacagaatctcgaacagaacgctctggcaaaatcgtaattaaaacgaaagcttttggagccactccgttctactattgtgtagtaacgttagataaaggacctttggcagaacatgtattaggggttttataccctgcaaaagcaagtttttttacaaatctttcctatatttaa

SEQ ID NO: 19157 - DNA, 309 bp, Chlamydia trachomatis
ttgggagagattatggcaccaagaaaaccgagcaagaaagtcggacctcaaaaacgcccttctgcagagaagcgagttatcacttctaagaaaaagcaattgcgtaatcaaagcttcaaatcaagagtgaaaactacattgaaaaaatttgaattggctgtgcaatcaggtgatgtggcatccatttcggcagggttaagttctgtttacagtattgcagataaagctgtaaaacgaggtatttttaagaaaggtaaagctgatcgagtaaaagctcgcgcttctggacgcgcttgccctacagcttaa

SEQ ID NO: 19158 - DNA, 1647 bp, Chlamydia trachomatis
ttgaaaaagcttaaaagcaacagaaagagaggagtaatgagcaaagacgatgaaggatcgctagtgcgatcgttgtttaatttgctgtccggaacattttttagccgtcttaccgggatgttacgcgagattgttatggctacctatttcggagccgatcctttggtggcttctttttggttagcttttcggacaatcttttttttaagaaaacttttgggtggtcctattcttgggcttgcgtttatcccgcattttgagtttttacgtgctcaaaatatttcgagagcagcttttttctttagaagtttttcgaaattcttttgttatagtgccattgtatttactttggtcatagaattgggacttggtgtttggtgctcttgtgttactggaagcctatttgatactttgttgttaactatcatattgcttccgtctgggatttttctcatgatgtatactgtgaattccacgctattgcactgtgaaaagaagtttttgagcgtaggattagctccttctgttgtgaatgttttgtggatcggaaccgtgtttttagcaagaaactacaatcctagaaatcgtatttttggattggcaatagttcttgttattggcttcattctagaatgggctgtaacacttcctggagtcattaagtttttgggtagaagcacggaaacaccaaaagagcgggatagtattcgcgctctgattgccccactttccttaggattattatctatggggattttccagttgaacttgctttgtgacatgtggcttgcaagatacattaatgaggtaggacctttgtatcttatgtattctgttcgaatacagcaattgcccgttcatttatttggtctcggagtatttacagtccttctgcccgcgatttctcgttgtgttcaagataacgaacatcaacaagggtatgatctcctacgtttttcattaaagcttaccgttgctgtgatgttagttatgactatggggctactacttttggcgttacctggggtacgagttctctatgaacatggagttttccctacaacagctgtacatgctattgtagaggtccttcgtgggtacagtggtagtattatccctatggctttagcgcctcttgtttctgcactcttctatgcaagaaggaattataaagtgcccatgcttgtgggtattgctgcagccgttgcaaacatagttcttaatgttattggttgtttagtcttcaagcatgtgtctgttttagcctacgcgacctctttagcatcttggggacagttagttattttatggtattgtgcaggaaagagcttacctacttacaaaggtttaatgtggcgtacatttagagaaagcgggaaaactgtttttacaactgttctagcagcttttattacggttggaattaacgtgtttacaaatactacgtacattgtattcattcatcctttgacaaccccaataaaacctttgacatctttgttagatcagtgtggagtgttttttgcagaatctgctcttttcttggctatcttatttggacttgctaaagtattgaaagctgaagatctcatgaatctcacatcattccaatactggaaaggccatcagtctatcctaagaaactag

SEQ ID NO: 19159 - DNA, 867 bp, Chlamydia trachomatis
atgtttgtactcccccccccacaagaacctcttttaggagcccacacgtcagctgctggaggactccataacgcgctttatgaaggacgagacatcggagctaccactattcagctgtttactgccaaccaacgccagtggaaaaggcgttctctaactcagaatatgattgaacaattccaaacagctttagatgagacctctttgtcctacataatgagtcatgcaggatatttaaataatcctggagctcccaatcctgagatactagagaagacgcgcatttgcatgtatcaagaaatagctgattgcatcgcgctaggtatttctttcgttaactttcatccaggagccgctctttctgattcgaaagaaagctgcctagatagagcgattactagtttttcacaaatggcaccgcttttcgaaacaaatcccccacttgttgttctccttgaaactactgcgggccaaggctccttaataggaagctctttcgaagaactggcttatctgattcaaggaatcaaagctcatatacccgtaggagtttgtttagacacctgccatatctttgccgctgggtatgatatctcttcccccgaagggtgggaacaagtgttaaaacattttgacgaagtaattgggctttcttttttacgagccatccatttgaatgactctatttttcctcttggaaagaataaggatcgccatgcccctatcggagaaggttgtataggttcagaaagcttttgctttcttatgcgagatgaacgtacacgcaagcttccaaagtatctagagactccaggaggtcccgatttatggacaaaagagattcgctatctacagaaggttagctaa

SEQ ID NO: 19160 - DNA, 630 bp, Chlamydia trachomatis
atggcgagatattgtggccctaaaaacagaatagcgagacgttttggagctaacatctttgggagaggtcgtaaccctttgctgagaaagcccaatcctccgggtcagcacggcatgcaaagaaaaaagaaatctgactacggcttacagttagaagaaaaacaaaaattaaaagcttgctacggaatgatcttagagaagcaattggttaaggcttacaaagaggttgtacataagcaaggcaatgttgctcagatgtttcttgaaaaatttgagtgccgtttggacaacatcgtttaccgattaggatttgcaaaaactatttttgcagctcagcaattagtctctcacgggcatgttttggtaaacgggaagaaggtagatagacggtccttcttcgttcgtcctggtatgcaaatctctttgaaggaaaaatctagacgattggcgatagtgacagaatccttagagaacaaggatcaaagctctcttccagcatacttgtctctcgataaggctgctttcaaaggagagttagttgtgtctccggagttggatcagatttcttcccaacttcctttgcctgtgaacgtttctgttatttgcgaattcttgtctcacagaacataa

SEQ ID NO: 19161 - DNA, 987 bp, Chlamydia trachomatis
atggaaaagaattattatgctttagcgtattattactttggtcccgtaagcaaccctcatgaagaaattgctttacacaagcaattattcaaaaccatggatgtttcttgccggatttatatctctgaggaagggattaacggccagtttagtggttatcaaccggatgcagagcgctatatggcgtggctgaaacagcgcccagacttcgctactgtaaaattcaaaattcatcatattaaagaaaatgtgttcccacgagttacggtgaaatatcgtaaagagcttgttgccctaggatgctctgttgatacaagcaagcaaggaaaacacatttctcctgaagagtggcatgaaaaacttcaagagaatcgttgcttagttttggatgttcgaaataattatgaatggaaaatcggtcactttgagaatgcggttctccctgacatagagactttccgggagtttccagcttatgcagatcggctcgctcaagagcatgcccccgaaactactccagtaatgatgtattgcacgggaggaattcgttgtgaactctactcagctcttcttttagaaaaaggcttcaaagaagtttatcaactcgatggtggcgtcattgcttatgggttgaagatgggcactggaaaatggaaagggaagttattcgtattcgatgatcgcatggcggtgcctatcaacgaagcggatcctaacgtctcccctatttcaaagtgttctctctgtgatatagagtctgatacgtactataattgtgcaaatacagattgcaataatctcttcctttgctgtgaatcttgtatcacttctcagaagggatgttgctcggaagaatgttctcaagcacctcgtattcgaacattttctgcagaaagaggaaacaaacctttccgaagaaaacacctctgcccaacaatcgagcagactcgttgttgtttgagagaaaaagacaaccaacctgcataa

SEQ ID NO: 19162 - DNA, 879 bp, Chlamydia trachomatis
atggatgatttcaatgtttatcgatcgaaaatagaaaaaaggctccgcgattctttagaggattttggaaaaactcaaagcggattacgtaacccaatagagtatgctctactgggtggaggaaaacgtgtgcgtcctctactcgtatgtttgtttgccgacagcattcaaaaaagacgagacgttttggatactgcaattgccgtggagtatatccacacatcaaccttgatagcggacgatcttccttgtatggataatgatgacatgcgtagggggaaaccttctgttcacaaagcttttgatgaggcttctgctcttcttgcttcgtatgctcttattcccgcagcttatgcaagaattcgtaagaatgcgaaagctttgaaggaagtggtttcggttcaacgagaaatcgaagatgcttacgaagatgttttggatctaatcgaactacgatttggggtagaaggggttttgggtggtcagtatgaagatgtttttttccaaagtttcactgaagagagtgttataaatattattaataagaaaactagcgctctttttgaaatagcatgtgtatctggatggttatttggaggtggagcaagagaaaaaactcctttagttatcgagtttgccaggaattttggtattttgtttcaaataggagatgatctagcagatcttagtcaggataaccaagaagagaagcatatgaattatgcgctattatttggagagcaagctgctaaagacttgcttaacagatcttttaattcgtgtattgaaattcttcatttactcaaagaaaaaggggtaaagcctttggaggagttatgtaagaaggtttttatgggtggaaataaacattctttatga

SEQ ID NO: 19163 - DNA, 657 bp, Chlamydia trachomatis
gtgtttaaataccagactatgctgtatcaggagcttagtatggttttagcttcctctttattttcccctgaagaatttctttatccagagattgtgagccaggctgaatttgtttggtccattttaactcttttggaacaaaagctgtcttctcattctttttctggaatacaaggacatcttgaagaaggtgtatatttaaaaaacaaagagaccatcgaaatccaggaaggagcttatgtggagtcgggggcatatctttgtggcccttgtattatcggaccttatactcaagttcgtcacggagcttatattcgaggtggagtaataactggtgctcattgtgtggttggacactgttctgagatcaaaaatagctatttagggcattatgcgaaagctgctcactttgcttatgtgggagattctgttttgggctctcgggtcaatttaggtgcaggggttcgttgcgcgaattttcgattggatgggggtaacatttttctccgttattctggagatcgctatgatacacagagaaagaaattaggcgctttcttgggtaagggagtgagtattgggtgtaataccgtacttaatccaggatgttgtgtggttagtgctacaaagattcttcctaatcaaactatttattag

SEQ ID NO: 19164 - DNA, 481 bp, Enterobacter cloacae
aacagcaaagtctggctgcaggccgacgatgttgacgtgaagccatggctggctgcgcaaaatatcagtgagactgcccgtttcagccttgaaggctggctgaccctgaccaaaggcgaatttgccagcggcgatatctggctcaagcaggggggcgccagctggaaaggcgaaaaacagcagcatcagctttccgtcgataacctcaccgcgcacgtgacgcaggagaaagggggctggcagtttgccattccggatacgcgcatcaccatggacggcaagtcgtggccgcgcggtgcgtgacgctggcctggatgccggagcaggacgtcggcggtacggccagtaaacgcagcgacgagctcgcatccgcgccagcaacctcgatttggcggccattgagggcctgcgatcgatggcggcaaagctctctccggacctgggcgagatctggctggcaacgcagccgagcgggacatcc

SEQ ID NO: 19165 - DNA, 356 bp, Enterobacter cloacae
agccatgcactcgtcgacatggcgcacgttgcgggcctgattgccgctggcgtttacccgaacccggttccacacgctcacgtagtattcatcaccacccacaaaactctggagggtccacgcggtggcctgatcctggcgaaaggcggtgacgaagagctgtacaaaaaactgaactccgctgtattcccaagcgcgcagggcggcccgctgatgcacgttatcgctgcaaaaacggtctctctgaaagaagcgatgtcgcctgagtttcaaggtttatcagcagcaggttgctaataatgccaaaagattggtgaagtgtcccgaaccgtggctacaaactggtatccggcggt

SEQ ID NO: 19166 - DNA, 114 bp, Enterobacter cloacae
aatgccgacgatctgaccaaaagctatgtttccgccggattcaaaaagatccacctcgactgcagcatgtcctgcgaggacgacccggttcccctgaccgacgcgatcgtcgcc

SEQ ID NO: 19167 - DNA, 310 bp, Enterobacter cloacae
gcaggccgtgttattattgttatcagtacattttgacaggaagagtattttgactactgacactcatactctgcatattgaagagattttagaacttctgccgttccgctacccgtttctgctggtagaccgtgtgctggattttgaagaaggtcgttttctgcgcgcagtgaaaaatgtttccgtgaacgagccgttcttccaggggcacttccctggtaagcctatcttcccgggtgtgttgattctggaagcgatggctcaggctaccggtattctggcgtttaaaagcgtcggcacactggatcgc

SEQ ID NO: 19168 - DNA, 114 bp, Enterobacter cloacae; identical to SEQ ID NO: 19166

SEQ ID NO: 19169 - DNA, 310 bp, Enterobacter cloacae; identical to SEQ ID NO: 19167

SEQ ID NO: 19170 - DNA, 452 bp, Enterobacter cloacae
taaacagaaggtgcgcttcgtcgaagaagaagaccagcttcggtttttccagatcgcccgcttcgggtaactgttcgtagagttcagagagcatccacagcaggggtgctgatttttatcgtgctgctgctcggtacggtggcgtttctggtgggaacgacgaccgggctgcatctgctgtttaacgctgcgaaccgctgggtgccggggctggagattggccaggtaacgggcggctggcgcgatctgcgtctgaagaacatccgctacgagcagccgggcgtggcggtgaacgccggggagttccacctggcggtgaagctgggctgcctgcgtgacagcaagctctgcgtcaacgatctgtcgctaaaagacgtcaacgtggggaatagatcggaaaaaatgccgaagcctgcgccggtcgaggaggaggacagccgcccgctgaaatc

SEQ ID NO: 19171 - DNA, 255 bp, Enterobacter cloacae
gtgctggatgctgattccgtcatgagcggagactgcctgagcggtctggtgcgcctgatggaagccaaccctaacgcgggtatcattcagtcttcgccaaaagcgtccggtatggacacgctgtatgcgcgctgccagcagttcgccacccgtgtttacgggccgctgtttacggcgggtctgcacttctggcagttgggtgaatcgcactactggggccacaacgccattgctgatgtatctgcgtcatgccat

SEQ ID NO: 19172 - DNA, 197 bp, Enterobacter cloacae
atgtatgatggcgcgcttatcgcccgggcattagcagggcggcgtgtttcccccgaagtctcagaatcatggccaaagaacaaacggaccgtacgacactagatctgttcgcgaatgagcgtcgcccgggacgacccaagacgaataccgtttcgcgcgatgaacagctgcgtatcaataaacgcaaccagctgggg

SEQ ID NO: 19173 - DNA, 253 bp, Enterobacter cloacae
aacgtgccggtgctctgggaccagtacaataacatcgtcggtgggaaacagtgccagcatggccccaccctaccctgtatattcgtagcggcaactcgccttacgttaccgagcgtaccgcgacacgctgatggccaaattcccgcagatcgcgcacacgtgattgccgatgcagagcactggatgcatgcggaaaaaccggatagcatgactgcgcgccattcgccgctatatcgctaatactgcaaattga

SEQ ID NO: 19174 - DNA, 138 bp, Enterobacter cloacae
atgaaacgcacttttcaaccgtctgtactgaagcgcaaccgttctcacggcttccgtgctcgtatggctactaaaaatggtcgtcaggttctggcacgtcgtcgtgctaaaggccgcgctcgtctgaccgtttccaag

SEQ ID NO: 19175 - DNA, 277 bp, Enterobacter cloacae
gtggttaagctagcatttcccagggagttacgtttgttaactcccgctcatttcactttcgtcttccagcagccactacgggctggcacgccgcaaatcaccatcctcggtcgccaaaattcgctggggcatccccgcatcggtctcacagtcgccaagaaaaatgttaagcgtgcgcatgtaacgcaatcggattaaacgtctgacgcgtgaaagcttccgtttacgtcagcacgaactgccttcaatggatttcgtggtggtggcgaagaaatgg

SEQ ID NO: 19176 - DNA, 449 bp, Enterobacter cloacae
gcggaagagattcagctcgatattcgcggcaacatttacgccaacgcctgccaggtggacagcgccaccagaacctgacggtcaatctgggcaaagcgaataccggcgattttaaggatgtgggcgataccggacaatggacatcattcgacttaaccctgtcgaaatgcccaaccactgccgtgctggccacggccacctttcacggtcagccggacagcattcatccgactaaattcgccagcagcggaaccgcgaaaggactggcgctggagcttgccgacccgcaggatcagatctcgcttgccccggacgccagcttcagcgtgttgatcaatcaggacaatcacacggcggatttcccgctggccgcccgctattacgccacctcattgccagtcacggcaggaacattcagcagcgtggtgcaggtgaccttcatttacccg

SEQ ID NO: 19177 - DNA, 342 bp, Enterobacter cloacae
atgatcaaacaaaggacacttaaacgtatcgttcaggcgactggtgtcggtttacataccggcaagaaagtcacgctgacgttacgccctgcgccggccaataccggggtcatctatcgtcgcaccgacttgaatccaccggtagattttccggccgatgccaaatctgtgcgtgatactatgctctgtacttgtctggtgaacgagcatgacgtgcggatttctaccgtagagcacctgaacgccgccctggcgggtctgggtatcgacaacattattgttgaagtcgatgcgccagaaatcccgattatggatggcagtgctgcaccgttcgtctatctg

SEQ ID NO: 19178 - DNA, 242 bp, Enterobacter cloacae
gccgttgttgcccccgtgtgggccgccacccagaccgtcacgctgtccgtgcctggcatgacctgcgcctcttgcccgatcactgtcaagcacgcgctttccaaggttgagggcgtgacaagaccgacgtaagtttcgacaagcgccaggccgtcgtcaccttcgacgatgccaagaccaacgtccagaagttgaccaaggcgaccgaggacgcgggctatccgtccagcctcaaacgctga

SEQ ID NO: 19179 - DNA, 801 bp, Enterobacter cloacae
gtgtctaagcgtcgtgtagttgtgaccggacttggcatgttgtctcctgtcggcaataccgtagagtccacctggaaagctctccttgccggtcagagcggcatcagcctaatcgaccatttcgatactagcgcctatgcaacaaaatttgctggcttagtaaaggattttaactgtgaagatatcatctcgcgcaaagaacagcgcaagatggatgccttcattcaatatggaattgtcgctggcgttcaggccatgcaggattctggtcttgaaattacggaagagaacgcaacccgtatcggcgccgctatcggctccgggattggcggtcttggcctgatcgaggaaaaccatacatctctgatgaatggcggcccgcgtaagatcagcccgttcttcgttccgtccacgattgttaacatggtggcaggccacctgaccatcatgttcggcctgcgtgggccaagcatttcaatcgcgactgcctgtacgtctggtgtacataacatcggccaggccgcgcgcattattgcgtacggcgatgcagatgctatggttgcgggcggtgctgaaaaagccagtaccccactgggtgtcggcggtttcggtgcggcgcgtgcgctgtctacccgtaatgataatccgcaggcggcgagccgtccgtgggataaagatcgtgacggcttcgtgctgggcgacggggcgggcatgatcgtactggaagaatacgaacacgcgaaaacacgcggcggaaaaatttatgctgaaatcgttggtttcggcatgaacaacgatgct

SEQ ID NO: 19180 - DNA, 273 bp, Enterobacter cloacae
atgttttgtgtgatctacagaagtacaagccgtgaccagacctatctttatgtcgaaaagaaagacgatttttcacgcgtgcctgaagaattaatgaagaactttggccgaccacagctggcgatgctgctgccgctcgatggtcgtaagaaactgattaacgccgatctggataaagtgaaaacggccttatccgagcaaggctattatttacagcttccaccgccacccgagaatttattaaaacagcatcttgaggcgaacggtaaaaaa

SEQ ID NO: 19181 - DNA, 327 bp, Enterobacter cloacae
atgcaatttaatatccctacgttgctcactctctttcgtgttgtactcatcccgttctttgtgctggcgttttacctgccggtcgtctgggcacctttcgcctgcgcattgctctttctgatcgcggcggtcaccgactggtttgatggctatctggcccgtcgctggaatcaaagcacccgtttcggtgccttcctcgacccggtggcagacaaagtgatggtcgtatcgccatggtgctggtggccgagcactatcacacctggtgggtaacgctgccggcggcaaccatgatcggccgtgagatcattatctctgcactgcgcg

SEQ ID NO: 19182 - DNA, 887 bp, Enterobacter cloacae
gcagacggctgcgtggatctggttcttaccaacgcgctgatcgtcgatcactgggggatcgtaaaagccgatatcggcgtcaagaacggacggatcttcgccgtcggcaaagccgggaacccggacattcagcccggcgtgacgatcccgattggcgcggcaacggaagtgattgccgccgaggggaagatcgtcaccgccggcgggatcgacacccacatccactggatctgcccgcagcaggcggaagaggcgctggtctccggcgtcaccaccatgatcggcggcggcaccggaccggcggcgggcaccaacgccaccacctgcacgccgggaccgtggtatatcgcccgcatgctgcaggctgccgatacgctgccggtgaatattggcctgctcggcaaaggtaacggctccagcccggacgccctgcgcgaacaaatcgccgcgggcgccatcgggctgaagatccacgaagactggggcgcgacgcccgccgccatcaattgctcgctggaggtggctgacgagatggatattcaggtggcgctgcacagcgacacgctgaacgagtccgggtttgtcgaagacacgctggcggccattgccgggcgcaccatccacaccttccacaccgaaggcgcgggcggcggccacgcgccggatattatcaccgcctgcgcgcacccgaatattctgccctcctccaccaacccgacgctgccctatacggtcaataccatcgacgagcatctcgacatgctgatggtctgccatcacctcgatccggatatcgccgaggacgtggcgtttgccgaatcccgcattcggtcgtgaaaccatcgccgcggaagacatgctgaacgacatcggcgcggtctcgctta

SEQ ID NO: 19183 - DNA, 668 bp, Enterobacter cloacae
ctgaacgatcagcttccggtgctgaagcgtggacacctctgggtgatggcgctgctgtatctggcccacttcggttcgtttatcggcttttcggccgggttcgcgatgctgtcgaaaacgcagttcccggacgtgcagatcctgcagttcgccttcttcggtccatttattggcgcccttgctcgttcgttgggcggcatggtctctgaccgcctgggcggtacccgcgtgacgctggtcagacttcgtcgtgatggcagtcttctgcgcgctgctgttcctgacgctgcccgccgacggacagggtggtaacttcatcgccttcttcggcgtatttatggtgctgttcctgacggccgggctggggagtgcatccaccttccagatgatctccgtgatcttccgtaagctgaccatggatcgcgtgaaggcgcagggcgggagcgaagagcaggccatgcgcgaagcggcgacggatacggctgcggccgctgggctttatctctgccatcggcgcgattggcggcttctttatcccgaaagcgttcggtatctctctggatctgaccggctcaccggccggcgccatgaaagttttcctcgtcttctatatcgcctgcgttgtgattacgtggctggtatatggccgtaataccaagaaaaataag

SEQ ID NO: 19184 - DNA, 953 bp, Enterobacter cloacae
atgactgaatcttttgctcaactgtttgaagaatccttaaaagaaatcgaaacccgcccgggttccatcgttcgcggtgttgttgttgctatcgacaaagacgtagtcactggttgacgccggtctgaaatctgagtccgccattccggcagagcagttcaaaaacgcccagggcgagctggaaatccaggttggtgacgaagttgacgttgctctggacgcagtagaagacggcttcggtgaaaccctgctttctcgtgagaaagctaaactgtcacgaagcatggatcacgctggaaaaagcttacgaagaagctgaaactgtggtcggtgttatcaacggcaaagttaaaggtggcttcactgttgagctgaatggtattcgtgcgttcctgccaggttctctggtagacgttcgtccagttcgtgacactctgcacctggaaggcaaagagcttgagttcaaagtaatcaagctggaccagaagcgtaacaacgttgttgtttcccgtcgtgccgttatcgaatccgaaaacagcgcagaacgcgatcagctgctggaaaacctgcaggaaggcatggaagtcaaaggtatcgttaagaacctcactgactacggcgcattcgttgacctgggcggcgttgatggtctgctgcacatcaccgacatggcgtggaaacgcgttaagcacccaagcgaaatcgtgaacgtgggcgacgaaatcactgttaaagtgctgaagtttgaccgcgagcgtactcgtgtatccctcggcctgaaacagctgggcgaagatccatgggtagctatcgctaagcgttacccagaaggtactaaactgactggtcgcgtaaccaacctgactgactacggctgcttcgttgaaatcgaagaaggcgttgaaggtctggtgcacgtttccgaaatggactggaccaacaaaaacatccac

SEQ ID NO: 19185 - DNA, 710 bp, Enterobacter cloacae
gacgggcactttacggcaattatcgggccgaacggttgcgggaaatcgagcctgctgggcacactgagccgcctgatgacgccggctgagggcagcgtgttccttgacggggatcaggtccagcgcttcgccagcaagggggtggccagacgcatcggtctgctggcgcaaaacgccaccacgccgggagacatcacggtgcaggagctggtctcgcgcggacgctatccgcaccagccgctatttacccgctggcgtaaagaggatgacgaggcggtgaaccgcgcgatgcaggcgacgggtattaccgggctcgcccagcagagcgtggacaccctctccggcggacagcgccaacgggcgtggatcgcgatggtggtggcgcaggagacctccatcatgctgctggacgagccgacgaccctggctcgacatcagccatcagattgatcttctggagctgctgagcgagctgaaccgcacgcaggggtataccctggcggcggtgctgcacgacttaaaccaggcgtgccgtacgccacgcatttgatctgcttcgcgacggtgagatcgtggcgcagggcgcgccgaaagagattgtgacgccggagctgatcgagcggatctacggcatgcgctgcatgattattgacgatccggtggcgggtacgccgctggtggtgccgctgggcaagcgtgcggtctgatgc

SEQ ID NO: 19186 - DNA, 246 bp, Enterobacter cloacae
atgggaattttatcctggattatctttgggcttattgcgggtattcaggcgaagtggattatgccgggcaaagatggcggtggttttatcgtcaccgtaatactgggtattatcggcgcggtagtcggcggctggatcagtacgctgttcggttttggcaaagtcgatggctttaacttcggcagctttgccgtcgcggtcatcggtgcgctggttgttctgtttatctacagaaaaatcaaaagc

SEQ ID NO: 19187 - DNA, 551 bp, Enterobacter cloacae
ttacgctggcaaaaagagctgatagcacatttccggttcactgtaccggtttattgaccgccgacctggcgcagtttaagcacgttgagggaattggcgtggcgaaatatgcccagctgaggggcattgctgaacttgcccgccgtttttacaatgtccgcatggagaaggaagatccgatcctgacgccagaaatgacgcgtgaattcctgcagagccagttaaccgatattgaacgcgagatctttatggtgatctttgtcgataacagaaatcgggtgctgaaacatagctgtctctttgcgggcacgttgagccacgttgaggtgcatccgcgtgaaattgtgcgggaagcgataaaagtgaatgcagcgggcgtgatcctcgcgcataatcacccctctggctgtgcagaaccgagcagagcggacaaagaaatcaccgaacgcattatcaaatgctgtcaattcatggacattcgtgtgctggaccatctgataattggccgcggtgagtacatttctttcgcagaacatggctggatttaggct

SEQ ID NO: 19188 - DNA, 1400 bp, Enterobacter cloacae
atgaaaatcaaaactcgcttcgcgccgagcccgacaggctatctgcacgtcggtggtgcacgtaccgctctctattcctggcttttcgcacgccacaacaaaggtgagttcgtgctgcgtattgaagacaccgatcttgagcgctccacgccagaagcaattgaagccattatggatgggatgaactggctgaatctggaatgggatgaaggtccttacttccagaccaaacgctttgaccgctataacgctgtcattgatgagatgctggtcgcgggcacggcatataaatgctactgctctaaagagcgtctggatgaactgcgtgaagcgagatggctaacggtgaaaagccgcgttatgacggccgctgccgccacgaccatagcgagcatgctgctgacgagccttgcgtggtgcgtttcgctaacccgcaagagggctcggtgatctttgacgaccagatccgtggccccattgaattcagcaaccaggagctggacgatctgatcatccgtcgtaccgacggttctccaacctataacttctgcgtcgtggttgacgactgggatatggaaattacccacgttgtccgtggtgaagaccatatcaacaatacgccacgtcagatcaacatcctgaaagcgctgaacgcccctgtgcctgtctatgcgcacgtctccatgatcaacggtgatgacgggaaaaaactgtctaaacgtcacggcgcggtaagcgttatgcaatatcgcgatgacggctatcttccggaagcgctgctgaactatctggtgcgtctgggctgggcccacggtgaccaggagatcttcagccgcgaagagatgatcgaactgttctctctgagctctgtaagcaaatcagcgagcgcatttaataccgacaagctcctgtggctgaaccatcactacatcaacaccatgcagcctgaatatgtggcgacgttatctgcagtggcacattgagcaggcaaatattgatacccgcactgggcctgagcttgctgacctggtgaaactcctcggcgagcgctgcaaaacgctgaaagagattgccgaaagctgccgctacttctatgaagagtttgatgagttcgacgcggacgccgcgaagaagcacctccgtccggttgcgcgtcaccgctggaagtggtgcgtgacaagctggcggccctttccgagtggaccgctgagaatgtgcatcaagcgattcaggcgacggcagacgagctggaagtcggtatgggtaaagtcggtatgccactgcgcgttgcggtgaccggtgcgggtcagtctccggcactggatgtaacggttcatgccatcggcaaatcacgcagcgtggcgcgcataaacaaggcgctggactttatcgctgaacgt

SEQ ID NO: 19189 - DNA, 339 bp, Enterobacter cloacae
cttttcaaaatcctgtcggatgaaacccggctcgccatcgtcatgcttctccgggagtccggagaactgtgcgtctgcgatatctgtgcggccacctccgaatcgcagcccaaaatatcgcgacatatggctatcctgcgcgaggccgggctggtacttgaccgtcgggaaggcaaatggatccactaacgtctgtcaccccacataccggcatgggcagcagagacaatcatgacgtcctggcagtgtatgcgggaggatgtgcgtgaatggctggataaatcagcctgcacctcctgctgagaaagaaaaacacatttacataatcatatataacgg

SEQ ID NO: 19190 - DNA, 860 bp, Enterobacter cloacae
gtggtttgaccgcggctaccacgcgcttatgcgacccgcctgttaacccgccttaaggagacagaccatgttcggatttcccactggcagttgaaatcgacctccacagaagcaggcgtggtcgcgccggatgaacgactcccgctcgggcagacgatggtgatgggcgtccagcacgcggtcgccatgtttggcgccacggtgctgatgccgatgctgatgggactcgatcccaacctgtctattctgatgtcgggtatcggtaccctgctgttctttttcgtcaccggcgggcgcgtgcccagctatctcggctccagcgccgcctttgtgggcgtcgtcatcgccagcaccgggtttaacggccaggggatcaaccctaacctgagcgtggccctcggcggcatcatcgcctgcggtctggtctacaccctgattggtctggtggtgatgaaaatcggcacgcgctggatcgagcgaatgatgcctcccgtcgtgacgggcgccgtggtgatggcgataggcctcaacctcgcgccaattgcggtcaggagcgtctccgcctcgccgtttgaaagctggatggcggtgatcacggttctgtgcatcggcctggtggcggtgttcacgcgcggcatgattcagcggctgctgattctggttgggctgattgccgcctgtatggtctacgcgctgctggccaacgttttcggcctgggcaagccggttgactttacgctgctccaccaggccgcctggttcggcctgccgaaggtgacctcgcccacctttaacacccaggcgatgatgcttatcgcaccggtggcggtgatcctggtggcggagaacttaggccacgg

SEQ ID NO: 19191 - DNA, 539 bp, Enterobacter cloacae
atgaagctgatacgcggcatacataatctcagcagcgcgccacacgggtgcgtgctgactattggtaatttcgacggcgtgcatcgtggtcatcaggcgctgttgcagggattgcgtaaagaaggggaggcccgcggcctgcccgttgtagtgatgattttcgagccgcagccgctggagctgttcgcgggcgataaatctcccgcccgactcactcgcctgcgcgagaaattgcgctatctggcggagtccggcgtggactatgtattgtgtttacgtttcgatcgtcgctttgccgcgctgacagcacaaaatttcgtcagcgacctgctggttaagcgtcttggcgtacagtttctcgccgtgggtgatgatttccgctttggcgctggtcgtcagggcgatttcttgctattacagaaggctggtctggagtacggatttgacgtcaccagcgcgatgaccttctgcgaaggcggcgtacgcgtcagcagcacggcggtgcgtcaggcgctggctaatgatgacctggacacggc

SEQ ID NO: 19192 - DNA, 495 bp, Enterobacter cloacae
gtggatattctggtaaacaatgccgggatcactcgcgataacctgttaatgcgaatgaaagacgacgagtggaacgatatcatcgaaaccaacctgtcatctgtattccgtctgtcaaaagcggtaatgcgcgctatgatgaaaaagcgtcatggtcgtattatcactgtcggttctgtggttggtaccatgggaaatgctggtcaggctaactacgctgcggcgaaagcaggtctgattggtttcagtaagtcgctggcgcgtgaagttgcgtcccgcggtattacggtaaacgttgttgctccgggctttattgaaacggacatgacgcgtgcgctgactgatgagcagcgtgcgggtacgctggcggcagttccggcgggtcgtcttggcgaccctaaagaaatcgccagtgcggttgcatttttagcctctgacgaagcgggttacatcactggtgagaccctccacgtcaacggcgggatgtatatggtt

SEQ ID NO: 19193 - DNA, 719 bp, Enterobacter cloacae
gttgcgctgtggccgtctggcagcagcagggcggtaaagcgccaggcctgctcgcgggtcatagcctgggtgaatactcagcgctagtgtgtgccggcgtgatcgcgtttgctgacgcggtacgtctggttgaactgcgcggtaaattcatgcaggaagcggtgccggaaggtacgggcggcatgtctgccatcatcggtctggatgatgctgcaattgcaaaagcgtgtgaagaatctgctgaaggccaggttgtctctccggtaaacttcaactcgccgggccaggtggttattgccggtcataaagaagcggttgaacgcgcgggtgcggcctgtaaagcagcgggtgctaagcgtgcgctgccacttccggtcagcgtgccgtctcactgtgctctgatgaagcctgccgccgagaagctggcggttgagctggaaaaaattacgtttaacacaccgacgatttccgttgtgaacaacgtcgatgtgaaatgcgaaaccgcaccggaagctatccgcgacgcgctggttcgccagctctacagcccggtacagtggaccaaaaccgttgagtttatggccgctcagggcgttgagcatctgtatgaagtcggcccaggtaaagtcctcaccggtctgacaaaacgtattgttgacaccctgacagcctcggcgattaacgagccggaagcgatgtcagcggcactctcgcaataa

SEQ ID NO: 19194 - DNA, 595 bp, Enterobacter cloacae
gaacaccggaatattttgcccgcgagcgcgatctgagccagttaaccggggtgtcgcgcatcactgtgcgaaaggcgatgcaggcgctggaggaagagggcgtggtgacgcgctcccgtggctatggcacgcaaatcaacaatatctttgaatattcgttgaaagaggcgcgcggtttttcccagcaggtagtctgcgcggccaaaagcccaatacgctgtgggtcaacaagcgggtggtgaagtgcccggaagaggtcgcaaaccacctgtcgattcctccggacagcgaggtctttttgctcaagcgcattcgctatgtggatgacgatgcggtgtcgattgaagagtcctgggtgccggttggcctcattcccgatccggatgcgattggcatttcgctgtacgactacttccgcagccagaatatcttcccgcagcgcacccgttcacgggttagcgcccgcatgccggacagcgagtttcaggcgcacattaagatggacgaaaaaataccggtgctggtgatcaagcaggttgcgcttgaccaacagcaccgaccgattgagtacagcatcagctactgtcgcagggga

SEQ ID NO: 19195 - DNA, 842 bp, Enterobacter cloacae
ggcgagtcgggatcgggtaaatccgtgaccgccatgctcgccatgcggctgttgccggaagggagctaccgcattcataacggacaggtgaagttactcggcgaaaacgtcctgacggcgtccgagaaacagcttcgccagtggcgcggtgcccgagtggcgatgatttttcaggagccgatgaccgccctcaacccgacgcggcggattggcaaacagatggtggaggtgatccgccagcatcagccgctttcgcgggcgaggcgcacagaaggcgattaccctgctggaagagatgcaaatcccggacgcgaagcaggtcatggagcgttatccctttgaactttccggcggcatgcgccagcgggtgatgatcgcccttgccttctcctgcgagccggagctgattatcgccgacgagccgaccaccgcgctggacgttaccgtccagctccagcgtgctgcgcctcctgaagcacaaggcgcgggccagcgggacctcggtgttgtttatcagccacgatatggccgtggtgtcgcagctcttcgacaggatgtacgtgatgtatgccgggagcgtgatcgagagcggtgccacgcaaacgctgatccaccgacccgtgcatccctactccatcggccttctgcggtgcgcgccggaaaacggccagccgcgcgacctgcttcccgccatccccggcacggtgcccaacctcagccagcttccgcagggatgcgctttccgcgagcgctgctttgccgccggggcgaaatgcagcgaaacgccgcgcttacagcccaacggtgcagagggccaacaggctgcctgctggtatccacaa

SEQ ID NO: 19196 - DNA, 741 bp, Enterobacter cloacae
atgagcagtaacttcagacatcatctgttgagtctgtcgttactggttggaatagcggccccctgggccgcttttgctcaggcaccaatcagtagtgtcggctcaggctcggtagaagaccgggtcactcaactcgagcgtatttctaacgctcacagccagcttttaacccaactccagcaacaactttccgataaccaaaacgatattgactctctccgcggccagattcaggaaagccagtatcagttgaaccaggttgtggaacgtcagaagcagattttgctgcagatggatagcctgagcagcggtggtgcagcagcacaagcacagccagccgcgggcgatcagaccggtgcggcgacatcagctccggctgcggatgcttctgcttcaacaggtgcgcctgtacagagcggtgacgcgaatacggactacaacgcggccattgccctggtgcaggatcaatctcgtcaggatgacgcgcttgctgcgtttcagaactttgttaagaaataccctgattccacttatcagccaaatgcgaattactggctcggtcagctgaattacaacaagggtaaaaaggacgatgcggcgttttatttcgcttccgtggtaaaaaactacccgaaatcgccaaaagcgcccgatgcgatctccaaagtgggcgtcatcatgcaggacaaagtcgccagcgcgagagctaaaccggtttatcggccatccactagctctaga

SEQ ID NO: 19197 - DNA, 725 bp, Enterobacter cloacae
tttttgccgacggtcagtagcaacaacgacgtcccggctgtggaataagctggtttgccccgctgatggccgcagccgccggggcgctcacgaccagcctgtttttccatccccatttctcactctccctcccccactacggccaaatgcagatagcggatattttcagcggcgccatcgtcgtcgccatcgccattgcgctgggaatggtcgcggtatgctgtgtacctcgcctgcacaggctgatgcataagctcaaacacccggtgttgattctgggggccggcggtttaattctcggtattttaggggtaatcggcgggccggtgacgctgtttaaaggtctggacgagatgcagcagctggccttcagccaggtgtttagcgtctccgactatctgctatttgccgtgattaagctggccgcgctggtggtggctgcagcctgcggtttccgcggtggacgcattttcccgatggtctttgtcggagtcgcgctggggctgatgctgcacgagcatgtcgatgcggtcccggcggcgattaccgtctcctgctctattctgggactggttctggtggttacgcgcgacgcgtggctcagcctgtttatggctgcggtagtggtaccggattcaacgcttttccccctgctctgtatcgtgatgttgcccgcctggctcctgctggcgggcaaaccgatgatgatggcctggcgaaacgac

SEQ ID NO: 19198 - DNA, 1242 bp, Enterobacter cloacae
aaatctgacctcgattcgatggccaacattgatgcgcagtcgagcgagctgaccttcaaagaggcggagatttccaagctttataccagatgtcacccggcctaccgcacgatgctggagaaacgccgcacgctggaagaggagaaggcgaactcagatgaccgcgtgaccgcgatgccgaaaacgcagaaggagatcgtgcgtctgacccgcgacgtggagtccggacagcaggtttacatgcagttgctgaacaagcagcaggagctgaaaatcaccgaagccagtaccgtcggtgacgtgcgcatcgttgacccggccattacccagcctggcgtgctgaagccgaagaaagcgctgattattctcggcagcattattctcggcctgatgctttccatcgtgggcgtgctgctgcgttcgctgttcaaccgcggtatcgaaagcccgcaggtgctggaagagagcggtatcaacgtctatgccagcattccggtgtccgagtggcaaaaatcccgcgacagcgtcaaaaccatcaagggcgtcaagcgttacaaacagagccagcttctggcggtgggtaacccgaccgacctcgccatcgaagcgatccgtagcctgcgtaccagcctgcacttcgccatgatgcaggccaaaaacaacgtcctgatgttaaccggcgtcagcccgtcgattggtaaaaccttcgtctgcgccaacctggcggcggtggtcagccagaccaacaagcgcgtgctgctgatcgactgcgatatgcgtaagggctacacccacgagctgctgggcaccaacaacgttaacggtctgtcggaaattctgctcggtaaaggtgaaatcagccagagcgcgaaacctacaacggtgccgaaatttgacctgatccctcgcggtcaggtgccgcctaacccgtccgagctgctgatgagcgaacgtttcacccagttgattgagtgggcgagcaaaaattacgacctggtgctgatcgatacgccgccaattctggcggtgaccgacgcggccgtcgttggccgccacgcgggcaccacgctgatggtagcgcgttacgcggtgaacaccctgaaagaggtggaaaccagcctgagccgcttcgagcagaacgggattgaggtgaaaggggtgatcctgaactccatcttccgccgcgcgaccgggtaccaggattacggctattacgagtacgaatataaatctgacagtaaa

SEQ ID NO: 19199 - DNA, 549 bp, Enterobacter cloacae
gtggcctatgtcgatatgctgaacaaatggaacaaagcgtacaacctgacttcagtacgtgaccccaacgagatgctggtacgccatattctcgatagcatcgtggttgccccgtggctgaaaggtgagcgttttatcgacgtgggtacgggacctggtttaccgggcgttccgctgtcgattgttcgccctgagagccacttcacgctgctggacagccttggcaagcgcgtgcgctttttacgtcaggtacagcatgagctgaagcttgaaaacatcacgcccgtgcagagcagggtagaggagttcccggcagagccgccgtttgacggtgttatcagccgcgcgtttgcttcgctcaatgatatggtgagctggtgtaagcacttaccggcagagaatggccgcttttatgcgctgaaagggcagttgccaggcgatgagattgaacaactcccggacggttttgctgttgaatccatcgagaaattacacattcctcagctcgatggggagcgtcatctggtgataattaagccaaacaatttt

SEQ ID NO: 19200 - DNA, 698 bp, Enterobacter cloacae
agtggatccccggcggcaattttctgtgcgtctgctatatcgtcacgctctcaatgctggtagcgggtggacatgtcgaagggatatcctggtaccgcgcgcgattatttgaaactgtcgccacgctgctgatcatttttgttctgctctacgatgttttcaggctgtatcgcgactcgcacataaagtatgagcagtcctatcagaactcaattcgcgacccgctcacgcgcctgtataaccgcagttatttttatgaatcattaaagcaggcgctggatatcgccagacccagccgtccggtttccgtcatcgtcagcgatctcgatcgcttcaagcgtatcaacgacacgtacggacatcttcagggcgacaaggtcctgcagtttgttgctaatctgctgatggattccgtgcgcccccaggacatcgcggcccgtatcggtggtgaggagtttgttctgatgatggccaacacctcatcagacgcggcgtaccaggtggcggaacgcattcggttaaatctgagcagcttcgataacgccagcagcggcggtcaactacctgagccaatcaccatcagcatgggggtgtttacggcgacgtcagccgcagtagccgcagaaacgtgcgtggaaaatgccgacaaagcgatgtatgaagcgaaggagaccggccgtaaccgcgtggtggtcttt

SEQ ID NO: 19201 - DNA, 384 bp, Enterobacter cloacae
gtgcgccaacagcagggcgaatgtcctcccggtcacgcggtgattacgctggcgggcaatctgcctgcgagagcggtaattcacgccgtagggcctgtctggcatggcggggatcagcacgaagcgagtattctggaagaggcttaccggaactgtctgcgactggctgccgacaatggttataaaacgatggcgtttccggccatcagcacaggcgtgtatggttaccctaaggccgctgccgcaacgattgccgtagaaacggtttaccgctatttgtcgttaaaaccgctgccagagaaggtgatttttgtctgtttcgacgacgacaccacgcatctttatcagcggcttctgactcagcgcagacaagaactggagagc

SEQ ID NO: 19202 - DNA, 917 bp, Enterobacter cloacae
gctgacctgaaagcgaaaaaactgccgtaagagaccgaaggcgcaacggtggtgttccttgatgagtacaaaaacaaggaaggcgaaccgatgggcgtgatcatccagaaaaaggatggcggctacctctacaccacgacagacatcgcctgcgcgaaataccgttacgaaacgctgcatgccgatcgcgtgctgtactacatcgactcccgtcagcaccagcacctgatgcaggcgtggaccatcgtgcgtaaagccggttacgtgccggattgcgtgccgcttgaacaccacatgttcggcatgatgctgggtaaagacggcaagccgttcaaaacccgtgcgggcggaaccgtgaagctgtccgacctgctggacgaagcgctggaacgcgcccgccgtctggtggccgagaagaacccggacatgcctgccgacgagctggaaaaactggccaacgccgtgggtatcggtgcggtgaaatacgcggatctctccaagaaccgtaccaccgactatattttcgactgggataacatgctggcgtttgagggcaacacagcgccttacatgcagtacgcctacacccgcgtgctctcggtgttccgtaaggcgaacattgatgaaagcgtactggcgaatgcgacagtgaccatcacggaagatcgtgaagcacagctggcggcgcgcctgctgcagtttgaagagacgctgacggttgttgcgcgtgacggcacgccgcacgtaatgtgtgcttacctgtacgatctggcgggtccgttctccggcttctaggatcactgggcgcatcgtgctgcggacaacgactctgtccggaacagctgcctgaagctggcgaactcacggcgaccaccctggaccttggtctgcataccctcggtatggccaccatagga

SEQ ID NO: 19203 - DNA, 621 bp, Enterobacter cloacae
atgaatatgacttcgatgacccttgatttacctcgccgctttccctggccgacgctgctttctgtcgtgattcacggtgccgttgtggcgggtttgctgtatacctcggttcatcaggttattgaaatgcccgcgcccgcgcaccgatttcggtgacgatggtatcgccagcggatctcgagccgccgcaggttgcccctccgccgccgcagccggtggcagagcctgagccagaaccagaacccgagcccgttccggagccaccgaaggaagccccggtagtgatccacaaacctgaaccgaagccaaaacctaagccgaagccaaagccggtgaagaaggtcgaggagcgtccgaaacgcgaggaacgtccggttgaaccgcgcgcgacccagacggtggagaatgcggcgccttcgcgtccggtgatgaataacaccgcagccgcgcctaagccgacagtcagtgcccctgcgggtccgcgcgcgctgagtcgcaaccagcctcagtatccgggcgcgagcgcaggccttgcgtattgaaggccgcgtacgggttaaatttgacgttactgccgatggccgcgtggataacgtggaaatattgtccgctcagcttcta

SEQ ID NO: 19204 - DNA, 563 bp, Enterobacter cloacae
atgagtcactcatccgctcccgaaagggaaaatggtgccgttattactgactggcgtccagaggatccggcgttctggcaacagcgcggccatcgtgtagccagccggaatctgtggatttccgtgccgtgcttgttattagcgttttgcgtatggatgttgtttagcgcggtggcggtaaacctgccgaaagtcggcttcacgtttacgaccgatcagctgttcatgctgaccgcgctgccgtcgctgtccggcgcgctgctgcgtgtaccttacgcgtttatggtgccggtgtttggcggtcgtcgctggacggcgttcagtacgggcatcatgatcgtcccctgcgtgtggctcggttcgcggtgcaggatacctctacgccgtttagcgtatttgtgattatctccctgctgtgcggttttgcgggcgcgaacttcgcctccagcatggcgaacatcagcttcttcttcccgaaagcgaagcagggcggcgcgctgggtattaacggcggcctggggaatatgggcgttagcgtgatgcaactcattgccccgctggcg

SEQ ID NO: 19205 - DNA, 994 bp, Enterobacter cloacae
atcaacggcatgagctgcgcaagttgcgtctcccgggtaccaaacagcctgcaaggcggtaccgggcgtcgcgcaggcacgggtaaaccctcgcggagcgcactgcgctggtgatgggcagcgcctccgccgcagatttagtgcaggccgttgagaaagcgggctatggcgcagaggccatcgaagatgatgccgaacgccgcgagcgccagcaggaaactgctatcgccaccatgaagcgcttccgctggcaggcgattgtcgccctgctggtgggtattccggtgatggtgtggggcatgatgggtgacaacatgatggtcaccgacgacaaccgcacgctgtggctggtgattggcctgattacccttgcggtgatggtgtttgcaggcgggcatttctataccagcgcctggaagagcctgaaaaaccgcaccgcgacgatggatactctggtggcgctcggtaccggcgcggcgtggctctattcaatgagcgtgaacgtctggccccagtggttcccgatggaggcgcggcatctctattatgaagccagcgcgatgattatcggcctgattaacctgggccacatgctggaagcccgcgcccgtcagcgctcctcgaaagcgctggaaagattgcttgatttaaccccgccgacggcccgcgtggtcacggacgagggggagaaaagcgtcccgctggcggaagttcagcccggcatgacgctgcgcctgacgacgggcgatcgcgttcccgttgacggtaagataactcagggcgaagcctggctggatgaagcgatgctgaccggcgagcccattccccagcagaaaacagacggcgacgccgttcatgcgggtacggtgctgcaggacggcagcgtgctgtttaccgccagcgccgtcggcagccacacgacgctgtcgcgtattatccgcatggtcgccaggcgcagagcagcaagccggaaattggccagcttgctgacagg

SEQ ID NO: 19206 - DNA, 832 bp, Enterobacter cloacae
atgaaaacgaaagtccaactgtcattcatgatgtttgttgaatggtttatctggggcgcgtggtttgtgccgctgtggctgtggctgagcaaaagcggttttaccgccggggaaatcggctggtcttacgcctgtaccgccattgccgcgatcctctccccgattctggtcggctcgctgacggaccgcttcttcgccgcgcagaaagtgctgtcagcgctgatgttcgccggtgcgattctgatgtacttcgccgcacagcaaacccagttcagcaccttcttcccgctgctgctggtttactccctgacctatatgccaaccatcgcgctgaccaacagtatcgcctttgccaacgtggacgacgtcgaggccgatttcccgcgcatccgcgtgatgggcaccatcggctggatcgcctccggtcttgcgtgcgggttcctgccgcagatgctgggctacagcgatatttccgacaccaacatcccgctgctgatgacggcagccagctccgccctgctcggcgtctttgccctgttcctgccgaatacgccgccgaaaagtaccggcaagctggatttcaaagtgatgctcgggctggacgcgctgatcctgctgcgcgacagaaacttcctggtgttcttcttctgctcgttcctgttcgccatgccgctggccttctattacatcttcgccaacggctatctcaccgaagtggggatgaaaaacgccaccggctggatgacgctcggccagttctccgaaatcttctttatgctcgccctgccgttctttaccaaacgctttggtattaagaaggtcttactgctgg

SEQ ID NO: 19207 - DNA, 1162 bp, Enterobacter cloacae
ctcatcgatgcaggcatgctggtcactaacgaccagggacgaagctacgaccgcttccgcgaacgggtgatgttcccgatccgcgacaagcgtggccgggtaataggttttggtggtcgcgtgctgggtgatgccctgccgaaatacctcaactccccggaaaccgatattttccataagggccgccagctgtacggcctttatgaggcgcacagtaataatgcggaacctccgcgtcttctggtcgtcgaaggctatatggacgtcgtggcactggcgcagtatgacatcaactacgcggttgcgtcgttagggacgtccaccaccgccgatcatattcaactgctgttccgggtgaccaacaacgtcatctgctgttacgacggtgaccgcgcagggcgcgacgccgcctggcgcgcgctggaaaccgcgctgccgtatatgaccgacgggcgtcagctacgctttatgtttctgcccgacggcgaagacccggatacgctggtgcgtaaagagggcaaagcggcgtttgaagcgcggatggagcaggctcagccgctctccacgtttttgtttaacagcctgatgccgcaggtcgatttgagtacccctgacgggcgcgcgcagctcagcacgctggcgttgccgttaatcagccaggtgcccggcgaaacgctgcgcatctatctgcgtcaggagttaggcaacaagctcggcattctggatgacagccagcttgaacgtttaatgccaaaacaggctgaaaacggtgcggttcggcccgcgcctcagctaaaacgcacaaccatgcgtatactgatagggttgctggtccaaaaccccgagttgcgccgcaggtgccgtctctggcgggtttaaaccacgaaaaattgcccgggcttggcttattttcagaactggtcaacacgtgtttgtctcagccaggtctgaccaccggacaacttttagagcattatcgcggcacaaaagaggccgctacccttgaaaaattgtcgatgtgggacgatatagcagataaggacattgcagaaaaaacgttcaccgactcactcaaccatatgtttgattcgatgcttgactgcgccaggaagagttgatagctcgcgagcgcacacacggtttaagcagcgaagaacgccgg

SEQ ID NO: 19208 - DNA, 407 bp, Enterobacter cloacae
ccgaaaccggtcatttgtgccttaaaacggcttgcaggccggcgcgtgtgccaacctgggcgctggggtgcgacatggtcattgccgcccgttccgccagcttcgtgatggccttcagcaaactcggcctggtgccggactgcggcggcacctgggctgctgccgcgcgtggccggacgcgcccgcgccatggggctggcgctgctcggcgacaagctcagcgccgagcaggcgcaggcctgggggatgatctggcaggtagtggatgacgaacagctctccactaccgcgcagcaagatggcgctgcactttgcgtctcaaccgaccttcgggctggggctgatcaagcaggcgatcaacgccgcggaaaccaacactctggacgcccagctcgatctggagcgcg

SEQ ID NO: 19209 - DNA, 1039 bp, Enterobacter cloacae
actatcagcgcctggccgggcgcagcgacgattatcgcgagggcgtcagcgccttcctggcgaagcgcgcgccgaactttacggggaaataagatgctgaacatacggacagtcgccgtgattggcagcggcacgatgggcgcagggattgccgaagtcgccgccagccatgggcatcaggtgctgatctacgacatctccagcgacgcgatatcgcgggccatcgacgggatccgccagcgtctggcctcccgggtgacgcgcggaaaactctccgccgatgccgggagccagatcctcgcccggctgcttccggtcacggatatcgaggcgctcgccgcggccgatctggtcatagaagcggcctccgagcgtctggaggtgaaaaaggcgctgtttgctcggctggctgagatctgcccgccgcagacggtgctgaccagcaatacctcttccatctccgtcacggcgattgcggcggacgtccaccacccggagcgcgtcgcagggctgcacttctttaacccggcgccggtgatgaagctggtggaggtggtcagcgggctggcgacctcttcggaagtggcagacgcgctgtgcgagctggtcgctgaactggggcaaacagcccgttcgctgccagtcaacgccgggattcatcgtcaaccgggtcgcccgtccattctattccgaggcctggcgcgcgctggaagagcaggtcgccccgccggaggtgattgatgccgccctgcgcgacggcggcggtttcccgatggggccgctggagctgaccgacatgattggtcaggacgtgaatttcgcggtgcacctgctcggtatttaacgccttctggcaagagcgtcgttttctgccttcgctggtgcagcaggagctggtgctggcgggaaagctgggaaaaaagagcgggaagggcgtctaacgactggcagggtgacaaaccgccgtgcagtgggtgccggccgtgaaagacagctttcgcccgatgcgcgtggaaataagacgtgacggtgtcaccga

SEQ ID NO: 19210 - DNA, 672 bp, Enterobacter cloacae
gctgaacagatgctggaagctacgcgccgtgaatcaaagtcgacagcgcacgctcgctgtggtctgtaccatggccgtctggaaaaacagacaacgttcgatccacaggcttactgggacgagtaccagcttgacggcctgaccatcaaaaccctgccgggcgtgttcagccgtgacgcgctggatacgggcagcaagctgctgctctccaccctgacgccgcacaccaaaggcaaagtgctggacgtgggctgcggcgcgggcgtgctctctaccgtgctcgccagccattcaccaaaagtgcgtttaaccctgtgtgacgtgagcgccccggcggtagaagccagccgcgcaacgcttgccgcaaacggcattgaaggcgaggtgattgccagcaacgtcttctccgacgtcaccggccgcttcgacatgattatctccaacccgccgttccacgacggcatggagaccagcctggaagccgcgcaaacgctgatccgtggcgcagtccgtcacctcaacagcggcggcgagctgcgtattgtcgcgaacgccttcctggcgtacccgaaagtgctggacgaaaccttcggcttccacgaagtgatcgcgcagaccggccgctttaaggtctaccgtaccgtcatgacgcgccaggccaaaaagtaatct

SEQ ID NO: 19211 - DNA, 566 bp, Enterobacter cloacae
atgtctaaagaaaagtttgaacgtacaaaaccgcacgttaacgtcggtactatcggccacgttgaccatggtaaaacaacgctgaccgctgcaatcactaccgttctggcaaaaacctacggtggttctgctcgtgcattcgatcagatcgataacgcaccagaagaaaaagctcgtggtatcaccatcaacacctctcacgttgagtacgacaccccgactcgccactacgcacacgtagactgcccaggccacgccgactatgttaaaaacatgatcaccggtgctgcgcagatggacggcgcgatcctggttgttgctgcgactgacggcccaatgcctcagactcgtgagcacatcctgctgggtcgtcaggtaggcgttcctttcatcatcgtgttcctgaacaaatgcgacatggttgatgacgaagagctgctggaactggtagagatggaagttcgtgaactgctgtctcagtacgatttcccgggcgacgatactccaatcgttcgtggttctgctctgaaagcgctggaaggcgacgcagagtgggaagcgaaaat

SEQ ID NO: 19212 - DNA, 290 bp, Enterobacter cloacae
  misc_feature (227)..(228): n=g, a, t or c
atgaccgaactcgaacagcttcaagccagcgccgggcaggccgccacactcttaaaagcgatgagcaacccgcgtcggctgctgatcctctgcaccctgtgcggacgcccggcaccagcgcgggggagcttgcgcgaccacggggctaagtccttccgccacgtcgcagcatctggcgcgcatgcgtgaggaagggcttatcgacagcactcgcgacgcgcacgcannttctctattccattaaaaacaatgcggtacatcagcttatcagcaccctgaaaaccctttat

SEQ ID NO: 19213 - DNA, 210 bp, Enterobacter cloacae
cgacgcattatcgtggtcagcgatgaagttgccgccgataccgtacgtaaaacctttctgactcaggttgctcctcctggcgttaccgcgcacgtcgtggatgtcgccaagatgatccgcgtttacaacaacccgaaatatgcgggtgaacgcgtaatgctcctgttcactaaccctacagacgttgagcgcattgttgaaggcggcgtg

SEQ ID NO: 19214 - DNA, 618 bp, Enterobacter cloacae
ttgagcgataccacctacgccattatttatgatttacacagccatactcaggcctctgacggcctgctgacacccgaagccctggttcatcgcgccgttgaaatgcgcgtcggcacgctggcgataaccgatcacgataccactgatgccattccggcggcgcgcgcagagattgcccgcagcgggctggcgctgaatctggtgtccggcgtcgagatctcgaccgtctgggaaaaccatgagattcatattgttggcctgaacatcgatatagaccatccggcacttacggcatttttgcaagaacaaaaaacgcgccgcaatcagcgcgcagagatgatcggcgagcgtctggaaaaggcgcatattccgggcgcgctgcaaggcgcgcaaaagatggcgaacggcggggcggtcacccgcggtcatttcgcccgttttctggtcgacgcgggcaaagcgacgaacatggcggacgtctttaaaaagtatctggcacgcggtaaaaccggatacgttccgccacagtggtgtacaataaaacaagctattgatgtgattcatcattctggcggtaaggccgtgctggcccatcctgggcggtataatctttctgcc

SEQ ID NO: 19215 - DNA, 624 bp, Enterobacter cloacae
atggggccgggcccgatcaacgccgacccgcgcgtgtgcgcgccatgtcgagccaactgatcggccagtacgatccggccatgacccactacatgaacgaggtgatggcgctctatcgcggggtgttccgcaccgagaaccgctggacgatgctggtggacggcacctcccgcgcgggaattgaagccattctggtctccgccatccgcccgggagataaggtgctggtgccggtctttggccgctttggtcatctgctgtgcgaaattgcccgccgctgccgcgcggaggtgcataccatcgaggtgccgtggggagaggtgtttaccccggaccaggtagaggatgcgattaagcgtattcgtccgcgcctgctgctgaccgtgcagggcgacacctccaccaccatgctgcagccgctcgccgagctgggcgcgatctgccgccgctacgacgtgctgttctacaccgacgccacccgcgtcgctcggcggcaacgcgctggagaccgacgcctggggctggacgccgtctccggccgggatgcagaagatgctcgtgcggcccttcgggcacctcgccgatgatcctgagctctcgcatggaggagtcgatccgcggtcg

SEQ ID NO: 19216 - DNA, 1080 bp, Enterobacter cloacae
ggttccagcgacgggctggcggcaggcacggcgctgaccgtcaccgtcaacggtaaagactatgcggccacggtgctggcggacggcacctggagcgcggcgatcccgtccaccgacgtgagcgcgtggccggaaggcaccgtcaaaatcagcgtgaccggcgacagtctgcgggcaatccgatcaccatcagtcacgacgtgacggtggatctggcgaccgttgccatcagcatcaacgccatcgccaccgacgacgtgattaacgcggcggagaagggcgcggatctggtgctgtccggtgcgaccaccaacgtggaagccgggcagaccgtgaccatcagcctgaacggcaaaatttatagcgcgacagtagacgacagcggcaactggacttacaccgtgccgtctgcggatctggtacacctcaaggacggcgacgccagcgtgcaggtgagcgtcaccaacgtcaacggcaacagcgcctcggcgggccgcgagtacagcgtggatgcgaccgcgccgtccgtgaccatcaacacccttgcggctgacgatattctgaacgccgcagaagcgcagtccgatctgaccgtatccggcaccaccaccgccgaagcgggccagaccgtgaccgtgacgctgaacggcaaagactacaccacagccgcaggcgcggacggcagctggacgctgagcgttccggcggcggatctggcatcgctcggcgacggcagcgtcaccgtgacggcaagcgtcacggctaaggcgggcaacccggcgtcggtcgatcatactctgacggtggacgtgaccgttcctgcagtgacgatcaacaccgtggcgggcgatgacgtgattaacatcgctgagcacgctcaggcgcatatcgtcagcggcaccgccaccggcgcggcagcgggcgataaggtcaccgtgaccatcggcggccagacctacaccaccgtgctggacgcggcggggaactggaacgctggcgtaccggccagcgtgatttccggcctcaacgacggcacccgtaaccgtcacggcgtccgtcacggacgcggcgggccacaca

SEQ ID NO: 19217 - DNA, 1120 bp, Enterobacter cloacae
actggtttcggcgatgggcgaagagaaccaggtgcttaacctggcggctcagccgccggccgtggtgctgatggcgggcctgcagggtgcgggtaaaacgaccagcgtcggtaagctgggtaaattcctgcgtgaaaagcacaagaagaaagtgctggtggtctctgcggacgtttatcgcccggcggcgatcaaacagctggaaactctggccgagcaggtcggggtagatttcttcccgtccgacgtggcgcagaagcctgtcgacatcgttaacgcggcgctgaaagaagctaagctgaaattctacgacgtgctgctggtggataccgccggtcgtctgcacgttgacgaagcgatgatggacgagatcaagcaggtgcatgcctctatcaacccggtagagaccctgtttgtggttgacgccatgaccggtcaggatgcggcgaacaccgcgaaagcgttcaacgaagccctgccgttaaccggcgtggtgctgaccaaagtggacggtgacgcccgcggcggtgcggcgctctccattcgtcacatcaccggtaagccgatcaaattcctcggcgtgggcgagaaaactgaagcgctcgagccgttccacccggatcgtattgcctcccgtatcctcggcatgggcgacgtgctgtcgctgatcgaagatatcgagagcaaggttgaccgcgcgcaggccgagaagctggccagcaagctgaaaaaaggcgacggtttcgatctcaccgatttccttgagcagctgcgtcagatgaaaaatatgggcggcatggccagcctgatgggcaaactgccgggcatgggccagatccctgacaacgtaaaagcccagatggatgacaaggtgctggtgcgtatggaggcgatcatcaactcggtgaccctcaaggagcgcgctaacccggatatcatcaaaggttcccgtaaacgccgtatcgcagccggttgcggcatgcaggtgcaggacgttaaccgccttctgaaacagttcgacgacatgcagcgcatgatgaagaaaatgaagaaaggcggcatggcgaagatgatgcgcggcatgaaacgcatggtgccaccggttttccgggggcgtaaa

SEQ ID NO: 19218 - DNA, 930 bp, Enterobacter cloacae
atgtatacgaagattttaggtaccggcagctacctgccaaaacaagtgcgtaccaacgccgatctggaaaaaatggtagatacgtctgacgagtggattgtcacgcgcacaggtatccgtgaacgtcgtattgccgcgccagacgaaaccgtgtcgaccatgggttacgaagccgcacagcgtgctatcgaaatggcgggcattgataaagaacagattggtttgatcgtggtcgccacgacgtctgccacgcatgctttcccaagcgcagcgtgccaggtgcagaacatgctcggcattaaaggctgtccggcgtttgacgtcgctgccgcgtgcgcaggcttcacctatgcgctgagcgtcgccgatcagtacgtgaaatccggtgccgttaaatatgcgctggtgatcggcgctgacgtgctggcgcgtacctgcgatccaaccgatcgtggaacgatcattatttttggtgatggtgcgggcgcggtgctgctggggcagtccgaagagccgggtatcatctctacgcatctgcatgctgatggcagctacggcgaactgttgaccctgcctaacgccgatcgcgttaatccggacaactcgatttacctgactatggcagggaacgaggtgttcaaggtggcggtaaccgagcttgcacatatcgttgatgaaacgctggaagcgaataaccttgagcgtaccgcgctcgactggctggtgccgcatcaggcgaaccggcgtatcatcagcgcgaccgcgaaaaagctgggcatgtcgatggataacgttgtggtgacgctggatcgtcacggcaacacctctgcggcgtcggtaccgtgcgcatttgatgaagcggtaccgaatggacgaatcaaacggggccagctggtcttgcttgaagccttcggtggcgggttcacctgg

SEQ ID NO: 19219 - DNA, 910 bp, Enterobacter cloacae
cgtcagtgggcgcacggcgccgatatggttgtcggccagctggaagcgcagggcgtgaagcaggtgtttgggatcccgggtgcgaaaatcgacaaggtctttgactccctgctggactcctccatcgagattattccggtgcgccacgaagcgaacgcggcgtttatggcggcggcggtagggcgtctgaccggcaaggccggggtagcgctggtcacctccgggccgggctgttccaacctgatcaccggcatcgccaccgccaacagcgaaggcgacccggtggtggcgctgggcggggcggtgaagcgggcggataaagccaagctggtacaccagagcatggataccgtcgccatgttcagcccggtcaccaaatacgccgtggaggtcagttcaccggacgcgattgccgaggtggtttccaacgcgtttcgcgccgccgagcacggcaggccggggggcgcgttcgtcagcctgccgcaggatatcgtcgaccagcccgcgatgggggccattttacccgccagcggcccggcgctgatgggcccggcaccggagtcagcgattaacgacgtggctaagcttatcgaaaacgccaaaaatccggtcattttactcggcctgatggccagccagcccgcgaacagcgccgcgtgcgcaagctgctggaaaaaagccgcattccggtgaccagcacctatcaggccgccggggcggtaaaccaggaacacttcacccgttcgccggccgcgtcggcctgttcaataaccaggcgggcgatcggctgctgcatctggcggacctgattatctgcatcggctacagcccggtggagtacgagccgtccatgtggaacagcggcggtctacgctggtgcacatcgatgtgctgcctgcctatgaagagc

SEQ ID NO: 19220 - DNA, 1007 bp, Enterobacter cloacae
atgcgtgtactgggtattgaaacatcctgcgatgaaaccggcatcgccatttacgacgacgaaaaaggacttctggccaaccagctgtatagtcaggtgaaattgcacgctgactacggcggcgtcgtacctgaactggcctctcgtgaccacgtgcgtaaaacggttcccctgatccaggcggcgctgaaagaggccgggttgagttcaaatgatatcgacgctgtggcctataccgcagcccgggcctggtcggagcgctgctggtcggcgcaacggttggccgttcgctggcgttcgcgtgggatgtgccggcgatcccggttcaccatatggaagggcaccttctggcgccgatgctggaagagaatccgcctgaattcccgtttgtggcgctgctggtctccggcggccatacgcagctgattagcgtaaccggcattggcaagtacgagctgctgggcgaatcgatcgacgatgccgccggtgaagcgttcgacaaaaccgccaagctgctgggtctggattatcctggcggcccgatgctgtcaaaaatggcgtcgcagggaacggaagggcgctttgtcttcccgcgtccgatgaccgaccgtccggggctggatttcagcttctccgggctgaaaaccttcgcggcgaatacgattcgcaataacgatgacagcgagcagacccgcgccgatatcgcccgcgcgttcgaagatgcggtggtggacacgctgatgatcaagtgcaagcgcgcgctggatcagaccggctttaagcgtctggtgatggcgggtggcgtgagcgctaaccgcacgctgcgcgcgaagctcgccgggatgatgcaaaagcgtcgcggggaagttttctatgcccgtccggaattttgtaccgacaacggcgcgatgatcgcttacgcgggaatggtgcgcctgaacgcgggcgcaacgtccgacctcagcgtgtccgtgcgcccgcgctggccgctggcggaactgccggag

SEQ ID NO: 19221 - DNA, 648 bp, Enterobacter cloacae
atgacggcagttgccccggtaatcaccattgatgggccgagtggcgcagggaaaggtactctgtgcaaagcgatggcggaagcattgcaatggcatcttttagattcgggagcaatctatcgcgtgctggcgctggccgcgctgcatcaccatgtggatgtcgcgtctgaagaagcgctggttccgctggctgcgcatctggatgtgcgtttcgtatcgaccgatggcaacctggaagtcatccttgaaggggaagacgtgagcggcgaaatccgtacgcaggaagtggctaatgcggcctctcaggttgcggcgttccctcgcgttcgcgaggcgctgttacgtcgtcagcgcgcgttccgtgaagccccggggctgatcgctgacggacgcgatatgggaacggtggtattccctgatgcgccagtgaaaattttccttgacgcctcctcggaagaacgtgctcaacgccgcatgcttcagttgcaggaaaaggggtttagtgttaactttgatcgccttttatccgagataaaagagcgcgatgaccgcgatcgtaaccgcgccgtcgccccacttgttcctgcagaagatgcattagttctggattcaaccagtttaactattgagcaagtgattgaaaaagcg

SEQ ID NO: 19222 - DNA, 1183 bp, Enterobacter cloacae
cccatgagtatgtcttccataccttcgcattccccatccggtaagctctatggctgggttgaaaggatcggcaataaagtgccgcaccctttcctgctgtttatctatctgattgtgattttaatggtcgccaccgccgtgctctccgcctttgacgtgagcgtgcgcagcccgagctgacggcagcctggtggcggtaaaaaacctgctcagcgttgacgggctgcactggtttttacccaacgtgattaaaaacttcacgcgcttcgccccgctggccgccattctggcgctggtgctgggcgccgggctggctgaacgcgtgggcttgctgcctgcattaatggtgaagatggcttctcacgtcagcgcgcgttacgccagctatatggtgctgtttatcgccttcttcagccatatctcctccgacgccgcgctggtgatcatgccgccgatgggggcgctgattttcctcgccgtcgggcgtcaccccgtggcgggcctgctgtcggcgattgcgggcgtgggctgtggatttaccgccaacctgctaatcgtcaccaccgacgtgctgctctctggcatcagcacggaggcggcaaagaccatcgatgcggcaatgcacgtcagcgtgatcgacaactggtactttatggccagctcggtgattgtcctgacgattgtcggcgggctgattaccgataaaatcatcgagccgcggctgggtaaatgggaaggccgtagcgatgaaaagctggagaccctgagcaaagagcagcgcttcggcctgcgcgtggcgggcgtggtctcgctggcctttatcgcgctggtggcgctgatggtggtgccggaaaacggcatattgcgcgatccggttaaacataccgtcctgccctcgccgtttattcagggcatcgtgccgctgattattctgtttttctttgtcgtctcgctcgcctacggtatcgctaccggcaaaatccgccgtcagggcgatctgccgcagctgatgatcgagccgatgaaagagatggcgggctttatcgtgatggtgttcccgctggcgcagtttgtggcgatgtttaactggagcaacatgggcaagtttatggccgtgggcctgacagacgcgctggaggcagccgggctaagcggcgtaccggcgtttgtcggcctggcgctg

SEQ ID NO: 19223 - DNA, 713 bp, Enterobacter cloacae
atgcaatcattacaacgtaaagttctgcgcaccatctgtcccgatcaaaaaggactgatcgcacgaattaccaacataggctacaaacatgaactgaatatcgtgcagaacaacgagttcgttgaccaccgtaccggccgcttctttatgcgtaccgaactcgaaggtattttcaacgacaccaccctgcttgccgatctcgacagcgcgcttccggaaggttccgtacgcgagctgaccccagccggtcgacgccgcatcgtgatcctggtgacaaaagaagcacactgtctgggcgacctgctgatgaaagcaaactacggcggtctggacgtggaaatagctgccgttattggcaaccatgagacgctgcgcacgctggtcgagcgttttgatattccgtttgagctggttagccacgaaggccatacccgtgaagaacacgacgatctgatggcgcaggccattgaagcgcataacccggactacgtggtactggcgaaatatatgcgcgtactcacgccttcattcgtggcgcgtttcccgaacaagatcatcaacattcaccactcgttcctgccagcctttattggcgcgcgtccctaccaccaggcgtacgagcgcggcgtgaagatcatcggtgcaacgcacactacgtgaatgacccctggacaaggtccatcatcatgcaggacgtgattcacgtggatcaa

SEQ ID NO: 19224 - DNA, 458 bp, Enterobacter cloacae
gtgtctcaactctgcccttgtggtagcgctctggagtatagcctatgttgccagcgatatctgtctggcgatcaggttgcaccagacccgtcacacctcatgcgttcacgttacactgcttttgtgatcaaagacgcagactacctgattaaaacctggcatccctcctgccaggctgccgaattcagacaggacatcgaagccggttcgcgaacacgcagtggctcggccttaccgtctatgaatcctcaacgggcagccatgttgatgaaggttacgtcagctttgttgctcgttttaccgagaataataaacctggtgccattatcgagcgttcccggttcttaaaggaaagcgggcagtggtattatattgacggaacgcgaccacagtttggtcgtaacgatccctgcccgtgtggttcaggtaaaaaatttaaaaagtgttgcgggcagtaa

SEQ ID NO: 19225 - DNA, 420 bp, Enterobacter cloacae
atgaaggattcagactttttcacctggcgacgggattgctccctccggtttcaggaattgacgaataccgatgaggtatatcgggagctagagcggcaaactcaggcgctggaattcgattattacgcgctctgcgtgcggcatcccgtgccctttacgcgccctaaaatctctttgcagaccacttatccaaagccgtggatggcgcaatatcaatccgcgaactatttcgctatcgatcctgttttaaaagcggaaaatttcatccagggtcatttgccctggacagacgcattatttgccgaggctcaggaattatggcatagcgcccaggaccacggtttacgcgcgggaataacgcagtgcctgatgctgcctaatcatgcgtttcgctgcctgtctcgtgcgagtactagtgta

SEQ ID NO: 19226 - DNA, 752 bp, Enterobacter cloacae
atgagtgctatcgacgtcaaaaacctggtgaaaaaattccacggtcaaacggtgctccacgggatcgatcttgaagtagagcagggtgaagtggtggcgattatcggaccgagcggttcgggaaagacaacgctcctgcgcagattaacctgcttgaacagccggaaggcggcacgattcgggttggggatatcacgattgataccgggaaatccattagccagcagaaagggttaattcgccgcctgcgccagcatgtcggctttgtattccagaacttcaatctcttccctcaccgtacggttctggagaacattattgaagggccggtgattgtaaaaggtgaatcgaaagaggaagcgacggtacgcgcgcgtgaactgctcgctaaagtcgggctggcggggaaagagaccagctatccacgccgtctgtcgggagggcagcagcagcgcgtagcgatagcgcgcgcgctggcgatgcgccctgatgtgatcctttttgatgaaccgacctctgcgctcgatccggaactggtgggtgaggtgctgaacaccattcgccagctggcgcaggagaaacggacgatggtgatcgtgacacatgaaatgagctttgcacgcgatgttgctgacagagccatcttcatggatcaggggcggattgtggagcaggggccagcgaaaagcctgttcgctaaccctcaacagccccgaacccgtcagttccttgaaaaattccttatgcagtag

SEQ ID NO: 19227 - DNA, 837 bp, Enterobacter cloacae
atgacaacgaacacagtttcccgcagggtcgcgtggctacgcgtggtcacgctggcagttgccgcgtttatttttaataccacagaatttgttccggttgggctgttgtctgacatcgctgaaagtttccagatggaaacggcgcaggtgggcattatgttgaccatctacgcctgggtagtggcgctgatgtccttgccgtttatgcttttgaccagccagatggagcggcgcaggctgctgatcggtctgtttgtgctgttcatcgccagccacgtgctgtcgtttatggcatggaattttacggtgctggtcattagccgaatcggcattgcctttgcccatgcggtgttctggtcgatcaccgcgtcgctggcgattcgactcgcgccagcgggtaaacgcgcgcaggcgctgagcctgattgccaccggtaccgcactggcgatggtgctgggtctgccgattggccgcatcgtagggcaatacttcggctggcgtacgaccttcttcgccattggtatgggcgcgctggttacgctggtatgcctgattaagctgctccccgcgctcccgagcgaacatgccggctcgctgaaaagcctgccgctgctgatgcgtcgcccggcgctgctgggtatctacctgcttaccgttattgtggtgacggcccattacacggcgtacagctacattgaaccctttgttcaggtggtggcgggctttagcgccagctttgccaccgtcctgctgttgatcctcggcggagcgtgcattattggcagcgtgctgttcggtaagctgggtaaccggcatgcgtcgacgctggtgagctgc

SEQ ID NO: 19228 - DNA, 363 bp, Enterobacter cloacae
atgtctatcactaaagatcaaatcattgaagcagtagcagctatgtccgtaatggacgttgtagagctggtttctgcaatggaagaaaaattcggtgtttctgctgctgctgctgtagctgtagctgcgggcccggctgaagctgctgaagaaaaaactgaattcgacgtaattctgaaagctgctggcgctaacaaagttgctgtcatcaaagcagtacgtggcgcaactggcctgggtctgaaagaagctaaagacctggtagaatctgctccagctgcgctgaaagaaggcgtgagcaaagacgacgcagaagcactgaaaaaatctctggaagaagctggcgctgaagttgaagttaaa

SEQ ID NO: 19229 - DNA, 96 bp, Enterobacter cloacae
gttaaaatcgttaagtttcgtcgtcgtaagcactaccgtaagcagcagggccaccgtcagtggttcactgatgtgaaaattactggcatcagcgcc

SEQ ID NO: 19230 - DNA, 255 bp, Enterobacter cloacae
atggcacataaaaaggctggcggctccacacgtaacggtcgcgattcagaagctaaacgtcttggcgttaagcgtttcggtggcgaatccgttctggcgggtagcatcatcgttcgtcaacgtggtaccaaattccacgctggcaacaacgtaggttgcggtcgtgaccacactctgtttgctaaagcagacggtaaagtgaaatttgaagttaaaggcccgaacaaccgtaaatacatcagcatcgttgctgag

SEQ ID NO: 19231 - DNA, 1122 bp, Enterobacter cloacae
gtggatatgccaagctatggcggcgtggtggcaaactcgtatttgccatctaactggctgtcagcgttagggctgtatgcctgggcgcaggcggacgaatccagggatgtgaaatcgctgatcaagccaacgaaacaattcacctaccagccgccagccgacgggattgatgatacggacgtcgtctttgtcataggcgaaacgacgcgctgggatcatatgggtattctcggctataaccgggataccacgccaaagctggcgcaggagaaaaacctggtggcctaccgtggctactcctgcgataccgcaaccaagctcttcctgcgctgcatgtttgtgcgtgaaggcggtgcaagcgataacccgcaacgcacgctgaaagagcagaacgtgtttgccgtgctgaagcagcttggatttagctctgacctgttcgccatgcaaagtgagatgtggttctacaccaacacgctggcagataacatcgcgtaccgcgagcagattggcgccgaaccgcgtaaccgcggcaaaaacgtcgacgacatgctgctgctggaagagatgtcccagtccctcaagaaccatccgcagggtaagcatctggttattctgcataccaaagggtcgcattacagctactaccagcgatacacgcgtgatttcgcgaagtggcagcctgagtgcgtgggcattaataaagactgcagcaagcaggagctgatcaacgcctacgacaactcggtgctgtacgtggataccttcctgagccgggtgatcgaccagctgcgcgataaaaaagcgattgtgatttacgcggcagatcacggtgaatccatcaatgagaaagagcatctgcacggtacgccgcgcaagctggcaccgccggaacagttccgcgtgccgatgatcatgtggatgtcggataagtatcttgaaaatccggagaaggcgaagatgtttgctcagctgaaaaaagaggcggagatgaaggtgccgcgtcgccacgttgagctgtacgacaccattatgggttgtctcggttatacctcaccgaacggtgggattaacgaaaacaacaactggtgtaaactccctgataacagcgtaaaagccgcgcag

SEQ ID NO: 19232 - DNA, 713 bp, Enterobacter cloacae
gtgaaattccctgccctattccgtaataccctgcttttatctggactttttgttttaggacttgcctcagccgctgccgccgactggccgcgtcaggtgaccgacagccgaggcgttcacacgcttgagagcaaaccgacgcgcattgtctccaccagcgtgaccttaaccggctccctgctggcgattgacgccccggtcgtcgccagcggcgccaccacgccgaacaaccgcgtggcggatgcgcagggctttttgcgccagtggggtgatattgcgaaacagcgcaaggttgcacggctgtacatcggcgagccgagcgccgaagcggtcgccgcccagatgccggatctgattttgatcagcgctaccggcggggattccgcactggcgctgtacgatcagctctcagctatcgcgccgacgcttatcatcaactacgacgacaaaagctggcaggcactgctgaccctactgggcaccattaccgggcaggaaaaacaggccgtagagcgcattgccgcctttgataaacagctcgcgcaggtgaaagagcagatgaagtgccgccgcagcctgtcaacgccatcgtctataccgccgccggcacagcgccaacctgtggactgcggaatccccgcagggcaagctgctgcaccagctgggctttacgctggcggagctgcccgccggactgcacacctcaaaaagcc

SEQ ID NO: 19233 - DNA, 408 bp, Enterobacter cloacae
atggtaaagattgatttaaatgccgatctgggcgagggcggaagcgcagatgctcaactgatgatgctggtctcctcggtcaatatcgcctgcggctttcacgcgggtgatgcccaaaccatgctggagagcgtgcgtaatgccattaaaaacggcgtcgcgattggggctcaccccagctttcccgatcgggaaaactttggccgcacggcgatggatcttccccctgagacggtctacgctcaggtgctctaccagatcggcgcgctggaggcgatggtgcgcgcccagaacggcgtgatgcgccacgtgaagccgcacggcatgctctacaaccaggcggcgaaagatgcggatctggcggacgccattgcccgcgcggtgcgggactgtaatccgggggtccac

SEQ ID NO: 19234 - DNA, 1084 bp, Enterobacter cloacae
gtaattgaacatgctgcaccgccggcctttgatcccgccagcaaaccggatgtgcgcatttccgctatcagcgcggcgtccgtcgatcctctgcgcgggctgggcgtctgggaagccggtgctggcgatgcgcgcccatccttatagccgtcttgaaacctgggagtgggaaaatgcccacgtcgcgtttgatgccgctgagctaaagctgccgcgcctgggttatatggtggaaaacaacgtgcttcagcaggcgctctggcaggcgctggaggcgcacccgaaggtgactgcgcgttccggcgtcgattaaggctctacatcctcaggagagcgagtatttgtgacgctcgacagcggcgatgaactggccgttaagctcgtcgtcggagcggacggcgctaactcgcaggtccgacagatggcgggaattggcgttcatgcctggcagtatgagcagtcctgcatgctgattaccgtcgagtgcgagaatgcgccgggagaaagcacgtggcagcactttacgccgaatggcccgcatgcgtttttaccgctgtttgataactgggcatcgctggtctggtacgacaaaccggcacgcattcgccagctgcaggggctttcaatggaacaattgcagcgggaaattcgcctgcatttcccgagtcgtctgggcaacgttacgccggtggctgccggggcgtttcccctcacgcggcgccatgctttgcagtatgcccgtgaagggctggcgctggtgggcgatgcagcgcacactattcatccgctggccgggcagggcgtgaatctggggtaccgtgatgtcgttccgttactggatgtgctgagcagcgcccgcgggcacgcggaaaactgggccagccatcagattctgaagcgttaccagacgcgacgcatggcggataactttattatgcagtcggggatggatctgttctatgccgggttcagcaatgacttagccccggtgcgcattctgcgtaatattggattgatggcagcggagcgtgcaggtggtttgaagcgtcaggcgctgaaatacgccttaggactttagttttca

SEQ ID NO: 19235 - DNA, 1069 bp, Enterobacter cloacae
  misc_feature (1033)..(1033): n=g, a, t or c
cctccattcagaccattcctgacagtcttccatatttcctccatttttccgctgtgttagctgactaaactagtatcattccccgaagtcttcaggatgagaacgtataacgatgaaaggcagtaacaaatcccgctgggcaatcgccgctggcatcattgtggtggtccttgccgccgcctggtactggcacagtcaatccgcgaactccgcagcccccgcgggtgcaaatagtcaggcacagcgcccggcaggcggagggcgtcacggcatgcgcggcggcgcgctggcgccggtccaggcggcgacggcagtgaataaagccgttcctcgctatcttactggccttgggaccattaccgccgccaacaccgtgacggtgcgcagccgcgtcgacggccagctgatggctattcacttccaggaaggtcagcaggttaaagcgggcgatctgctggccgaaatagacccgagccagtttaaggtcgccctcgcccaggcgcaggggcagctcgcgaaagacaaagccacgctcgccaacgcccgccgcgatctggcccgctaccagcagctagtgaaaaccaacctcgtatctcgtcaggagctggacacccagcagtcgctggtcagcgaaacgcagggcaccatcaaagccgacgaggccgccgtggccagcgcccagctgcagctggactggagccgcatcaccgcgccgattgacggacgcgtgggcctgaagcaggtcgatatcggcaaccagatctccagcggcgacaccacgggcatcgtggtcatcacccagacccacccgattgatttagtctttaccctaccggaaagcgacattgcgaccgtggtgcaggcgcaaaaatccgggaaggggctggtggtggaagcctgggaccgcagcaacaagcagaagctgagcgaaggttccctgctcagtctggataaccagatcgacaccaccaccggcaccatcaagctgaaggcgcgctttaacaatcaggacgatgcctctctttgggtcganttcggcaacgcgcgtatgctggtcgcgaccgaagag

SEQ ID NO: 19236 - DNA, 830 bp, Enterobacter cloacae
ggctattacatcgtcagcggcggcggtaaacgcattcgtccgatgattgctattctggctgccagagccgttggctatcagggaaatgctcacatcactatcgcagcgctcatcgaatttattcacacggcgacgcttctgcatgacgatgttgtggatgaatcggatatgcgtcgtggcaaagccacggcaaacgccgctttcgggaacgcagccagcgtcctggtgggggattttatctatacccgcgccttccagatgatgaccagcctgggctctcttaaagtgctggaagtcatgtccgaagccgtgaacgttattgctgaaggcgaagtgctgcagctgatgaacgtcaacgaccctgacatcaccgaagaaaactacatgcgcgtcatctacagcaaaaccgcgcgcctgtttgaagcggcggcccagtgctccggcattctggctgactgtaccgaagcacaggaaaaaggcctgcaggactatggccgctacctgggcacagccttccagttgattgacgatctgctggactatagtgcggacggcgagacgctcggcaaaaacgtgggcgatgatctgaacgaaggcaaaccaaccctgccgctgctgcatgctatgcgcaacggaacagccgaccaggcgaaaatgatccgtgaagcgattgagcagggaaatggccgccatcttctggagcctgtcctggaaaccatggctatctgcggatcgctggaatggacgcgtcacgtgcggaagaagaagccgacaaagccatcgaagcgcttcaggtcattccagacagcccatggcgcgatgcactgatt

SEQ ID NO: 19237 - DNA, 2287 bp, Enterobacter cloacae
  misc_feature (2254)..(2254): n=g, a, t or c
gacgccgtgatgccatccgcgccggtttcgccgccggaatccgttattcagcagcctcaggttgactggcagactgcgccaggcgttcacacgccggagcctgttatcgcgcctgaacctgaaagctacattcctgtgcagcaggagcagtggcagcagccttatcagccgccgcagcctgcgtatgaaccgcaagattacccgcactatgaacagcctgtggcccaaccttatcaggagtatgtgcctgagccggttgaacctgtgcagccttatgtagagccgcagcctgaagctgaaatcgtggaagaggtaaaaccctctcgtccaccgatgtactattttgaagaagttgaagagcgtcgtgcgcgtgaacgcgagcagatggcggcctggtaccagcctgtgcctgaaccggtgcaggagccggtgacgaaagcgccttctgtttccgttccaccgatcgacccgacgcctgcagtcgcacccgtagcggaaagcgtggagcaggctaccgcggccgctgccgtagtgcgcctgtctttagcctggcaacagggggcacaccacgtcctcaggtgaaggaggggattggtccgcaactgcctcgccctaaccgcgttcgtgtacccacccgccgtgagcttgcctcttatggcatcaagctgccttcccagcgtatggccgaagagaaagcgcgcgagcctgagtacgaagatgacgccgatgaaatgcagcaggacgagctggcccgtcagttcgccgcgcagcagaatcaacgctacggtgaagaatatcagcacgatgaaccggtgctggaagacgaagaggacgcggctgaagcagaactggcgcgccagtttgccgccacccagcagcagcgctattccggtgagcaaccggctggcgcaaatccgttctcgctgtctgattttgaattctcgccgatgaaggatctggtggatgatggcccgagcgagccgttatttaccccgagcgtgatgccggaagcggagcctgtgcgccagcagccagcaccacaggcctacgcgcagccgcaccagcctgttcagcagccgcagcagccgcagcagccgccacagccaccgcagttccagcagcctgcgcctcagccgcaggaaagtctgattcacccgctgctgatgcgtaacggtgacagccgtccgctgcagcgtccaagcacgccgctgccgtctctggatctgttaacgccgccgccgtcagaagttgagccggtcgataccttcgcgcttgagcagatggcgcgtctggtggaagcacgtctggctgacttccgtatcaaggcggacgtggtgaactactcgccgggtcctgtgattacccgttttgaactgaacctggcgcccggcgttaaagctgcgcgtatttccaacctgtcccgcgacctggcgcgttctctgtcgaccgtggcggtgcgtgtggtggaagttatccctggcaagccgtacgttgggcttgagctgccgaacaagaaacgtcagaccgtctacctgcgtgaagtgctggataacaccaaattccgcgataatccgtccccgctgaccgtggtgctgggtaaagatatcgcgggcgatccggtcgtggccgatctcgccaaaatgcctcacctgctggttgcgggtaccaccggttccggtaagtctgttggtgtgaacgccatgatcctcagcatgctctataaagcgcagccggaagatgtgcgcttcatcatgatcgacccgaaaatgctcgaactgtcggtctacgaaggcatcccgcatctgctgaccgaagtggtcaccgacatgaaagacgccgccaacgccctgcgctggagcgtcaacgagatggaacgccgctacaagctgatgtctgcgctgggcgtgcgtaacctggccggttataacgagaaaattgcccaggctgtgcgcatggggcgtccgatcccggatccttactggaagccgggtgacagcatggatgctcagcatccggtgctggaaaaactgccttatatcgtcgtgctggttgatgaattcgctgaccttatgatgaccgtcggtaagaaagtagaagagttgattgcccgtctggcgcagaaagcgcgtgcggccggtattcaccttgtgctggcgacccagcgtccttccgtggacgttatcaccggtcttatcaaagcgaacattccgacgcgtatcgcctttaccgtatccagtaaaattgaacaccgtancattcttgaccagggcggcgcagagtcgctgct

SEQ ID NO: 19238 - DNA, 642 bp, Enterobacter cloacae
gtgaccgctttttctaccctgaatgttctgcccgccgcccagctcgataacctcatcgagttgggttacctcacgatgacgcctgttcaggcggccgcgttgcccgccatccttgagggccgtgacgtgcgcgtgcaggcaaaaacgggcagcgggaaaacggcggcatttggcctcggcctgttgcagcatatcgatgcggcgctttttcagacccagtctctggtgctgtgcccgacccgcgaactggcggaccaggtcgcgggtgaactgcgtcgcctggcgcgtttcctgccaaacaccaagattttaaccctctgtggcggacagccgttcggcgcgcagcgtgattcacttcagcatgcgccgcacattattgtcgcaacgcccggccgcctgctggatcacctgcaaaaaggcaccgtctcgctggatgcgttacaaacgctggtgatggacgaggcagacaggatgctggatatgggcttcagcgatgcgattgacgaggtgatccgtttcgccccgaccgatcgtcagacgctgctgttctccgcgacctggccggaggcattcgccgccatcaacgggcgcgtgcagcccaatccggttcacattgaaatcgacagcgtaaatgcgctgccc

SEQ ID NO: 19239 - DNA, 884 bp, Enterobacter cloacae
acagacgttgcagcccagtgttttttaaacgccctgttgcgcgaaacgaaggactggcgctatctccacgctaccgctgcggatgcgttaccgaacattcatatcccgctgtcccaaacccaggcgcttcgggttccggtacgctatttctctcccacccagcatcatcagtaccgtttcccggcaacgcttattcagagcaacagtgatgacggtgacgccgtcacatttgaccaactggttgatttaattcttgaaaaaccatcagttaaaggctcgctggatgccgatacgctggcgcgttttaagcagcgcgttctcgaaagccatgcgcacacctggcaggcgatcgatctgcgccacagctgggcaaacctgcgcgataagccgctgacgtttgccgacgcggaacaggcgctgctggtcggccacgcgtttcaccctgcaccgaagtcgcacgagccgttcaacgaaaccgaggcgcgtcgctatctgcccgatttcgcctcccgcttcccgctgcgctggtttgccgttgagagcacgctcgttgccggcgacagcctgaacgtctccctgcgcgagcgtctgctgcgcttcgcggcccagagcgcgcctgagctgctcggccacttcaccgacacccgctggctgctgccgatgcatccatggcaggccgactatctgctggagcaggactggtgccagcgtctggcggaaaacggttcattgcaggatctgggcgaacgggcgcgcagtggctgcctaccagctcctcccggtcgctgtacagcgaaaccaacagcgacatgattaagttctccctcagcgtgcgcctggacaactccgtgcgcacgctgtcggtcaaagaggttaagcccgga

SEQ ID NO: 19240 - DNA, 478 bp, Enterobacter cloacae
atgtttgtcatctggagccatgaaaaagggttcatcatgagtcatcagctcaccttcgccgacagtgaattcagcagtaagcgccgtcagaccagaaaagagattttcttgtcccgcatggagcagattctgccatggcaaaacatggtggaagtcatcgagccgttttatcccaaggctggtaatggccggcgaccttatccgctggaaaccatgctacgcattcactgcatgcagcattggtacaacctgagcgatggcgcgatggaagatgctctgtacgaaatcgcctccatgcgtctgtttgcccggttattcctggatagcgccttgcgggaccagaacaccatcatggatttacgtcacctggaggacgaggatgaactggcccgtcaattgttcaaggcgatcagtcggtgggtggccgaagcaagacgtcatgaagacacaagggaccttgggcgatgcaaccattaat

SEQ ID NO: 19241 - DNA, 783 bp, Enterobacter cloacae
ccatgccgcagacacggcgacataaataagacagacgggagcattacaatgaaaaagttagttctggccgcattactcgccaccttcgccgctggcgcatccgcagctgataaaatcaattttggcgtgtccgccacctatccgccgtttgaatcgctggatgccagcaaccagatcgtgggtttcgatatcgatctggcgaaagcgctgtgcaaacaaatgcaggccgactgcacctttaccaaccatgccttcgacagcctgatcccgtcgctgaaatttaaaaaatacgacgcggtgatctccgggatggacatcacgcctgagcgcagcaagcaggttgcgtttaccgacccgtactacgccaactcggcggtcgtgattgcgaagaaaggtgcctatacctctttcgatcagctgaaaggcaaacgcatcgggatggaaaacggcaccacgcaccagaaatacctccaggacaaacatcctgaagtgaaaaccgtagcctatgacagctatcagaacgcgattattgacctgaaaaatggccgcatcgacggcgtgttcgcgataccgccgtggtgaacgaatggctgaaaaccaatccgcagctgggcaccgcaaccgagaaagtgaccgatccgcagtacttcggtacgggtctcggcatcgcggtacgtccggataacaaggccctgctggaaaaactgaacgccgcgactgaaagcgactaaagcggacggtacgtatcagaaaatcagcgagcagtggttcccgcagtaagat

SEQ ID NO: 19242 - DNA, 957 bp, Enterobacter cloacae
atgaaactgtcacgggtgagtgccgttaactggaacaagattcaggacgataaagatctggaggtgtggaaccgcctcaccagcaacttctggctgccggaaaaggtcccgctctccaacgatattcctgcctggcaaacgctgagccacgccgaacagcagctgacgatccgcgtctttaccggcctgacgctgctggacaccattcagaataccgtcggtgcaccggctctgatgagcgacgcgctgacgccgcacgaagaggcggtgatgtcgaacataagctttatggaggcggtgcatgcccgctcctacagctcgattttctcgaccctgtgccagaccaaagacgtggacgcagcctacgcctggagtgaagagagcgagtcattacagagaaaggcggagctggttctggaatattaccgcgccgacgagccgctgaagaagaagatcgccagcgtgttcctggaatctttcctcttctattccggcttctggctgcccatgtactggtcgagccggggcaagctcaccaacaccgccgatttgattcggctcatcattcgtgatgaagcggtgcacgggtattacattggctataagtatcagaaaggactggagaaagtcagcgaggcgaagcgcgaggagcttaaaggctttgcgctcgatttgctgatggatctgtacgacaacgagctgagctatacggaggaactctacgccggcaccggctgggaggacgacgtgaaggccttcctctgctacaacgccaacaaggcactgatgaacctgggctacgacgcgctgttcccgccggagatggcggaggtgaacccggcgattctggccgcgctgtcgcccaatgccgacgaaaaccacgatttcttctcgggatcgggctcatcgtacgtgatgggcaaagcggtggaaaccgaggatgaagactgggatttt

SEQ ID NO: 19243 - DNA, 1425 bp, Enterobacter cloacae
atgggcgcgacctacctggccgtagccgcaggtcatccgctggcgcagaaagcggcggaaaacaatccggagctggcgttattcatcgatgagtgccgcaacaccaaagtggccgaagccgatatggcgacgatggagaaaaaaggggttgataccggctttaaagccattcacccactgacaggcgaagcaatccctgtctgggccgccaacttcgttctgatggagtacggcactggcgccgtgatggctgttccgggtcacgaccagcgcgactacgaatttgccaccaaatatggcctgaccatcaagcctgtcatcctgacggctgacggttcagaaccagacctgtctgaacacgccctgactgaaaaaggcaccctgttcaactccggtgaatttagcggtctgagcttcgaagagggcttcaacgccatcgccgataagctggcctctctgggcgtaggcgaacgtaaagttaacttccgtctgcgcgactggggcgtgtcccgtcagcgttactggggtgcgccaatcccgatggtgacgctggaagatggcaccgtgatgccaacgccagaagatcagctcccggtgatcctgccggaagacgtggtcatggacggtatcaccagcccgattaaagccgatcctgagtgggcaaaaaccaccgttaacggacagcctgcgctgcgtgaaaccgacacctttgacacctttatggagtcatcctggtactatgcgcgctacacctgcccgcagtatcaggacggtatgctcgattccgatgcggcaaactactggctgccggttgatatctatatcggcggcatcgaacacgccatcatgcacctgctctacttccgcttcttccacaaactgatgcgcgatgcaggcatggtgaactctgacgaaccagcaaaacagctgctgtgtcagggcatggtgctggcagatgcgttctattatgttggtgccaacggcgagcgtaactgggtttcaccggttgatgcgatcgtcgagcgtgacgagaagggccgtatcgttaaggcgaaagacgccgaaggtcatgaactggtctacaccggcatgagcaagatgtccaagtcgaaaaacaacggtatcgatccgcaggtgatggttgagcgttacggtgctgataccgtgcgtctgttcatgatgtttgcctctccggcggacatgaccctggaatggcaggagtccggcgtggaaggggcgaaccgcttcctgaaacgcgtctggaaactggtttacgaacacactgcaccgggcgatgccccggcgctgaacgccgccgcactgactgaagatcagcaggcgctgcgtcgcgatgttcataaaacgattgcgaaagtgaccgatgatattggtcgtcgtcagaccttcaataccgcaattgcggcg

SEQ ID NO: 19244 - DNA, 328 bp, Enterobacter cloacae
gctgcaggcggccttgcgaatgccgccattcgcgccgccgaaatcgaggcgaccgctttcgccctgttcaccaaaaacccagcgccagtggcgcgccgcgccgctcaccgctgacgtgattgatgattttaaagccgcctgtgagaagtatcactatgggccaggccagatccttccccacgacagctacctgatcaacctcggtcacccggttgaagaggcgctggaaaaatcccgcgaggcgtttcttgatgaagtacagcgctgcgaacagctggggctgacgctgctgaacttccatccgggcagccatctgatgcaaatcgac

SEQ ID NO: 19245 - DNA, 1722 bp, Enterobacter cloacae
atgcagaatcaggtgtggatctcagccgccctgaaaattcctctgtgccttgcccaatacgtggtgcacggccagcgtaccgttttcccgattagcctcggtttagcctcttcctttaacctcgacgcggtgaaaaccgttgggcgcgtgtcggcttatgaagctgcggacgacggcctgaacatgacctgggcgccaatggtggacgtttcgcgcgatccgcgctgggggcgcggctcggaaggttttggtgaagatacgtatttaacctccacgatgggtaaaaccatggtggaagcgatgcagggcaaaagcccggcggaccgctactcggtgatgaccagcgtcaaacacttcgcggcctatggcgcggttgaaggcgggaaagagtacaacaccgtcgacatgagcccgcagcgcctgttcaacgactacatgccgccgtacaaggcggggctggatgcgggcagcggcgcggtgatggtagcgctgaactcgctgaacggcacgcctgcgacctctgactcctggctgctgaaagacgtgctgcgcgaccagtggggctttaagggcatcaccgtttctgaccacggcgctattaaagagctgattaaacacggtaccgcctccgatccggaagacgcggtgcgcgtggcgctcaagtccggcatcaacatgagcatgagcgacgagtactacagcaaatacctgccggggctggtgaagagcggcaaggtaacgatggcggagctggacgatgccgcgcgccacgtgctgaacgtgaaatacgacatggggctgtttaacgatccgtacagccatctggggccgaaggattctgacccggcagataccaacgccgaaagccgcctgcaccgcaaagaagcgcgtgacgtggcgcgcgaaagcctggtgctgctgaaaaaccgcctcgacacgctgccgctgaaaaaatccggcaccattgccgtagtgggcccgctggccgacagcaagcgcgacgtgatgggcagctggtctgcggcaggcgtggccgatcagtccgtgaccgtgctgaccgggattaagagtgccgtgggtgataacgcgaaagtggtgtacgccaaaggggcgaacgtcaccaacgacaaagacatcgtcaccttcctcaaccagtacgaggaagcggtgaaggtcgatccgcgcacgccgaaggagatgatcgacgaggcggtgaataccgcgaaacagtctgacgtcgttgtcgcggtcgtgggcgaagcgcagggtatggcgcacgatgcctccagccgtaccgacatcaccatcccgcagagccagcgcgatctgatcgccgccctgaaagccaccggcaagccgctggtgctggtgctgatgaacggtcgtccgctggcgctggtgaaagaggaccagcaggctgacgccattctggaaacctggtttgccggtaccgaaggcggtaacgccatcgccgacgtgctgtttggtgattacaacccgtcgggcaagctgccgatgtccttcccgcgctccgtcgggcagatcccggtctactacagccacctgaacaccggtcgcccgtataacgccgataagccgaacaagtacacgtcccgttacttcgacgaagctaacggcccgctgtatccgtttggttacggcctgagctacaccaccttcaaggtttctgacgtgaaaatgtccgcgccgacccttaagcgt

SEQ ID NO: 19246 - DNA, 443 bp, Enterobacter cloacae
gcgctggaaaacgtgatgtttggcccacggcgcgtgcgcggtgccagcaaagcggcggcggaacgctggcaaaagatctgctggcgaaagtcggcctggcagaacgtgcgcaccactacccttccgagctgtcaggcggccaacagcagcgtgtggcgattgcccgcgccctggcggtcaaaccgaaaatgatgctgtttgatgagccgacgtccgcactcgacccggagctgcgccacgaggtgctgaaagtcatgcaggatctggcggaagaagggatgacgatggttatcgtgacccacgaaatcggctttgctgaaaaagtggcgtcccgcctgatctttattgataaaggccgtatcgcggaagacggtaacccgcaggaattgattgcgaacccgccgagccagcgtttgcaggagttcctgcagcacgtctcctga

SEQ ID NO: 19247 - DNA, 743 bp, Enterobacter cloacae
gcaaacgcgtggaacagcattgaaaaacagcgtgcctacctgtcgatgatggcgcaaaagcgcgttgatggcctgctggtgatgtgttccgagtatccggagtccgtgctgtcgatgctggaagagtatcgccatattccgatggtggtgatggactggggcgaagcgcgcgcagacttcaccgattccgttatcgataacgcctttgaaggcggctatatggccggtcgttatttgatcgaacgcggtcaccgcgagattggcgtgatccccggtccgctggagcgcaacaccggcgcgggccgtctggccggttttatgaaagcgatggaagaagcgttgatcaacgtgccggaaaactggattgtacagggcgactttgagccggaatcgggctaccgcgcgatgcagcagatcgtctcccagccgcaccgtccgaccgccgtgttctgcggaggcgacatcatggccatgggcgcgctctgcgctgccgacgagctgggcctgcggtaccgcaggatatttccgtgatcgggtatgacaacgtgcgtaacgcgcgcttcttcaccccggcgctgaccaccattcaccagccaaaagactcgctgggcgaaacggcctttaacatgctgatggacagaatcgtcaacaagcgtgaagagtcgcagtccattgaagttcacccgcgtcttatcgaacgccgttccgttgcggatggtccgttccgcgactaccgtcgttaa

SEQ ID NO: 19248 - DNA, 1317 bp, Enterobacter cloacae
atgcaggagaactgcgcttttattgccgatgcgatcgacacgcgatgtcggacgttaaccgatattgccgacgcgatctgggatcgtcctgaaacccgcttcgaagagttctggtccgccgaacggctggccagcgagctggaggccgagggcttcacgctgacgcgcgaggccggcggtattccaaatgcctttatcgccagcttcggcagcgggaaaccggtcattgccctgctgggcgaatacgacgcgctggccgggctaagccagcaggcgcactgcgcgatggcgcaatccgccacgccgggggccaacggccacggctgcgggcataacctcttaggcaccgcggcgcttgcgggcgcggtggcggtgaaaagctggctggagcagcacggcggcagcggaacggtgcgtttttatggctgtcccggcgaggaaggtggctccgggaaaacctttatggtgcgcgaaggtctgtttgatgacgttgatgccgccgtcacctggcacccggaagccttcgccgggatgtttaacgtcagcacgctggcgaatattcaggccgcctggcgttttcacggcgtggcggcacacgcggccaactcccctcatctgggacgcagcgcgctcgacgccgtgacgctgatgactaccggcaccaacttcctcaacgaacacatcattgagaaagcgcgcgtccattacgccattaccgataccggcgggatttcacccaacgtggtgcaggcgcaggccgaggtgctgtacctgatccgcgccccggagatggccgatgcgcagcagatctacgaacgcatcgataaaatcgcccagggcgcggcgatgatgaccgaaaccaccgtcgagtgtcgctttgataaagcctgctccagctacctgccaaaccgcacgctcgaggcggcgatgtatcgcgccctgcagcactacggcacgccgctctggacggaggaagaacgcgccttcgcccgcgagatccgcaccaccctgacgcccaacgatctgcaaaacagtctgaaaaatattgccgcgacgggcggtgatgcgggtaaagcctttgcccggcgtcatcaggagacgctgctggtggatgaagtcgctccctatgccatcaccgacaacgtgctggcgggttcaaccgacgtgggcgacgtcagctggaaaatgccggtcgcccagtgcttcagcccctgctttaccgtcggcacgccgctgcacacctggcagctggtggcgcagggacgtacctccattgcccacaaaggcatgctgctggccggaaaagtgatgggcggg

SEQ ID NO: 19249 - DNA, 831 bp, Enterobacter cloacae
atggatagtgctgtcgatcgccacgttttttatatttctgatggtacggcgatcaccgccgaggtgctgggccacgcggtgatgtcgcagttccccgtttcgattaacagcatcacgctgccgtttgttgaaaacgagagccgcgccaaagcggtgaaggaccagattgacgccatctaccagcagaccggcgtccgcccgctggtgttctactctatcgtgatcccggagattcgctccatcattctgcaaagtgaaggcttctgccaggatatcgtacaggcgctggtggctccgctgcaaagcgagctgaagctcgacccgaccccgattgcccaccgtacccacgggctgaaccccggcaacctgaccaagtacgacgcgcgtatcgccgctatcgactacaccctcgcccacgacgacggtatttcgctgcgaaatctcgaccaggcgcaggtgatcctgcttggcgtgtcgcgctgcggtaaaaccccgaccagcctctatctggcgatgcagtttggcattcgcgccgcaaactacccatttatcgccgacgacatggataacctggtgctgcccgccgcccttaagccgctgcagcacaagctgttcggcctgacgatcaacccggaacgccttgctgccatccgcgaggagcgccgcgagaacagccgctacacctccatgcgccagtgccggatggaggtctccgaagtggaagcgctgtaccgcaaaaaccagatcccgtggctgaacagtaccaactcttcggtatcagacattgccaccaaaattctcgacatcatgggacttaatccgcgcctgtac

SEQ ID NO: 19250 - DNA, 1574 bp, Enterobacter cloacae
atgctggcgggcgggatcggcaacatccgtgccgatcacgtgcagaaaggcgagatcgtcgtcggcgcgaactgatcgtactgggcggcccggcgatgaacatcggtctgggcggcggggcggcctcttctatggcctccggccagtctgatgcggatctcgacttcgcctccgtgcagcgcgacaaccctgagatggagcgccgctgccaggaagtgatcgaccgctgctggcagctgggcgacgctaacccgatcctcttcattcacgacgtgggcgcgggcggtttgtccaacgcaatgccggagctggtaagcgacggcggccgcggcgggcgtttcaacctgcgcgatatcctgagcgatgagccgggcatgagcccgctggaaatctggtgtaacgaatcccaggagcgttacgtgctggcggttgatgccgaccagctgccgctgtttgacgagctgtgccgccgcgagcgcgcgccgtatgccgtcatcggtgaagcgaccgaagagcagcacctttccttaagcgacacccactttgacaaccagccaatcgatctgccgctcgacgttctgcttggtaaaacgccgaagatgacccgcgacgtaaccacccgtaaagcggcgggcaaagcgctggatcgccagggcatcaccgtggcagaagcggtcaaccgcgtgctgcatctgcctgctgtggcagagaaaaccttcctggtgaccatcggcgaccgcaccgtgaccggtatggtatcgcgcgatcagatggtcggcccgtggcagatccctgtcgctaactgcgccgtgaccaccgcgagcctcgacagctactacggcgaagcgatggctctcggcgaacgtaccccggtggcgctgctggacttcgctgcttctgcccgtctggcggtcggtgaagcgctgaccaacatcgccgcgacgcagattggcgatatcaaacgtatcaagctctccgccaactggatggccgctgccggccaccctggcgaagatgctggcctgtatgaagccgtgaaagcggtgggcgaggagctgtgtcctgccctcggcctgaccattccggtgggcaaagactccatgtcgatgaaaacccgctggcaggaaggcagcgagcagcgcgagatgacctctccgctgtcgctggtcatcaccgcgtttgcccgcgtggaagacgtgcgtcacaccgttacgccgcagcttgcgaccgaagacaacgccctgctgctgattgacctgggtaaaggtcacaacgcgctgggtgctaccgcgctggcgcaggtttaccgccagctcggcgacaagccagccgacgtgcgtgacgtggcccagctgaaaggcttctacgacgcgattcaggcgctggtggcgcagcgtaagctgctggcctaccacgaccgttccgacggcggcctgctggtgaccctggcagagatggccttcaccggccactgtggcgtggaagcgaacattgcgacgctgggcgaagaccgtctggcggcgctgttcaacgaagagctgggcgccgtgattcaggtgcgcgcggcggatcgc

SEQ ID NO: 19251 - DNA, 1063 bp, Enterobacter cloacae
atgtctttacgtcatctgtgctcgccgcgtctgagcctgtcactgctgtctgccactttactgcttgccgggacgttccaggtgcatgccgccgaagaggtgctgcgtaaagcggtgggcaaaggggcgtatgaaatggcggtcagccagcaggagaatgcgctgtgggtggcgacctcgcaaagccgcaaaaccgataagggcggagttatctatcgccttgatccggttacgctggacgtgacgcaggcgattcacagcgatctcaaaccctttggcgccacgctcgacggcgcgacgcaaaccctgtggtttggcaacaccctcaacggcgcggtgacggccatcgatgcgaaaacgggcgacgtgaaagggcgactggtgctcgataatcgccagcgcagtgaaaccgtcaaaccgctgcagccgcgccagctggtggcggatgacgcgagcaacacgatttacatcaccggtgtcggcaaagagagcgtgatttgggtggtggatggcgcaacgctgaagctgaaagagaccattgccaataccggtacgtacagcaccggcctggcgctggatactcaggcaaaacgtctgtacaccacgaatgcggacggcgagctggtaaccattgatacggcgaccaataaaatcctgagccgcaaaaaagtgcaggatgacggcaaagagcacttctacctgaacatcagcctcgataccgccggccagcgcgcgttccatgaccgattcaaaacagccggaagtgatggtggtgagcctgaaagacggcagcgtgatggagaagatcgccgcgcctgaatcactggccgtcctgtttaacccaacgcgcaatgaggtttacgtgacgcaccgtgaagccggtaaggtgagcgtgattaacgcgaaatcttataaagtcaccaaaaccttcgacacgccggtttacccaaacagcctggcgctctctgcagatggcaaaaccctgtacgtgacggtgaaacaaaaatccactcgccagcaggaagccacccagcctgacgacgttattcgtatcgcgctgtaa

SEQ ID NO: 19252 - DNA, 657 bp, Enterobacter cloacae
atgcagtttgactggagcgccatctggcctgccattcctatcttgcttgaaggcgctaaaatgaccctgtggatttcggtcctgggtctggttggtgggttgattatcggtcttgtcgccggtttcgcccgcacctacggcggctggatcgcaaaccacatcgcactggttttcatcgaagtgatccgcggcacgcctattgtcgtgcaggtcatgttcatctacttcgccctgccaatggcattcaccgacctgcgcatcgacccgttcagcgcggccgttgtcaccattatgatcaactcaggtgcctatattgcggaaatcacccgcggtgcggtgctgtcgattcataaaggtttcagtgaagccggtctggcgttaggtctttctcgtcgcgaaacgatccgccacgttattctgccgctggcgctgcgtcgcatgctgccgccgctcggtaaccagtggatcatcagcattaaagatacgtcgctgttcattgttatcggcgtggccgaactgacccgtcaggggcaggagatcattgctggcaacttccgcgcgctggaaatctggagtgcggtagccgttgtctacctgatcattactctggttctgagcttcgttctgcgtcgtcttgaaagaaggatgaaaatcctg

SEQ ID NO: 19253 - DNA, 847 bp, Enterobacter cloacae
ggcatcgaatacggcgacatgcagctgattgctgaagcttactccttgctgaaaggcggtctgaacctctctaatgaagagctggctgaaacctttaccgagtggaacaaaggcgagctgaacagctacctgattgacatcaccaaagatatcttcacgaaaaaagatgaagagggtaaatacctggttgatgtgattctggatgaagctgcgaacaaaggtaccggtaaatggaccagccagagctctctggatctaggcgaaccgctgtctctgatcaccgaatccgtcttcgcgcgttacatctcttccctgaaagagcagcgcgtcgcggcggtgtaaagtgctgtctggcccacaggctaaaccagcgggtgataaagccgaattcgttgaaaaagtgcgtcgtgccctttacctgggtaaaatcgtttcttacgcgcagggcttctctcagctgcgtgcggcgtcagacgagaacaactgggacctgaactacggtgaaatcgcgaagatcttccgtgcgggttgcatcattcgtgcgcagttcctgcagaaaatcaccgatgcctatgctgaaaatgccggtatcgctaacctgctgctggcgccgtacttcaagaaaattgcggacgaataccagcaggcgctgcgtgacgtggttgcctacgctgttcagaacgggatcccggttccgaccttctctgctgcagtagcctactacgacagctaccgcgctgctgttctgcctgccaacctgattcaggcacagcgtgactactttggtgcgcatacttacaaacgcaccgataaagaaggcgtgttccataccgaatggatggaataa

SEQ ID NO: 19254 - DNA, 720 bp, Enterobacter cloacae
atgagcgttgtgcctgtagccgacgtactccagggccgtgtcgccgttgaccaggaagtcaccgtgcgcggatgggtgcgtacccgccgagattctaaagctggcatctccttccttgccgtctatgacggttcctgctttgatcctgtacaggccgtcattaataattctctgcccaattacaatgatgacgttctgcgactgacaaccggttgctccgtcattgttaccggcgtggttgtggcgtcaccgggccagggccagagcttcgaaattcaggccactgcgattgaagtcaccggctgggttgaagatccggatacctacccgatggcggcaaaacgccacagtatcgaatatctgcgtgaagtcgcccacctgcgtccgcgtaccaacctgattggtgcggtggcgcgcgtgcgtcatacgctggcgcaggcgctgcatcgtttcttcgatgagcagggttacttctgggtgtctaccccgctgatcaccgcgtccgatacggaaggtgccggtgagatgttccgcgtttcgacgctggacatggaaaacctgccgcgcacgcctgaaggtaaagtggactatgacaaagacttctttggtaaagaagccttcctgacggtatctggtcagctcaacggcgaaacgtacgcctgtgcgctgtctaagatctacacctttggcccaaccttccgcgccgaaaactccaacacc

SEQ ID NO: 19255 - DNA, 903 bp, Enterobacter cloacae
gtgcttaacgataacggcaaactggatattcgccttgaaggcccgtggcgggaagtgatcatgtgggaagtgccgcttctggcggtgatcagtgaactggctcaccgctaccgttcgccggaaaaaggcgtcgagcaggcggtcgccgcgctggaaaataaactcgcagccttctccacgctgaccgaagggctggacatgtcccgcttccgcctgatggactttggcacgcgtcgccgtttctcacgtgacgttcaggaggccatcgttaaacgtctgcagcaggagccgtggttcgttggcaccagcaactacgatctggcacgccgcctcagcctgacgccaatgggcacccaggcacacgagtggttccaggcgcatcagcagatcagccccgatctggctaacagccagcgcgcggcactggccgcatggcttgaggagtacccgaatcagctcgggattgccctcaccgactgtattacgatggatgccttcctgcgcgactttggtcccgagttcgctgaacgttaccagggattacgccacgactccggggatccggttgaatggggcgagaaagccattgcccattacgaaaaactcggcattgatccgatgagcaaggtgctggtcttctcggataatctcgacctggcgaaagcggtcgacctctatcgccatttcaatagccgtgtgaacctgagcttcgggattggtacccgtctgacctgcgatattcctcaggtaaaacctctgaatatcgtcatcaaactggtggaatgtaacggcaagccggtggcaaaactctccgacagcccgggtaaaaccatctgccatgacaaagcgtttgtccgcgcattgcgcaaagcgttcgatctccccttgatcaaaaaagccagt

SEQ ID NO: 19256 - DNA, 1148 bp, Enterobacter cloacae
atcgtgctgtgcttcttctcgctgttcgacccgggcaatagcctgaagtttatgatgggagcgacgttcaaaagcctggccattatcggcatcgcggcgtttgtatcggggctgctgtcgcgctggatctcgaaaaccatcaccctgtcgccgcaagtgcagcgtaattacccggaactgcaaaagcgggtaaacggctggatgtcggtatcgctcaaagtggcgcgtattctcaccgtctgcgtggcgattatgctgcttctgaatgcgtggagcctgtttgatttctggaactggctgcacaacggtgcgggtgaaaaaacggtagatatcctgattcgcatcgcgctgattttattcttctccgccgtcggctggacgctgctggcgagccttattgagaaccgcctggtatcggatattcacggcaggcccctgcccagcgcacgggcaagaacgctgttaaccctgttccgcaacgcgctggcggtgattatcagcaccatcaccatcatgatcgtgctgtcggaaatcggcgtgaatatcgccccgctgctggcgggtgccggtgccctggggctggccatctccttcggctcacaaacgctggtgaaggatattattaccggtatcttcattcagtttgaaaacgggatgaacacgggcgatctggtcaccatcgggccgttaaccggcaccgtggagaggatgtccatccgctcggttggcgtgcgtcaggacaccggggcgtaccacatcattccctggtcttcgatcaccaccttcgccaactttgtgcgcggcattggttccgttgtggcgaactacgatgtggatcgccacgaggatgcggacaaagcgaagcagcgctgcgcgatgcggtagaagaactgatggagatggaggatattcgcgggctggtgatcggggagccgtcatttgccggcatcgtcgggctgtcgaacacggcatttaccctgcgcgtgtcgttcaccacccagccgctgaagcagtggacggtgcgctttgcgctcgacagcatggtgaaaaaacactttgatctggcgaacgtgcggatgcccgtgcagacgtatcaggtattgccgccgcccgcatcgccgctccctccgcaggagccgacgctgtga

SEQ ID NO: 19257 - DNA, 1445 bp, Enterobacter cloacae
atggttgcggtaagaagtgcacatctcaataaagctggggagtttgacccacaaaaatggatcgcaagtctgggaatttccagccagcagtcgtgtgaacgcttaaccgaaacctgggcctattgtctgcgcaccacgcaggggcatccggatgccgatcttctcctgtggcgcggcgtggagatggtggaaatcttatccatgctgaacatggatattgaaacgctgcaggccgcgcttctcttccctctcgcggatgcggacgtggtcagcgaagacgtactgcgcgacagcgtcgggaaatccgtcgtcgcgctgatccacggcgtgcgcgatatggcggccattcgccagctcaaagccgcacacaccgattccgtctcatctgagcaggtcgataacgttcgccggatgctgctggccatggtggatgacttccgctgcgtggtcatcaagcttgccgagcggattgcccacctgcgagaggtgaaggatgcgccggaagacgagcgcgtgctggcggccaaagagtgtacaaatatctacgcgccgctggcgaaccgcttagggattggtcagctgaaatgggagttggaagattactgcttccgctatctgcacccggcggaatataaacgtattgccaaactcctgcacgagcgccgtatcgaccgcgagcactatatcgaggaatttgtcggcgggctgcgccaggcgatgaaagaagagaacgtgcgcgccgaagtctacggccggcctaagcatatctacagcatctggcgcaaaatgcagaagaaacacctcgcctttgacgagctgtttgacgtgcgcgccgtgcgtatcgtggcggagcgtctgcaggactgctacgccgcgctggggatagtacacactcacttccgtcatcttcccgatgagttcgatgactatgtcgctaaccccaaaccgaacggctatcagtctatccataccgttgtgcttggccctggcggcaaaacggtcgagattcagatccgcaccaaacagatgcacgaagacgccgagctgggcgtggccgcgcactggaaatacaaagaaggcacgtccggcggagcgcgttctggccacgaagaccgcattgcctggctacgcaagctgattgcgtggcaggaagagatggccgactccggcgagatgctcgacgaagtacgtagccaggtctttgacgatcgcgtgtacgtctttaccccaaaaggggacgttgtcgacctgccggcgggctctacgccgctcgattttgcctaccacatccacagcgatgtgggacaccgctgcatcggggcgaaaatcggcggacgtatcgtaccgttcacctatcaactgcagatgggtgaccagattgaaatcattacccagaagcagccaacccgagccgtgactggcttaacccgaacctgggctacgtc

SEQ ID NO: 19258 - DNA, 842 bp, Enterobacter cloacae
atgaacatgaaaaaactggctaccctggtttctgctgtcgcgctgagcgcaaccgtaagtgctaacgccatggcgaaagacaccatcgcgctggttgtctctaccctgaacaacccgttcttcgtctccctgaaggacggtgcgcagaaagaagcggacaaactgggctacaacctggtggtgctggattcacagaacaacccggcgaaagagctggctaacgttcaggatttaaccgttcgcggcaccaaaattctgctgatcaacccaaccgattctgatgccgtagaacgccgtgaagatggcaaaccaggcgaagatcccggtaatcaccctggaccgtcaggcgtctaaaggtgaagtggtcagccacattgcctctgataacgtgctgggcggtaaaatcgccggtgattacatcgcgaagaaagccggcgaaggcgcgaaagttatcgaactgcaggggattgccggaacttccgcagctcgcgagcgtggtgaaggcttccagcaggcagtggctgcacacaaattcaacgtgctggccagccagccggcagacttcgaccgtactaaaggtctgaacgttatgcagaacctgctgaccgcgcatcctgacgtgcaggccgtgttcgcacagaacgacgaaatggcgctcggcgcgctgcgtgccctgcagaccgcagtaaatcagatgtgatggttgtcggatttgacggcacgccggatggtgaaaaagcagtaaacgatggcaaacttgctgcgaccatcgctcagctgcctgagcagattggcgcaactggcgttgaaactgccgacaaagtgctgaagggccaaaaagt

SEQ ID NO: 19259 - DNA, 578 bp, Enterobacter cloacae
acgctgcggatgagcctgctctgcccggtggcaccatggtgtacaccaacggcagcccggtcaataccggctttaccgataacgccgatctgtttggctggttcggtattggtcgcccgctgggtgttccgaccccggtctggatcatggctatcgtcttcctggcggcgtggtacatgctgcaccacacccgtctgggtcgttatatctacgcgctgggcggtaacgaagcggcaacgcgcctgtccggtatcagcgttaataaagtcaaaattatcgtttactccctgtgcggtctgctggcatcgctggcaggtatcatcgaagtggcgcgcctctcctccgcgcagccaacggcagggacgggttatgagctggatgctatcgcggcagtggttctgggcggtacgagtcttgggggcggtaaaggtcgcattgttgggacattgatcggcgcactgattctcggtttcctgaataatggtttgaatttgttaggtgtttcctcctattaccagatgatcgttaaggcagtggtgattttgctggcggtactggtagacaacaaaaaacagtaa

SEQ ID NO: 19260 - DNA, 696 bp, Enterobacter cloacae
gtgtgctgcatcgctgatgaccagacaaattatggtacaatgaatcatcgggaatattacacattgattagggttttacggccaatggcacaactttatttctactattcggcaatgaatgccgggaaatccaccgcgttgctgcaatcctcgtacaattaccaggagcgcgggatgcgtaccgttgtttatacggctgaaattgacgatcgctttggcgcagggaaggtgagctcaagaatagggctctcgtcgcctgccagactgtttaacccgaaaaccgatctgttcgaggacattcgtacagaacatgctttgcagcccattcactgtgttctggtagatgaaagccagtttctgacgcgtgaacaggttcatgccctttcagaggtggtcgatgagcttgatattcccgtgctgtgttatggcctgcgtacggatttccgcggtgagctctttgctggtagccaatatttgcttgcctggtcggataagcttgtcgaattgaaaacaatctgcttctgcggtcgcaaagccagcatggtgcttcgtctcgaccaggccgggaaaccttatgcagatggcgagcaggtggtgataggcggtaatgaacgctatgtttcagtctgtcgtaagcattataaagaagcgttgtctgtaggctcgctgacggcgattcagcacgacaacaggaaa

SEQ ID NO: 19261 - DNA, 234 bp, Enterobacter cloacae
gtgacgttttttcatcgctcagagggtttaccccttcaggacctgatcttcggtgcgtcagtctattttcctcccctgtttaaggccgttctggtcggctttatgctctggctcatcgcgcatcgcctgctccgcgactggatgtactccggcgaaatctggcatcccatgctgatggatctttccctgtttgccctttccgtatgcctgggccttgccgttttgactgtgtgg

SEQ ID NO: 19262 - DNA, 771 bp, Enterobacter cloacae
atgcaatcgccctggacgcgtgacggcaaagttcgcgctgagcaggtcagcattacccctcaggtgtcgggaagtattacggcgctgttggttaaggataaccagttcgtcaaaaagggagacattttattccgcatcgacgacaccccgtaccacattgcgatcctgaacgcccaggcgcagctggcgaaagcccagtcggatctggcaaaggctaacaacgaggccaaccgccgccgccacctgtcgcaaaactacatctcagcggaagatttagacaccgccaacatcaccgtaaaggccatgcaggcgagcgtcaacgtagccgaagccacgctgaagcaggcccagtgggagttgacccaaacggtgattaccgcgccggttgacgggtgggtaaccaacctttccgctcgcgtggggaattatgccaccacgggacaacccgtttttgccctcgtcgacagccactccttctacgtggtgggctattttgaagagaccaagcttcgccatattcgcgagggatcgcctgccgccattacgctttacagcggctcgcagaagttacagggtcacgtatccagcattggccgcgccatttacgatcaaagcgtcgaaacggattccggtctggtgccggacataaagccgaacgtcccctgggtgcgtctggcccagcgcgttccggttcgcgtggagtttgaccgtttaccgcaggacattacccttgtgtccggcaccacctgcactgtctccatcggcaaccgg

SEQ ID NO: 19263 - DNA, 1682 bp, Enterobacter cloacae
aatcccgggaacatgctgaaaccctgcctgcgccgtggtgacataactgcgttggtgccaccacgcttgacgagtatcgtcagtacattgagaaagatgctgcgctggaacgtcgcttccagaaagtgtttgttgctgagccaagtgttgaagataccatcgcgatcctgcgtggtctgaaagagcgctatgaactgcaccaccacgtgcagatcactgacccggctatcgttgcggcggcgacgctttcacatcgttatatcgccgatcgccaactgccggataaagcgatcgaccttattgatgaagcggcttcgagcattcgtatgcagattgactcgaaaccggaagagctggaccgactcgaccgacgcatcattcagctcaagctggaacagcaggcgctgaagaaagagtctgatgaagccagtaagaaacgcctggatatgctcaatgaagaactggacgataaagagcgccagtactctgagctggaagaagagtggaaagccgagaaagcgtccctttccggcactcagaccattaaagctgaacttgaacaggcaaaaattgccattgagcaggctcgccgtgtcggcgatctggcgcggatgtctgaactgcagtacggcaaaattcctgagctggaaaaacagcttgagatagcgacgcagtcagaagggaaaacgatgcgtctgttacgtaataaagtgacggatgcagaaatcgcggaagtgcttgctcgctggaccggtattccggtggcgcgcatgctggaaggcgagcgtgaaaaactgctgcgcatggagcaagatctccataatcgggtgattggccagaacgaagcggttgaggcggtttccaacgccattcgccgtagccgcgcagggctgtccgatccaaaccgcccgattggttcgttcctgttcctggggccaaccggcgtcggtaagaccgagctgtgtaaagcgctggctaactttatgttcgacagcgacgatgcgatggtgcgtatcgacatgtctgagtttatggagaaacactccgtctcacgtctggtcggtgcgcctccgggatacgtaggttatgaagaaggtggttatctgacggaagcggttcgccgtcgcccttattccgtcatcctgctggatgaagtggaaaaagcgcacccggatgtgttcaacattctgcttcaggtcctggacgatggtcgtctgaccgacgggcaggggagaacggtcgacttccgtaatacggttgtcatcatgacctcgaacctgggttccgatttgattcaggaacgtttcggtgaactggactatagccatatgaaggatctggtgctcggtgtcgtcagccataacttccgtcctgagttcatcaaccgtattgatgaagttgtggtattccatcctctgggtgagaaacatattgcgtcgattgcacagatccagctgcagcgtctgtacaaacgtctggaagagcgtgggtatgaaattcacatctccgacgaggccctgaagctgctgagtgagaatggttacgatccggtgtacggtgcgcgtccattaaaacgtgctatccagcagcagatcgaaaacccgctggcgcagcagatcctctccggagagttgattccgggcaaagttatccgtctggaagccaacgacgatcgcattgtg

SEQ ID NO: 19264 - DNA, 718 bp, Enterobacter cloacae
gtgccgcgcccacatccctgccgtcacgaaggaggtggcgtaatgacgaaccttaacgcacgcccggaagctattaccttcgcgccccagcagagcgcgctgatcgtggtggacatgcaaaacgcctacgccagccagggcggctatctggatctggcggggttcgacgtctccgccacccgaccggtgattgagaacattaaaaccgccgtcgccgccgcgcgcgccgcgggcatgctcatcatctggttccagaacggctgggatgaccagtacgtcgaggccggcggccccggctcgcccaacttccacaagtcgaacgccctgaaaaccatgcgtaaacggccagaactgcagggcaagctgctggcgaaaggcggctgggactatcagctggtggatgaactggtaccgcaggcgggcgatattgtcctgcccaaaccgcgctacagcggctttttcaacacgccgctcgatagcctgctgcgcagccagggcattcgccatctgatattcaccgggatcgccaccaacgtctgcgtggagtcgaccctgcgcgacggctttttcctcgagtattttggcgtggtgctggaagacgcgacccaccaggccgggccggaattcgcccagaaagcggccctgttcaatatcgaaaccttttttggctgggtcagtggcgtacagcgatttctgcgacgccgtgaatcccacggtc

SEQ ID NO: 19265 - DNA, 504 bp, Enterobacter cloacae
actagtggacccccgattgcaacgccgctcgggccgctgtgggtgatcgcggacgagcagttctgcctgcgcgccgtcgaatgggaagagcacagcgaccgcatggaagaactgctccatgttcactaccgctcacaggggtatgaacgtatccgcgccaccaacccgggcgggctgagcgacaagcttgcggcctacttcgaaggcgatctcagcatcatcgatactctgccaaccgccacggcaggcacgccttttcagcgcgaagtgtggcaggcgctgcggtccattccctgcgggcaggtcatgcattacggccagctcgcggaacagctaggccgcgcaggcgccgcacgcgcggtgggtgccgctaacggctctaacccggtcagcatcgtggtgccctgccatcgcgtcattggccgcaacggcaccatgacaggctatgccggcggcgtgcagcgaaaagagtggctgctgcgtcacgaagggtatctcctgctc

SEQ ID NO: 19266 - DNA, 1539 bp, Enterobacter cloacae
atggataacaaccgtcagttcggtttcttccgcctcgatccgcgtctgatcaccatgctttcgtcagcaaacggcgagcagcgcctgttcgtggcgcgtaacggcttcccggatctgctggttgataccctgctggcaaccgaagaccgtcacttctacgagcacgatggcattagcctctactcgattggtcgtgcggtgctggctaacctgactgccggtcgcaccgtgcagggggcgagtacgctgacccagcagttggtgaagaacctgttcctctccagcgaacgctcttactggcgtaaagcgaacgaagcctacatggccgtgctgatggatgcgcgctacagcaaggatcgtatccttgagctgtacatgaacgaggtgtacctcggtcagagcggcgataacgaaatccgcggcttcccgctggcgagcctgtactactttggccgtccggtggaagagctgagcctggaccagcaggcgctgctggtgggcatggtgaaaggggcgtccatctataacccgtggcgtaacccgaaactggcgctggagcgtcgtaacctcgttctgcgtctgctgcaacagcagcaggtgattgaccaggagctgtacgacatgctgagcgcgcgtccgctcggcgttcagccgcgcggtggcgtgatttcgcctcagcctgcgtttatgcagctggtgcgtcaggagctgcaaagcaagctcggtgataaggtcaaagatctctccggcgtgaagatcttcaccacctttgactccgtggcgcaggatgcggccgaaaaagcggccgttgagggcattccggcgctgaagaaacagcgtaagctgagcgatctggaaaccgcgatggtggtggttgaccgtaactccggtgaagttcgcgccatggtgggcggtgccgagccgcagtttgcaggctacaaccgcgccatgcaggcgcgtcgctcaatcggctctctggcaaaaccggcaacctacctcacagccctgagccagccaaatcagtatcgcctgaatacctggattgcggatgcgccgatctccctgcgccagcctaacggccaggtctggtcaccgcagaacgatgataaacagttcagcggccaggtcatgctggtggatgcgttgacccgttccatgaacgtgccaacggtgaacctgggcatgtcgctgggactgccggcgattgtcgatacctggcaaaaactgggcgtgtcgaaagatcagctgcacccggtgccggcgatgatcctcggcgcgcttaacctgacgccgatcgaagtggcgcaggcgttccagaccattgccagcgggggcaaccgcgcgccgctgtctgccctgcgctcagtgattgccgaagatggctccgtgctgtatcagagcttcccacaggcggagcgtgccgttcctgctcaggccgcctatatgacgctgtggacgatgcagcaggtcgtccagcgcggtaccggccgtcagctgggcgcgaagtatccgggtctgcatctggcgggtaaaaccggg

SEQ ID NO: 19267 - DNA, 768 bp, Enterobacter cloacae
atgcagcctgacctgctcaatttacgcgttttacaccacttccgaacccgttctccgctgacccactgtatgaccaacgatgtcgtacagaccttcacggccaacgttttgctggcgcttggcgcatcacccgcgatggtgattgaggccgaagaggctgaacagtttgccggcatcgccgatgcgctgctgattaacgttggtacgctgacctcgccgcgtgcccaggcgatgcgtcgggcaatagaaagcgcggtggctgcaggcaagccctggacgctggacccggttgccgcgggcgccctgacgttccgcacccgtttttgccatcaaatccttgccctgaaaccggctgccattcgcggcaatgcctccgaaattcttgcccttgccggaatgagcgcgggcgggcgcggcgttgatacaaccgataccgcagccagcgcggtgcccgccgcacaggcgctggctcgccagaccaatgccgttgtggtcgtcaccggcgaggtggattacatcactgacgggcaacgcacccgcacgataacgggcggcgatccgttgatgacgcgcgtagtgggaaccggatgcgcgctttctgccgttgtggcggcgagctgctcgctgcctggcgaccggatggataacgtcgctgcctcctgcggatggatgaagcgagccggaacggtggccgttgcgcagtcacgtgggcctggcagttttgccagcgcgtttctggatgcgctctatacgctggaggagcaggca

SEQ ID NO: 19268 - DNA, 1137 bp, Enterobacter cloacae
aaacctgggattctgacccccggtaattctccaggcgtcagatctcgtgcctgccacgggcgtggatgaaaaaacgctggcgggatgccgcacagctctcttggcttgccgatgaaaccccggaagtccgcagtatcgtgatcctcgccaagcagcgctttaacgctgcgccagcgctacgttcagagcctgcacgccactttcgtgcccttcacggcgcaaacccgcatgagcggcattaacattcaggatcgcatgatccgtaaaggctctgttgatgccatccgtcgccacattgaggccaacaatggccatttcccgccggaagtggacagcctggtcgaaagcgtggcccgtcagggggcgacgccgctggtggtggccgagggcgcacacgtgctgggggtgattgccctgaaggatatcgtcaaaggcggtatcaaggagcgctttgcccagttgcgtaaaatggggatcaaaacggtgatgatcaccggggataaccgtcttaccgccgcggcgattgccgccgaagcgggcgtggatgattttctttccgaagccacaccggaagcgaaactggcgctgattcgtcagtatcaggcggaaggccgtctggtggcgatgaccggcgacggtaccaacgacgccccagccctggcgcaggccgacgtggcggtggcgatgaactctggtacccaggcggcaaaagaggcgggcaacatggtcgacctcgactctaacccgaccaagctgattgaagtggtgcacatcggcaagcagatgctgatgacgcgcgggtcgctgaccacgttcagtatcgccaacgacgtggcgaaatattttgccatcattccggcggcgtttgctgcgacctacccgcaattaaacgcgttgaacgtgatgcacctgcactctccggcatcggccatcctgagcgcagtcatctttaacgctctgattattgtcttcctgatcccgctcgcgctgaagggcgtgagctataagccgctcacggccgccgccatgctgcgccgcaacctgtggatttacgggctgggcgggctggtggtgcccttcatcggtatcaaggtgatcgacctgctgttgacgctgttcggcctggtttaaaaggtg

SEQ ID NO: 19269 - DNA, 573 bp, Enterobacter cloacae
atgacgatgttacgccccgctatacttctgtttattctgctgtctctcattaccggcgggctgtacccgctggtgaccaccgcgctgggccagtggtggtttaaggatcgggccaacggctcgctgattatgcaaaacggtgaaaaccgcggttcgcgcctgattggtcagaactttacggatgcccgttacttccagggacgcccttccgccactgccgaaagcccgtataatccgatggcatccggcggcagtaacctggcgggcagcaaccccgagctggacaaagccgttgctgagcgcgtggcagccctgcgcgccgctaatccgcaggccagccgtgaggtgcccgtagagctggtgaccgcctcggccagtgggctggactacagcctgacgccggcagccgcggcatggcaaatcccgcgcgtcgccgcggcccgtcaactgaccgtcgagcaggttagccagctggttgcagagcacacgcaaaagccgctggtcagctttatcggcatgcccgtggtgaatattgttgagctgaatctggcgctggacgcgctaaggaaaaac

SEQ ID NO: 19270 - DNA, 578 bp, Enterobacter cloacae
atgaccgacgagcccatgcgcccggatccggacaggctgcttgaacagacggccgaagcccatcgcggcaaactgaaaattttctttggcgcctgcgcaggcgtcgggaaaaccttcgccatgctgacggaagcccagcggcttcgggcgcaggggctcgatatattgataggcgtggtagaaacccacggacgcaaagagaccgcatcgctgctgaaggggctggccacccagccgccccgccgtatcagccaccgcggtcggctagtcaccgaattcgatctcgatgctgccctcgcccgccgtcccgcccttatcctgatggacgaactggcgcacagcaatgcgccaggctcacgccatccaaaacgctggcaggatgtagaagaactacttgaagccggtgtagatgtattcacgacggttaacgttcagcatctggagagcctgaacgacgtggtcagcggcgtgaccgggattcaggtgcgcgagacggtgccccgaccccttctttgattctccctatgaagtggtgctggtcggacctgccccccgacgaatttacgccacggcctgca

SEQ ID NO: 19271 - DNA, 666 bp, Enterobacter cloacae
atgcttgatttggaccacttagaaaaagcccaaagggtcagtcttaccatgcaagttgaacacagtttgaaaggagcgttaattacaggctcactcaaacctggggcacgactgattacgaaagagatcgccgataaattaggaaccagtattacccctgttcgcgaggcgctgttgcgcctggtgtcatcaggggcgttacacgccacgccggcgcaggcatttctggttccggaggtcacgctggagcgctataacgagattaacgccatccgcaagcagcttgagccgatggcggtcgccgcagcctgtcagaatatgtctgatagcaaactggaggcgttgcgcaaattgtcggatgcctttcatgaggccatgcgcaacgggaacgtccagcaggcattgcatgcgaatcgcgtcttccggtttacgctttatcagtacgcagaaatgccaacgcttaatgccttaattgagcagctctgggtgcgcatcgggccctgtatgaactatctgcatcaggagcttaacgacatcaaagcctcgacatatcactatgacgaactgctttccgcccttgagcgaagagatgttgttgcctgccagaaggcgattgataaggtgattgatgaagcgaatttgcttttacagcgacaatattttaac

SEQ ID NO: 19272 - DNA, 858 bp, Enterobacter cloacae
agcgcggagctgctgaagcagttcgatattccgctggtgcacgacctgcccggcgtgggcgaaaacctgcaggatcacctggagatgtacctccagtacgaatgcaaagagccggtctccctctaccctgccctgcagtggtggaaccagccgaagattggcgccgagtggctgtttggcggcaccggcgtgggcgcgagcaaccacttcgaagcgggcggttttatccgcagccgtgaagagttcgaatggcccaacattcagtaccacttcctgccggtagcgattaactacaacggctcgaacgcggttaaagagcacggcttccagtgccacgttggctccatgcgctccccgagccgcggccacgtgcgcatcaagtcccgcgatccgcaccagcatccggcgatcctgttcaactatatgtctcacgagcaggactggcaggagttccgcgacgctatccgcatcacccgcgagatcatgcaccagcccgcgctggacaaatatcgcggtcgcgaaatcagcccgggtatcgaatgccagaccgacgagcagctcgacgagttcgtgcgcaaccacgccgaaaccgccttccacccgtgcggcacctgcaagatgggttacgacgagatggcggtggtcgacggcgaaggccgcgttcacgggctggaagggctgcgcgtggtggatgcgtcgatcatgccgcagatcatcaccggcaacctgaacgccaccactattatgattggcgagaaaattgccgacgcaatccgcgggcgcgagccgctggcgaagagcacggcggcgtattatgtggcgaacggggcgccggttcgtcaggcacgacagaaagtc

SEQ ID NO: 19273 - DNA, 1314 bp, Enterobacter cloacae
atgactattccctttacccgctggcctgaggaattcgcccgccgctaccgtgaaaaaggctactggcaggatctgccgctgacccacatcctgacggaccgtgcggacagcgatgccgtggcgattatcgacggcgaacggcacatcacctaccgcgcgtttcatcaggcggtgaataacctcgcgtccgcccttaaggcgcagggactgcaccgcggcgagacggcgctggtgcagctcggaaacgtggccgagttctacatcactttcttcgcgctgctgcaaatcggcgtcgcgccggtgaacgcgctctttagccatcagcgcagcgagctgaacgcctacgcggagcagatcaaacccgccgcgctgattgccgatcgcgaccacgcgctgtttgcgggcgatgattttcttaacacctttgtggaatgcgcaccgctcggttcgcgtcgtgctctgcgcggcgataaggacgaacacgccctggaagcggcgattgcgcgtccggcggacaatttcatcccgaacccgacgcccgccgacgaagtggcgtttttccagctttccggcggtagcaccggcacgccgaagctgatcccgcgcacgcacaacgattacgactacagtattcgccgcagcaacgagatttgcggcatcaccgccgatacgcgttacctgaacgcgctgcccgcggcgcataactacgccatgagttcgccgggatcgttaggcgttttcaccgcgggcggctgcgtggtgctggcgaacgatccgagcgccacgctctgcttcccgctgattgaacggcatcagattaacgtcacctcgctggttcctccggcggtgagcctctggctgcaggcgattgccgacggcgcgggaagcgcgcagcttaaatccctcaggctgctgcaggtggggggcgcacgtctctccgccacgctcgcggcgcgcattccggcggaaatcggctgccagcttcaacaggtgttcggcatggcggaagggctggtgaactacaccgcgctcgacgacgcgccggaacgcatcatcaacacccagggccgcccgatgtgcccggacgacgaagtttgggtggcggacgagaacggaaacccgctgccgcgcggtgaggttgggcgtctgatgacgcgcgggccgtataccttcggcggctatttcagcagcccggaacacaatgccagcgtctttgacgccgacggttttactgctccggcgatctgattgcattgacgagaagggctacatcaccttgcagggcgcgaaaagatcagataacgggggggggag

SEQ ID NO: 19274 - DNA, 853 bp, Enterobacter cloacae
atgaaacaaaaagtggttagcattggtgatatcaaggtagcaaacgacctgccgttcgtactgtttggcggcatgaacgtgctggaatcccgcgatctcgccatgcgtatctgcgaacactacgtgaccgtgacccagaagctgggtatcccgtacgtgtttaaggcctcttttgacaaagccaaccgctcctccatcaactcttaccgtggcccgggcctggaagagggaatgaaaattttccaggagctgaagcagacctttggcgtaaaagtgatcaccgacgtgcatgaagcctctcaggcgcagccggtggcagacgtggtggatgtgattcagctcccggcattcctggctcgccagaccgacctggttgcggcgatggcgaaaaccggtgccgtgatcaacgtgaagaaaccacagttcgtcagccctgggcagatgggcaacatcgtcgataaatttatcgaaggcggcaacgataaggtcatcctgtgtgaccgtggcgcaaacttcggctacgacaacctggttgtcgacatgctgggcttcagcgtgatgaaaaatgtctccggccagtctccggtgattttcgatgtgacccacgccctgcagtgccgcgacccgttcggcgccgcgtccggcggccgtcgtgcccaggtgaccgagctggcgcgcgccggcatggcaaccggtctggccgggcctgttcattgaagcgcacccggatccggataacgcaaaatgcgacggcccatccgcgctgccgctggacaagctggagccgttcctgaagcagatcaaagcgattgacgatctggtgaagagcttcgacgagctggataccagcaac

SEQ ID NO: 19275 - DNA, 597 bp, Enterobacter cloacae
atgagcagaaatactgaacacgatacccgcgaacatttactggcaaccggcgagcgactttgcatgcatcgcgggtttaccggtatggggttgagcgagctgttaaaaaccgctgaggtaccgaaggggtcgttttatcactacttccgttccaaggaggcttttggcgtagcgatgctggagcgtcattatgctggctaccaccagcgtctggcgacccactttgcttcaggtgaaggtaactaccgggatcgtgttctgaactactaccaagaaacgctgaaccagttctgtcagcagggcattattagcggatgcctgaccgttaaactgtctgcagaagtgtgcgatctttctgaagatatgcgcacggcgatggataaaggtgcccgcggcgttatcgccctgctggcccaggcgctggagaaaggccgcgatgaaaaaacgctggccttttccggcgagccgctaacccaggcgcaggtgttatatgcgctctggctaggcgctaacctgcaggcaaaaatttcgcgcagtgccgtgccgctggaaagcgcgctggcacatgtgaaaaacagcattactgcgcctggcatt

SEQ ID NO: 19276 - DNA, 1605 bp, Enterobacter cloacae
atgagtatttccttgaagaagtcagggatgctgaagcttggtctgagcctggtggctatgaccgtggcagcaagcgtacaggcaaaaaccctggtttactgttctgaaggctcgccggaaggccttaacccacagctctttacctctggtacgacttacgacgcaagctctgtaccgatctataaccgtctggttgaattcaaaaccggtaccacggaagtaattccgggtctggccgagaagtgggacgtcagcgaagacggcaaaacctataccttccacctgcgccagggcgtgaagtggcaggacagcaaagatttcaaaccaacgcgcgactttaacgccgacgacgttgtgttctccttcgaccgtcagaaaaacgctcagaacccgtaccataaagtgtctggcggcagctatgaatacttcgaagggatgggtctgccagacctgatcgctgaagtgaaaaaagtggacgataaaacggttcagttcgtgctgacgcgtccggaagcgccattcctggctgacctggccatggacttcgcctcaattctgtccaaagagtacgcggacaacatgctgaaagccggcacgccggagaaagttgacctgaacccaatcggtaccggtccattccagctgctgcagtaccagaaagactcccgcattctgtataaagcgttcgaaggctattggggcaccaagccgcagatcgaccgtctggtcttctccatcacgcctgatgcttccgtgcgttacgcaaaactgcagaaaaacgaatgccaggtgatgccgtacccgaacccggctgatatcgcccgcatgaagcaggacaagaacatcaacctgctggagcaggccggcctgaacgtgggctatctctcctttaacaccgagaagaaaccgtttgatgacgtgaaagtgcgtcaggcgctgacctacgcggtgaacaaagaagcgattatcaaggcggtttaccagggcgctggcgttgctgccaaaaacctgatcccaccaaccatgtggggttataacgacgacgttaaagactacacctacgatcctgagaaagcgaaagcgctgctgaaagaagctggccaggataaaggctttaccgttgagctgtgggcgatgccggtacagcgtccttacaacccgaacgcacgccgtatggcgtacatgattcaggctgactgggctaaggttggcgttcaggccaagattgtgacctacgagtggggcgagtacctgaagcgcgccaaagcgggtgagcaccaggcggtaatgatgggctggaccggtgataacggggatccggacaacttcttcgccaccctgttcagctgcgcggcggcgaaagacggttctaactactctcgctggtgctacaagccgtttgaagacctgatccagccggcgcgtgcgaccgacgatcacaacaaacgtattgaactgtacaagcaggctcaggttgttatgcacgatcaggctccggcgctgattgttgctcactccaccgtgtacgagccagtgcgtaaagaagtgaaaggctacgtggtagatccactgggcaaacaccacttcgaaaacgtatcggttgaa

SEQ ID NO: 19277 - DNA, 831 bp, Enterobacter cloacae
atgtttgttccattcctcattatgttacgtgaagggctcgaagctgccctcatcgtgagcctcatcgccagttatctgaagcgaacccagcgcggacgctggattggcgtcatgtgggtcggggtattccttgccgcggcgctctgtctgggcctcggtatcctcatcaacgaaaccaccggggagttcccgcagaaagagcaggagctgtttgaggggatcgtcgccgtaattgcggtgctgatccttacctggatggtgttctggatgcgtaaagtctcgcgcaacgtgaaggtgcagctggagcaggcggtggataacgcgctgcaaaagggcaataaccacggctgggcgctcattatgatggtctttttcgccgtcgcgcgtgaaggcctggagtctgttttcttcctgctggcggcgtttcagcaggatgtggggatctggccgccgctgggtgccatgcttggcctcgccacggccgtggtgctcggtttcctgctctactggggcggtatccgcctgaacctgggcgccttcttcaagtggaccagcctgtttattctgctggtggcggcagggctggcggcaggggcgattcgcgccttccatgaagcgggcctgtggaaccacttccaggacgtggcgttcgatctcagcaactgtgtctccacccattctctgaccggcaccctgctcgaaggtatcttcggctatcaggaaacgccgagcgtcagcgaagtggcgatgtactttatctatctggttccggcgctggtgctgttcgcaatgccgccgcgtaccggcacgcaggcgtcgcgcgttgcgccg

SEQ ID NO: 19278 - DNA, 412 bp, Enterobacter cloacae
atgtcggattttccacccattgccagtttgcgaagctttgaagccgtcgcccgtcttggcagcgtgacgctggcggcgaaagaactccatgttacccattccgcaatcagccagcagatcaaactgctggaggagatggtgggcgtaaagctctttatccgtcagggacgcggggtgcagatcaacgaagaagggcggctatatgccttacaggtgcgcgaggcgttgaaccatattgcggatgccacccggctcgtacaggtgaagccgagaaagcaggagctgacgctggcgatggtgccgtcttttggatgccactggctgttgccgcgtctggaacgctttcgggcgaaatatccgcttatcacccttcggaatccaggccagcctgacggtcaccagcctgcagcag

SEQ ID NO: 19279 - DNA, 699 bp, Enterobacter cloacae
atgactctccctgcatttggtctgggcactttccgcctgaaagacgacgttgttatcgcatcggttaaaaccgcactcgaactgggttatcgtgcagttgatacggcacagatctatgaaaatgaagctgccgttggacaagctctcgaagagagtggtgtgccgcgtaatgaactgtatatcaccacgaaaatctggattgagaatctcagcaaagataagctgatccctagcctgaaagagagcctgaaaaaactgcgtactgactacgtagatctgacgctgatccactggccatcaccgaatgatgccgtctcagtagaagagttcatgcaggcgctgctggaagcgaaaaagcagggcctaacccgcgaaatagggatctccaacttcacgattccgctgatggaaaaagccattgccgctgttggcgcagaaaatattgcgaccaaccagattgagctgtctccatacctgcaaaacctcaaagtcgtggactgggcaaaacagcacgggatccacatcacttcatacatgacgctggcctacggtaaagcgctgaaagatgaagtgattagacgtatcgcagagaaacataacgccactgctgcgcaggtgattctggcatgggcaaggggtgaaggttatgccgtgagcccagcagcaacgaagcgtgaaaacctggccgggaagccacga

SEQ ID NO: 19280 - DNA, 1487 bp, Enterobacter cloacae
atgctacggaaaatggaacattatgttcaggacaaacctcctgtagtgcagcttaaacagcaactgctttcccagacgccgcgtgcagaaggcgtcgtaaaagccacggaaaaaggctttggcttccttgaggttgacgcgcagaaaagctacttcattccgcctccgcagatgaagaaagtgatgcatggcgatcgcgtcatggccgtcattcataccgagaaggaccgcgagtctgccgagccggaagaactgatcgaaccgttcctgacccgttttgtgggtaaggtgcagagaaaagacgatcgtcttgctatcgtgccggatcatcccctgctgaaagatgccattccctgccgcgccgcccgtggcgttgagcatgattttaaagaaggtgactgggccgtagcagaaatgcgtcgtcatcccctgaaaggcgatcgcggtttttatgctgagctgacccagttcatcacctttggcgccgaccatttcgtgccatggtgggtcacgctggcacgccataatcttgaaaaagaagcgccgaacggcgtagcgaccgagatgcaggacgaaggtctgacgcgccgcgatctcaccgcactggagtttgtcaccatcgacagcgccagcacggaagatatggatgacgcgctgtacgctgaagaaggcgccgatggcaaactccatctgaccgtcgccattgccgatccaaccgcctggattgccgaaggcagcaagctggatgacgccgcgaaaatccgtgcgttcactaactacctgccgggcttcaacattccgatgctgccgcgcgaattgtcagacgatctctgctcgctgcgtccaaatgaagtgcgcccggtccttgcctgccgcatgactatcgccgcagatggcgcgattgaagacgatatcgagttctttgccgccaccatcgaatcgaaagccaagctggcctacgataacgtctccgactggcttgaaaataccggtagctggaaacctgaatcagacgccattgccgcgcaaatccgtctgctgcatcgcatctgcctgaaccgcggcgaatggcgtaaaacccatgcgctggtgttcaaagaccgcccggactatcgctttgttctgggcgagaaaggcgaagtgctggacatcgtggccgaaccgcgacgcattgcgaaccgcatcgttgaagaggcgatgatttccgccaacatctgcgccgcacgcgtgctgcgcgacaagctgggctttggcatttacaacgtccacaccggttttgatccggcgaataccgaagcgctggcggccctgctgaagactcacgatgtgcacgttgatccggaagaagtgctgacgctgccgggcttctgcaagcttcgccgagaactggacgctcagccgtcgggtttcctggacagccgcattcgtcgcttccagtccttcgcggaaatcagcaccgagcctggcccgcactttggcggggatcc

SEQ ID NO: 19281 - DNA, 876 bp, Enterobacter cloacae
attccccctgtctccaccatctttaccgccgacggccagctcgataagacgggcactgccgcgctgatcgacgatctcatcaaagcaggcgttgacggcctgttcttcctgggcagcggcggcgagttctcccagctcggcgccgaagagcgtaaagcaattgcccgctttgctatcgatcacgtcgatcgtcgcgtgccggtcctgatcggcaccggcggcaccaacgcccgggaaaccattgaactgagccagcacgcgcagcaggcgggcgcggacggcatcgtggtgatcaacccctactactggaaagtgtcggaagcgaacctgatccgctatttcgagcaggtggccgacagcgtcacgctgccggtgatgctctataactttccggcgctgaccgggcaggatctgaccccggcgctggtgaaaacccttgccgactcgcgcaacaatattatcggcatcaaagacaccatcgactccgtcgcccacctgcgcagcatgatccataccgtcaaagccgctcacccgcacttcacggtgctctgcggctacgatgatcatctgtttaataccctgctgctcggcggcgacggggcgatctcggcgagcggtaactttgccccgcaggtgtcggtgaatcttctgaaagcctggcgcgacggggacgtggcgaaagcggctgagtatcatcaaaccttactgcaaattccgcagatgtatcagctggatacgccgtttgtgaacgtgattaaagaggcgatcgtgctctgcggtcgccctgtctccacgcacgtgctgccgcccgcctccccgctggacgagccgcgtaaggcgcagctgaaaaccctgctgcaacagctcaagctctgc

SEQ ID NO: 19282 - DNA, 2354 bp, Enterobacter cloacae
ccgggcgccaacccgaaagtgattgccgagaccgtggcgacgccgcttgaagaggcgatcaacggcgttgagaacatgatgtacatgaagtccgtcgcgggctccgacggcgtgctggtcaccaccgtcaccttccgtccgggtaccgatccggatcaggcgcaggtgcaggtgcaaaaccgcgtcgcgcaggccgaagcgcgtctgccggaagacgtgcggcgcctggggattaccacccagaaacagtccccggacgtaacgctggtggtgcatctgttttcgcccaacggtaagtacgactccctgtatatgcgtaactacgccacgctgaaggtgaaggacgagctggcgcgtctgcccggcgtcggccagatccagattttcggctcgggtgagtacgcgatgcgcgtctggcttgatcccaacaaggtggcggcccgcgggctgaccgcgtcggacgtggtcacggcgatgcaggagcagaacgtacaggtctccgccgggcagcttggcgccgagccgctgccgaaagagagcgatttcctgatctccattaacgcccaagggcgtctgcataccgaagaagagttcggcaatattgtcctgaaaacgacgcaggacggtacggtcgtccgcctgcgcgacgtggcgcgtatcgaaatggggtccggcagctatgcgctgcgctcccagctgaacaataaagacgcggtcgggattggtatcttccagtcgccgggggcgaacgccattgatttgtctaacgcggtgcgcgcgaaaatggacgaactgtccacgcgcttcccggcagatatgaagtgggcggcaccttacgatccaaccgttttcgtgcgcgactccatccgtgcggtcgtgcaaacgctgctggaagcggtggtgctggtagtgctggtggtgatcctgttcctgcaaacctggcgcgcgtcgatcattccgctgatcgcggtgccggtttcggtggtaggtacccttcagcattatctacctgctcggcttctcgctgaacaccctgagcttgttcgggctggtgctggccatcggtatcgtggtggacgatgccatcgtggtggtggaaaacgtcgagcgaaacatagaagaggggcttgctccgcttgcggcggcgcatcaggcgatgcgcgaagtgtccgggccgattatcgcgattgcgctggtgctgtgcgcggtgtttgtgccgatggcgtttctctcgggcgttaccggtcagttctacaagcagtttgcggtgacgatcgcgatatctacggtgatttcagcgattaactcgctgacgctctctccggcgctggcggcactgctgttaaaaccgcacggcgcgccgaaagatttcccgacccggcttatcgatcgtctgttcggctggattttccgtccgtttaaccgctttttccaccgcagctcgaacggctatcaggggctggtgggcaaaacgctgggacgacgcggctcggtatttgtggtgtatctgctgctgctctgtgccgcaggcgtcatgtttaaagcggtgcccggcgggtttattccgacgcaggataagctgtacctgattggcggcgtgaagatgccggaaggttcgtcgctggcgcgcaccgacgcggtgatccgtaaaatgagcgaaatcgggatgaataccgaaggcgtggactacgcggttgcgttcccggggctgaacgcgctgcagttcaccaacacgccgaataccggcacggtcttctttggcctgaagccgttcgaccagcgtaaacatactgcggcggaaattaacgctgagatcaacgcgaaaatcgcgcaaattcaggaaggctttggcttctccattctgccaccgccgattttagggctgggtcaggggtcgggctattctctgtacatccaggaccgcggtggtctgggctatggcgcgctgcaaaatgcggtaaacaccatgtccggtgcgattatgcagacgccgggaatgcacttcccgatctcaacctaccaggctaacgttccgcagctggacgtgcaggtagaccgtgataaggcgaaagcgcagggcgtattgctgaccgatcttttcggtacgctgcaaacctatcttggctcgtcgtacgtgaacgacttcaaccagttcggccgtacctggcgcgtgatggcgcaggccgacggacagttccgcgacagcgtggaagacatagccaatttacgcacccgtaatagccatggctgcatggtccctgatggcaataaggtgaatatctcgaccgcctacgggtcggatccgggaaaccgctacaacggctactcggaggtgtgtctgattggcaatgcta

SEQ ID NO: 19283 - DNA, 2622 bp, Enterobacter cloacae
gatgtgacggtggatctggcgagcgttgccatcagcattgacgccatcgccaccgatgacgtgattaacgcggccgagaagggcgcggatctggtgctctcgggggcgacctcgaacgttgaggaaaaccagaccgtcaccatcaccttcggcggcaagagctacaccgcgacggtagacgccgaaggcaaatggaccgccacggtgccagcggccgatctggcgggtctgaaagacggcgacgccagcgtgcaggtgagcgtcaccaacgttaacggcaacagcgcctcggcgggccgcgagtacagcgtggatgcaaccgcgccgtccgtgaccatcaatactctggcgaccgacgatatcctgaacgccgccgaagcgaagagcgatctgaccgtatccggcaccaccaccgccgaagcgggccagacggtcaccgtatcgctgaacggcaaagactacaccacaaccgtcagcgcagacggcagctggacgctgaacgtcccggcggccgatctggctggattaaccgacggcagcgtcaccgttaccgcatcggtcagcgacaaagcgggcaacccggcgtcggtggatcacaatctggcggtagatatcaccgcgcctgcggtgaccatcaataccgtggcgggcgacgatgttattaacatcgcagaacacggccaggcgcagatcatcagcggcaccgccaccggcgcggcagcgggcgataaggtgaccgtcaccatcggcggccagacctacaccaccgtgctggatgccgcggggaactggagcgtgggcgtaccggcgagcgtgatttccggcctcagcgacggcaccgtaaccgtcactgcgtccgtcaccgacgcggcgggcaacaccggtaccggcacgcataacgtgaccgttgataccggtctgccatcggtggccttcaacgccatcagcgatgacaacgtcctgaacgcggtagaaaaaggtcaggatctgagcgtcagcggcaccagcgccaacctggcggaaggcaccgtggtgaccgtgaccctcaacggtaaaaactacgcggcgacgaccgcggcagacggcacctggagcctgacggttccggcagcggacctggccggtctgggcgaccatctacacactgagcgcgactgcgaccaacggcgtgggcaacagcgtcagcaatacggcgaacctgctggtcgacaccgcgctgccgaccgtcaccatcaataccgtggcgggcgataacgtcatcaacgcggcggaagtggccgcaggccagaccatcagcggtaaggtagcgaacgcggaagcgggcaacacggtaaccgtgactatcggcggcaacagctacaccgcaacggttcagagcgatctcacctggtccgtgaacgtgccggaatccgtcctgacggcgctgggcaacggtgatttgaccgtgtcggcgaccgtcaccaacggccacggcaacaccggcgcgggcgagcgcgaaatcgtgatagacgccagcctgccgggtctgcgcattgataccgtggcgggcgacgatgtgatcaacagcattgagcacgggcagaacctgatcgttaccggctccagcgacgggctggcggcaggcaccacgctcaccgtgaccgtcaacggcaaaacctatgcggcctccgtgctggcagacggcacctggagcgcggcaatcccggcggcggacgtcggggccctggcagcaggcacggtcaccgtgaccgctgcaggccagagcgcggcgggcaacccggtgaccatcagccatgacgtgaccgtcgatctgtcagcagtggctatcagcatcgatgcgattgccaccgacgacgtgattaacgcggcggagaaaggcgcggatctggtgctgtccggcagcacctcgaacgtggaggaaaaccagaccgttaccatcacttcggcggaaagacttacaccgcgaaggtggatgctgacggtaactggacggccaccgtgccgtctgcggatctcgcgggccttaaagacggcgatgccagcgtgcaggtgagcgtcaccaacgcgcacggcaacagcgcctcggcgggccgggagtacagcgtggacgccaccgcgccaaccgtgaccatcgatacggtcgcaggcgataacgtgattaacgccagcgaagcggctgcgggcgtggccatttccggcaccaccacggcggaagtcggtcagacggtcaccgtgacgctggacggtaagagctataccgcgcaggtgcagcagggcggtatctggagcgtgaacgtgccgggcacagacctgtccgcactggcggataacggctactccgtgcaggtcagcgtgagcgacgccgcgggtaacccgggcagcgcgggcaaagcgattacgcttgataccacgccgccgaccgtcagctttaacgacgtcgcgggcgataacgtcattaacagcgtggagcacgggcaggcgcagatcgtcagcggcaccgccaccggcgcgagcgtcggcgataagctggtcatcaccatcggttcgaaccagtacaccaccaccgttgacgctagaggtaactggagcgtgggcgtgccggccagcgtgatttccgcgctg

SEQ ID NO: 19284 - DNA, 1379 bp, Enterobacter cloacae
atgaacgcattaacactcactcccggctcgctgacgctcaagcagctgcgtaacgtctggcgcaaccggtcaccctttcgctggatgcaagtgcccatgccgccattaacgacagcgtcgcctgcgtcgaagccatcgttgccgaaggcgcaccgcctacgggattaacaccggctttggcctgctggcgcagacccgcatcgcgacacacgatctggaaaacttacagcgttcgctggtgctgtcacacgcggcgggcgtgggtcagccgctggatgatgagattgtccgtctgatgatggtgctcaaaatcaacagcctggcccgcggcttctccggcattcgactgagcgtgattcaggcgctgatggcgctggtcaatgcggaagtctatccgtggatcccggcaaaaggttccgtcggtgcctccggcgatctttcgccgctggcgcacatgtcgctgctgctgctgggggaaggtaaagcgcgctggcagggcgagtggcttcctgcgaaagaggcgctgaaaaaagccggattaaacccgatcaccctggcggggaaagaggggtggcgctgctgaacggcacgcaggcatcgaccgctttcgctgcgcggcctgtttgaagcggaagatctgtttgcctcagcggtggtgtgcggtgcgctgaccaccgaagccgtgctgggctcggcgtcgcccgttcgatgcccgtatccacgaggtgcgcggtcagcgcgggcagattgatgtcgccgcgatgtaccgtcacgtgcttaccgacaccagcgaaattggcgattcacaccataactgcgagaaggttcaggatccctattccctgcgctgccagccgcaggtgatgggcgcgtgcctgacgcagctgcgccaggcggcagaagtgctgctggtggaggccaacgcggtgtccgataatccgctggtcttcgcccaggaaaacgaggtggtttccggaggcaacttccacgccgagccggtggcaatggcggcggataatatcgccctggcgattgccgaagttggcgcgttgtccgagcgccgcatcgcgctgatgatggataaacatatgtcccagctgccgccgttcctggtgcgtaacggcggggtcaactcgggctttatgattgcccaggtgaccgcggcggcgctggcgagcgagaacaaagccctgtcgcacccgcacagcgtggacagcctgccaacgtcagcgaaccaggaagatcacgtttcgatggcaccggctgccgggcgtcgtctgtgggaaatggcctccaacacccgcggcgtgctggcggtggagtggctggcggcatgtcagggtgtcgatctgcgtgaagggctaaaatcctagcccgct

SEQ ID NO: 19285 - DNA, 996 bp, Enterobacter cloacae
aaatcaccctccaaaggaaaagcggtgtccaattgccttgtgcggcaacgcggcggacattcttcctgaaaccggtcgcccgcagcgtgcgccaggatctggtaaccgaccagaccagcgcccatgacccgctgcacggctatcttgccaaaaggctggacgtgggaagaatatcagcaaaaagcggaaaccgacccggaaggcacggtgcttgccgcgaaacgctccatggccgagcacgtctccgccatgctggccttcagccagatgggcattccgacctttgactacggcaacaacatccgccagatggcgaaagagatgggcgtgaataacgcctttgacttcccgggcttcgttcctgcctatattcgcccgctgttctgccgcggcatcggtccgttccgctgggttgccctgtccggtgacccggaggatatctacaaaaccgacgccaaagtgaaggagatcgtcgctgatgacgaacatcttcaccactggctggacatggcccgcgagcgcattaacttccagggcctgccggcgcgtatctgctgggtagggctggagtggcgtcaaaaactcggcctcgccttcaacgaaatggtgcgcagcggtgaagtctccgcgccgatcgtcatcggccgcgaccacctggactccggctccgtcgccagcccgaaccgcgaaaccgaagccatgcgcgacggctcggatgcggtctccgactggccgttgctgaacgctctgctgaataccgccagcggcgcgacctgggtgtcgctgcaccacggcggcggcgtggggatgggcttctcccagcattccgggatggtcatcgtctgcgacggaaccgatgaagccgccgcgcgtatcgctcgcgtactgcacaacgacccggcaaccggcgtgatgcgtcacgcggatgcgggttacgaaattgccattgactgtgccaaagagcagggccttaacctgccgatgatccctgccaca

SEQ ID NO: 19286 - DNA, 990 bp, Enterobacter cloacae
atgttcaaatgcctgaaacgcccaattatttccagtgaacctgtggcagatcaattttattcagagagccgttctgtgaccgtcaaacgacccgtttccggaagccttgcctgggctttcttttcgataattgccttatccgtgctgaccagcaccgtcgcgctgctgacgcttgccagcagccagcgtgacgccgaagctattaatatcgcgggttcgctgcgcatgcagagctatcgtctgggctacgagatgcagcgcaacagcccttcccttgccgcgcatcgcgacagctggcaacagacgctgaacgcgcctgccctgcagaagctgaaccgctggtacgtcccggacgatgtaaaagcgcgctaccagcagctgcacgtggcgtggctggaaatggatgcgcgcatcgcccgcggcgacagcgcgtggtatcaaatccacattgaggattttgttggccgcattgatgcctttgtgctcgctcttcagcactacaccgaacataaaattcagacggtgaccctgctctcgctggcgggcgctctcgggatcctgctgctgacgctgtttacgctgcgacgcatccgtcgccaggtggtgttgccgcttaacaatctggtggcggccagcgaacgggttgagcgtggcgaatttgcaaccccggcgccggataccgccctgccgaacgagctgggccaactctcccgctccttcaaccacatgtccgccgaactggctacgctctaccgttcgctcgaagcctcggtcgcggaaaagacgcggcatttgcatgaagcccaccagcagctcgacatgctgttcaaatgctctcaggcgctgaataccggccagatagacagccactgctttcggcatatcctgcagattgtccatgactatacgcagatgaattatctcgaactgcgcaccagcgacgactggcggctgtctgaagcgacggagtcacatgggcattcctctgca

SEQ ID NO: 19287 - DNA, 1254 bp, Enterobacter cloacae
atgcgtctgaaaactatcgtgcaccagcagcgtttcgactgggtcggctacgatgagtctcgtcctctgcctgtctctgttccgtctatgccgctgtcgctgaccgtcgtgctgacgggcgaccgtgaatcgctggcggacttccaggaaatggagccagaactggctgagcaggcggtgtatagcgaatacgaagacaacacccagattgctgacgccgacgatatggcgcagtggtgccagtgggtgatggccgttgctgaacgttttgcgctgccaacccctgcggctgacgcgtggccgggcttaatccgcgaagcggtacgctacaccggtgaccaggaaacgctgccgctttgcccgctctggatcggcaaacagctgcgtgaagtgggtgtgatcagcggtaacggggcgttcaccggcgaacagctcactcagatgctggctcagcgtgagtggcgagaaggctatcttgccgaccgtatgcaggatgaaattctgctggaacaaattctggtggaaaccgaaggcgaacgcgtcgggcagatcaacgccctgtcggtgattgaatttcccggtcatccgcgcgcattcggggaaccgtcccgtatcagctgcgttgtgcacattggcgatggcgagttcaccgatatcgaacggaaagccgagctgggcggcaacattcacgcgaaaggcatgatgatcatgcaggcgtttttgatgtcagagctgcagcttgagcaacagatccccttctccgcctcgctgacgtttgagcagtcctacagcgaagtggatggcgatagcgcctctatggccgagctgtgcgccttaatcagcgccctggcggaagtgcccatcaatcagaacatcgcgatcaccggttcggtggatcagttcggtcgtgcacagccagtgggaggcctcaacgaaaaaattgaaggcttcttctctatctgtcagcagcgcggtttaaacggcaaacagggcgtgattattcctgctcccaacgcacgccatttgagcctcagtcaggatattctggatgcggttgagcaagagcaattcgccatctgggccatcgaagggattgaggatgctctacccttactgacaaatctggtttgggatggcgaagggcaaaccaccctgatgcagactatccaggagcgcatagctcaggcgacacagcaggatgctcgtcatcgttatccatggccgttacgctggctgggctggtttagttcgaac

SEQ ID NO: 19288 - DNA, 1184 bp, Enterobacter cloacae
atgagtgtacgtttagtgttagccaaagggcgcgagaaatcattactgcgccgtcatccctgggtcttttccggcgcggttgcccgtatggaaggcaaagccagcctcggtgaaaccattgatatcgttgaccatcaggggaaatggttagcgcgcggcgcctactcgccagcgtcccagatccgtgctcgcgtctggacgtttgataaagatgaaaccatcgacatcgacttcttcgttcgccgcctgcagcaggcgcagcagtggcgcgactggctggcaaaacgtgacgggctggacagctaccgcctgattgccggtgagtccgacggcctgccgggcgtgaccatcgatcgcttcggtaacttcctggtgctgcaactcctgagcgccggagcggaataccagcgtgccgcgctgatcggcgcgctgcaaacgctgttcccgcagtgcgccatttacgaccgcagcgatgtggcggtgcgcaaaaaagaaggcatggagctgactcaggggcccgtaacgggcgaactgccaccggccctgctgccgattgaagagcacggcatgaagctgctggtggatattcagggcgggcacaaaacgggttactacctcgaccagcgcgacagccgtctggctacgcgtcagtatgttgccgacaaacgcgtgctgaactgcttctcctataccggcggttttgccgtttcggcgctgatgggcggctgtgctcaggtggtgagcgtggacacctcgcaggaagcgctggacgtggcaaaacagaacgtcgagctcaacaagctggatttgagcaaagctgagtttgtccgcgatgacgtcttcaagctgctgcgtaaatatcgcgaccagggcgagaagttcgacgtcatcgtgatggatccgccaaagtttgtggaaaacaaaagccagctgatgggcgcgtgccgggggtataaagatatcaacatgctggctatccagcttctgaacccgggcggggttctgctcaccttctcctgctccggcctgatgaccacagatttatttcagaaaatcatcgccgatgccgcaatagatgctggccgtgatgtacaatttatagagcagttccgtcaggcagccgatcaccccgtgatttgctacctaccggaaggactgtatctgaaagggtttgcctgtcgcgt

SEQ ID NO: 19289 - DNA, 219 bp, Enterobacter cloacae
atgtttcattgtccaaaatgtcatttcgccgctcacgcccgtacaagtcgctattttactgacacgaccaaagagcggtatcaccagtgcacaaacatcaactgcagcgcgacatttgtgaccactgagacggtcgagcgctttatcgtatcaccgggcgaggttgttccagcgccaccgcatccggcaacatcaggccagcaacagatacagtggatg

SEQ ID NO: 19290 - DNA, 1795 bp, Enterobacter cloacae
attgccatcaataccccggcagttgacgacgtgatcaacgcgaccgagaaagccaggatctgctgtgtccggcaccagcaaccagccggacggaaccaccattacggtgaccctgaacggtatcagctatacggccaccaccgacgccagcggcagctggagcatcaccgttccggtttcaaacgtttctgcgctgggtgaagcaagctacgtggtgacggcgagcgtaaccgacgcggcgggcaacagtgcgagcaccggccacagcgtgctggtcgacagcgcgtgccgcaggtcaccatcaaccctgtcgccacggacgatgtcattaacgcagcggaagtggctgccgggcagactctgagcgggaaagtgagcggcgcggcgagcggtgacactgtcacgatttcaatcggcggcaatacctggaccgcgacggttcaggacgatctgagctggtcggtcaacgtgccgtccacggtcttaaccgccatcgggaacggcgatctgaccgtgtcagccagcgtcaccaacggccacggcaacaccggaacgggcgagcgcgaaatcgttatagacgctaacctgcctggcctgcgcgtggataccgtagcgggcgacgacgtcatcaacagcattgagcacgctcagaacctgattattaccggctccagcgaaggcctggcaacgggcgcggcgttaacggtgaccgtcaacggcaaaacctacgccgcaaccgtgctggcggacggcacctggacggctgccattccggcggcagacgtcagcgcgctgaatgcgggcacggtcaccgtgaccgtggaaggccagagcgcggcgggaaatccggtttccatcagccatgacgtgaaggtggatctggcggcagtcgccatcagcattgacccgattgcctcggacgacgtaatcaacgcggctgagaaaggcgcggacctggtgctgtccggctctacctccaacgtggaagaaaaccagaccgtcaccatcaccttcggcggcaaatcgtacaccgtgacggtcgatgccagcggcaactggacggcgaccgtaccgtccgccgatttgggcagcctgaaggacggcgatgccagcgtgcaggtgagcgtcaccaacgtgaacggcaacagcgcgtcggcaggccgcgagtacagcgtggacgccaccgcgccgacggtgtctattgaaattgtaagcgacaacaacatcatcaatgcggccgaagcgcagcaggatctggttattgacggcgtgaccaacgccgaagcgggccagaccgtcaccgtgacgctgaacggcgtggactacaccaccaccgtgctggcaaacggcagctggagcgtgaccgtgccatccgcggatctgagcggcattaccgacggcaactacaccatcagcgccgccgtgtctgataaggcgggcaacccggcctctgcggatcgcgacgtgctggtcgataccaccgtcccgcagctgaccatccacaccgtttccgacgacgacgtgatcaacagcgccgagcatgcgcaggccctgattgtcacgggttccgtgaccggcgcggcggcgggcgacgtggtcaccgtcaccctcaacggcaaatcgtacaccgccactctggatgcctcaggcaactggagcgtgggcgtgcctgcggcggacgttaccgcgctggccgccggagattacaccattacagcggcgctgaccgataaagcgggcaacagtaacagcgccacgcacggcgtagaggtgaatctgaccgcgccggtgctgg

SEQ ID NO: 19291 - DNA, 273 bp, Enterobacter cloacae
gtggcttctgtttctatcagctgtccctcctgttcagctactgaaggcgtggtgcgtaacggtaaaagtactgccggacatcagcgctatctctgctctcactgccgtaaaacatggcagctacagttcacttacaccgcttctcaacccggtacgcatcagaaaatcattgatatggccatgaatggcgtcggatgtcgcgccagtgcacgcattatgggcgttggcctcaacacgattttacgtcacttaaaaaactcagaccgcagtcgg

SEQ ID NO: 19292 - DNA, 499 bp, Enterobacter cloacae
gtggatgtgggtccagtcatgttggatgtagaagggtttgagctggatgcggaggagcgtgaaattctggcgcatccgctggtgggtggactgatcctgtttacccgcaactatcacgatccggcgcagctgcgtgagctggtgcgtcagatccgcgccgcatcgcgcaatcatctggtggtggccgtcgatcaggaaggcgggcgcgtgcagcgttttcgcgacggttttacccgtctcccggcagcccagtcatttgccgcgctgctcggcacagaagaggggggaaaactggcgcaggacgccggctggctgatggccagcgaaatgattgccatggatatcgacatcagctttgccccggtgctggatgtagggcatatcagcgctgccattggcgagcgctcataccatgaagacccgcgtattgcgctggcaatggcgacccggttcatcgacggcatgcacgatgccgggatgaaaaccaccgggaaacact

SEQ ID NO: 19293 - DNA, 213 bp, Enterobacter cloacae
atgtttacttattacccggctaataccgcagcagcacaacctgaactcgttaacgcgattgcgcagggtcttcacgccgagcacggtgctgtgactgaagatgacattttgatggaactaaccaaatgggtggaatccacggataatgacatcctcagtgacatctaccagcagactattaactacgtcgtcagcgggcaaaacgcacccttg

SEQ ID NO: 19294 - DNA, 385 bp, Enterobacter cloacae
gttgccggaatcatcgttgaagaatgggagagacagggcggtgccgggctggattttccagaagacctgagccgtaagcgtcagaaactcttccgatggctcgatggtgatacggagtatgcgcgcaaaaacattagcccagctgtcgcccgcgatcatcgccgttctgccccttgaattccgtggtcgcttggtacctcaggattgctttatggcgcggtatgcagcgatggagaaggagatcggcgaagcgaaacgcgcggtaattctgaaggcgccacagcatcagctggtgaaagaggtgagagagggcattgaacacctgctggcgcttctgccaggggaggctgttgttcaggttctgagtggtctcgcggtcatgggc

SEQ ID NO: 19295 - DNA, 884 bp, Enterobacter cloacae
cagctgttcgccctggcgcccgtcgcgacgtttaaagagcgcctggtgatggatctctacccggccaacgcaacggatattcaggatccgcttcttgccctgctggaggattacaacaagggcgacttgcagcgtcaggttccacctgcgcaaagcggtccgcagccggggaaagcagggcgcgatcgtccgattgtgatcatgctcgatcccggacacggcggtgaagactccggcgcggtggggaaataccgcacgcgtgaaaaagacgttgtgctgcaaattgcccgccgcctgaaggcgttgattgataaagaaggtaatatgcgcgcctatatgacgcgcaatgaagatatctttattccgctgaaggtccgggtggcgaaagcgcagaagcagcgcgccgatttgttcgtgtcgatccatgcggatgcctttaccagccgccagccaagcggctcgtcggtgttcgcgctctcaaccaaaggcgcgaccagtaccgcagcaagatatctggctgacacccagaacgcctctgacctgattggcggcgtgacaaaagcggtgaccgctacgtcgaccacactatgttcgatatggtgcagtcgctgaccattaacgacagcctgaagtttggtaaagcggtgctgggcaagctgggcaacatcaataagctgcataaaaacagcgttgaacaggccgggtttgcggtactcaaagcaccggatatcccgtccattctggtagaaaccgcgtttatcagtaacgtcgaagaggagcgtaagctcaagacggcaaaattccagcaggaggttgcggagtcgattctggcggggatacgggcgtatttctctgacggggcgacgctggcgcgacgcggataa

SEQ ID NO: 19296 - DNA, 618 bp, Enterobacter cloacae
atgagtgcaatcgcgcctggaatgatcctcctcgcctatctttgcggctcaatctccagcgccattctggtctgccgcattgccgggttacctgacccgcgtgaaaatggttccgggaatccgggggcgaccaacgtactacgaattggcggcaagggagcagccgtagcagttttgatttttgatgttctgaaagggatgctgcccgtctggggcgcctatgcgctgggcgttacgcctttctggctcgggctcattgcgattgcggcctgcgttggccacatctggcccgtattcttcggctttaaaggcggtaaaggcgttgcgaccgcctttggtgccattgcacctatcggctgggatctcaccggcgtaatggccgggacgtggctgctcaccattcttctgagcggctattcgtcgctgggcgcaatcgtcagcgcgctgatcgccccgttctacgtctggtggttcaaaccccagttcaccttcccggtgtcgatgctctcctgtcttatcctgctgcgtcatcacgacaatatccagcgcctgtggcgtcgtcaggagaccaaaatctggacgaagctcaagaggaagaaaaaagacgctccgaagggt

SEQ ID NO: 19297 - DNA, 639 bp, Enterobacter cloacae
atgcgcagtaaatacattgtcattgagggactcgaaggggcgggtaaaaccactgcccgcaacgtggtggtggatacgctcaaagcgcttggcgtggcggacatggtatttacccgcgagccgggcggcacgcagctggctgaaaacgtgcgcagcctggtactggatatcaaatccgtcggtgacgaagttatcactgacaaggccgaagtgctgatgttctacgcggcccgcgttcagctggttgagacggtgatcaaacccgccctggccgagggcaagtgggtgatcggcgaccgtcacgatctgtcgactcaggcgtatcagggcggaggacgcggcatcgaccagacaatgctcgcaacgctgcgtaatgccgtattgggtgattttcgccccgacctgacgctctatctggatgtaaccccggaagtgggtctcaaacgtgcccgcgcgcgcggcgagctggaccgcattgaacaagagtcgtttgatttctttaaccgcacccgcgcgcgctatcttgagctggccgcacaggacagctcaatttgtaccattgatgcgacgcagtccctggacgacgtcacgcgcgacattcaacacaccattacgcagtgggtgcaggagcagcaggca

SEQ ID NO: 19298 - DNA, 807 bp, Enterobacter cloacae
  misc_feature (364)..(364): n=g, a, t or c
atgtttttaatcaatggccttgagcaggacacgctgcctgccagcgacagggcgatacagttcggtgatggttgctttacgacggcgcgcattctgaacggcgatgtctgcttgctggaggcgcacattcgacgcctgcagcatggctgtgaaaagctcatgatcccctttacgcactgggacacgctgcgtcaggaaatgtgcgagctgggaaccgggaaggacagcggcgtactcaaagtcatcatcagccgcggcagtggtggccggggttacagcgctgcatcgtgcctcaacccaacgcgtattctctccgtttctgcttatcctgcgcattattctcgctggcgagaagagggcgtcnacgtgacgctgagcccggtacggctgggacgaaacccgatgctggccgggcttaagcatctcaaccgcctcgagcaggtgctcattcgtactcatcttgaacagacggacgccgatgaggcgctggttcttgacagcgaagggttcattacggaatgctgtgcggctaatttactctggcggcagggggaagaggtgttcactccgtcgctggaatacgctggcgtaaatgggttaatgcgtcagttttgtctgcaacagctggcacgctctggctttcgcgttgtcgaagttagcgcaggagaagccgcgctacagaccgccgatgaagtcatcatctgcaatgcgctgatgcctgttgtacccgtccgtgcgtatggccaacaacgctggtcttcgcgcgagctgtttcagtttttagccccgatatgtgagcaaaccaga

SEQ ID NO: 19299 - DNA, 713 bp, Enterobacter cloacae
ttcaaaccctggcgtctgcgcttcaaaaaggagcagcgtttacccctgctgttttatggactctcccttggggcaatgaactatctgttctacctctctattcagacgataccgctggggatcgccgtcgcgctggagtttaccggcccgctggcgatggcgcttttctcctcgcgacgtccggtcgattttatctgggtcgtgttagccgttctgggtttatggttcctgctgccgctgggccagagcgtcgctgagatcgatctgacgggtgcagccctggcgctgggtgcaggcgcctgctgggccgtctatatacttacgggccagcgtgcaggagaagagcacggtccggcgaccgtcgcgttaggttccctgatcgcagccatcgtcttcgtgcctatcggcatggcgcaggcgaccgaatctatctggcaatggtccgtcatgcccatcgggctggcggtcgcaattctttctaccgcactcccctactctctggagatgattgccctcacgcgtctgccgacgcgcatatttggcacgctgatgagcatggagcctgcgctaccgccatttccggaatggtgtttctcggcgaaaccctcacgttgacccagacgctggcgctctgctcaattatcgcggcatcaatgggctcgacgctcaccatgcgcccggagcctaaagttgagaaagtggatatcagctaa

SEQ ID NO: 19300 - DNA, 501 bp, Enterobacter cloacae
atgagtaccgctaaactggtgaaaacgaaagcgtctaatctgctttatacccgtaacgatgtatcggatagcgacaaaaaggcgaccattgagttgctgaatcgccaggtgatccagttcatcgatctttcgctgatcaccaaacaggcccactggaatatgcgcggtgcaaactttattgccgttcatgaaatgctggatggcttccgcacagcactggttacccacctcgatacaatggctgaacgagccgttcagctgggcggcgtggcgctgggcaccacgcaggtgatcaacagcaaaacgccactgaagagttatccgctggatatccataccgttcaggatcaccttaaagagctggcggaccgctacgcaattgtggccaatgacgtgcgcaaagcgattggcgaagccaaagacgaagataccgcagacattttcaccgccgcctcccgcgacctggatcagttcctgtggtttatcgaatctaacatcgaa

SEQ ID NO: 19301 - DNA, 734 bp, Enterobacter cloacae
atgctatatattgttcgtcttattcttaccgttatctactgcattctggtctgtattttcggctctatttattgccttttcagcccgcgtaatccgaagcatgttgccacctttggccatatgttcggtcgtcttgcgccgctgtttggtctgaaggttgaaaaacgtctgcctgaaggggcggagaatttcggtaacgccatctatatcgccaaccatcagaacaattacgatatggtgaccgccgcaaatatcgtgcttccaccgaccgtgacggtgggaaaaaaaagcctgctgtggatcccgttttttggccagctgtactggctgaccggtaacctgctgatcgaccgtaacaaccgtgcgaaagcgcacagcaccattgcggaagtggtgaatcattttaaaaagcgcaaaatctcaatctggatgttcccggaaggaacgcgcaccgcggccgcggcctgctgccgtttaaaaccggggcgtttcatgccgcaattgcggcaggtgttccaattattcccgtgtgcgtttccaatacttcgaataagattaatcttaaccgcctgaataacgggctggtgattgtcgaaatgctgccacccgtcgataccagcaaatacggtaaagaccaggtgcgcgagccggcagcgcactgccgtgagctgatggctcagcatattgcgcagctcgacaaagaagtcgcagagagagaagccgccggtaaagat

SEQ ID NO: 19302 - DNA, 708 bp, Enterobacter cloacae
atgtccatcgccgtaaatgtgaatgatcctacgaactcgggtgttaataacacgaagagtacgacgggttctaactccctcaccgggagcaatgccgccgatcttcaaggcagctttctgacgctgctggtggcgcagcttaagaaccaggatcccaccaacccaatgcagaacaacgaactgaccacgcagcttgcgcagatcagcaccgttagcggcattgagaaactcaacaccaccctcggctccgtctccgggcagattaacagcgcccagtctctgcaggcggcaagcctgattggccacggggtgatgatcccgggaaccacgattctggcgggcaccagcaccaccgaaggcaacaccaccacgaccaccacgccgtttggcgttgagttgcagcaggcggcggagaaagttaccgccaccattaccgacagcaacggcacggtcgtgcgcactattgatatcggcgagctgaaggcgggcgttcacacctttacgtgggatggcagcctgaccgacggcactaaagcaccaaacggttcttacaaagtagcgatcagcgccagcaacgggacaacccagctggtggcgcagccgctgcagttcgcgctggtccagggcgtgattaaaggaagcgacggcaacaaactggatttgggaacctctggttccaccacactcgacgaagttcggcagattatc

SEQ ID NO: 19303 - DNA, 135 bp, Enterobacter cloacae
gttctcgtcattaaggcaaacctgaaagatgcatttggcatcaaggagcggttggttccgttcctcgatggacaggttatcaagaaagtcgatctcactactcaaaccattgaagtagattgggatcctggtttt

SEQ ID NO: 19304 - DNA, 765 bp, Enterobacter cloacae
atgtggattggcataattagcctgtttcctgaaatgttccgcgcgattaccgattacggggtaactggccgggcagtaaagaatggcctgctgagcatccagagctggagtcctcgtgactttactcatgaccggcaccgtaccgtggacgatcgtccttacggcggcggaccggggatgctaatgatggtgcaacccttacgggacgccattcacacagcaaaagccgcggcaggtgaaggcgcaaaggtgatttatctttcacctcagggacgcaagcttgatcaagcgggcgtgagcgaactggcgacgaatcaaaagctgattctggtctgtgggcgctacgaagggatagatgagcgcgtaattcaaaccgagattgacgaagaatggtctatcggcgattacgttctcagcggtggtgagttacccgcaatgacgctgattgactccgtcgcccggttcattccgggggttctgggccatgaagcttcggcaacggaagattcctttgccgatgggttgctggactgtccacactatactcgtcctgaagtgttagaagggatggaggtaccggcggtgttactgtctggaaaccatgccgagatacgtcgctggcgtttgaagcagtcgctgggccgaacctggcttagaagacctgaacttctggaaaacctggctctgactgaagagcaagcaaagttgctggccgagttcaaaacagaacacgcgcaccagcagcatgaacatgatgggaatgcg

SEQ ID NO: 19305 - DNA, 345 bp, Enterobacter cloacae
atgagcaacattattaagcaacttgaacaagagcagatgaagcaggacgtaccttccttccgtccaggtgacaccgtggaagtgaaagtatgggttgttgaaggttccaaaaaacgtctgcaggcattcgagggcgtggttatcgctattcgtaaccgcggtctgcactctgcattcactgttcgtaaaatttccaacggcgaaggcgttgagcgtgtcttccagactcactctccggtagttgacagcattgctgttaaacgtcgtggtgctgtacgtaaagctaaactgtactacctgcgtgagcgtactggtaagtctgctcgtattaaagagcgtctgaac

SEQ ID NO: 19306 - DNA, 910 bp, Enterobacter cloacae
atggctgccctaaattcgaaagtcagaaaggccgtcatcccggtagcgggattggggaccaggatgttaccagcaactaaggcaattcctaaagagatgctgcctctggttgataagccattaatccagtatgtcgttaatgaatgtatcgcagccggcatcactgaaattgtgctggttacgcattcatcaaaaaactctatcgaaaaccatttcgatacaagctttgaacttgaagccatgctggaaaagcgtgttaagcgtcagctgttagaagaagttcagtctatttgcccgccgcacgttaccattatgcaggttcgtcagggcctggctaaaggtctgggccacgctgtgatgtgtgcacatcctgttgtacgtgatgagcctgtagcggtaactctgcctgacgtaattctggacgaatacgaatccgatctttctcaggataacctgtgctgagatgatcaaacgtttcgatgaaaccggcggcagccagattatgcttcagcctgttgaagacgtggcggcatacggtgtggttgactgcaaaggcgttaaccttgaaccgggcgaaagcgtgccaatggttggcgtggtagagaagcctaaagcggacgtagcgccttcaaacctggccgttgtaggtcgctatgtcctgagcgctgaaatctggcctctgctggcgaaaacgcctccaggagcgggggatgagattcagctgacggatgccattgatatgctgatcgagaaagagaccgttgaggcttaccatatgaaaggtaagagccatgactgcggtaataagcttggttatatgcaggcgttcgttgaatatggtattcgccacaatactcttggtgaagaatttaaaacctggctcaaagagagcgtaggtattaagaaataa

SEQ ID NO: 19307 - DNA, 379 bp, Enterobacter cloacae
gtgctcattaccgtccacctcatttccgttgcgctgaccatcagctttttcatcgtccgttactggtggcgctacagcaacaatccgctgacggatgcccgctgggtgcgtatcgcgccgcactgcatcgacacgctattgctcctttccggtgccgggctcatgtggaagaccggctatctgccatttactgataaaggtgcatggctgactgaaaagctgtttggcgttatcatctacatcgttttgggttttaatcgcgcttgggcgtcgtcgtccgcgcagccagcaggtcgggtttatcgcctttctgctgggtctggtggtgctgtacatcatcattaaactcgccaccacaagaataccgttactggggtaa

SEQ ID NO: 19308 - DNA, 827 bp, Enterobacter cloacae
atggattttcagcgctggttacgtgaggcggccggtgagctttcagaaagcgaaagcccgaaacgcgacgccgaaattttgcttgagcatgtgacgggtaaagcccgcacgtatctgctggcttttggcgaaaccgaactgaccgcggaacaggaagcgcagctcgccgcgctgcttgcccgccgtaaaaccggcgagccggtggcgcaccttgtcggtgagcgtgagttctggtcgttaccgctttacgtctcggcggcgacgctgatcccgcgtccggacaccgagtgtcttgtagagcaggcgctggcgcgtttaccggcggcggcctgcagcattctcgatctcggtaccgggacaggggctatcgcgctggcgctcgctaccgagcggcgcgactgcgcggtgacggcggtggatgtaatgcccgatgcggtggcgctggcgcagcgtaacgtggaacgtcacgggcttcgcaacgtgacggtgctgcaaagcagctggtttgccgcgctggagaatcgctcatttgcgatggttgtcagcaatcctccctacatcgacgaacatgacccgcaccttgcgcagggagacgtgcgcttcgaaccgctgacggcgctcgtggccggcaacgcgggattagccgatctcgatcacattgtgacaacgtcacgaaaacatttgcttcccggcggctggctgctcgtggaacatggctggacgcagggagaagccgtgcgggcactgtttacgcaagctgctacgccgctgtcgaaacctgccgcgactacggcggcaacgaacgtctgacgctggggcagtggcta

SEQ ID NO: 19309 - DNA, 744 bp, Enterobacter cloacae
gtggaagtgcgcgccggtaccggcggtgacgaagcggctctgtttggcggggatctgttccgcatgtacagccgctacgccgaatcgcgtcgctggcgagtggagatcatgagcgccaacgaaggcgaacatggtggccacaaagaggttatcgccaagatcagcggcgacggcgtgtacggtcgtctcaagtttgaatccgcaggtcaccgcgtgcagcgcgtaccggccaccgaatctcagggccgcattcacacctccgcctgtacggttgcggtgatgccggagctgccggaggctgaactgccggatatcaatccggcggacctgcgtattgatacgttccgctcctctggcgcgggcggtcagcacgttaacaccaccgattccgccatccgtattacccacctgccgaccggcatcgtcgttgaatgtcaggacgagcgttcacagcacaaaaacaaagccaaagcgttgtccgtgctgggcgcgcgtatccacgcagccgaaatggcgaaacgccagcaggcggaagcctctacgcgccgtaaccttctgggcagcggcgatcgcagcgaccgtaaccgcacctataacttccctcaggggcgcgtaaccgaccaccgcatcaacctgacgctgtaccgtctggacgaggtgatggaagggaagctggatatgctgatcgagcctatcgtgcaggaataccaggccgaccagctggcggcgctgtccgagcaggaa

SEQ ID NO: 19310 - DNA, 216 bp, Enterobacter cloacae
atggccaaagaagacaatattgaaatgcagggtaccgtacttgatacgttgcctaataccatgtttcgcgtagagctggaaaacggtcacgtggtaactgcgcacatctccggtaaaatgcgcaaaaactacatccgcattttgacgggcgacaaagtgactgttgaactgaccccgtacgacctgagcaaaggccgcattgtcttccgtagtcgc

SEQ ID NO: 19311 - DNA, 600 bp, Enterobacter cloacae
aaaaaagagagcgagctgccttccacgtggtggcctacgatttcggcgccaagcgcaacatcctgcgtatgctggttgacccgcgctgccgcctgacggtggttcaggcacaaattatccgccgaagacgtgctgaagatgaatccggacggtattttcctgtccaacggccctggcgacccggcgccgtgtgattacgccatcgccgccatcaagtccttcctggaaactgatatcccggtattcggcatctgcctcggccatcagctgctggcgctggcgagcggagcgaacaccgtcaagatgaagttcggccaccacggtggtaaccacccggtaaaagatatcgataacaacacggtgatgatcaccgcgcagaaccacggcttcgccgtcgatgaagcctcaatgccggctaacctgcgcgtgacccataagtcgctgttcgatggcaccctgcaggggattcatcgcaccgataagcctgcgttcagcttccagggccacccggaagcgagcccgggcccgcacgacgccgcgccgctgttcgatcacttcatcgaacttatcgagcaataccgtaagaccgctaaataatca

SEQ ID NO: 19312 - DNA, 467 bp, Enterobacter cloacae
gtgaagttacagctggtcgccgtcggcaccaaaatgccggactgggtacaaaccggttttactgaatatctgcgtcgttttccaaaagacatgccgttcgagctggtggaaattcccgccggtaagcgcggcaagaacgctgatatcaaacgtattctcgataaagagggcgaactgatgctggctgccgcaggaaaaaccgcatcgtcaccctcgatattccaggtaaaccctggaatacgccgcagctggcgcaagaactggagcgctggaagcaggatggtcgtgacgtcagtctgttgattggcggaccagaagggttatcccctgcctgcaaagcggcggctgaacaaagttggtctctctccgcgctgacgcttccccacccgctcgttcgggtactggtggcagaaagcctgtatcgcgcgtggagcattactaccaaccacccctatcaccgcgagtaa

SEQ ID NO: 19313 - DNA, 225 bp, Enterobacter cloacae
atgaataagacagctgcaatcatttctgcctgtgcgtttacttttgccctgagcgcgtgttctggtaacaactacgtgatgcacaccaacgatggtcgttctatcgtttcggaagggaaaccgactaccgataatgataccgggatgatttcgtacaaagatgctaacgggaacaagcagcagatcaaccgcacggacgtgaaagagatgaaagagatcgagcat

SEQ ID NO: 19314 - DNA, 958 bp, Enterobacter cloacae
atcacgtttaatagtcacgctcttttcctgcttgaaactcactatgattgttcgtcctaaacagcactggctacaactgatttttgtctggcacggttcggtactgcctaagatctatacccgattgctgctcaacttcctgctttctatcgccgttatcctgatgctgccgtggtatacctcgctgggcatcaaatttaccgtggcgccattcagcattctcggcgtggcgatcgcaatctttctcggtttcagaaacaacgcctgttattcacgctacgttgaggctcgcctgctgtgggggcagctgatgatagcggcacgctcgctgtttcgcgaggtaaaaaacaccttgcctgacgataagcatctgggggaatttgttcgcctgcagatagcttttgccaactgtctgcgtatgaccctgcgccgggagctgaacgccgaacagctctctcgctaccttgctccggatgatttacgtcaggtgatgagcgccaattcgccggcaaaccgtattttactgatcatgggggagtggctggccgtgcggcgacgaaacggccagctttcagacatcctgttccatagcctgaacaaccgtctgaacgatatgtccatcgtcctttctggatgcgagcgtattgcgacaacgccggtaccgtttgcctacacgctgattctgcaccgcacggtgtatctgttctgcatcatgctgccgttcgcgctggttgtagatctgcactagatgacgccctttgtctcggccctgatttcctacacctttatctcgctggacaccctggcggaagagctggaagacccgttcggcacagaagataacgatctgcccctggacgccatctggaacatgatggaacgcgatctgctgcagatgaacgatgaagagaacattccggaaaggctgatgccggataagcattatcagctgacctga

SEQ ID NO: 19315 - DNA, 850 bp, Enterobacter cloacae
tcgcttatatactcgtgggtctgctatcagcaaacagacggatttcatgtatcaacctgtcgcactcttcataggttacgctacatgcgtgggcgcgccgcggaccgcttcggtcgctttgtctcctggctttcgactattggcattacgcttggcgtgatggcactggtgacggtgctttccgtcatgaatggcttcgaacgcgagctgcaaaacaatatcctggggctgatgccgcaggccgttctttcatcatccaacggttcggttaacccgcaacagctgccggaaagcgcggcgaagttacagggcgtcacgcgcgtagcgccgttgacgaccggcgacgtggtgctgcaaagcgcccgcagcgtggcggtcggcgtgatgctgggtattgacccggcgcaaaacgatccgctgacgccgtatctggttaacgtgaagcagtccgatctggaagccggaaaatacaacgtgattctgggtgaacagcttgccggccagcttggcgtcaaccgtggcgatcacgtgcgcgtgatggtcccttctgccagccagtttacgccgatggggcgcctgccaagccagcgcctgttcaacgtgattggtacctttgccgccaacagcgaagtcgatggctaccagatgctggtgaacattcaggacgcttcacgcctgatgcgctacccggcagggaatattacccgctggcgcctgtggctcgatgcgccgctgaaggtcgataccctcagccagcaaaaactgccggacggcactaaatggcaggactggcgcgagcgtaaaggcgaactgttccaggccgtgcggatggaaaaaaacatgatggggg

SEQ ID NO: 19316 - DNA, 1071 bp, Enterobacter cloacae
atgaagcaaaaagcattatggattaaccagataaaagggctgtgtatctgcctggtggttatctatcattcggttatcacgttttatccgcatctgatcgggctacaacacccgctctccggccttctcgccaaatgctgggtctattttaacctctatctcgcaccgtttcgtatgccggtcttcttctttatctccggctatctgatccgtcgttatattgacgaagtggactggcgaaccagtctcgataaacggatctggagcattgtctgggtcctggcgctgtggggcgtcctgcaatggcaggcgttgacccacctgaacgcctggctggcgcccgagcgtgagcttgccacctcgtcgaacgcggcctacgccgactcgttctcaggctttgtgctggggatgatcaccgccagcaccagtttgtggtatctgtatgctctggtggtctacttcacgctgtgtaaactgctgagccgctggaagctgccggtactgggactgctggcgctggcaagcatcgcgattaacttcctgccgctgccgtggtggggaatgaacagcgtggtacgcaacatgatctactacagcctcggggcgtggtatggcgcagagctgatggcgtggatgaaaagcgtcaacctgcgccgcatctggctggcaaccggggctttcgccgccgtctccgtggtgctgtggtttgctaacgttccgctgctgctctcattgctgtcgattgtgctgatcatgaagctgttctacagccttgagcagcgctatgccgttcacccgaacaatctgctgaacgtgattggctcaaataccattgcgatttataccacccaccgcatcctgattgaggcctttagcctgttcctgattggcgaaatgaatgccgcctcgtggccggtctgggcagagctcaccctggtgctggtctatccgtttgccagcctgtttatctgtacccttgccgggctcggggtgcgtaagatttccaccgcgctttttggggacgttttcttctctcctccgtctacgctgaccctgtcaccttcaacgcgt

SEQ ID NO: 19317 - DNA, 2776 bp, Enterobacter cloacae
cctcttattctcgtcgatggctcttcttacctgtatcgggcataccatgcgtttcctcctctgaccaatagcgcaggggaacctaccggcgcaatgtacggcgtgctgaacatgctgcgcacctgatccttcagtatcagccaacccatgcggctgtagtctttgatgcgaaaggtaaaactttccgcgatgagctgtttgagcattacaaatctcaccgtccgccaatgcctgacgatctgcgtgcgcagattgagccgctgcataccatggtaaaagcgatggggctgccgctgctggccgtctctggcgttgaggctgatgacgttatcggcacgctggcgcgtgaagcagaaaagatggggcgtcctgtgctgatcagcaccggtgataaagatatggcgcaactggtgacgccaggcatcaccctgattaacaccatgaccaacaccattctggggccagaagaagtggtcacaaagtatggcgtgccgcctgagctgattatcgacttcctcgcgttgatgggcgattcctcggataacatcccgggtgtccctggagtcggtgaaaaaaccgcgcaggcgctgctccaggggctgggtggtctggatacgctctacgcggagccagacaaaatcgccgggctctccttccgtggtgcaaaaaccatggccggaaaactggaagagaacaaagaggtggcttatctctcctataagctggccacaatcaaaaccgatgtcgaactggagctgggctgtgagcagcttgaagtgcaacagccttccgctgacgatctgctgagcctgtttaagaaatacgaattcaagcgctggaccgctgacgtggaagccggtaaatggctgcaggcgaaaggggctaaacctgctgcaaagccgaagagacaatcgtcgttgacgcagaagagcaggcggaagaagaagccgtggcgctttccttcgacaactacgaaaccattcttgaagagtcacggctgatcgcctggatcgataaactgaaaaaggcgccggtcttcgcctttgataccgaaaccgacagcctcgataacatctctgccaatatggttggcctgtcatttgcgacagagccgggtattgccgcctacgtccctgtggcgcacgattacctggatgcgccggagcagatctcccgtgaacgcgtgctcgaactgctgaagccgatcctggaagacgaaaaggcgctcaaggttgggcaaaacctcaagtacgaccgaggcattctgcaaaattacggcattgaactgcgcgggattgccttcgacaccatgcttgaatcctacattctggacagcgtcgcgggccgccatgatatggattccttatctgaccgctggctcaagcacaaaacgatcacctttgaagagattgccggtaaagggaaaaatcagctcaccttcaaccagatcgctctggaagaagcggggctacgcggcggaagacgctgatgtcacgctgcagctgcacctgaagatgtggccaaaactgcagaagcatgaaggtccgctgaacgtgttccagcatatcgagatgccgctggtgcccgtgctatcccgcattgaacgcaacggcgtgaagattgacccaacggtgctgcataaccactccggggagctggcgcagcgtttgaccgagctcgagcaaaaagcgcatgagcttgcaggcgagccgtttaacctctcttcaccgaagcagctgcaaaccattctgtttgaaaagcagggcatcaagccgctgaagaaaacccctggcggcgcaccgtcaacctctgaagaggtgctggaagagctggcgctggattacccgctgccaaaagtgattctgcagtaccgaggcctcgcgaagctgaagtctacctacaccgacaagctcccgctgatgatcaacccgaaaacgggtcgtgtgcacacgtcgtaccatcaggctgttgcggcgaccggtcgtctctcatcaaccgaccccaacctgcagaacatcccggtacgtaacgaagaaggccgccgtattcgccaggctttcatcgcaccagaggattatctgattgtctctgctgactactcgcaaatcgaactgcgcattatggcgcatctgtcccgcgacaaaggcctcctgaccgcgtttgccgaaggaaaggatatccaccgggcaaccgcggcggaagtcttcggcttgccgctggacagcgtgaccaacgagcagcgccgcagtgctaaggcgatcaacttcggtctgatttacggcatgagcgcatttggtctttcgcgccagctcaacattccacgcaaagagtcgcagaagtatatggatctctatttcgagcgttatccgggggtgttggaatatatggaacgcacccgcgcgcaggcgaaggaaaaaggttacgtcgaaaccctggatggccgccgtctctacctaccggacatcaaatccagcaacgcgggcgtcgcgctggcgcagagcgtgcggcgatcaacgccccgatgcagggtaccgcggcggacattattaagcgtgcaatgatcgccgttgatgcctggctggaaaaagagaagcctcgcgtgaaaatgatcatgcaggtacacgatgaactggtatttgaagtgcacaaagacgacctcgacgccgtgtcgaagaagatccacgaactgatggaaagcagcatgacgctcagcgtgccgttgctggtggaagtgggaagtggagaaaactgggatcaggctcactaacggttcttc

SEQ ID NO: 19318 - DNA, 1295 bp, Enterobacter cloacae
atgtctgccaaccatgctgcgtttaacctgatattccgttttgttgaaaattacgtcagcccgattgccgggcggatctcttcccagcgtcatgtcatggctatccgtgatgggtttatctccgcgatgccatttatgattgtgggttcatttttgttagtgttcgcatacccgccgttttcgccggataccacctggggtttcgcccgagcctggctggatatggcgaagcagtttgaaggtcagatcctgacgccgtttgatatgacgatgggcattatgtccatttatatttgtgcggccattgcctacaaccttggcaaacactatgtcaaatcgcaccagttagacccgtttatgtgtgccatgctgtcgctgatggcgtttctgctggtcgcggcaccgaaaaccaaaggcacgctgccagtcgacagcctgggtgggacgggcatttttactgcgattctggtggcgatctactgcgttgagatgatgcgtttcctcaaggcgcataacatcggtattcgcctgccagaccaggtacctccgatgatcaaaaactcttttgatctgctgattcctgtgctggtggtggtgttgacgctctatcctctgagtctgctcattcagtctcagttcggcatgctgatcccgcaggccattatgtcggtctttaaacctttggtttccgcagcggattccctgcctgcgatcctgctggccgtgttgattggccatctgctgtggttcgccgggatccacggagccgccatcgtctccgggatgctgcagatgttctggctgactaacctgggcgctaaccagaccgcgctggccgccagccagcctctgccgcatatttttatggaggcgttctggacgttctttatcgtgattggcgggtcgggcgccacgatggggctggtgatttgctatctgcgtagccgttcagcgcatttacgctctatcgggcgtttgagcgtggtacccagcttctttaacatcaacgaacccgtcatttttggtacgccaattgtgatgaacccggtgttctttattccgttcctgctggcaccgatggtaaatgcagtgctggcctgggcggcgatgacgtttgacctgattggccgcgtcatctcagtggtcccctggacggcaccggcgccaataggcgcacgtcgggctctgggctgggatttccgcgcggctattctggttgtggttctggcctgcgtatcggcaatcatctacttcccgttcttcaaagtgtacgataaacagctgctggatcagga

SEQ ID NO: 19319 - DNA, 1509 bp, Enterobacter cloacae
gccacgctggccctgagcgccccgctggcgctggctgccgttccgaaagacatgctggcgatcggtaaagccgccgacccgcaaacgctcgatcctgccatcaccattgataacaacgactggaccgtcacctatccgtcctaccagcgtctggtcaagtacaagccgggctccaccgaggtggaaggcgatctgtcgacgggctggaaggcgtctgaagaccagaaagagtggacctttaccctggcggataacgcgaaattttccgacggcacgccggtcaccgccgaggcggtaaaactttcctttgagcgcctgctgaagctcggccaggggccgtctgaagccttcccgaaagatctgaaaatagatgccgtcgatgaccatacggtgaagttcaccctcagccagcccttcgcgcctttcctctacaccctggcaaacgacggggcgtccatcattaacccggcggtgctgaaggccaatgccgcagacgatgcgcgcggttttctggcgcaaaacaccgccggttccgggccgtttatgctgaaaagctggcagaaaggccagcagctgattctgatccctaaccctcactggcagggtgaaaagccgcactttaagcgcgtatcggtgaaaattatcgggtgagagcgcctcgcgccgactgcagctttcccgcggcgatctggacattgccgactccctgcctgtcgatcagctcgcagcgctgaagcaggaaggcaaagtcgccgtcgcggaatacccgtccctgcgagtgacttacctctatctcaacaacggtaaagcgccgctcaatcaggtggatttacgccgggccatctcctgggcgacggattaccaggggatggtgaaaggcattctgagcggcaacggcaagcagatgcgcggcccgatcccggaaggcatgtggggctttgacgccacggcaatgcagtacagctttgacgaggccaaagccaaagtggcgctggagaaggtcaaagacaaacccgccagcctgaccttcctctactcggacaacgatccgaactgggagcctatcgccctctccactcaggccagcctcggcaagatcggcattaacgtcaagctggaaaaactggccaatgcgaccatgcgcgaccgcgtcggaaaaggcgattacgacattgccatcggcaactggagcccggactttgctgacccgtacatgttcatgaactactggttcgaatcggacaaaaaagggctgccgggcaaccgctcgttctatgagaacaaagaggtcgattccctgctgcaggccgcgctgaaaaccaccgaccaggcagaacgcaccaaagattaccagcaggcacagaaggtggttatcgacgaggcggcctacgtttatctgttccagaaaaactaccagttggcgatgaacaaagaggtcaaaggcttcaccatttaatctcgatgctcgagcaggtgttcaacatcggcaccatgagcaaataacggttc

SEQ ID NO: 19320 - DNA, 573 bp, Enterobacter cloacae
atgcccgaagagagtgaactgattgatgtggcgaagacgtttcccacgctgcatatcgatctgaagtacgccaccgccgacaacatcaccggccgtccgatctatcaggaggcgctgtgcctgctgcataccgacgcggccaccgcgctggcaaaagccatcagcattgcctcgctggccgggctgaagctggtggtgtacgacgcctatcggccgcagcaggcgcaggcccagctgtgggatgcctgcccgaacccggaatacgtggtcgacgtggcgattggctccaatcacagccgcggtacggccatcgacgtcaccctgatggatgaacataacgccgtgctggatatgggtgccggttttgacgaaatgcacgaccgctcgcatccgtatcacccttccgtgccgccgcacgcccagcgcaaccgtctgctgttgaacgccatcatgttcggcggtggttttgtcggtatcagcagcgaatggtggcacttcgaactgccgaacgccgccagctacccgctgcttgacgaccgttttgcctgttttcccctgacgcacacttctctt

SEQ ID NO: 19321 - DNA, 1183 bp, Enterobacter cloacae
gacacccgttttgaaagctgcattaaatgcacgctgtgtaccaccgtctgcccggtgagcggcgtgaacccacgctatcccgggccaaagcaggccggaccggacggcgagcgtctgcgtctgaaggacggcaagctgtacgacgaggcgctgaaatactgcatcaactgcaaacgctgcgaagtcgcctgcccgtcggatgtgaaaatcggcgatatcatccagcgcgcccgggcgcgctacagcacgcaaaagccgacgctgcgtgacgctattctgagccacaccgatctgatgggcagcgtctctacgccgtttgccccgctggtgaatgccgcgaccgccctcaaaccggtgcgccactgctggatgccacgctgaaaatagaccatcaccgcagcctgccgaaatattctcacggcaccttccgccgctggtataaatccgtggcggcggacaggcgcagtacgccgagcaggtggcctttttccacggctgctatgtgaactacaaccacccgcagttgggtaaagatctgctgaaggtgctgaacgccatgggaaccggcgtacagctgcttagcaaggagaagtgctgcggcgtaccgctgatcgccaacgggtttaccgataaagcgcgcaggcaggctcagagcaatgtcacatcactgcgcgaagcgattgttgataaaggcataccggtgctggcgacctcgtccacctgtaccttcaccctgcgcgatgagtatccgcatctgctggacgtagataacaccggcctgcgagagcacatcgagctggcaacacgcttcctgtggcgcaagctggacagcgggcagacgttgccgctggggaaattgccgctgaaagtggtgtaccacacgccgtgtcatatggagaagatgggctggtcgctctatacgctggagctgctgcggttaatcccggggctggagctgacggtgctggactcgcgctgctgcgggattgcgggaacctacggctttaagcgtgaaaactacgaaacgtcgcaggcgattggcgctccgctgttccgtcagattgaagagagcggcgcggatatcgtggtaacggactgcgagacctgcaagtggcagattgagatgtccaccagcaagcgctgcgagcatccaatctccctgctggcgaaggcgctgggctaa

SEQ ID NO: 19322 - DNA, 1434 bp, Enterobacter cloacae
atgtcggtattaaagaaaaacagcgccagacagcgtgaccaggagcgcgcgcgactcatctggcttctcacgaccgataaagcggtcacttctacgcttttaggcaaactcaccctggctgagcaatatgatgtcggcaccctggccgacgatattgctgaggtaggtgcgctggttgctcatttacccccgccggatctggcggatacccttgaggcgcttccctcggaagagcgtcacgccctgtggcgtctggtgcaggatcacgagcgcgggcaggtgctgcttgaggcctccgaaaacgtctgggacgacctgatcgacgagatgagcgatcgggatattctcgacgcggtgcaaaccctggatatcgacgagcagatttacctcgttcagcacctgccgcgaaacctgaccggccgcctgctggcgtcactgcctgcggaggagcgggcgcgcgtgcgtcaggtgatgcactacgagaaaaacagcgtcggcgcgatcatggagttcggcgttatcacggtgcgaccggacgtcacgcttggtaccgtgcagcgctatctgcgtcgcctgggcaaaatgccggacaacaccgataaactgtttgtcacctcccgggataaaaccctgcttggagaacttgagctgaaaaccatcctgctcaacagcacccagcggaaggtgagcgaggtgatggaaaacgagccgatggtcttctccccggaagacgatgcggagaaagcggcgcgtaccttcgagcgtgacgacctggtgagtgccgccgtcgtggattccgtcggcaaactgatggggcgtctgaccatcgatgaaatcgttgacgtggtctatgaagaaaccgacaacgacctgcgcgcgctcggcgggatcagcgccgaagatgacgtccatgcctccgtcggcaaggcggtaaaaacgcgctgggcgtggctggccattaacctgtgcaccgcgtttatcgcctcccgcgtgatcgacgggtttgaacacaccatttcgcagctggtggcgctggcctcgctgatgccgattgtggccggaatcggcggcaacaccggaaaccagaccatcaccatgatcgtccgcgcgctggcgctggaaaacattcagccaggtaacttttcgtggctcatttttagagagatgggcgtcgcgctaattaacggcctggtgtggggcgggattatgggcggcatcacctggtggctgtacgacgatatggccctgggcggcgtgatgatgctggcgatggtgctgaacctgctggtagcgtcgataatgggcgtgattatcccgctgacgatgaccaaactgggccgcgaccccgcggtggggtcgagcgtgatgatcaccgccatcaccgataccggcggtttctttatttttcttgggctggcgacgatttttctgctt

SEQ ID NO: 19323 - DNA, 791 bp, Enterobacter cloacae
atggaactgacccccagagaaaaagacaagctgttgctgttcaccgccgcgctggttgccgaacgccgccttgcgcgcggggtaaagctcaattacccggaatcggtcgcgctgatcagcgccttcattatggagggcgcgcgcgatggcgaaaccgtcgcctcgctgatggaggcgggccgccacgtcctgacgcgcgatcaggtgatggagggcgtgccggaaatgatcccggatattcaggtcgaagccaccttcccggacggctccaagctcgttaccgtccacaacccgatcgtctaaggagcgcgtgatgatcccaggcgaataccagatccagcccggcaatattgcgttcaacgtcgggcgtgaaacccaaagcgtcgttgtcgaaaaccacggcgacaggccgatccaggttggatcgcactaccacttttacgaggtcaacccggcgctgaagttcgatcgggaagccaccaaaggcttcagactgaacatcccggcgggcaccgccgtgcgcttcgagcccggccagaagcgggaagtgacgctggttcaggtcacgggggcgcagcgcattttcggctttcgcggcgaggtaatgggcgaggtgaaacatggctgacatttcacgacgggcgtatgccgatatgttcggccccaccaccggagataaagtgcggctggccgacagcgagctgtggatcgaagtggaagacgatctcacggtctacggcgaagaggtcaagttcggcgacggaaaggtgatccgcgcgggggtccacgta

SEQ ID NO: 19324 - DNA, 827 bp, Enterobacter cloacae
atggctctgcaacaagagattattcaggcactgggcgcgaagctacggtagatgcacatgaagagatccgccgcagcgtggattttttaaaatcgtacttaaaaaagaacgcgttcctgaaatccctggtgctgggcatcagcggcggccaggactctaccctgaccggtaaactctgccagatggcgatttcagagcttcgcgaagagacgggcgatgagaaactgcagtttatcgcggtgcgtcttccttatggcgtacaggcggacgagcaggattgccaggatgccattgccttcattcagcctgaccgcgtgctgaccgttaatattaagggctcggtgctggcaagcgagcaggcgcttcgcgaagcgggcattgagctgagcgattttgttcgcggcaacgagaaagcccgcgagcgcatgaaagcgcagtacagcatcgccgggatgaccaaaggcgttgtcgtcggcaccgaccacgcggcagaagcgatcaccggtttcttcaccaaatacggcgacggcggcaccgatattaaccctatcttccgtcttaacaagcgtcagggtaagcagctgctggccgcgctgggctgtcctgagcatctgtataagaaagcgccgacagcggaccttgaagacgatcgcccttccctgccggatgaagcggcccttggcgtcacctatgacaacattgatgattatctggaaggcaaaaagctggatgaaggtaccgcgaaaatcatcgaaggctggtatctgaaaaccgagcacaagcgccatacgccaattacggtgtttgacgacttctggaaaaaataa

SEQ ID NO: 19325 - DNA, 1152 bp, Enterobacter cloacae
atgacaaatacaacaaaccttgatccgattgaaacggcctcccttgacgagttacaggcgctgcagaccgagcgtctgaagtggacgctgcatcacgcctataacaacgtgccgatgtacaaacgcaagtttgacgccgcgggcgttcaccctgacgatttcaaagagctggcggatatccgcaaattcccgtgcaccaccaagcaggacctgcgggataactatccgttcgatacctttgccgtgccgatggagcaggtggtgcgcattcacgcgtcatccggcaccaccggcaaaccgaccgttgtcggctatacgcagggcgacatcgacaactgggccaatctggtggcccgctccctgcgcgccgcgggcggcagtgcgaaggacaaaattcacgtggcgtatggctacggcctgtttaccggcgggctgggggcgcactacggggccgagcgtttaggcgcgacggtgatcccgatgtccggcggccagacggagaaacaggcgcacgtgatccgtgatttccagccggatatgatcatggtgacgccgtcctactgcctcaacctgattgaggagctggagcgccagatgggcggcgatgccagcggctgttccctgcgcgtgggcgtcttcggcgccaagccgtggacgcaggccatgcgtcgcgaaatcgaaaaacgcttaggcattaccgcgctggatatctatggcctctccgaagtaatggggccgggcgtggcgatggagtgtatcgaaaccgtcgacggcccgaccatctgggaagatcacttctacccggagatcgtcaacccgaacgacggcacgccgctggatgacggtcagcagggcgaactgctgttcaccacgctgaccaaagaggcgctgccggtgatccgctaccggacccgcgacctgacgcgcctgcttccggcaaccgcgcgcagcatgcgccgcatggaccggatcagcgggcgcagtgacgacatgctgatcatccgcggcgtcaacgtcttcccgtcgcagctggaagaggagatcgtcaagttcgaacacctttctccgcactaccagctggaggtgaaccgtcgcgggcatcttgattcactttccgtgaaggtggagctgaaagagagtagcctcacgctg

SEQ ID NO: 19326 - DNA, 1559 bp, Enterobacter cloacae
gacaaaacctataaaatcaccattctgcataccaacgatcaccacggtcatttctggcgcacgaatacggcgaatatggcctgtcggcacaaaaaacgctggtggacggcattcgtaaagaggtggcggcccagggcggcagcgtgctgctgctgtcgggaggcgatatcaataccggcgtgccggaatccgatttacaggacgcggaacctgattttcgcggcatgaacctgattggctacgacgcgatggccgtgggtaaccacgaattcgataatccgctgaccgtgctgcgtcagcaggaaaaatgggccaaattccccttcctctccgccaatatttaccagaaaagcaccggcgaacgcctgtttaagccgtgggcgctgtttaagcgccaggatctgaaaattgcggtcattggtttaaccaccgacgatacggcgaaaattggcaaccccgagttctttaccgatatcgaattccgcaaaccggcagacgaagcgaagctggtaatccaggagctgcagcaaaacgagaagccggacgtgattatcgccaccacgcatatggggcactacgacaacggcgagcacggctctaacgcgcccggcgacgtggaaatggcgcgcagcctgcctgcgggctcgctggcaatgattgtgggcggtcactcacaggatccggtgtgcatggcctcggagaacaaaaagcaggtggactacgtgccgggcacgccgtgcgcgccggaccgtcagaacggtatctggattgttcaggcgcacgagtggggcaaatacgtcggccgggcggatttcgagttccgtaacggcgaaatgaagctggttcattatcagctcatcccggtcaacctgaagaagaaagtcacctacccggacgggaaaagtgagcgcgtactctacacgccagagatcgctgaaaaccagcagatgctctccctgctgacgccgttccagaacaaaggcaaggcgcagctggacgtgaaaatcggcacgctgaacggtcgtctggagggggaccgcagtaaagttcgcttcgtgcagaccaacatgggccacctggtgctggcggcgcaaatggcgcgtaccggcgctgacttcggcgtgatgagcggcggcggtattcgtgattccatcgagggcggaaacattacctataaagacgtcctgaaggtgcagccgttcggcaacgtggtggtctatgcggacatgagcgggaaagaggtgattgactacctgaccgccgtggcgcagatgaagccggattccggggcctatccgcagtttgctaacgtcagcttcgtcgcgaaagacggcaagcttaatgacctgaagatcaaaggcgaaccggttgacccggctaaaacgtaccgtctggcgacgttaagctttaacgccaccggcggcgacggctatccgcacattgataacaaaccgggatacgtgaataccggctttattgatgcggaagtgctgaagcagtttatcgagcagaattcgccgattgacgtgaatgcctacgagccgaaaggtgaggtgagc

SEQ ID NO: 19327 - DNA, 407 bp, Enterobacter cloacae
cagcgtctgggactgcccggtgactacggcattgattatcagctgctgaacgcggcaagggcgcgaacctgcccgtcatcgagctggaagggacggacagccagattgcgcttctgcgacagcttcccgacgacggcctgatgctgctggatgatacgttgacccactggcacaccaacgcgcgcctgctgcagaccatgattggctggtggctggacgcgccgcctgcggacggcaagctggcgttaccgtcgacgttcagcgaatcgctgtatgatgtgctgatgaacgcgcgcaacaaagcctggcggcagacgctgcacgctttgcccgcggggcattacgtggtggcggttggggcgttacatttgtacggagaagggaatttgccgtcactgttgaaataa

SEQ ID NO: 19328 - DNA, 677 bp, Enterobacter cloacae
ttttacaatggtcattcaccaaaccaacagaggaccaacggcaaatgacaaccgatgtcacgagttgtgcgaagaaaagccgtggccgaccaaaagtgtttgacagggatgcagcgcttgataaggccatgactctcttctggcaacatgggtatgaagcaacctcgctttccgatctggtagaagccaccggagccaaagcgccgacgctgtatgccgaatttaccaataaagagggactgttcagggcggtgctggacagatacatttcgcgttttgcggcgaaacacgaagcccagctgttctgcgaagagaaaagcgttgaacaggcgcttcgcgactatttcaccgccgtcgcgacctgctttaccagtaaagagacgcctgcgggctgctttatgattaacacttctgccacccttgcggcgtcctccaaagagattgccaatacggtgaaatcgcggcatgcgatgcaggaggagaccctcagcgcctttctggctcagcgccagcagcgcggtgaactccccgcgcaatgcaaccctcagctgctggcacaatatctgagctgtattttgcaggggatgtcgatcagcgcccgtgaaggggccacgctggaaaaactgcagaatattagcgaaaccacgctgcggctgtggcctgagctactcaaaatc

SEQ ID NO: 19329 - DNA, 1278 bp, Enterobacter cloacae
gtgattgtaggcggtggtgctggcgggctggagctggctacacagctgggcaagaagctgggtcgcggtaaaaaagccaaaattacgctggtcgatcgtaaccacagccacctgtggaaaccgctgctgcacgaagtggcgaccggttctctggatgagggcgtggacgcgctcagctatctggcgcacgcgcgcaaccatcatttccagttccagctgggctcggtggtggacatcaaccgtgaaagcaaaaccatcaccctggcagagctgcgcgatgataaaggggatctgctggttcccgagcgtaaactggcgtacgacacgctggtcatggcgctgggcagtacctccaacgacttcaacacgccgggggtgaaagagcactgtatcttcctcgataacccgcaccaggcgcgtcgtttccatcaggaaatgctgaacctgttcctgaagtacaccagcaatatgggtgcgaacggtaaggtgaatatcgctattgtcggcggcggcgcgacgggcgttgagctgtcagcggagctgcacaatgcggtgaaacagctgcacagctacggttataaagggttaactaacgaagcgctgaacgtcacgctggttgaagccggtgaacgcatcctgcctgcgctgcctccgcgtatttccggtgcggcgcacaatgagctcaccaaattgggcgtgcgggtgctgacgcagaccatggtgaccagcgccgacgaaggcggcctgcataccaaagacggcgagtatatcaaagcggatctgatggtctgggcggcaggtatcaaagcgcctgactttatgaaagagatcggcggtctggaaaccaaccgcattaaccagctggtaaccgagccaacgctgcaaaccacgcgcgatcctgaaatctttgccatcggtgactgtgcctcctgtgcgcgtcctgaaggtggattcgtgccgccgcgcgcgcaggccgctcaccagatggcaagcctggtgctgcacaacattctggcgcagtacaaaggcaagccaatgaaagcctatgtctacaaagaccacggttcactggtgtcgctgtcaaacttctctaccgtcggcagcctgatgggcaacctgatgcgcggctcaatgatggtagaagggcgcattgcccgcttcgtgtatatctccctgtaccgcatgcaccagattgcgctgcacggctacttcaaaaccgggctgatgatgctggtgggcagaatcaaccgcgtgatccgtccgcgtctgaagctgcac

SEQ ID NO: 19330 - DNA, 243 bp, Enterobacter cloacae
atgcgtattgaagtcaccatagccaaaacaactgttctacctgccggcgcgcttgatgcactggcaggcgaattatcccgccgtattaacaacacctttcccgacaacgcgggtgccgtaacggtgcgttacgccgcggcgaacaacctctccgtcattggtgctgcgaaagaagataaagatcgcatcagcgaaatcctgcaggaaacgtgggaaagcgcagacgactggtttatcacagat

SEQ ID NO: 19331 - DNA, 1122 bp, Enterobacter cloacae
atgcatatgagatacgacttaatcattattggtagcggctccgtgggttccgctgccggttattacgcaacacaggcaggtctgaaggtcctgatgatcgatgcccacctccctcctcattcggagggtagccatcatggcgatacccgcctcatccgccatgcgtatggagaaggcgagcgctatgtcccgctggtgcttcgcgcccagacgctgtgggacgaactggcgaaacagaccgaagatcgcattttcgaacgtaccggcgttatcaacctgggcccggcccagtctgaatttctcgcaggcgtcgagcgcagcgcgaaagcctttaatctggacgttgagaagctggacgcgacgggcattaccgcgcgctggcctgaaattaccgtcccggacgattacatcggcctctttgaagcccactccggcgtgctgcattgtgaaacggcgatcaaaacctggatcgatcttgccgcgaaagccggctgtgcgcagctgtttaactgtccggtggaggccatcacgcatgacgctgatggcgtcacggtaacgactattgacggcggctattcagcgtcccgcctgctcgtcagcgcaggaacctgggtcacgcgcctgctgccggaactgccgatccagcctgtgcgcaaggtcttctcctggttccagtcggatggccgctacagcgcgcagaataaattcccggccttcaccggcgaattgccgaatggcgatcagttctacggtttcccttccgagaaagacgcgctgaaaatcggtaaacacaacggtggccaggctatctccacccctgaagagcgtaaccttttcggcgcctttccgcaggatggttcagaagccttcacgttcctgcgtactattcttccgggcgtcggcggcttgctgtatggcgcggcctgtacctacgacaacaccccggatgaagactttatcattgatacgctgcccgggcatgacaacgtcctgctgattaccgggctgagcggccacggctttaagtttgcttccgtgctgggcgagatcgccgcgcagttcgcccagggtattgcaccgcagtttgatctgacgcccttctccctctcgcgttttaacgga

SEQ ID NO: 19332 - DNA, 473 bp, Enterobacter cloacae
ccccgagctgagccgttgtagagccagagccggttgttgaaaaaccacagcgtaaagaagcggtgatcatcatgaacgtggccgcgcatcacggcagccatctcaacggtgacgtgctgctcaacagtattcaacaggcaggattcaagtttggcgatatgaacattttccatcgccacctgagccctgacggtagcggcccggcgctgttcagcctggccaacatggttaaccctggtacctttgatccggaaatgaccggtgatttcgtgaccccgggcgtcactatctttatgcaggtaccttcttacggcgacgaactgcaaaactttaagctgatgctgcagtccgctcagcacatcgctgacgaattcggtggcgtggtgcttgacgatcagcgtcgaatgatgaccccgcagaagctgcgcgagtatcaggaccgcatccgcgaagttaaggaagctaacgcgtaa

SEQ ID NO: 19333 - DNA, 2025 bp, Enterobacter cloacae
atggactcaatcgaaaaacaactcactgaactgcgaaccacgcttcgccatcatgaatacctctatcatgttatggacgcgccggaagtcccggatgcggaatatgaccgcctgatgcgcgagctgcgcgagttagaggcgcacatccagagctcatcacgccggattcccccacccagcgcgtcggcgctgagccgctgggcgctttcagccaggtgcgccatgaggtgccgatgctgtcgctggataacgtcttcgatgaagagagcttcctcgcgtttaacaagcgcgtgcaggatcgcctgaaaagcagcgactccctcacctggtgctgcgagctcaagctggatggcctggcggtcagccttctctacgaaaacggcgtgctggtgcgtgccgcaacgcgtggcgacggtacaacgggcgaagacatcaccaccaacgtgcgtaccatccgcgcgatcccgctgaagctgcagggtgacaacattcccgcacgtctggaagtgcgcggcgaggtgttcctgccccaggcgggcttcgagaaaattaacgaagcatgcgcgtcgcaccggcggaaaggtgtttgctaacccgcgtaatgcggcggcaggctctctgtgccacttgatccacgtatcaccgcgaagagccgcttactttcttctgctacggcgttggtattctggagggcggcgagctgccggatacgcacctcgggcttctgctgcagtttaaagcgtgggggtctgccggtgagcaaccgcgttcagctctgcgactcgccgaaagcggtgctggcgttctaccacaaggtggaacgaggaccgcccgacgctcggttttgatattgatggcgtcgtcatcaaggtgaattcactggcgctgcaggagaagctgggctttgtggcgcgcgcgccgcgctgggcggtggcgtttaaattccctgctcaggagcagatgaccttcgttcgcgacgtggagttccaggttggccgtacgggggcgattaccccggtcgcacgtctggagcccgtgcaggtcgcgggcgtgctggtgagtaatgccacgttgcataacgccgatgaaatcgaacgcctcggcctgcgcattggtgacaaagtggtgattcgccgcgcgggcgacgttattccgcaggtggttaacgtcgtggagtcagagcgtcctgccgatacgcgcgagatcgtcttcccgacccactgcccggtgtgcggctccgacgttgagcgtgtggaaggcgaagcggtggcgcgctgcacgggaggcttaatctgtggtgcgcagcgtaaagagtcgctgaagcacttcgtctcccgtcgggcgatggacgtcgacggcatgggcgacaagattatcgatcagctggttgagaaagagtatgtccatacgccagcggatctcttcaggctgacggcaggtaaactgaccggtctcgaccgcatgggaccaaagtctgcccagaatgtggttaacgcgctggaagccgcaaaagaaacgacctttgcccgcttcctttacgcgctgggcattcgtgaagtgggtgaggcgacggcggcgggtctggcggcgtactttggtacgctggaggcgctggaaaaggctagcatcgacgagctgcagaaagtccctgacgttggcattgtggtcgccacgcacgtctttaacttcttcgccgaagagagcaaccgtgaagttatcggcaagctgctggaagagggcattaagtggcccgcgccggtagtggttaacgccgaagagatcgacagcccgttcgccggtaaaacggtagtcctgaccggcagcctgagccagctttcacgcgacgatgcgaaagcgcgcctggtggcgctgggggccaaagtggcgggcagcgtgtcgaagaaaaccgacctggtgatcgccggggaagcggcgggctcgaagctggcgaaagcccaggagctcggcattgaagttatcgacgaagcggaaatgatgcgtctgttaggagagtaacgtggagaa

SEQ ID NO: 19334 - DNA, 507 bp, Enterobacter cloacae
atgtcaagacgtaagtacacctttgaacagcgcctcgaagtggttatgcactatttagctactgatgaaggctatcgcttaacatcagctcgctttaacgttcccagaacccaggtaagaatatgggttgcagcctatgatgtttatggagaagaaggtctgaagcccagagataagggcgtatcaatcgatcccgaaatcagaattgaagctgtgaaagcggtgctatccggtcagatatctcagacacaggccgcgactaaattcaatgttgcaggtgcgtcatctgtcgccaaatggctaaaagtgtacaaagagcagggtgaagaagggcttcgctcactcaaggtaggcacaaaaagggtatcttacatggctgaacaccctgaacttattgaagccgcagaggaacgatcaaaagagcaacgaattcttgaactggaaaggaaggtcaaacgtcttgaattacggatactttatcttcaaaagctgaaagccttagttcgg

SEQ ID NO: 19335 - DNA, 981 bp, Enterobacter cloacae
atgcgggtactgatcgttaaaacttcttcgatgggcgatgtgctgcatacgctcccgtcactgacggacgccatgcgggccgttcccggcattcgttttgactgggtggtggaagaaggcttcgcgcagatccccacctggcatgaagcggttgaccgcgtgataccggtggcgattcgccgctggcgcaaagcgtggttctccgcgccgattaaagccgaacgcaaggccttccgtgaggcggtgcaggtacagcattacgacgctatcatcgacgcccaggggctggtgaaaagcgccgcgctggtgacgcgtctggcacatggcgtaaagcacggcatggactggcacaccgcccgcgaaccgctggcgagcctgttctataatcgtcgccaccacatcgcaaagcaacagcatgccgtcgaacgtacccgcgagctgtttgcaaaaagcctgggctacgcgaaaccggaaacccagggcgactacgccattgcgcagcactttttgcgcaatacagatccctgtgctcagccttatcttgtcttcctgcatgccacaacgcgcgacgataaacactggccggaatcgcactggcgaagcctgattgaactaacgcaacccaccggcatccatattaaactcccgtggggtgccgaacatgagcggcagcgtgcagagcgtctggcagacggcttttcacacgtcgaggtattgccaaaactcacgctggcacaggttgcagcgcagctggcgggagcgaatgctgttgtttccgttgatacaggtttaagccatttaaccgcggcgctggatcgtccgaatattacgatttttggtccgaccgatcctggattgatcgggggttacggcaaaaaccagcatcagatggtcagcccgacccagcaaacgaaggatatcagcgcagatgctattttttcatttttacagggcagccgttggctttccaacagggatatc

SEQ ID NO: 19336 - DNA, 490 bp, Enterobacter cloacae
ccgtacagcttctttaactgctttaactatcgcccgccgatcatgggttttttccagcaacggctggaaggacagcgtgcgtaatattaacgaaactaaagagtttgtctggaacctcgcaacccgcgatcttgccgaagccatgaaccaaacctctgccatgcttccgcacgatcgggatgaatttagctttgccgggctaacgccagcggcgagccagctggttaacgcaccccgcgtcgccgaaagcccggtgaactttgagtgccgcctgtcgcagtgcattcagcttaccggtgccgacggcacaccggtcgatacgtggctggtgttgggggaggtggtcggtatccatattgccgaaacgctgctggaagaggggatataccagacggctaaatcgcagcccatcctgcgtgcgggtgggccgacggcgtattatggcatcagtgatgaaaaccggtttgatatggtgcgcccgggcgcggat

SEQ ID NO: 19337 - DNA, 369 bp, Enterobacter cloacae
atgacaacaactaacgccccgcagggcgaactggttttacgcacactggcaatgcccgctgacaccaatgccaatggcgatatttttggcggctggctgatgtcgcagatggatatgggcggcgcaattctggcaaaagagattgcccacgggcgcgtggtgactgtgcgagtggacggcatgaccttcctgcgcccggttgcggtgggagatgtggtttggctctacgcgcgctgcgtcaaacgcggcaacacctctatttcaatcaacatcgaagtatgggttaagaaagtctcttctgaacctattgggcagcgttataaggccaccgaagcgctgtttatttatgtcgcagtggacagggggatc

SEQ ID NO: 19338 - DNA, 537 bp, Enterobacter cloacae
atgaagcagtttcttgattttttaccgctcgtggtcttttttgctttttataagctgtatgacatttatgccgcgaccactgcgctgatcgttgcaacggctgttgttctgatctacagctgggttcgctatcgtaaagtcgaaaagatggcgctgataacgttcgtcctggtcgccgtgttcggcgggcttacgctgttcttccacaatgatgaatttattaagtggaaagtgaccgtcatttatgcgctgttcgctggtgcactgttaatcagccagtgggtgatgaaaaaaccgctgatccagcgcatgctgggtaaagagctgacgctgcctcaggaagtctggtcccgtttgaatatcgcctgggcggtcttctttattctctgtggtcttgccaatatctatatcgccttctggctgccgcagaatatatgggtcaacttcaaggtctttggcctgactgcgctgacccttatcttcacgctgttaagcggcgtatacatctatcgccacatgccgcaagacgacaagcac

SEQ ID NO: 19339 - DNA, 630 bp, Enterobacter cloacae
atgaaaaaattagcggtggcagcccttgtattaagcagtctctctggcggcgcgtatgcgcatgaagcaggcgaattctttattcgtgccggttcggctacggttcgcccgactgaaggatcggataacgtgctgggtatgggcggttttaacgtcagtaataacacccagttagggttaacgttcacctatatggcgacggaaaacgttggtgttgagcttctggctgcaacgccgttccgtcatcgcgtaggtctgggcgcaaccggtgatatcgctacggttcaccatttaccgccaacgctgatgtcgcaatggtactttggtgatgccagcagcaaggtgcgtccttatattggcgccggtgtgaactacaccactttcttcgacgagaagtttaacgataccggtaaagaggccggtctgactgacctcagcctgaaagattcatggggtatggcggggcaggtcggtctggattatctgattaaccgcgactggctgattaacgcctcggtctggtacatggatattgatacggacgtacgcttcaaagcgggcggtcagcagcaaagtatcaatactcgcctggatccgtgggtgtttatgttctctgcgggttatcgtttc

SEQ ID NO: 19340 - DNA, 714 bp, Enterobacter cloacae
atgcgtttttaccgcccacttggtcagatctcagccctgacgtttgaccttgatgacaccctttacgacaaccgcgaggtgatcctgcgtaccgagcaggagtcgctggcgtttgtgcagaactaccatcccgcgctgaaagcaatgcagaacaaggactttcagaagctccgtcagtccctgcgggaaaccgagccggacatttaccacgacgtgaccgaatggcgtcgtcgtgcggtcgagcaggcgatgctcaatgccggcctgagcgcgcaggacgcggccatcggtgccgaagcggccatggaaaactttgccaaatggcgcagccgtatcgacgtgccgcaggagacccacgacacgctggcgaagcttgccgaaaagtggccgctggtggcgatcactaacggcaatgctcagccggagctgtttggcctcagcgattattttgagttcgtgctgcgtgctggcccgcacgggcgcgcgaagccatttaatgatatgtaccatctggcggcagataagcttaacctgccgctgggtaacatgctgcacgtgggggatgacctgaccacggacgtggccggtgctatccgctgcgtgatgcaggcctgctggatcaagccggaaaatgcggatctgatgaccgcaaccgacagccgtcttctgccgcacgtggaaatttcacggttggcatccctcacgacgctgata

SEQ ID NO: 19341 - DNA, 1170 bp, Enterobacter cloacae
gtgacggtgccaatggacgtttcttacctgctcgacagccttaatgacaaacagcgtgacgcggttgccgcctcgcgcaccaacctgctggtgctggctggagcgggcagtggtaagacgcgcgtgctggttcaccgtatcgcctggctgcagagcgtggagaactgctccccgtactccatcatggcggtgacgtttaccaacaaggcggcagcagagatgcgccaccgtatcgctcagctgatgggcaccagccagggcggcatgtgggttggcaccttccacggtctggcgcaccgcctgctgcgcgcacaccacatggacgccaacctgccgcaggatttccagatcctcgacagcgaagaccagctccgtctgctgaaacgcctgatcaaggcgatgaacctcgatgagaagcagtggccgccgcgtcaggcgatgtggtacatcaacggccagaaggacgaagggctgcgcccgcaccacattcagagcttcggcaacccggtcgagcagacctggcagaacgtctacaaggcctatcaggaagcgtgcgatcgcgccggtctggtggattttgccgagctgctgctgcgcgcccacgagctgtggctcaacaagccgcacatcctgcagcactaccgtgaacgcttcaccaatatcctggtggacgagttccaggataccaacaacattcagtacgcgtggatccgcctgctggccggtgataccggcaaggtgatgatcgtgggcgatgatgaccagtcgatctacggctggcgaggggcgcaggtggagaacatccagcgcttcctcaacgatttcccaggtgcacagaccatccgtctggagcagaactaccgctcaaccagcaacattctgagcgcggccaacgccctgattgagaacaacaacgggcgtctgggtaaaaagctttggaccgacggggtcgacggcgaaccgatttcgatttactgcgccttcaacgagctcgacgaagcccgcttcgtggtgaaccgcatcaaaacctggcaagacaacggcggcgcgctggagcagtgcgccattctctaccgcagcaacgcccagtcgcgcgtgctggaagaggcgctgctgcaggtgagcatgccgtaccgcatttatggcggcatgcgattcttcgaacgtcag

SEQ ID NO: 19342 - DNA, 642 bp, Enterobacter cloacae
atgtttactggtattgtgcagggcaccgccaaagtggtgtccattgatgaaaaacctaatttccgtactcatgttgttgagctgccggaatatatgcttgagggtattgaaaccggcgcgtcgattgctcacaacggctgctgcctgaccgttaccgaaattaacggcaaccagattagctttgatttaatgaaagagacgctgcgcatcaccaacctgggcgagctggcggtaggagatactgtcaacgttgagcgtgcggcgaagtttagcgatgagattggcggccacctgatgtccgggcacatcatgaccaccgctgaagtggcaaaaatcgtgacctcggaaaataaccgtcaaatctggtttaaaatgcaggatccttcattaatgaaatacatcctctataaaggatttattggcatcgatgggattagcctgacggtgggtgaagtaacgccaacgcgtttttgcgtgcatttaattcctgaaactctgcagcgcaccacgctgggtgccaaaaaactggggcaccgcgtgaatattgaaatcgatccgcaaacccaggcggtggtggatacggttgagcgcgtgctggcagcaaaagaagcggcaataataaagaccgccgcagaagaagaa

SEQ ID NO: 19343 - DNA, 853 bp, Enterobacter cloacae
gtgaatattcaggctcttctctccgaaaaagtcagtcaggcactgattgccgcaggcgcgcctgcggattgcgaaccgcaggttcgtcagtcagcaaaagtacagtttggcgactatcaggctaatggcgtgatggcagtggctaaaaaactgggcatgccgccgcgacagctcgctgagcaggtactgacgcatctggatctttccggcattgccagcaaaaccgaaatcgccggtccgggctttatcaacatcttccttgagcctgcattcctggcaagccacgttgacgcggcgctgaaatctgaccgtctgggcgtttcccagccggaggcgcagaccgtcgtgatcgactactctgccccgaacgtggcgaaagagatgcacgttggccacctgcgctccaccatcatcggtgatgccgcggtgcgcacgctggaattcctcggtcacaaggtgatccgcgcgaaccacgtgggcgactggggtacccagttcggcatgctgattgcttacctggaaaaacagcagcaggaaaacgcaggtgaaatggcgctggcggatctggaagggttctaccgcgaagccaaaaagcactacgacgaagatgaagcctttgccgagcgcgcgcgcagctatgtggtaaaactgcagggcggcgaccaatacttcctcgagatgtggcgcaagctggttgatatcaccatgtctcagaaccagctgacctataaccgtctgaacgttaccctgacccgtgacgacgtgatgggtgaaagcctctataacccaatgctgcccggcattgtggctgacctgaaagcgaaaaaccctggcggtagagagcgaaggcgca

SEQ ID NO: 19344 - DNA, 1016 bp, Enterobacter cloacae
atgaaaccatctctaaggcgctcaaccgcagcgctgctggcatcgtcattgttattaaccattggtcggggggcaacgctgccgtttatgaccatttatctcacgcgcgtctacagcatgagcgttgagaatattggttatgccctgacgattgcgctgaccatcggcgtagtgttcagcctgggatttggcattcttgccgataagtttgataaaaagcgttacatgctgatcgcgatcgtggccttcatcgccggatttgtcgcgatcccgctggccgataacgtcacgctggtggtactgttctttgcgctgatcaactgcgcctattccgtcttttcgacggtgctgaaggcctggttctccgacgtgctcaccacgagccagaaagcgcgcgtcttctcgcttaactacagcttcctgaacattggctggacgatcgggccgccgattggcaccctgctggtgatgtacagcctgcaactgccgttctggctggcggccttctgcgccgcgctgccgctcggattcatccatttcttcgtgcagaaaagcgttgcgctggataccgcagaggagaagatgccctggcagccgtcggtgctgcttaaagaccgcgcgctgttctggtatacgctctctggcctgctcgcgtcatacgtgggcggatcgttcgccagctgcatttcgcagtatgttctggccgcccatgccgatagcgattttgcgcagaaggtcgttgccgtggtactgctcgtgaacgccgccgtggtggtgacgctgcagtacgcgctgggccgcaagaactctgcacgcaatattcgcccgctgatgatgctcgctaacctgttttttatcgtggggctggggcgatttatggtctctgcgacaaacctggtttactggggcatcgatgccgcccatatttacccctgggtgagattatctatgcaccggccgaatatctgctgatcgacatacattgccccgccgggaattgaggcaagctatttctc

SEQ ID NO: 19345 - DNA, 669 bp, Enterobacter cloacae
atgttggatttaataaaagcaatcagccttgggctggtggtcttgctgccgttggctaacccgttaacgacggtggcgctgttcctcgggctggcagggaatatgaacagcgccgagcgcaaccatcagtcgatgatggcctcggtgtatgtgtttgccatcatgatggtggcttactatgccggacaggtggtgatgaacaccttcgggatttccatccctggcctgcgtatcgccggggggctgattgtggcctttatcggtttccgtatgctgttcccggcgcaaaaagcgcatgagtcgccggaagcggccagcaaatcggaagagctggaaaccgaaccgagtgcgaatatcgcctttgtgccgattgccatgccgagcacggcgggggccgggcaccatcgcgatgatcatcaagtccgcctcgacggtgcgtgacagcgcaaccttcccggactgggtgctgacggttgcgccaccgctgatttttgcgattatcggggttatcgtgtgggcgtcgtgcgcagttctggcgccattatgcgctgggtaggcaagggcggtatcgaggcgatttcccggctgatgggcttcttactggtctgtatgggcgtgcagtttattattaacggcgtgctggaaattattaagacctatcattgatgt

SEQ ID NO: 19346 - DNA, 898 bp, Enterobacter cloacae
accggctatgcacagtgggaatacaacattcaggctaataacacggaagggtctgataatcagtcatggacccgtctggccttcgccggtgtaaaagtgggtgactacggctccttcgattacggtcgtaacctacggtgtcctgtacgacgtggaaggctggaccgatatgctgcctgagttcggtggcgactcctacaccaaagccgacaacttcatgaccggccgcgccaacggtgtggcaacctaccgtaacaccgacttctatggtctggtgcagggcctgaactttgcgctgcagtaccagggcaaaaatgaagacgccagcaacaaccaggaaggcaccaacaacggtcgcgatacgcgtcacgagaatggtgacggcttcggtatttctaccacctatgacttcggcatggggattactgcaggggccgcgtatacctcttctgaccgcaccaacgagcaggtcatgaataccacagcaggtggagacaaggcggatgcctggacggcgggcctgaagtatgacgccaataacatctatctggcggcaatgtattctgaaacccgcaatatgacaccgtatggtgataataccgacgccgtggcgaacaaaacccagaacttcgaagtgaccgcgcagtaccagttcgacttcggcctgcgtccgtccgtttcctacctgcagtcgaaaggtaaggacctgggcaacggccagggcgaccaggatctggttaaatacgctgacgtaggggtcacctattacttcaacaaaaacatgtccacctacgttgattacaaaatcaacctgctggatgaagatgacagcttctacaaagacaacggcatcagcactgatgatgttgtagcgttaggcctggtttaccagttctga

SEQ ID NO: 19347 - DNA, 1131 bp, Enterobacter cloacae
atgagccagttgctgcgcgcgcgacggatccttaccgaacagggctggctggacgaccaccagctacgcattgaaagcggcgcggttgcggcgattgaacccatcccggcgggcgttacggcgcgcgatgcggagctgctttgcccggcgtatatcgatacgcacgtccacggcggcgcgggcgtggacgtcatggatgatgtgcccgacgtgctggacaccctggcgatgcataaagcgcgtgaaggcgtgggcgcatttctgcccaccaccgtgaccgcgccgatggaagccatccacagcgcactgatgcgtatcgcccggcgcagtcagtccggcggacccggcgcgcagatcctgggcagttatctggaaggaccgtactttacgccccagaacaaaggggcgcatccgcccgagctattccgggaactggatatcgccgagctggacaggctgattgacgtttcacagggcacgctacgggtggtggcgctcgcgccggaaaaacccggcgcgctgcaggcgattcatcatcttaaacagcgcggtatccgcgtcatgctgggccacagcgctgctacgtaccggcaaactctcgtcgcgtttgatgcgggtgccgacgggctggtgcactgctacaacggtatgacgggtttgcaccacagagagcccggcatggtcggcgcagggctgacggacaaacgggcgtggctggagctgattgccgacggccaccacgtccatccgggagcgatgcgtttatgctgctgctgcgctcaggatcgcgtggtgctgattaccgatgccatgcaggcggcaggtatgcccgacggtcggtataccctgtgcggtgaagaggtcacgatgcaaaacggcgtggttcgaaccggctccggcgggctggcgggcagcacgctgtcgctggatgccgcggtcaggaatatggtggagtacgcgggcgtcaccgccgaagaggcgatccatatggcctcgctgcaccctgcccggctgctgggcgttgacgatcagcttggatccttagccccgggcaaacgcgccaatattattgcgctggacgggggtttacacctccagcggatctggattcagggccaggctctccccctt

SEQ ID NO: 19348 - DNA, 748 bp, Enterobacter cloacae
tcgttcaacagctctaagctggtaacggtctgggcgggctggtcgacgcgctggtacagcgagctgttccacgacgatgcgatgatgagcgcggtggggctgagcctgacgattgccgccctggcggcgaccatggcgtcggtgctgggcacgatcgccgcgctggtgatggtgcgcttcgggcgttttcgcggctcaaacgggttcgcctttatgatcaccgcgccgctggttatgccggacgtgatcaccggactcgcgctgctgctgctgttcgtggccctggcgcacgccatcggctggccggcggatcgcggcatgctcaccatctggctggcgcacgtcaccttctgtacggcctacgtggcggtagtgatctcctcgcgcctggcgcgagctggatcgctccattgaagaggcggcgatggatcttggcgcgacgccgctgaaggtctttttcatcattaccctgccgatgattatgccggcggtgatctccggctggctgctggcgtttacgctgtcgctggacgatctggttatcgccagctttgtctccggaccgggcgcgacgacgctgccgatgctggtcttctccagcgtgcgcatgggggtcaacccggagattaacgccctggcttccatcatcctcggcgtggtcggaattgtcggatttatcgcctggtatttgatggcgcgcgcggaaaaacagcgcgtgcgcgatatccagcgtgcaagacgcggctga

SEQ ID NO: 19349 - DNA, 2290 bp, Enterobacter cloacae
gtacgccgcgctctggcgctggcgcaccacctggcggaaccaccatctggatcaaacacgacgagctaattatcggtaaccaggcaagcgaagtgcgcgccgcgccgattttcccggaatacaccgtctcctggattgagaaagagatcgacgatctggcggaccgcccgggcgcgggctttgcggtgagcgaagagaacaagcgcgtgctgcacgacatctgcccgtggtggcgcggccagacggtgcaggaccgctgctacggcatgttcaccgacgagcagaaaggcctgctggaaaccggcattatcaaagccgaaggcaacatgacctccggcgacgcgcacctggcggtgaacttcccgctggtgctggagaaaggcctcgacggcctgcgcgccaaagtggccgaacgccgctcgcgcattaacctgacggtgctggaagacctgcacggcgatcagttcctgaaggcaattgatatcgtgctggaagcggtgagcctgcacatcaaacgcttcgccgatctggcgcgcgagatggcatctacggaaaccgcgaaagcgccgcgacgagctgctggcgatggcggagaactgcgacgtgattgcccacgagccgccaaaaaccttctggcaggcgctgcagctgtgctacttcatccagctgatcctgcagattgagtccaacggccactccgtctccttcgcgcgtatggaccagtacctgtatccgtactaccgccgcgacgtggagctgaaccagagcctggaccgcgagcacgctatcgagctgctgcacagctgctggctgaagctgctggaagtgaacaaaatccgctccggctcgcactcgaaagcttccgccggcagcccgctgtaccagaacgtcaccatcggcggccagaagctggtcaacggcgagccgatggacgcggtgaacccgctctcctacgcgattctggaatcctgcggtcgcctgcgctccacccagccgaacctgagcgtgcgctaccacgcgggcatgagcaacgacttcctcgacgcctgcgtgcaggtgatccgctgcggcttcgggatgccccgcgttcaacaacgatgaaatcgtcattccggaattcatcaagctcggcgttgaacgaaacgacgcctacgactacgcggccatcggctgcatcgaaaccgcggtgggcggcaagtggggctaccgctgcaccggcatgagctttatcaacttcgcccgcgtgatgctggccgcgctggaaggcggccgcgacgccaccagcggcaaggtgttcctgccgcaggagaaagcgctctctgccggtaacttcgacaacttcgacgaagtgatggcggcgtgggatagccagatccgctactacacccgcaagtccatcgagattgagtacgtggtggacaccatgctggaagagaacgtccacgacattctctgctcggcgctggtggacgactgcatcgaacgcgcgaaaagcatcaagcagggcggcgcgaagtacgactgggtctccggcctgcaggtgggcatcgccaacctcggcaacagcctggcggcggtgaagaagctggtgttcgaacagggcactattggtcagcagcagctggcggcggcgctggcggatgacttcgacgggctgacccacgagcagctgcgtcagcgcctgatcaacggcgcgccgaagtacggcaacgacgacgacagcgtggacatgctgctgacgcgcgcctatcagacctacatcgaagagcttaagcagtaccacaacccgcgccacggccgcggcccgattggcggtaactactacgcgggcacctcttccatctccgcaaacgtgccgtttggcgcagcaacgatgaccacgccggacgggcgtaaggcgcacaccccggtggcggaaggagcaagcccggcttccggtacggaccacctcggcccgacggcggtaattggctcggtgggtaaactgccgacggaagcgattctcggcggcgtgctgcttaaccagaagctgaacccgtcgacgctggaaaacgacagcgatcgccagaagctgatggtgctgctgcgcaccttcttcgaggtgcataagggctggcatattcagtacaacatcgtctcgcgcgaaacgctgctggaagcgaagaaacatcctgaccagtatcgcgatctcgtggtgcgcgtcgcgggctactcggcgttcttcaccgccctgtcgccggatgcgcaggacgatattatcgcccgtactgagcatacgctgtaacggcat

SEQ ID NO: 19350 - DNA, 814 bp, Enterobacter cloacae
atgaccgttaaagttatcgtcaccgatatggacggaactttccttgatgatgccaagcagtacgatcgtgaccgcttccaggcacagtttgaacagcttaaagcccgcgacattgaattcgttgtcgccagcggcaatcagtattaccagctcatctccttctttctggagctcacagatcggatctccttcgtcgcggaaaacggcgcgctggtgttcgatcgcggcgaacagattttccacggcgagctgacgcggcatgaatcgcaaatcgtgattggcgagctgctgaaagataaagggctgaactttgtggcctgcgggctggagagcgcgtacgtgagcgataaagccccggacgcgttcgtggcgctgatgtcaaagcactatcaccgcttaaagcgcatcagcgattaccgcgaaattgacgacgtactgtttaaattctcccctgaacctgccggacagcgatatccctaatctggtggataaactgcacgtctccctggacggcattatgaagccggtcaccagcggctttggttttgtggatttgattatccccggcctgcacaaggccaacggcatcagtcgtctgctgaaacgctggaaaatctccccgcaggagtgcgtggccattggggacagcggcaacgatgccgagatgctgaagctggtgaaatattcctttgcgatgggcaacgcggcagagagcatcaaagaaatcagccgctacggcacagacgacaacaaccatcagggcgcgctgaacgtcattcaggccgtgctcgacaaccattccccgttcgatctc

SEQ ID NO: 19351 - DNA, 906 bp, Enterobacter cloacae
atggcgtgtgcaagcgagcaggaacagtatcagcagtggctggcgcaaattaaccaggtttgcgggcgttttaacgcgcagcccaccggggggaaattcttcggcgagctggagaccagctatgcgcgcagcctgaagctcagcaccgtgaccgcaggcggggttaacctgttccgctcccgtcaggagatcgctcagagtaacgatgcctggttctataccgtgttccagctcgaaggcagcgcggaaattgagcaggatgaccgtcgcgcgctgctcagaaccggtgatatcacgctgattgacgcgtcgcgtccctgctcgatcaactggcgggaaaaatcccgtcagatctcgctgctggttccccgtcagattattgagcagcagtgtcgtttccaggagataagctgcgcgaccgccctttcccgcaccttgccgacggtacagctgagccatcgcctgctgatggagagcatgagcaatgccgacctgagtgaccgtgaaagcgaagcggcgctcgaggcgatgatctgtctgctgcgccccgctttccagcagcgtgaaatcattcagccgcgcaaggagcgccagttccagcatgtggtggcgctgattgacgaccatattcagtctgaatcgctgcgcccggaatggattgcagccgagagcggcatgtccgtgcgcagcctttaccgcatgtttgccgagaaggggctggtggtggcgcagtacatcaaaaaccgtcgtctggatctctgcgcgcaggcactgcaatctaccggtgatgatgaaaagctggcgggtattggctacagctgggggttcaccgaccatagccatttttctacggcgtttaagcagcgttttggcgtctcgccgggtgaataccgcaggcgctaccgc

SEQ ID NO: 19352 - DNA, 1008 bp, Enterobacter cloacae
atggttaaggtcggtattaacggtttcggtcgtatcggacgtaatttcctgcgcgcggcgctgggtaacccggatctgcagattgtggccattaacgatctgacggacagtaaaaccctcgcacacctgctgaagcatgattcccttctgggcaaactgcgcgcgcccgttgaagcggctgacggcgcgctgcaggtagacgggcagcggatcgtcgtatttagcgaacgcgatccggcgaatatcccgtggcgtgacgtcggcgttgacgtggtgattgaggccaccggattctttaccgagcgggaaaaagcggcggtgcatatcacccacggtggcgccaagcgcgtcatcatttccgcccccgggaagaacgacgacctgacgattgtgatgggggttaaccacgagcagtacgatccagcccgtcacgcggtggtgagtaacgggagttgcaccacgaacggcgtggcgcctgccgctcaggtgctgcatcagcagttcgggattgagcatggcctgatgaacaccacgcatgcctacaccaacagccaggcactgcacgatcagccggagaaagacctgcgcggcgcgcgcgcggcggcgctgtcgattgtgccttactcaagcggcgcggcaaaagcgctggggaaagtgatcccctctctggacggcaaactgaccgggtactccctgcgcgtgccggtgccggtggtgtcgattgtagatttaacggtaacgctgagccgtaacgtgaccgccgaagaggtgaacgaagcgttccgcaacgcggccgccagcgggccactgaaaggtattctgggctatagcgacgaaccgctggtctccagcgattatcagggcgacccacgctcctcgattatcgacgggctttccacgctggtgattggcgggaacatggtgaagatcctggcgtggtacgacaacgagtggggcttctctaaccgtctggttgatctggcggtgtggatggataagaaagggctg

SEQ ID NO: 19353 - DNA, 358 bp, Enterobacter cloacae
ggaatattaacctgtttcccatcgactacgcctttcggcctcgccttaggggtcgactcaccctgccccgattaacgttggacaggaacccttggtcttccggcgagcgggcttttcacccgctttatcgttacttatgtcagcattcgcacttctgatacctccagcatgcctcacagcacaccttcaacggcttacagaacgctcccctacccaacaacgcatacgcgtcgctgccgcagcttcggtgcatggtttagccccgttacatcttccgcgcaggccgactcgaccagtgagctattacgctttctttaaatgatggctgcttctaagccaacatccggttctgtgcctg

SEQ ID NO: 19354 - DNA, 1121 bp, Enterobacter cloacae
atgataaaactggaaaacctcaccaaacaattttcacagaagcacggccagacctttaaggccgtcgacaacgttaacctgaccgtacccgaaggggaaatgtgcgtcctgctcggcccgtccggctgcggaaagaccaccaccctgaagatgattaaccgcctcattaccccaagcagcgggacgatcctgatcaacggtgaagacaccagcgggatggacaccgtcaccctgcgccgcaacatcggctacgtgatccagcagattggcctgtttccgaatatgacaatcgaagagaacatcaccgtcgtgccgcgcatgctgggctgggataaagcgcgctgcaaaacccgcgccgaagagctgatggatatggtggcgatggacccgcataagtttctcaaccgctacccgcgcgagatgtcgggcggccagcagcagcgtatcggcgtgatccgcgccctggctgctgatcctccggtgctgctgatggatgaacccttcggcgcggtggacccgatcaaccgcgaggtgatccagaaccagttcctggagatgcagcgcaactgaaaaaaaccgtcatgctggtgagccacgatatcgacgaagccctgaagctcggcgaccgtattgcggtgttccgtcaggggaaaatcgtgcagtgcgccagcccggatgaactgctggcgaaaccggcgaatgagtttgtcggctcgtttgtcggccaggaccggacgctgaagcgtctgctgctggtatcggcgggcgacgtcaccgaccagcagccgaccattacggtgcggggctctactccgcttcccgaagcctttgcgaccatggatgataacgacattcgtgccgtgacggtggtcgacgagcacggcaaaccgctgggctttgtgaagcgtcgcgaagcgcgtaacgccagcggtacctgcgccggcatcctgcatccgttccgcatgaccggcaaggcggaagacaacctgcgcgtggtgctttcacgtctgtatgagagtaataccagctggatgccgatcgtggatgaggacggtcgttacaacggcgagatttcgcaggactatattgccgagtacctgagctccggacgcacgcgccgg

SEQ ID NO: 19355 - DNA, 676 bp, Enterobacter cloacae
atggagcacgcccgccagaggctgcgcctgatgcagctatccagcagcagcctgccggtcgggtcgtttacctggtcgcagggggctggagtgggccgttgaggcaggctgggtcaccgacgccgacgcgttcaaacgctggcaaatccagcagatggagcagagctttttctgcgtcgacctgccgctgtttattcggctattccgggcctgcgagcagcaggatctgacgatggccaaacgctggacggcataccttctcgcctgccgggaaacgcgcgagctgcgcgaagaggagcgcaaccgtggagcggcgtttacgcggctgattaagagctgggaacctgactgtccgcccgaatggctgccgctgtttatgcaaagccagctctgcggcatggcctggctcggcgtgcgctggggcattagcgcgcgcgagctggcgctgagcctcggctacagctggatggagagcgcggtcatggcgggcgtcaagctggtgccgtttgggcaacaggccgcgcagcagctgattatcgaactgggcgaccattacgccgccgggcttgaacaggcatttttgcgtagcgacgacgcgctgggggcagcaacgccgctgtccgccatcgcctccgcgcgccacgaaacccaatattcacgactattccgttcctga

SEQ ID NO: 19356 - DNA, 621 bp, Enterobacter cloacae
atggctgattacaaacatcccctgcgcgtgggcgtgggcggcccggtagggtcgggcaaaaccgcgctgctggaagcgctctgcaaggcgatgcgcgacacgtaccatcttgcggtggtgaccaacgatatctacaccaaagaggatcagcgcatcctcaccgaggcgggcgcgctggagccggagcgcatcgttggcgtggagacgggcggctgtccgcacactgccatccgggaagatgcctcaatgaacctggcggcggtagaagcgttaagcgagaaattcggcaatctggatctgatcttcgttgaaagcggcggcgataacctgagcgcgacgttcagcccggagctggcggatctgaccatttacgtgatcgacgtggccgaagggaaaaaatctcgcgtaaaggcgggccggagatcaccaaagccgattttctggtgatcaataaaaccgacgcgcgcgccgtacgtctggcgcgtcgctggaggtattggagcgcgacactaacgcatgcgcggcgagcgtccatggacctttaccaacctgaaggcgggtgacgggttagcgacgattattgcgtttctgatagagaaagggatgctgcgtgtgtatcca

SEQ ID NO: 19357 - DNA, 1829 bp, Enterobacter cloacae
ctgaaacttcttgtccaacgtggtaaggagcaaggctatctgacctatgccgaggtcaatgaccatctgccggaagatattgtcgattcagatcaaatcgaagatatcatccaaatgatcaatgacatgggcattcaggtgatggaagaagcaccggatgccgatgatctgttgctggctgaaacctccaataacactgacgaagatgcggaagaagctgctgcacaggtactgtccagcgtggaatctgaaatcgggcgtaccactgacccggtccgcatgtacatgcgcgaaatgggtaccgttgaactgttgacccgcgaaggcgaaattgacatcgcaaaacgcatcgaagacgggatcaaccaggttcagtgctccgttgccgagtacccggaagcgatcacctatctgctggagcagtacgatcgcgttgaagcggaagaagcgcgcctgtctgacctgatcaccggttttgtcgacccgaacgctgaagaagatatggcacctaccgccactcacgtcggttctgaactgtctcaggaagagatggatgatgacgaagacgaagatgaggaagagagcgacgacgacaccgcggacgatgacaacagcattgacccggagctggcgcgtgagaagtttgccgagctgcgtacccagtacgaagtgacgcgcgacaccatcaaagcgaaaggccgcagccatgccgccgctcaggaagagatcctgaaactgtctgaggtattcaaacagttccgcctggtgccaaaacagttcgactacctggtaaacagcatgcgcgtgatgatggatcgcgtacgcacccaggaacgcatcatcatgaagctgtgcgttgagcagtgcaaaatgccgaagaagaacttcatcaccctcttcaccggcaacgaaaccagcgaaacctggttcaacgcggctatcgcgatgaacaagccgtggtctgaaaaactgcacgacgtgaaggacgacgtacatcgcggcctgcagaaactgcatcagattgaagaagagaccggcctgaccatcgagcaggttaaagacatcaaccgtcgtatgtccatcggtgaagcgaaagcccgccgcgcgaagaaagagatggttgaagcgaacttgcgtctggttatctctatcgccaagaaatacaccaaccgtggtctgcagttcctggatctgattcaggaaggcaacatcggtctgatgaaagcggtagataagtttgaataccgtcgtggttacaagttctccacctacgcaacctggtggatccgtcaggctatcacccgctctatcgcggatcaggcgcgcaccatccgtattccggtgcatatgattgagaccatcaacaagctcaaccgtatctcccgccagatgctgcaggagatgggccgcgagccgacgccggaagagctggccgagcgcatgctgatgccagaagacaagatccgtaaagtgctgaagatcgccaaagagccaatctccatggaaacaccaatcggtgatgatgaagattcgcatctgggtgatttcatcgaggataccaccctcgagctgccgctggactctgccaccaccgagagcctgcgcgctgcgacgcacgacgttctggctggcctgaccgctcgtgaagcgaaagtcctgcgtatgcgtttcggtattgatatgaacaccgaccacacgctggaagaagtgggtaaacagttcgacgttacccgcgaacgtatccgtcagatcgaagcgaaggcgctgcgcaagctgcgtcatccaagccgctctgaagtgctgcgtacttcctggacgattaatcggtc

SEQ ID NO: 19358 - DNA, 159 bp, Enterobacter cloacae
cacgttatcagcaagcgatatacgcagcgcattgagcggcataacctgaatctgaggcaacatctggcaaggctgggcaggaagtcactgtcgttctcaaaatcggtggagctgcatgacaaagtcatcgggcattatctgaacataaaacactatcag

SEQ ID NO: 19359 - DNA, 921 bp, Enterobacter cloacae
gtgaaaaaattacgcgttggcgtggtggggctcggcggcatcgcgcaaaaagcttggctgcctgtattaggtgcggcgacggactggacgctgcaaggggcatggtcacccacccgagaaaaggcagaacgtatctgcgaaacctggcgcattccgtatgccgcctccctgcaggatctggcccgcgagtgtgatgcggtctttgtgcatacctcaacggcaacccactatcaggtggtgagcgagctgctcaatttgggggttcacgtctgcgtggataagccgttggcggaaaatgttcaggatgccgaacggctgattgagctggccgcgcgcaaaaaactgacgctgatggtgggcttcaaccgccgcttcgcgccgctttaccagcagctgaaggcgcagtcggacacgctcgcctcgctgcggatggataaacaccgcaccgacagcattgggccaaacgatctgcgcttcacccttctggatgattatctgcacgttgtggatacggcgctgtggctgagcaacggcgaagcgctgctgaaaagcggcaccctggtgacaaacgatcaggggcagatggtctacgcggagcaccacttcggcgttgagcatcttcagattaccaccagcatgcaccgtcgtgcgggaagccagcgtgaatccgtgcaggcggtgaccgagggcgcgctgtacgacattacggacatgcgcgaatggcgggaagagaagggcaatggcgtggtgacgctcccggcgccaggctggcagagcaccctcgagcagcgcggtttcgcaggatgcgcccgtcactttatcacctgcgtgcaaaatcagacggttcctgaaacgtccggcgagcaggccattctggcgcagcgcattgtggaaaggctctggcgcgatgccatgagcgaa

SEQ ID NO: 19360 - DNA, 1533 bp, Enterobacter cloacae
atgaacttattaaaatcgctggcggccgtcagctcgatgaccatgttttcccgcgtgctgggttttgcgcgcgacgccattgtggcaagggtatttggtgcaggaatggccacggacgcctttttcgtcgcgttcaaattgccaaacctgctgcgtcgtatttttgctgaaggggcgttttcccaggcattcgtgcctattctggcggaatataaaagcaagcagggcgaagacgcgacgcgcgtctttgtttcttatgtctccgggctgctgacgctggctttggcggtggtgactgtactcgggatgctggccgcgccgtgggtgattatggtgaccgcgcccggttttgccgatacggccgacaaatttgcgctgacctcgcagctgctgcgtattactttcccctatattctgctcatctcgctggcctcgctggtgggggctatcctgaatacctggaaccgcttctctgtcccggcgtttgcgccgacgtttctcaacgtcagcatgatcggttttgccctgttcgccgcgccgcactttaacccgccggtgctggcgctggcctgggcggttaccgtcggcggcgtgctgcagctggcgtaccagctgccgcatctgaaaaaaatcggcatgctggtgctgccgcgcatcaatctcaaagatgccggggcgatgcgcgtgatcaggcagatggggcccgctattctcggcgtctccgtcagccagatctcgcttatcatcaacaccatttttgcctctttcctcgtgtccggctcggtttcctggatgtactacgctgaccgtctgatggagttcccgtccggggtgctgggcgtggcgctggggaccatcctgctgccgtcgctgtcgaaaagctttgccagcggcaatcatgatgaatattgccgcctgatggactggggcttacgtctctgcttcctgctggccctgccgagcgcggtggcgctgggtattctggccaaaccgctgacggtgtcgctcttccagtacgggaaattcaccgcctttgatgccgccatgacccagcgcgcgctgattgcctactcggtcggcttgatggggctgatcgtcgtcaaggtgctggcgcccgggttctattcgcgtcaggacatcaaaacgccggtgaaaattgccatcgtgacgctgattatgacccagctgatgaacctggcgtttattggtccgctgaagcatgctggcctgtcgctgtctattggtctggcggcctgtctgaatgccgggctgttgtactggcagttgcgcaagcaggatatctttacgccgcagccggggtggggaagtttcctggtacgtctgatcgttgcggtactggtgatgtcggcggcgcttctcggcatgatgtacgtgatgccggagtggtccctcggcactatgccttatcgtctgatgcggctgatggccgtggtaggcgtcggggtcgtggcttactttgccacgctcgcggtgctggggttcaaagtgaaagagtttgcccgccgtacggca

SEQ ID NO: 19361 - DNA, 327 bp, Enterobacter cloacae
atgagtcatcagctcaccttcgccgacagtgaattcagcagtaagcgccgtcagaccagaaaagagattttcttgtcccgcatggagcagattctgccatggcaaaacatggtggaagtcatcgagccgttttatcccaaggttggtaatggccggcgaccttatccgctggaaaccatgctacgcattcactgcatgcagcattggtacaacctgagcgatgttgcgatggaagatgctctgtacgaaatcgcctcaagccgcttgtttccccggttacccttgattaccgctttgccggaccgcaccaccatcatgaatttccgt

SEQ ID NO: 19362 - DNA, 4001 bp, Enterobacter cloacae
gagggtaatcacaccctgacggttaacgtgagcgacaaagcgggcaacggctcgtccgtgacggcagatttcacggtggataccgccgcgccggtcgtcaccatacataccgtggcgggcgacgatatcctcaatatcagcgagcagggccaggcgcacattatttctggccaggcgagcggtgccgccgcgggcgatgtggtcaccgtgatccttggcggccagaccttcaccggcgtggtgctggcggacggcagctggagcgtgggcgttccggcgtccgtgctgggcgcgctgggtgaaggcaaccacacgctttcggtttccgtcactgacgcggcaggcaacaccggcagcgccacgcacggcattacgctgagcgtacacccgccggaatttacgattgacgccatcagccaggataacgtcctgaatgcccaggaggcgatgcagccgctgagcctgaccggtaccagcaatctgccggacggcactgccgtcaccgtgacgctgaacaacgtcagctatcaggcaaccgtcgaaaacggtatctgggcggtccaggtgccggtttccgacgttctgaatctggcgaacacgctttataccgtcagcgtcagcgggaccgacagcgtggggaacagcggttctgccgaagcgaatctgctggtggataccgttcttccgcaggtcattatcaatacgtttgcgggcgacaacctggtcaataacgccgaagcgggcgtcgatcaaaccctcagcggtcgcgttaccggcgcggcggcgggcgataccgtctccatcaccgcaggcggcaagagctacaccgcaacggttggcagcgatctgacctggagcgtgaaaatcccgtcagcggatcttcaggcgttcggcgacggagatttaaccttcaccgcgtccgtcaccaacgcgcacggcaataccggcaccggcgagcgggatatcaatatcaacgcggagctgccgggactgcgcgtgaacaccatttccggcgatgacgtgatcaacgccatcgaacagcagcaggatctgagcgtcaccggctccagcacccatctggccgcgggcacgcagattatcgtcactatcaacagcgttgagtacgtcaccgcggttaacgccagcggcagctggcagatcggcgttccggcggcggacctgcaggcctggacggcgggcggcatgacggttagcgtcagtgcggtagatgcctggggcaatcccgttgcggctgaacacccgattgaactcgatctgaacgccgtggcggtcactattgataccgtctccggcgacgacctgctgaatgcggcagaaaaaggcggtgatttaaccctttccggccagacgcagggcgtggaggcggggcagaccgtggtggtgaaattcgccgaccagaccttcaccgcgcaggtgcagcaggatggctcctggagcctgaccgtacccgccagcgccatggaaagcctgatcgacgggcgcgcgcaggtgagcgtcagcgtcactaacgtcagcggcaacagcgccgacgccgcgcgcgtggtcacggtggatacgcagcctccggcgattacgctcgataacctgaccgccgacaacatcatcaacgcggctgaagcgcagcaggatttagccttaagcggtaccagcactgcggaagcgggccagacggtcaccgtgacgctgaacggcaaaacgtattcagaccacggttcaggcggacggtacgtggcagctgagcgtgcctgcggctgacgtgggtgccctgacggacggcattgtgaccgtgacggccaccgtgagcgacgtggcgggcaacgccagcagcgcggaccgcgtgggtctggtggacgcaaccgtaccgcaggtgaccattaacgactttgtcaccgacaccaacaccgttaaccagctcgcccattcacaggcgcagatcctgatcggctccgtcaccggtgcggcggcgggcgatctggtcaccatcaccattaacagcgtcgactacaccaccgtggtggatgcggccgggaactggagccttggcctgccggcgtccgtcgtgcaggggctgactgacgccacctggacaatcgacgtttccgtgaccgacaggtccggtaattccggaagcagttcgctggatgtggtggtgaataccgtgacgcctgtcatcggtatcaacacgctggcggcggacgacgtgatcaacgcgaccgagaagggcgaagatctgcttctctccggcaccagcaaccagccggaaggcacgaccattacggtgaccctgaacggcattcactacaccgcaaccgctgacgccagcggaaactggagcgtgaccgtaccggcctcggccgtaagcgcgctgggagaagcccattacaccgtgacggcgagcgtcacggatagcgtaggcaacagcgcctcaacctcgcacgatgtgctggtggacagctcgctgccggtggtaacgatcgacaccctggcgggcgacaatatcgttaacgcagcggaagtagcggcagggcaaaccctgaccggtaaggtgacgaacgcggcggcaggtgacactgtcactattatccttggcggccagacgtacacggctaccgtgcaggacgatctgacctggagcctgccgttaagcgagagccagttaaccgcgctcggcaacggcgacctcaccgtatccgccagcgtgaccaacgcgcacggcaataccggctcttcttctcacgacttcaccatcgacgcccagctcccgggactgcgtattgataccgtggcgggtgacgacgtgatcaacgtgattgaacacgctcagaacctgattgtgtccggtaccagcaccgatctggcggcgggcagcaccgtgaccgtgaccatcaacggcaaaacctattctgcaacggtactggcggacggcacctggcaggcggcggtaccggcggccgatgtctcccagtgggcggacggttcgctggatatcaaggcaggcgcgcaggatgcctccggcaacccggtaaccatcggcaccgttgtggacgtcgatctcgcgcctgttgccatcaccatcagcagcgtgaccgacgataacgtgctcaacgcggcggaaaaaggccaggatctgctgctttccggcaccacctccaacgtggaagcgggccagaccgtgaccattacctttgcgggtaaaacctataccacgacggtggatgccagcggcgactggacctggaccgttccggcagccgatttgagcggcctgaaagacggtgatgccagcgtgcaggtaaccgtcaccaacgtgaacggcaacgcggcgtcttcggcgcaggaattcagcgtcgataccaccgcgccgacggtgaccatcaacaccatcagccatgacaatatgctgaacgcggcagaggcggcgcaggatctgaccctgagcggcacctctactgccgaagcgggccagacggtcaccgtgaccttcaacggcaatcagtacaccgcgcaggtgcaggctgacggcagctggacgctcgacgttccggcggcggatatggcaggcatcgccgacggcagcgcggcggtcacggcgacggtgtccgataaggcaggcaacccggccagcgcgggctcttcggtgctggtcgacaccaccgtaccgcagattagcttcaacatcgtcgcgggcgacgacgtcgtgaatattgccgagcacggccaggcgctgatcgtctccggcaaggtcacgggcgcgcaggcgggcgacgtgattaccgtgaccctgaacggcaaagactacaccgccatgctggacgcgtccggcagctggagcgtgggcgttccggcggcggacgtgggcgcgctggttaacggcgagcagacgatctccgcgaccctcaccgataaagccggtaacagcaccagcacgacgcacgagtttgacgtctccctgaccgcgccggtgattgccatcaatacgg

SEQ ID NO: 19363 - DNA, 1257 bp, Enterobacter cloacae
atggataaatttcgtgtacaggggccaacgcgcctccagggcgaagtcacaatttctggcgcaaaaaacgccgcgctgccaatcctctttgctgcgctgctggctgaagagccggtagaaattcagaacgtaccgaagctgaaagatatcgacaccaccatgaagctgctcacccaactgggcacgaaagttgagcgtaacggttccgtctggatcgacgccagcaaggtgaacaacttttcagccccttacgatctggtgaaaaccatgcgtgcatccatctgggcgcttggcccgctggtagcgcgttttggtcagggtcaggtctctctgccgggtggctgcgccatcggtgcgcgtccggttgacctgcacatctttggtctggaaaaactgggcgccgagatcaagctggaagaaggttacgttaaagcgtccgttaatggtcgtctgaaaggcgcgcacatcgtcatggacaaagtgagcgtgggcgcaactgtaaccattatgtctgcggcgacgctggcagcaggtactaccatcatcgaaaacgccgcgcgcgaaccggagattgtggataccgccaacttcctcgtggcgctgggggcgaagatttccggtcagggcaccgaccgtatcaccatcgaaggcgttgagcgtctgggcggcggtgtctatcgcgtactgccggaccgtatcgaaaccgggaccttcctggtcgctgcggcgatttctggcgggaagattgtttgccgcaatgcgcagccagataccctggatgcggtgctggcgaaactgcgcgatgcgggtgcggatatcgaaatcggcgaagactggatcagcctcgatatgcacggccagcgtccaaaagcggtcaatgtgcgtacggcgccgcatccggcgttccctacggacatgcaggcacagttcaccctgttgaacctggttgccgaaggtactggcttcatcacagaaaccattttcgagaaccgctttatgcacgtaccggagctgatccgtatgggcgcgcatgctgagatcgaaagtaataccgtgatctgccacggcgttgagaaactgtcaggtgctcaggtgatggcaaccgatctgcgtgcgtctgcaagcctggtgctggcgggttgtatcgcggaaggtacaaccatcgtggaccgtatctatcacatcgatcgtggttatgagcgtatcgaagataaactgcgcgcgctgggtgccaacatcgagcgtgtgaagggcgag

SEQ ID NO: 19364 - DNA, 945 bp, Enterobacter cloacae
atgagactcgggaaatacaataaaagtttgggatggttgtcattattcgcgggcactgtattactcagtggctgcgattctgcactactagaccccaaaggacagattggactggaacaacgttcactgatattgacggcttttggcctgatgttgattgtggttattcctgccattttgatggctgttggtttcgcctggaagtatcgtgcgagcaataaagatgcgaagtatagccctaactggtcacactccaataaagtggaagctgtggtctggacggttcctattctgatcatcctgttccttgccgtactgacctggaaaaccactcacgcacttgagccaagcaaaccgctggttcacgatgagaaacctattaccattgaagtggtctccatggactggaaatggttcttcatctatccagagcagggtattgctaccgtgaatgaaatcgccttcccggcgaacactccggttcagttcaaagtgacttccaactccgtaatgaactccttcttcatcccacgtctgggtagccagatttacgcgatggccggtatgcagaccaacctgcacctgatcgcgaatgaagcaggcacctatgatggtatctccgccagctatagcggcccgggcttctcaggtatgaagttcaaagctattgcgacgccagaccgtgccgctttcgaccagtgggttgaaaaagcgaagcagtctccaaacaccatgtctgacatggcggcgttcgaaaaagtggctgcaccaagcgaatacaacaaggtggagtacttctctaatgtgaaaccagatttgttcaaagacgttattggcaaatttatggatcacggcaagagcatggacatgacccagcctgaaggcgagcacagcgcgcacgaaggtatggaaggcatggacatgagccacgcggaaaccgctcac

SEQ ID NO: 19365 - DNA, 585 bp, Enterobacter cloacae
atgagccatcaactcaccttcgccgatagtgaattcagcactaagcgccgtcagacccgaaaagagattttcttgtcccgcatggagcagattctgccatggcaaaacatggtggaagtcatcgagccgttttaccccaaggctggtaatggccggcgaccttatccgctggaaaccatgctacgcattcactgcatgcagcattggtacaacctgagcgatggcgcgatggaagatgctctgtacgaaatcgcctccatgcgcctgtttgcccgattatccctggatagcgccctgccggatcgcaccaccatcatgaatttccgccacctgctcgagcagcatcaactggcccgtcaattgttcaagaccatcaatcgctggctggccgaagcaggcgtcatgatgacccaaggcactttggtggatgccaccatcattgaggcacccagctctaccaagaacaaagagcagcaacgcgatccggagatgcatcagaccaagaaaggcaatcagtggcactttggcatgaaggcccacattggtgtcgatgccaagagtggcactgttgcaaatagtcggtgg

SEQ ID NO: 19366 - DNA, 570 bp, Enterobacter cloacae
atgactgcacaaccccaggttcttaaaatccgccgccctgacgactggcatatccatctgcgtgatggcgatatgctgaaaaccgtcgtgccttataccagcgaaatttatggccgcgcgattgtcatgcctaacctggtgccaccagtcaccaccgtcgatgccgcgattgcctatcgccagcgcatcctggatgccgttcctgcgggacacgattttaccccgctgatgacctgctatcttaccgactcgctggatccgaacgaagtggagcgcgggtttaacgaaggcgtatttacggcggcgaaactctacccggcaaatgccaccaccaactccagccacggcgtcaccagcattgatgccatcatgccggttctggaacgtatgcagaaactgggcatgccgctgctggtccatggtgaagtcacgcatgccgagattgacatcttcgatcgtgaagcccgctttatcgagaccgtgatggagcctctgcgccagcgcctgcccgcgcttaaagtggtctttgagcatatcaccaccaaagacgcggcagagtatgtgcgtgac

SEQ ID NO: 19367 - DNA, 558 bp, Enterobacter cloacae
atgaagaaaattgtctttgccgcggcattagttgtcagcggcctgctggttggctgtaaccagctcacgcaatataccgtcagtgaacaggaaattaatcaggcgctggaaaaacataacaatttctctaaagatattggcgtgccggggctggcggacgcgcatatcgtccttacgaacctgaccagccagatcggtcgtgaagagccaaacaaagtcaccctggccggtgatgcggatctcgatatgtcatccctctttggcaatcagaaagccaacatcaagctcaagctgaaggcactccctgttttcaataaagagaaaggggcaattttcctgcaggagatggaagtcgtcgatgcgcaggtgtcgccggacaagatggcaccggttctgcaaaccctgatgccctatctgaaccagtcgctgcgaaattactttaaccagcagcccgcgtacgtcttaagcgaagacaaaagcaagggtgaagctctggcgaaaaaatatgcaaaaggtatagaggtgaaaccgggagaaattatcattcctttcaccgat

SEQ ID NO: 19368 - DNA, 3234 bp, Enterobacter cloacae
gacattaaagaacaagaagtctacatgggtgaaattccactcatgacagacaatggtactttcgtaatcaacggtactgagcgtgttatcgtttcccagctgcaccgtagcccgggcgtcttcttcgacagcgataaaggtaaaacacactcttccggtaaagtactgtataacgcacgcatcattccttaccgtggttcatggctggacttcgagttcgatccgaaagacaacctgtttgtccgtatcgaccgtcgtcgtaagctgcctgcaaccatcattctgcgtgcactgaactataccactgagcagatcctggacctgttctttgagaaagtgatctttgaaatccgcgacaacaagctgcagatggagctggtgccggaacgtctgcgtggtgagaccgcgtcgttcgacatcgaagccgacggcaaagtgtatgtggaaaaaggtcgccgtatcaccgcgcgccacatccgccagctggaaaaagatgatatcaaacacatcgaagttccggttgaatacattgcaggaaaagtagccgcgaaagattacgttgatgaatcaactggcgagctgatctgcccggcgaacatggagctgagcctggatctgctggctaagctgagccagtctggccacaaacgtatcgaaacgctgttcaccaacgatctggaccacggtgcgtatatctctgagactattcgcgtcgacccaaccaccgatcgtctgagcgcgctggtagaaatctaccgcatgatgcgtcctggtgagccaccaactcgcgaagcggcggaaagcctgttcgagaacctgttcttctccgaagaccgctacgatctgtctgcggttggtcgtatgaagttcaaccgttctctgctgcgcgacgaaatcgaaggttccggtatcctgagcaaagacgacatcatcgaagtgatgaagaagctcattgatatccgtaacggtaaaggcgaagtggacgatatcgaccacctcggcaaccgtcgtatccgttccgtaggcgaaatggcggaaaaccagttccgcgttggcctggtacgtgtagagcgtgcggtgaaagagcgtctgtctctgggcgatctggataccctgatgcctcaggatatgatcaacgccaagccgatttctgcagcagtgaaagagttcttcggttcaagccagctgtctcagttcatggaccagaacaacccgctgtctgagattacgcacaaacgtcgtatctctgcactcggcccaggcggtctgacccgtgaacgtgcaggctttgaagttcgagacgtacacccgacgcactacggtcgcgtatgtccaatcgaaacgcctgaaggtccaaacatcggtctgatcaactccctgtccgtgtacgcacagactaacgaatacggtttcctcgagaccccgtaccgtaaagtgaccgacggtgttgtaaccgatgaaattcattacctgtctgctatcgaagaaggtaactacgttatcgctcaggcgaactccaacctggatgacgaaggccactttgtagaagatctggttacttgccgtagcaaaggcgaatccagcttgttcagccgcgaccaggttgactacatggacgtatccacccagcaggtggtatccgtcggtgcgtccctgatcccgttcctggaacacgatgacgccaaccgtgcattgatgggtgcgaacatgcaacgtcaggccgttccaactctgcgcgctgataagccgctggttggtaccggtatggagcgtgctgttgccgttgactccggtgttactgcagttgctaaacgtggcggtactgttcagtacgtcgatgcatcccgtatcgttatcaaagttaacgaagacgagatgtatccgggcgaagcaggtatcgacatttataacctgaccaaatacacccgttctaaccagaacacctgtatcaaccagatgccttgcgtgtctctgggtgagccagttgagcgcggcgacgtgctggcagacggtccgtccaccgacctcggtgaactggcgctcggtcagaacatgcgcgtagcgttcatgccgtggaacggttacaacttcgaagactccatcctcgtctccgagcgtgtggttcaggaagatcgttttaccaccatccatattcaggagctggcatgtgtgtcccgtgacactaagctggggccagaagagatcaccgctgacatccctaacgtgggtgaagctgcgctctccaaactggatgaatccggtatcgtttacatcggtgcggaagtgaccggcggcgacattctggttggtaaggttacgcctaaaggtgaaacccagctgacgccagaagagaaactgctgcgtgcaatcttcggtgagaaagcgtctgacgttaaagactcttctctgcgcgtaccaaacggtgtttccggtacggttatcgacgttcaggtcttcacccgtgacggcgttgagaaagataagcgtgcgctggaaatcgaagagatgcagctcaaacaggctaagaaagacctgtctgaagaactgcagatcctcgaagcgggtctgttcagccgtatctatgcggtgctggttgccggtggcgttgaagctgagaagctcgacaaactgccacgcgatcgctggctggaactgggcctgaccgacgaagagaaacaaaatcagctggaacagctggctgagcagtatgacgaactgaaacacgagttcgagaaaaaactcgaagcgaaacgccgcaaaatcactcagggcgacgatctggcaccaggcgtgctgaagattgttaaggtgtatctggccgttaaacgtcagattcagcctggtgataagatggcaggtcgtcacggtaacaagggtgttatctctaagatcaacccgatcgaagatatgccgcacgatgctaacggtacgccggtagatatcgtactgaacccgctgggcgtaccgtctcgtatgaacatcggtcagatcctggaaactcacctgggtatggctgcgaaaggtatcggcgacaagattaacgccatgctgaagcagcaggaagaagtcgcgaaactgcgcgaattcatccagcgtgcctacgatctgggtaccgacgttcgtcagaaagtcgacctgaataccttcagtgatgaagaagtgctgcgcctggctgagaacctgaaaaaaggtatgccaatcgcaacgccggtcttcgatggtgcgaaagaaggc

SEQ ID NO: 19369 - DNA, 1492 bp, Enterobacter cloacae
atgaacaaagaaattttggctgttgttgaagccgtctccaacgagaaatcactgccgcgtgagaagattttcgaagcgctggaaagtgcactggctacagcaaccaagaaaaaatacgaacaagagatcgatgttcgcgtagaaatcgatcgtaaaagcggtgacttcgatacattccgtcgttgggtaatcgttgaagaagtgacccagccgaccaaagagatcacgctggaagccgcccgttttgaagacgaaagtctgaacgtgggtgactacgttgaagatcagatcgaatctgtgaccttcgatcgtatcaccacgcagaccgctaaacaggttatcgtgcagaaagtgcgcgaagccgagcgcgcgctggttgtcgatcagttccgcgatcaggaaggcgaaatcattaccggcgtggtgaagaaagtgaaccgcgacaacatctccctcgagatcaaatccgaagggttgccgggtaacgctgaagccgtgatcctgcgtgaagatatgctgccgcgtgaaaacttccgcccgggcgaccgtattcgcggcgttctgtacgcggtacgccctgaagcgcgtggtgcacagctcttcgtgacccgttctaaaccagaaatgctggtagaactgttccgtatcgaagtgccggaaatcggtgaagaagttatcgaaattaaagcggcggctcgcgatccgggctcccgtgcgaaaattgcggtgaaaaccaacgacaagcgtatcgacccggtcggtgcttgcgtcggtaatcgcggtggcgcgcgttcaggcagtttctactgagctgggcggcgaacgtattgatatcgttctgtgggatgacaacccggcgcagttcgtgatcaacgcaatggctccagctgatgtggcgtctatcgttgttgacgaagacaaacacaccatggatatcgctgttgaagcgggcaacctggcgcaggcaatcggccgtaacggtcagaacgtacgcctggcgtcacagctgagcggctgggaactcaacgtaatgaccgttgatgacctgcaggctaagcatcaggctgaagcccatgcggcgatcgataccttcactaaatacctggatattgacgaagacttcgccactgttctggttgaagaaggattctctacgctggaagaactggcctatgtgccaatgaaagagctgctggaaattgacggtctggatgaaccaaccgttgaagccctgcgtgaacgcgctaaaaacgcactgaccaccctggcactggctcaggaagaaagccttggcgataagaagccggctgatgacctgctgaatctggaaggtcttgatcgtgcgattgcgttcaagctggctgcccgtggtgtttgtacgctggaagatctcgctgagcaaggcgttgatgacctggctgatatcgaaggtttaaccgacgagaaagccagcgagctcatcatggccgcacgtaatatttgctggttcggc

SEQ ID NO: 19370 - DNA, 2166 bp, Enterobacter cloacae
atgtctgcttatgctcacgcggccgaaaccccgaaaaaagaagaaaccattacggtaaccgcagcacctgcggcacaggaaagtgcctgggggcctgctgcgaccatcgccgcacggcaatccgcgaccggaaccaaaacggatacccctattcaaaaggttccgcagtcgatttctgtggtcacggccgaagagatggcgctgcatcagccgcgctcggtgaaagaagcgctgagctatacgccgggcgttgcggtgggcacgcgcggcgcgtctaacacctatgactatttgatcatccgcggcttcgcggccgatggtcagacgcagaataactacctcgacggcatgaaaatgcaggggaacttctataacgacgcggtgattgatccttatatgctggagcgcgccgagatcatgcgcggtccggtttccgttctgtacggcaaaagcagcccgggcggtttgctgaacatggtcagtaagcgtccgacaaccgagccgctgaaagagatccagttcaaagtcggcacagatagcctgttccagaccgggtttgactttagcgatgcgatcgacgacgacggcgtttactcttatcgcttaacgggcgttgcgcgttctaataacgcccagcaggagcgtgcggaagagcagcgttacgccatcgcgccatcgttctcctggcgtccggatgataaaaccaccttcacgttcctctcctacttccagaacgagcctgaaacgggctactacggctggctgccaaaagagggaacggttgagccgctgccgaacggcgatcgtctgccgacgaacttcaacgaaggcgcgaagaacaatacctattcccgtaaccagaaaatggtgggatatagcttcgaccacgagttcaacgatacctttaccgtgcgtcagaacctgcgctttgccgagaacaaaacctcgcaaaacagcgtatacggttatggcgtctgtaccgacccagcaaacagcggcaacaaacagtgtgccgcgctagcgccatcggacaaaggtcattatctggcgcgtaaatacgttgtcgataacgaaaagctgcagaactttaccgttgatacccagctgcagagcaaattctcaaccggcgaggtggaccacgtcctgctgaccggcgttgactttatgcgcatgcgaaatgacatcaactcctggttcggttacgacgactctgttccgctgctggatctctacaatccggtgaacagcgattttgatttcggctcaaaagatcccgcgacctccggtccatatcagatcctcaaccgtcagaaacagacggggctgtacgttcaggatcaggcgcagtgggataaagtgctggtaaccctgggcggccgttatgactgggccgatcaggaatcctacaaccgcgtgacgaacaccacctccaaacgtgatgatacccagttcacctggcgcggtggcgttaactatctgtttgataacggcgtaactccgtactttagctacagcgaatcgtttgaaccggcttcgcagaccgatgcccagggcaagctgttctcgccgtctaaaggcaaacagtacgaagcgggcgtgaaatacgtgccgaacgatcgtccgatcgtcgtcaccggcgcgttgtaccagctgaccaaaaccaacaacctgatggcggacccggcgggctccttcttctcggttcagggcggtgaaatccgcgcgcgtggcgtagaactggaagcgaaagcggccctgtctgcgagcgtcaacctggtggggtcttatacctacaccgatgcggaatacaccacggacaccacctacaaaggcaacacgcctgctcaggtgccaaaacacatggcatcgttgtggggcgattacaccctgtttgacggtgcgctgtctggtctgacgctgggtaccggcgtgcgttacacgggctcaagctatggcgatccggcgaactccttcaaggtgggcagctacaccgttgttgatgcgctggtcagatacgatctggcacgcgttggcatggctggctcaaacgtggcgctgcacgtgaacaacctgttcgatcgtgagtacgttgccagctgcttcaatacctacggctgcttctggggtgctgaacgtcaggttgttgccaccgcgaccttccgcttc

SEQ ID NO: 19371 - DNA, 1831 bp, Enterobacter cloacae
gacaaaacgcggttagcctcgcttgctgcgcggatgggggaattacgcaacaggctggctgagatgccggaaaattcgctgacgctgacggcggatgaggtcagcgcggccatagagcagcagtcccggtcacgcacgctgcgccagcggctgacgtggctgcatgcccgctatcagccgctgcaaaagcgcctgcgccagagcggtgaaagcgtgctgaaggcccaggccgaacaaaacaaactcaatgaaacgctgacgctgcgtcgccagcagtacaaagagaaacaccagcactatctggacctcaaggccctctgcgaaaccgaagcgacgatcaaaaagctggaacattatcgttcgcagcttgaggccggcaaaccctgtccgctgtgcggctccagcgagcatcccgccgttgcgcaataccagtcgcttgagctgacggataaccagcgccgccgtgatgacctggaaaaagaggtcgccgcccttaaagaggaagggctgctggtgctggggcaggtaaatgccctgacgcagcagatccagcgcgagacagacgaagcgcagatgctctctcaggaagagcaagcactcactaaagagtggatggaagcctgcacttccctgaacatcgcgttgaatattcaggaagatatctcgccatggatgaacgagcaggaacagtacgagcgccagctctatcagctcagccagcgtctgaccctgcaaaaccagttaaacgagcaggaagtgcaggagcgacagcatcagcagcagctgacggccgcgcgccaggcgctggaaaacgccctgctttcgctatcgcttaacgtacctgaagacggtaatgaagccgcctggctgcacgcccgcgaagcggaattcgcgcagtggcaggagaaacaaacgcagcacggcgcgcttctggaacgcataaacgcgctgaagccgctgctcgacacgcttccggaaacgaacggcgaagaggccgaaccggccattccggacggctggcgcgacgtgcatgacgaatgcgtgtcgctacaaagccagctcaccgcacatcagcagcaggaaaagctggagcaagagcgcctgcttcagtcgcaggcacagttcaccgcggcgctctcagcgagctgctttgccgatcgggacgcgttccttgccgccctgctggatgacgacgctattcgtcgcctcgaacagctgaagcagttgctggaaagccagatacagcaggccgcggccctttccggccaggctaaccagcagctgcattctcatctggcgctgcggccggaagggctcaacgccgatgcccccacgctgcaaacccagctgcacgcagctggcgcaacggcttcgcgagaacacgacgcatcagggcgagatccgccagcagcttaagcaggacagcgataaccgtcagcaccagctggcgttgatgcagcaaattgaagaggccgcgcgcgaggcggacgactggggttatctgaacgcgctgatcggctccagcaccggcgacaagttccgtaaattcgcgcaggggctgacgctggataatctcgtctggcttgctaaccagcagcttaaccgtctgcacgggcgttatctgctgcagcgcaaggccagcgacgcgctggagctggaagtggtcgatacctggcaggcggatgcggttcgcgatacccgcacgctctcgggcggcgagagcttcctggtcagcctggcgctggcgctggccctttccgatctggtgagccataagacgcggatcgattccctgttcctggatgaagggttcggcacgctcgacagtgaa

SEQ ID NO: 19372 - DNA, 1134 bp, Enterobacter cloacae
gtgaaaatcctcgttgatgaaaatatgccttacgcccgtgagctgtttagccgcctgggtaacgttaaggctgtccctggtcgcccgatcccggtcaacgaactggatgacgcagacgcgctgatggtgcgctcggtgactaaagtaaatgaggcgttgctcgccggtaaagcgattaagtttgtcggaaccgcaacggcagggaccgatcatgtggatgataaatggctgaagcaggccggaatcggtttttccgcagcgccgggctgtaacgccatcgccgttgtggaatacgttttctcctccctgctgatgctggccgagcgcgacggttttgcgctgaaggaccgcacggtggggattgtcggcgtgggtaacgtcggcgggcgcctgcaaaagcgcctggaagcgttagggatccgcacgctgctgtgcgatccgccgcgtaaagacaacggcgatgacggggatttccgctcgctggatgagctggttgaacagtgtgacgtgctgactttccacacgccgctgtttaaagaggggccgtataagtcgctgcatcttgctgacgaggcgctgatccgtcgtctgaaggctggcactattctgataaatgcctgccgtggtccggtcgtagataacgccgcgctgctgacatgcctgaacgaagggcaacacctcagcgtggtgctggacgtctgggagccggagccggatctcaacgttgagctgcttaacaaggtggacgtgggcacggcgcatatcgccggttataccctggaaggcaaagcacgcggtaccacgcaggtcttcgaagcctacagcgcttttatcggccatccgcagcaggtggcgctggataccttactccccgcgcctgaatttggccgcattaccctgcacggcccgctcgatcaggcaacgctgaaaaggctggtgcatttggtgtatgatgtgcgccgcgatgatgcgctgctgcgtaaagtggcggggatcccgggtgagtttgataagctgcgcaagaactacgttgagcgccgcgagtggtcttccctgtatgtaatgtgcgacgacgcgtcggcggcgacgctgctgcataagctgggatttaacgccgttcatcacccggcgcat

SEQ ID NO: 19373 - DNA, 1011 bp, Enterobacter cloacae
atgtctgaaggctggaacattgccattttaggtgccacgggtgccgtgggcgaagccctgctcgaaacccttgctgagcgtcagttcccggtgggcgatatctatgcgctggcccgtaccgacagcgcaggtgagcatctgcgttttaacggtaaatccgtcatggtccaggacgcggccacgttcgactggacgcaggcgcagtgtgcgtttttcgccgcgggcgctgaagcgacggctgcgtacgttgaagaggcgactaacgcaggctgcctggtgatcgacctgagcggtctgttctcaatggaggcggatgtcccgctggtggtgccggacgtgaacccgtttgtgctggctgactaccgcaaccgtaacgttattgcggttccgaacagcctcaccagccagctgctgaccgcgctgaaaccgctgatcgacgacggcggcctgtcgcgcattaccgtcactagcctgctgtccgcgtccgcgaacggcaaaaaggccgttgacgcgctggccgggcagagcgcgaagctgctgaacggtatcccgattgacgaagatgatttctttggtcgccagctggcgttcaacatgctgccgctgctgccggaccgcgagggctccgtgcgcgaagagcgtcgtatcgtcgatgaagtgcgtaaaattctgcaggacgatggcctgatgatctccgctaacgtcgtgcagtccccggtcttctacggccacgcgcagatggtcggctttgaagcccttcgtccgctggcggcagaagaggcgcgcgacgcgtttggccgcggtgaagacatcgtgctctctgaagagagcgagttcccgacccaggttggcgatgccaccggcagtgcgcatctttccgttggctgcgtgcgtaacgactacggcatgccggagcaggttcagttctggtccgttgccgataacgttcgcttcggcggcgcgctgatggcggtcaaaatcgctgaaaaactggtacaggagtacctgtac

SEQ ID NO: 19374 - DNA, 757 bp, Enterobacter cloacae
atgagctggattgaacgaattaaaagcaacattaccccaacgcgcaaagcgagcattcctgaaggggtatggacgaagtgtgatagctgcggtcaggttctgtaccgcgcagagctggagcgcaaccttgaggtgtgtccgaagtgtgaccaccatatgcgtatgtcggcgcgcaaccgcctgcatagcctgctggacgaaggctctctggtagagctgggtagcgaacttgagccaaaagacgtgctgaagttccgcgattccaaaaaatacaaagatcgtctggcctcggcacagaaagagaccggcgagaaagatgcgctggtcgttatgaaaggcaccctgcatgggatgccggctgttgccgctgcgtttgagttctcctttatgggcggctcaatgggctccgtggtcggtgcgcgcttcgtgcgtgccgttgagcaggcgctggaagacaactgtccgctgatctgcttctctgcctccggcggtgcgcgtatgcaggaagcgctgatgtcgctgatgcagatggcgaaaacctctgctgcgctggcgaagatgcaggagcgcggtctgccgtacatctccgtgctgaccgacccaaccatgggcggcgtctccgcgagcttcgcgatgctgggcgatctgaacatcgctgagcaaaagcgctgatcggctttgccggtcctcgcgttatcgagcaaaccgttcgtgaaaaactgccgccgggcttccagcgcagtgagttcctcattga

SEQ ID NO: 19375 - DNA, 1347 bp, Enterobacter cloacae
gtgggcaatctgtcgctcgatttttcagataacgcgtttcaacctctggccgcccgtatgcggccagaaaatttagcgcagtacatcgggcagcagaatctgctggctgccggtaagccattgccgcgcgcccattgaggctgggcatcttcactccatgatcctctggggaccccctggcaccggcaagactacgcttgcagaagtgatcgcccgctatgccaacgcggacgtcgaacgtatctcggcggtcacctccggcgtgaaagagatccgtgaggcgatcgagcgtgcgcggcagaaccgcaatgccgggcggcgtaccatcctcttcgtggacgaagtcaccgcttcaacaagagccagcaggatgccttcctaccgcatattgaagacggcacgatcttcttcatcggtgcgaccaccgaaaacccgtcgtttgaactgaactcggcgctactttcccgcgcgcgcgtttacctgctcaaatcgctcaccaccgatgatatcgaaaaggttctcacccaggcgatggacgacaaagcgcgcggctacggcggacaggatatcgttttgcctgacgacacgcgtcgtgcgattgccgagctggtcaacggtgatgcgcggcgtgcgctgaatacgctggaaatgatggccgatatggccgaaatcgacgatgccgggaagcgggtgctgaaaccggaactgctcaccgaaattgcgggggagcgcagcgcgcgtttcgataacaaaggcgaccgtttttacgacctgatctcggcgctgcataagtccgtgcgcggcagcgcgccggatgcggcgctttactggtacgcgcgcattatcactgcgggcggcgatcctttatatgtcgcgcgtcgctgtctggcgattgcgtcagaagatgtcggcaatgccgatcctcgcgccatgcaggttgcactgtcggcctgggactgcttcacccgcgttgggcccgcggaaggcgaacgagccattgcgcaggcgattgtctatctggcctgtgcgccgaaaagtaatgcggtttataccgcgtttaaagcggcgatgtccgatgcgcgtgaacgtccggactacgatgtgccggttcacctgcgtaacgcgccgaccaaactgatgaaagagatgggatatgggcaggagtatcgttacgctcatgatgaacccaatgcctacgccgccggggaggaatatttcccgcaggagatggcacaaacgcgctattatcaccccacaaacagaggtcttgaaggcaagattggtgaaaagctcacctggctcgccggacaggatcaaaatagccctataaaacgctaccgttagttc

SEQ ID NO: 19376 - DNA, 1290 bp, Enterobacter cloacae
atgctcgatcccaatctgctgcgtaatgagccagacgcagtcgctgaaaaactggcacgccggggctttaagctggatgtagataagctgcgcgctctcgaagagcgtcgtaaagttctgcaggtacaaactgaaaatctgcaggcagagcgtaactctcgatcgaaatccatcggccaggcgaaagcgcgcggggaagatattgagccattacgcctggaagtgaacaaactgggtgaagaactggatcaggcaaaagctgaactggacgttcttcaggccgagattcgtgatattgccctggctatcccgaatattcctgacgacagcgtgcctgtcggcaaagatgaaaacgacaacgttgaagtgaaacgctggggtacgcctcgtgagtttgacttcgaagtgcgcgatcacgtgacgctgggcgaaatgcacgcgggcctggactttgcggcagcggttaagctgaccggctcccgttttgtggtgatgaaaggccagattgcccatctgcaccgcgcgctggcgcagttcatgctggatctgcacaccgagcagcatggctacagcgaaacctacgtgccgtatctggtcaaccacgatacgctgtacggtacgggccagctgccgaaatttgccggcgatctgttccatacccgtccgctggacgaggaagcagacagcagcaactacgcgctgatcccaaccgctgaagtgccgctgactaacctcgtgcgtgatgagatcatcgatgaagacgacctgccaattaagctgacggcacactctccgtgcttccgttctgaagcaggttcttacggtcgcgacacgcgcggtctgatccgtatgcaccagttcgacaaagttgagatggtgcagatcgtccgtcctgaagagtccatggacgcgctggaagagatgaccggtcacgctgagaaagtgctggagctgctgggcctgccgtatcgtcgtatggccctgtgcaccggtgatatgggctttggcgcctgcaaaaccttcgatcttgaagtgtgggtgcctgcgcaaaacacctaccgtgaaatctcctcctgctctaacgtctgggatttccaggcgcgtcgtatgcaggcacgctgccgcagcaaatctgacaagaaaactcgtctggtgcataccctgaacggttctggtctggctgtgggccgtacgctggttgccgtgctggaaaactatcagcaggcagatggtcgtattgagatccctgaagtgttgcgtccatacatgaaaggccagcagtacatcggc

SEQ ID NO: 19377 - DNA, 834 bp, Enterobacter cloacae
gtgtcgcgtttattcacgttagcccgtcggcggctatatcattttttattcgatcctgaaacggtttccgggcgacgctttgaaggtctgtgcggtttatttgcgctcctcagcgtggttgtcatctttattgaatcgggtgccgggacgcaataccacctgacgtttgacgaatggcatatctttgtctggcttgagctggcgattaccctggtttttaccgctgaatatctcctgcgggtaatagcctggcccaacccggccagatatgttttcagcttctggggatttatcgatttagccaccatcctgccgctctatgttatgtggctgtggccggagattagcctgagttatgtctttgcctggcgggcgatgcgcgtgattcgggtattacgtattctgaaattactgcgttttatgccgtcattacgcgtgttctggagtgcgatcgtcagcgcccgccatcagcttattttgttctactcgtttattgccatcgtcatgattgtttttggcgcgctgatgtatttaatagaagggcctaaatatggttttacgacgctcaatgcgtccgtctactgggccattgtgaccgtcaccaccgtgggttacggtgatatcacgccccatacgccactgggtcgcatcgtggcgtccgtgctgattttgattggctattcggttattgccatcccgacgggacttattaccacacacatgagcagcgcgtttcagagccgcaagcaacagcgcaaatgtcctcattgccagcagggtgaacatgaacacgacgcgcggttttgtcaccgctgcggcagtgaattaccggag

SEQ ID NO: 19378 - DNA, 999 bp, Enterobacter cloacae
gaattattcaacaaacctttccttgagctgatgttcgaagcccaacaggtgcatcgtcagcacttcgatccgcgccatgttcaggtcagcacgctgctgtcgatcaaaaccggtgcctgtcctgaagactgcaaatattgcccgcagagcgcgcgctacaaaaccggtctcgaatccgaacggctgatggaagtggagcaggtgctcgactccgctcgcaaggcgaaaaacgccggctcgacccgcttctgcatgggcgcggcgtggaagaacccgcacgaccgcgacatgccgtatctggagcagatggtgaagggcgtgaaggagatgggcctcgaagcctgtatgacgctcggcacattaaacgaggagcaggcgcagcgcctctccgccgcagggctggactactacaaccacaacctcgacacctcgccggagttttacggcaacatcatcaccacgcggacctatcaggagcgtctggacacgctggataaagtgcgtgacgcggggatcaaggtctgctcgggcggtattgtcggcttaggcgaaacggtgaaagaccgcgcgggcctgctgctgcagttggcaaacctgccgaccccgccggaaagcgtgccgatcaacatgctggtgaaggttaagggaacgccgctggcggataacgacgacgtggatgcgtttgattttattcgcaccatcgcggtggcgcgcatcatgatgccgacctctttcgtgcgcctctctgccggtcgcgagcagatgaacgagcagacccaggcgatgtgctttatggccggagccaactccatcttctacggctgcaagctgctgaccacgccgaacccggaagaggacaaagacgttcagctgttccgcaaactggggcttaacccgcatcagaccgaggtgctgacgggcgataacgagcaacagcagcagctggagcagcagattttcaacgccgacaccgaccagttctacaacgcggcagccgta

SEQ ID NO: 19379 - DNA, 358 bp, Enterobacter cloacae
atgtctgacacgttgaggctggctaccattaaggcgatccgttattccaaggaaataaacgcaatgacaagacgttacctgaagattttgctggtggggagcctcttcacccttagcgcctgtgcacagcaaaccgaagttcgccagatgaaacaaagcgtcaacacgctcaatacggcgatggacaaactgaataaagaaacggtgaagatcacccaacaaaacgcgctgaacgcaaaatccaaaagcggggtgtatctgctgcctggtgccaatgacgcctgcgcggctcaacagccagattggcacgcttaaaatgtcactggtgaacgttgcggcgaatgcagatggtactcgg

SEQ ID NO: 19380 - DNA, 1105 bp, Enterobacter cloacae
atgcaggatgagatttacatggcgagagccatgaacgctggcgcagcgcggtcgttttaccacccatcccaacccgaacgtcgggtgcgttatcgttaaagatggcgagatcgtaggggagggatttcactatcgtgctggcgagccgcatgccgaggtccatgcgttgcgcatggccggtgagaaggcgcgcggcgccacagcctacgtcacgctggagccctgcagccatcacgggcgtacgccgccgtgctgtgaagcgctgattgcggcgggcgtgtcgcgcgtggtcgctgcgatgcaggacccaaatccgcaggttgccgggcgcggcctgtatcgcctgcagcaggaaggcattgacgtcagccatgggctgatgatgcaggacgcggaagcgatcaacaaaggctttctgaagcgcatgcgcacggggttcccgtatattcagcttaagctgggcgcctcgctggacggtcgtacggcgatggcaaacggcgaaaccaagtggattacgtaaccacgggaaaggcgcaatgtccaaggtctggcccccaaaagccatgctattttaaccaccagtgaaaccgttctggctgacgatccggccatgaccgtgcgctgggacgagctgaatgccgatactcaggcgctgtacccgcaggagaacctgcgtcagccgctgcgtattatcattgatagccagaaccgcgtgacgccggagcaccgtattgtccagcagccgggtgaaacctggattgcccgcaccagagaagatacgcgcgaatggccggaaggcgtgcgcagtattatggtgccggagcataacggtcatctggatctggtggtgctgatgatgctgctcggcaagcagcaggtgaacagcatctgggttgaagcggggccaacgctcgccggtgcgcttttacaggccgggctggtggatgagctgattgtttacgttgcgcctaaactgttaggtcacgacgcgcgcggcctgtttgtgctgcccggccttgaaaaactggccgacgcaccgcaactcaaatttagcgagattcgtccggtaggcccggatgtctgcctccacttaatgacagcgtaa

SEQ ID NO: 19381 - DNA, 468 bp, Enterobacter cloacae
atgaacattattgaagctgctgtagctaccccggacgctcgcgtcgccatcaccattgcgcgtttcaacaacttcatcaacgacagcctgctggaaggtgcgattgacgccctgaaacgcatcggccaggttaaagatgacaacattaccgttgtttgggttccaggcgcttacgaactgccactggcggcgggcgcgctggcgaaaaccggtaaatacgacgcggtgattgcgctgggtaccgttattcgtggcggcactgcgcacttcgaatacgttgcgggcggtgcaagcaacggtctggcacacgttgcgcaggatgctgaaattcctgtcgcgttcggcgtgctgaccaccgaaagtattgaacaagccatcgaacgtgctggcaccaaagccggtaacaaaggtgcagaagctgcactgaccgcgcttgaaatgatcaatgtattgaaagccatcaaggcc

SEQ ID NO: 19382 - DNA, 417 bp, Enterobacter cloacae
gtgaaacctgctgctcgtcgccgcgcccgtgaatgtgccgtccaggcactttactcctggcagttgtcccagaacgacatctctgatgttgaataccagttcctgtcagaacaggacgtgaaagacgttgacgttctgtacttccgtgaactgctgtcgggagtggcgactaatagcgcgtatctcgatggtctgatgaagccatacctgtcccgtctgctcgaagagctgggtcaggtggaaaaagcagtgttgcgtatcgcgctgtttgagctgtctaaacgtgatgatgtgccgtataaagtggccatcaacgaagcgatcgagctggcgaaaaccttcggcgctgaagacagccacaagtttgtaaacggcgtacttgataaagcagcacctgcgatccgtccccacaaaaag

SEQ ID NO: 19383 - DNA, 971 bp, Enterobacter cloacae
atggcatgcggcgaattctccctgattgcccgttatttcgaccgtgtcagaacctctcgtcttgatgttgaaaccggcattggcgatgactgtgcacttctcaatattcccgaaaaacagacgctggcaatcagcaccgacactctggtgtgcggccgtcatttcttaccggatatcgatcctgccgatctggcgtataaagccctggcggttaacgtcagcgatctggcggcgatgggggccgatcccgcgtggctaacgctggctctgacgctgccagaggtagatgaagcctggctggaagcctttagcgatgcgctttttgagcagcttagctattacgatatgcagctgattggcggcgacacgactgccgggccgctgtcgatgacgctggcgatccacggctatgtgccgcttggccgcgcgctgaagcgttcaggcgcaaaacccggcgactggatctacgtgaccggtacgccgggcgatagcgcggcagggctggcgatccttcaaaatcgtttaacggttgaagatgctgacgatgcggcgtatctggtgaaacgccatctgcggccaacgccgcgtattttgcacggtcaggcgctgcgcgaacgggcaagctcggctatcgatctctctgacgggctgatctccgatctcggccatatcctgaaggccagcggcgtaggtgcgcgcgttgacctggatctcttcccgctgtctgagcagctgcttcgccatgtggagcctgagcaggccctgcgctgggcgctctccggtggtgaagactatgagttgtgcttcacggtgcctgagctcaaccgtggaacgctggacgtggcgttagcgcatctcggcgcgaaattcacctgcatcggtcagatcatgccggagagcgaagggctgaagtttgtgcaagacggcgccgccgttacgctggactggaaaggtacgatcacttcgcgtag

SEQ ID NO: 19384 - DNA, 806 bp, Enterobacter cloacae
atggtcgaaaccttactggaagtccgcaacctgagtaagacctttcgtaccgcactgggctgtttcatcgtcaaactgtcgacgcggtgaagccgctgagctttacgctgcgtgaaaaacagaccctggcgatcattggcgagaacggttccgggaaatccaccctggcgaaaatgctcgctggcatggttgaaccgactgcaggcgaagtgttgattgacgatcatcctctgacgttcggcgactactctttccgcagccagcgcatccgcatgatcttccaggatccgtctacctctcttaacccgcgccagcgcatttcgcagatcctcgattttccgctgcgtctgaacaccgacctggagccagaggcgcgccgtaagcgcgtatttgaaaccctgcgtatggttgggctgttgccggatcacgaaagctactacccgcatatgctggcaccaggccagaaacagcgtctgggtctggcgcgcgcgttgattttgcggccaaaagtgatcattgcggatgaagcgcttgcctcgctggatatgtcgatgcgctcgcagctgattaacctgatgctggaattgcaggaaaaacaggggatctcgtatatctacgtcacccagcatctgggaatgatgaagcacatcagcgatcaggtgatggtcatgcaccagggtgaagtggtagagcgcggcagcaccgcggatgtgatggcctctccgcttcatgaactgacaaaacggctgattgccggtcatttcggtgaagcattaaccgccgatgcgtggagaaaggaccgctaa

SEQ ID NO: 19385 - DNA, 1986 bp, Enterobacter cloacae
atggacgatctggagcagaatttgctgtttcgctacatggggactcacagcccgtggtggcgcctgtcagctgacagcaacgctctgcacctttccaccagcgaaaatgccgatgtcactcaggtcgtggcgctggacgatgaacaggccgatctcatccgtcatttaaccgttattacctccagcatttccatgtcgctctccctgtacggggaagatgtcccggttcatcttgtgggccgtaaaattacccgcaacgagtgggcaggcaccgcttccgcctggaatgatacgccctccgtggcgcgcgatctggctcaggggctctcttttgcggaacaggttgtctccgaggccaactccgtcattgttatcctcgatcagcacggcaatattcagcgttttaaccggcttagcgaagagtacaccggcctgaaagagcaagaagtcattggtcagaacgtatttaagctgtttatgagccgcagcgaagcggcagcctcaaagcgcaatattaccggtttttttcgcaacggcagctcctacgaagtcgaacgctggatcaaaacgcgtaaagggcagcggctgtttctgttcagaaacaaattcgttcacagcggcagcggtaaaaatgaaattttcctcatctgttccgggacagatattaccgaggagcgccgcgctcaggagcggctgcgcgtgctggccaataccgataccatcaccggcctgccaaaccgcaatgcgatccacgatctcatttctgacgccatcgacaaccgcggcgacacgcaggtgggcgtggtgtatctcgatctggataactttaaaaaggtcaacgacgcttacgggcatatgtttggcgaccagctgttgcaggccgtcgccctcgccattttgagttgtctggatgaagaacaggtgctggcgcgtcttggcggcgatgagtttatcgtcatggccaccaatacctctcagggctctctggaggccatggcgtcgcgcattttaacccgtctgcgccagccgttccgaatcggtctgattgagatttataccggctgctctctgggtatcgccctcgccccgcagcacgggaacgaccgggaaagcgttattcgcaacgccgataccgccatgtacactgccaaagagaacggccggggcaagttctgcgtcttctcacccgagatgaaccagcgcgtgtttgagtatctctggctggataccaacctgcgcaaagccctggataacgatcagcttctgatccactatcagccgaaaataacctggcgcggagaagtcagaagccttgaagcgctggtccgctggcaatcaccagaacgcggcctgatcccgccgctggagtttatctcttatgccgaggagtcggggttgattgtgccgctgggccgctgggtgatgctcgatgtggttcgccaggtggcaaaatggcgcgataagggaataaacctgcgcgtggcggtgaacgtctctgcacgccagctggccgaccagacgatcttcagcgacttaaagcaggcgctgaaggatctgaattttgaatactgcccggtcgacgtcgagttgaccgaaagctgtcttatcgaaaatgaagagctggcgctgtccgtgatccagcagttcagccgactcggggcgcaaattcatctggatgattttggcaccggctactcttccctttctcagttggcccgcttccctatcgacgccattaagctcgatcaatctttcgtcagggatattcataagcagcctatttcccagtcactggtgcgcgctatcgtcgcggtggcgcaggcgttaaatctgcaggtgattgccgagggtgtggaaaatgcaaaagaagacgcctttctgaccaagaacggcgtcaacgaacggcagggttttctgtttgctaagccgatgctcgctgccgcattcgagcgatggctaaaacgatatcaagcgcgaaatcaacgt

SEQ ID NO: 19386 - DNA, 825 bp, Enterobacter cloacae
ctagcccgagaggttattgtccgaagcatctttcaggaaattgcttgtcaatggcacgccagtaagctttacaatggtctgaaggatatgcttcggacattatggaagcgttcaataaagacatgttcctttacataggcaaaaagcctattgcaaacatcaaaccacttgaatcgctgaatgtccttcgtcggatggaaatcaggggagcaacagagaatgcaaaaaaggtcagacagcgctgtggcgaggtcttccgctatgcaatcatcactggtcgagctgaatacaatcccgtgcctgatctcacaagtgcaatgcaaggacatgagtacaaccattatcctttccagaacatttccgagattccatcatttttcgaatccctttctcagtattcgggcagtattctagttgttttggcctcgcgcttgctgattctcacggatgtaagaacgggtgaactacgaggtgctacatggaaagaaatcggcacagaatccgcagtgtggattatcccggcagaacgtatgaagatgcgccgcccgcatattgtgcctttatcaataccatcattgagcgcatccgcgaaatgacggggcgttaccctctgatgtttcctgggcgtaatgacccgcgaaagactatgggtgaagccagtatcaatcaggtgttaagtggatttgttacaccggccgcgtaactggccacggcttcaggcacaccataagcaccatcctccacgagcagggatacaacaccgcctggattgaaacacagcttgctcacgtcgataaaaactcgattcgtggtacataaatcaga

SEQ ID NO: 19387 - DNA, 173 bp, Enterobacter cloacae
atggagcagattctgccatggcaaaacatggtggaagtcatcgagccgttttatcccaaggctggtaatggccggcgaccttatccgctggaaaccatgctacgcattcactgcatgcagcattggtacaacctgagcgatggcgcgatggaagatgctctgtacgaaatcgc

SEQ ID NO: 19388 - DNA, 1965 bp, Enterobacter cloacae
atgggtatcttttccatcgccagccagcacattcgcttcgccgtaaagctggcgtgcgccatcgtgctggcgctgtttgttggctttcacttccagcttgaaacccctcgctgggcagtgctgacggccgcgattgtcgcggcgggcccggcctttgccgcgggcggggagccctattcaggcgcgatccgctatcgcgggatgctgcgtattatcgggacgtttatcggctgtttcgcggcgctgaccattattattctcatgatccgcaccccgctgctgatgctgatggtctgctgcatctgggcggggttctgcacctggatctcgtctctggtgaaagtggaaaactcctacgcctggggactggcgggctataccgcgctgattattatcatcactatccaaagcgaaccgctgctggcaccgcagtttgcggtggagcgatgcagcgaaattgtgattggtattgtcagcgcgatcgtcgctgatctgcttttctctccgcgctccatcaagcaggaagtcgaccgtgagctcgacgcgctgatcgttgcccagtatcagctgatgcagctgtgcattaagcacggcgacagcgaagaggtggataaagcctggagcgggctggtacgccgtacgcaggcgctggaaggtatgcgcagcaaccttaacatggagtcctcgcgctgggcccgcgcgaatcgacgtcttaaagccctcaacactgtctctctgacgctgattacccaggcctgtgaaacctatctgattcagaacacccggccggaagcggtcaccgatacgttccgcgaactgtttgccgagccggtggaaaccgtacaggacgtgcataagcagcttaagcgcatgcgccgggtgattgcctggaccggggagcgcgacacgccggtgaccatctacacctgggtcggcgccgcgacgcgctatctgctgctgaagcgcggcgtaatcggtaacaccaaaatcagcgcggcggaagaagaggtgctgcagggggaagtggtgatcaaggcggaatccgccgagcgccatcacgccatggtcaatttctggcgtacgacgcttgcctgcatgctcggtacgctgttctggctgtggacgggctggacgtccggcagcggcgcgatggtgatgattgccgttgtgaccgcactggcgatgcgtctgcctaatccgcgtatggtcgccattgatttcctttacggcacgattgccgcgttgccgataggcgcgctctatttcctggtcatcatcccgtcgacgcaacagagcatgctgctgctctgtattagcctggcggtaatggcgttctttataggcattgaagtgcaaaagcggcgtctgggatcgctgggggcgctggcgagtacgattaacatcatcgtgctcgataacccgatgaccttccatttcagccagttcctcgacagcgcgttaggccagctggtgggctgcttcctggccatgatggtgatactgctggtgcgggataactcgcaggcaagaacgggccgcgtgctgctgaaccagttcgtgtcggctgccgtgtcatctttgacaaccaataccgcgcgccgtaaagagaaccacctccccgcgctgtaccagcagctgtttttgctgctgaacaagttcccgggcgatatcgcgaagttccgcctggcgttaaccatgatcattgcgcaccagcgtttgcgtaacgcgcccgtgccgatcaacgacgatctgtcggcataccaccgccagctgcgtcgtaccgccgatcacgtgctttctgccagcagcgatgacaaacggcgccgctactttacgcagctgcttgaagagctcgatatctatcaggaaaagctcaagcactgggaggcgccgcctcaggtgaccgagccggtaggacggctggtgtttatgctgcatcgctaccagaatgccctcacggataac

SEQ ID NO: 19389 - DNA, 977 bp, Enterobacter cloacae
cttcaggaccacatcctttttcagaccggttatctggtcaacggaatctggaaaacgctggatacaacctttgatgtgctgaatcccgcgaccggcgaggtcattgctaaagtcgcaaaagcgggtaaagcacagaccgaagacgctattgcagcggctacccaggccttcccggcatggcgtgccaaaaccgcgaaagaacgctcggcgattctctaccgctggtacgaactgattattgagaataaaagctggctcgggcggttgatgaccaccgaacagggcaaacccctgaaagaagcggagggagaagtcgagtacgccgccagctttatccagtggtttgccgaagaggccaaacgcgcgaacggtgaaattattccgccgataaaacccggctcacgcattctggcgacccgtgaacccattggtgtggtcgcagcgattacgccatggaacttcccgatggccatgctcacccgcaagttaggcccggcgctggcagcaggatgcaccggggtcattaaaccggccaataacacaccgctcagcgcctttgcgctgcttacgctggcgaaacaggccggagtgcccgacggtgttctcaacgccgtagccgggaatacgcatgaaatcagcgatgcgattatggcaagccgcgacgtacgtaaaatctcctttaccggctcaacctccgtcggcaaaacgctggtgcgtaacgccgcagaaaccatgaaaaaagtctcgatggagctggggggaaatgccccgtatatcgtttttgaggatgcggatatcgacgccgcggttaagggtgcgatcgccaacaagttccgcaatgccgggcaggtctgcgtcacgtgaaccgtttttatattcaggaaaccgtctacgacaaatttgtgaataaactcgccgatgcggtgaatgcgctgaacgtgggtaatggtcttgaggaggggttcctgtcgggcgct

SEQ ID NO: 19390 - DNA, 1356 bp, Enterobacter cloacae
gtgtactcgctggtgatgggctgcgcggtgctgatcgtgatgtccacacagatcagctggcagctgaccctgcttgccctgctgccgatgccgatcatggcgctggcgatcaatcgctatggcgaacagctgcacgagcgcttcaagctggcgcaggcggcgttttcgtcgctgaacgatcgcacccaggagagcatgaccagcatccgcatgatcaaagcgtttggtctggaagaccgtcagtctgcgctgtttgccgccgatgcggcagacacgggggcgaaaaacatgcgcgtcgcgcgtatcgacgcccgttttgacccgacgatttatatcgcaatcggcatggcaaatatgctggccattggcggcggaagctggatggtggtgcagggcacgcttaccctggggcaattgaccagctttgcgatgtatctgggtctcatgatctggccgatgctggcgctggcctggatgtttaacatcgtggagcgcggcagcgccgcctacagccgaattcgcgccatgctggccgaagcgccggtggtcatcgacggcagtgaagccgtaccggaagggcgcggcgtcatgaccgtcgacgtccgcaagtttgtctatccgcatacggagcattcggtgctggagaacgtcagctttaccctgcagccagggcaaatgctgggcatctgcggcccgacgggatccggcaaaagtaccgtgctctctctgcttcagcgccactttgacgtcaccgaaggcgatatccgcttccacgatattcccctgaccagactgctgctggacgagtggcgcggtcgcctggcggtcgtcagccagacgccgtttttattttcggacaccgtggcgaacaacatcgccctgggacgccctggggcgacgcaggacgagattgaacatgtggcgcgtctggccagcgtacatgatgatattttgcgtctgccgcaggggtacgaaacggaagtcggggaacgcggcgttatgctgtccggcgggcaaaagcagcgtatctccattgcccgcgcgctgctgctgaatgctgaaatcctgatcctggatgatgcgctttctgccgtggacggccgtaccgagcatcagatcctgcataacctgcgccagtggggtgacggacgcacggtgattatcagcgcccaccgtttgtcggcgctcactgaagccagcgaaattgtggtcttacagcacgggcacattgcccagcgcgggcagcatgaaacgcttgccgagcagccgggctggtatcgcgatatgtaccgctatcaacagcttgaggcggcgctggacgatgcgccgcagcaggatgaggaggccgccaatgcg

SEQ ID NO: 19391 - DNA, 576 bp, Enterobacter cloacae
atgggcgcggtggcggtaggcgcgacgatttacttcggctccgaacagtcccgtcgtcagattgaagagatctccgcggcgtttgagcgtgcgcacgagctgggcatggtcaccgtactgtgggcatatctgcgcaacaacgcgttcaagaaagacggcgtggattaccatgtatccgccgacctgaccgggcaggcgaaccacctggcggcgaccatcggcgcggatattgtgaagcagaaaatggccgagaataacggcggctataaagcggtgaactttggctacaccgacgatcgcgtttacagcaagctgaccagcgataacccgatcgacctggtgcgctaccagctggcgaactgctacatgggccgcgcggggctgattaactcaggcggcgcggcgggcggtgataccgacctgtcagacgcggtgcgtacggcggtgatcaacaaacgtgcgggcggcatggggttgatccttggccgcaaggcgttcaagaaatcgatggccgacggcgtgaagctgatcaatgcggttcaggacgtctatctggatagcaaagtcacgattgcc

SEQ ID NO: 19392 - DNA, 897 bp, Enterobacter cloacae
atggcaacctatccagacagtttattgattctcaatggcaaaagtgcgggcaacgatctgctgcgtcaggccatcataggtttgcgtgacgatggcgcgcgcattcacgttcgggtgacgtgggaaaaaggcgacgcggcacgctatatcaatgaagctctcgggcttggcgtcagcaccatcatttccgggggcggcgacggcaccatcaatgagattgcgtcagcgcttatcgacctgcccccggcaaaccggccggtgatgggcattttaccgctcggcaccgccaatgattttgctaccagcgcagggatcccggaagagctggagaaggcgctccagttggcgatcctcggcaaagccaccgctgtggatattgcgcaggtgaatgataaaacctgctttatcaatatggcgacgggcgggtttggcacgcgcatcaccagcgaaacgccggaaaagctgaaggcggcgctgggcggcgtgtcatacctgatccacggcctgatgcgcatggacaccctcaagcctgaccgctgcgaaattcgcggcgaggattttcagtggcagggtgacgcgctggtaattgggattggcaacggacgtcaggcgggcggcggacagcagctgtgcccggaggcgctgattaatgacggtcagctccagctgcgtattttcactggcgacggcctgctgcccgcgctgtttaccacgctgacgcagccggaagagagtccaaatatcatcgccgggaaatcggcgtggtttgaagtgaatgctccccacgggatgacctttaacctcgacggagagccgctgagcgggacgcagttccgcattgaggtgttgcccggcgcgctacagtgtcggctgccgccggactgcgtgcttttgcgc

SEQ ID NO: 19393 - DNA, 717 bp, Enterobacter cloacae
gtgcataagcacgagccgatcccggtgaccaacgtcgagccgacgctgggcatcggcgcgccaaccgacagcgtgtttatgattgaagaagccaaacgcccgggcgagtacatgaccgcctttgaagacgagcacggcacctacatcatgaactcgaaagatctgcgcgccatcgcccacgtcgagcgtctgacgcagatgggcgtgcactccctgaagattgaaggccgcaccaaatcctattactactgcgcgcgcaccgcgcaggtgtaccgcaaagccatcgacgatgcggcggccggtaaaccgttcgataccagcctgctggaaactctggaaggcctggcgcaccgcggctataccgaaggcttcctgcgtcgtcatacccatgacgactaccagaactacgagcacggctactccgtttccgagcgccagcagtttgtcggcgacttcaccggcgagcgcaaaggcgcgctggcggccgtggcggtgaaaaacaaattcaccaaaggcgacagcctggagctgatgaccccgcagggcaacatgaactttacgctggaacatctggaaaacggcaaaggcgaagcgattgacgtggcgccgggtgacggtcataccgtctggctgccggttccggaagaggtggagctgaagttcgcgctgctgatgcgtaacttcaacggtgaaagcacccgaaacccacacggcaaa

SEQ ID NO: 19394 - DNA, 240 bp, Enterobacter cloacae
ggcctgctttcggcctatgaggtcgtggtatggatgacggatggctggccgctttatgaatcacgcctgaagggagaactgcacgttatcagcaagcgatatacgcagcgcattgagcggcataacctgaatctgaggcaacatctggcaaggctgggcaggaagtcactgtcgttctcaaaatcggtggagctgcatgacaaagtcatcgggcattatctgaacataaaacactatcag

SEQ ID NO: 19395 - DNA, 1226 bp, Enterobacter cloacae
atgacaaacagtcgcgtagagggtagcagtggcagagccgcgcgcaagttgcggttcgcattaatgggacctgcgttcatcgctgccattggctatatcgatccaggtaactttgcgaccaatattcaggccggggccagcttcggctataagctgctgtgggtggtcgtctgggcaaacctgatggcgatgctgattcagatgctctccgcaaagctggggattgccacaggtaaaaacctggcagagcaaattcgcgaccattatccgcgtccggccgtctggctctattgggttcaggcggaaatcatagccatggccactgacctcgctgaatttattggcgcagcgatcgggtttaaactgattctgggcgtgtcgctgttgcagggggcggtactgaccgggattgccactttcctgatcctgatgctgcagcgtcgaggtcaaaagccgctggagaaggttatcggcggtctgctgctgtttgtcgcggcggcctatatcgtggagctgattttctcacagccgaatctggtgcagctcggtaaaggtatggcaatcccaagcctgccaacctcggaagcggtgttcctggctgccggggtattgggggcgactatcatgccgcatgtgatttacctgcactcctcgctgactcagcatctccacggtgggacgcgcaaagagcgttactccgccaccaaatgggacgtggcgattgccatgaccatcgcggggtttgtcaatctggcgatgatggctaccgctgccgccgctttccactttaacggccacaccggtattgccgatctcgaccaggcttatctcacgctggagcccttactgagccatgctgccgccacgatatttggtctcagcctggtggctgccggtctctcttctacgggtggtgaggcacgctggcaggccaggtggtggtccaggggtttgtccgcttccatattccgctgtgggttcgtcgctccgtcaccatgctaccgtcatttatcgtgatcctgatggggctcgatcctacgcgaattctggtcatgagccaggtgctgctgagttttggtatcgcgctggcgctggtgccgctgctgatctttaccagcaacaaaaacctgatgggcgaactggtcaactcgaccctggtgaaacggaccgggtgggccatcgtggtggtggtagtggcgctgaacctgtggctgctggttggcacc

SEQ ID NO: 19396 - DNA, 525 bp, Enterobacter cloacae
atgatcaccgctaccatcgggatcaacatcgtcgcgaacttcgtctccccggcgtttgatttctctaactgctcgccgcagaaaatcagcttccgcaccgggggcatgattgccgccgtcggctcgatcctgctcaccccgtggaacctgttcaactcgccggagcttatccactacaccctcgacgtgctcggggcgtttatcggcccgctgttcggcattctgattgccgacttctacctcattaagcgcggcaaggtgtcggttgacgatctgttcgacgacacgccaaagggcaaatactggtaccgcaacggctttaacccgaaagccattggcgcgctgatcccgtccgtggccgtgggcctggtgattagcttcatcccggccctgcatgaggtggcaaacttcagctggtttatcggggtcttcctcggcggcgtgacctaccgctggctggcgcgggaagaccgcgagacggcgggcgcgacgtcgttcagctcccgcgtggcaacgcaaaaagag

SEQ ID NO: 19397 - DNA, 1285 bp, Enterobacter cloacae
gcgatccgcggcgcattttttgatattgcccaggtctgcgacagcgcagacgcgattgcccaacacgcgcgctaccttgaggacgggctgctgtttatacagagcgggaaaattctggcgcacatgccgtggcaggagggtgagcagtatcttgacccccacaagggctacaccgacctgcgcggcaggctgctgctgcccggttttgtcgacacccacgtccattatccgcaaacggagatgatcggcgcctttggcgaacagctgctggagtggctgaccacctacaccttcccggtggagagccagttttccgatgaagcctacgcgaaagagatcgccgaatttttcattcagcagctggtgagcaacggcaccaccaccgcgctggtgttttgcacgctgcatccggaatcggtcgaggcgctgtttacccaagccctgcgcctgaacatgcgccttatcgccggaaaggtgatgatggacagacacacgccggactacctgagcgaagacgcgaagcagagctaccggcagacgcgggcgctgatccagcgctggcaccaccggggacggctgggctacgccattaccccgcgctttgcgccgacctcatcccccgagctgctcgccgcggttagcctgctcagagaggagttcccggatacctggatgcagacccacctgagcgaaaaccccaacgaagtggcctgggtgagcgacctctggccggagcacgagcgctatctggacgtatatcaccactacgggctgaccggcgagcgcagcgtgtttgcccacgcgattcaccttcaccacagcgagtggcagtgcctgcacgacaccggctcggcggtggcgttttgccccacctctaacctgtttctcggcagcgggctgtttcgcctgcccgcctgctggcagcacagggtgcgcatgggcatcggcacagacgtcggggcgggtaccaccttcagcatgctgcgcaccctggggggaggcctacaaggtgggccagcttcagagctaccgcctgcgcgccagcgaggcgttttatcacgccacgctgggcggcgcgcacgctctcaggctcgaagataagattggcaacttcgcgcccgggaaagaggcggatttcgtggtgattgaccccgacgtgacgccgctgcagcgcctgcgcaatcgccgctgccaggatatctacgagcagctttttgtgctgatgaccctcggcgacgagcgcaacatcagcgagacctgggtcaacggcgagcgggtgtggtca

SEQ ID NO: 19398 - DNA, 1395 bp, Enterobacter cloacae
atgaggctacacgagatgagtatcagcgcgatccagcatgcgctgggcgcgggcgagctgagcgctcgcgagattgcccgccagacgctggaggcgattgcgcgcgtgaatccgcagatcggcgcctggaccgccgtgacggaagcgcgcatgctcgccgaggccgagagcatcgataccctgcgccgtgaaaagcgccccctgccgccgctggcgggcgtaccctacgcggtaaaaaacctgttcgacgttgccggccacaccacccttgccggggcagagctgttcagccagcgccccgccgcggccgctgacagcttcgcggtgcgccagctgcgcagcgcgggcgggctgctgaccgggatggtgaacatggacgcctacgcctacggcttcacgaccgaaaacagccactacggcacgacgcgtaacccgcacgatctggcgcgcattgcgggcggctcgtccggcggctcggccgccgccgtggccgccgggctggtgcatttttcgctcggcaccgacaccaacggctcgattcgcgttccggcctccctgtgcggcatctatggcctgaagcccacgtttggccgcctgtcacgatccggcagccatccgtttgtcgcgagcctcgatcatatcggcccctttgcccgccgcgtgtgcgatctggcatccgtatacgatgcgctgcagggccgggacagcagcgacgcttttcaggcagagagctcgcgcgagcagacgcgccccatgctcgaccgcggtctcgacggcctgcgctgcgcggtgctcggcggctacttcaccacctggtgcgacgcggatgccagagacgccgtggcgcgggtggcaaaggcgctcgacgtgcaggatgagctgcagttcccggacgccgaactggcgcgttccgcggcgtttatcatcagcgcctccgaagggggaaatcagtacctgcctgcgcttcgccgcgagcccgagcggtttgagccgcattcccgcgaacggctgctggccggggcgatgatcccctccgcctggtacattcaggcccagcggtttcgcgcgcacgcccggcaggcgtttaaaaccctgttcgcgcaggtcgacgtgctgatcgctccggcgacgccgcgcagcgccacgctagcgggtgagcagaccatggagattaacggtcagccgctccccattcgcgccagtatggggatgctgacccagccgatttcgtttctgggcctgcccgtgaccaccgttccgctgcgcaccgcccagggtgcgccgattggcctgcagctgattgccgcgccgtttaacgagcaggcctgcctgcacgtagcgcgcgtgctggaagagagtgggatcgccgacgcgcgtccggcggaggtggccgca

SEQ ID NO: 19399 - DNA, 648 bp, Enterobacter cloacae
atgaacaatatgaacgtaattattgccgatgaccatccgattgtactgttcggtattcgcaaatcacttgaacagatcgagtgggtgaatgtagtcggtgaatttgaagactctacagcactgatcaataacctcccaaagcttgatgcgcacgtgctcattaccgatctctccatgcctggagacaaatacggtgatgggatcacgctcatcaaatacattaaacgtcacttcccggatatctcgatcattgttctgaccatgaacaacaacccggcgatcctgagcgcggtgttggatctggacattgaagggattgtgctgaaacagggcgccccgaccgatctgccaaaagcgctcgctgcgctgcagaaaggcaagaagttcacccctgagagcgtctctcgtctgctggaaaaaatcagcgcgggtggctacggtgacaaacgcctgtccccgaaagagagtgaagttctgcgcctgttcgcagaaggtttcctggtaaccgagattgccaagaagctgaaccgcagcattaaaaccatcagcagccagaagaaatcagcgatgatgaagctgggcgtggacaacgatattgctctgctgaactatctctcctccgttacgctgagcgcatcggacaaggat

SEQ ID NO: 19400 - DNA, 1258 bp, Enterobacter cloacae
atgaccctattagcactcggcatcaaccacaaaacggctccggtttcgctgcgagaacgcgtgacgttttcgccggatacgcttgacctggcgctggacagcctgcttgcacagcctatggtgcagggtggcgtggtgctctcgacgtgcaaccgtaccgagctgtatttaagcgtggaagagcaggacaacctgcacgaagcgctgatccgctggctatgcgactaccacaatctcaatgaagacgagctgcgcaacagcctgtactggcatcaggacaacgatgccgtcagccatctgatgcgcgtcgccagcgggctggattcactggtgctgggcgagccgcaaattctggggcaggtgaaaaaagcgtttgcggattcgcaaaaagggcatctgaaggccagcgagctggagcgcatgttccagaagtcgttctccgtggcgaagcgtgtgcgaaccgaaaccgacattggtgccagtgcggtttctgttgctttcgcggcctgcacccttgcacgccaaatctttgaatccctgtctaccgtcaccgtgatgctggtgggcgcgggcgaaaccatcgaacttgtggcgcgccatctgcgcgagcataaagtgaaaaagatgattatcgcaaaccgcacccgcgaacgcgcgcaggtgctggcggatgaagtgggtgcagaggtggttgccctgagcgacatcgatgaacgactaaaagatggcggacattatcatcagctcaaccgccagcccgctgccgattatcggaaaagggatggtggagcgtgcgctcaagtcccgccgtaatcagccgatgctgctggtggatatcgccgtcccgcgcgatgttgagccggaagtgggcaagctgcctaacgcctatctctacagcgtggatgacctgcaaagcatcatttcgcacaaccttgcccagcgtaaagcggcggcggttcaggcggaaaccatcgtcgagcaggaaaccagtgagtttatggcctggctgcgcgcgcaaagcgccagcgagaccatccgcgagtaccgcgggcaggcggagcaggtgcgtgatgacctgactgccaaagcgttagcagcccttgaacagggcggcgacgcaaatgcgattatgcaggatctggcgtggaaactgaccaaccgcctgatccatgcaccaaccaaatctcttcagcaggctgcccgtgacggggatgatgaacgcctgactattctgcgcaacagcctcgggctggaatag

SEQ ID NO: 19401 - DNA, 945 bp, Enterobacter cloacae
gtgcctgatatgaagctttttgctggtaacgccaccccggaactagcacaacgtattgccaaccgcctgtacacttccctcggcgacgccgccgtaggtcgctttagcgacggcgaagtcagcgtacaaattaacgaaaatgtacgcggtggtgatattttcatcatccagtccacctgtgctccaacgaacgacaacctgatggaactggttgttatggtcgacgccctgcgtcgcgcttccgcaggccgtatcactgctgtaatcccttacttcggctatgcccgtcaggaccgtcgcgtccgttccgcgcgtgtgccaatcaccgctaaagttgtcgctgacttcctgtccagcgtcggcgttgaccgcgtactgaccgttgacctgcacgcagagcagatccagggcttcttcgacgttccggttgataacgtattcggcagcccaatcctgctggaagacatgctgcagctgaacctggataacccaatcgtggtttctccggacatcggcggcgtggtacgtgcccgtgctatcgctaagctgttgaacgataccgacatggctatcatcgacaaacgccgtccgcgcgcaaacgtttctcaggtgatgcacatcatcggtgacgttgctggccgtgactgcgtgctggttgacgacatgatcgataccggcggtacgctgtgtaaagcagctgaagcgctgaaagagcgtggtgccaagcgcgtgttcgcttacgcgactcacccgatcttctccggtaatgcggtaaacaacctgcgcaactccgtcattgacgaagtggtggtatgcgataccatcccactgagcgacgagatcaaagcactgccaaacgtgcgtacgttgaccctgtccgggatgctggccgaagcgattcgtcgtatcagcaacgaagaatccatctcagcaatgttcgaacac

SEQ ID NO: 19402 - DNA, 1000 bp, Enterobacter cloacae
gtgaaaaacgtagcctcctcacatgttctgccctttcgcgccctcatcgacgcctgctggaaagagaagtacacctcgtcacgctttgtccgtgacctgattgccgggatcaccgtcggcatcatcgccatcccgctggcgatggcgctggcaattggcagcggcgttgcgccgcagtacggtctgtacacctcggccgttgccgggatcgtcattgccctgacgggcggttcgcgcttcagcgtctccggcccgaccgccgccttcgtggtgatcctctacccggtttcgcagcagtttggtctggcaggcctgctggtcgccaccctgatgtcgggcgtatttttgattttgtttggtctggcccgctttggtcgcctgattgaatatattcccctttccgtgacgctggggttcacctcggggattggtattaccatcggaaccatgcagatcaaagatttcctcggcctgcagatgccccacgtaccggagcactacctgcaaaaagtgggggcgttgtttatggcgctgccgacggccaacctgggcgacgcggccatcgggattgtgacgctgggtacgctgatcgtctggcctcgcctcggtattcgtctgccgggccatctgcccgcgctgctgctgggctgggcggtgatggcgatcgtcaatatgctcggtggtcacgtcgcgactatcggctcgcagttccactatgttctggcggacggttcacagggtagcggtattccgcaactgctaccgcagctggtgctgccgtgggacatgcccggctccagcttcaccctaagctgggattccctgcgagccctgcttcccgccgcgttctctatggcaatgctgggggcgattgaatccctgctctgcgccgtcgttctggacggcatgaccggcaccaaacacaaagccaacagcgaactggtcggtcagggattaggcaacctcgtcgcgccgttcttcggcggtattaccggggatc

SEQ ID NO: 19403 - DNA, 828 bp, Enterobacter cloacae
atgaccgattttgtttcacttcttcagcagggcaatgcctggctgtttgttcccagcgctatcctgctcggtgcgctacatggcctggaaccgggccattcaaaaacaatgatggccgcctttattgttgccatccgcggcacgctgaaacaggcggtgctgctcggcctggcggccacgctctcccatacggcggtggtctggctcgttgcgatggcgggattatggtttggtcgtggctgggatgcgcacacgtccgaaccctggttccagctgttctccggagtgctgatcgttgcaatcgccctgtggatggcgtggcgaacctggaaagaaagccagccgcacgatcatcatcatcacgatcatgatcatcaccaccatgaccatgaccatgaccaccatcatgatcatcatcatcaccacgaacactcgctggttgaagaagagtggcaggacgcccaccagcgcgctcacgcgcaggatattaaccggcgcttcagcggtcaaaatgtcaccacaggacagatcgtgatgtttggcctgaccggcgggcttatcccctgtccggcgtccatcaccgtgctgctgatctgcctgcagctgaagcatttcgccctcggcgcgacgctggtgttcagcttcagtattggtctggcgttaacgctggtcgcttccggcgcgattgccgccttaagcctcaagcacgcgaccaaacgctggcccgggtttagcgaattctcccgtaaagcgccgtggatctccgctgcgctgattaccgtagtagggatttacatgagcctgcatggcctgagcggcattctggcg

SEQ ID NO: 19404 - DNA, 984 bp, Enterobacter cloacae
atgaacgaccaggcttttactttccagacattacacccggacaccattatggatgccctgtttgaacagggtattcgggtggactccgggctaacaccgttaaacagttacgaaaaccgcgtctatcaatttcaggacgaggatcgtcagcgcttcgtcgtaaagttctatcgtcctgaacgctggtccgcagaacaaattcaggaagagcatcagtttgctcacgatctgctggatgacgatgttcccgttgccgcgccgctaaaattcaataatcaaacgctcctcacgcacgaagggttttactacgctgtattcccaagcctgggtggccgccagtttgaagcggataatatcgatcagatggagtgggttgcccgctatcttgggcgcatacaccagacgggacgcaaaaaagcctttattgcccgcccgactatcggaattcaggaataccttcttgagccacgcgaaatattcgaaacgtctgccatgatccccgctgcgttaaaggatgatttcctcaacgccaccgataagctcattgctgctgttaaaacctgctggcgtgacgatatttccgtcctgcgcctgcatggcgattgtcatgccggaaatatcctctggcgtgatggcccgctgtttgtcgatctcgatgatgcgcgtatggggcccgcggttcaggacctgtggatgctactcaatggcgacaaagccgagcaacgcatgcagcttgaaaccattattgaagcttatgaagaatttagcccgtttaattcagacgaaattgccctgattgagcctttacgtgcgatgcgttttgtttattatctcgcatggttaatcaggcgttgggacgatcccgcatttccccggaatttcccgtggcttaccggagaggattactggcgtagccagatatctacatttactgagcaggtcaaggttcttcaggaaccccctctgcaattaacgccgatgtat

SEQ ID NO: 19405 - DNA, 1917 bp, Enterobacter cloacae
atgcaagctttagtgaggcgaccagtttttagtatgctaaattatttaatatctttaccacgaccaataaaacgtattatcacactctctatagatgttgtgcttctgttgtgcgcattttggtttgcattttgggtgcgtattgattcaatgactccagtatatagtacggagcattggctttttattttctcaataattttagttactctggcaatatttgttaaattagggctgtatcgggcagtaatccgttatattactgccaagatattattggtcgtaacgatggggatggtcatatcatccattttgcttattatcgcagcgttctataccaacctctatttgccgagaacgattccttttatctatttctcattcggtctgctgcttattgccggatcacggcttgcaatgaggatgttagtgaatcgtgggttgaatctgggcactcgggtagttatttatggtgcaggtgcatcgggtcgtcaattactgcctgcgttgagccagatggacgaatattaccccgttgcttttgtcgacgataatcgcgccctgcaaggtcaggtgattcacggggtaagcgtcttcgcaccagaaaaactgccctggctggttgagaaatacgaagcgaagaaaattctgctggccatgccaagcgcaagccgggccagaaaaaacgaagtcattaaaaccctggaaggtctgccgtgcgaagtgctctccatcccgggaatggtcgatctggtggaggggaaggcaagcattgattccttgcggaaagtcgttattacagacctgctgggccgcgatcctgtctcacctattccggaactgatatcccgtaatatcaacgggaaaacagtgatggttaccggggcaggggggtctatagggtctgaactatgccgacagataattaaaaataagccaaaccagcttattctgttcgaactgtccgaattctccctctattccattgattccgaactgcgtaacctgaatctgagtcaggattttaaagttaaaatctatccaatcctcggaaacgttcaggataaagagcatctcgaaaggttaatcagagcattcaacgtcgacacaatttatcatgctgcggcgtacaagcatgtgccgcttgtcgagttcaacgtccttgatggcgtgcgcaataatatctttggtacgttgagctgcgctcaggctgcggcaagttgcggtgttgaaaactttgttctgatttcgactgataaagccgttcgccctaccaacaccatgggggcgaccaagcgcatggcggagctggtgctgcaagcgctggcgaaggaatccagtaaaacctgcttcagtatggttcgtttcggcaacgtgttaggctcgtcaggctcagttgtgccgttatttgaaaaacaaattgctgcaggtggaccggtgacgctgactcacgaagatatcacgcgttactttatgaccattcctgaagcggctcaattggttatccaggcaggagccatgggcacgggcggcgatgtttttgttcttgatatgggggaacccgtcaagatcatcgaccttgcccaccgcatgattacgttgcaagggcttaccgttcgcgatgataaaaacccttatggtgatattgcgataaaaacgacgggtctgcggcctggtgagaaactgtatgaagagttgcttatcggcgacaatgtatccgttacgcagcacccgcgtatcagaactgctaacgaggtgatgttgccgtggagtgagatgagcattattctccgtgacctcgacagcgcctgcagtcagttcgactacgagcgcgtgcgagagattcttttacaggcacctgcagcatttaatccaaccgacggtatctgcgatttactttggaatgaaaaggtaaat

SEQ ID NO: 19406 - DNA, 1008 bp, Enterobacter cloacae
atgaaggctgctgttgtcactcaggatcatcaggttaatgtcaccgaaaaaaccttacgcccgctaaagcacggggaggccctgctgaagatggaatgctgtggcgtatgccataccgacctccacgtgaagaacggtgattttggcgataaaaccggggttatcctgggccacgaagggattggtatcgtaaaagaagtcggccccggcgtgaagtcgctgaaagtcggcgatcgcgcaagcgtggcctggttttttgaaggctgcggccactgcgaatactgtaataccggcaacgaaaccctgtgccgcgacgtgaaaaacgccggttactccgttgacggcgggatggcggaagagtgcatcgtcaccgctgactacgccgtaaaagtgccagacggtctggaatccgctgcggccagcagcatcacctgcgccggcgtcaccacctataaagcggtgaaggtgtcgggtattaaaccgggccagtggatcgcaatctatggtctgggcggtctgggcaaccttgcgctgcagtacgccaaaaacgtctttaacgccaaagtcatcgctctcgacgttaacgacgaacagctgaagctggcggccagcatgggtgcggatttaaccatcaactcccgcagcgaagacgccgcaaaaattgtgcaggagaaaaccggcggcgcgcatgccgcagtcgttactgccgtcgcaaaagcggcctttaactcagccgttgacgccgtgcgtgccggtggccgcgtggtcgcggttggcctgccgccggaagcgatgagcctcgacattccgcgtctggtgctggacggcatccaggtggtaggttccctggtcggcacccgtcaggatctgcaggaagccttccagttcgccgcagaaggtaaggtggtgccgaaagtcacgatgcgtccaatcgaggacatcaacgccatctttaaagagatggaacagggccagatccgcggccgtatggtgatcgacctacgttca

SEQ ID NO: 19407 - DNA, 931 bp, Enterobacter cloacae
gcgaatatcgtccattccggctacggctttcgctgcaccgcaacggatcgcgcgctgccgctgacgttgggtctcgacggcagcgcggtgctggagcgtctgaatgggctcccggacggctggctggtcgaagccctggatcagctgtttgttgccgcacccgcgctgaccggcattaccctgccctgggcgacctggcaggatgccccccaggcgcaggcgctgtttagcctggcccacggggactatctggcacgcgaaaccttctggcaactgccgctgtggctgaaaggcgaacggccgcaggccagcggcgggatgcagtttgatgagagccgtcagctgtacttcccgctgcgtcctcacgcgcccgcagggcgaaatataccgtcgctacgatccgcaaattaagcgcaccctcagcttccgcgtggtcgacgtggcgctggacggcgagcgctttacccaatggatgaacaacccgcgcgtgaacgccttctgggagatggcgggcccgcaggccgagcaggaaagctacctgcgccgtcagcttgactcgacctactgctacccggttatcggctgcttcgatgaccagccgttcggctattttgagctctactgggcggcggaagaccgcattggccgccactaccgctggcagccgtttgaccgcggcctgcacatgctggtgggcgaagagaactggcgcggcgcgcagtacatccgcagttggctgcgcggcctgagccactatctgtatctcaatgaaccgcgcaccgcgcgcatcgtggccgagccgcgcttcgacaaccagcgcctgttccgccatctggcctccgccggtttcgagacggtgaaagagttcgacttcccgcacaagcgctcgcgcctcatcatgagccagcgccaccgcttcttcagcgaggtg

SEQ ID NO: 19408 - DNA, 963 bp, Enterobacter cloacae
atgagtaaacccattgtgatggaacgcggtgttaaataccgcgatgccgataaaatggcccttatcccggttaaaaacgtggctacagagcgcgaggcgctgttaagaaaaccggaatggatgaaaatcaaacttccggccgactcttcgcgtatccaggggatcaaagcggcgatgcgcaagaatggccttcactccgtctgtgaagaagcctcttgcccgaaccttgctgaatgtttcaatcatggtaccgcgacgtttatgattctgggtgctatctgtacccgccgctgcccgttctgcgatgttgctcatggacgtccagtcgcgcctgatgctaacgaaccccagaaactggcgcagaccatcgccgacatggcgctgcgttatgtggttatcacgtccgttgaccgtgacgacctgcgtgacggtggtgctcagcacttcgccgactgcattacggccattcgcgagaaaagccctaacatcaaaatcgagacgctggtgcctgacttccgcggccgtatggaccgtgcgctggatatcctgaccgcaacgccgccagatgtgtttaaccacaacctggagaacgtgccgcgtctttaccgtcaggtccgtccgggcgctgactacaactggtccctgaagctgctggagcgtttcaaagaagcgcatccgcatattccgaccaagtctggtctgatggtgggtctgggtgaaaccaatgatgaaatcatcgaggtgatgcgcgatcttcgccgccacggtgtgaccatgttgaccctcggacagtatctgcagccaagccgtcaccacctgccggtacagcgctacgtgagcccggacgaattcgatgaaatgaaagccgaagcgatggcgatgggcttcacccatgctgcctgcggcccattcgttcgctcctcataccatgccgatatgcaggctaaaggcgaagaagttaaa

SEQ ID NO: 19409 - DNA, 951 bp, Enterobacter cloacae
gtggagtataataatttaccagccaaacgactgaatgaacccggtggcgaagacaagccacaaatttttcggactttacgtaatattgatctcaatttactgactatttttgaggcggtatatgtccataagggtatcgttaacgctgcgaaaattcttaatctcacgccatcagcaataagccagtcaatccaaaagcttcgcgctatatttcctgacccattatttatccgcaagggccagggggtaacgccgacggcttacgccacgcatctccatgagtacatcagtcaggggctggagtcgattctgggcgcgctggatttaaccggaagctatgataagcagcgaaccatcaccatcggctgttccccttctgtaggggtgctggtgatgccggcgatcttccaggccgtgaaagaacatgctccgcagctcctgcttcgcaacgtgcctctcaatgaaccagacattcagcttgcccagttccagacggacctgattattgaaagcggcagcttcagtgccagagcgctggggcaaaatgtgctttatgcggataacctggtactggtttgccgccagcagcatcctgctcttagcgagccgttaaccatcgaaaacctgcgcaactacgatcactcatctttcatgaccgaagggcaatctaatcacgcacttcgtcagcgtattgatgaaattttcccggaacgtcagatcagcttcagcagttacaatatgtttaccaccgcatccctgatcggcagcagcgacatgctgtgcgtaatgccatcacgcctgtacagcctgctacaaaaatgctggccgctggaaagcatcccgctcagtcagcttaatgcggaatctatcgagatttcactgcattacaacaagctgagtttgcgcgatccggtcctggaaaacgtcatccgcattatccgtcaggccttc

SEQ ID NO: 19410 - DNA, 1317 bp, Enterobacter cloacae
atgtcaccctcagatgcccccataaactggaagcgtaacctcgcggttgcgtggcttggctgttttcttaccggcgcggcctttagcctggttatgcccttcctgccgctctacgtcgaacagcttggcgtgacgggctacagcgcgctcaatatgtggtccggtctggtattcagcatcacgtttctcttttccgcgatggcctcacccttctggggcggccttgccgaccgcaagggacgtaaaatcatgctgctgcgctcggcgctggggatggccattatcatggcgctgatgggcgaggcgcagaacgtctggcagtttctgatcctgcgcgcgctgctgggccttctggggggatttattcccaacgcgaatgccctgattgccacacaaattccccgccataaaagcggttgggcgctcgggacgctctctaccggcggcgtgagcggtgctctgcttggaccgctggccgggggattactggcggataactacggcctgcgcccggtcttctttatcaccgccagcgtgttgttcctgtgctttatcgtcaccctgctctgtatccgggaaaacttcacgcctgtcgccaaaaaagagatgcttcacgccagagaggtgctgacctcgctcaaaaatcccagactggtgctgagcctgttcgtgacgacaatgattatccaggtggctaccgggtcgattgcccctattctgacgctgtacgttcgcgacctgacgggtaacgtcagcaatattgcgttcatcagcgggctgattgcctccgtacccggcgtggcggcgctgctgagcgccccgagactgggtaaactgggagaccgggtgggtccggagaaaatcctgatctccgcgctggtgatctccgtcctgctgcttatcccgatgtcgatggtgcaggctccgtggcagctgggcttacttcgctttttgctgggagccgccgacggcgcgttgcttcccgccgtacagaccctgctggtttacaactccacgaaccagattgccgggcgtattttcagctataaccagtcattccgcgatatcggtaacgtcaccggaccgctgctcggagccgggatctccgccagcttcggttttcgcgccgtctttatcgtgacggcgggcgtcgtcttgttcaatgccatttattcatggttcagtttatcccggcgcgctgcggcccgtaacggaataagacgaacgcctgacagcttattttcgcattcatacttgcagaatcttatattcagctattctttccctgaaaccttctggaaaacagggagacaccaa

SEQ ID NO: 19411 - DNA, 1047 bp, Enterobacter cloacae
atgccagtgttacacaaccgcgtgtcgaatgagatgttgaaagcgcgtatgttggctgaaaccgaaccgcgcacaaccatctctttctataaatacttcacgatcgacgatccgcaggcgacccgcgatgcgctttatcaggcgttcacggcgctgaacgtcttcggccgcgtctaccttgcccgtgaaggcattaacgcgcaaattagcgtaccggaaagcaaagtcagcgccttccgcgacgtgctttatcagttcgatccggccctcgacggcttgcgcctgaacattgctctggacgatgacgggaaatccttctgggtgctgcgcatgaaggtgcgtgagcgcatcgtggcggacggtatcgacgatcccgagtttaacccggcggatgtcggtgaatatctgaaggccgcggaagtgaatgcgatgctggacgatccggatgccgtgttcattgatatgcgtaaccactatgagtacgaagtggggcatttcgagaacgcgatggaaatcccggccgacaccttccgcgagcagctgcccaaagcggttgagatgatgcaggaacataaagataaaaagatcgttatgtactgcaccggcggtatccgctgtgagaaagccagcgcgtggatgaagcacaacggctttaataaggtctggcatattgaaggcggcattatcgagtacgcccgccgcgcccgcgagcagggtttaccggtgcgctttatcgggaaaaactttgtctttgacgagcgtatgggtgagcgtatctcggaagacgttattgctcagtgccaccagtgcggcgcaccgtgcgatacccacaccaactgcaaaaacgacgggtgtcatctgctgttcattcagtgcccggcctgtgccgagaagtttaacggctgctgtagcgaactgtgcagcgaagagagcatcctgccggaagaagagcagcgtcgccgtcgcgcaggacgtgaaaacggcaacaagattttcaataaatcacgcggccgtctgaataccaaactgggtatccctgacccggaa

SEQ ID NO: 19412 - DNA, 577 bp, Enterobacter cloacae
aaaaaccccctgctgggtatcgcccctggggtcccctggtaattcaccgccggtaataccgtggcggcggattataaaattgataaagagggccagcacgctttcgtcaatttccgtattcagcacctgggctacagctggctgtacggcacctttaaggattttgacggcacgttcacttttgacgagaaaaatcccgcggccgataaagtcaatgtgacgattaatacgaacagcgtcgacacgaaccacgcagagcgcgataaacacctgcgcagtgggggagttcctcaacgtcgcgaaattcccgcaggcgaccttcacctctacggaagtgaaaaaagagggtgataagctaaatattaccggcaacctgacgcttaatggcgtaaccaaaccggtcacgcttgatgctaaattactgggtcagggtgacgatccgtggggcggtaaacgcgcaggttttgaagcggcgggtaaaattcacctgaaagattttaatatcacaacggatttaggcccggcgtctcaggacgttgagctgattatttccgttgaaggtgtacagcagaaatca

SEQ ID NO: 19413 - DNA, 2268 bp, Enterobacter cloacae
gtgtggagtgcctgtaccgttaactgcggtagccgttgtccgctgcgtatgcacgtggtggatggcgaaattaaatatgtcgaaaccgacaataccggggacgataactatgaagggttacatcaggttcgcgcctgcttgcgcggccgctccatgcgtcgtcgcgtgtataatccggaccgcctgaaatatccgatgaagcgcgtcggtaagcgtggggaagggaagttcgagcggattagctgggatgaagcctacgacattatcgccaccaatatgcagcgccttatcaaagagtacggcaacgaatccatctacctgaactacggcaccgggacgctcggcggtacgctgacccgctcctggccaccgggtaaaacgctggtggcacgcctgatgaactgctgcggcggttatctcaatcactatggtgactactcatcggcgcagattgctgcgggactcaactacacctacggcggctgggcggacggcaacagcccgtctgatatcgaaaacagtaagctggtggtgttgttcggtaataacccgggcgaaacccgcatgagcggcggcggggtaacctattacctcgaacaggcccgcgccaaatccaatgcccgcatgatcatcatcgacccacgctataccgacaccggcgccggacgtgaagacgagtggatcccaatccgtccgggtaccgatgcagcgctggtctccgcgctggcgtgggtgatgatcaccgaaaacctcgtcgatcagcctttcctggataaatactgcgtcggctatgacgagaaaaccctgccagccagcgcgcctgctaacggtcattacaaagcctatattctcgggcagggcagcgacggcgtggcgaaaacgcccgagtgggcgtccaccatcaccggtattccggccgagcgtatcgttcagctggcgcgtgagattggctcggccaaaccggcctacattagccagggctggggaccgcagcgccatgcgaacggcgaaatcgcgacccgtgcgatctccatgctctccattctgaccggcaacgtcggtattcacggcggtaacaccggcgcgcgtgaaggctcgtatgaagtgccgtttgaacgtatgccgacgctggataaccctgttcagaccagcatctccatgtttatgtggaccgatgcgatcgaacgtggtcctgaaatgaccgccctgcgcgacggcgtgcgcggcaaggacaagctggacgtgccgatcaagatgatctggaactatgccggtaactgtcttatcaaccagcactccgaaatcaaccgtacccatgaaatcctgcaggatgataagaagtgcgagatgattgtggtgatcgactgccacatgacctcctcggcgaaatatgccgatatcctgctgccggactgcaccgcctctgagcagatggatttcgcgctggacgcctcctgcggcaacatgtcctacgtgatcttcaccgatcaggcgatcaaaccgcgcttcgagtgcaaaaccatttatgagatgacctctgagctggcgaaacgtcttggcgttgagcagcagtttaccgagggacgtacacaggaagggtggatgcgccatctgcatgaactctcccgtaaggcggtccctgacctgccggatttcgataccttccgcaagcagggtatgtacaaacagcgcgatccggaagggcaccacgtggcttacaaagcgttccgtgaagatccgcaggcaaacccgctgaccacgccgtcgggcaaaatcgaaatctactccgaagagctggcaaaaatcgcgtcgacctgggagctgccggaaggggacgttatcgatccgctcccgatctacacgccaggtttcgaaaactacaacgatccgctgacggcgaaattcccgctgcagctgaccggtttccactacaaagcgcgcgtgcactccacctacggtaacgtcgacgtactcaaggccgcctgccgtcaggagatgtggatcaacccgatggatgccaaagcgcgaggcatcagcaatggcgatcgcgtgcgtatcttcaacggtcgcggggaggtgcacattgaagctaaggtgacgccgcgcatgatgccaggcgtagtggcgctgggagaaggggcctggtacagccctgatgccaaccgtatcgaccaggcgggcagtattaacgtactgaccacgcagcgtccgtcgccactggcgaagggcaacccatcccacacaaaccttgtccagtttgaaaaggtt

SEQ ID NO: 19414 - DNA, 759 bp, Enterobacter cloacae
gtgcattatcaaccgcaaaaaaatctgctgcacaaccggattattcttgtcaccggtgccagcgacgggatttgccgcgaggcggccctgacatacgccgaatatggcgcgaacgtcattctgatcggccgcagcgaagaaaaactgcaaaacgtcgctcaggaggttgaggctaaatgcggcacgcctgccccgtggtatacactcgatttactgatctgcacgcccgcggtgtgccaggaattagcccagcgcatcagcgctcactatccgagacttgacggcgtgttgcataacgccggtttgttaggcgaggttcgtccgatggatgaacaggatcctgatatctggcagcaggtgatgcaggtcaacgtcaacggcacgtttttcctgacacaggcattgcttcctttattactcaaatccgagtccgggtccctggtctttacctcgtccagcgttggccgtgaaggacgcgcaaactggggagcctatgccgtatcaaaattcgcgaccgaaggcatgatgcaggtgctggcggaggagtatcagagccgccatctgcgcgtaaactgcattaacccgggcggtacgcgcaccaaaatgcgcgccagcgcgttcccgagcgaagatccgcagaagctgaaaaccccggcagacattatgccgctctatctctggctgatgggcgacgacagccgccgcaaaaccgggatgacctttgacgcccagccgggacgtaaaccaggaatttcgcaa

SEQ ID NO: 19415 - DNA, 1606 bp, Enterobacter cloacae
atgggtaaagctctcgtcatcgttgagtccccggcaaaagccaaaacgatcaataagtatctgggtaatgactacgtggttaagtccagcgtgggtcatatccgcgatttgccgaccagtggctcagccagcaaaaagagcgcagactctacctccaccaaaggggctaaaaagcctaaaaaggatgaacgtagcgcgcttgtcaaccgcatgggtgttaacccatggcataactgggatgcacaatatgaagtgctgcccggtaaagaaaaagtcgttaacgaactgaagcagcttgctgaaaaagcagaccacatctatctcgcaaccgaccttgaccgcgaaggggaagccattgcgtggcacctgcgggaagtgatcggtggtgatgacaaacgctacagccgtgtagtgtttaacgaaattacgaagaatgcgattcgtcaggcgtttgagaagccgggcgagctgaatattgaccgcgtaaacgcacagcaggcacgtcgctttatggaccgcgttgtgggctacatggtctctccactgctgtggaagaagattgcccgtggcctgtccgcagggcgtgtgcagtccgtcgccgtgcgtctggtcgttgagcgtgagcgcgaaattaaagccttcgtgccggaagagttctgggaagtcgatgccaatgtgaccacgccgggcggtgacgctctgccgctgcaggtgagccatcacaacgacaagcctttccgtccggaaaaccgcgaccagaccatggccgccgtagcgctgttggaaaaagcacgctatcaggtgctggaacgtgaagacaaaccgaccagcagcaagccgggtgcgccgtttattacctctacgctgcagcaggctgcaagcacgcgtctgggttatggcgtgaagaagaccatgatgatggcgcagcgcctgtatgaagcgggctacatcacctacatgcgtaccgactcaaccaacctgagccaggatgcggtcaacatggtccgcggctacatcagcgacaatttcggtaagaaatacctgccggaaagcgctaaccagttcgccagcaaagagaactctcaggaagctcacgaagcgattcgtccttctgacgtctcggtgttagcggaatcgctgaaagacatggaagctgacgcgcagaagctgtatcagctgatctggcgccagttcgtggcgtgccagatgaccccggcgcagtacgactccaccacgctgaccgtcggcgcgggtgatttccgcctgaaggcgcgcggtcgtattctgcgcttcgacggctggacgaaggtgatgcctgcgctgcgtaaaggcgatgaagacagaacgctgcctgcggttaataaaggtgacgagttgtcgcttgtcgatctggttccggcacagcacttcaccaagccacctgcgcgcttcagtgaagcgtccctggtgaaagagctggaaaaacgcggtattggtcgtccatcgacctacgcgtccatcatctcgaccattccaggaccgcggctacgtgcgcgttgaaaatcgccgtttctatgcggaaaaaatgggtgagatcgtcactgaccgtctggaagcaaacttccgc

SEQ ID NO: 19416 - DNA, 897 bp, Enterobacter cloacae
atgttagataactcacgcttacgcatagctattcaaaaatcaggccgtttgagcgacgattcacgcgaactgctggcccgctgcgggattaaaattaacctgcacacccagcgcctgattgctctggctgaaaacatgcccatcgacattctgcgcgtgcgtgatgacgatattcccggcctggtcatggatggcgtcgttgacctcggcattataggggaaaacgtgctggaagaagagctgctgacccgccgcgcgcagggcgaagatccgcgttacttcacactgcgtcgtctggacttcggcggctgccgcctgtccctggctacgccggttgacgaaacgtgggacggcccggccgcgctgaacggcaaacgtattgccacctcttaccctcacctgttaaagcgttatctcgaccagaaaggcgtgcagtttaaatcctgcctgctgaacggctccgttgaagtggcgccgcgtgcgggtctggcggacgccatctgtgacctcgtctctaccggcgcgacgctggaagccaacggtctgcgcgaagtggaagtgatctaccgctctaaagcgtgcctgattcagcgcgacggcgagatggccaatgccaagcagcagctgatcgacaagctgctgacccgtattcagggcgtgattcaggcgcgtgagtccaaatacatcatgatgcacgccccaaccgagcgtctggatgaagtgattgccctcctgccgggcgccgagcgcccaaccatcctgccgctggcgggcgatcagcagcgcgtggcgatgcacatggtgagcagcgaaaccctgttctgggaaaccatggaaaaactgaaggcgctgggcgcaagctccatcctggtgctgccgattgagaagatgatggag

SEQ ID NO: 19417 - DNA, 822 bp, Enterobacter cloacae
atgaaaaaggtcgcgattgtcggtttaggatggctgggaatgccgctggcgatgtcattagccgcgaaaggctggcaggtgaccgggagcaaaaccacggcggatggggtagaggcagcgcgcatgtgcggtattgacggcgttgaactgcgccttgaaccggagctggtgtgtgatgctgacgatctggacaccctgatgaacgtcgatgcgctggtgatcacgctccccgcgcggcgcagtggcccgggcgagtcgttttatctgcaggcgatgcaggagatcgtcgacagcgcgctggcgcaccatgttccgcgtatcatttttaccagctcgacgtcggtgtatggcgaagttgagggcgtggtgaaagagagttccgagcgccgtccagtgacggcgagcggtcaggttctgaaagagctggaagactggctgcataatcttcccggcacgcaggtcgatattgtacgtctggcggggctggtgggtccaggccgccatccgggacgcttttttgccggtaagtctgcgccagacggccagcatgtcgtcaatcttgtgcatcttgacgatgttgtaggcgcgattgagctactcttacaggctccgaaaggtggacacatctataatatatgtgcaccttctcatccggcgcgcagcacgttttacccgctgatggctcgtcagctgggcctggcggcgccggttttcggtgaggcaaaggatgacagtaaaggcaaaattgttgatggcaatcgcatttgtcatgagctggggtttgagtatcagtatcccgatccgctggtgatgccaatggaa

SEQ ID NO: 19418 - DNA, 795 bp, Enterobacter cloacae
atgataaagtggccctggaaaacgaatgaagctggccgggatatggcgctgccatgggatgacgcgctgacgatccctgttctggctaatcttaagccggatgaacaagcgaaactggttcagctggcggatcgttttttacagcaaaaacgtctggttccactgcagggtttcgaactcgatcccctgaaaaacgcgcgcatcgccctgcttttctgtctgccggtgcttgagctcggcattgagtggctggacggtttccacgaggtgcttatctatcccgcgccgttcgtggtggatgacgaatggcaggacgatatcgggctggtgcacaaccagcgcgtggtgcagtccggacaaagctggcagcaggggccgattatcctgaactggctcgacattcaggactcgttcgatgcgtccggttttaatctggttatccatgaagtggcgcataagctcgatacccgcaacggcgatcgcgccagcggagtaccgctgatcccgcttcgcgaggtggcgggctgggagcacgatctgcacgcggcgatggataacatccaggatgaaatagacctggtgggcgaaagcgcggccagcattgacgcctatgcggcaaccgacccggccgagtgctttgcggtgctgtcggaatatttctttagcgcgcccgagctcttcgcgccccgtttcccggcgctgtggcagcgtttctgccagttttatcagcaggatccgctccagcgtctgcggcaaaatgaggagtctggcggccattcctcccgccagatccat

SEQ ID NO: 19419 - DNA, 1169 bp, Enterobacter cloacae
acattacttaacccgtattttggtgagttcggcgggatgtacgtcccgcaaatcctgatgcccgcgctgcgccagctggaagaagcgtttgtcagcgcgcagaaagacccggcgtttcaggctgaatttaccgacctgctgaaaaattacgccggtcgtccgaccgcgctgaccaaatgccgcaacctgacggaaggcaccaaaaccacgctgtatctgaagcgtgaagacctgctgcacggcggcgcgcataaaactaaccaggtgctgggtcaggcgctgcttgcgaagcgtatgggcaaaaccgaaatcatcgccgaaaccggtgcgggtcagcacggcgtggcctctgcgcttgccagcgccctgctcggcctgaaatgccgcatctatatgggagcgaaagacgttgagcgtcagtctccgaacgtcttccgtatgcgtctgatgggagcagaagtgatcccggtgcacagcggctccgcgacgctgaaagacgcctgtaacgaagcgtgcgcgactggtctggcagctatgaaaccgcacactatatgctcggtaccgcggcgggcccgcacccgttcccgactatcgtgcgcgaattccagcgcatgatcggtgaagagaccaaagcgcagatcctcgaaaaagagggtcgcctcccggatgcggtaatcgcctgcgtcggcggcggctccaacgccatcggtatgttcgcagactttatcgacgacaccagcgtgggcctgattggcgtcgagcctgccggtcacggcattgaatcgggtgaacacggcgcgccgctgaagcatggccgcgtggggatctacttcgggatgaaatccccgatgatgcaaaccgatgagggtcagattgaagagtcttactctatttctgccggcctcgacttcccgtccgtcgggccgcagcatgcgtatctgaacagcaccggccgcgcggactatgtctccattaccgatgacgaagcgctggaagcctttaaaacgctgtgccgcagcgaagggatcatcccggcgctggagtcttcgcacgcgctggcgcacgcgctgaaaatgatgaaagaaaatccggaaaaagaacagctgctggtggtgaacctttccggccgcggtgacaaagatatcttcaccgttcacgatattctgaaa

SEQ ID NO: 19420 - DNA, 1356 bp, Enterobacter cloacae
atgcagaccgttttagcgaaaatcgttgccgataaggccatctgggtggaagcccgcaagcaacagcagccgcttgccagtttccagaatgacgtcgtcccgagcagccgtcgtttctatgacgccctgcggggtacgcgcaccgcgtttattcttgagtgcaaaaaagcgtccccctccaaaggcgttattcgtgacgatttcgatccggcacgtattgccggcatttataagcatcatgcttcagccatctccgtgctgacggatgagaaatattttcagggcagcttcgattttctgcccatcgtcagcggcatcgcgccgcagccgatcctgtgcaaagactttattatcgacccgtatcagatctggctggcgcgtttttaccaggccgacgcctgcctgctgatgctctcggtgctcgacgatgagcagtatcgccagctttccgccgtggcgcacagcctgaatatgggcgtgctgaccgaagtgagcaacgaagaggagctggagcgcgcgattgcgctggaagccaaagtggtcggcattaacaaccgcgatctgcgcgacctgtccattgaccttaaccgtacgcgtcagctggcgccgcgtctggggtctggcgtcacggtgatcagcgaatccggcattaacagctacgctcaggtgcgcgagctgagccacttcgccaacggtttcctgattggctccgccatgatggaacatgacgatctcaatgcggctgtgcgtcgcgtgctgctgggtgaaaacaaagtctgcggcttaacccgcgaacaggatgctcaggccgcgtatgaagccggggcgatttatggcgggctgatctttgtggattcctctcctcgcgcggtcagcgtagagcaggcgcgtaaggtcatcgcagcggctccgctcagctacgtgggcgttttccgcaatgcagatattgcagacgttgcggcaaaagccgacgcgttatccctgagcgcggtgcagctccacggcgatgaagaccagatctatatcgatgccctgcgcgccgcgctggcaccacaggtgcagatctggaaagcgcaaagcgttggcgatacgttgccctcgcgtaacctgaaccacgtggataaatacgtcctcgataacggccagggcggtaccggccagcgttttgactggtcgctgctgaacggcgcaaagctggacaacgtcctgctggcgggtggattacgcccggataactgcgtagaagccgctaaaaccggctgcgcaggcctcgatttcaattcaggcgtagagtcccagccgggtatcaaagatgccagcaagctggcctcggtttttaaaactctgcgtgcatat

SEQ ID NO: 19421 - DNA, 603 bp, Enterobacter cloacae
atgaacgccgagcgttcccgtgaagcgctggatgacctgggcgtctgcttcctgtttgcgccgaagtaccacaccggtttccgccacgcgatgccggttcgtcagcagcttaaaacccgcacgctgtttaacgtgctcggcccgctgatcaacccggcccacccgccgctggcgctgattggcgtttacagcccggaactggttctgccgattgccgagacgctgcgcgtgctgggttatcagcgtgccgccgtggtgcacagcggcggtatggatgaggtttctcttcatgcgccaacgctggtggccgaactgcgcgacggtgaaatcctgagctatcagctggaggctgccgacttcggccttgcgccataccatcaggaagcgctggctggcggtacgccggaagaaaaccgtgacattctcacgcgcttattacaaggtaaaggagaggtcgcccatgaggccgccgttgctgccaacgtcgccatgctgatgcgtttgcacggtgaggaagacctgaaggccaacgttcaaaaagttctggatgtactgcgctccggtgcagcttacgatcgcgttaccgcacttgcggcaagaggg

SEQ ID NO: 19422 - DNA, 1575 bp, Enterobacter cloacae
atgacggaaaacattcataaacatcgcattctcatcctggacttcggttctcagtacactcagttggtggcgcgtcgcgtacgtgaactgggcgtttactgtgagctgtgggcgtgggatgtcacggaagcacagattcgcgaattcaatccaagcggcgtcatcctgtccggcggcccggaaagcaccaccgaagagaacagcccgcgcgcgccgcagtacgtgtttgaagctggcgtgccggtattcggcgtttgctacggcatgcagaccatggcaatgcagctgggcggccacgtagaaggctccaacgagcgcgagtttggctacgcacaggtagaagtcgtcaccgacagcgcgctggtgcgcggtatcgaagactccctgaccgctgacggcaaaccgctgctggacgtgtggatgagccacggcgacaaagtcaccgccatcccgtctgacttcgtgaccgttgccagcaccgaaagctgtccgttcgccatcatggcgaacgaagaaaaacgcttctacggcgtgcagttccacccggaagtgacccacacccgtcagggtatgcgcatgctggagcgcttcgtgcgtgacatctgccagtgtgaagccctgtggaccccggcaaaaatcatcgacgacgccgttgagcgtatccgccagcaggttggcgatgacaaggtaattctcggcctctcaggcggcgtggactcctccgtgaccgcgatgctgctgcaccgcgccatcggcaaaaacctgacctgcgtattcgtggacaacggtctgctgcgtctgaacgaagcccagcaggtcatggacatgttcggcgaccacttcggtctgaacatcgttcacgtggaaggcgagcagcgcttcctggacgcgctgaaaggcgagaacgatccggaagccaaacgtaaaatcatcggccgcgtgttcgtggaagtgttcgacgaagaggcgctgaagctggaagacgtgaagtggctggcgcagggcaccatctaccctgacgtgatcgagtctgcggcctctgcaaccggtaaagcgcacgtcatcaaatctcaccacaacgtgggcggcctgccgaaagagatgaagatgggcctggttgaaccgctgcgcgagctgttcaaagacgaagtgcgtaagatcggtctggaactgggtctgccgtacgatatgctctaccgtcacccgttcccgggtccgggtctgggcgtgcgcgtgctgggcgaagtgaagaaagagtactgcgacctgctgcgtcgcgcggacgcgatcttcatcgaagagctgcacaaagctgacctgtacaacaaggtaagccaggcgttcaccgtgttcctgccggttcgctccgtcggtgtgatgggcgatggccgcaagtacgactgggttgtttccctgcgtgcggtggaaaccatcgacttcatgaccgcgcactgggcgcacctgccgtatgacttcctgggccgcgtgtctaaccgcatcatcaacgaagtgaacggtatttcccgcgtggtgtatgacatcagcggtaagccaccggctacgattgaatgggaa

SEQ ID NO: 19423 - DNA, 2580 bp, Enterobacter cloacae
tcggtgaccgcgcaagaaaaacaaaccttgttaacgcacctgaaccgtgaacacggttctacgcctgacaagttaacgctgcagcgcaaaacgcgcagagcggtaaacatccctggtaccggtggcaaaagcaaatcggtacaaattgaagtccgcaagacgcgcacctttgtaaaacgtgatccgcaagaggcagaacgccttgccgcggaagagcaggcacagcgtgaagcggaagaacaagctcagcgtgaggcggaagcagccgccaaacgtgaagcagaattaaaagctgaacgtgaggccgcagaaaaagcgaaacgcgacgcaagtgataaagtgaagcgtgacgctgcggaaaaagacaaagtgagcaatcaacagacagacgaaatgaccaaaaccgcccaggctgaaaaagcccgccgtgaaaatgaagctgccgagctgaagcgtaaagcggaagaagaagcccgccgtaagctggaagaagaagctcgccgcgtcgccgaagaagcgcgccgcatggcagaagaaaacgagaagaatggtgtgaataccgttgagccgactgaagacaccagcgactatcacgtgaccacttctcagcatgcgcgtcaggctgaagatgataacgaccgtgaagtagaaggcggccgtggccgtggtcgtaatgcaaaagcagcgcgtccggcgaaaaaaggcaacaagcacgctgaatccaaagctgaccgtgaagaagcacgcgcggctgttcgcggtggtaaaggcggcaagcgtaaaggttccgcgctgcagcagggcttccagaagccggctcaggccgttaaccgtgacgtcgtgattggcgaaaccattaccgttggcgaactggcgaacaagatggcggttaaaggctctcaggtcatcaaagcaatgatgaagctgggtgccatggcgaccatcaaccaggtcatcgatcaggaaaccgcacagctggttgctgaagagatgggtcataaagttatcctgcgtcgtgaaaacgagctggaagaagcggtaatgagcgaccgtgatactggtgctgcggctgaaccgcgtgcaccggttgtgaccatcatgggtcacgttgaccacggtaaaacctctctgcttgactacattcgttctactaaggttgcctctggtgaagcgggtggtattacccagcacattggtgcttaccacgttgaaactgacaacggtatgatcaccttcctggatactccgggccacgccgcgtttacctcaatgcgtgctcgtggtgctcaggcgacggatatcgttgttctggttgttgctgcagacgacggcgtcatgccgcagaccatcgaagctatccagcacgcgaaagcagcaggtgtgccggttgtggttgcagtgaacaagatcgataagccagaagcggatcccgatcgtgttaaaaacgaactttcccagtacggtattctgccggaagagtggggcggcgaaagccagctcgtacacgtgtctgcgaaagcgggtaccggtatcgacgaactgctggacgcgatcctgctgcagtccgaagttctggagctgaaagccatccgtaacggtatggcgagcggtgcggttatcgaattcttcctggataaaggacgtggcccggttgctaccgttctggttcgcgaaggtacgctgcataaaggcgatatcgttctgtgcggtttcgaatacggtcgcgttcgtgcgatgcgtaacgaactgggtcaggaagtgctggaagcaggtccgtccattccagtggaaatcctgggtctgtccggtgttccggctgccggtgacgaagtgaccgtggtgcgtgacgagaagaaagcgcgtgaagtggcactgtatcgtcagggtaaattccgtgaagttaaactggctcgtcagcagaaatctaaactcgagaacatgtttgccaacatgaccgatggcgaagttcacgaagtgaacatccttctgaaagccgacgttcagggttctgtggaagcgatctccgactccttgctgaaactgtctaccgacgaagtgaaagtgaagatcatcggttctggcgtaggtggtatcaccgaaaccgacgcgaccctggctgctgcctccaacgctatcctggttggcttcaacgttcgtgcggatgcatctgcgcgtaaagtgattgaagctgaaagcctggatctgcgctactactccgtcatctataacctgatcgacgaagtgaaagcagcgatgagcggcatgctgtctcctgagctgaaacagcagatcatcggtctggctgaagtacgtgacgtgttcaaatcaccgaaattcggtgcgatcgcgggctgtatggttaccgaaggtaacatcaagcgtcacaacccaatccgcgtactgcgtgacaacgtggttatctacgaaggcgagctggaatccctgcgccgcttcaaagatgacgttaacgaagtccgtaacggcatggaatgtggtatcggcgtgaagaactacaacgacgttcgcgttggcgatatgatcgaagtgttcgagatcatcgaaattcagcgtaccatcgct

SEQ ID NO: 19424 - DNA, 941 bp, Enterobacter cloacae
atgagtcgtcctcgtcgtcgcggtcgcgacgtgcatggtgtgctgctgctggataaaccccagggcgcttccagcaacgacgtgctgcaaaaagttaagcgtatttataacgccaaccgtgcgggccacaccggcgcgctcgatccgctggcaaccggcatgctgccggtctgcctgggagaggcgacaaagttttcccagtacctgctcgactccgataagcgctaccgcgttatcgctaaactgggccagcgcacggatacctccgacgcggatggccaggtggtggaagagcgtccggtgacgttcagcgcggaacagcttgatgctgcgctggagagcttccgtggagacacgatgcaggtgccgtcgatgtattcggcgctgaaatatcagggcaagaagctctacgaatatgcgcgccagggcattgatgtcccgcgtgaagcccgtccgataaccgtgtatgagctgctttttattcgccacgaaggcgatgagctggagctggaagtacactgttcgaaagggacctatattcgcaccatcatcgacgacctcggtgaaaagctgggctgcggtgcgcatgtgatttacctgcgccgcctggcggtaagcaagtacccggtggagcggatggtgaccctggaacatctgcgcgagctggtagaacaggcggaagcgcaggggatcgcgccggcagatttgctggatcccttgctgatgccgatggacagtccggcagcggacttcccggttgttaatcttcctttaacatcgtccgtttactttaagaacggcaacccggttcgtacggcggaagcgccgctggaaggactggtacgcgtgaccgaaggtgacgaagggaaattcatcggtatgggcgaaatggatggcgaagggcgcgttgcccgcgtcgtctggtcgtcgaatatccggtc

SEQ ID NO: 19425 - DNA, 249 bp, Enterobacter cloacae
atggcacaagaaatcgaattaaagtttatcgtcgaaaaagacagcgttgacgcactccgccagcatctgcatacgctttccggcgaacaccatgcaccggtacaactgcttaatatctattatgaaacgccagacagctggctgcgccgccatggatatggggctgcgcatccgcggcgcgagcgggcgctacgagatgacgatgaaaatttccggccggcgtggtcggcgggttgcatcagcgcccgg

SEQ ID NO: 19426 - DNA, 1214 bp, Enterobacter cloacae
tatcttgtcggtggtgcggtacgtgatgcgttgttaggtctgccggtcaaagataaagactgggtggtggttggcgccacccctgaagagatgctcgacgcgggctaccagcaggtaggccgcgattttcccgtgttcctgcacccgaaaagccgtgaagagtatgccctggcgcgtaccgagcggaaatcgggctcgggctatacgggcttcacctgctatgccgcgccggacgtcacgctggagcaagatctcctgcgccgcgatctcaccatcaacgcgctggcgcaggacgaagacgggcagatcgtagatgcctatggcggtcaggacgatctgcgcaaccgccttttacgtcacgtttctccggcgttttctgaagatccgctccgcgtgctccgccgtggcgcgcgtttgccgcgcgttacgcccatctcagtttccgtattgccgatgaaacaatggcgctgatgaccgccatgaccgaggcgggcgagcttgaacacctgacgccagagcgcgtctggaaagagacggaaaatgccctcaccacgcgcaacccgcaggtctttttccaggtcctgcgcgactgcggcgcgctgaaggtgctgttcccggaaatagacgcgctgttcggcgtgcctgctccggcgaaatggcacccggaaattgataccggcgtacacacgctgatgacgttgagcatggccgccatgctcagctctgacgtggacgtgcgcttttccaccctgtgccacgatctcggcaaaggcctaacgccaaaagaattctggcctcgccaccacgggcacggcccggcaggggtgaagctggtcgaggggctgtgccagcgtctgcgcgtgccgaacgagatccgcgatctggcgaaactggtggccgagttccacgatctgatccacaccttcccgatcctgaagccggccaccatcgttaagcttttcgataacatcgacgcctggcgcaaaccccagcgcgtagagcaaatcgcgctcaccagcgaagctgacgtgcgcggtcgtaccgggtttgaagcgtgcgattacccgcagggacggttactgcgtaaagcctgggacgtagcgaaagcggtgcccacgaaggacgttgtcgaagcgggattcaaaggaccggaaattcgcgaagagctcacgaaacggcgaattcaggcggtgtcggactggaaggaaaagcat

SEQ ID NO: 19427 - DNA, 183 bp, Enterobacter cloacae
atgatgcgtactttcatcaagaaagtatacgcagcaatcgaagcaggcgacaaagctgcagcgcagaacgcatttaacgaaatgcaaccaatcgtggatcgtcaggctgctaaaggtctgatccacaaaaacaaagcagcgcgtcataaagcaaacctgaccgcgcaggtcaacaaactggct

SEQ ID NO: 19428 - DNA, 2920 bp, Enterobacter cloacae
ctcttcatttatcgcccggtggcgacgatattaatctcgctcgccattaccctctgcggcgtgctgggcttccggctgctgccggtggcccccctgccgcaggtggatttcccggtgatcatggtcagcgcctcgctgccgggcgcgtcaccggagaccatggcctcgtcggttgccacgccgctggagcgttcgctcgggcggattgcgggggtcaacgagatgacctccagcagctcgctgggcagcacgcgcatcattctggagttcagcttcgaccgggatattaacggtgcggcgcgcgacgtgcaggcggccatcaacgccgcacaaagcctgctgccgagcgggatgccgagccgcccaacctaccgcaaggccaacccgtccgatgcgccgatcatgatcctgacgctgacctcggacacgtattctcaggggcagctttacgactttgcgtctacccagctggcgcagaccatctcacaaattaacggcgtcggtgacgtgagcgtcggcgggagctccctgcccgccgtgcgcgtgggcctaaacccgcaggcgctgttcaaccagggcgtgtcgctggatgacgtgcgctccgccatcagcacggccaacgtccgcaaaccgcagggggcgattgaggacggtagccaccgctggccagatccacactaacgacgatctgaaaaccgccgcggaatatcagccgctcattattcactacaacaacggcgcggcggtgcgcttgagcgacgttgccagcgttaccgactcggtgcaggacgtgcgcaacgccgggatgaccaacgcgaaaccggccattctgctgatgatccgcaagctgccggaagcgaatattattgagacggtgaacagcattcgcgcccgtcttccggacctgcaggagaccatcccggcagcaatcgatctgcaaattgcccaggatcgctccccgaccattcgcgcttcgcttgaagaggtggagcaaacgctgattatctccgtcgcgctggtgatcctggtggtcttcctgttcctgcgatccggccgcgcgacgcttattccggcggtggccgtgccggtctcgctgatcggtacctttgccgccatgtacctgtgcgggtttagcctcaacaacctgtcgctgatggccctgacgatagcgacgggcttcgtggtggatgacgccatcgtggtgctggaaaacatttcccgccacctggaagcgggcgtgaagccgcttcaggccgcgctgcagggcacgcgcgaggtgggctttacggtgctctccatgagcctgtcgctggtggcggtattcctgccgctgctgctgatgggcgggctgccgggcaggctgctgcgcgagtttgccgtcaccctctccgtcgccatcggcatttcgctggcgatctccttaacgctgacgccgatgatgtgcggctggatgctcaagcgcagcaaaccgcactcgcagcctcgtcgcaaaggctttggtcgcttcctgatggcgatgcaggaaggctacggcaaatcgctgaagtgggtgctgaaccatacgcggctggttggcctggtgctgatcggcaccatcgtgctcaacgtctggatgtacatcaccatcccgaaaacgttcttcccggagcaggacaccggcgtgctgatgggggggattcaggcggaccagagcatttcgttccaggcgatgcgcggcaagctgcaggacttcatgaagatcattcgtgaagacaaagccgtggataatgtcaccggctttaccggcgggtcacgcgtcaacagcgggatgatgtttattaccctgaaaccgcgcggcgagcgcaacgaaaccgcccagcaggtgattgaccgcctgcgggtgaagctcgccaaagagccgggggcaaacctgtttttgatggccgttcaggatatccgcgtcggcggccgtcaggcgaacgccagctatcagtacacgttgctctcggacgatttagccgccctgcgggagtgggagccgaagatccgcaaggcgctggccgccctgccgcagctggcggacgtcaactccgatcagcaggataacggcgccgagatggccctgacctacgaccgcgaaaccatgtcgcggctgggcattaacgttgaagccgccaacagcctgctgaacaacgccttcggccagcgcgagatctccaccatctaccagccgatgaaccagtataaggtggtgatggaggtcgatccgcgctacacccaggacatcagcgccctggacaaaatgtttgtgattaacaacgacggcaaggcgattccgctctcctactttgccagctggcagccggccaacgcgccgctgtcggtgaaccaccaggggctatcggcggcgtcgactatctcctttaacctgcccgccggttcgtcgctttctgaagccagcgacgcaattaaccgcgcgatgacgcagcttggcgtgccgtccaccgtgcgcggcagctttgccggcaccgcgcaggtgttccaggagacgatgaattcgcaggtgattttgattctggccgccatcgccacggtttatattgtgctgggcgtgctgtacgagagctacgttcacccgctgaccattctctcgacgctgccgtcggcgggcgttggggcgctgctggcgctggagctgttcggcgcgccgttcagcctgatcgcgctcatcggaatcatgctattaattggtattgtgaagaaaaacgcgatcatgatggtcgacttcgcgctggacgcccagcgtaacggcaatctatcgccggaagaggccagcggccaggcctgcctgctgcgttttcggccgagcaggatgaccaccctggcggcgctgtttggcgcctgccgcgggtgatctcgggcggcgacggctccgagctgg

SEQ ID NO: 19429 - DNA, 1485 bp, Enterobacter cloacae
atgtttcgtcagtggttagcgttagtgattatcgtgctggtgtatatcccggtggcgatcgacgcgacggtgctgcacgtggcggcgccgacattgagcatgacgctgggcgccagcggcaatgagttgctgtggatcatcgatatttactcgctggtgatggcgggaatggtgctgccgatgggcgccctgggtgaccgcattggttttaaacgactgctcatgattggcagcacgctgtttggcctgtcgtcgctggcggcagcatttgccccgtcagcagggtggctgattgcggcgcgcgcctcgctggcaatcggcgcggcgatgattattccggccacgctggctgggatccgcacgctgtttatcgacgcgcgggatcgtaacattgcgctcggcgtctgggctgcggtgggctccggtggcgcggcgtttggcccgctgattggcggtatgctgctcgagcatttttactggggatcggtgtttttaatcaacgtgccgatcgtgctggtggtggtttcgctggcagcgcgtttggtgcctcctcagaaggggcgtccggagcagccgctgaatatcagtcatgccattatgctgattgtggcgattttgctgctggtctacagtgcgaaaaccgcgctaaaaggcgttctgtcaccgtgggtggtcgcgtccgcgctggtgaccggctcggtgctgctgtttatcttcgtgcgtattcagctccgcgcccgcgtgccgatgatcgacatgcgtctgttctgccatcgcatcattttgagcggcgtggtgatggcgatgaccgccatgattgccctggtcgggtttgagctgctgatggcccaggagctgcagtttgttcatggctttacgccgtttgaagcgggaatgttcatgctgccgctgatggtggcgagcgggtttagcggaccgatcgcgggtgtgctggtgggtcgtctcggtctgcgcattgtggcggctggcggaatggggctcagcgccgtcagctttatcggcctgtcgatgctcgacttcagcacgcagcagctgctggcttctgccctgatggttctactcggcttcagcgccgccagcgcgctgctggcctcgacctcggcgattatggccgctgcgccgaaagagaaagccgccgcggcaggggcgattgaaaccatgtcctatgagctgggcgcagggctggggatcgccatctttggtctgttgttgacccgcagcttctcggcgtcgattgacctgccgcaggggctgaacgcctcgctcgcagataaagcctcgtcatccattggtgaggcgatgaaggtggcgcaggatctgaccccgacgctggcggagtcggtgattgaggcggcgaaaagcgcgtttatcacttcgcacagcgtggcgctgggcagcgcgggcggaatgctgctgctgttggcagtggggatctggtttagcctggcgaaggccaagccgcag

SEQ ID NO: 19430 - DNA, 753 bp, Enterobacter cloacae
atggtgatgtttgcctacggcggtatcgagattatcggtattaccgccggggaagcgaaagatccggagaagtccattccgcgcgccatcaactcggtgccgatgcgtattctggtgttctacgtgggtacgctgttcgtgattatgtccatctacccgtggaatcaggtaggcaccaacggtagcccgtttgttctgaccttccagcatatggggattgcctttgcggccagcattctgaactttgtggtgctcaccgcgtcgctctccgcgattaacagtgacgtctttggcgtgggccgtatgctgcacggcatggcggagcagggcagtgcgccgaaggtgttcgccaaaacctcacgccgcggcacgccgtgggtgaccgtcgtggtgatgaccgtggcgctgctgttctcggtttacctgaactacatcatgccggagaacgtcttcctggtgatcgcatcgctggcgaccttcgcgacggtgtgggtgtggattatgatcctgctgtcgcagatcgcattccgtcgtcgtctgtcgccggatgaggcgaaagcgctgaagttcaaagttccgggcggcgttgcgacgaccgtggtcgggctgatcttcctggtgtttatcattgccctgattggctaccatccggatacccgcatttccctgtacgtgggctgcgcgtggatcgtcctgttgctggtgggctgggtgtttaaatgccgccgcgaccgtcagctggcggaagcgcag

SEQ ID NO: 19431 - DNA, 1438 bp, Enterobacter cloacae
gacctgagcagcgggcagccgcgtcgtcgctacagcttcaaactgctgtggaataaccgccagctgtggtttaccccgcaggggtttagccgtttcccgcccgcacggctggagcagttcgcggtcgattacccggataacggcccgcagtgggttaacgatcaggtgttttaccagattttcccggaccgttttgcgcgcagcgaaaaacgcactgccgaccaggataagatctatcaccaccatgcggcgggctacgacattatcctgaaagcgtgggatgagcccttaaccgcgcaggcgggcggatccactttttacggcggcgatctcgacggcatcagcgaaaagctgccgtatctgaaaaagctcggcgtgacggcgctgtatctcaacccggtgtttaaagccccgagcgtgcacaaatacgataccgaagattatcgccacgttgacgcgcagtttggcggtgacgaggcgctgctgcgcctgcgtaagaacacccaaaacgaaggcatgcgcctgattctggacggcgtgttcaaccacagcggagattcgcacgcctggtttgaccgtcataaccagtcgatgggcggggcatgtcataacccggagtcgccgcagcgcgactggtacagctttaacgaggagggccgcgcgctggactggctgggttacgccagcctgccgaagctggatttccagtcgccaacgctcgtgaatgaaatctacggcggtgaagacagcatcgtccgtcactggctgaaggcgccgtggaatatggacggctggcgtctggacgtagtgcatatgctcggcgaagcgggacggggcgcggaataaccttcagcacgtcgccgggattacgcgctcggcaaaagcggcccagccagaggcgttcgtctttggcgagcactttggcgacgcgcgccagtggctgcagaacgatgcggaagatgcggcgatgaactatcgcggctttaccttcccgctgtggggattcctcgctaacaccgacatctcctacgatccgaatcatatcgacgctgaaacctgcatggcgtggatggagaactatcgcgccggtctgtctcatcagcagcagctgcggatgttcaaccagctcgatagccacgataccgcccgctttaaatccctgctcggcaaggatgtggcgcgtctgccgctggcggtgacctggctcttcacctggccgggcgtgccgtgcatctattatggagatgaagtggggctggacggcaacaacgatccgttctgccggaaaaccttcccgtgggagccagagaagcaggacaaggtgctgttcagcctgtatcagcggctggcgaagctgcgtaagcagagtctcgcccttcgctacggcggctgtcaggtggtgtatgcccacgataacgtggtggtgtttgctcgcgtc

SEQ ID NO: 19432 - DNA, 1050 bp, Enterobacter cloacae
ttgctggtatcaatctacgccctgggcgtcgccgtcggtgcgccagtgctgacggccctgaccggacgttttccgcgtaagcagctgctagtcgcactgatggtgctgttcaccgccggcaacgttctggcctggcaggcgccggactacaccacgctggtgattgcccgtctgttgaccggccttgcacacggcgtgttcttctcgattggttccaccatagcaacaagcctggtgcccaaagagaaagcggcttcagctattgcgatcatgtttggtgggttgaccgtcgcactcgttacgggcgtaccgctgggaacgtttatcggacaacacttcggctggcgtgaaacgtttctggccgtctccttgctgggcgtcatcgccctggtggccagcctgctgctggtaccgtcgaatattcctggtcgggcgagcgccagcctgcgcgatcagctgaaggtactcacgcatccgcgattgctgattatctacgcggtaactgcgctgggctatggtggagtattcaccgcctttaccttcctggcgccgatgatgcaggacctggcgggcttctcacccaatgccgtgagctggattttgctgggatacggtatttccgttgccattggcaatatctggggcggcaagcttgcggataagcatggtgcggtaccggcactgaaattcatcttcgctgccctggttgttctgctgatgattttccagttcacggcttcgctacactacgccgcgctggtcactgtgctggtcatggggatctttgcctttggaaatgtccctgggcttcaggtttacgttgtccagaaagccgagctctatacgccaaatgcggtggatgtggcatcggggctgaacattgccgcatttaatattggcattgcgctgggctccatcattggcggacaaaccgtagcgcatgttgggttaacccagactccgtggattggcgcggtgattgtcctggtggccttcctgctgattggcctgagtgggcgccttgataaacctgctcgcgtcgcgctgggt

SEQ ID NO: 19433 - DNA, 1662 bp, Enterobacter cloacae
atgtgttcaatttttggcgtactggatattaaaactgacgcgggcgaactgcgtaaaaaggcactcgaactgtcccgcctgatgcgccaccgcggtccggactggtcaggcgtttacgccagtgacaaagcgattctggctcacgaacgtctgtccattgttgacgtcaacgccggtgcacagccgctgtataacgagaaaaaaacgcacgcgctggctgtcaacggtgaaatctacaaccaccaggctctgcgcgccgaatacggcgaccgctacgcgttccaaaccggttctgactgtgaagtgatcctggcgctgtatcaggagaaagggcccgagttcctggacgacctgcagggcatgtttgccttcgccctgtacgacagcgaaaaagacgcttacctcattggccgtgaccatatcggcattatcccgctgtacatgggccactatgagcacggcaacttctacgtcgcctctgaaatgaaagccctggtgccggtatgccgcaccattaaagagttcccggcgggcagctatctgtggagcaaagacggcgagatccgctcctattaccagcgcgactggttcgactatgatccggtgaaagacaacgtgacggacaaagccgagctgcgtcaggccctggaagattccgtgaaaagccacctgatgtccgacgtgccgtacggcgtgctgctctccggcggtctgaactcctccgtgatctccgcgatcaccaagaaattcgcggcccgtcgcgtggaagatcaggagcgctcagaagcctggtggccacagctgcactcttttgccgttggcctggaaggcgcacctgacctgaaagccgcgcaggaagtggcgaaccacctcggcaccgtgcaccatgagattcacttcaccgtgcaggaaggtctggatgcgatccgcgatgtgatctatcacattgaaacctatgacgtaaccactatccgcgcctcaacgccgatgtacctgatgtcgcgtaagatcaaagcgatgggcatcaagatggtgctctccggtgaagggtctgacgaagtgtttggcggctacctgtacttccacaaggcgccaaacgccaaagagctgcacgaagagaccgtgcgcaagctgcaggctctgcacatgttcgactgtgcgcgtgccaacaaagcgatgtcggcctggggcgtggaagcgcgcgtgccgttcctcgataagaaattcctcgacgtggcgatgcgcatcaacccgcaggacaagatgtgcggcaacggcaaaatggaaaaacatatcctgcgtgaatgttttgaatcctacctgccggcgagcgtggcatggcgtcagaaagagcagttctctgatggcgtaggctatagctggatcgacaccctgaaagaggtcgcggcgaaacaggtttctgaccaacagctggaaaccgcgagcttccgcttcccgtacaacacgccgggctcgaaagaggcctatctgtatcgtgaaatttttgaagagctgttcccggtaccgagcgccgcggagtgcgtaccgggtggcccgtccgtcgcctgctcttctgccaaagcgattgaatgggatgaatctttcaaatccatgaacgatccgtcaggacgcgcggtaggcgttcaccagtcagcctacaaa

SEQ ID NO: 19434 - DNA, 1218 bp, Enterobacter cloacae
atgacacctggcggacaagctcaaatcggtaatgtcgatctcgttaaacaacttaacagtgcggcggtataccgcctgattgaccagcacggaccaatctcgcgaattcagatagccgaacaaagccagcttgctcccgccagcgtgacaaaaattacccgccagctcattgagcgcggtctgatcaaagaagtcgatcagcaggcctccaccgggggccgccgcgccatctccattatcaccgaaacccgcaattttcaggcgattggcgtccgtctgggccgccatgacaccacgcttacgctttacgatctgagcagtaaagccattgcggaagagcattaccctcttccggagcgcacccaagagacgctggagcatgcgctgctgaataccatcgcgcagtttattgaaagctgtcagcgcaagatccgcgaactcatcgccatctccgtgattctgcccggcctggtcgacccggaaagcggcgtgatccgctatatgccgcacattcaggtggaaaactgggggctggtcgacgcgctggaaaagcgttttaaagtgacctgctttgtgggccatgacattcgctcgctggcgctggcagagcactactttggtgcgagccaggactgcgaagactctattctggtgcgcgttcaccgcggaacgggcgccggtattatctctaacggccgtatttttattggtcgcaacggtaacgtcggcgagattggccacattcaggttgagcctctcggggagcgctgccactgcggcaacttcggctgtcttgagaccattgccgccaacacggccatcgagcagcgcgttcgccatctccttgaacagggttaccaaagccgcgtcacgctggacgattgcaaaattggcaacatttgcaaagccgccaataagggtgacgcgctggcctgcgaagtgatcgaacaggtaggccgtcatctggggaaaaccatcgccatcgccattaacctgtttaacccacaaaaagtggtgatcgccggtgaaattgtggaggcggaaaaggtgctgctccccgccattgaaggctgtattaacacccaggcgctgaaagcattccgccagaacctcccggtggttcgttcaaagcttgaccatcgctcggcgattggcgcgttcgcgctggtcaaacgcgccatgctcaacggaattctgctgcagcatttgctggaaagt

SEQ ID NO: 19435 - DNA, 798 bp, Enterobacter cloacae
atgagactgattcccctggcaactgctgaacaagtcggtaaatgggccgctcgccatatcgttaaccgtattaacgcctttaaaccgaccgcagatcgtcctttcgttcttggacttccgacaggcggcacgcgcatgaccgcctataaggcgctggttgagatgcataaagcaggccaggttagcttcaaacatgttgtgaccttcaatatggatgaatacgttggcttaccgaaagaccacccggaaagctaccatagctttatgcaccgcaatttctttgatcacgttgatattccatctgaaaatattaacctgctgaatggaaacgcgcctgatattgacgcagaatgccgtcagtatgaagaaaaaatccgttcttacggtaagatccacctgttcatgggtggcgtaggcaatgatggtcatatcgcgtttaacgaaccggcgtcatctctggcttcccgcacccgtattaaaacgctgacccatgacacgcgcgtggcaaactcccgcttctttgacggcgatgttaaccaggttccaaaatacgccctgaccgttggcgtaggcaccctgctggatgccgaagaagtgatgattctggtgctgggcggcgtgaaagcgcaacgcatccaggctgccgttgaaggcaacgtaaaccatatgtggaccatcagctgcctgcagctgcatccgaaatcagtcatcgtctgtgacgaaccgtccacgatggagctgaaggttaaaacgctgaaatacttcaacgagttagaagctgagaacatcaaaggtctg

SEQ ID NO: 19436 - DNA, 1683 bp, Enterobacter cloacae
atgaaaacgctgctgatcattgactccggtctcggacaggctcgcgcctatatggcgaagaccttgctgggagcggcggcgaacaaagcacatctcgagatcattgataacccgggcgatgcagaactggtcattgtcctgggcgataagatcccggctgacagtgcgctgaacggcaaaaaagtgtggctgggcgatattaatcgcgcggtggcacatccggaactgttcctgagcgaagcgaaagggcacgcgtctgtctacagcgcgcctgtcgcgacggcaccggctgcggccacgggtccgaaacgcgttgttgcggtgacggcctgcccgacgggcgtggctcacacctttatggcggctgaagccattgaaaccgaagcgaaaaaacgcggctggtgggttaaagttgaaacgcgcggctccgtcggtgccggcaacgctatcacccctgaagaagtggctgaggccgatctggtgatcgtggcggcggatatcgaagtggacctggcgaaatttgccggtaagccaatgtaccgcacgtctaccggcctggcgctgaaaaagaccgcgcaggagtttgataaagcgctggtggaagcgaagccgtatcagacaaccggcgcgcgtcaaaccgcgacggaaggtaagaaagagtctgcaggcgcctatcgccatctgttgaccggtgtgtcttacatgctgccgatggtggttgcgggtggtctgtgtatcgccctctcgttcgcatttggtattactgcgtttaaagagcaaggcacgctggccgctgcgttaatgcagattggcggcggctccgcgttcgcattgatggtaccggtactggcaggctttattgccttctccatcgctgaccgtcctggcctgacgccgggccttatcggcggtatgctggccgtgagcaccggttctggctttatcggcggtattatcgcgggcttcctggccggttacgtcgcgaagctcatcagctcgaagctcaagctgcctcagagtatggaagcgctgaaacctattctgattatcccgctgatttccagcctggtggtcggtctggcgatgatttacctgattggtaagccggttgcgggcattctggcgggtctgacccactggctgcaaaccatgggtaccgcgaacgcggttctgctgggtgcaatcctcggcggcatgatgtgtaccgacatgggtggtccggtgaacaaagcggcgtacgcctttggcgttggcctgctgagtacccagacctacgcgccaatggcggcgatcatggcggcaggtatggtacctcctctggcgctcggcctggcgacgattattgcccgtcgtaagttcgataaagcgcagcaggaaggcggcaaagcggcgctggttctgggcttgtgcttcattaccgaaggggcgattccgttcgcggctcgtgacccaatgcgtgtactgccgtgctgtatcgcgggtggtgcagtgacgggtgcgatctccatggcgattggcgcgaagctgatggcaccacacggcggtctgtttgtcctgctgatcccaggcgccatcaccccggtcctgggctacctgctggccatcgttgccggtacgctggtggcgggtctctcttacgcagtgctgaaacgtcctgaagcggaagttgtggcgaaagcagcg

SEQ ID NO: 19437 - DNA, 1130 bp, Enterobacter cloacae
atgttccagttatctgttcaggatatccacccgggcgctcaggccggggataaagaagaggctattcgccaggttgccgctgcgcttgtgcaggcgggtaacgtcgcggacggctatgtaaacggcatgctggcccgcgagcagcagacctcaaccttcctcggaaatggcattgccattccgcacggtacaaccgacacccgcgatcaggtgctgaaaaccggcgttcaggtttatcaattcccgcagggcgtgctctggggcgacggtcaggtggcgtatgtggctatcggtatcgcggccagcagcgacgaacacttaggcctgctgcgtcactgacgcatgtcctgagcgatgacgacgtggctgagcagctcaagtccgctaccacagctgaagagctgcgcgccctgctaatgggcgaaaaacagagcgaagcgctgaaactggataatgaaacgctgacgctggacgtgattgcctccgatctggtgacgctgcaggcgctgaacgcgggtcgtctgaaagaagccggcgcggcggatgccacctttgtgacgcgcgcgattaacgataagccgttgaatctgggtcagggtatctggctgaacgacagtgctgaaggcaacctgcgcagcgctatcgccgtgagccgcgcggccaatgcgtttgacgtggaaggcgagcgtgcggccatgctggtgaccgtggcgatgaacgacgatcagccggtttccgtgctgaagcgtctgggcgatctgctgctgaacaacaaagctgaaaaactgctgaacgctgatgcctctaccgtgctggcacttttgaccagtgatgatgcgccgaccgaagacgtgcagaccgctgagttcgtggtacgcaacgagcacggcctgcatgcccgtccgggcaccatgctggtgaataccattaaacaattcgagagtgagatcaccgtggcgaatcttgatggcacgggcaaaccggccaacggccgtagtctgatgaaagttgtcgcgctgggcgtgaagaaaggacatcgtctgcgtttcaccgcacagggtgccgatgctgaacaggcgctgaaagcgattggcgacgccatcgcggcgggtctgggggagggcgcataa

SEQ ID NO: 19438 - DNA, 530 bp, Enterobacter cloacae
atgcataacacccctgcggccgtctcgccgaagccctttgacttgacctcagcagccttcctgattgttgcctttttcacgggcattgccggcgcgttacagacgccgacgctgagcttatttctgaccaatgaggttcatgttcgtccggcaatggtcggcttcttttttaccggaagcgccatcatcggcatcctggtcagccagtttctggcgggacgatccgacagaaaaggcgatcgtaaaagcctgatcgttttctgctgtctgctgggggtcatggcctgcgttctgttcgcctggaaccgcaactatttcattctgctcttcgtcggggtattcctgagcagctttggctcaacggcgaacccgcagctgtacgcccttgcccgctaacacgccgaccataccggacgtgaagcggtgatgttcagctccgtcctgcgtgcgcaggtgtcgctggcgtgggtgattggccgccgctggcctacgcgctggcgatgggtttttgctttacggtgatgtacctg

SEQ ID NO: 19439 - DNA, 3093 bp, Enterobacter cloacae
atgccgcatttttttattgaacgccccgttttcgcttgggtagtagcgctttttatcgttctggcaggactcctgtctattccccgtttaccggttgcgcagtatccggcggtagcaccgcctggaatcattatttccgtcagttatccgggggccagtcccgatatcatgaacacgtcggtggtatcgttaatcgagcgcgaaatctctggcgtagataatttgctctactttgaatcatccagtgacacaaccggttcggcatcgattaccgtcacgtttaaaccgggcacggacatcaagctggcgcagatggatctgcaaaatcagattaagatcgtcgagcctcgtctgcctcaggcggtaaggcaaaacgggattaacgtcgaggccgctaactctggctttttaatgatggtggggcttaagtccgcgacgggtcaatttgaggaagccgatttaagcgactattttgcaagaaacgtcagtgacgagcttcgtcgcgtgcccggcgtagggaaatttcagctgtttggcggcgaaaaagcgctgcgcatctggttggatcccatgaagctccacggctacgggctttcggtaagcgatgttcttaccgccgttggccagcaaaatgccctggtttcgcccggcaaaacgggagatgagcccgccgctgcaggacaaggggtgacgtatcccatcacagtgaagggacagctctcctcggtagaggcgttcaggaatatcaccctgaaatctgacgcatccggcgcccgcctgaggctgtccgacattgcgcggattgaatctggtctgcaaagctacgcttttggtatccgcgaaaatggcgtgcccgcaacggcggcggcaatccagctatcgcctggcgccaacgcaatgagtacggcttccggcgtacgagcgcgcatcgacgaactttcccgggtgttacccgaaggaatggcgtttacgatccccttcgataccgcgccgtttgtgaaactttctatcatgaaggttgttcagacatttgtggaagcgatggtcctggtcttcctggttatgctgctgtttctgcacaagatacgctgtacgcttatcccggcgattgttgcgcccgtcgcccttcttggcaccttcaccgtgatgctgttgagcggctactccatcaatattctgacgatgttcggcatggtgctggcgatagggattatcgttgatgatgccattgttgtcgtagaaaacgtcgaacggctgatggaggaaaaaagcctgtccccgcgtgacgccacgcggcaagccatgcaggaaatcaccccggcgattattggcatcacgctggtgctgaccgccgtctttatccccatggggtttgcggaaggatccgtcgggattatctaccgacaattttgtatttccatggcggtctccatactgctgtccgcgtttcttgccctgacgctgacgcctgccctgtgcgcaacgttactcaagccgcataaggcaggaaagagcggaggcggaaggttcgcggtcgggtttaacgcgcgctttcgttcgctcaccgcctgttacgaagccgggctgggtgccattctgaagcgaaccgggcgtatgctgctcctgtacgctgcgctttgtgctgcgctgtttctgggattgtcttcgctaccgtcgtcttttctgccggacgaagatcagggctactttatgtcctcaatccagctgccttctgatgccacgatgcagcgcaccctcaacgtggttaaaaaatttgaagaggaaattgcggcccggccggatattgaaagcaacattatgatcctggggtttggattttcaggttcagggccaaactcggctatggccttcactacgctgaaggactggaaagatcggcagggctcgacggcccagggggaagccgaccggatacaggccagcatggcgaacgtctctgatgccgtcacgatgagcctgctcccgccggccatttcggatatgggcacctcgtcgggcttcacctggtacgtgcaagacagagagggactgggctacgaggcgttaaagcgcgctgccgacgcgctggtcctgcaggccaaccagcgccctgaactgagtgacgtatatatagacgggcttccggaaggaacaagccttgcgctccaggtggacagagaaaaggcggaagcgatgggcgtctcgtttgatgaaatcaaccagacgctctccgtcaccctgggctcaaattacgttaatgactatacgaacaacggccgcgttcagcaggtgattattcaggccgatgcgccctaccgaatgcagcctgagcagatactgacattatcagtgaaaaaccggatggggcagatggtgcaggtatcaacgtttgccacgctttcctggcacgttgcgccgcagcagtttacgcgttatcagggatattcggctattcgcattaccggaaatgaggcgccgggagagtccagcggcaccgcaatgaaggttatggagagtttgtccagagatttacctcagggcatggcgggcgagtgggcagggagctcattgcaggagagaaaatcggaatctcagcttccgggccttatcgtcctgtcgatactggtcgtgtttatggtgctggccgccctgtatgagagctggtctagtccatttgcggtcatgctggtcgttccgctggcctttatcggcgcggtgatagcggtgtccgttgccgacatgacgaatgacgttttcttcaaggtcggcctgattacgcttatacgcctgtcggccaaaaacgccattctgattgttgaatttgcgaggcagctccatcgccaggggcagcccctgctggcggcaaccattcatgccgccggccagcgcctgcgccctattctgatgacgtcgttagccttcaccttaggggttgttccgttgatgctggccaatggtgcgagcgacagtacgcagcatgccatcggtaccggcgtatttggcgggatgattagcggtacgcttctcgccattttcttcgtaccggttttctttatcgtcatcgcgcgcttcatcgacaacctcaggaaagcg

SEQ ID NO: 19440 - DNA, 790 bp, Enterobacter cloacae
atgggttttctttccggtaagcgcattctggtgactggcgttgccagcaaactgtccatcgcatacggcatcgcacaggcaatgcatcgcgaaggcgctgagctggcgttcacctaccagaacgacaagctgaaaggccgtgttgaagagtttgccgcgcagctgcggttccagcatcgttctggaatgtgacgttgcacaagacgaaagcatcgacggcatgtttgctgaactggcaaaagcatggccgaaattcgacggtttcgttcactccattggcttcgctcctggcgaccagctggacggcgactacgtgaacgcggttacccgtgatggcttcaaaatcgctcacgacatcagctcctacagcttcgttgcgatggcgaaatcctgccgcgcgatgctgaacccgggcgcagccctgctgactctgtcctacctgggcgctgagcgtgctatccctaactacaacgttatgggcctggcgaaagcctctctggaagccaacgtacgctacatggcgaacgcaatgggtcctgaaggcgtgcgcgttaacgccatctctgcaggtcctatccgcaccctggcagcttccggtattaaagatttccgtaaaatgctggcacactgcgaagcggttaccccgattcgtcgtaccgttaccattgaagatgtgggtaactctgcagcattcctgtgctctgacctttccgctggtatctccggcgaagtagttcacgttgacggcggcttcaacatcgctgcaatgaacgagctggaaattaaataa

SEQ ID NO: 19441 - DNA, 1045 bp, Enterobacter cloacae
cctttatctgccttacgccaggatattgatcgccattttgagatcaaggaacgcacatggaacaacgccgtttttccggcaaaggccactggtatcacgagacccagtcgaaccacgcgcagacagatgtggtgcctctggtgcccgaagccgctaacgtcgacgatcgttttttgctcgatttggccctggcctgatgagattgtcgccgcctgttctggctgggcttacccctgccagagctttgtgccatcagctgttgccgctctcgatgcccgtgaaccgcctgcatacgcttagcgcctacgatcggctcagcaccgcgctaacggtcgcccaggcctgtggcgttcagcggctttgtaaccattacgccgccctcctcgccccgcttcccggcccggactcctcgcgtgaaagcaaccgacgtctggcgcaaattacgcagtatgcccgccagctcgccagctcccctgatgtcattgatgataaagcgcagaaccagcttgatgaggttggcctgtcaatatatgacattgtggtgattaaccagattatcgggtttattggttttcaggcgcgcgtggtcgcggtttttcaggcgctgttaggacaccccgttcgctggttgccaggtcatcatattcagccgcatacgctgcccgcgagccacgccgcctgggtgccgctgttgcccgtcgtcgagctgcgctatgcgagtgcgcatcagcttgagtcgctgtcccgctggcaggcagaacccgcgctggaggcactgacgccggtcctttgccacgagccgtcgctgctcgacctgaccggagaaatcctgttaaacacccgcgaagcgatcccgctgacgtcccccgcactttcggcggcggtcgaactgctgacgcgctctccggaccgcttcagcgccgcgcagtttacccctctcacggatcaaggactccacggtgaacatgccatcatgctgcttacccggagcgcgtttgatggctggctcaatcgtttgaaagtcgcgtttggtaaagaggaataa

SEQ ID NO: 19442 - DNA, 1735 bp, Enterobacter cloacae
gtgattcaggcgacaccggattaccatgcattaaacgccatgcttaacctctacgatcgggagggacgcattcagttcgagaaagatcgtgaggcggtggacgccttttttgccgcccacgtgcggcccaacagcgtgacgtttgcgagccagaatgaacgtctcgactatctggtgaacgagggctactacgacgcgcgcacgctcacccgctacgaccgcgcctttgtggtgaagctgtttgaacgcgcccacgccagcggctttcgtttccagaccttcctcggcgcgtggaagtactacaccagctacacgctgaagacctttgacggcaagcgctacttagagagctttgaagatcgcgtggcgatggtggcgctgacgctggcgcagggcgatgaagcgctggcggagcagctcgccgacgagatcctctccggccgcttccagcccgccacgccgacctttctcaactgcggcaaagcccagcgcggcgagctggtttcctgttttctgctgcgtatcgaagacaatatggagtcgattggccgcgcggtgaactcggcgctgcagctttccaaacgcggcggcggcgtggcgtttctgctctcgaacctgcgtgaagcgggcgcgccgatcaagcgcatcgaaaaccagtcctccggcgtgatcccggtgatgaagatgctggaagatgccttctcctatgctaaccagcttggcgcgcgtcagggtgcgggcgcggtttacctgcacgcgcaccacccggacattctgcgttttcttgataccaaacgtgaaaacgccgacgaaaaaattcgcatcaaaacgctgtcgcttggcgtggtgatcccggatatcacttttaagctcgccaaagagaatgccgagatggcgcttttctcgccgtatgacgttgagcgaatctacggcaaagcctttggcgacgtggccatcagcgagctgtacgacgagctgctggtcgacgatcgcatccgcaaaaaaaccatcaatgcccgcgatttcttccagacgcttgcggagatccagtttgagtccggctatccgtatatcatgtttgaggatacggtgaaccgcgcgaacccgattgccgggcgcatcaacatgagcaacctgtgctcggagattttgcaggtcaacagcgcgtcaacctacgacgaaaacctggactacgcggacatcggcaaggatatctcctgcaacctcgggtcgctgaatatcgcccacaccatggattcccccgactttggccgcacgatagaaaccgccgttcgcgggctgacggcggtgtcggacatgagccacatccgtagcgtaccgtctattgaagcgggcaacgccgcgtcgcacgccatcggtctggggcagatgaacctgcacggctatctggcgcgcgaaggtatcgcctacggcagtccggaagggctggatttcaccaacctctatttctacaccattacctggcacgcgctgcacacctcgatgatgctggcgcgcgagcgcaaccagcggttcgccggctttgagcagtcccgctacgccagcggggaatatttcagccagtatctggaaggcgactggcagccaaaaaccgaaaaagtgcgcgaactgtttgcccgcgcggggattaccctgccgacgcgcgagatgtggcagcagctgcgtgacgagcgcagctggtacacctggctgctgaaggcaatcatggggatcc

SEQ ID NO: 19443 - DNA, 644 bp, Enterobacter cloacae
atgagcattattatttacactcgtaacgattgtgttcagtgccacgcgaccaaacgggcaatggaaagccgcggcgtggcgtttgaaatggtgaatgttgaccaggtccccgaggccgcagataccctgcgcaagcagggttttcgtcagcttccggtggtggtcgccggggagacaagctggtctggcttccgcccggacatgattaaccgcctgagcgctcaggccacacgtgcatgagcgggctggtctacttctccagcagctcggaaaacacgctccgctttattgagcgcgtcgggctgcctgcggtgcgcattccgctgaacgagcgggagcggatccgggtagatgaaccgtacattctggtggtgcccagctatggcggaggcggcacggcaggagccgtgcctcgccaggtgatccgctttctgaacgatcctcacaaccgcgggctgattcgcggagtgatcgcggcggggaatcgcaatttcggcgatgccttcggccgcgccggggatgtcatttctcaaaaatgcggcgtgccgtatctctatcgttttgagctgatggggacgcagcaggacgtcgaaaacgtgcgtaaaggagtgaacgaattttggcaacgacaaccgcagaacggg

SEQ ID NO: 19444 - DNA, 528 bp, Enterobacter cloacae
atggatagttcgtttacgcccattgaacaaatgcttaaattccgcgccagtcgccatgaggacttcccgtatcaggaaatcctgctgactcgtctgtgcatgcacatgcagggtaagctactggaaaaccgtaataaaatgctgaaagctcaagggattaacgagacgttgtttatggcgttgattacgctggagtctcaggaaaatcacagcattcagccttccgaactgagctgcgcgctgggctcctcccgtaccaatgcgacccgtattgccgatgaactcgaaaagcgcggctggattgagcgccgtgaaagcgacaacgatcgccgctgcctgcatctgcaactgaccgataaaggtcaccagttcctgcgcgaggtgctgccacctcagcacaattgcctgcacaaactctggtctgccctcagcaccgccgagcgcgaccagcttgagcacatcactcgcaagctgctcacccgtctggaccagatggatgaagacggcgccgttcttgaggcgctgcgc

SEQ ID NO: 19445 - DNA, 183 bp, Enterobacter cloacae
atgctgattctgactcgtcgagttggtgagaccctcatgattggggatgaggtcaccgtgacagttttaggggtaaagggtaaccaggtacgtattggtgttaacgctcctaaagaagtatctgtccaccgtgaagagatctaccagcgtatccaggctgaaaaatcccagcagtccagttac

SEQ ID NO: 19446 - DNA, 2587 bp, Enterobacter cloacae
gagatccgtcaggcgtttctcgattttttccatagtaagggacaccaggttgttgccagcagctccctggtaccgaacaacgatccgactctgctgtttaccaacgccgggatgaaccagttcaaggacgtgttccttggtctcgacaagcgtaattattcccgcgccacaacctcacagcgttgcgtgcgtgcgggcggtaaacacaacgacctggaaaacgtcggttacaccgcgcgtcaccatacgttcttcgaaatgctgggtaacttcagcttcggcgactacttcaaacacgatgccattcaatacgcgtgggaactgctgaccggtgaaaactggttcaacctgccgaaagagcgtctgtgggttaccgtctatgaaaccgatgacgaagcctacgaaatctgggaaaaagaagtcgggatcccgcgcgagcgtattattcgcatcggcgataacaaaggcgcgccatacgcgtctgacaacttctggcagatgggtgataccggcccttgcggtccgtgcaccgagatcttctacgatcacggcgaccacatctggggtggccctccgggcagcccggaagaagacggcgatcgctacattgagatctggaacatcgtcttcatgcagttcaaccgtcaggccgacggtacgatggagccgctgccgaagccttccgttgataccggtatgggtctggagcgtattgccgcggttctgcagcacgtcaactccaactacgagattgacctgttcagcaccctgatcaaagccgttgccgaagttaccggcgcgaccgacctgaacaacaaatcgctgcgcgttatcgcggaccacattcgttcctgtgcgttcctgattgccgacggcgttatcccgtcgaatgaaaaccgtggctacgtgctgcgtcgtatcattcgtcgtgccatccgtcacggcaacatgctgggcgcgaaggacaccttcttctataaactcgttgggccactgattggcgtgatgggtgctgccggtgatgagctgaaacgccagcaggcgcaggttgagcaggttctgaaaaccgaagaagagcagtttgcgcgtacacttgagcgcggtctggcgctgctggacgaagagctggcgaaacttaagggcgatacgctggatggcgaaacagctttccgcctgtacgacacctacggcttcccggttgacctgacggcggacgtttgccgcgagcgcaatatcaaagttgacgaagcgggcttcgaagccgcgatggaagagcagcgtcgtcgtgcgcgtgaatccagcggtttcggtgcagactacaacgcgatgatccgcgttgatagcgcgtctgaattcaaaggttatgacgcgctggaactgaccggcaaagtgaccgccctgtttgttgacggtaaagccgtggacagcatcagcgcgggccaggaagcggttgtcattctggacaaaacgccgttctacgcggaatccggcggtcaggttggcgataaaggcgaactgaaaggcaacggtttcagctttagcgtcagcgacacccagaaatacggtcaggcgattggtcaccagggcaaactggtttccggttctctgaaagtgggcgagggcgtacaggctaacgttgatgaagctcgccgcgcgcgcattcgtctgaaccactctgcaacccacctgatgcacgccgcccctgcgcgacgtactcggtacccacgttgcacagaaaggttctctggttaacgacaaagtgctgcgtttcgacttctcgcattttgaagcgatgaaaccgtctgaaatccgcgcggtggaagatctggtgaacgcgcagatccgtcgtaacctgccaatcgagacccatatcatggagctcgaggacgcgaagaaaaaaggtgcgatggcgctgtttggtgagaaatatgacgaccgcgttcgcgtgctgagcatgggcgacttctctaccgagctgtgcggcggtacgcacgcatcgcgcaccggtgacatcggcctgttccgcattgtttccgagtcgggtacggcggcaggtgtgcgtcgtattgaagcggtgaccggtgaaggtgcgattgccagcctgcatgcgcagagcgatcagctgcacgacatcgcgcagctgctgaaaggcgatagccagaacctgggcgagaaagtgcgcgttgcgctggatcgcacgcgtcagctggaaaaagagctgcagcagctgaaagagcaggctgcggcgcaggagagtgcaaacctctccagcaaggctgtagacattaagggcgtcaaactgctggtcagcgatctggcgggcgttgagcctaagatgctgcgtactatggtcgacgatctcaagaaccagcttggttctaccgttatcgtgctggctacagtggcagaaggtaaggtttctctgattgcgggcgtctctaaggatgtgaccgaccgcgtaaaagcaggggaattgattggtatggtcgctcagcaggtgggtggcaagggtggcggtcgtccggacatggcgcaagccggtggtacggatgcggcggcacttccgcaagctttggccagcgttgaa

SEQ ID NO: 19447 - DNA, 498 bp, Enterobacter cloacae
atgagtgaaccgacaacacgtcgacccgcgtatgcacgcttactggaccgcgcggtgcgcatcctggccgttcgtgaccacagtgaacaggagctgcggcgaaaactgtcggctccggtgatgagtaaaaacgggccggaagagattgatgccaccgcggaagattatgaccgcgtgattgcctggtgctatgagcatcattatctcgatgacgagcgctttgccttacggtttctcgccagccgcggccgtaaaggatatgggcccgcgcgcatccggcaggagctgaaccagaaaggggtggcccgggagtccatcgaaaaagcgatgcgcgaatgcgatactgactggtgcgagctggccagagaacaggcgattcgtaaatacggcgaaccgctgccgcgtgaattttcagaaaaagtcaaaatccagcgctttttgctctaccgcggctttctcatggaagatattcaggatatctggcgtaattttgccgat

SEQ ID NO: 19448 - DNA, 1060 bp, Enterobacter cloacae
atggctatcgacgaacacaatcagaaagcgttggcggcagcactgggccagatcgaaaagcaattcggtaaaggcgccatcatgcgcctgggtgaagaccgttccatggatgtggaaaccatctccaccggttcgcgttctctggatatgcgcgctgggcgctggcggtctgcctatgggccgtatcgtagaaatctacgggccagagtcctccggtaaaaccacactgacgctgcaggtgatcgctgcggcacagcgcgaaggtaaaacctgtgcgtttatcgatgccgagcacgcgctggaccctgtttatgctcgcaagctgggcgtggatatcgacaacctgctgtgttctcagccggacaccggtgagcaggcgctggaaatttgtgacgcgctggcgcgttctggtgccgttgacgttatcgtggtcgactccgttgccgcactgacgccaaaagccgaaatcgaaggtgaaatcggtgactctcatatgggcctcgcggcacgaatgatgagccaggcgatgcgtaagctggcgggtaacctgaagcagtccaacacgctgctgatcttcatcaaccagattcgtatgaaaattggtgtgatgttcggtaacccggaaaccactaccggcggtaacgcactgaaattctacgcctctgtccgtctggatatccgccgtatcggcgcggtgaaagagggcgagaacgtggtcggtagcgaaacccgcgtgaaggttgtgaagaacaaaatcgccgcgccgttcaaacaggctgagttccagatcctctacggcgaagggatcaacttcctcggcgagctggttgacctgggcgtgaaagagaagctgattgaaaaagcaggcgcctggtacagctacaacggggacaagattggtcagggtaaagcgaacgcgatctcctggctgaaagagaacccggctgcggcgaaagagattgagaagaaggtgcgtgagcttttgctgaacaaccaggactccaaacctgatttcgtggtcgatgccgcggatgctgaagaaaccaacgaagatttttaa

SEQ ID NO: 19449 - DNA, 1281 bp, Enterobacter cloacae
atgaatcctgagcgttctgaacgcattgaaatccccgtattgccgttgcgcgatgtggtggtttatccgcacatggtcatacccttatttgtagggcgggaaaaatctatccgttgcctcgaagccgccatggatcatgataaaaaaatcatgctggtggcgcagaaagaagcatcaacggatgagccgggtgtaaacgatcttttcaccgtcgggaccgtggcctctattttgcagatgctgaagctgcctgacggcaccgtgaaggtgctggtagaaggcctgcagcgtgcgcgtattaccactctgtcagatgacggcgagcacttctctgcaaaggcagagtaccttgagtcgcctgagcttgatgagcgcgaacaggaagtgctggttcgcaccgcgattagccagtttgaaggctatatcaagctgaacaagaaaattccaccagaagtgctgacgtcgctgaacagcatcgacgatcctgcgcgtctggctgacaccatcgctgcacacatgccgctgaagctggctgacaaacagtccgtgcttgaaatgtccgacgtcaacgaacgtctggaatacctgatggcgatgatggagtctgaaatcgatctgctgcaggttgagaagcgcattcgcaaccgcgtcaaaaagcagatggagaaatctcagcgtgagtactatctgaatgagcaaatgaaggccattcagaaagaactgggcgagatggacgacgcgccggacgaaaacgaagcgctgaagcgtaagatcgacgcggcgaagatgccgaaagaggcgaaagagaaggctgaagcagaactgcagaagctgaaaatgatgtctccaatgtcggctgaagcgaccgttgtacgcggctacattgagtggatggtgcaggttccgtggaacgcccgcagcaaggtcaaaaaagacctgcgtcaggcgcaggaaatcctggataccgaccactacggcctggaacgcgtgaaagaccgcattcttgagtacctcgcggtacaaagccgtgtaaacaaaatcaaaggcccaattctgtgcctggtaggaccgccgggggtgggtaaaacctctctgggtcagtccatcgccaaagcgaccggacgcaagtatatccgtatggcgctgggtggcgtacgcgatgaagcggaaatccgcggtcaccgccgtacctacatcggttctatgccgggtaaactgatccagaagatggcgaaagttgggggtaaaaacccgctgttcctgctcgatgagatcgacaag

SEQ ID NO: 19450 - DNA, 1253 bp, Enterobacter cloacae
atgacagataaacgcaaagatggttcgggcaaactgctgtactgctctttttgcggcaaaagccagcatgaagtgcgtaaactgattgccgggccgtccgtgtatatctgcgacgaatgtgtcgatttatgtaacgacatcattcgcgaagagattaaagaagtcgcaccgcaccgtgagcgcagcggctgccaacgccgcatgaaattcgtcatcaccttgacgactatgtcatcggacaggagcaggccaagaaagtgctggcggtagcggtctataaccactacaaacgtctgcgtaacggcgacaccagcaatggcgtagaactgggtaaaagtaacattctgctgatcggcccaaccggttccggtaaaacgctgctggctgaaaccctggcgcgcctgcttgatgttccgttcacgatggcggatgccaccaccctgaccgaggccggttatgtgggtgaggacgtcgaaaacatcattcagaaactgctgcagaagtgcgattacgatgtacagaaagcccagcgcgggattgtttacatcgatgagatcgacaagatctcccgtaaatcagacaacccgtccattacccgtgacgtatcgggtgaaggcgtacagcaggcactgctgaagctgatcgaaggtacggttgccgccgttccgccgcagggtggtcgtaaacatccgcagcaggagttcctgcaggttgatacctccaagatcctgttcatctgtggtggcgcgtttgctggtctggacaaagtcatctcccaccgtgttgaaaccggctccggcattggttttggcgctacggtgaaatcgacatccgaaaaaccaaacgaaggcgaactgctgtctcaggttgaaccggaagatctgatcaaattcggtctgatccctgaatttatcggccgtctgccggttgtggcaacgctgaatgagctgagcgaagacgcgctgatccagatcctgaaagagccgaaaaatgcgctgaccaagcagtatcaggcgctgttcaatctggaaggcgttgatctggaattccgtgacgaagcgctggatgctattgccaagaaagcgatggtccgtaaaaccggtgcgcgtggtctgcgttcaattgttgaagcggcactgctcgacaccatgtacgatctgccgtcgatggaagacgttgagaaagtggtgattgacgagtccgtgattagcggccaaaccaagccgctgctgatttacggcaaaccggaagcg

SEQ ID NO: 19451 - DNA, 1405 bp, Enterobacter cloacae
cgcccgacttttttatttcatgactacgaaacctttggcacgcacccggcgctggaccgaccggcgcagtttgccgccattcgtaccgacgacgaattcaacattattggcgagcctgaggtcttttactgcaaaccggctgatgactacctgccgcagcccggggcggtcatggtcaccgggatcactcctcaggaagcgcgcgagaaaggcgttaacgaagcagaattcgcccgacgcatccacgatctgtttaccgtccccaatacctgcgtggtcggttacaacaacatccgcttcgatgacgaagtgacgcgcaacgttttttatcgcaacttctacgatccctatgcctggagctggcagaaccgcaattcacgctgggatttgctcgacatcatgcgcgcctgttatgccctgcgtcctgagggcattaactggcctgaaaatgaggaagggctgaccagcttccggctggaacacctgacgcgcgccaacggcatcgagcacagcaatgcccacgacgcgatggcggacgtctatgccaccattgccatggcgaaactggtgaaaaacgcgcagccccggctgtttgagtatctgctgagtcaccgcagcaagcagaagctcatgacccttatcgacgtaccgcagatgaaacccctggtgcatatctccggcatgtttggcgcctggcgcggtaataccagctgggttgccccgctggcctggcatccggacaatcgtaatgcggtcatcatggtggatttagccggcgatatttcgccgctgcttgagctcgacagcgacagcctgcgcgaacggctttacactccgaaaaatgaactcggcgatctgcccgcggtgccggtcaaactggtgcatatcaataaatgtccggtactggcgcaggcgaatacgctgcgccccggaagatgcggacagactgggcattaaccgtcagcactgcctcgataacctgaaagtgctgcgcgaaaacccgcaggtgcgcgagaaagtggtcgccatctttgccgaagccgagccgttcgtgctgtctgaaaacgtggacgcccagctgtataacggtttcttcagtgatgccgatcgcgcggccatgaatatcgttttgcaaaccgagccgcgtaacttaccggcgctggatattactttcgccgataaacgcatcgaaaagctgatgtttaactaccgcgcgcgtaacttccccggcacgctggacgaggcagagcaggatcgctggctgcagcatcgtcgcaatgtctttacccaggagtttcttaacagctatgcccaggagctggaaatgctttatggccagtatgaaggaaatgctgagaaacaggcgctgttgaaagccctgttccagtacgctcaagagattgtc

SEQ ID NO: 19452 - DNA, 1071 bp, Enterobacter cloacae
gtgctacattacgccgcccacccaaatcagcagtggccaggcaacgccgtaaagttcggtaaagcctgcaaccatcaccttgaagaacggtcttatcggcacgtcgtatcgcaaactctgcgctacctttacaggcttcacataggttctactattttgtctcaatccaaatttcagcgtgcgtttttacacccacgttactggtttacatggtttggtcttggcgtgctctggctgctggttcaacttccataccctgtcctgcgcttgctggggtcaaaactgggcagcgcttcccgcgtttttctgaaacgtcgcgaatcgatcgcgcgtaaaaatattgagctttgttttccgcagtacaatgccgaagagcgcgagaaactcatcgcggaaaacttcaagtctatcggcatggcgctgcttgaaaccggaatggcctggttctggccggatgagcgtgtccgcaaatggtttgacgtggaaggactggataaccttaaacgcgcgcagatgcaaaaacgcggcgtgatggtcgtcggcgttcactttatgtcgctggagctgggcggccgggtgatggggctttgtcagccaatgatggcgacctacagaccgcacaacagtgcgttgatggagtgggtgcagacgcgaggccgcatgcgttccaataaggcgatgatcagccgtaataacctgcgcggcatggtcggtgccctgaagaaaggtgaggccgtctggtttgcgcccgatcaggattatggacgtaaaggcagcagctttgcccccttctttgcggtgaaagatgttgcgacgactaacggcacctttgtcatttctcgtttatcgggcgcctccatgctgaccgtgacgatggtgagaaaagcagataagtcaggctatcgtctgcacatctctcctgaaatggctaactatccggaaaatgagtgcgaagccgcggcgtttatcaataaagttatcgaaactgaaatcatgcgtgcgcccgagcagtatctgtggatgcaccgtcgtttcaaaacccgccctcttggcgaagcctcactctatatt

SEQ ID NO: 19453 - DNA, 894 bp, Enterobacter cloacae
atgctggccacgctggatcacggcgatacggttctggtgccgaatccaagctacccgatccatatctacggcgcggtgattgccggggcgcaggtccgttctgtgccgctggtggaaggtatcgatttctttaacgaactggaacgtgcgattcgtgaaagctatccgaaacctaagatgatgatcctcggtttcccgtcgaatccaacggcccagtgcgttgaactcgatttcttcgagaaagttgttgcgctggctaagcgttatgacgtgctggtggttcacgatttagcctatgcagatatcgtctatgacggctggaaagccccgtcgattatgcaggtcccgggcgcgcgtgatgtggcggtagagttctttaccctgtcgaaaagctacaacatggcgggctggcgtattggctttatggtgggtaacaaaacgctggtgagtgccctggcgcgcattaagagttaccacgactacggtaccttcacgccgctgcaggtcgccgctatcgctgccctggaaggcgaccagcagtgtgtccacgagattgccgcccagtataagcgccgccgcgacgtgctggtaaaagggttgcatgaagcgggctggatggtggaaatgccgaaggcgtctatgtacgtctgggcaaaaattccggagccgtatgcggcgatgggatcgctggagtttgccaaaaaactgctgcaggatgcgaaggtgtgtgtgtcgccgggcattggctttggtgattatggcgacacccatgtgcgatttgccctgattgaaaacagcgaccgtattcgtcaggcggtgaggggcatcaagagcatgttccgggccgacggtcttctcacctcaaagagcgtcgctgaacaccccgcgtcgtca

SEQ ID NO: 19454 - DNA, 501 bp, Enterobacter cloacae
atgaccggtatgagtaatgtaacgaaactggcgggcgagccatcagggcaggaattcctggtattcactttaggcgatgaggagtacggcatcgatatcctgaaagtgcaggaaatccgtggttacgaccaggttacccgcatcgctaacacgcctgcttttattaaaggtgtcaccaacctgcgtggcgtcattgtgccaatcgtggacctgcgcgtgaagttcagccagggcgacgttgactacgacgacaacaccgtggtgatcgttctgaatctggggcagcgcgtggtaggtatcgtggtggacggcgtatctgatgtgctttccctgacctctgaccaaattcgtcctgcgccggagtttgcggtcacgctgtcgaccgaatacctgaccggcctgggcgcgctcggcgagcgtatgctgatcctggtgaacattgagaagttgctgaacagcgatgagatggcgctgctggatatcgccgcgagtcacgtagcg

SEQ ID NO: 19455 - DNA, 1463 bp, Enterobacter cloacae
tatttacaaaaggttggccgcgcgcttatggtgccggtcgccacgctgcctgccgcagccatcctgatgggtgtcggctactggatcgaccccaacggctggggtaataccagcgcgctggcggcgttctttatcaagtcaggttccgccattatcgacaacatgtccgtgttgttcgcgattggtgtggcttacggtatgtccaaagacaaagacggtgccgctgcgctgaccggttttgtcggtttcctcgtgttaaccaccctctgctcgcctgcagcggtggccatgatccaaaaaattccggcggaccaggttccggcggcgttcggtaagatcagcaaccagtttgtcggtatccttgtgggtatcatctccgccgaactgtataaccgcttcagcagcgtagagctgccgaaagcgctctccttctttagcggtcgccgcctggttcctatcctgacctcgtttgtgatgatcgttgtcgcgttcatcatgatgtacgtctggccgatgatcttcgacggcctggtgaacttcggtgagcacatccagaaactggggttctgtcggtgcgggcgtgtacgcgttcttcaaccgtctgctgatcccggtcggtctgcaccacgcgctgaactccgtattctggttcgacgttgccggtattaacgatatccctaacttcctgggtggcgcacagtccatcgaagcaggtaaagcggttgtcggtatcaccggtcgttaccaggcgggcttcttcccgatcatgatgtttggtctgccgggtgctgcgctgggctatctaccactgcgcgcgtccagagtacaaagcgaaagtgctgggtatcatgatggcgggggcgttcgcggccttcttcaccggtatcaccgagccgctggagttctccttcatgttcgtggcgccggatctgtatgtgatccacgccgtgctgaccggtatctccgtgttcatcgctgccagcatgcactggattgccggtttcggcttcagcgccggtctggtggatatggtgctgtcgtcccgtaacccgctggcgacccactggtggatgctgatcccgcaaggtctggtgttcttcgcgatctactacatggtgttccgtttcactatcaccaaattcaacctgatgaccccgggtcgtgaactggccgtggccggtagcgaacgtaatggtcaggatgtgaacgtgagcggtgctcaggatcaggacgtttcaggcctggcgcgtcagtatatcgccgctgtcggcggttctgacaacctgaccggtatcgacgcctgtatcactcgtctgcgtctgaacgtcaaagactcttccctggtgaacgaagcgctggctaaacgtcttggtgcttccggtgttattcgcctgaacaaaaccagcgtgcagattatcgttggcttcgtggcagagaaaattgctaacgccatgaaaaccacc

SEQ ID NO: 19456 - DNA, 1665 bp, Enterobacter cloacae
atgagtgaggcagaagcccgcccgagtaactttattcgtcagatcatcgatgaagatctggccagtggtaagcacaccacagttcatacccgcttcccgccggagccgaacggctacctgcatatcgggcatgcgaagtccatctgcctgaactttggcattgcgcaagactaccagggacagtgcaacctgcgtttcgatgacaccaacccagtaaaagaagacatcgaatacgttgagtccatcaagaatgacgtgcaatggctgggcttcaactggtctggcgatatctgctactcctctgactatttcgatcagctgtacgcctacgcggttgaactgatcaacaagggtctggcgtatgttgacgaactgtctgctgatgaaatccgtgaatatcgcggtacgctgaccgcgccgggcaaaaacagcccgttccgcgatcgcagcgtggaagagaacctggcgctgtttgaaaaaatgcgtgccggcggcttcgaagaaggcaaagcgtgcctgcgtgccaaaatcgacatggcgtctccgttcatcgtgatgcgcgatccggtgctgtaccgcattaagtttgcggaacaccatcagaccggcaacaagtggtgcatctatccgatgtacgactttacccactgcatcagcgatgcgctggaaggcattacgcactctctgtgtacgctggagttccaggacaaccgtcgtctgtacgactgggttctggataacatcaccattcctgtgcatccgcgccagtacgagttctctcgtctgaatctggaatacaccgtgatgtccaagcgtaagctgaacctgctggtgaccgacaagcacgttgagggctgggatgacccacgtatgccaaccatctcgggtctgcgtcgtcgtggttacactgccgcctctattcgtgagttctgcaaacgcatcggcgtgaccaagcaggacaacaccatcgagatggcctccctggaatcctgcattcgcgaagatctcaacgaaaacgccccgcgcgcgatggcggttatcgatccggtgaagctggttatcgaaaactatccgcagggtgaaagcgagctggtctccatgcctaaccatccgaacaaaccggaaatgggaagccgtgacgtgccgttcagcggcgagatctggattgaccgcgctgacttccgcgaagaagccaacaagcagtacaagcgtctggtgctgggtaaagaagtgcgcctgcgtaacgcctacgtcatcaaagccgagcgcgtagagaaagatgcagaagggaatatcaccaccatcttctgttcttatgacgctgaaacgttgagcaaagatcctgcagacggccgcaaggtgaagggcgttattcactgggtgagcgcttcccacgcgctgccggtagaaattcgcctgtacgatcgcctgttcagcgtgcctaaccctggtgctgcggaagacttcctggcgaccatcaacccggaatctctggtgatcaagcagggttatgcggagccttctctgaaagccgctgaagcgggcaaagcgttccagttcgaacgtgaaggttacttctgcctggacagccgttacagcacggcggaaaaaccggtattcaaccgtaccgtaggcctgcgtgatacctggacgaagatcggcgaa

SEQ ID NO: 19457 - DNA, 963 bp, Enterobacter cloacae
atgatgaccttttcgcgttttactcgctggatgaccctgtttgcgctggcagccaccgtcgcggttgcgcttcccgctcgggcaaacacctggccccttccccctcccggcagcaatgtcgtgggcgaaaaccgctttcatgtggttgaaaacaatggtggttcgctggaagccattgccaaaaaatataacgtcggttttctggccctgctgcaggcgaaccccggcgtcgacccgtatgtcccgcgcgcgggcagcgtactgaccatcccgttacagactatcctgccggacgccccgcgcgaggggatcgtgataaacctggccgagctgcgtctgtactattatccgccgggtaaaaatgaagtcaccgtctaccctatcggtattggtcagctgggcggcgacaccctgacgccgacgatggtcaccaccgtctcggataaacgcgcgaatccaacctggaccccgacggccaacattcgtgcccgctataaggcccaggggatcgatcttcctgccgtggtgccggctggtccggataacccgatggggcatcacgcgatacgcctcgcggcatacggcggcgtctacctgctgcacggaacgaatgcagactttggcatcggcatgcgcgtcagctccggctgtattcgtctgcgcgatgacgatatcaaaacgctgtttaacgtcgttacgcctggaaccaaagtgaatattatcaatacgccgattaaggtttcagaggagcccggcggcgtgcggctggttgagattcatcagccgttatcgaaaaacattggcgacgatccgcagacgctgcccattaacctgaatgccgcgatggtaagcttcaaaacgaatgcgaataccaacagcgtggtgatggagcgcgcgatggaagcccggtcaggcatgccgaccgatgtcacccggcatcacgacgtcgtccagcagtcgatg

SEQ ID NO: 19458 - DNA, 3074 bp, Enterobacter cloacae
gttcagcctggccgactgggagacgctgccgtatgacagcttctctccgcatcaggagatcatctcctcgcgcctgtcgacgctctatcagctgccgaccatgcagcgcggcgtgctgattgtgccggtgaacaccctgatgcagcgcgtctgtccgcacagctatctgcacggtcacgcgctggtgatgaaaaaaggccagcgcgtgtcccgtgacgccctgcgcgcgcagcttgacggtgccggctatcgccacgtcgaccaggtgatggagcacggggaatacgccacccgcggcgcgctgctcgacctttacccgatgggcagcgaccagccgtatcgtctggatttttttgatgatgaaatcgacagcctgcgcgtattcgacgccgacacgcagcgcacgctggaagaggtggagtccatcaatttactgcccgcgcatgagttccccacggacaaaaccgctatcgagctgttccgcagccagtggcgcgataagttcgaggtgaagcgcgacgcggaacatatttatcagcaggtcagtaaaggcatgcttcctgccgggatcgaatactggcagccgctgttcttcaacgagccgctgcctgccctgttcagctacttcccggcgaatacgctgattgtcaacaccggggatatcgacgccagcgccagccgctttgagagcgaaacccgcgcccgctttgaaaaccgtggcgttgacccaatgcgtccgctgctgccgccggaagcgctgtggctgcgcaccgacgagctcaacgccgagctgaagcgctggccgcgcatgcagctgaaaaccgattcgcttgccgataaggccgccaataccaacctcgccttccggacgctgccggacctggccgttcaggcgcagcagaaatccccgctggataatctgcgcaagttcctggagtccttcaccggcccggtggtgttctccgttgagagtgaaggccgccgcgaagcgttaggtgagctgctggggcgcattaaggtggcgccgaagcgcatcctgcgcctgagcgaagcgaccggaaacggtcgttatctgatgattggcgccgccgagcacgggttcatcgacacgctcaacaacctggcgctgatttgcgaaagcgacctgctgggcgagcgcgtcgcgcgccgccgtcaggacagccgtcggaccatcaacccggacacgctgatccgtaaccttgccgagctgcacccgggccagccgattgttcacctggagcacggcgttgggcgctatcaggggatgaccacgctggaagcgggcggcatcaaaggtgaatacctgatgctcacctatgctaacgacgccaaactgtatgtcccggtctcctccctgcatctgatcagccgctacgcggcggcgccgaagagaatgcgccgctgcacaagctgggcggcgacgcctgggcgcgcgcgcgcagaaagcggcggaaaaagtgcgcgacgtggctgccgagctgctggatatctacgcccagcgcgcggctaaacagggctttgcctttaagcatgataaagaacagtaccagctgttctgcgacagcttcccgtttgaaaccacgccggatcaggcccaggccatcaacgccgtgctgagcgacatgtgccagccgctggctatggaccgcttagtctgcggcgacgtcggcttcggtaaaaccgaagtggcgatgcgcgccgccttccttgcggtggaaaacaacaagcaggtggcggtgctggtgccgaccaccctgctcgctcagcagcacttcgacaacttccgcgaccgtttcgccaactggccggtacgtatcgagatgctctcgcgttttcgcagtaccaaagaacagacgcagatcctcgaacaggcaagcgaaggcaaaatcgatattctgatcggcacccacaagctgctgcaaagcgatgtgaagtggaaagatctggggctactgatcgtcgacgaagagcaccgcttcggggtgcgtcataaagagcgcatcaaagcgatgcgcgccgacgtcgatatcctgaccctgaccgcaacgccaatcccgcgaacactcaacatggcgatgagcggcatgcgcgatctgtcgattattgctacgccgccggcgcgccgtctggcagtgaaaaccttcgttcgcgagtacgataatctggtggtgcgtgaggccattctgcgtgaggtgcttcgtgggggtcaggtctattacctatacaacgacgtggaaaacatccagaaagccgccgacaggctggcagagctggtgccggaagcgcgtattgctatcggtcacgggcagatgcgcgagcgcgagctggaacgggtaatgaacgacttccaccaccagcgctttaacgtgctggtgtgtaccaccatcattgaaaccgggatcgacattccgacggcaaataccatcatcattgagcgtgcggatcactttggcctggcgcagcttcaccagctgcgcggccgcgtcgggcgttcgcaccatcaggcctacgcctggctgctgacgccgcatccgaaagcgatgaccaccgacgcgcaaaagcgtctggaagccatcgcctcgctggaagacctcggcgcaggctttgcgctggccacgcacgatctcgagatccgcggtgccggcgagctgctgggtgaagaccagagcggctccatggaaaccatcggcttctcgctctatatggagctgctggaaaacgcggttgatgccctgaaggccggacgcgagccgtcgctggaagatctcaccagccagcagaccgaggtcgagctgcgtatgccttccctgctgccggacgattttattccggacgtgaatacccgactgtcgttctacaagcgcatcgccagcgcgaagaaggagaacgagctggaagagattaaggtggagctgattgaccgctttggcctgctgcccgatccggcgagaaatttgctggatatcgcgaggctgcgccagcaggcgcaaaagctggggatccgcaagctcgaaggcaatgaaaaaggcggcgtgattgaattcgccgagaag

SEQ ID NO: 19459 - DNA, 1236 bp, Enterobacter cloacae
gtgaaagcgcatatcgtcacgcctgaagacgagcgctttaccgccgtctggcagccgagcgacgcctgtgagtcataccaggatgaagaggggcgtttgctgcatcgtcctctggcggagcatgtggttaaccgcattaccggccagccggctatcgtcaccagctataacgataaacgggaatcagaacccgcaccgctgccgttctcgctgtcggccctgcagattgaggccgcgaagcgctttggcctcagcgcacagaacgtgctggatatctgccagaagctctatgaaacccataagctcatcacctacccgcgttcggacagccgctatctgccggaagagcattttgccggtcgccactcggtgatgaacgccatcggcgtgcacgcgccgcatctgctcccgcagcctgcggtaaacccggacacccataaccgctgctgggacgacaaaaaagtcgatgcccaccacgcaattatcccgacggcccgcgccagcaacgtcaacctgaccgagaacgaagcgaaggtctataacctgatcgcccgtcagtatctgatgcagttctgcccggacgcggtgttccgcaagtgcgtgattgagcttgagattgccaaaggtaagtttgtcgccaaagcgcgtttcctcgcagaagcgggctggcgcacgctgctcggtaacaaagagcgcgacgaagagaacgacggcacgccgctgccggtggtcgccaaagatgacgaactgctgtgcgagaagggcgaagtggttgaacgtcagacccagcctccgcgccatttcaccgatgcaacgctgctgtcggcgatgaccgggatcgcccggttcgttcaggataaagatctgaagaagatcctgcgcgccaccgacggtctgggaacggaagcgacgcgagcagggatcatcgagctgctctttaagcgcggcttcctggagaaaaagggacgctatatccactcaacggagccgggccgggcgctaatccactctctgccggagctggccgccaggccggacatgaccgcacactgggaatctgtgctgacgcagatcagcgagaagcagtgccgctatcaggactttatgcaaccgctggtcgggacgctttatcagctgatcgatcaggcgcgcagcacgccggtgaaaacgttcagagggatggttgcgcccggtagtggcgcgaagaaaccgtttaaaaagaaaaagagcgcggcc

SEQ ID NO: 19460 - DNA, 1328 bp, Enterobacter cloacae
tctctggaaagtttccttgcccatgttcagcagcgcgacccgcaccaaagcgagttcgctcaggccgtgcgtgaagttatgaccaccctgtggcccttccttgaacaaaacccgcgttatcgccagatgtctctgcttgaacgcctgatcgagccagagcgcgtgatccagttccgcgtgacgtgggttgacgatcgcaaccaggtacaggttaaccgcgcgtggcgcgttcagtttaactcggcgattggcccgtttaagggcggcatgcgttttcatccgtccgtgaacctgtcgattctgaaattcctcggcttcgagcagacctttaaaaacgccctcaccacgctaccgatgggcggcgggaaaggcggcagcgatttcgacccgaaaggcaaaagcgaaggggaagtgatgcgcttctgccaggcgctgatgaccgaactctaccgccacctcggcccggataccgacgttcctgccggtgatatcggcgtgggcggacgtgaagtgggctttatggccggaatgatgaaaaagctctccaacaacagcgcctgcgtctttaccggcaaggggctgtcgtttggcgggagcctgatccgcccggaagcgacaggatacggcctggtttacttcaccgaggcgatgctcaagcgtcacggtttaggctttgaaggcatgcgtgtcgcggtgtccggctccggtaacgtggcgcagtatgctattgagaaagcgatgcagcttggcgctcgcgtggtgaccgcctctgactccagcggcacggtggtggatgaagcaggcttcacggcagagaagctggcgcgcctgtgtgaaatcaaagccagccgcgacggccgcgtggcggattatgcccgggagcttggcctgacctacctggaagggaaacagccgtggggcgtgccggtggatatcgccctgccgtgcgccacccagaacgagctggacgtcgacgccgcgcgccccctgattagcaacggcgtaaaagcggtggccgaagggcgaatatgcctaccaccatcgatgcgacggatctgttcctagaagcgggcgtgctgtttgcgccgggcaaggccgctaacgcgggcggcgtggcgacctccggcctcgagatggcgcaaaacgccgcgcgtctcggctggaaagcggagaaagtggatgcgcgcctgcaccacatcatgctggatattcaccatgcctgcgtggagtacggcggcgaggcgtcgcaaaccaactacgtgcgcggggcaaacatcgccgggttcgtgaaggtggcggatgcgatgattggtcagggcgtgatttaa

SEQ ID NO: 19461 - DNA, 1622 bp, Enterobacter cloacae
ctgcagagcggcattctcctgctgttcgcggtcctcttctgctgggtctcggccggtttctggaccgcgctgatgggcttcctgcagctgctcatggggcgtgacaaatacagcatttcagcgtcaacggtcggggatgaacccctcaatcccgagcaccgtaccgcgctgattatgcctatctgtaacgaagacgttgaccgcgtatttgcgggcctgcgtgcgacctgggagtccgtgaaggcgaccggcaacgcagagcatttcgacgtttacatcctgagcgacagtacaaccccggatatctgcgttgcggaacaaaaagcgtggatggagctgattgcagaagtgcagggcgaacgccagatcttctaccgccgccgtcgtcgtcgcgtgaagcgtaaaagcggtagcatcgatgacttctgccgtcgtggggtaaccagtacagctacatggtggtgctggatgctgattccgtcatgagcggagactgcctgagcggtctggtgcgcctgatggaagccaaccctaacgcgggtatcattcagtcttcgccaaaagcgtccggtatggacacgctgtatgcgcgctgccagcagttcgccacccgtgtttacgggccgctgtttacggcgggtctgcacttctggcagttgggtgaatcgcactactggggccacaacgccattatccgcgtgaaaccgttcattgagcactgtgcgctggcgccgctgccgggtgagggttcgtttgccggttctattctgtcgcacgacttcgtagaagcggcgctgatgcgtcgtgctggctggggcgtctggattgcctacgacctgccgggatcgtacgaagagctgccgccgaaccttctggacgagctcaagcgtgaccgccgctggtgtcatggtaacctgatgaacttccgtctgttcctggtaaaagggatgcacccggttcaccgagcggtattcctgaccggcgtgatgtcctatctctctgcaccgctgtggtttatgttcctggcgctgtcgactgccttacaggtggttcatgccctgacggagccgcaatatttcctgcaaccgcggcagctgttcccggtgtggccgcagtggcgtccggagctggcgattacgctgtttgcttccaccatggtgctgctgttcctgcctaagctgctcagtatcattctgatctggtgcaaaggctcgaaagagtacggcggtttcttccgcgtaaccctttcactgctgctggaagtgctgttctccgtcctgctggcgccggtacgtatgctgttccacaccgtgtttgtggtcagtgcgttcctgggctgggaagtggtctggaactcaccgcagcgtgatgatgactccactccgtggggtgaagcctttatgcgccatggttctcagctgctgctgggtctggtgtgggcggccgggatggcctggctggatctgcgcttcctgttctggctggcgccgattgtcttctcgctgatcctgtcgccgtttgtgtccgtgatttccagccgttcaacggtggggctgcgaaccaaacgctggaaactgttcctgatcccggaagagtattccccgccgcaggtgctggtggat

SEQ ID NO: 19462 - DNA, 305 bp, Enterobacter cloacae
attcgtgaagaacgtctgctgaaggtgcttcgcgcaccgcacgtttctgaaaaagcgtctactgcgatggaaaaaacaaacaccatcgttctcaaagttgctaaagacgcgaccaaagcagagatcaaagctgctgtgcagaaactgtttgaagtcgaagtcgaagtcgttaacaccctggtagttaaagggaaagttaaacgtcacggacagcgtatcggtcgtcgtagcgactggaaaaaagcttacgtccacctttaaagaaggccagaacctgggactttcgtttgggcggcgcttgagtc

SEQ ID NO: 19463 - DNA, 603 bp, Enterobacter cloacae
atggaattagtattgaaacacgcgcagagcccctggactgtttccgaaactaccttcggtcgtgatttcaacgaagcgctggttcaccaggttgttgttgcttatgcagctggtgctcgtcagggtactcgtgctcagaagactcgtgctgaagtaactggttctggcaaaaagccatggcgccagaaaggtaccggccgtgcgcgttcaggttctatcaagagcccgatctggcgttcaggtggcgtgaccttcgctgcgcgtccacaggaccacagtcaaaaagttaacaaaaagatgtaccgcggcgcgctgaaaagcatcctgtccgaactggtacgtcaggatcgtctgatcgttgtcgagaagttctctgttgaagcgcctaaaactaagctgctggcacagaaactgaaagacatggctctggaagatgtgctgatcatcaccggtgagctggacgagaacctgttcctggccgcacgtaacctgcacaaggttgacgtacgcgatgcgactggtatcgacccggttagcctgatcgccttcgacaaagtcgtaatgactgctgatgctgttaagcaagttgaggagatgctggca

SEQ ID NO: 19464 - DNA, 627 bp, Enterobacter cloacae
atgattggtttagtcggtaaaaaagtgggtatgacccgcatcttcactgaagatggcgtttctatcccagtaaccgtaatcgaagttgaagcaaaccgcgttactcaggttaaagatctggctaacgatggctaccgcgctattcaggttaccactggtgctaaaaaagctaaccgtgtaaccaaaccagaagcgggtcacttcgctaaagctggcgtagaagctggccgtggtctgtgggaattccgtcttgctgaaggcgaagagttcaccgtaggtcaggacattagcgttgagctgtttgctgacgttaaaaaagttgacgtaaccggtacctctaaaggtaaaggttttgctggtaccgttaagcgctggaacttccgtacccaggacgctacccacggtaactccttgtctcaccgcgttccgggttctatcggtcagaaccagactccgggcaaagtgttcaaaggcaagaaaatggcaggtcagctgggtaacgaacgtgtaaccgttcagagcctggacgtagtacgtgttgacgctgagcgcaacctgctgctggttaaaggtgcggtcccgggtgcaaccggtagcgacctgatcgttaaaccagctgtgaaggcg

SEQ ID NO: 19465 - DNA, 309 bp, Enterobacter cloacae
atgcagaaccaaagaatccgtatccgccttaaagcgtttgatcatcgtctgatcgatcaatcaaccgcggaaatcgtcgagactgctaagcgcactggtgcgcaagtccgtggtccgatcccgctgccgacccgcaaagagcgcttcaccgttctgatctctccgcacgtcaacaaagacgcgcgcgatcagtacgaaatccgcactcacaagcgtctggttgacatcgttgagccaactgagaaaaccgttgatgctctgatgcgtctggatctggctgccggtgtagacgtgcagatcagcctgggt

SEQ ID NO: 19466 - DNA, 402 bp, Enterobacter cloacae
atgttccgcaaactgctggacgaaggccgtgctggtgagaacgttggtgttctgctgcgtggtatcaaacgtgaagaaatcgaacgtggtcaggttctggcgaagccaggctcaatcaagccacacaccaagttcgaatctgaagtgtacatcctgtccaaagacgaaggcggccgtcatactccgttcttcaaaggctaccgtccacagttctacttccgtacaactgacgtgaccggtaccatcgaactgccagaaggcgttgagatggtaatgccaggcgacaacatcaagatggttgtgacgctgatccacccaatcgcgatggacgacggtctgcgtttcgcaatccgtgaaggcggccgtaccgttggcgcgggcgttgttgctaaagttctgggc

SEQ ID NO: 19467 - DNA, 531 bp, Enterobacter cloacae
atggaaaagaccctttccgatggcctgcctttaccccagcggtatggcgctatagcgaccatcattatcggtatctcaatggccgtccttgacggcgcaattgcgaacgttgccctgccaaccatcgccagcgacctgcatgcctctcccgccagttcgatatggatcgttaacgcctatcagattgcgattgtggtttccctgctctcgttctctttcctgggcgatatgttcggttaccgtcgggtgtatcagtgcggtctggtggttttcaccttcacgtccttgctatgcgccctttcagattcgctgcataccctgacgcttgcccgcatcgcgcagggttttggcggcgcggcgctcatgagcgtaaacacggcgttgatccgcttaatttatccccagcgtcatctggggcgcggcatggggataaactcgtttattgtcgctgtctcttccgccgccgggccaactattgcggcggcgatcctttccgttgcgtcatggcaatggctgtttgctattaacgtg

SEQ ID NO: 19468 - DNA, 1470 bp, Enterobacter cloacae
atgtcccgaatggcagaacagcagctttatatcaatggtggttatacctccgccaccagcggtcgcaccttcgagaccatcaacccggccaacggtgaagttctggcgagcgtacaggccgccgggagagaagacgtcgatcgcgccgtggaaagcgcaaaacgcgggcaaaaaatctgggcggcgatgaccgccatggagcgctcgcgcgttctgcgtcgcgccgtcgatatcctgcgcgagcgcaacgatgagctggcgaacgtggaaaccctcgataccggtaaagcgtattccgaaacctcaaccgtcgatatcgtcaccggcgcggacgtgctggagtactacgcggggctgatcccggcgctggaaggcagccagatccccttgcgtgagacctcgttcgtctacacccgccgcgagccgctgggcgtagtggcgggtatcggcgcgtggaactacccgatccagatcgccctgtggaaatccgccccggcgctggcggcgggcaacgcaatgatcttcaagccgagcgaagtgacgccgctcaccgccctgaagctcgcagaaatctacaccgaagcgggcgttccggacggcgtgtttaacgtcctgccgggcgtgggcgcggagaccggccagtacctgaccgagcatccgggcatcgcgaaagtctccttcaccggcggcgttgccagcggcaaaaaggtgatggccaactcggcggcctcgtccctgaaagaggtgacgatggagctgggcggtaaatccccgctgattattttcgacgacgccgatctggatctcgcggcagacatcgccatgatggcgaacttcttcagctccggccaggtgtgcaccaacggcacccgcgtgttcgtgcccgcgaaattcaaggccgcgttcgagcagaaaatcgtcgagcgcgtgggccgcatccgcgcgggcgatctgttcgatgaacgcaccaacttcggcccgatggtcagcttcccgcatcgcgacagcgtgctgcgctacatcgccaaaggcaaagaggaaggtgcgcgcgtgctgtgcggcggcgacgtgctgaagggcgaaagcttcgacaacggcgcttgggttgccccgaccgtgttcaccgactgcaccgacgagatgaccatcgtgcgcgaagagatattcggcccggtgatgtccatcctcacctatgaaagcgaagaagaagcgatccgccgcgccaacgacaccgactacggtctggcggcgggcatcgtcactgccgacctgaaccgcgcgcaccgcgccattcatcagctcgaagcgggcatctgctggatcaacacctggggtgaatccgccgcagaaatgccggtcggcggctacaaacactccggcattggccgcgagaacggcgtgatgacgctgcagagctacacccaggtgaagtccatccaggttgagatgggtaaattccagtccatattt

SEQ ID NO: 19469 - DNA, 417 bp, Enterobacter cloacae
gtggcccggaaacacagcagcttcgccagtaatgcatattttgctgcaacatcgatctgttgctgctatactgtatataaatacagtatagcgaggtgcacgatggctgttgaaacaaaatttgttgtcgtaagaaaaggtgaagagaaaatgacatttgccagtaagaaagaggctgacgctcacgacaagctgctcgatatggcagatgcgttcaccgactggctgttgcaaagcggaatgcagatggatgaaacgcaggctgaaaatcttggcctgtatctcgccgagcagaaagagaccgtgcagcatattctgcgtaccagcaagcttcccgatctcaatgccccagctgcagcggataaaactgaatccgatgcggctgacacgaaaaaaatcagggcggtgaaagcggcc

SEQ ID NO: 19470 - DNA, 1714 bp, Enterobacter cloacae
atgatttcaggcattttagcatccccgggtatcgctttcggcaaagcactgctgctgaaagaagacgagatcgtcatcgaccggaaaaaaatttctgccgacaaggttgatcaggaagttgaacgttttctgagcggtcgtgccaaggcatctgcgcaactggaagcaatcaaaactaaagctggcgaaactttcggtgaagaaaaagaagccatcttcgaagggcatatcatgctgctcgaagatgaggagctggagcaggaaatcatagccctgattaaagataaaggcatgacggccgacgcggctgcgcatgaagttatcgaaggtcaggcaactgccctggaagaactggatgatgaatacctgaaagagcgtgcggctgacgtacgtgacatcggcaagcgcctgctgcgcaacatcctgggtctggccatcatcgacctgagcgcgattcaggatgaagtcatcctggttgccgctgacctcactccgtctgaaaccgcacagctgaacctgaaaaaggtcctcggtttcatcaccgacgcgggtggccgtacctcccacacctctatcatggcgcgctctctggaactgccagccatcgtgggtaccggtagcgtcacctctcaggtgaaaaacggcgactatctgattctggatgccgtaaacaatctggtttacgtcaacccaaccaatgaagagatcgataaactgcgcgcggttcaggagcaggttgcgactgaaaaagcggaactcgctaagctgaaagacctgccagccatcaccctggacggccatcaggtagaagtgtgcgcaaacatcggtaccgtccgcgacgttgatggcgctgagcgcaacggtgcggaaggcgtaggtctctatcgtacagaattcctgttcatggaccgcgacgcgctgccaacggaagaagagcagtttgctgcctacaaagccgtggctgaagcgtgtggctctcaggcggttatcgtccgtaccatggacatcggtggcgacaaagagctgccgtacatgaacttcccgaaagaagagaacccgttcctgggctggcgtgcaatccgtatcgcgatggatcgtaaagagatcctgctgtgaccaggttcgcgcgatcctgcgtgcgtctgctttcggtaaactgcgcatcatgttcccgatgatcatctctgttgaagaagtgcgtgcactgaagaaagagatcgaaatctacaaacaggaactgcgcgaagaaggtaaagcgtttgacgagtcaatcgagatcggcgtgatggtggaaacacctgcggcggcgaccattgcgcgtcatttagccaaagaagttgatttctttagtatcggcaccaatgatttaacgcagtacaccctggcagttgaccgtggtaatgatatgatttcacatctctaccagccaatgtcaccgtccgtactgaacttgatcaagcaagttattgatgcttctcatgcagaaggtaaatggactggcatgtgtggtgagcttgcaggcgacgaacgtgctacacttctgttgctgggtatgggtctggacgaattctctatgagcgccatttccatcccgcgcattaagaagattatccgtaacacgaacttcgaagatgcgaaggtgttagcagagcaggctcttgctcaaccgacaacggacgagttaatgacgctggttaacaagttcattgaagaa

SEQ ID NO: 19471 - DNA, 969 bp, Enterobacter cloacae
atgagtaagatttatgaagacaactcgctgactatcggtcatacgcccctggttcgactgaaccgtatcggtaatggacgcattctggcgaaggtcgaatcacgtaacccgagcttcagcgtaaaatgccgtatcggtgcaaacatgatttgggatgctgaaaaacgtggcgtactgaagcctggcgttgagctggtggaaccgacaagcggtaacaccggtattgctctggcctatgttgctgccgcacgcggctacaagctgacgctgactatgccagaaaccatgagcatcgagcgtcgtaagctgcttaaagcgctgggcgcgaacctggtgctgaccgaaggcgcgaagggcatgaagggcgccattcagaaagctgaagagattgtggccagcgatccggcgaaatatctgctgctgcagcagttcagcaacccggctaacccggaaattcacgagaagaccaccggtccggaaatctgggaagataccgacggccaggttgacgtatttatctccggcgtgggtaccggcggtacgctgaccggcgtgtcacgctatattaaaggcacaaagggtaaaaaagacctgatcaccgttgccgttgagccaactgactcaccggttatcacccaggcactggcgggtgaagagcttaaaccaggcccgcataaaattcagggtattggcgcaggcttcattccgggcaacttggatctgaagctgatcgataaagtggtgaccatcactaacgaagaagccatttctaccgcgcgtcgcctgatggatgaagaaggcattctggcgggtatctcttccggtgcagccgttgcggcagcactcaagcttcaggaagatgaagcctttaccaacaagaatattgtggttatccttccttcttcgggcgagcgttacctgagcaccgcactgtttgccgatctgtttaccgaaaaagaactgcaacag

SEQ ID NO: 19472 - DNA, 1114 bp, Enterobacter cloacae
atgcctttacccgatttcaagtcctctgaacccttcaccctcggcatcgaactcgaactgcaggtagttaacccgccgggctacgatctgagccaggactcctccgcgcttatcgccgccgtcaaaggcgacatcaaaggcggcgaggtcaaacacgacatcaccgaaagcatgctcgaaatcgccaccggcgtatgccagaacatcgaccaggcggcggctcagttctcggtgatgcagcagagcatcctgcgcgcggcggcggagcagcatatccagatctgcggcggcgggacgcacccgttccagaagtggcagcgctcaggaggtgtgcgacgacgagcgctataacgtcacgctggagcgctttggctacctgattttgcaggcgacggtattcggccagcacgtgcacgtcggctgccggaccggggacgacgcgatttacctgctacacggcctgtcgcgcttcgtgccgcactttatcgccctggcggccgcctcgccgtatatgcagggcacggacacgaagttctccttgtcgcggctcaacatcttatcgggatttccggataacggccagatgccgtgggtcaacagctggcaagagttcgaggggctgttccgccgcctgagttccaccagcatgatcgacagcattaaggatctgcactgggacatccgccccagcccgcacttcggcaccgtcgaggtgcgggtgatggatacgccgctgacgctcggccacgcgattaacatcgccgggctgatccaggcgacgtcccactggctgctgaccgcgcggccctataagcatcaggaacgggattttctgctctaccgttttaaccgttttcaggcctgtcgctacgggctggaagggatcctgacggacgtgcacaccggcgagcacaaaaccgtggcggaagacattgcgtggctgctggagcaggttgcgccgtcggccgagaagctcggcgcaacgagcgcagtcaatgaaattgccctgcttttaaagcagggcaagagcgaggcgcagcgcatgcgggagtttatcgccgacggtggctcgctgatttctctggttcagaagcactgcgagctgtgggcgacg

SEQ ID NO: 19473 - DNA, 465 bp, Enterobacter cloacae
atgtcaaagccaaaataccccttcgaaaagcgccttgaagtcgtgaatcactacttcacaactgatgatggttacaggatcatctctgcacgttttggtgtgcctcgaacccaggtcaggacgtgggttgccctctatgaaaaacatggagaaaaaggtttaattcccaaacctaaaggcgttagtgctgatccagagttgcgcattaaggtcgtgaaagccgtgaccgagcagcagatgtccctcaatcaggctgctgctcactttatgcttgctggtagtggttctgtagccaagtggctgaaagtctatgaggagcacggagaagctggtttacgcgcactcaagatcggcaccaaaagaaacattacaatgtcagttgatccagaaaaagcggcgttagcattggagctgtcgaaagaccgacgtatatacagtactttcttcataacaatttcccttcaa

SEQ ID NO: 19474 - DNA, 1281 bp, Enterobacter cloacae
atggctgatacaaaggcaacgctcaccctaaatggtgacactgctattgaactggatgtgctaaaaggcacgctcggtcaggatgttattgatatccgtacgctgggctctaaaggtgtattcacctttgaccctggatttacctctaccgcatcttgcgaatccaaaatcacctacattgacggtgacgaaggtatcctgctccatcgcggcttccccatcgatcagttagccaccgaatccaactatctggaagtgtgctacatcctgctgaacggcgaaaaaccgacgcaggcacagtacgatgaattcaaaaccaccgtgacccgtcacaccatgatccatgagcagattacccgtctgttccatgcgttccgccgtgactctcacccgatggcggtgatgtgcggtatcaccggtgcgctggcggcgttctaccacgactcccttgacgtgaataacccgcgtcaccgtgatatcgcggcgttccgcctgctgtccaaaatgcctaccatggcggcgatgtgctacaaatactccatcggccagccgtttgtgtatccgcgcaatgacctctcttacgcgggtaacttcctgcgcatgatgttctccacaccgtgcgaagagtacgaagtgaacccggtgctggaacgcgcaatggaccgtattctgatcctgcacgctgaccacgaacaaaacgcctctacctctaccgtccgtaccgcgggctcttcaggcgcgaacccgttcgcctgtatcgctgcgggcatcgcttccctgtggggaccggcgcacggcggcgcgaacgaagcggcactgaagatgctggaagagatcagcaccgttgagcacattcctgagttcgtgcgtcgcgcgaaagacaagaatgactccttccgcctgatgggcttcggtcaccgtgtttacaaaaactacgacccgcgcgccaccgtcatgcgtgagacctgccacgaagtgctgaaagagctgggtaccaaagatgatctgctggaagtggcgatggagctggaacacatcgcgctgaacgacccgtacttcatcgagaagaaactctacccgaacgtcgatttctactctggcattattctgaaagcgatgggcattccgtcttccatgttcaccgtgatcttcgctatggcccgtaccgtaggctggattgcgcactggaacgaaatgcacagcgaaggcatgaaaatcgcccgtcctcgtcagctgtataccggctacgagcagcgtgattttaagtctgacctgaagcgc

SEQ ID NO: 19475 - DNA, 1075 bp, Enterobacter cloacae
atgaaactgccagtcagagaatttgatgctgttgtaattggtgccggtggcgcaggtatgcgtgccgcactgcaaatttcccagagcggccagacctgtgcgctgctctctaaagttttcccgacccgttcccacactgtgtctgcgcagggcggtatcaccgttgcgctgggtaactcccatgaagataactgggaatggcacatgtacgacacggtaaaaggttccgactacatcggcgaccaggatgccatcgaatatatgtgtaaaaccggcccggaagcgattctggagctggaccacatgggtctgccgttctcccgtctggaaaatggcactatctatcagcgtccgtttggcggccagtcgaaaaacttcggcggcgagcaggcggcacgcaccgcggcggcggctgaccgtaccggtcacgcactgctgcacaccctgtatcagcagaacctgaaaaatcataccaccatcttctccgagtggtacgcgctggatctggtgaaaaatgccgatggcgcaatcgtcggctgtaccgcgctgtgcatcgaaaccggtgaagtggtttacttcaaagcccgtgctaccgtgctggctaccggcggtgcaggccgtatctatcagtccaccaccaacgcccacatcaacaccggtgacggtgtcggtatggctatccgcgcgggcgtgccggtgcaggatatggaaatgtggcagttccacccaaccggtatcgccggtgcgggcgttctggtaacagaaggctgccgcggtgaaggtggctacctgctgaacaaacacggcgagcgcttcatggagcgttatgccccgaatgcgaaagacctggcgggtcgtgacgtggtggcgcgttccatcatgatcgaaatccgtgaaggccgcggctgtgacggcccatggggtccacacgcgaactgaagctcgaccacctgggtaaagaagttctggagtcccgtctgccgggcagtcctggaactgtcccgcaccttcgcacacgtcgaacccggtaaaagcagcgattccggtctacccaacctgccactacatgatgggc

SEQ ID NO: 19476 - DNA, 534 bp, Enterobacter cloacae
atgaaaaaagtcattttaggtttattcattgctgccgctttgggatgctctgcatcttctttcgcggcatccaccggcgaagggcaaattaacttcacgggtgaaattatcgattccgcctgtcaggtggtgaacggtttaagcagtccgctgaatgttgcgctgggcaaagtatccaaaacaacatttaccggcgcaggctctaccagcaccttaacgaaatttgatattcagttaaaagactgcccggaaacggtcacgtctgcagccatcaacttcggtggtacgcccgatgcggataataataccacgctggccttaaccccgggtgcgacaactgcaaccggcgtggcgattcagctggttgattcatccgaacagcccgtcagtctgtatacgccttcaaagcagtatcctttaactcctggaacgacggtaactaatctggagtttggcgcacgttatattcagactcaggctgcgatcacggccgggcaggctaactcagcctctacttttaccgttatttataac

SEQ ID NO: 19477 - DNA, 780 bp, Enterobacter cloacae
gtgctggtgtttgattccggcgtcggtgggctttcggtctatgatgagattcggcatctcctgccggatctccattacatctacgccttcgataacgtcgctttcccgtatggggaaaagagcgaagattttattgttgagcgtgtggttgaaatcgtcaccgctgtacaaaagcgctatccccttgcgctggccgtcatcgcctgtaatacggcaagcaccgtttctcttcccgccctgcgtgaaaaattccagttcccggttgtgggcgttgttcctgcgataaagcctgccgcgcgcctgacggcgaacggcattgtgggtttgctggcaacgcgaggcacggtaaagcgtccttatacccgcgagctgatcgaccgttttgccaacgaatgccagattgcgatgctgggttcggctgagctggtggagatggctgaagcgaagctgcatggaaaagcggtatcactcgacgagctgcgtcgtattcttcgtccgtggctgcggatgcccgaacctccggataccgttgtgctgggctgcacccacttcccgctattacaggaagagttattagaggtattgccggaggggacgcgcctggtggattccggcgcggctatcgcccgtcgtacggcctggctactggagcatgaagcgccggatgctaaatctaccgatgcgaatatcgcgttttgtatggccatcacgaaagagactgagcaacttttacccgttttacgccgttatggctttgaaacgctcgaaaaactggcgctg

SEQ ID NO: 19478 - DNA, 393 bp, Enterobacter cloacae
atgaacagtggagaaaacatgcgtgatattcagatggttttagagcgttggggtggttgggctgcgagtgatagttccggtgttgattactcatcaatagccgctggtttcagagggcttcttcccccaacaagcaaatcccgcctgtcatgtactgatgacgatgccctaattatcgaggggtgtttagctcgacttcaaaaacgcaagccctatgagcattcgctcttggtcgcatactatctctttggcatctcgaagcggaaaatagcaaaagcgcgaaaaaaggatgagaagctgatacgcattgagatacagatggctgaggggtttattgaaggttgccttagcatgcttgatgtgagcttagagatggatgttgaagtgaaatcg

SEQ ID NO: 19479 - DNA, 3154 bp, Enterobacter cloacae
ctcgtcgccgcccagccgggtatctggatggcggaacagctgtcctccctgccaaacgcctggagcgtggcgcactacaccgagctgaaaggcgatatcgacgcgccattgctggcaaaagccatcgctgagggcatgatgcaggccgataccctgcgaatgcgttttgccgaggataacggcgaggtgtggcagtgggtggatgacaccctcattctgccggagccgtccatcgttcgcgttgccgaccacgccgccgccgtggcgctgatggaggccgaccttaaccagaacctgcgcgtcgacagcggtcagccgctggcgtttcaccagctgattcaggtgggggaaagccactggtactggtatcagcgctatcaccatctggtggtggatggcttcagcttcccggccattacccgccagatcgccgcgatttacgccgcgtggaaaaaggatgaaccaactcctgactccccgtttacgccatttgctgaagtggtggaggagtatcagcgctatcgcggcagcgaggcgtatcagcgcgacggcgctttctgggccgagcagcgcaggcagcttccttctccggtctcgctctcttccgcaccgctgccgggacgcgccgctactaccgatatcctgcgcctgaaaatcgctgccgacggtcgcgccttcagccagcttgcgcaggcggcaggacaggcgcagcgtaccgatctggcccttgcgctggtggcgctgtggctggggcgcctgaccggacggctggactacgccgccgggtttatctttatgcgccggatgggatccgcggcgctcaccgcaaccgggccggtgcttaacgtcctgccgctggcggtcgatatcgatccccaggagagcctgccctcgctggcactgcgcctggcgaaccagctgaaaaaaatgcgccgccaccagcgctacgacgccgagcagatcgtgcgcgacagcggaaaagcggcgggcgatgaagcgctgttcggcccggtgctgaatgttaaagtgttcgactaccagctggatatcgacggcgtggaggccatcacccacacgctggctaccggcccggtgaacgatctggagctggcgctgttcccggacgagcagggcgggctgagcatggagatcctcgccaataagcagcgctacgacgaggcgacactgacgcgtcacgttgcgcgcctgaacgcgatgctgatgcagtttgctgccaacccggacctgcgctgcggcgaggtggaaaccgtttcagagcaggaataccagatgcttgcgcgcatcaactataccgggctgcgctgccggccaccacgctggcggatctggtggcggagcaggcgagcaaaacgccggacgcccccgcgctggcggacgcgcatattgagctcagctatcgtgagatgcgcgagcaggtggtcgcgctggcaaacctgctgcgcgagcgcggcgtgaagccgggcgacagcgtggcggtggctctgccgcgctcggtgttcctgacgctggcgctgcacggcattgtcgaggctggtgccgcgtggctgccgctcgacaccggctacccggacgatcgtctgcggatgatgctcgaggacgcgaagccgtccctgcttattaccacagacgaacagcttccgcgatttagcgatctgccgattagtgcatttagttacaacacccttttaccggctgcggatgcaaaaccgtgcgcctggcgaagccggagcagacggcctacatcatctttacctccggctcgaccgggcgtccaaaaggggtcatggtcggccataccgccatcgttaaccgcctgaagtggatgcaggaccactacccgctggacgcgacggacgtggtggcgcagaaaacgccgtgcagctttgacgtgtcggtatgggagttctggtggccctttatcgccggggcgaagctggtgatggcagagccggacgcgcaccgagatccgcaggcgatgcagagcttcttcacccggcacggcgtgaccaccacccacttcgtgccgtcgatgctggcggcgtttgtcgcctcgctgacgccggaaaacgtggcgtgctgcaaaaccctaaagcaggtgttctgcagcggcgaagcgctgccgaccgagctgtgccgcgagtgggagcagctcacccatgcgccgctgcacaacctgtatggcccaaccgaagcggcggtagacgtcagctggtatccggcgtatggccccgagctcgcggcggttgagggcaacagcgtgccgatcggcttcccggtgtggaatacgggactgcgcattctggacgcgatgatgcgcccggtgccgttcggcgtggcgggcgatctgtatctcaccggcattcagctggcgcaggggtatctgggacgtccggacctcaccgccagccgctttattgccgacccgtttgcccccggcgagcggatgtaccgcaccggcgacgttgcccgctggctggacaacggcgcggtggaatatctcggccgcagcgatgaccagttaaaaattcgcggccagcgcatcgagctgggcgaaatcgaccgggcgatgctgtcgctgccggacgtggcccaggccgtcgcccacgcctgcgtgttcaaccaggcggccggccaccggcggggatgcccgccagctggtgggatacgtcgtctccgaatccggcttaccgctggaccgcgacggctgctggcgtcgctcaaagcccaactgccgccgcacatggtgccggtggtgctgctgcaaatcagcgcgctgccgctcagcgcgaacggcaagctggatcgcaaggtgctgccgctgccggagttgacgagtaaaacctctggccgcgtgccggaaagcgaatccgaaatcgccgtcgcgcaggcattttccgcgctgctgggctgcgaggtcaacgacattgagaccgacttctttgccctcggcggacactcgctgctggcgatgcgcctggcggcgcagcttagccgcgcgttcgagcgcaaggttacgccggggcagattatggtcgcctcctcggtgagcaagctcagcgcgctgctggactcgcagatgagcgacgagcaggcgcagcgtctggggtatgaaacccttctgccgctgcgcgaa

SEQ ID NO: 19480 - DNA, 1380 bp, Enterobacter cloacae
atgatggccttcctgctgatcctgctgccgctgctgatccttgcctggcaggcgtggcaaagcctgaacgcgctgagcgcgcaggcggctttgaccaaccgcacgacactcatcgacgccagacgcagtgaagcaatgaccaacgccgcgctggagatggagcgtagctatcgtcagtattgcgtgcttgacgatcggacgctggaaaaggtttatcagagtcagcgtaaacgctacagcgaaatgctggacgctcacgcgggggtcttgcctgatgacaagctgtatcaggcgttacgtcaggatttgaacgatctcgcgcagctgcagtgcagcaacagcggcccggatgccgccgccgccgcgcgcctcgaagcatttgccagcgccaacaccgagatggtgcagtcaacgcgcgcggtgattttctctcgcggccagcagctccagcaggagattgccgagcgtggccagttcttcggctggcaggcgctggtgctgttcctggtgagcctggggctggttctgctctttacccgcatgatcatcggcccggtgaagggcattcagcgtatgatcaaccgtctgggggaggggaaatcgctcggggatacggtagcctttaaaggtccccgcgagctgcgatccgtaggccagcgcattatctggctgtccgagcgcctggcgtggctcgaatcacagcgccatcagttcctgcgccatatctcccatgagcttaaaacgccgctggccagcatgcgcgaagggacggagctgctggcggacgaagtggccgggccccttacgccagaacagaaagaaattgtcgagatcctggataacagcagccgcaatctgcaaaagctgattgagcaactgctggattacaaccgcaagctggctgacggggcggtcgtactggaaaacgttgaaattgagccgctggtggatatggtgatctccgcccacagcttgccagcaagagctaaaatgatgcataccggcgttgagctgaatgcgcctgcgtgcctggctgaacccatgctgctgatgagcgttctggataatctttactccaatgcggtgcactatggtactgaatccggtaacatttatatccgaagtaatacgaatggttcacgggtgtttattgacgtcgcaaacaccggcaccccgatccccgatgacgaaaaaaccatgatcttcgaaccctttttccaggggagtcatcagcggaaaggcgcggttaaaggaagcgggctgggcttgagcatcgcccgggactgcatacgacgcatgcagggtgagctaaacattgccgcggacgaacgttcagacgtttgcttccgtatcgaactgcccgtgagccggaaaaatcaa

SEQ ID NO: 19481 - DNA, 1281 bp, Enterobacter cloacae
atgaataagcatagcgagaacgatgtggttgagccttcacgtcgtcgattgttaaaaggggtaggggcgctgggcggcgcgcttgctctggccggtggctgtccggtagcgcatgcggcgaaaccgcaaagcgcgcccggcacgctgtcacccaatgcccgcatggagacgcagccgttttatggcgagcatcagtcgggcatcctgacgccgcagcaggcgtccatgatgctggtggcctttgattcgctggccagcgataaagccgatctggagcgcctgttccgcctgctgacgacgcgcatcgcgtttctcaccgcgggcggaccggcacccgatacgccgaacccgcgtctgccgccaatggactccggcattctggggccgttcatcgccccggataatctgaccattaccgtttcgctcggcgagtcgctgtttgatgcccgctatgggctggcaaaacagaagccgaaagcgctgcagaaaatgacgcgtttcccgaacgactccctggacgcggcgctgtgtcatggcgacctgctcctgcaaatttgtgccaatacccaggacacggtgatccacgccctgcgcgatatcatcaagcacacgccggatctgctgagcgtgcgctggaagcgggaaggttttatctcggaccacgccgcccgcagtaaagggaaagagacgccggtgaacctgctgggctttaaggacggcacggccaacccggacagcagcgatgcggcgttgatgaaagacgtggtatgggtgacggcggatcagggcgaaccggcgtgggcggtgggcggcagctatcaggcggtacggattatccagttccacgtggagttctgggaccgcacgccgctgaaagaacagcagacgatctttggtcgcgataagcaaagcggcgcgccgctcggcatgaagaacgagcacgacgtgcccgactacgccagcgatcccaatggcgataccatcgcgctggacagccacattcgtctggctaatccgcgcaccaaagagacgcagtccagcctgatgatgcgtcgtggctacagctattcgctcggcgtgaccaacgccggccagcttgatatgggcctgctgttcgtctgctatcagcacgatctggaaaaaggcttcctgaccgtgcagaagcggctcaacggcgaagcgctggaagagtacattaagcctatcggcggcggctatttctttgccctgccgggcgtgcgcgatcggaacgcgtacctcgctcaaggtcttattgaaacc

SEQ ID NO: 19482 - DNA, 1503 bp, Enterobacter cloacae
atgaacgaactggttggtgctattaatggtgtaatctggagccctgcgttaatatttttatgtctgggtgtcggcctctatttctggctgcgtagtcgcttcctgcaattacggcatatcaaacatatgattaccctgatgttccaggggcgtcctaccgatgcaggcgtatcgtcgtttcaggcgctgacgatgacgctggcaggccgcgtgggaacagggaatatcgccggtgtggccacggcaattacctttggcggtccgggcgcgcttttctggatgtggatagtcgcttttttaggtgccagctccgcatttgtagaatccaccctgggacaagtttataaagaaaaaattaacggcgaatatcgcggcggtcctgccttttatattgaaaaaggtttaggcgttaagtggtacgcatggttatttgctattgtgactattttctcctgcggattattacttcctggcgtgcaggcaaactcgattggggcgagcctggatattgcttttggtctgagtccgaacgttacggcggcattacttgcggtgctgttaagttttattatattcggcggtgtgaaaaggatcgccagctttagcagcatggtcgttccatttatggcgctggggtatattattgtcgcctgcgtgattatcgctattaatattaaccagctcccttcggttattctgctgatctggaaaagtgcgttcggccttgaagcaggtttcggtgccatcctgggtcaggccatcatgtggggcgttaagcgcggcgtctattccaacgaggccgcgcaggggaccgggccgcatgcatcatctgcggcggcagtaagccatccggtgaagcaggggctggttcaggcattctcggtctacatcgacacgctgtttgtctgctccgcgaccgggtttatgctgctgatcaccgggctgtataacgtccagggcgtcgacggtgcagcgctttacaccgggattgctggcgtggccgcgggtcctggctatgtgcagacggcgatggaaagtatgatgccaggctttggtaattactttgttgccattgctctgttcttctttgccttcacgacgattattgcctactactatattgccgaaactaatatcgccttcattaaccgtaaaattcaccgtccatggctgacattcctgctcaagctatgtctgatggcctccacggtatatggcacggttcgcaccgcggatctggcatgggggctgggggatatcggggtagggctgatggcgtggctcaacattattgcgattgttctgttgcataaaaaagcgtttgccagccttaaggattatgaaatccagaatgcgcaggggctggatccacagtttgacccggttcggctgggaattaaaaatgcggattactggcttgatgggcgtaaggatgaggatggtgttcagcctgaacaggtttcatcgcttgaaagaaagcagccggcagcaaagttgaatagc

SEQ ID NO: 19483 - DNA, 819 bp, Enterobacter cloacae
atggtcggccttattcgcagcgtgagtgagggactgggcccggtaggcggtgcggcgatgatttacaccctcagcggattactgtgtctggtgacggtaggatttcctgatatcaggcggttttcaccccgctatcttattgccggcagcgttttatttgtcagctacgaaatatgcctggcgctgtcgctgggctatgccgcaacgcgctcgcaggcaatagaagtgggcatggtcaattacctttggccaagcctgaccattgtgtttgccatcttgttcaacgggcagaaatcgaccctgttggtgatccccggcttagccgtctcattgctgggtgtctgctgggtattgggcggtgaacagggtttacatcttgatgaaataacccgcaatatcgtttccagcccgctgagctacgcgctggcgtttgccggggcatttatctgggccgcctactgcacggtcaccagcaaatttgcgaaaggacaaaacggcatcacgctgtttgttttgctgaccgcgctgagcctgtgggtgaaatatttcctgagcgatcagcctgagatggtgtttacgcttcaggtgatagtgaaactcgtcatgtgcggtattgcgcttgggtttggttacgccgcatggaatattggcatccttcacggtaacgtcacggtactcgctgccgtatcctattttacccccgtcctctccgccgcgcttgccgccgcagtgctgagttcgcccctctcattctcgttctggcaaggcgcgctgatggtctgcgccgggtcgttgctctgctggtacgcaacaagacaa

SEQ ID NO: 19484 - DNA, 954 bp, Enterobacter cloacae
atgaaagagcttatggtcgtcgccatcggcggtaacagcattatcaaagacaacgccagccagtcgattgaacatcaggcgcaggcggttaaagcggtggcagagtcggtgctcgaaatgctggcctccgactatgacatcgtgctcacccacggtaacggcccccaggtggggctggatctgcgccgcgccgaaatcgcccacgagcgggaagggttgccgctgacgccgctggcaaactgcgtggcggacacccagggcgggattggctacctgatccagcaggcgctcaacaatcgccttgccgcgcgcggggagcaaaaagcggtcacggtcgttacgcaggtggaggtggataaaaacgatccgggttttactcaccctaccaaacctatcggtgcgttcttcaccgaggcacagcgcgacgagctgcagcgcgcacacccggactggcattttgtcgaggattcaggccgtggctaccgtcgcgtggtggcttcaccgcagccgcttcggattgtcgaggcggatgcgatcaaagccctgacgcaaaaaggctttgtggtgatcggcgcgggcggcggcggaatacccgtgattcgcagcgagcagggcgactaccagagcgtcgacgcggtgattgataaagatctctccaccgcgctgctggcacgcgagatcggtgccgacgtgctggtgattaccaccggcgtggaaaaggtgtgcatcaacttcggcaagccgaaccagcaggcgctggacaccgtcagcgtggcgcagatgacgcgctacagggaggagggccacttcccggcgggcagcatgttgcccaaaatcgtcgcctcgctggaatttttacaccacggcggcaggcgcgtgattatcacctcgccggactgcctgcccgcggcgctgcgcggggaaaccggtacccatattgttaatgagggaaga

SEQ ID NO: 19485 - DNA, 617 bp, Enterobacter cloacae
atggctggcatcgatacgctatatctggtgataaaaatatgccaaatctcgtccttgcttccacgtctccctaccgccgaacgctgctggaaaagctcgggatcccgtttgaatgcgccgcgccagaggtggatgagacgccacagccgggcgaatcaccgcgtcatctggtgatgcgtcttgctaaagagaaagcgcagtcgctgaccgcacgttaccccgcacatttgattataggctcagaccaggtttgcgtgctggacggcgaaatcaccggcaagccccatacggaggagaacgcctgtcagcagcttctgcgcgcgcgaggcactatcgtgaccttttataccggcctggcgctctataactccgccaccggtcatctgcaaaccgaatgcgagccgttcgacgtacacttccgccatctcagcgagcaagagatcgtggattatgtgcgccgggaacgtccgctgaactgtgcgggaagctttaaaagtgaaggattggggattgcgctgttcgacaagctggacggacgcgatcccaacacgctggtggggttaccgctgattgccctgtgtcagatgttaagacgagaagagtgtaatccgctgacc

SEQ ID NO: 19486 - DNA, 1099 bp, Enterobacter cloacae
gttgcgatgctgctatgtgcatcattaagtggagtgacaacaatgagttatgcagaaaccaccaacccaaacgcgcctgtttcgatggtgagcacatgggataaaaccttcgccgaaagtgacaaagtcgatcaccgtaaggtgtccttccagaaccgatacgggatcactttggtaggcgatctgtatcttcccaaaaaccgcggcgaccgcaagctggcggcgattgcggtcagcgggccatttggcgcggtcaaagagcagtccagcggcctgtatgcgcaaaccctggcagaaaatgggtttgtgaccctggcgttcgatccgtcctatacgggcgaaagcggtggccagccgcgcaacgtagcgtctccggatatcaacaccgaagactttagcgcggcggtggacttccttgggttgcagaaagaggttgatcgtaaccgcattggtattctcggcatctgcggctggggcggtatggcgctcaacgcagcatccatggacacccgcgtgaaggcggtcgccaccagcgtgatgtatgacatgagccgggcgatgggccacggcgtggggcgacgggaaagatcgctattcaacgtctgaccgccgtgccgttctgcagtatctgaacgcacagcgctggaaagatgctgagaacggtaccttcgcgcacagcggccatgacatttatgtcgatgagaacggtaaggtgacggcagctgaacgtattctgccggagacgttacctgacaacccgaatccggtactcaaagagttctttgactactaccgtatgccgcgcggcttccatgcgcgctccgtcaactccaccggcgcgtggaccgcgaccacgccattatcatttatgaatatgccgctgctgagctacgccggggaaattactatcccaacgcttatcgtaaccggtgaaaaggcacactcccgctactttgctgaagatgcttttaaagcggtcggcagcaagcagaaggaactggtgattgttccgggcgcaaaccatgtcgatctctacgataatgctgccgggaagatccccttcggccagtttgagcagttcttcaaaaccaacctgaaa

SEQ ID NO: 19487 - DNA, 1004 bp, Enterobacter cloacae
atgagtacgcaacaggccaccacgcaacaaccgctgttgcaggccatcgacctgaaaaaatactacccggtgaagaaggggctgtttgcccctgaacgcctggtgaaagcgctggacggcgtctcttttaacctcgaacgcggtaaaacgctggcggtggtgggggagtcaggctgcggcaaatccacgctgggccgtctgctgacgatgattgaagtgccgaccggcggggagctctactatcaggggcaggatctgctcaagcacgatccgcaggcgcagaagctgcgccgccagaaaatccagattgtgttccagaacccgtatggttctttgaacccgcgtaaaaaagtggggcagattctggaagagccgctgctgatcaacagtaatctgagcaaggagcagcgccgtgaaaaagcgctggcgatgatggcgaaggtcggcctcaaaaccgagcattacgatcgctatccgcacatgttctccggcggccagcgtcagcgtattgctattgcgcgcgggctgatgctcgatccggacgtggtgattgccgatgagccggtctccgcgctcgacgtatccgtgcgtgcgcaggtgctgaacctgatgatggatctccagcaggagctggggctgtcttacgtgttcatttcccacgacctgtcggtggtagagcatattgccgatgaagtgatggtgatgtacctggggcgctgcgtggagaaggggactaaagaccagatctttaataaccctcgtcacccgtatacccaggcgctgctgtctgcgacgccgcgtctgaacccggacgatcgtcgtgagcgtattaagctgacgggtgaactgccaagcccgctgaatccgcctccgggatgtgcattcaacgcccgctgcagtcgccgcttcggtccgtgcacccagctccagccgcagctgaaggattatggcggccagctggttgcctgttcgcggtcgatcaggatgaaaatggcgagaagcca

SEQ ID NO: 19488 - DNA, 946 bp, Enterobacter cloacae
atgttgcagttcatcctccgacgtctgggacttgttatccccacgtttatcggtatcacccttctcacttttgccttcgtccatatgatccccggcgacccggtaatgattatggcgggcgagcgtggtatttcccctgagcgccatgcacagctgctggcggaactcggtctcgataagccgatgtggcagcagtacctccactatatctggggcgtgttgcacggtgatttagggatttcgctgaaaagccgccttccggtgtgggacgagttcgtgccgcgttttaaagcgacgctggagcttggcatctgcgccatgattttcgccactgcggtgggtattcctgtcggggtactggctgccgtcaagcgtggctctatttttgaccataccgccgtgggcctggcgctgaccggctactccatgcctatcttctggtggggcatgatgctgatcatgctggtatcggtgcagcttaacctgacgccggtctccggtcgcgtcagtgatatggtcttcctggatgactccaacccgctcaccggctttatgctgattgatacggctatctggggcgaagagggcaacttcattgatgccgtggcgcacatgatcctgcctgccatggtgctgggcaccattcctctggcggtgatcgtgcgaatgacccgttcatcgatgctggaagtgctgggcgaggattatatccgcaccgcgcgcgctaagggcctgacgcgtatgcgcgtcatcatcgtccatgcgctgcgtaatgccatgctgccggtggtgaccgttatcggtctccaggtggggacgttgctggcgggggcgatcctgaccgaaaccatcttctcctggccgggccttggacgctggctgattgacgcgctgcaacgccgtgactatccggttgtgcagggcggtgtactgctggtcgcgacga

SEQ ID NO: 19489 - DNA, 792 bp, Enterobacter cloacae
atgaatcaacctgtttcgcaaaatcgccgctgggtactggcctctcgtcctcagggtgcgccggtcgcggaaaattttcgtctcgaaacgcagcctgttcccgccccggctgagggacagcttttgctgcgcaccgtctggctgtcgctggacccttacatgcgggggcgcatgagcgatgcgccatcctattcaccaccggttgagctgggcgcggtgatggtggggggaacggttagccgcgttgagcagtcaaatcatcccgacttcaaagccggggagtgggtgctgggctacagcggctggcaggagtatgaactctcggacggaagcggcctggtgaagctgggcgaaaatccgtcgcatccttcctgggcgctgggtattctgggcatgccgggctttaccgcctatatgggattgctggatatcgggcagccaaaagcgggcgaaacgctggtggtcgccgcggcgacaggcccggttggcgcgaccgtcgggcagatcggtaaaatcaaaggttgccgggtagtcggcgtcgccggtggggctgaaaaatgccgccatgccgttgaggtcctcgggtttgacctctgtctggatcaccacgcggctgactttgccgaacagctgaaacgcgcctgcccgaatgggattgacatctattatgaaaacgtcggcgggaaagtatttgacgccgtgctgccgttattgaatacctccgcgcgcgtgccggtgtgcggcctggtgagcggctacaatgcgacgggcctgcccgaggggcaacctggc

SEQ ID NO: 19490 - DNA, 1272 bp, Enterobacter cloacae
atggcaagcagtaacttgattaaacaattgcaagagcggggcctcgtggcccaggtgacggacgaggaagcgttagcagagcgactggcgcaaggcccgatcgcgctctattgcggcttcgatcccaccgctgacagcttgcatttggggcatcttgttccattgttatgcctgaaacgcttccagatggcgggccacaagcctgttgcgctggtgggcggcgcgaccggcctgattggtgacccaagctttaaagccgctgagcgtaaactgaacaccgaagataccgtgcaggagtgggtggataaaatccgcaaacaggttgcaccgttcctcgacttcaactgtggtgataactctgccattgccgcgaacaactacgactggtttggcagcatgaacgtgctgaccttcctgcgcgacatcggcaagcacttctctgttaaccagatgattaacaaagaggccgtgaagcagcgtctgaaccgtgacgaccagggtatctcctttaccgagttctcctacaacctgctgcagggttatgactttgcctgcctgaacaagctgcacggcgtttccctgcagattggcggttccgatcagtggggtaacatcacctccggtatcgacctgacccgtcgtctgcaccagaaccaggtcttcggtctgaccgttccgctgatcaccaaagccgacggcaccaaattcggtaagactgagggcggcgcagtatggctcgatccgaagaaaaccagcccgtacaagttctaccagttctggatcaacacggcggatgccgatgtttatcgcttcctgaagttcttcaccttcatggatatcgcagagatcaacgcgctggaagaggaagacaagaacagcggtaaagcgccgcgcgcgcagtacgtgctggcggacgaagtgaccaaactggttcacggtgaagaaggtctggccgcggcaaaacgcattaccgctagcctgttcaacggtaccctgagcgatctgagcgaagcggacttcgaacagctggcgcaggacggcgtgccgatggttgagatggaaaaaggggctgacctgatgcaggcgctggtggactctgagctccagccttcgcgcggtcaggcgcgtaaaaccatcgcgtctaacgctatcaccatcaacggtgagaaacaggccgacccggaatacaccttcgttgacggtgaccgtctgtatggccgctacacgctgctgcgtcgcggtaagaaaaactactgccttgtctgctggaaa

SEQ ID NO: 19491 - DNA, 489 bp, Enterobacter cloacae
atgtttgaacctatggaactgaccaacgacgcggtgattaaagtcatcggcgtcggtggcggcggcggtaacgccgtagagcatatggtgcgtgaacgcattgaaggtgttgaattcttcgcagttaacaccgatgcgcaggcactgcgtaagacggctgtaggccagactatccagatcggcggtggtatcaccaaagggctgggagcaggggctaacccggaagttgggcgtaatgcggctgaagaagatcgtgcaacgctgcgcgctgcactggaaggtgcggacatggtcttcatcgcagcaggcatgggtggcggtaccggtaccggcgcagcacctgttgtggctgaagtggcaaaagatttaggtatcctgaccgttgctgtcgtgaccaagcctttcaactttgaaggcaagaagcgtatggccttcgcggagcagggtatcaccgagctgtccaagcatgtggactcgcgggggatccac

SEQ ID NO: 19492 - DNA, 1254 bp, Enterobacter cloacae
atgatcaaggcgacggacagaaaactggtagttggactggagattggcaccgcgaaggttgccgctttagtaggggaagttctgcccgacggtatggtcaatatcattggcgtaggcagttgcccgtcccgtggtatggataaaggtggggtaaacgatcttgaatcggtggtgaaatgcgttcagcgcgccatcgatcaggctgaactgatggcagattgccagatttcttctgtctatcttgccctttctggtaagcacattagctgccagaacgaaattggtatggtgccgatttccgaagaagaagtgacgcaggaagacgttgaaaacgtcgtgcacacggcgaaatccgtgcgtgtccgcgacgagcatcgcgtgctgcatgtcattccgcaggaatatgcgattgactatcaggaagggatcaagaacccggtcggtctttctggcgtgcgtatgcaggcaaaagtgcacctgatcacatgtcacaacgatatggcgaagaacattgtaaaagccgttgaacgttgtggcctgaaagttgaccaacttattttcgccggtctggcggcaagttattccgtactgaccgaagatgaacgtgaactgggtgtctgtgtggtcgatattggtggtggtacaatggatatcgccgtgtataccggcggtgcgttgcgccacacgaaagtgatcccttatgccgggaacgttgtaaccagcgatattggttacgcttttggtacgccgccgagcgatgcagaagcgattaaagtgcgccacggctgtgcgctgggatctatcgttggcaaagatgagagcgttgaagtgccgagcgtcggtggtcgtccaccgcgtagcctgcagcgccagacgttggcagaggtcattgagccgcgctataccgagctgctcaacctggtcaacgaagagattttacagttacaggaacagcttcgtcagcagggcgttaaacatcatcttgcggcggggattgtattaaccggcggtgcagcgcaaattgaaggtcttgcggcctgtgctcagcgggtgttccatacgcaggttcgtataggtgcgccgctgaatatcactggtttaacggattatgctcaggagccgtattattcaacggctgtgggcctgctccactacgggaaggaatctcatctcagtggtgaagcagaagtggaaaaacgcgtctcagtggggtcgtgggtcaaacgactgaacaactggttgcgaaaagaattt

SEQ ID NO: 19493 - DNA, 840 bp, Enterobacter cloacae
atgtctcaggctgcattgaacacgcgcaaccgcgatgacgaggacgaatacgcctcttcacgccgcagtaatggaacgcgtcttgcaggcatcattttcctgctcggggtgctgtgcaccgtgtttatcagcggctggatggtcctgggctggatggaagatgcacagcggttgccgctttctaagctggtggtcaccggtgagcgtcactacacgcgtaacgacgatattcgccagtcaatactggcgctgggctcacctggcacctttatgacgcaggacgtcaatattatccagagccagatagaacgtctgccatggataaaacaggcgagcgtaagaaagcaatggcctgatgaattgaagattcatctggttgaatatgtgcccattgcgcgttggaatgatcagcacatggttgacgcagacggaaattccttcagcgtcccggccgatcgtgtcaacaagcaaaatttaccgatgttgtatggcccggaaggtagcgaaaacgaagtattacagggttttcgcgaaatgggtcaggtgctggcgaaggacaggtttacgttaaaagatgcagccatgacggcgcgccgttcctggcagctgacgttaacaaacggcattaagctcaacctgggacgcggcgacagaatgaagcgtctggcgcgttttgtcgaactttacccggttttacagcagcaggcacagactgacggcaaacggataagctacgttgatttgcgctatgactcaggcgcagcagtcggttgggtaccggctccggtcgaggaacctaatcagcaacagaatcaggcacaggtacaggcagaacaacaa

SEQ ID NO: 19494 - DNA, 1473 bp, Enterobacter cloacae
atgaatacacaacaactggcaaaactgcgttcaatcgtgcccgagatgcgtcgcgtccggcacattcactttgttggcatcggtggtgctggcatgggcggtattgccgaagtgttagctaacgaaggctatcagatcagcgggtctgacctggcgccaaaccctgtaacgcagcagctggcgtcgcttggggcgactatctatttcaaccatcgcccggaaaacgtgcgcgatgcgagcgtggtggtggtctcaagcgctatctcctctgacaacccggaaatcgttgccgcgcacgaagcgcgcattccggtgatccgccgtgcagaaatgctggcggaactgatgcgtttccgtcacggcatcgccattgccgggacccacggtaaaaccacgaccacggcgatggtctccagtatttatgcggaagcgggtctcgacccgacgttcgtcaacggcggtctggtcaaagcagcgggcgtacatgcgcgtctgggccacagccgttacctgattgctgaagcggatgagagcgacgcgtcgttcctgcacctgcagccgatggtggcgattgtcactaacatcgaagctgaccatatggatacctaccagggcgacttcgagaacttaaagcagaccttcatcaacttcctgcacaacctgcctttctatggacgcgcggtgatgtgcgttgacgatccggtgatccgcgagctgctgccgcgcgtgggtcgtcaaatcaccacttacggcttcagcgaagacgctgacgtccgcgtggaagagtacaaacagattggtgcacaggggcatttcactctggcgcgtcaggacaaagagctgctgcacgtcacgctgaatgcgccaggtcgccataatgccctcaatgccgcagcggcagtggccgtcgcgacggaagaaggcattgatgatgatgccattctgcgcgcgctggaaagcttccagggcaccggccgtcgtttcgactttctcggtgaattcccgctggacgccgttaacggtaaagccggcacagcgatgctggtggacgactacggccaccatccgaccgaagtggacgccaccattaaagccgcgcgtgcaggctggcctgacaaaaatctggtgatgatcttccagccgcaccgcttcacgcgtacgcgcgatctgtacgacgatttcgccagcgtcctgtcacaggtagacaccctgttaatgctggacgtgtacgccgcaggcgaggcgtcgattccgggtgctgacagccgttccctgtgtcgtaccatccgtggacgcggtaaagttgaccctattctggtttctgaccctgcacaggtggcggaaattctggcaccggtcctgacgggtaacgatttgattctgattcagggcgcgggaaatatcggcaaaatcgcccgtaccttagctgaaatcaaactgaagccgcaaacccaggaggatgagcatcatggc

SEQ ID NO: 19495 - DNA, 1092 bp, Enterobacter cloacae
atgggattcaaatgcggtatcgtcggtctgccaaacgtgggcaaatccaccctgtttaacgcgcttaccaaagcgggtatcgaagcggcgaacttcccgttctgtaccatcgaaccaaacaccggcgttgtgccaatgccggacccgcgtctggaccagctcgcggaaatcgtgaagccgcagcgcattctgccaaccaccatggaattcgtggacatcgcgggcctggtaaaaggcgcatccaaaggtgaaggcctgggtaaccagttcctgaccaacattcgtgaaaccgaagcgatcggccacgttgtgcgctgcttcgagaacgacaatatcatccacgttaacaacaaagtggatccggctgacgacatcgacgtcatcaacaccgagctggcgctctctgacctcgacacctgcgaacgcgctattcaccgcgtgcagaagaaagccaaaggcggcgacaaggacgcgatatcggaactggctgcgctggaaaaatgtctgccgcagctggaaaacgcgggcatgctgcgcgcgctgaaaaacctgactgaagaagacaaggcggcgatcaaatacctgagcttcctgaccctgaagccaaccatgtacatcgccaacgttaacgaagacggtttcgagaacaacccgtacctcgacaaagtgcgtgaaatcgcagcggctgaaggttctgtggttgtggcggtttgcgctgccgttgaatccgacatcgccgagctggacgacgccgaccgtgaagagttcatggccgagctgggtctggaagagccgggcctgaaccgagtaattcgcgcaggctatgagctgctgaacctgcagacctacttcaccgctggcgtgaaagaagtgcgtgcgtggaccattcctgtaggtgcgactgcacctcaggcggccggtaagatccacacagactttgagaaaggctttattcgtgcgcagactatcgcgtttgaagactttatcacctacaaaggtgagcaaggcgcgaaagaagcaggcaagatgcgtgcggaagggaaagattacatcgttaaagatggcgatgtgatgaacttcttgtttaacgtt

SEQ ID NO: 19496 - DNA, 312 bp, Enterobacter cloacae
caggtgggtgagctggcgaaacgcgccgggatcaccgtgcggacattgcaccactatgagcaaacagggttgttgctgccttcagccagaagcgcggcaggttaccggctatacaacctggcggatgtccagcgtctgcacatgatccaggcgctggcaaaagcggggctggaacttgctgaaatcagggatttcctggaacaggagtcgctgtcgttaaccgagttactcgatgcgcaaatcacgctgctggataaacagctgcgcagcatacatacgctgcgcgaccggctggtggagctgcggaccggg

SEQ ID NO: 19497 - DNA, 328 bp, Enterobacter cloacae
gtggccgcagtaatgtttcagtcaatcttagtggtctgcactggcaatatttgccgttcaccgattggtgagcggctgttgcgtcagcaattacccggcaagcaggtgacctcagcaggtatttttggacttgaaggacgcccggcggatgcggctgcgcaggctgtcgcctggcgtcatggcgtttcgctggaagggcatgttgcccgaaaggtgacgcgcagcctgctgcaacaatccgatttgattctggtaatggagccaacaaacctccgttttattgccgcaatgactccggagaaccggggaaaatcgctgctctttggac

SEQ ID NO: 19498 - DNA, 2031 bp, Enterobacter cloacae
atgactcaagtcgcgaagaaaattctggtaacgtgcgcactgccgtacgccaacggctcaatccacctcggccacatgctggagcatatccaggctgatgtctgggtccgttaccagcgaatgcgcggccacgaggttaacttcatctgtgcggacgatgctcacggcacgccgatcatgctgaaagcgcagcagctggggatctcccccgagcagatgattgccgaaatgagtcaggagcatcagaccgattttgctggctttgacatcagctatgacaactatcactccacgcacagcgacgaaaaccgcgagctgtcggagctgatctacacccgcctgaaagagaacggttttatcaaaaaccgcactatctctcagctgtacgatccggaaaaaggcatgttcctgccggaccgtttcgtcaaaggcacctgtccgaaatgtaaatccccggaccagtacggcgataactgcgaagtgtgcggcgcgacctacagcccgaccgagcttatcgagccgaaatccgtggtttccggcgccacgcccgtcatgcgtgactccgagcacttcttcttcgacctgccgtccttcagcgaaatgctgcaggcgtggacccgcagcggcgcgctgcaggagcaggtggcgaacaaaatgcaggagtggttcgaatccggcctgcagcagtgggatatctcccgcgatgcgccgtacttcggctttgaaatcccgaacgcgccgggcaaatacttctacgtctggctggacgcgccaatcggctacatgggctccttcaagaacctgtgcgacaagcgtggcgacaccgtcagcttcgacgaatactggaagaaagattccacggcagagctgtatcactttatcggtaaagacatcgtttatttccacagcctgttctggccggcgatgctggaaggcagtaacttccgaaagccaaccaacctgttcgtacatggctacgtgacggtgaacggcgcgaagatgtccaagtctcgcgggacgttcattaaggccagcacctggctgaaccacttcgacgcggacagcctgcgctactactacaccgcgaagctctcttcccgcatcgacgacatcgacctgaacctggaagatttcgtgcagcgcgtgaacgcggacatcgtcaacaaggtggtgaacctggcctcccgtaacgcgggctttatcgccaaacgttttgacggcgtgatggcggctgaactggccgatcctgacctgtacaaaacctttaccgacgcggcagccaccattggcgacgcgtgggaaacccgtgagttcggcaaagcggtgcgcgaaatcatggccctggctgacctggcgaaccgctatgtggacgagcaggcaccgtgggttgtcgcgaaacaggaaggccgcgatgccgacctgcaggccatctgctccatgggcatcaacctgttccgcgtgctgatgacgtacctgaagccggttctgccgcagctggcagcccgcgctgaagcgttcctgaacaccgaactggcctgggatgccatggcgcagccgttgctcggccacaaggtgaacacgtttaaagcgctgtacaaccgcatcgagatgaagcaggttgaagccctggtggaagcgtctaaagaagaggtgaaggcggcttcggcaccggtcaccggcccgctggcagacgatccgattcaggagaccattacctttgacgatttcgccaaagttgacctgcgcgtggcgctgatcgaaaacgcggaattcgtggaaggatctgacaagctgctgcgcctgacgctggatctgggcggcgagaagcgtaacgtcttctccggcatccgttcagcctacccggacccgcaggtgctgatcggtcgtcaaaccgtgatggtggcgaaccttgcgccgcgcaaaatgcgcttcggcatctctgaagggatggtgatggccgcaggccctggcgggaaagatatcttcctgttaagccctgacgaaggcgcgaagcctggccagcaggtgaaa

SEQ ID NO: 19499 - DNA, 330 bp, Enterobacter cloacae
atggctaagcgtaaattgctgcttctgggtgtattactgtctctggcgggatccgctttcgctgccccgcaaacggccgctgcgtcatccggcatcaaggcctatgaagaacaagagttcatcgctgactttacgaaattcaagattggcgacacggcgccggcgcagtatcaaacgccagagtacaccatcaaacagtaccagttacgtaacctgccggctccggatgccggaacccactggacctatatgggagagaactacgtgctgatcggcgatgctgatggcaagatctacaaagcctacaatggagatattttctatcaccgc

SEQ ID NO: 19500 - DNA, 1078 bp, Enterobacter cloacae
atgttcaagcgtcgttatgcagcgctgttgcctgcgcttattctgctgtctgcctgtagtagcaaacctaagactgaagccgttcagcaaacggcgggcgcgccttccggaggattcctgctggagccgcagcacaatatgatgcagatgggcggcgacttcgcgaataacccggcggccgagcagttcatcgataaaatggtgagcaaacacggctttgacagacagcagctgcacgaaattttgtctcaggccaggcgtctggactacgtgctgcgcctgatggacaggcaggcaccaaccgcccaggtgccgagcgggccgaacggcgcgtggctgcgctatcgcaaacagtttattaccccggacaacgtgcaaaacggcgtagtgttctggaatcagtatgaagatgcgctcaaccgcgcgtggcaggtgtacggcgtaccgccggaaatcatcgtcgggattatcggcgttgaaacccgctggggccgcgtgatggggaaaacccgcatcctgcgacgcgctggcgacgctctcctttaactacccgcgccgcgcggagtatttctcttccgagctggaaaccttcctgctgatggcgcgcagcgagcaggacgatccgctcgatctgaaagggtcgtttgccggcgcgatgggctacggccagtttatgccgtcctcctataaacaatatgccgtcgactttaacggggacggtcatatcaacctgtgggatccggtagacgccatcggcagcgtggcgaattacttcaaagcacacggctgggtgccgggcggccaggtggcggtgcaggcgaacggtcaggcgccggggctggaaaacggcttcaaaaccaactacagcatttcgcagctggcagcggcaggcctaacgccaacgcagccgctgggcaacgcgcaacaggcaagcctgctgcgtctggatgtcggtacgggctatcagtactggtacggtctgccgaacttctacgtcatcacccgctataaccacagcactcactatgcgatggccgtatggcagctggggctggcggtgtctcaggcgcgcgttccg

SEQ ID NO: 19501 - DNA, 1530 bp, Enterobacter cloacae
atggctactattgattccctgaacaaggacaacacacgtctgagcgatggacccgactggaccttcgaactgctggatgtttacctcgccgaaatcgaccgggtcgcaaagctgtatcgtctggatacctatccccatcagattgaagtcattacgtccgaacagatgatggacgcctactccagcgtcgggatgccgattaactatccgcactggtcgtttggtaaaaaatttattgaaacggaacggctgtataagcacggccagcaggggctggcgtatgagattgtgattaactccaatccgtgtattgcctatttaatggaagagaacaccattaccatgcaggcgctggtgatggcgcatgcctgctacgggcacaactcatttttcaagaataactacctgttccgcagctggacggacgccagctccatcgtcgattacctgatcttcgcccgcaaatacattaccgactgcgaagagcgctacggcgtggacgaagtggaaaaactgctcgactcctgccacgcgctgatgaactacggcgtggaccgctataaacgcccgcagaaaatctccctgcaggaggagaaagcccggcagaaaagccgcgaagagtacctgcaaagccaggtgaacatgctgtggcgaaccctgccgaagcgtgaggaggaaaaaacgatcgccgaagcgcgtcgctatccgtccgagccgcaggaaaacctgctctattttatggagaagaacgccccgctgctggagccgtggcagcgtgagatcctgcgcatcgtgcgcaaggtgagccagtatttttacccgcaaaagcagacgcaggtcatgaacgaaggctgggcgaccttctggcactacaccattcttaaccatctgtacgacgagggaaaagtgaccgagcggttcatgatggaattcctccacagccataccaacgtggtgttccagccgccctacaacagcccgtggtacagcgggattaacccgtatgcgcttggcttcgccatgttccaggatattaagcgcatctgccagtcgccgacggaagaagacaagtactggttcccggatatcgccggttctgactggctggaaacgctgcactttgcgatgcgcgactttaaggatgagagcttcatcagccagtttatgtcgccgaagatcatgcgtgatttccggttcttcaccgtgctggacgatgaccgcaacaactatctggagatttccgctatccataacgaagagggataccgtgagatccgctctcgcctctcttcccagtacaacctgagcaaccttgagccgaatattcaggtgtggaacgtcgatttgcgcggcgaccgctccctgacgctgcgctatatcccgcacaatcgcgcgccgctggataaagggcgtaaagaggtgctgaagcacgtgcatcgcctgtggggttttgacgtgcagctggagcagcagaatgaagacgggagcgtcgagctgcttgaacgttgcccggcgcggttgaatacgctg

SEQ ID NO: 19502 - DNA, 876 bp, Enterobacter cloacae
atggatttaacccagcttgagatgtttaacgccgtcgcgctgacgggcagtatcacccaggcggcgcaaaaggtgcatcgcgtgccgtctaacctgacgacccgcatccgccagctggaagccgatctgggcgttgagctgtttattcgtgagaaccagcgtttgcgtttatccccggccgggcataacttcctgcgctacagcaggcagatcctcgccctggtggatgaagcgcgcatggttgtcgcgggggatgagccgcaggggttatttgccctcggcgcgctggaaagcaccgccgcggtgcgcattcccgaaacgctggcgcagtttaaccagcgctatccgcgcatccagtttgccctttctaccgggccttccgggacgatgattgatggcgtactggagggaaccctcagcgccgcctttgtcgacgggccgctgtcgcacccggagctggagggcatgccggtctaccgggaagagatgatgctggtcacgcctgccgggcagacggaaatctcgcgcgccgcgcaggtcagcggcagcgacgtgtatgcctttcgcgccaactgctcgtatcgccgacacctggagagctggtttcacgctgaccgcgccgcgcccggccgcattcatgagatggagtcctatcacggcatgctcgcctgcgttattgcgggcgcgggcatcgcgctgatgccgcgctcgatgctggaaagtatgcctgggcatcatcaggtggaagcctggccgctggcagaaaactggcgctggctcaccacctggctggtgtggcgacgcggggcgatgacccgccagctggaggcctttatagcgctgctaaacgaacgtcttcaaccagcgccttctcca

SEQ ID NO: 19503 - DNA, 660 bp, Enterobacter cloacae
atggcctttcgcgaccaaccactgggcgagctggcgctctccattcctcgcgcttctgcgctgtttcgtaaatacgatatggattactgctgcggcggtaagcaaaccctggcgcgtgcggcctcacgaaaagagctggacgttgaggtgattgaatcagagctggcgctgctggcccagcagcccgtcgacaaagactggcgaaccgctccgctcgcggaaatcatcgaccatatcatcgtgcgttatcatgaccgtcaccgtgaacagctgccggagctgatcctccaggcgaccaaagtcgagcgcgtgcatgccgacaaaccttccgtaccgcgcggtctggcgaaatacctgaccctgctgcacgaagagctttccagccacatgatgaaagaagagcagatcctcttcccgatgattaaacagggaatgggaagccaggcgatggggcctatcagcgtaatggaaagcgagcacgatgatgcgggtgaactgctggaagtgatcaaacacaccacccgcaacgtcacgccgccgccagaagcgtgcacaacgtggaaagcgatgtacaacggcattaacgagttgattgacgacttgatggaacacatcagtcttgagaacaacgttctgttcccgcgggcattagctggggaa

SEQ ID NO: 19504 - DNA, 1014 bp, Enterobacter cloacae
atgaatcactacacgcgctggcttgagctaaaagaagccaatccgggtaagtacgcgcgcgacgtcgcggggttaatgaacatcagtgaagcagagctgacctttgcccgcgtaggtcacgacgcctggcgactgcgcggtgaaatccgcgagatcctgggcgcgctggaggcggtgggcgaaaccaaatgtatctgccgcaacgaatacgccgtacacgagcaggtcgggagatttaccaaccagcacctgaacagccacgccgggctggtgctgaacccgcgcgcgctggatctgcgcctgttcctcaatcagtgggcgagcgcgtttcacatcagtgaagccaccgcccgcggcgagcgacagagcattcagttcttcgaccaccagggcgatgccctgctgaaggtctacgccacggataataccgacgtttcagcctggggcgacgtgctgacccgctttatctttgccgagaatcctccgctggcgttgaagatggccgatgccccgactcatgcagaaaacgcaaatgctgctctcgtggataacgagtggcgcgccatgaccgacgttcatcagttcttcagcctgctcaagcgccataacctcagccgccagcaggcgtttcgcctggtgggtgacgatctggcctgccgggtagaaaacaccgcgctggcgcagctcctggagacggcgcgtcgggacggtaacgaaatcatggtcttcgtcggcaaccgcggctgcgtgcagatcttcaccggcgcggtggaaaagctggtgccaatgaaaggctggctgaacgtctttaacccaacctttaccctgcatctgcttgaaggatccattgcggaaacgtgggtcacgcgcaagccgacggctgacgggcatgtcaccagcctggagctgtttgccgccgatggaacgcaaatcgcccagctgtacggccagcgtacggaaggcgaaccggagcagagccagtggcgcagccagattgacgccttaacgggcgaa

SEQ ID NO: 19505 - DNA, 723 bp, Enterobacter cloacae
atgaaagttatcatcgtagaagatgaattcctggctcagcaggagctcacctggcttatcaaaacccacagccagatggagattgtgggtacgtttgatgatggtctggacgtgctgaaatttttgcagcataaccgggtagacgccattttcctggatatcaatatcccgtcgctggatggcgtattgctggcgcaaaacatcaatcagtttgcccataagccatttatcgttttcgttaccgcctggaaagagcacgccgtagaggccttcgagctggaggcttttgactatattcttaagccttatcaggagtcgcggattgtcagcatgctgcaaaagctggaggccgcctggcagcagcaaaccgcccccgccagcccgacggtacgcgaaaacgacaccataaatctggtcaaagacgagcgcatcatcgtgaccccggtcaacgatatctactacgccgaagcgcacgaaaagatgacgtttgtctatacccggcgggaatcgtacgtgatggcgatgaacattaccgaattctgcagcaagcttccggctgcccactttttccgctgccaccggtcgttttgcgtaaatttaaataagatccgcgagatcgaaccgtggtttaacaacacctacattttacgtctgaaagatctggattttcaggtgccggtaagccgcagcaaggtgaaagagttccgccagctgatgcacctg

SEQ ID NO: 19506 - DNA, 1686 bp, Enterobacter cloacae
atgctgctggcggtttttgatcgtgcggcattaatgctgatttgcctgttcttcctgattcgcattcgcctgtttcgcgagctgttgcacaaatcggcccactcgccaaaagagctgctggccgttaccgccatcttttcgctgttcgccctgttcagcacctggtcaggcgtgccggtagagggttcgctggtaaacgtgcgcattatcgccgtcatgtccggcggaattttgtttggtccgtgggtcggcgtcatcaccggcctgattgccgggacgcaccgctatctgattgatatcggtggcgtaacggcggtgccgtgctttatcaccagcattatcgccggggtgctttccggctggatcagccgcaaaataccgaaaaaacagcgctggcgcgccgggatcgtcgccggcatggtgtgcgaaacgctgaccatgatccttgtcgtcgtctgggcccccaccaccgagctggggctggatatcgtttcgaaaatcggtattccgatgatcctgggcagcgtgtgcatcggttttatcgtgctgctagttcaaagcgttgaaggggaaaaagaggccagtgccgcccgtcaggccaagctggcgctggatatcgccaacaaaacgctgccgcttttccgccacgtgaacgcggaatcgttgcgtcaggtctgcgaaattatccgccacgacatccacgctgacgccgtcgccatcaccaatattgatcacgtgctggcctacgttggcgtcggggagcacaactatcgcgacaacgatgacaccataagcccgaccaccagacaggcgattaactacggtaaaatcattattaaaaacaatgatgaagcccaccgaacgccggaaattcactcgatgctggtcatcccgctgtgggagaaaggcgtcgtgacgggcacgctgaaaatttattactgccacgcgcatcagatcacctcaacgctacaggagatggccatcggcctgtcgcagattatctccacccagcttgaggtttcgcgggcggaacagctgcgcgagatggcaaataaggcagaactgcgcgcgctgcagagtaaaatcaatccccatttcctgtttaacgcgctgaacgctatctcctcgtccattcgcctaaatccggacaccgcgcgccagctgatttttaacctgtcgcgctatctgcgctacaacatcgaactgaaagatgacgagcagatcgacatcaaaaaagagctttatcagatcaaggactacatcgcgatcgagcaggcccgctttggcgacaagctcacggtcatttacgatattgatgaagaggtcaactgcgtgatcccaagcctgcttatccagccgctggtcgaaaacgcaattgttcacggtattcagccctgtaaaggcaaaggcgtcgtcaccatcagcgttaccgaaagcggcaaccgggtgcggattgccgtgcgcgataccggccacgggattgatccaaaagtcattgagcgcgtggagtctaacgagatgccggggaataaaatcggtctgctgaacgtgcaccaccgggtcaagctgctttacggcgacgggctgcatattcaacgtcttgagccgggcaccgaaattgctttttacgtcccgaatgagcgctctcgcgcgcatacgacgacatcactattgccccaggtggag

SEQ ID NO: 19507 - DNA, 867 bp, Enterobacter cloacae
gcgctgttcccccgagttaccggggtcgtgctggtcgcgctgttctctccggtgatgctcggcggtctgttcttcagtgccaaatcgctgcaaccgaaatttcccaaactgaacccgctgccgggtattgcgaaaatgttctctgagcagaccggggctgagctgctcaaagccgtcctcaaatcggtgctgatgggcagttccgcaggcttttacctctggtaccactggccagaaatgatgcgtcttatcagcgaatcgcctctcaccgcgatgagcaacgcgctgaatctggtcgggctctgcgcgctgcttgtggtgctcagcattatcccgatggtgggttttgacgtgatcttccagctttatacccacttcaaaaagctgcgcatgtcgcgtcaggatatccgtgacgaatataagcagatggaaggtgacccgcacgtaaaagggcgtatccgccagatgcagcgtgccgccgcccgtcgccgcatgatggacgatgtgccgaaggccgacgtcattgttaccaacccaacgcactattccgttgcctgcgctatgacgaaaacaaaatgagcgcgccgaaagtcgttgctaaaggggcggggctgatcgcactccgtatcagggaaattggcacagaacaccgcgtgccgatcctggaagcccctccgctggcgcgtgccctgtaccgccatgcggatatcggacaacagatcccgggacaactctacgccgccgtggcggaagtgctggcctgggtgtggcagttgaagcgctggcgtctggctggcggtcagcggcctgtaaaacctgaaaaccttccggtgcctgccgcgctggattttatgaacgagaaggaca

SEQ ID NO: 19508 - DNA, 2107 bp, Enterobacter cloacae
cccggtatgtcgcttcgcggagatattggggcaggtgttttgtacgttagtgtcccgcaggcttatctcgaatatgtggctgaaaactgggatccaccgtcacgctgggatgaaggcgttccgggggtgctccttgattacaacgtgaacgggcagattaaccacgcttacggcagcgatgatggtggcgactcacgaaccttaagcggcaatggtacggcgggggcgaatctgggcgcatggcgttttcgtgccgactggcagggacagcagcagtctggtgacggttcggatagcgtacgctcatttgactggaaccgttactacatgtaccgcgccattccttccctgcgcgcgaagctgacgatgggtgaagattacctgacgtccgatatgtttgacagcttccgctttacaggggcaagcctgatctcaagcgataacatgctgccgccgaatctgcgtgggtatgcgccggaagtaacgggagtggctaagaccaacgccaaagtcacggtgagtcaacaggggcgcgtaatttctgaaactacggtagcagcaggcccgttccgtattcaggatttgaataatgccgtgtccggtacgctggatgtgaaggtcaaagagcaggatggtacagagcagacttatcagatcaacacatcgaatgtgccatatctgactcggccgggaatggtgcgttacaaaattgcaaccggtaaaccatctgattacgaccatcacagcaacggccctgtatttggaaccggggaattttcctgggggatcaataacggctggtcgctgtacggaggcctgctgggcgccggggattataacgctctgtcgctgggtatcggtcgtgatttgctggcgctgggggcgatttcttttgacgtaacggagtcctctgctcgtttgccggatcaaggtaatcagcaaggggggtcgtaccgcgtaagctattcaaaacgctttgacgaaacgaacagtcaggtcacttttgctggctaccgtttttccgaacgtgaatttatgacgatgacggaatatctcgatgcccgttataagtcatacgaagacgccggtaataacaaggagatgtataccatctctttcaaccagcagttgacctcgctgaataccagcctcgtacgtgaactacagtcgccagacgtactgggataacgacgcgagtacaacatggaatacctcgatttcgcgctactttgatctcggacgctttaaaaacctgagcgttaacctctcagctttccggacggaaaacgccgattacaaagacgatggggtctatgccagcgtgtcgattccatggggggaaacggcgtcctttggctatgacagccagtacggccacgggggaagcagccataacgtttcctacgatgaccgcattgataacaataatacctaccacctttctgccggtaccgatcaaaacggtcggggtggtggaagcggttacttcacgcatgaaggggatattgctgaaatgacggccaccgcagcttaccagagcagcgattacagctcggcgggtattgccctgcggggtggcatgacggcaacccaatccggtgccgctttgcaccgaatttcggtgccgggcggtacgcgaatgatgctggataccgatggggtcggcggtgtaccggtttatggcaatgctgccattacgcacaccaacatgtttggcaaagcagtgctggctgatgtcagtagctactaccgcaacagtatgaacatcgatatgaattcactcagcgatgacgtggatgcaacccgttcggtagtacagggaaccttaaccgaaggtgcgattggttatcgtaagttcggcgtaatcgccgggaaaaaagcgctggtcgttgttcgtctgagcgatggttctgtaccaccgtttggcgcaaccgtcagcaacaaggataaggaacagaccgggttagttagcgatgacggtagcgtctggctgacggggatgaagtccggtgaggttatggccgtaagctgggatggcgctgaacagtgccagatacgcttaccgtcgccattgccactcaatatggacactcaacatatgctgctg

SEQ ID NO: 19509 - DNA, 707 bp, Enterobacter cloacae
gcactgacaataaccgctttactgatgacttcacaggcggcgcatgccgccctggcgctggaccgaactcgcgcgatccttgatggtggtgagaagtccctaagcatgagcgtaaccaaccagaatcgcgagctgccttttctggctcaggcctgggtggaagatggtcagggtaaaaaattaaccgatcctctggtggcattaccaccggtacagcgtattgagccaggcagcaaaacgcagtaaaagtccaggcatccgcgtcgatgaacacgctgccgcaggatcgcgagtcgctgttctatttcaacctgcgtgaaattccaccgaagagcagtaaaccgaacacgctgcagctggccctgcaaacgcggatcaagctgttttatcgtccggcaccgctggcggtgaacccaaacgataagccgtggcaggaaaaggtcacgctgacacgagaaggggggaaatttgttgccaacaacccaacgccatattttgtctcgatcattgatgccgcagccaccgagaaaggcaatgcgcaaaagggcttcaagccggtaatgattgcgccgaaaagcagcgcgcctttaagcgttgatgccggcgcgctgggcaacagcccggttctgacctacatcaatgactatggtggacgtccgaagctgattttcgcctgtgcgggcaatacctgtagcgtcaaagaagcg

SEQ ID NO: 19510 - DNA, 1031 bp, Enterobacter cloacae
aaaaaaatgctcgccgctgcggcgctggtgcttggcataggtgccgcgcacgctgatgacagcaaaacgctctacttctacaactggaccgagtacgtgccgccgggcctgctggaacagttcacaaaggaaacgggcatcaaggttatctactcgacctacgagtcgaatgaaaccatgtacgccaagctgaaaacctacaaagacggcgcgtacgatctggtcgtgccttccacctactttgtcgacaaaatgcgcaaagagggcatgatccagaagatcgacaaaacgaagctaaccaattttgcaaacctcgatcctgagatgctcaacaagccgttcgacccgaataacgactactccattccgtatatctggggggcaaccgcgatcggcgtgaacagcgaggccgtcgatccaaaaacggtgacaagctgggccgatctctggaaaccagagtacaagggtagcctgctgttaaccgacgacgcgcgtgaagtgttccaggtcgcctgcgcaagctgggctactcgggcaacacgacggatccgaaagagattgaagcggcgtataacgagctgaaaaagctaatgcctaacgtggcggcgttcaactctgataacccggcaaatccgtatatggaaggcgaagtgaacctggggatggtgtggaacggctccgcgtatgtcgcccgccaggccggtacgccgcttgaggtggtctggccgaaagaaggcgggatcttctggatggacagccttgcgatccccgccaacgcgaaaaacgctgaaggggcgcacaagctgattaacttcctgctgcgcccggacgtagcgaaacaggttgccgagacgattggctacccgacgccaaacctcgccgcacgcaagctgctgaagcctgaggtagctaacgataaatcgctctatccggatgccgaaaccatcagcaaaggtgaatggcagaacgatgtcggtgacgccagcctcctctacgaagagtattaccagaaattaaaagcgggccggtaa

SEQ ID NO: 19511 - DNA, 561 bp, Enterobacter cloacae
atgtctttgattaacaccaaaattaaacctttcaaaaaccaggcgttcaaaaacggtgagttcatcgaagttaccgagaaagataccgaaggccgctggagcgtcttcttcttctatccggctgactttaccttcgtttgcccgactgaactgggtgacgtggcagaccattacgacgaactgcagaagctgggcgtagacgtttactctgtctctaccgatacccacttcacccacaaagcatggcacagcagctctgaaaccatcgcgaaaatcaaatacgcgatgatcggcgacccgactggcgccctgacccgtaacttcgacaacatgcgtgaagatgaaggcctggctgaccgcgccaccttcgttgttgacccgcagggcattatccaggctatcgaagttaccgctgaaggtatcggccgtgatgcttctgacctgctgcgtaaagtgaaagccgctcagtacgtggcttctcacccaggcgaagtatgcccggcgaaatggaaagaaggcgaagcgacgctggctccatccctggacctggttggcaagatc

SEQ ID NO: 19512 - DNA, 1053 bp, Enterobacter cloacae
gccctcatgattattgcgtgtctgtggattgttcaacccgttattctcggctttgcgtgggctgcgaccgtagtcgttgccacgtggcctttgctgctgcgcttgcagaagctgctgtttggccgccgcgggctcgccgtactggtcatgacgctcctgctgttcctgctgtttattattccgattgccctgctggtgaatagtctggtggattccagtggcccggttattcgcgccattagcagcggtgacctgacgctgccggatctcgcctggctaaacagcattccggttgtgggctcaaaactctacagcggctggcatagcctgctggagatgggcggcagcgcgctgatggcaaaagtccgcccgtatattggcaccactaccacctggtttgtcggtcaggcggcgcatatcggccgctttatgatgcactgtaccctgatgctgctcttcagcgccctgctctactggcgcggcgagcaggtggctttaggcgttcgtcactttgccacccgcctggcgggcaaacgcggtgacgccgcggtactgctggccgcacaggccgtgcgcgcggttgcgctgggggtggtggtcaccgcgctggtgcaggcggtgctgggcgggatcggtctggcaatttccggcgtaccgtacgccaccgtgttcaccgttgtcatgctgatgacctgtcttgcgcaactgggaccgttgctggtgctggtccccagcattatctggctctactggacgggcgataccacgtggggaacggtgctgctggtctggagctgcgtggtcggcaccatggataacgtgattcgtccgatcctcatccgcatgggcgcagacctgccgctgatcctgatcctctccggggtcattggcggattgattgcctttggcatgattggcctgtttattggcccggtgctgctcgccgtcacctggcgtctgttctctgcctgggtgcatgaaattccgccgccgggaactgacccggacgtgattttgagcgaactggaagagctggaagagaagaacacgcat

SEQ ID NO: 19513 - DNA, 171 bp, Enterobacter cloacae
atgacgtcaagtcatcatggcccttacgagtagggctacacacgtgctacaatggcgcatacaaagagaagcgacctcgcgagagcaagcggacctcataaagtgcgtcgtagtccggattggagtctgcaactcgactccatgaagtcggaatcgctagtaatcgtagat

SEQ ID NO: 19514 - DNA, 639 bp, Enterobacter cloacae
tcccccgagtttggcgaagggatggcgtacgggtttggtgccgacgccaccagcgagcagagcgtgatggcgctggcccgcggcgtggacgagatttttgggcgtaccgacctgctggtctacagcgcagggattgcgaaagcggcctttatcagcgatttcgaactgggggattttgaccgttcgctgcaggtgaatctggtgggctatttcctctgcgcccgcgagttttcccgtctgatgatccgcgacggcattcaggggcgcatcattcagatcaactccaaatcagggaaagtgggcagcaagcacaactccggctacagcgcggcgaagtttggcggcgtggggctgacgcagtctctggcgctggatctggccgaatacggcatcaccgtgcattcgctgatgctgggcaacctgctgaaatcgccgatgttccagtccctgctgccgcagtatgccaccaagctcggcatcaaggctgaggaagtggagcagtactacatcgataaagtgccgctgaagcgcgggtgcgattatcaggacgtgctgaacatgctgctgttttacgccagcccgaaagcctcgtactgcaccgggcagtcgatcaacgtgacgggtgggcaggtcatgttc

SEQ ID NO: 19515 - DNA, 357 bp, Enterobacter cloacae
atggttaccgcactcatcaccgtcgccgccctcgcctggatctgccagatggcgtttggcggctggcagatccaccagtttaaccgcgcgtttgacgcgctgtgtcagaaaggtcgcgtcggggtcgggcgttccggcggacgcttcaaaccgcgcgtggtcgtcgccgttgcgctggatgaaaacaatcacgtctgcgattccctcatcatgcgcggcatgaccgtctttgcccgtccggcgaaaatccaggcgatcaacggcatttcgctgcaggaattacggcctgatgtgatctttccccatgatccactctgtcagaatgcactatcattagcgcttaatctgaaacatgga

SEQ ID NO: 19516 - DNA, 1317 bp, Enterobacter cloacae
atgacccatcacttaaaatcgcgtgacatcatcgcgctgggctttatgacatttgcgctgttcgttggcgcaggcaacatcattttccctccaatggttggcttacaggcgggtgaacacgtctggaccgccgcgtttggtttcctgattactgccgtgggtctgccggttctgaccgtcgttgcgctggcgaaagtcggcggcggtgtggatagcctcagcaccccgattggcaaagtggcgggcgttctgctggcaaccgtctgctatctcgccgttggcccgctgtttgcgaccccgcgtacggcaaccgtttccttcgaagtgggtattgctcccctgaccggtgacggcgcgatgccgctgtttatctacagcctgatctacttcgcgatcgtgattctggtttccctctatccgggaaaactgctggataccgtgggtaacttcctggctccgctgaaaattgtggcgctgattgttctggcggtagcggccatcgtctggccagcgggcccgattagcgacgcgatggacgcctataaaaacgccgcgttctctaacggctttgtgaacggctacctgacgatggatacgctgggcgccatggtgtttggtatcgttatcgttaacgccgcgcgttcccgcggtgtgaccgaagcgcgtctgctgacccgctataccatctgggctggcctgatggccggcgtggggctgacgctgctctatctggcgctgttccgtttgggctccgacagcgccatgctggttgagcagaacgccaacggtgcggctatcctgcacgcctacgttcagcacacctttggcggtgcgggcagtatgctgctggcagcgctgattttcctggcgtgtctggtgacggcggttggcctgacctgcgcctgcgcagagttctttgcacagtatctgccgctctcttaccgcaccctggtgtttatcctcggcatcttctctatggcggtgtccaacctcggtctgagccacctgattcaggtctcgattccggtgctgacggcgatttatccgccgtgtatcgtgctggtcgtgctgagctttactcgcccgtggtggaacaactcttcacgaattattgcgccagccatgtttatcagcctgatttttggtatccttgacgggattaaagcatcagctttcgcgcacatactgccggcatggacacagcgtctgccgctgtccgagcaggggctggcctggctgatgcctaccgttgttgcactggttctggcgattatctgggaccgtgctgcagggcgtcaggtcgcatcgaacgctcat

SEQ ID NO: 19517 - DNA, 1309 bp, Enterobacter cloacae
gtgctggaacgtctgtcatggaaaaggctcgtctttgaactgatcttatgctgtattccggccttccttctgggggcctttcttggacacctgccgtggtttctgctggcgtcggtcaccgggctgctgatctggcatttctggaacctgctgcgcctctcctggtggctgtgggttgaccgaagtatgacgccgccgccggaaagcggcagctgggagccgctgctgtacggtctgcatcagatgcagatgcgtaataaaaagcgtcgccgcgagctgggaagccctgattaagcgttttcgcagcggtgcagagtcgctgccggatgccgttattctgacgaccgaagaagggacgatcttctggtgtaacggccttgcgcaacagctgctgggcctgcgctggcccgacgacaatggccagaatatcctcaaccttctgcgttatcccgaatttacgctgtatctgaaaaagcgtgattttacccgcccgcacaatctgaagctcaataatggtcgccatctggaaatccgcgtgatgccctacagcgataagcagtggctaatggtggcgcgcgatgtcacccagatgcaccagctggaaggggcgcgtcgcaacttcttcgccaacgtcagtcacgaactgcgtaccccgctgaccgtgcttcagggctacctggagatgatgcaggagcaaacgcttgaaggcgcgccgcgtgaaaaagcgctgcacaccatgcgcgagcaaacgcaccggatggaagggctggtgaagcagctgctgacgctctcgaagattgaagcggcgccgtcgctcgcgctaaatgacaccattgatgtgccaatgatgctgcgggtcgttgagcgtgaagcgcagacgttaagccacaaaaagcatcacctgacctttgaggtcgacaatacgctgaaggtgctgggcagcgaagatgaactgcggagcgccatttccaacctggtgtataacgcggtaaatcatacgccggaggggacgaatatcgtggtgcgctggcatcatgtcccaacgggggctgagtttagcgtggaagacaacgggccggggattgcacctgagcatattccgcgtctgaccgagcgcttttaccgtgtggataaagcgcgatcccggcagactggcggaagcggtctggggctggcaattgtgaaacacgcggtgaatcaccatgaaagccgtctcgatattcagagtacgctgggtaaaggaacctgcttcagtttcgttattccggaacgattaattgccaaaaagatcgcctgacggcaggcgtgt

SEQ ID NO: 19518 - DNA, 1220 bp, Enterobacter cloacae
cttttttgccacggatcagctatgcgcatacttcacacctcggactggcatctgggtcaaaatttttacagcaaaagccgtgcggctgaacatgaagccttcctgaactggctgctggaaacggcccggacgcacgaggtggacgcgattattgtggcgggtgacatctttgataccggctcaccccccagttatgcgcgtgaactgtacaaccgcttcgtggtgaatttgcagcaaaccggctgtcatctggtgattgtcgccggcaaccatgattccgtcgcgacgctcaatgaatcccgcgacatcctggcatttctcaataccaccgtcgtcgccagcgccgggcacgccccgcagatcctgaaaaaacgcgacggcactccgggggcggtgctgtgccctattccgtttttgcgtccgcgggacatcatgcaaagccaggcggggctgtcgggtgcggaaaaacagcagcatctattacaggccatcaccgactattatcaccagcagcacgccgatgcctgcgccctgccggcgaccagccgattccggtaattgcgacggggcatctcaccaccgtcggggccagtaaaagtgacgcggtacgtgacatctatatcggcacgctggatgcctttccggcgcagaacttccctccagccgactacattgcgctcgggcacatacaccgggctcagatcgtcggcggcagcgagcacatccgctactgcagctcgccaatttcgctcagctttgacgaaacgggcaaggccaaatccgtccatctggtgagcttctccaaaggaaaacttcacgccgtcgagacgctggaggtgcccgtcacccagcctctagcagtgctaaagggcgatcttgacgccattaccgcccagcttgagcagtggggcggaacagcgcttaacccgcccgtctggctggatatcgaaatcaccaccgacgactacctgcacgatatgcagcgaaaaattcaggcgctgacggaagatttacccgtcgaagtcttactggtacgccgcagccgcgagcagcgcgagaaaattctgttaagcgctcaacgcgaaacgctcagtgaactgcgggttgaagaggtgtttgaacgcaggctctcgcaggaggaaattgacgacgcgaagcgcgcaagactcagcgaactgttcagccataccctgcatgcgctcaatgatgaggaagaaaac

SEQ ID NO: 19519 - DNA, 1281 bp, Enterobacter cloacae
atgaaaggtaccgtttttgccgtcgccctcaaccatcaaagccagcatgaagcctggcgtgaggcctttgaaaaagcgccctacaacacgccgccgaaaacggcggtgtggtttatcaagccgcataacacggtgattcgtgcgggcgagccgatccccttccctcacggggaaacggtgctgagcggtgcgacggtggcgctggtcgtgggcaaaaccgccagcaaggtgcgcgcggaggacgccgcggagtacatcgcgggatatgcgctcgccaacgaggtgagcctgccggaagagagcttctaccgcccggccatcaaggccaaatgccgggacggattttgcccgctgggcgagctggtcgccgttaataacgtggataacctgaccatcatcaccgagatcaacggccgcgaacgatcactggtgcacggccgatcttcagcgtaacgccgccgaactgctgagcgccctgagcgagttcgccaccctcaatcccggcgatgcgatccttctcggcaccccgcaaagccgcgtggagatccgcccgggcgatcgcgtgcgtgttctggcagaaggctttccgccgctggaaaatccggtggtggatgagcgtagcgtcactattgcgcacagcacgccgccgcaagccacgctgtttgccctcgggtctgaactatgccgatcacgccagcgagctggactttaagccgccgaccgagccgctggtatttatcaaagcgccaaacaccttcaacggcgacggccagacgtcggtgcgcccgaacaatatcgaatacatgcattacgaagcggagctagtggtggtcatcggtaaaaccgcgcgtaaggtcagcgaagccgaggcgatggactatgttgcgggctatacggtctgcaacgactacgccatccgcgactacctggaaaactactaccgcccgaacctgcgggtaaaaagccgcgacgggctgacgcccatttccccccacatcgtgccgaaagcggcaattcccgatccgcacaacctcgccctgcgcaccttcgttaacggcgagctgcgccaggaaggcaccaccgccgatctcattttcagcatcccgtacctgatcgcgatactaagcgattttatgaccctgcagcctggcgacatgatcgccactggcacgccgaaggggctttccgacgtggtgccgtgcgatgaggtggtgttgaagtggatggcctggaccgcctggtaaccgtattgtcagcgaggagacttcaaaatgaaaaaga

SEQ ID NO: 19520 - DNA, 849 bp, Enterobacter cloacae
atgggtaaattagcgctagcgccaaaaatcacccacgtgccgtcgatgtacctctccgagctgccggggaaaaaccacggctgccgccagtcggccatcgacgggcataaagaaatcagcaagcgctgccgcgagctgggcgtggacaccatcatcgtgttcgacacccactggctggtgaacagcgcataccacatcaactgtgcggaccattttgcgggcgtatacaccagcaacgagctgccgcactttatccgcgacatgacctacgactacgacggcaacccggaactcggccagctgatcgccgacgaggcggtgaagctcggcgtgcgcgccaaagcgcacaacatcccgagcctcaagctggagtacggcacgctggtgccgatgcgctacatgaacgcggataaacacttcaaagtggtctccatctcggcgttctgcacggttcacgacttcgccgacagccgcaggctgggcgaggccatcgtcagcgccattgagaaatacgacggcaccgtggcggtgctcgccagcggctcgctatcgcaccgctttatcgacgaccagcgcgcggaggaagggatgaacagctacacccgcgagttcgaccgtcaaatggacgagcgcgtggtgaagctgtggcgcgaggggcagttcaaagaattctgcagcatgctgccggagtacgccgactactgctacggcgagggcaacatgcacgacacggtgatgctgctggggatgctcggctgggaccagtacgacggtaaggtggagttcctcaccgagctgttcgccagctccggcaccggccaggttaacgccgttttcccgctgcccgcg

SEQ ID NO: 19521 - DNA, 378 bp, Enterobacter cloacae
atgccgcactttattgctgaatgtaccgacaacatccgcgagcaggcggacctgccggggctgttcgccaaagtcaacgaggcgctggccgccacgggcatcttccccatcggcggcatccgcagccgcgcccactggctggacacctggcagatagccgacggcaggcacgactacgcctttgtgcatatgacgctgaagattggcgccgggcgcagcctggagagccgggaagccgtgggggagatgctttttgcgctgatcaaggcacatttcgcggagctgatggccgaccgctatctggcgctgtcgttcgagctcgacgagctgcacccgacgctcaattacaaacaaaacaacgtgcacgcgttgtttaag

SEQ ID NO: 19522 - DNA, 2130 bp, Enterobacter cloacae
atgatcatcgtcggcgcgggtctgaaccactggtatcacctcgatatgaactatcgcggtctgatcaacatgctgatcttctgcggctgcgtcggtcagagcggcggcggctgggcgcactacgtcggccaggagaaactgcgtccgcagaccggctggcagcctctggcgtttgccctcgactggcagcgtccggcacgccatatgaacagcacctcctacttctataaccactccagccagtggcgctacgaaacggtcaccgcgcaggagctgctctcgccgatggcggataaatcccgctacagcggccacctgattgacttcaacgtgcgtgcggaacgcatgggctggctcccgtcggcgccgcagctgggcactaacccgctgcgcattgcggaagcggcgaagcaggcgggcatgtctccggtggattacaccgtgaaatcgctgaaggatggctcaatccgcttcgcggcggaacagccggagaacggtaaaaaccacccgcgcaacctgttcatctggcgctccaacctgctgggctcgtccggtaaaggccacgagtacatgctgaaatacctgctcggtaccgaaaacggcatccaggggaaagatcttggtaagcagggcggcgtgaagccggaagaggtggagtggaaagacaacggtctcgacggcaagctggatctggtggtgacgctcgacttccgtctgtccagcacctgcctgtactccgatatcgtgctgccaaccgcgacctggtacgaaaaagacgacatgaatacctcggatatgcatccgtttattcatccgctgtctgcggccgttgacccggcgtgggaatcaaaaagcgactgggatatctacaaagacatcgcgaagaaattctccgaagtctgcgtagggcacctcggcaaagagacagacgtggtgacgctgccaatccagcacgactccgccgccgagctggcgcagccgctggaagtgaaggactggaaaaaaggggaatgcgacctgatcccgggcgtaaccgcgccgcacattattccggttgaacgcgactacccggcaacctacgagcgctttacctctatcggcccgctgatggagaaaatcggtaacggtgggaaggggatcgcctggaacacccagagcgaaatggatctgctgcgcaagctcaactacaccaaagcggacggcccggcgaaaggccagcctatgctgaacacggcgattgatgcggcagagatgatcctgaccctggccccggaaaccaacggccacgtcgcggtgaaagcctgggcggcactgagcgagtttaccggacgcgatcacacgcacctggcgaagaataaagaggaagagaaaatccgcttccgcgatattcaggcccagccgcgcaagattatctccagcccgacctggtccggcctggaagatgagcatgtgtcctataacgcgggctacaccaacgttcacgagctgatcccatggcgcaccctgtccggccgtcagtcgctgtatcaggatcaccagtggatgcgcgacttcggtgaaagcctgctggtctaccgtccgccaatcgacactcgctccgtaaccgcagttatgggcgcgaaatcgaacggtaacccagagaaggcgctgaacttcctgacgccgcaccagaagtgggggatccactccacctacagcgacaacctgctgatgctgacgctgtcgcgcggcggtccgattgtctggatgagcgaaacggatgccaaagatctgggtattgaagataacgactggatcgaagtgttcaacagcaacggtgccctgacggcgcgtgcggtggtgagccagcgcgtaccggccgggatgaccatgatgtaccacgctcaggaacgtatcgttaacctgccggggtcagagatcaccgagcagcgcggcgggatccacaactccgtgacccgcattacgccgaagccgacccacatgatcggtggctatgcgcagctggcctacggctttaactactacggcaccgtaggatcgaaccgcgatgagttcgtggtggtacgtaaaatgaagaatattaactggttagacggcgaaggtaatgaccaggtacaggagagcgtaaaa

SEQ ID NO: 19523 - DNA, 1867 bp, Enterobacter cloacae
atgttttatcaggatccttttgacgtcatcatcattggcgggggtcatgcaggcactgaggccgcaatggccgcagcgcgtatgggtcagcagaccctgcttttgacacacaatatcgacacgctgggacaaatgtcctgtaatccggcgattggcggcattgggaaaggacacctggtaaaagaagtggatgcacttggcggcctgatggcgaaagcgatcgatcatgctggcatccagtttaggttactaaacgcgagtaaaggtcccgccgtgcgtgcgacccgagctcaggcagaccgcgtactttaccgtcaggctgtgcgtaccgccctggagaaccagccgaacctgatgatcttccagcaggcggttgaagatcttatcgttgagaacgatcgcgtcgtaggtgccgtgacccagatgggtctcaaattccgtgcgaaagccgtggtgctgaccgtgggcacattcctggacggtaaaattcatatcggtctggataactacagcggtggccgtgccggcgatccgccgtctattcccctgtctcgccgtctgcgtgaacttccgcttcgcgtcagccgccttgaaaaccggtacgccgccgcgtattgatgcgcgcaccattgatttcagcgtgctggcgcaacagcacggtgataatccgatgccggtgttctcgttcatgggcaatgcggctcagcatccgcagcaggtaccgtgctacatcacgcataccatcgagaaaacccatgacgtgatccgcaataacctcgatcgaagccccatgtatgccggcgtgatcgaagggatcggcccacgctactgtccgtcgatcgaagacaaagtgatgcgattcgccgatcgtaaccagcaccagatcttcctggagccggaagggctgacctcaaatgaaatttatccgaacggcatctccaccagtctgccgttcgatgtacagatgcaaattgttcgctcaatgcaggggatggagaatgcgaaaatcgttcgtcccggctacgctattgagtacgatttcttcgatccacgcgacctgaagccaaccctggaaagcaaattcatccacggactgttcttcgcggggcagattaacggcactaccggctacgaagaagcggctgcgcagggcctgcttgccggtttgaacgccgcgcgcttctccgctgagaaagagggctgggcaccaggccgttctcaggcgtatctgggcgtgctggttgacgatctctgcacgctgggtaccaaagagccgtatcgtatgtttacctctcgcgctgaatatcgcctgatgcttcgtgaagataacgccgacctgcgtctgaccgaaatgggccgcgagctgggtctggtcgatgacgaacgctgggcgcgcttcaacgaaaagctggagcgcattgaacaggaacgtcagcgcctgaaaaccacctgggtgaatccgcaggcggaaaccgccgccgaagtaaacgctcacttaaccgcgccgctgtcgcgtgaagccagcggggaagatctgctgcgccgtcctgaagtcacctacgagaacctggtcaaactgaccgccttcgcgccggggctggaagacgctgaagcggcagagcaggttgagatccaggtgaagtacgaaggttacatcgcgcgtcagcaggatgagatcgaaaaacagcagcgtaacgaaaacacgctgctgccggaaatgctggactaccgccaggtgacgggcctttccaacgaagtgatcgccaagctgaacgatcacaaaccggtatcgatcggccaggcatcccgtatctccggcgtcacgcctgcagcgatttcgatcctgctggtctggctgaaaaagcag

SEQ ID NO: 19524 - DNA, 965 bp, Enterobacter cloacae
atgaaacgacctggtatcaacaggtcaaggaagatatcgacgctgagcagtctgattccgcgacattatcggaacggctgcaggacttgtctctataaatatgatggaaaattataaacataaaacggtgttactggacgaggccgttaacggtctgaatattcgtccggatggcatctacattgatggcacgtttggtcgcggtggtcactcacgtttgattctctcccagcttggagaggaaggacgtctgctggcaatcgatcgcgatccgcaggcaattgccgttgcacagaccatcaatgatccacgcttttccatcgtgcatggacctttctctgcgctcgcggaatatgttgccgagcgcggcctgacgggcaagatcgacgggattcttctcgatcttggcgtctcttcaccccaacttgatgatgctgaacgtggtttctcctttatgcgtgatggtccgctggacatgcggatggacccgacgcgcggtcagtctgccgctgagtggttacagaccgctgacgaagcagacatagcatgggtcatcaaaacgtttggcgaagagcgctttggcaaacgtattgcgcgcgccatcgttgagcgcaatcgcattgagccaatgacccgcaccaaagagctggctgaggtgatcgcggcggcgacaccggtgaaggataagcacaaacatcccgcgacccgtaccttccaggcggttcgcatctgggtaaacagtgaactggaggaaatagagctggcgctaaaaagctcgctcgacgtgctggccccgggtgggcggttatccatcatcagcttccattcgctggaagaccgtattgtgaaacgctatatgcgtgaacaaagccgcgttccacaggtgccagcggggctgccgatgacggaagaacaactcaggaagctgggtggccgtcagttgcgagcattaggcaagttgatgc

SEQ ID NO: 19525 - DNA, 360 bp, Enterobacter cloacae
atgttccgtggagctacgttagtcaatctcgacagcaaagggcgtttatcggtaccaacccgataccgcgaccagctgattgagaacgctgcgggtcaaatggtttgcaccattgacattaactccccctgcctgctgctttaccccttgcctgaatgggaaattattgagcaaaagctgtcgcgactgtcgagcatgaacccgcaggaacgccgcgtgcagcggctgttattgggacatgccagtgaatgtcagatggataacgcagggcgattactgattgcgcctgtgttgcggcaacatgccggtctgaccaaagaagtgatgctggtcgggcagttcaacaagtttgaactgtgg

SEQ ID NO: 19526 - DNA, 489 bp, Enterobacter cloacae
atgcgccggatattatctgttttactggaaaacgagtctggcgcactgtcgcgcgtcattggcctttttgcgcagcgcggctataacattgaaagcctgaccgttgccccgacggaagacccgacgctgtcgcgcatgacgatccaaaccgtcggcgatgccaaagtacttgagcaaattgaaaaacagctgcataagctggtcgacgtactgcgcgtgagcgagctagggcagggtgcctacgttgaacgtgaggtcatgctggtgaaaatccaggccagcggctacgggcgtgatgaagtcaaacgcaatgcggatattttccgcggccagattatcgacgtcacgccttctctttatacagttcagctggtcgggacaagcgacaagctggatgctttcctggcgtccgtgcgggatgtcgcaaaaattgtcgaggtcgcgagatcgggggttgtgggtctgtcacgcggcgagaaaatcatgcgt

SEQ ID NO: 19527 - DNA, 473 bp, Enterobacter cloacae
atgaaactcgtgcccatgctaagtggtgtagctattgcggtggcgttgtccgcctgtgccggtaagagtgcccaggtgccggtaccagcagccgacccgaacgggattaataccctttcacagcaatccattcagcagcctaatgtttccggtaccatctggattaaacagaaagttgcgctgccgccggatgcggtattaaccgtaacgctgtctgatgcttctctggccgacgcaccgtcgaaagttgtggcccagcgtgccgttcgtactgaaggcaagcaggcgccgtttagcttcgtgttgccgtataacccgtcggacgtgcagcctaacgcccgtatcctgctgagcgcagcggtaaccatcaacggtaagctggtgtttatcaccgatacggtccaggaagcgatcaacaacggtgggacaaaaatcgacctgaacctggtgccggtacagcagggggatccact

SEQ ID NO: 19528 - DNA, 1206 bp, Enterobacter cloacae
atgtctcttcgttcgctgcgggcattgtgcctgacaagttttttcattgcggatgtccgcgatggcctcggtccttttctcggtatttttctgaccgaacgccactggactcccgatgatatcggcatcctgatgacggccggtgggctggcgggactactcgctacgctgccggcgggattcatcaccgacacctcgcgcagcaagcggaccgtgctggcgctggtgtgcctgctcatcacccttagcacgcttctgctctggtttagccagcagagcggcattgtcgctgtttcgcaaatcgtcaccggtatctgtgcggcgtttgtcggtccgctgatcgccggaattaccctggggctgaccggccagagcggattcagcgcgcagatgggcaaaaatgaggcgttcaatcacggcggcaactttgttaccgcactgattgcaggcggcattgcgtggtactggggcgtcggcgggattttcctgctgatgacctgtaccacgctgttaacgctctgcgcgctgcttgccattcgcaacggggatatcgacaacgacgcggcgcgcgggctgtcctcttcagcgagcctgcctgttcccggatttgccgtgctgataacaaaccgggcgctgttcgtgaccggactgacgctgctgctgtttcacctggcgaacgccgcgctgctgccgatgctgagcatgagggtggccgccgcgcccgcctcgatcaaccccggtttgtacgcggcgggcaccgttatcatctcccaggccgtgatgatccccgtcgccatctgggtcgctaaccgaatagaccgctacggctactggcgcttaattatgctggcgctgctggtgatgccggtgcgcgcggcgctggcggcgtctacggacgcgccgctcatgatgatcccggtacaaatcctcgacgggctggccgcagggattctgggcgtcgcggtaccgtcttttatcgtggtgctgttgcgcgggagcgggcacgtcaatgccgggcagagcgtggtgatgctgatgcagggggttggggcatccatgagcccggcgttaaccggcacgattgcgggtcattactcatttgccacagcattcagcgtcctgagcgcgattgcgctggtggccgtactgctatggtggtgctttgcgcaccggacctgggaaacagacagtacgccgggtggggca

SEQ ID NO: 19529 - DNA, 432 bp, Enterobacter cloacae
atgtataattcaattttggttccaattgacatttcggaggatagcctgacgcacatggttatccccttcgttcaggcacatacagcacttaacacagctaaagttcactttcttaccgtcattccatcgcttccgtattattcatcattaggcctggcctattcggtagaaatgccgaagctgaaagatttccagcacgcggccttagcgaagctggatgaaatcgttaagcaattcaaaattcctccagacaaggtacagactcacgccgtgacgggatctccaaaggatcaaatccttaagctcgctgacacgatcgatgccgacctgattatcatcgcttcccacaaacctgacatatcgacgtatctgttgggttcgaacgctgcggcagtggttcggcatgcgaaatgccctgtcctggtcgtgaga

SEQ ID NO: 19530 - DNA, 735 bp, Enterobacter cloacae
gtgaaggtactgcgtgatccgctcctctggctggtagcgctctttgtcgccttactgtttctgatgccccacagcgcggcgctgtttaacactctttttccggggctgccgcggccggtttatcagcaggagagctttattaatctcgccctggcgcatctctggctggtggcgctctcaagcgccatcgcggttgtgttgggggttggggcaggtatcgcggttacgcggcctgcgggcaaggagtttcgtccgctggtggagacgatagcggcgattggccagacgtttcccccggtggcggtgctggcgatagcggttccggtgatgggctttggtcagctgcccgctattattgcgctgattttatacggcgtattgccggtgctgcagggcacgctggcgggcctcgcggcggtaccggcgtcagtgctgagcgtggcagaagggatggggatgagtcgcggtcagcggctgcgcaaggttgaactgccgcttgcggcgccggttatcattgccgggatccgcacgtcggtgattattaacatcgggacggcgaccattgcgtctacggtcggtgccaatacgctgggaacgccgattattatcggcctgagcgggtttaatacggcttatatcgtgcagggggcggtgctggtcgcgctggcggcaatcgtcgtcgatcgcctttttgagcggctgtctctgtacctcagccgacaccgccgcgaacaa

SEQ ID NO: 19531 - DNA, 1005 bp, Enterobacter cloacae
atggcctataaccgtactttcgccctcgatataagctggaaaacgctgctgaaagacgcggggcttgagccagaacgcattctccgcagggcaggattacctgacgatctctttttgcaaaaaacgcgcggactcgatacggatgaatacatccgcttctggaacgcgctggaggccgaaacgaacgatcccgcctttcccgtaccacttattgaatcgatctctgcggatatatttgatccgccactttttgccgcactctgtagtagcaatatgatgcaggctgtccagcgtctggccagatataaacagcttattgcccccatggttctggagacaacggtcgaccaaaacggcaaccttaccgtttcaccgcgctggctttttgcgacggatctcccggtgtttctgcaggtggcagagttgggtttcctgctcaagcttctgcggctgggaagccgcgaacgggttaaccccttacggatctgcgtttctgcgctaccctcagcggttcagaacagccacttttctcgtttctttggtactgacgtgcaatacggagaacagcccgccatcagcttttccgcagctgatgcgcttcggccctttttaacggtaaatgaggggatgtggcaggtatttgaaccggaactgcagcgtcgtctcggtcagttaaatgacacggcctcgaccgccgagcgcgtgcgttcggtactcctggaacttattcccggtaacgaagcgacaattgaaaaagcggcggagcgcctgggaatgagcaaacgcacgctccagcgcaggcttgagcaggaaggggataattttcgtaacctcgtcaacgcctgtcgtgaacacctggcccgtcattatcttctcaatacgcgcctgtccgggtatgagatcgcatttttgctggggttcgaagatcctaactcattctatcgcgcatttatggcctggacgggccagacccctgaagcggccaggatggccatgcgtcttgag

SEQ ID NO: 19532 - DNA, 1527 bp, Enterobacter cloacae
atgcgtattggggtaccaaaagaacggttagccaatgaaacccgcgtagcggcaacaccgaaaacggtggagcaactgcttaaactgggttttacggtcgcggttgaaagcggcgcgggcaaactggcgagtttcgatgacgaggcctttatccaggccggcgcggaagtggtggacggtgctgacgtctggcagtcgccggtgattctgaaggtcaacgcaccggaagagagtgagattgcgctgctcaatccgggaacgaccctggtgagcttcatctggcctgcgcaaaacccggagctgatggagaaactggcggcccgcggcgtgaccgtgatggcgatggactccgtgccgcgcatttcgcgcgcgcagtcgctggatgccttaagctccatggcaaacattgccggctaccgcgctattgttgaggcggcccacgagtttggtcgcttctttaccggtcaaatcaccgccgcgggtaaagtccctccggcgaaagtgatggtgattggcgcaggcgtggcgggccttgccgcaatcggtgcggcaaacagcctgggcgctatcgtacgcgcctttgacacccgtcctgaagtaaaggaacaggtccagagtatgggcgccgaattccttgagctggatttcaaggaagaagcaggcagcggcgacggctacgcgaaggtaatgtccgaagcctttatcaaagccgaaatggaactcttcgccgcccaggcgaaagatgtcgacattattgtcaccaccgcgcttatcccgggtaaaccggcgccgaagctgattacccgtgagatggttgactccatgaagccgggcagcgtgattgtcgacctggccgcccaaaacggcggtaactgtgaatataccgttccaaatcaggtaaccacgaccgctaacggcgtgaaggtgatcggctataccgatctgccgggccgcctgcctacgcagtcttctcagttgtacggcaccaacctcgtcaacctgctgaagctgctctgcaaagagaaagacggcaacgtcaccgttgatttcgacgatgtggttgtgcgcggcgtcacggtggttcgtgaaggtgaaattacctggcctgcgccgcctattcaggtttctgctcagcctcaggcggcaacgaaagcggcacctgagccaaaagaacccgccaaaccggcttctccgtggcgcaaatacgcgatcatggcgctggtgattattctgttcggctggctggctgacgtcgcaccaaaagagttcctcggccactttaccgtcttcgcgctctcctgcgtcgtgggctactacgtggtgtggaacgtctcccatgcgctgcatacgccgctgatgtcggtaaccaacgccatctcggggatcatcgtggtgggggcgttactgcagattggtcacggcggctggatcagcttcctgagctttatcgcggtgctgatcgccagtatcaatattttcggtggtttcaccgtgactcagcgcatgctgaaaatgtttcgtaaaggc

SEQ ID NO: 19533 - DNA, 1258 bp, Enterobacter cloacae
gggtcgcttacagttctcaccttagcggtcgccgtctggggccctatgtctaccacccgagttctgcacctactcattaaaaccattgagcttgaaaagagcgaaatccgttctttgctgcctgaagccagtgagcctaccgaccaggcggctcaggaagatgaagcgatcccgcaggatgagctggacggtaaaaccgagaacgaggcgggtatccacgaatatgttgtctctaccggggatacgctgagcagcgtgctgaaccagtacggcatcgacatgggcaatatcagccagctggcggctgcggataaagatcttcgcaacctgaaaatcggacagcagctctcctggactttaacggcggatggcgatctccagcgtctgacctgggaaatgtcccgtcgggaaacccgtacctacgatcgcactgcaaacggtttcaagatgaccagcgaaatgcagaagggtgactgggttaacagcgttctgaaaggcaccgtgggcgcgagctttgtctccagcgcgcgcgatgcaggcttgaccagcgctgaaatcagctcggtgatcaaagccatgcagtggcagatggatttccgcaagctaaagaagggcgatgagttctccgtcctgatgtcccgcgaaatgctggacggcaagcgcgagcaaagccagctgctgggcgtacgtctgcgctccgagggcaaagattactacgcgattcgtgccgaagacggtaagttctatgaccgtaccggtacgggccttgcaaaaggcttcctgcgcttcccgacggcaaaacagttccgcgtctcctctaactttaacccgcgtcgtctgaacccggtaaccggcgcgtcgcgccgcaccgtggcgttgactttgccatgccgcagggcacgccggtactggcggttggagatggtgaagtggtggtggccaagcgtagcggtgccgccggatattatgtcgcggtacgtcatggccgcacttatacgacccgctacatgcacctgcgtaagctgctggtcaaaccgggccagaaggtgaagcgtggtgaccgtatcgcgatctccggcaataccggacgctctaccggcccgcacctgcactatgaagtgtggatcaaccaacaggccgtgaacccgctgacggcgaaactgccgcgtaccgaagcctgacaggtaaagatcgtactgattatctggcgcaggtgaaagaggtgatgccgcagctgagcttaaactaagccctctgt

SEQ ID NO: 19534 - DNA, 1441 bp, Enterobacter cloacae
atgtccagaaggcttcgcagaaccaagatcgtaaccaccttaggcccggccaccgatcgcgataataatcttgagaaaattatcgctgccggcgccaacgtggtgcgtatgaacttctctcacggtacgccagaagaccataagttacgtgccgataaagtgcgtgaaatcgcagccaaactgggccgccacgttgctatcctcggcgatttgcagggtccaaaaatccgcgtatcgacctttaaagagggtaaagttttcctcaatatcggcgacaaattcctgctggatgccaacctgggcaaaggcgaaggcgataaagagaaagtcggtatcgactataaaggcctgccggctgacgttgtgccaggcgatatcctgctgctcgacgacggtcgcgtacagctgaaggtgctggaagttcagggcatgaaagtgttcaccgaagtcaccgtcggcggcccgctctccaacaataaaggcatcaacaaactgggcggcggcctctctgcagaagcgcttaccgacaaagacaaagcggacatcgtcactgccgcgctgatcggcgttgactacctggcggtctccttcccgcgctgcggcgaagatctgaactatgcgcgtcgcctggctcgtgatgcaggctgcgatgctaaaatcgtcgcgaaagttgaacgcgcggaagccgtttgcgatcaggatgccatggacgatgtgatcctcgcatccgacgtggtgatggttgcgcgtggagacctgggcgtggaaattggcgaccctgagctggtagggatccagaaagcgctgattcgtcgcgcacgtcagctgaaccgcgcgggtgatcaccgccactcagatgatggaatcgatgatcaccaacccaatgccaacccgtgcagaagttatggacgtggctaacgccgtgctggacggtaccgatgcggtgatgctctctgcggaaaccgccgcaggccagtatccggcagaaaccgtggccgccatggcgcgcgtctgcctgggcgctgaaaagatcccaagcattaacgtttctaaacaccgtctggacgtgcagttcgacaacgtggaagaagcgattgcgatgtctgcgatgtacgcggcaaaccaccttaaaggcgttaccgcgatcatcaccatgaccgaatctggccgcaccgcgctgatgacctctcgtatcagctctggtctgccgatcttcgccatgtcccgtcacgaacgtacgctgaacctgaccgcgctgtaccgcggcgtgacgccggttcacttcgacagcaccaacgacggcgtagctgcggcgcacgatgccgtaaacctgctgcgcgacaaaggctatctggtgtccggtgatatcgtcattgtgacccagggcgacgtgatgagcaccatcggctcaaccaacaccacgcgcgttatgaccgtcgag

SEQ ID NO: 19535 - DNA, 1473 bp, Enterobacter cloacae
atggcggtaacgcaaacagcccaggcatgtgacctggtcattttcggcgcgaaaggcgaccttgcacgccgaaaattgctgccttccctgtatcaactggagaaagcgggccaaattcatccggatacccgtatcctgggtgtcgggcgcgctgactgggacaaggacgcttataccaaagtcgtccgcgaggcgctcgaaactttcatgaaagaaaaaattgatgaaagtttgtgggataccctgagtggacgcctcgatttctgcaacctggacgtcaacgacgtcagcgcgtttacccgcttaggcgcgatgctggatcagaaaaaacgtgtcaccattaactatttcgccatgccgccaagcaccttcggcgccatctgcaaaggtctgggcgaagccaaactgaacgccaaaccggcgcgcgtcgtgatggagaagccgctgggtacgtcgctggcaacctcgcgtgaaatcaacgaccaggtgggcgagttctttgaagagtgccaggtttaccgtatcgaccactatctcggtaaagagacggttctgaacctgctggcgctgcgtttcgctaactccctgtttgtgaataactgggacaaccgcactatcgaccacgtggaaatcaccgtggcggaagaggtggggattgaaggccgctggggttactttgaccaggccggccagatgcgcgacatgatccagaaccacctgctgcaaattctgtgcatgattgccatgtctccaccgtctgacctgacggctgacagcatccgtgaagcaaaagtgaaagtgctgaagtcactgcgccgcattgaccgctccaacgtgcgtgagaagaccgtccgcggtcagtacaccgccgggtttgcgcaaggcaaaaaagtgccgggctacctggaagaagagggcgcgaacaagtccagcaacaccgagacgttcgtggcgatccgcgtggatatcgacgactggcgctgggcgggcgttcccttctacctgcgcaccggtaaacgtctgccggctaaatgttccgaagtggttgtgtacttcaaaaacccggaactgaacctgttcaaagagtcctggcaggaactgccgcagaacaagttgaccattcgtctgcagccggacgaaggggtggatatccagatcctgaacaaagtgccggggctggatcataaacacaacctgcagaccaccaagctggatctgagctactccgaaaccttcaaccagacgcacctggccgatgcttacgagcgtctgctgctggaaaccatgcgcggtatccaggcgctgttcgtgcgtcgcgacgaagtggaagaggcgtggaaatgggtcgactccatcaccgaagcctgggctgccgatcaggatgcgccaaaaccgtaccaggctggtacatggggacctgtcgcgtcggtggcgatgatcacccgcgatggccgctcctggaacgagtttgag

SEQ ID NO: 19536 - DNA, 825 bp, Enterobacter cloacae
atggaactgctcgaggagcaccgttgttttgaaggtcgacagcagcgctggcggcatgactccaccgtcctgaactgtgcgatgacgttcagcattttcctgccgccgacggaaaatccgccggttctgttctggctttcaggcctgacctgcaacgacgaaaacttcaccaccaaagcgggcgcgcagcgtattgccgccgagctgggtattgcgctggtgatgcctgataccagcccgcgtggcgatgatgtagccgacgatgcaggatacgacctgggtaaaggcgccgggttttatctcaatgcgaccgagcagccctgggcgcaccattaccgcatgtatgactacattcgcgacgagctgcccgcgctgattcagtccgggtttgcggtaagcgaccgctgtgccatcagcggacattctatgggcggtcacggggcgctgatcatggcgttaaaaaatccgggaaaatacgtcagcgtgtcggcattttcgccaattgtgaacccaacgcaggtgccgtgggggcaaaaagccttcacgaactatctgggtgaagatgaagcaaaatggcaggaatgggacagctgtgcgctgatgctggccagcagctcggcaaatgcgatcccgatgcttatcgatcagggcgatgcggaccagttcctcgccggacagctgcagcctgcggtgctcgccgaagcggcacgccagaaggactggccgctgacgctgcgcattcagccggggtatgaccacagctattacttcatcgcatcctttattgaggatcatctccgcttccatgcggagcatttgtttggg

SEQ ID NO: 19537 - DNA, 1837 bp, Enterobacter cloacae
atgccgattcaggttctaccgccgcagctcgcgaaccaaatcgccgccggtgaggtggtggaacgccctgcgtcggtggtgaaggagctggtggaaaacagcctcgatgcgggcgcaacccgcatcgatattgatatcgaacgcggtggcgcgaagcttatccgcattcgcgacaacggctgcggcattaaaaaagaggagctggcgctggcgctggctcgtcacgccaccagtaaaatcgcctctctggacgatctggaagcgattattagcctcggttttcgcggcgaagcgctggccagtatcagctccgtttcgcgcttaacgctgacctcccgtaccgctgaacagcaggaagcctggcaggcttacgccgaagggcgcgatatggatgtgacggtcaaacccgcggcgcaccctgtcggcacgacgctggaagtcctggatctgttctacaacacccccgcccgacgcaagtttatgcgtaccgagaagaccgagttcggccatatcgacgagatcattcgccgtattgcgctggcccgtttcgatgtcaccattaacctcagccataacggcaaggtgatgcgccagtaccgtgcggtggctgaaggcggacagaaagagcgtcgtttgggggcgatctgcggtacgccgttcctggaacaggctctggccattgagtggcagcacggcgatctggctttacgcggctgggttgccgatccaaacgcgagcagtgctgcgttctctgaaattcagtattgctacgtgaacggccgcatgatgcgcgaccgtctcatcaatcacgcgattcgccaggcctgcgaagacaaactcggggccgatcagcagccagctttcgtcctttatctggaaatcgacccccatcaggtggatgtaaacgttcatccagccaagcatgaggtgcgtttccaccagtcgcgtctggttcacgactttatttatcagggcgtggccgccgtgttgcagcagcaggcagagccaacgctgccgctggagaacgacgcccctgcaccgcgtccgctgccggaaaaccgtgtcgcggcaggccgcaaccattttgcggagcctgccgtcgcgcgtgaaccggaagctccgcgtttctcccaggccgggagcgcaccgcggcccaacgggcgcgaactatccgaatgcacagcctggctatcagaagcagcagggcgcgttgtaccgcaagctgctggaaacgccagccgtggagcgtaaagagcacattccggccgctcagccttctctggacgggcatagccagagttttggccgggtgctgacaattatcgcgccggatatggcactgcttgaacgtgacggcaaactgatgcttctggcactgccggtcgccgaacgctggctcaagcaggtgcagcttacgccaggcgaaaatgcagcctgcgcgcagccgctcttaattccggttcggctgaaaatatcccctgatgaaacaagggttttgcagcgcgcagagccgcagctggcgcaaatgggtattgaaactgtgctcgaaccacaacatgtgacaattcgtgcagtgcctttacccttacgccaacaaaatttacaaaacttgattcctgaactgataggctacctggcgcagcaaacatcgtttgatgccgccaacaccgcgcagtggatcgcccgccatctggcaagcgaacacgcgccgtggagtatggcgcaggccattagcgtgctggcggaggtggaacgcctctgtccgcatctggtgaaaacgccgccgggtgggttattacaacctgttgatttaaaaacggcgatgaacgccctgaaa

SEQ ID NO: 19538 - DNA, 975 bp, Enterobacter cloacae
gcacggttttcgggcgtatcgaaatcaacccgtttcccgcgttctgagtaaccaacggatatttctcccgaagcgcgtgaaaaagtgctgaaggcgattgacgaattaaattatcagcccaacaaactggcccgcgccctgacctcttcaggcttcgatgccattatggttatttcgacccgttcaaccaaaaccactgccggaaatccttttttctcagatgtcctgcatgccattacggcaaaagcggaagaagaaggatttgacgttattttacaaacgtcaaaaagcagcgaagacgatctgctgaaatgcgtgaataaaataaaacagaagatgatcaaagggatcattatgctgagctcaccggcaaatgaatcctttttcaccacgctggatgcgtatggcgtaccggtagtagttatcggcaaagtcgaaggtgagtttcagaatatttattccgtcgacacggataatttccatgacagcgccacgctgaccgaaacctttattaaaaacggacgccgtaaaattgcctgtctgcatgccccgcttgattatcatgtttcgatcgatcgtcttgcgggctataaagccagtctggaaaagtaccatattgccctcaacccggactggatcagggatggcggttatacccatgagagtgcgcttacggcggcgctggaattgttgtcttcacccacgccgcctgatgcagtattcgctaccgacagcatgaagttacttagcctctatcgcgcggcggatgagttgaatctgatgatcccggagcaggtggtcatcgccggatacagtgacccgatgctgtctctcattttaacgcccgcacctggcggcttcgatatcccgacccgaaaactgggcgaagagagctgcgatcttcttttcaggcgtattgcgggtcagcccgcaccgcaaaaagttctcgttgatacccactttttactggcggcc

SEQ ID NO: 19539 - DNA, 1049 bp, Enterobacter cloacae
agtgcttctacaccttcgcctctgcgcgtcgccatcattggcgccgggcaggtcgcggataaagtgcatgcctcgtattacaccacgcgcagtgatgttcagatggtggctgtcatggacagccatcctgaacaggctctggcgtttgcggaacgtcatggtatttcctcggtatggcaggatgcgcgagacatgctcgaggcggttaagccggatgtggtgagcgtctgttcgcctaaccggttccatttcgagcacgtcatggcagcgctggaagctggctgccacgtgatgtgtgaaaaaccacctgctatgacgccgcaggaggccgatcggatgcgcatggccgcgcgcaaggcgggaaaagtgctggcgtatgattttcaccatcgctttgctctcgatacgcaactgctgcgtgaggctgtgatgaagggggcgctgggagaaatttattacaccactgcgcaggcgctacgccgctgcggggttccggctggggcgtctttaccaacaaaacgctacagggcggtgggccgctgattgatatcggcatccatatgctcgatgccgctatgtacgtgctggggttcccggcggtaaaaaaggtgacggcacacagcttccagaggctgggaaaccgtaaaagcagcggccagtttggcgcgtgggatcccacgcagtttaccgttgaagatgccctgtttggcaccattgaattttgcaacggcggcattctgcgtctggacacgtcgtttgcgctcaatatccgtgaacaatccatcatgaacgtcgcattttgcggtgaaaaggcgggcgccatgctgttcccggcgcacatctacaacgacgaagccgggactttagtcaccctcacgcagcgtgaagaggctgacgatcgtcgtcatatgcgcagtatggatgcctttgtgcggcatgtgcagggagagcccgtcatgatcgctgatgcagagcaagggctggttatccagcagcttgtcgccgcgctgtatgaatctgcagaaacaggggaaagcgtgacgttatgc

SEQ ID NO: 19540 - DNA, 1009 bp, Enterobacter cloacae
atgaaggtactggttaccggggcgaccagcggcttaggccgaaatgcggtcgaatttctgcgcaacaagggcatcagcgtcagggctaccggtcgcaacgaagcgatgggaaaactgctgcaaaaaatgggcgcggagttcgtccatgctgacctgacggagctggtctcctcgcaggcgaaagtgatgctcgccggtatcgacacgctgtggcactgttccagttttacctccccatgggggacccaggaagccttcgatctcgccaacgtgcgggccacccgtcgtctgggtgaatgggccgtcgcctggggcgtgcgcaactttattcatatctcgtcaccgtcgctctatttcgactatcaccaccatcgtgacgtgcaggaagatttccgtccggctcgcttcgcctgcgagtttgcccgcagcaaggcggccagcgaagaggtgattgacctgctggcacagtcgaacccgcacacccgttttacggtcttacgtccgcagagcctgttcgggccgcacgacaaagtgtttattccgcgcctggcgcagatgatgcaccactacggcagcgtgctgctgccgcgcggcggcgatgcgctggtggatatgacctattacgaaaacgccgtccacgccatgtggctggcaagccagccggactgcgataagctcatctccggtcgcgcctacaacatcacgaacggcgaaccctggcacgctgcgcagcattgtgcagcgcttaattgacgagctgcagatcgactgccgcatccgttcagtcccttacccaatgctggatatgattgcccgcagcatggagcgttttggcagtaaatcggccaaagagcctgcgctgacgcattacggcgtatcgaagcttaactttgatttcacgctggatatttcgcgagcggagaacgagcttgggtacaaaccgatcgtgacgctggatgaagggattacgcgtacggcggcgtggctgcgggatcacgggaagcttcat

SEQ ID NO: 19541 - DNA, 520 bp, Enterobacter cloacae
agtaccgagaacaacgaaaatattcattttatcgttagcggtgaagttgaattccgccgcgagtcggatgaattgtgtatgtatgttcactctgcagaataaatgtattttcggtctctcctctatttattacaactcaacgcatatgtacggcctggttcgtgccagtaccgtcgtaagaacccttaaaaaagaggattttttccgtctgatgagcgaaaaaaacctgtgggaagccttgagtaaagtcctctcctggtatgtttgcctgctcagcaagcgtgacgaagtgctggtggcccgcagcgcatactcgattgttcgcgaattcttgctggaaattaacgaactgatggtgcaccatcagcgcgatatcaatatttacgactatattcaggaatataccagcctggcccgaagtaccattattaaaattctcgccgacctgaaaaaaggtaattatattcaggttgataaaggccgtctaatgtatttgtcagcactgccggagaaatattaa

SEQ ID NO: 19542 - DNA, 1371 bp, Enterobacter cloacae
atgttatcctctcaatccccctcaatttataccgtcagccgcctgaatcagacggtgcgtttgctgcttgaggaggaaatggggcaggtctggatcagcggtgagatctctaacttcacgcagccgtcctccggtcactggtactttaccctaaaagacgacaccgcccaggtgcgctgcgcgatgttccgcaacagcaaccgtcgcgtgacgtttcgtcctcagcacggccagcaggttctggttcgcgccaatatcaccctgtatgagccgcgcggcgattatcagattatcgtcgagagcatgcagcccgcgggcgaaggcctgctgcagcagaagtatgaacagctaaaagccaggctctctgccgaagggctgttcgaccagcagttcaaaaaaccgctgccctcccccgcccactgcgttggggtcatcacctcgaaaaccggtgcggcactgcacgatattttgcacgtgctgaagcgtcgcgacccttccctacccgtcatcatctacccgaccgccgttcagggtgacgatgcgccgggccagatagttcgcgccattgagctggcgaacgtgcgtcaggagtgtgacgtcttaatcgtcggacgcggcggcggctcgctggaagatctgtggagctttaacgacgagcgcgtggcgcgggcaatctttgcaagtattatccccgtggtgagcgccgtcggccacgaaacggacgtaacaattgcggatttcgtcgcggatctgcgtgcgcctaccccgtccgcggcggcggaagtggtcagccgcaaccagctggagctgctgcgtcagattcagaacgtacagcagcgtcttgagatggcgatggactactttcttgccaaccgtacccgccgctttacccagcttcatcatcgtcttcagcagcagcatccgcagctgcgtctggcgcgccagcagaccgtgctggatcgtctgcgtcagcgcatgagcgttgcggtggacgcgcagcttaagcgcgcggtatcgcgccagcagcgcgttacgcagcgcctgaaccagcagaacccgcagccgaaaatttatcgcgcgcaaacgcggatccagcagctggagtatcgtctggcggagacaatccgggcgcggctgagcaccacccgcgagcgttttggcaatgcggtgacccaccttgaagccgtcagccccctctccacgctggcgcgcggctatagcgtgacgacggcgacggacggcaaagtgctgaagcaaactaaacaggtaaataccggcgatgtgctgacgacgcgtctttccgacggctgggtagaaagcgaagtgaaatcaattaaaccggtgaaaaagacgcgtcagcgtaaaaccgga

SEQ ID NO: 19543 - DNA, 1470 bp, Enterobacter cloacae
atggtacctgtggtcgcgcttgtcgggcgccctaacgttggaaaatccactctttttaaccgtttaacacgcacccgtgatgcgctggttgcggatttcccggggctgacgcgtgaccgtaagtacggtcgtgcagaggtggaaggacgcgagttcatctgtatcgataccggtggtattgacggcacagaagacggcgttgaaacccgcatggcggaacagtcgctgctggcgattgaagaagcggatgtggtgctgtttatggtggatgcgcgcgctggcctgatgccggcggactccgctattgccaaacacctgcgttcacgcgaaaagccgaccttcctggtggcgaacaaaactgacggcatcgatgccgatcaggccgtcgcggatttctggtctctgggcctgggtgaaatctacccgattgcggcatcgcatggccgtggcgtcaccagcctgctggaaaccgttctgctaccgtgggttgatgaagtgaacccgccggaagaggtggacgaagacgctgaatactgggcgcagttcgaagacggagaagagggcgaagaagagcctgaagacgacttcaacccgcaggacctgccgatcaagctggccatcgtgggtcgtccaaacgtaggtaagtctacgcttactaaccgtattctgggtgaagagcgcgtggtcgtttacgacatgccgggcaccacccgtgacagtatctacattcctatgcagcgcgatgagcgtgagtatgtcctcatcgacaccgccggggtgcgtaagcgcgggaaaatcaccgatgtggtggaaaaattctccgttatcaaaaccctgcaggcgatcgaagatgctaacgtagtgctgctggtcatcgacgcacgcgaaggtatctccgatcaggacctctctctgctcggctttatcctcaatagtgggcgctcactggttatcgtagtcaacaagtgggatggcctgagcaatgaagtgcgcgagcaggtgaaagagactctcgacttccgtctgggctttatcgactttgcacgcgtgcacttcatctctgcgctgcacggcagcggcgtgggtaacctgttcgaatccgtgcgtgaagcgtacgacagctccacccgtcgtcagagcaccgcgatgctgacccgcatcatgaatatggctgcagaagaccatcagccgccgctggtgcgcggccgtcgcgtgaagctgaaatatgcccacgccggtggttacaacccgccaatcgtagtaattcacggcaaccaggtgaaagacctgccggattcctacaagcgctatctgatgaactatttccgtaaatcgctggacgtgatgggcacgcctatccgtatccatttcaacgaaggggaaaacccgtttgccaacaagcgcaacaccctgacgccaaaccagatgcgtaagcgtaagcgcttgattaagcacattaagaaaagcaaa

SEQ ID NO: 19544 - DNA, 630 bp, Enterobacter cloacae
atgatgcattcatctgcctgcgactgtgaggcaagcctgtgcgagaccctgcgcgggttctccgcccagcatcctgacagcgtgatctaccagacatcgctaatgagcgccctgctaagtggcgtgtacgaaggagagaccaccatcgccgatctgctggcacacggtgattttggactgggcacccttcaacgagctggacggtgaaatgattgccttcagcagccaggtgtaccagctgcgcgccgacggcagcgcccgggccgcgaagcggagcagaaaacgccgttcgcggtgatgacctggttccagccgcagtaccgcaaaaccttcgatgcgccggtcagccgtcagcagatccacgacgtcatcgaccagcagatcccctccgacaacctgttctgcgcgctgcgcatcgacggcaacttccgccacgcccacaccccgcacggtaccgcgccagaagccgccgtaccgcgcgatgaccgacgtgctcgacgaccagccggtgttccgctttaaccagcgcgaaggggtgctggtcgggttccgcacgccgcaagacatgcagggcattaacgtggccggctatcacgagcatttcatcaccgaggaccgtcaggggggggt

SEQ ID NO: 19545 - DNA, 987 bp, Enterobacter cloacae
tggcgaatcagcattctggataaaagccccatcgctgaaaacgaaacggctgccgatgcactggcgcgtacgctggcgctggcgcacaggcagaaaatctgggctatcaccgcttctggattgccgaacaccacaacactccccatcttgccagcccctcgccggagctgctgattgcctggatcctcgggcagacaacgcgcatccgcgtcggatccggcggcgtgatgctccagcactacagcccttataaagtcgccgagaattttaacgtgctggccgcgctggcgcccggccgcgtggatctcggcgtcggaaaagcccccggcgggctgccgctctcaacccgcgcgcttcagcagggtctgaatcaactggaaaagggcagcttcgccgaacagctggcccagctcgatcgctggatccgtcctgagcatcagtctaatgatgaggccgttcgcgccacgccgctgccgccgctgcctgcagagggtttcctgctgggcgcgagtatcgatagcgcgctgctggccgccgggctcggctggcactttgtgtttgccgcgcatctgaacggtgaccctgagctgctgcgcgaggtggtctcgacctggcgtaagaacagcacgcgggacgtgattgtggcggtacaggcgattgttgccccgacgcaggcagaggcggaagccctggcgcagaaggtcgaagtgtggggcgttgagctggcaaacggccagcgtgtcaccgtggccagcgaagagcaggcctacgcctttgcgcgccaggcgggcagcgagccggtgcgcattgcacgtcgggcgcagtcgctgctggcgggtacggcttagtcggtgctcgaacagctcaacgccctgcatgaaaaatggggtattgacgaatttatcatcgacacgccggtagcggaggggggcaacgcgcgtcgcgtcgctgcgcctgcttgccgaggcgcgtcttaacaaggaggtc

SEQ ID NO: 19546 - DNA, 1038 bp, Enterobacter cloacae
atgcgttatcaaaaactgggcaataccggtctgttcgtttctgaactgtgcctcggcaccatgaccttcggcggcgagggcggcatgtggggcaagattggccagctccagcaaagtgaagccgagcagctggtgggccgcgcgctggatgccgggatcaactttatcgacaccgcggacgtttactcggaaggacgctcggaggagatcaccggtcaggcgctgaaaaacctgaagatccctcgcgagaacgtggtggtcgccacgaaagtgttcggcgaaacgggaacggccggggtgaactcgcgcggcagctcgcgctatcacatcatcagcagcgtgaaggagagcctgcgccgcctgcagctcgatcatatcgatctctaccagctgcacggcttcgacccggccacgccgattgaagaaatgctctacgcgctggataacctggtgcagcacggccacgtgcgctatatcggcgtctcgaactgggcggcgtggcagattgccaaagcgctgggcatttccgagcgacttgggctggcgcgcttcgcatccctccaggcgtattacaccatcgccggacgcgatcttgagcgcgagctggtgccgatgatgcagagcgaaggcgtcgggctgatggtctggagcccgctggcgggcggcctgctgagcggaaaatatgggcgcgacgggcagagcgaagccggtggtcgccgtctggagttcgacttcccgccggtgaacaaagatcgcgccttcgactgcgtggacgtaatgcgcactatcgccgaaagcaagggtgtctccgtcgcgcaaattgcgctggcgtggctgctgcaccagaaagcggtgaccagcgtcatcattggcgcgaaacgcgttgaacagctggacgacaacattgccgccaccgggatccgcctgagcgaagacgagcttaagcagcttgatgcggtgagcgcgctgccgcgcgaatacccgggctggatgctggagcggcagggagaatatcgccgcaatcagctcgcgcaacaa

SEQ ID NO: 19547 - DNA, 978 bp, Enterobacter cloacae
atgacacaaaacaacaatagccaggtcagtcgaagcaatgaccctgagcaaattgatttacttgatttaatgctgcagctgtggcgtgggaagtggatgatagcaacctttgttgttgtttttatcgccctggcaattggatatttatcggtcgcaaaggagaaatggacctcaagcgcaattattgcgcaacctgatgtcgctcaaattgcaacatattctaatgcgttgaatatcctctacggtagcgctgcaccctcaatgcttgatgttcaaacacgcgctattggtcgtttcaattcttccttctctgcattggcacaggcactggaaaatcaggaagaacctgaaaaactgacgattgagcctgctgtaaaaggggaagcactgccattaagtgtttcctataccagtacatccgcagaagccgctcaaaaacagctggcgcagtacatccagcaggttgatgagcaaacggcaaaagagcttgccgttgaccttaaggacaacatcaaggagcagataaagacccttaatgattctctgcaaaaccaggagaaggttgctcaggagcagaaggatctgcgtataaaacagattgctgaggcgctgaagaatgctgaagcggctaaaatcactacgccgcagattcagcaaacccaggatgtgacgcaggaaacgatgttcctcctgggaagcgtagggctgaaatcgatgattgaaaacgaagcctctcgtcccctggtcttttctgctgcatactatcagaccaggcaaaacctgctggacatccaaaacctgaacgtaaagccggacacaatacacgtctaccgttacgtcatgaaaccggatctgcccgttcgtcgtgacagcccgaaaaaagccattgtgctgatccttgccgtgctgctgggcggaatgattggttccggtgtggtattagggcgtaacgcattacgcaactataagccaaaagcc

SEQ ID NO: 19548 - DNA, 543 bp, Enterobacter cloacae
gtggcttatttcaatgagttggacagctacgcagagagtcttggcttgaatacccgccagattattgaaggtgtgtgtctcgacccgcgtattggcaaccactacaacaacccgtcatttggctacggcggctattgcctgccaaaagatactaaacaattgctggcaaattatcaggctgtgccgaacaacctcatttcggcgattgttgacgctaaccgtacacgtaaagatttcatctccgactccatccttgcgcgtcaaccgaaagtggtcggcgtataccgtctgatcatgaagagtggctccgataatttccgcgcctcttcaattcaggggattatgaagcgtattaaggcgaaaggcgtgcaggtcatcatttatgaacctgcaatgcaggaagatgagttcttccactcccgagtgattcgcgatctggatgcgttcaagcaagaagcggacgtgatcatctcgaaccgcatgtcggaagagctggcggatgttgcggataaagtttatacccgcgatctgtttggtagcgac

SEQ ID NO: 19549 - DNA, 424 bp, Enterobacter cloacae
atgacccttgcgtatatcgccatcggcagcaatttagcctctccgctggagcaggtgaacgctgccgtacaggcgctgggggagatcccgcaaagcaagatcgtggcggtctcctctttctaccgcacgccgccgctgggtcctcaggatcagcctgattatctgaacgccgccgtggtgctggaaaccgctctgaatgccgaaacgctgctggataacacccagcgcatcgagctgcagcagggtcgcgtacgcaaagccgagcgctggggaccgcgcacgctggaccctcgacattatgctgtttggtcacgagactattaacactgaacgtgtcaccgttccgcattacgacatgaaaaatcgcgggtttatgctctggccgctgtttgaagtcgctcccgatctcaacttcccggatgca

SEQ ID NO: 19550 - DNA, 1730 bp, Enterobacter cloacae
atgctacaatgtacgccgactaatgttaaccctctggagctgttagtgtcctcattgccggtcgccgtcattcttcctgagcttctcgctgccttacaccatgccccgcaggttttgctgaatgctcctacgggcgcgggcaagtccacctggctgccgctgcagattctgaaagacggaaacatccgcgggaaaattatcctgctggagccgcgcaggctggccgcgcgcaacgtggcgcagcgtctggcggaactgctgaatgaaaaaccgggcgaaacggtaggttacaggatgcgtaccgagacctgcgttggcccgaccacgcgtcttgaagtggtcaccgagggtattctcacccgcatgctgcaaaacgatcctgagctgaccggcgtcgggctggtgatcctcgatgaattccacgagcgcagcctgcaggcggatctggccctcgcgctgttgctggacgtgcagcaggggtgcgcgacgatctccggctgcttattatgtcggccacgctggataacgagcggctacgacaggcattacccgatgcgccggtcatcagctcggaagggcgggcgtttccggttgaacgccgctatcagccgcttccctcccatcagcgttttgacgaggccatcgccattgccaccgctgagctgtgcgccaggaagcgggttccctgctgctgtttttgcccggcgtgggcgaaattcagcgcgtgcaggagcagctttctacccgcgtaggcggcgacgtgctgctttgcccgctctacggcgcgttgtcgctacaggatcagcgtaaagccatccttccggctccggcggggcagcgcaaggtggtgctggcaaccaacattgctgaaaccagtttgaccattgaagggattcgcctggtggtggatagcgcgcaggagagggtggcaagctttgatccgcgtaccgggctgactaaactcctgacgcagcgcatcagccaggcgtcgatggtgcagcgcgcgggccgcgcggggcgtcttgagccgggcatatgcctgcatttgaccagcgcggaacaggctgaacgcgccgcacagcaaagcacgccggaaattttacaaagcgatttgtctggtctggtgatggatctgctccagtggggctgcccgaaccctgagcagctcacctggcttaatcctcctcctgtcgtaaacctcaccgctgcgcgcaccctgctgacccagctcggcgcgctggaaggcgagcgtctgacggcgcgcggccagaaaatggcggcgctgggcaacgatccgcgtctggccgcgatgctggtggccgcgcaaggggatgatgaaattgccacggcggcaaaactggcggctattcttgaggagccgcctcgcggtggcagcagcgatctgggacaggcgttttcgcgcagccaggggaactggcagcagcgtgcgcagcagttgtgcaaacgcctgaatagccggggaggagtgcctgacagcgataagattgccttcctgctggcccaggccttcccggacaggactgcgcgtcggcgcgggctggtcgttcgtaccatgctggcaaacggcatgggggcgatgctggacagcgacgactggtgacgcgtcacgaatggctgatcgcctcgtgctgctgcagggcagccactctccggacgcgcgtaccctgctggcgattgccgtagagactgacgccgggctgcaggtaccc

SEQ ID NO: 19551 - DNA, 453 bp, Enterobacter cloacae
atgcaagaagggcaaaaccgtaaaacatcgtccctgagtattctcgccatcgctggggtggagccgtatcaagagaagccgggcgaagagtatatgaacgaagcccagctgtcgcacttcaagcgtattcttgaagcatggcgtaatcaactcagggatgaagtcgatcgcaccgttactcatatgcaggatgaagctgctaacttcccggatccggtagaccgtgccgctcaggaagaagagttcagcctcgaactgcgtaaccgtgaccgcgaacgcaaactgatcaaaaagatcgagaaaacgctgaaaaaagtcgaagacgaagattttggctactgcgaatcctgcggtgttgaaatcggtattcgtcgcctggaagcgcgtccaaccgccgatctgtgcatcgactgtaaaacgctggccgaaatccgcgaaaaacagatggccggt

SEQ ID NO: 19552 - DNA, 951 bp, Enterobacter cloacae
ttgataccagcgctgtttacacactccaaaggcgggagtctctcccgccttgttattgttgatatgtctgaatcacactatattgggcgcttcgcgccatctccttccggtgaattacacttcggctcattaattgccgcgctcggcagctacctgcaggctcgcgcccgtcagggaaaatggctcgtccgcattgaagatattgaccctccgcgtgaagttcccggtgcagcagagacgattctgcgtcagctggaacattacggtcttcactgggatgacgaggtgctctggcagtcaaaacgtcacgatgcctatcgggaacgcctggcctggcttcgcgatcggggactttcctataactgcacctgcacccgcgcgcgtatccagagcgtgggtggcgtctatgacggccactgccgcatgcttaatcttcccccggaaaatgccgccgtacgtataaagcagcgctccccggtgacgcgctttaccgatctcctctccggtgaggttcatgccgatgaacgcctggcgcgtgaggattttattattcaccgccgtgacggcctgtttgcctataacctggcggtggtcgtcgacgatcgttttcagggcgtgacggaaattgtgcgcggggcggatctggtcgaaccgacggtgcgacaaatatcgctttatcaccagtttggctggacggcaccggactacattcatctgccgctggcggtcaatgcgcagggctttaaattgtcaaagcagaaccacgctccggccctgccagacggcgatccgcgtcctgttttgatcgacgcgctgcgatttctcaaccagaatgtatccaacgaatggcaggatctgcgtattgacgaactgctgaaaatggccattgccaactggacgctcgcggcagtgccaaaaatccagcattctcaaatgcgttgcgctgagcta

SEQ ID NO: 19553 - DNA, 1362 bp, Enterobacter cloacae
gtgctaagccgcgaagagagcatggcgaacgatgctattgcacagccacacatgtcggttattccgcgtgagcagcacactatttcccgcaaagatatcagtgaaaatgccctcaaggtgctctatcgtctgaataaagcgggctacgaggcctatctcgtgggcggtggagtacgtgatttactgctgggcaaaaaaccaaaagatttcgacgtgacgaccagcgccacgcctgagcaggtgcgcaaattattccgcaactgccgtctcgttggccgccgtttccgtctggctcacgtgatgtttggcccggaaattatcgaagtggcgaccttccgcggccaccacgaagccggcgcatccgatcgcaccacgtcacagcgcggccagaacggcatgctgctgcgtgacaatatcttcggctctatcgaagaagatgcccagcgtcgcgacttcaccatcaacagcctttattacagcgtggcggatttcaccgtgcgtgattacgtcggcggcatgcaggacctgaaagaaggtctgatccgtttgattggcacgccggaaacgcgctatcgcgaagatccagtgcgtatgctgcgcgccgtgcgtttcgccgccaagctcaatatgcgcatcagcccggaaacggcagagccgattccgcgcctggcgacgctgattaacgacgtgccgcctgctcgcctgtttgaagaggcgctgaagctgctgcaggctggacacggctttgaaacctacaatctgctgcgcgaatacaacctgttccagcccctgttcccgaccattacccgctacttcaccgaaagcggtgacagcccaatggagcggatgattgcgcaggtgctgaaaaataccgatacccgtattcgcaacgacatgcgcgtcaatccggcattcctgtttgcggcgatgttctggtatccgctgctggaaacggcccagcgaattacccaggagagcgggcttgcatactatgatgccttcgcgctggccgcaaacgacgtgctggacgaagggtgccgtacgctcgccattccaaaacgcattaccacgctggtgcgcgatatctggcagcttcagctgcgcatgtcccgtcgtcagggcaaacgcgcctggaagctgatggagcatccaaaattccgcgccgccttcgatctgctgtcgctgcgtgctgaaattgaacgcaaccaggagctgcagcgcctggcgcagtggtgggctgaattccaggtttccgcaccgccggagcaaaaagatatgctaaccgggctggatgaagagccggaaccgcgtcgccgccatcgtcgtccgcgcaaacgcgcgccgcgtcgtgaagggacagca

SEQ ID NO: 19554 - DNA, 549 bp, Enterobacter cloacae
atggacgcactcgaactgcttgttaaccgccgtagcgcttcccgtctggccgaacctgccccggcaggcgagcagctggagaatattctgcgtgccggcatgcgtgcccccgatcacggcacgctgcagccgtggcacttctttgtgattgaaggcgaaggccgcgatcgtttcagccaactgctggagcagggcgcgattgccgccgggcaggatgagaaaggtatcgacaaggcgcgcaatgccccgttccgcgccccgatgattatcgccgtcgtggcgaaatgccaggctgaccataaggtgccgatctgggaacaggaaatgtccgcaggctgtgcggtgatggcgatgcagatggccgccgtcgcgcagggctttaacggtatctggcgtaccggtgcgctgaccgaaagcccggcggtccgtgacggttttggctgcggtgagcatgacaagattgtcggtttcctctatctcggtaccccgcagcttaaagcctccagcaccatcagcattccggacaccacgcctttcgtcagccatttc

SEQ ID NO: 19555 - DNA, 702 bp, Enterobacter cloacae
atggtcagtgttgaaacgctccttcatcccggcgggtaccgaacgccctggcacagccatcgcaccggccagctgtggcgcattgcaacggggctgctggtcattgagacgcagcaggcgcgttcggtcgtaccggcaaaacacatcggctggatccctccggatcggcagcacgccgctttttccgaaagtgcgatagaaggctgcgctatctttcttgaccccgccgggtgcgcaatgcttcccgatgcgcccgcgctgttcgagcccgacgatctcacccatgcactgttttcccgtttatgcgatgcagagagcgagtacgatccgcgaaagcttactttgctgctggatgagcttgccctgacgccccaggctcgcttttctctgcctgtgccgacggatccgcgtctgaagaacgtggtcagccatttgctgcagtttgtcgatgataaccagacggtcgagagccatgctgttcatgctgggatgagcgtgcgtacgttcaaccgtcggtttagtgcccagaccggaatgaactttgttaactggcggcagctggcgcgcgtcatgcgggcaatggagtggctggcggcggggaagccggtagggtggattgcgctgtcctgcggctacagcagcgtcagcgcatttattgaggttttcagagcatggaccggtaaaacgccggggcagtgggtt

SEQ ID NO: 19556 - DNA, 660 bp, Enterobacter cloacae
atgctgcgcgtcatcgataccgaaacttgcgatcttcagggcggaatagtggaagtggcctctgtcgacgtggttgatggtaaaatcgtcaaccccatgagccatctggtgcgtcccgatcgccccatcagccctcaggcgatggctatccatcgcattaccgaatcgatggtggcggataagccgtggatcgaagagatcatccctcactactacggtagcccgtggtacgtcgcgcataacgccagctttgaccgccgggtgttgcctgaaatgccgggggaatggatttgcaccatgaagctggcgcgtcgtctgtggccggggattaaatacagcaatatggcgctgtacaagtcacgcaagctcagcgttcgtacccctgaggggcttcaccatcaccgcgccctgtatgactgctatatcaccgccgcgctgctgattgatattatgaatatctctggctggacgccggatgacatggcgacgatcaccggacgtcccgcgctgctgaccacgtttacctttggtaaatatcgcgggaagccggtgtccgaggtggcggataaagatccgggctatttgcgctggctgtataacaacctcgacagaatgagcccggaactgcgcttaacgctgaaacattatctgggcgaagct

SEQ ID NO: 19557 - DNA, 1417 bp, Enterobacter cloacae
ctggaaaaactcgacgcgctgtatgaacagtccgtcaaacgcgtgcgcagcgccatcagcgaatatatcgaaacagggaaacttcccgaccaaaaggccagaaccgagggcctttttgtttatccatcgctctctgtgacctgggacggcagcgccagcagtaatcccaaaacccgcgcctacgcccgttttacacactccggctgctacagcaccaccgtcacccgccctgcgctgttccgcccgtatcttgaagaacagctcacgctgctgtaccaggattacggcgcgaacattgccgttgagccctcgcagcatgagatcccctatccctacgtgattgacggttcggcgttaacccttgaccgctccatgagcgcggggctgacccgccacttcccgacgacggaactttcccagattggcgatgagacggccgacgggatttatcatccggcagaattttctcccctgtcgcattttgatgcccgccgggtcgatttctccctggcgcgcctgcccactacaccggtacgccagtcgaacatttccagccgttcgtgctctttaccaactacacccgttacgtcgacgagtttgtccgctggggctgcagccagatcctcgacccggaaagcccgtatatcgcgctgtcctgcgcgggtgggatctggatcaccgctgaaaccgaagcccccgagcaggcgatctccgacctggcatggaaaaagcaccagatgcccgcctggcacctgatcaccgccgacggtcagggcatcacgctgattaacatcggcgttggcccgtcaaatgccaagaccatctgcgaccatctggcggtactgcgcccggacgtatggctgatgattgggcactgcggcggcctgcgcgaaagccagctgattggcgactacgtgctggcccacgcctatctgcgcgatgaccacgtgcttgatgcggtgctgccgccggatatcccaatcccgagcatcgccgaagtacagcgcgcgctgtatgacgctaccaaagaggtcagcgggatgccgggcgaagaggttaaacagcgcctgcgcaccggcacggtcgtcacaacggatgaccgcaactgggagttgcgctactccgcctccgcgctgcggttcaacctgagccgcgcggtggcgatcgatatggagagcgccaccatcgccgcgcaggggtatcgcttccgcgtcccttacggcacgctgctgtgcgtctccgataagccgctgcacggcgaaattaagcttccgggccaggccaaccgtttctatgaaggagctatctcagagcatctgcagattggtattcgtgcgattgtttacttcgcgcggaaggcgacaagttgcattcgcgcaacttgcgaaccttcaacgagccgccgtttcgctaataa

SEQ ID NO: 19558 - DNA, 1314 bp, Enterobacter cloacae
atggactccaccctcatctccgatcgtcccaacgaggagacaccttcgctcaatcgtgcccgccgcgcagccttaggcagcttcgcgggtgccgtcgtcgactggtatgattttctgctttacggcatcactgccgccctggtgtttaaccgcgagttttttcctcaggtcagccccgcgatgggtacacttgccgcgtttgccaccttcggcgtcggctttctgtttcgcccgctgggaggtgtgatcttcggccacttcggcgaccgcctgggccgcaagcgcatgctgatgctcaccgtctggatgatggggatcgccaccgcgcttatcggtattctcccctcgtttgcctctatcggctggtgggcaccggtactgctggtcaccctgcgcgccatccagggcttcgccgtaggcggcgaatggggcggtgcggcgctgctgtccgtagagagcgcgccgaagcacagaaaagcgttttacagcagcggcgtacaggtcgggtacggcgtaggccttctgctttccaccgggctggtatcgctaatcagccagcttactaccgacgagcagttcctgagctggggctggcgcattccgttcatcttcagcatcgtgctggtcatcgccgcgctgtggatccgcaacgggatggaagagtccgcggaattcgaacagcagcagcgggaaaaaccgctcgccaaaaagcgtatgcctgtgatggaagcgctggttcagcaccctggcgcttttctgaaaattatcgccctgcgcctgtgcgagctgctgacgatgtatatcgtcaccgcgtttgccttgaactactcgacgcagaatctcggtctgccgcgcgagctgttcctgaatattggcctgctggtcggcgggatcagctgcctgacaatcccctgcttcgcgtggctggcggacaggtttggccgccgtcgcgtttacatcaccggggcgctgattggcaccctcagcgcctggccattctttatggcgctggaggcgcagtcgatcttctggattgtcttcttcgccatcatgctcgccaacatcgctcacgacatggtggtgtgcgtgcagcagccgatgttcaccgagctgtttggcgcaagctaccgctacagcggcgcgggcgtgggctaccaggtcgcaagcgtggtcggtggcggatttacgccgtttattgccgccgcgctggtgaccttctccggcggcaactggcacagcgtggcgatttatctgttcgccggctgcctgctgtcggcggcaacggcgctgctgatgaaagagacgagccaccgt

SEQ ID NO: 19559 - DNA, 861 bp, Enterobacter cloacae
atgaaactcgcaagctttttataccagggaaaacgcagctacggcatcgtccaggccgacggcgtgattgatttaggccgccgtctcggcgaccgctacagcgacctcaaggcgctgctgcagggcaacgggctggcgcaggccacccgctacctgaacgacgccgtggacgtgccgatgagcgccatcaccttcttaccggtgattgagcagccggaaaagatcctctgcgtgggcatgaactatgccgacaagcgcaaggagtttgaccagcataatccggccccgacgctgtttgtccgcttcccggattcacagaccggccacaacgagccggtgctgaagccgcgccactccagcgaattcgactatgaaggcgagctggcggtgatcatcggcaaaggcggggagaacatcagccgcgacgacgccctgcgccacgtggcgggctacagctgctacatggacggctccgcccgcgactggcagcacacctggttcaccgccggtaaaaactggcgcaaaaccggcgcgtttgggccgtggatggcgacggcggatgagatcccggatccgcaccagcttgcgatccgcacctggctgaacggccgcatggtacaggaagacaacaccagcagcatgatccataaggtggcggagctgatcgagtacatcagcaccttcacccgcctcagtccgggcgacgtgatcatcaccggatctccgggcggggtgggtaaaaaacgcaatccgccgctgtttatgaaggaaggggatcgcattgaggtggagatcgagcatatcggtcatctgagcaacgtgatcgtggaagcgccagccgtcgggcttgcggcagcacac

SEQ ID NO: 19560 - DNA, 873 bp, Enterobacter cloacae
atgagcaaactccgccgcagcatgttgttcctgccgggcgctaacgccgccatgctctcaaccgcttttatctaccgtcccgactccatcatgtttgaccttgaggacgccgttgccctgcgcgagaaggataccgcgcgcatgctggtgttccatgccctgcagcacccgatgtatcaggatatcgaaaccgtagtgcgcattaacccgctcagcacgccgtttggcctgctggatctggaggccgccgtgcgggccggcgtggacgtgatccgcctgccgaaaaccgacacgccggacgatatctacgagctggaaggccacctcgaacgcatcgagcaggagtgcggccgcgaggtcggctccacccgcgtaatggcggcgattgaatcggccattggcgtcatcaacgccgtggcgattgcccgcagctctgtgcgcctcatcggcatcgcgctggccgcctttgactacgtgatggacatgcagaccgagcgcggcgacggcaccgagctcttctacgcccgctgcgccgtgctgcacgccgcccgcgcggcgggtatcgacgccttcgacgtagtgtggtcagacgttaacgacgaggccggattcctgcgcgaggtcgatctgatccgcaagatgggctttaacggaaaatcgctgatcaacccgcgccagattgacctgctgcacaacgcctacgccccgacgcaggaagaggtagatcacgccaaaagggtaattgaagcagcagaagagggcgagcgtaacggcctgggcgtggtatcgctcaacggcaaaatggtggatgcaccgattattaaccacgcgcaggtggtgctggagcgcgcggcggcctccggcgtgcgtcgg

SEQ ID NO: 19561 - DNA, 1599 bp, Enterobacter cloacae
atgcaccgattattaaccacgcgcaggtggtgctggagcgcgcggcggcctccggcgtgcgtcggtaaggataaaataatgaatcagactgaacttcttcacgtgaatttcccccatctgcgggacttaaaaccctttgataccgcccacagcgcgacgccctggctggcggacagcgacgcgaagcacagccgtaaactctgtgcctccattgaagaggcggttaagcgatgcggcctgcaggacggaatgaccatctccttccaccacgcgttccgcgaaggcgaccgggtgatcaacaccgtcgtggcgctgctggcgcgaatgggcttcaaaaacctgacgctggcttccagctcgctaatgacctgcaacgacgcgctgatcgagcatattaaaagcggcgtcatcacccggatttatacctccggtatgcgcggcaggctggcggacgcgatctcccacgggctgatggacgagccggtgcaaattcactcccacggcggtcgcgtgaagctgctccaggacggcgagctgaatattgacgtggcgtttctcggcgtgccgtgcagcgatgagtttggcaacgccaacgggacgcacggcaaatcgtgctgcggctccctgggctacgccatggtggacgcccactttgcccgcaaggtagtgctgctgaccgaagaactggtgccgtttccgaatatgcccgccagcctggtgcaggatcaggtggactacatcgtgcaggttgagagcgtgggcgacccggcgaaaatcagcgtcggcgcggcgcgggtcaccagcaacccgcgcgagctgatgatcgcccgctatgcggcggacgtcattgaacactccggctacttcaaaccgggcttctcgatgcagaccggctccggcgcggcggcgaccgcctgcacgcgctttatggaagagaagatggagcgcagcggcgtgaaggcgcgctttgcgctcggcggcatcaccggcagcctggtggatctgcacgagaaggggctcatcgaaaagctgctcgatacccagtgctttgacggccaggcggcggcctcgctggcgcgcaacccgaaccacgtggagatctccaccaacgtctacgccaaccccggcagcaaggcggcaagctgcgaccagcttgacgtggtgatcctcagcgcgctggaaatcgacgtcgatttcaacgtcaacgttatcactggctccgacggggtgatgcgcggcgcgtccggtggacactgcgacgtggccgccgcggcaaacctgaccatcgtcgtagcgccgctgttgcgcagccgcattccgacggtcgtgaagcgggttaccacgcgcctcacgccgggcgagagcatcgacgtgctggtcaccgaccacggcattgcggtcaacccggcgcgcccggagatccgcgagcggctgctggaagccgggctcaaagttgtggatatcagcgcgctttacgagcgggcgatttctctgacgggcgtacctaaaccgattgaatttaccgacaaaatcgtcggggtgatccgctaccgcgacggcagcgtgatcgacaccgtacgacaggtgaaggaggaagtg

SEQ ID NO: 19562 - DNA, 1257 bp, Enterobacter cloacae
atgcggatgttaaagcgtgaaatgaacattgccgattatgatgccgaactgtggcaggctatggagcaggaaaaagtacgtcaggaagagcacatcgaactgatcgcctccgaaaactacaccagcccgcgcgtcatgcaggcgcagggttctcagctgactaacaaatatgctgaaggttacccgggcaaacgctactacggtggttgcgagtacgttgatatcgttgagcagctggctatcgaccgtgcgaaagaactctttggcgctgactacgcaaacgtgcagccgcactctggctctcaggctaacttcgcggtctacaccgcgctgctgcagccgggcgataccgttctgggtatgaacctggcgcagggcggccacctgactcacggctccccggttaacttctccggcaaactgtacaacatcatcccttacggtattgatgagtccggtaaaattgactacgaagacatggcgaagcaggctaaagagcacaaaccgaagatgatcatcggtggcttctctgcttactccggtatcgttgactgggcaaaaatgcgtgaaatcgcggacagcatcggtgcttacctgttcgtcgacatggcgcacgttgcgggcctgattgccgctggcgtttacccgaacccggttccacacgctcacgttgtgaccaccaccacccacaaaactctggcgggtccacgcggtggcctgatcctggcgaaaggcggtgacgaagagctgtacaaaaaactgaactccgctgtattcccaagcgcgcagggcggcccgctgatgcacgttatcgcggcaaaagcggtcgcgctgaaagaagcgatggagcctgagttcaaggtttatcagcagcaggttgctaagaatgccaaagcgatggtggaagtgttcctgaaccgtggctacaaagtggtatccggcggtactgaaaaccacctgttcctgctggatctggttgataagaacctgaccggtaaagaagctgacgcagccctgggccgcgccaacatcaccgtgaacaaaaacagcgtgccaaacgatccgaagagcccgttcgtgacctccggtatccgtatcggttctccggccgtaactcgccgcggctttaaagaagcggaagtgaaagagttggctggctggatgtgtgacgttctggacaacatcaatgacgaagcggttatcgagcgcgtcaaaggtaaagttctggatatctgcgcacgcttcccggtttacgca

SEQ ID NO: 19563 - DNA, 2247 bp, Enterobacter cloacae
atgtcgaacaaagataaaactcatcaatcaccgattcatggcactgaggaatctcaaccgggtatggactctctcgcccctgctgacggctctcatcgcccctcccctggcccctccgcaccgggcgaacagcctaccgcaccgggaagcatgaaatcgccggacacgggaaacgagaagctgaaatctcttgagccgcaccgtaaaggcggcgaaggctttgcgctcaccaccaatcagggcgtgcgcattgctgacgatcagaactcccttcgcgcaggcgcgcgcgggccaaccctgctggaagactttatcctgcgggaaaaaatcacccatttcgaccatgagcgaattccggaacgcatcgtccacgcgcgaggttccgctgcgcacggctacttccagccctacaagagtctgaaagacatcaccaaagcggatttcctctccgatccggataaaatcaccccggtgtttgtgcgcttctccaccgtgcagggcggcgccggttcggcagatacggttcgggatatccgcggctttgccaccaagttttataccgaagagggtattttcgatctggtgggcaataacaccccggtgttcttcattcaggacgcgcataaatttcctgactttgtccatgcggtaaaaccggagccccactgggccataccgcagggacaaagcgcgcacgacaccttctgggactacgtctcactgcagcctgaaaccttacacaacgtgatgtgggcgatgtcagaccgcggcattccgcgcagctatcgcacgatggaagggtttggtatccataccttccgtctgatcaatgccgagggcaaagccacgtttgtgcgcttccactggaagccggtggcgggcaaagcctcgctggtgtgggacgaggcgcagaagctgaccggacgcgatccggacttccatcgccgcgagctgtgggagtccattgaagcgggcgatttcccggaatacgagctgggcctgcagctcataccggaagaggacgaatttaagttcgatttcgacctgcttgacccgacgaagctgattccggaggaactggtgccggtacagctggtgggtaaaatggtgctcaaccgcaacccggataacttcttcgccgaaaacgaacaggttgccttccacccgggccatatcgtgccggggctggacttcaccaacgatccgctcctgcagggacgcctgttctcatacaccgatacgcagatcagccgtcttggcgggccgaacttccacgaaatcccgattaaccgcccaacctgcccgtaccacaacttccagcgcgacgggatgcaccgtcaggatattgataccaacccggcgaactatgagccgaactcgatcaacgataactggccgcgcgaaacgccgccggggccgaaacgcggtggattcgaatcgtatcaggagcgtatcgatggcaataaaattcgcgagcgcagcccgtcgttcggcgagtattacgcccaccctcgcctgttctggaacagccagacgccgattgagcagcagcacattatcggcggcttcagctttgagctgagcaaagtggtgcgtacctacatccgcgagcgcgtggtcgatcagctagcgcatattgatgttcagcttgcccagagcgtcgcggacaacctgggcattactctgaccgatgagcagcgcaaccttgccccgccgaaagaggttaacggcgtgaagaaagatccgtcgctgagcctgtatgccgtgccgggtggctcgattaaaggccgcgtggtcgccatcctgctgaacgacaaaacccgcgccagcgacgtgctggggattatgcaggcgctgaagacccagggcgtgcatgcgaaactgctttattcccgcatgggggaagtgaccgccgatgacggctcagtgctgccggtggcggcaacctttgccggggcgccatcgctgaccgttgacgcggtgattgtgccgtgcggggatatagacagcctgctgaccaacggtgacgccgtgtattatctgctggaagcctataagcacctgaaaccgatcgcgctgtccggcaacgcgcgacggtttaaggcgcagctgaaggtggccgatcagggtgaggacggcattgtcgagggagacaacgttgacgatgcctttatgacgaagctgtttgatttgctcgccgcgcaccgcgtctggtcgcgcagcagtaagatcgatcagattccggcg

SEQ ID NO: 19564 - DNA, 1286 bp, Enterobacter cloacae
gtgtcaaaggcaaccgaacagaacgacaagcttaagcgagcgataatcgtctccgcagtgctgcacgtgattctctttgcagcgctgatctggagttcgttcgacgagcatattgatgcatcagccggcggcggtggagggtcttccattgacgccgtgatggtggatcccggtgcggtagtacagaactataatcgcgaacaacagcagaaggcgagtgccaaacgggctgaagagcagcgtgaaaaacagtcgcaacagcaggcggaagaactgcgtgaaaagcaggccgcagagcaggagcgtctgaagcagcttgagaaagagcgtttgcaggcgcaggaagctgcgaaagagcaggcggaacagcagaagcaagccgaagaggccgcgaagaaagcccaggaacagcaaaagcaggcggaagaggcggcagcaaaagccgcagcggacgcgaaagcgcaggctgatgcccaggcaaaattagcggcagaagcggcgaagaaagccgctgctgatgctcagaagaaagctgaagcggaagccgcgaagaaagccgctgctgatgcccagaagaaagctgaagcggaagccgcgaagaaagccgctgcagatgcccagaagaaagccgaagcggaagccgcgaaaaaagccgctcaggaagcagagaagaaagctgctgccgaggccgcgaagaaagcggctgctgctgagaaagcggctgcagaaaaagctgccgccgctgaaaaagccgctgccgataaaaaagctgcagctgagaagctgccgccgataagaaagctgctgctgagaaggccgctgccgataagaaagctgctgctgataaagcggctgccaaaaaggccgcagccgctgaaaaagccgctgccgccgcaggggttgacgatctgctgggcgatttgagctcaggtaagaatgcaccgaaaacgggcggtggggcgaaaggaaacaacgcagcgccgacgggaagtggtaacactaagagtaacggtgcgacaggggctgaaatcaacggttatgccgcgcagattaaatccgctattgaaagccgattctatgatgcgtcttcctataccggtaaaacgtgtacgttgcgtataaaactggctccggacggcatgctgctggatattaagtctgaaggtggcgacccggctttatgtactgcggccctggctgcagcgcgtcaggcgaagatgcctaaaccgccgtctcaggcagtttacgaagtcttcaaaaatgcgccgctggacttcaaaccttaa

SEQ ID NO: 19565 - DNA, 699 bp, Enterobacter cloacae
ctagtggatccccgcattattggtgcaatggaagaagaagttacgctgctgcgtgacaaaattgagaaccgtcagaccctctctctgggaggttgtgagatctacaccggccagctgaacggtgttgacgtggctctgctaaaatcaggcatcggtaaagtggctgctgcgctgggtgcaaccctgctgcttgagcgctgcaagccggacgtgatcgtgaataccggctctgcgggcggcctggcgccgacgctgaaagtgggcgatatcgttgtctccgacgaagcgcgttaccacgatgccgacgtcaccgcgttcggttacgagtacggacagctcccgggctgccctgctggttttaaagctgacgacaagctgattgcggcggcagagacctgcatcgcagaactcaacctcaacgcggtacgcggtctgattgtcagcggtgatgccttcatcaacggctccgttgggctggcgaaaattcgtcataacttccctcaggctgttgccgttgagatggaagcgaccgcgatcgctcatgtctgccataacttcagcgtacccttcgtggtggttcgcgccatctctgacgtggcagaccagcagtcccacatcagcttcgacgagttcctgaccgttgcggcaaaacagtccaccgtgatggtggagcgcctggtgcagaatctggcacgtggc

SEQ ID NO: 19566 - DNA, 798 bp, Enterobacter cloacae
gtggctaaacataccgtcagggcgctggccgccctgcttcttctcgcaccgctgtggctctatgcgttaccgcgcgtgattactctctctcccgcaaatacggaactggcgtttgccgccgggatcacgcccgttggcgtgagtagcttttcggattacccaccgcaggccgcgggtattgaacaggtggcaacctggcaggggatgaaccttgagcgcatcgtggcgcttaaaccagatctcgtgctggcctggcgcggcggcaacgccgagcggcaggtcaaccagctcacctcgcttggcataaaggtcatgtggattgatgccgtcagcattgagcaggtcgctcaggcgctacgcgccctggccccctatagccctactcctaaaaaagccgaggctgcggcgaaacagatgctgagcgactatgccgcgctgaaatcccgatacgatacccctgttaaaaagcgcatcttcttgcagtttggcagccagccgctgtttaccaccggaaaagggtcgattcagaaccaggtgctggaagtctgcggcggtgaaaacatctttgctgccagccgggtaccctggccgcaggtgagccgcgagcaggttctggcgcgccagccgcaggccatcgtcgtggtcggaaatgcgagcgagattcctaaaattgaacaattctggcaaaggcagctaaaaattccggtgatcccgctcaacagcgactggtttgaacgcgccagcccgcgtattatcctcgccgcaaaacagctctgtgccgcgctggcagagagtcac

SEQ ID NO: 19567 - DNA, 819 bp, Enterobacter cloacae
atgcatgatgcacagatccgtgtcgccattgcgggcgcgggtggacgtatgggccgtcagctgattcaggcggcacttcagatggatggcgtcgcgcttggcgcggcactggagcgtgaaggttcgtcgcttctggggaccgatgccggtgagctggcgggcgcaggccacacgggcgttaccgtgcaaagcagcctggaggcgattaaagaggatttcgatgtcttcatcgattttacccgcccggaagggacgctcgcgcatctggcattttgccgtcagcacggcaaggggatggtgatcggcaccaccggttttgacgatgcgggcaagcaggctatccaggatgcatccaaagagattgcgattgtcttcgccgcaaacttcagcgtcggcgttaacgtcatgctgaagctgctggagaaggccgcgaaggtgatgggcaactataccgatattgagatcgtagaagctcaccaccgttacaaggttgatgcgccatctggtacggcgctggcgatgggcgaagcgattgcgcatgcacttgataaagatttaaaagactgcgcggtctatacccgcgaaggttacaccggcgaacgcgtgcctggcaccattggcttcgcaaccgtgcgcgcgggcgacatcgtcggcgaacacacggcgatgttcgccgatattggcgaacgtgtcgaaattacgcataaagcctccagccgtatgacgttcgccaacggcgccgtacgttccgctttgtggctgaaaaacaagaaaaacggcctttttgatatgcgagacgtgctcgatctcaacaatttg

SEQ ID NO: 19568 - DNA, 2765 bp, Enterobacter cloacae
gactataaatcaaccctgaatttgccggaaacagggttcccgatgcgcggcgatctcgccaagcgcgaaccgggaatgctggcgcgttggaccgatgatgacctgtacggcatcattcgtgcagccaaaaaaggcaaaaaaaccttcattctgcatgatggccctccatatgcgaatggcagcattcatattggtcactcggttaacaagattctgaaagacattatcgtgaagtccaaaggcctcacgggatatgactcgccttacgttccaggctgggactgccacggtctgccaatcgagctgaaagtggagcaagagtttggcaagcctggtgagaagttcaccgccgccgagttccgtgcgaagtgccgcgaatacgcagccacgcaggttgacggtcagcgcgctgacttcatccgtctgggcgtgctgggcgactggtcgcatccgtacctgaccatggacttcaaaactgaagccaacatcatccgtgcgctgggtaaaatcatcggtaacggccacctgcacaaaggcgctaagccggtgcactggtgcgtggactgccgttctgcgctggcagaagcggaagttgaatattacgacaaaacctctccatctatcgacgtggcgttccaggccgtcgatcaggatgcggtgaaagctaaatttggcgtctcctcggtaaacggcccgatctctctggtgatctggaccaccaccccgtggaccctgccagccaaccgcgcgatctccctgtccggtgagttcgaatacgcgctggttcaggttgaaggtcaggcggttatcctggcgaaagatctggttgagagcgtgctgaagcgcgcgcatatcagcgactacaccgtgctgggcaccgtgaaaggcgacgcgctggagctgatgcgcttcaaacacccgttcctggacttcgacgttccggcgatcctgggcgaccacgtgacgctggaagcgggtaccggtgcggtgcataccgccggtggccacggtcctgacgactacaacatcagcctgaagtacggtctggaaatcgctaacccggttggcccggacggatcttatctgcctggcacctacccggcgctggacggtatcaacgtcttcaaagcgaacgacatcatcgtcgacatgctgcgcaccagcggcgcgctgctgcacgttgaaaaaatgcagcacagctatccgtgctgctggcgtcacaagaccccgatcatcttccgtgcgaccccgcagtggttcgtcagcatggatcagaaaggcctgcgcgagcagtctctgaaagagatcaaaggcgtgcagtggatccctgactggggccaggcgcgtatcgaatccatggtggctaaccgtcctgactggtgtatctcccgtcagcgtacctggggcgtgccgatgtctctgttcgtacataaagagacgcaggagctgcacccgaacaccctggaactgatggaagaagtggcgaagcgcgtcgaagttgacggcattcaggcgtggtgggatctcgacgcccgcgacatcctgggcgtgacgcagacaactacgagaaagtgccggataccctggacgtgtggttcgactccgggtctactcactcctccgtggttgacgtgcgtccggaatttgccggtcacgctgccgatatgtatctggaaggatctgaccaacaccgcggctggttcatgtcatctctgatgatctccaccgccatgaagggtaaagcgccttaccgtcaggtactgactcacggcttcaccgtggatggtcagggccgcaagatgtccaaatctatcggtaacaccgtttctccgcaggatgtgatgaacaagctgggcgcagacattctgcgtctgtgggtggcctctaccgattacaccggcgaaatggcggtatctgacgagatcctgaagcgtgctgccgacagctatcgtcgtatccgtaacaccgcgcgcttcctgctggcgaacctgaacgggttcgatccggcaaaagacatggtgaaaccggaagagatggttgtgctggaccgctgggcagtaggctgcgcgaaagcggcgcaggaagatatcctgaaagcctatgagtcttacgacttccacgaagtggtgcaacgcctgatgcgcttctgctccatcgagatgggctcgttctacctcgacatcatcaaagaccgccagtacaccgcgaaggcggacagcgtggcgcgtcgtagctgccagaccgcgctgttccacatcgcagaagcgctggttcgctggatggcgccgatcatgtccttcaccgcggacgaaatctggggctacctgccgggcgaccgtgagaagtatgttttcacgggcgagtggtacgaaggtctgttcgatctctccagcaccgaagcgatgaacgatgccttctgggacgagctgctgaaagtgcgtggcgaagtgaacaaggttatcgagcaggcgcgtgcggacaagaaagtcggcggctctctggaagcggcagttacgctgtatgccgaaccggagctggcggcgaagctgacggcgctgggcgatgaattacgatttgtcctgttgacctccggtgcgaaagttgcggattatgccgaggcttctgctgatgctcagcagagcgagctgctcaaaggactgaaagtcgcgctgagcaaagccgacggtgaaaaatgcccgcgttgctggcattacaccaccgatgtcggccaggtggcggaacacgcagatatctgcggacgctgt

SEQ ID NO: 19569 - DNA, 1803 bp, Enterobacter cloacae
atgcttatgcgcttcatgttgctgatgttggcactaacgagcctgtccagccaggcgcaagccatcaaagaaaatatcgccttcgcggtgattggcgagccgaaatatgcggtcaattttacgcacttcgattacgttaaccctgccgcgccgaagggcggaaaggtcacgctttccgccacgggaacattcgacaacttcaaccgcttcgccctgcgcggcgtggcggccgcgcgaacggaatcgctttacgatacgctcttcgtcacgtcggatgatgagcccggcagctattatccgctgattgccgagaacgtgctttacgccgataacttcgcctgggcggaaatctcgctgaatccgcgagcacgttttcacgatggcacgccggtgaaggccagcgacgtggcgttcaccttccataaattcatgaccgaaggcgtcccccagttccgcatcgtgtataaaggcgcatccgttagagccatcgcgccgctcaccgtacgcatcgagctgagcgaaccgaacaaagagaacatgcttagcctgttctcgctgccggtgatgcctgaatcgttctggaaaaatcataagctaagcgacccgctttccacgccgccgctggcaggcggcccataccgcatcaccgactggcgaatggggcaatatgtcgtttactcccgcgttaaagactactgggcggcaaatctgccggttaatcgcgggcgctggaatttcgacacccttcgctatgattactacctcgacgataacgtggcgtttgaagcgttcaaagccggtgccttcgatttacgcgtagaaagcagcgccaaaaactgggcgacccgctatatcggcaaaaatttcgcaaaaggctatatcgtcaaagacgagcacaaaaatgagtctgcccaggacacccgctggctggcgtttaatattcagcgtccggtatttaatgaccgccgggtgcgcgaagccatttccctggcctttgattttgagtggatgaacaaagcgctgttttacggtgcctacagccgcgccaacagctatttccagaacaccgaatatgccgcgcgcgattacccgaaagccgacgagctggtcctgctgaccccgctgaaagcggagctaccgccggaggttttcaccaccgtgtttcagccgcccgcgtcgaacggtgacggttacgaccgcgacaacctgctgaaggccagcaaactgctggatgacgcgggctggcacctgaaaaatcaaaagcgtgtggatgccaaaacgggcaagcctctcagctttgagctgctgctctcgtccggggtcaacgatcagtgggtactgccgtttaagcacaaccttgagcggctgggcgtgaccatgaacattcgccaggttgataacgcgcagatcaccagccgcatgcgcagccgtgattacgacatgatgcagcgcctgtggcccgcccagccgtggcccagctcggacctgcaaatctcctgggcctccagctacatcgactcctcatacaatgcgccgggggtaaaaagcccggcgattgacgcgctgattgccaaaatagaggcggcgcagggggataaagaaaagctcctgcctctcggacgcgccctcgacagggtcttaacctggaactactacatgctgccgatgtggtatatgggcgaagatcgccttgcgcgctgggacaagttctccgtgcctgccgtgcgtcctgtctactacatgggctttgatacctggtggtatgacgttaacaaagccgccagacttcccgctgagcggcga

SEQ ID NO: 19570 - DNA, 1581 bp, Enterobacter cloacae
atgaatgtaaccctgatagataccgttgtgacccgcagccgggccttaagcccgtggacgggtttttactttttgcagtcattgctgattaactttgcgctgggttatccctttagtctgctctacgcggtggcgttcacctgcgttctgcatgtgctgtggcgaaccgcaccgcgcgtgcaaaaagcgttaatcgggatctgctcgctggtcgctgcactctatttcccgtttggtcaggcttacggctcgccaaactttaataccctgctggcgctgcactcgaccaatatggaagagtcaacggagatcctgacgatcttcccgtggtacagctacgtggtcgggatctttatcttcgcgttgggcgttatcgccatccgccgtcagtcgggcgagaaaaaatcctggggtaagatcgaaatactctgtctggtgttcagcgttgccgtggcgtttgtcgcccccatccagaatattccctgggacggtaagttaaggctcatcaatatcggctatccggttttccgcttcgttaaagacgtcgttgtaaataataaagaggttctcgacgaacaggcgcgcatggctgagctttccaatatgaaagacacctggaacgtgctggccgttaagccgaagtatcacacctatgtggtggtgattggggaaagtgcccgtcgcgatgcaatgggacgcttcggcggacactgggataacacaccgtttgccagctcggtcaaaggcacgctgtttaccgattatgttgcggccagcggctcgacgcagaaatcgctcggcctgacgcttaaccgggtcgtcgacggcaaacctcagtatcaggataattttgtcaccctggcaaaccgcgcgggttatcagacctggtggttctccaatcaggggcaaattggcgaatacgatacggccatcgccagtatcgccaaacgtgccgacgaagtgcagttccttaagaacggcgactttgaagccgacaaaaataccaaagacgaagcgctgctgaaaatgacggcacaggtcttcgccactccgcgcacccagcctcagttgatcgtcctgcacctgatggggtcgcacccgcaggcctgcgatcggaccggcgggaagtacgcggagttcgtgcagtccaaagagacctcttgctgtctctacaccatgacgcaaaccgacgacctgctgagcaagctgtacgatcaagtacgcaatacgggcgacagcttctccatggtctatttctcggatcatgggctggcgtttaaagagcgtggtaaagaggtgcagtacctggcgcatgatgacaagttccagcagaacttccaggtgccgtttatggtgctgtcgagtgatgataaaacgcatcgcgtgattaaagcgcgccgttcggcaaatgatttcctgcagttcttctcgcagtggacgggaattacagccgagcagataaaaacggcttacccgtttgtctctaacaagaaagctcccccagtgtacgttaccaacttcaagttacagaaagttgactacaaccatctgggtacggatattttcgatattaagagtaag

SEQ ID NO: 19571 - DNA, 636 bp, Enterobacter cloacae
atggctgtcgctgccaacaaacgttcggtaatgacgctgttttctggtcctactgacatttatagccatcaggttcgtatcgtgctggccgagaagggtgtcagttttgagatcgagcatgtggaaaaggataacccgcctcaggatctgatcgatctcaacccgagccaaagcgtaccgacgctggtggatcgcgagctgaccctgtgggaatcccgtatcattatggaatatctggatgaacgtttcccgcatccgccactgatgcctgtttaccctgtcgcgcgtggtgaaagccgcctgtacatgcagcgtatcgaaaaagactggtactcgctgatgaacgtgattaccagcggttctgcttctgaagctgacgctgcacgtaaacaactgcgtgaagagctgctggcgatcgctcctgtgtttggtcagaaaccattcttcctgagcgatgagttcagcctggtggattgctacctggcaccgctgctgtggcgtctgccaaccctgggcgtagagttcagcggtcctggcgcaaaagagctgaaaggctatatgactcgcgtctttgagcgcgactctttcctggcatctttaactgaaccggaacgtgaaatgcgtctcggccgaggc

SEQ ID NO: 19572 - DNA, 390 bp, Enterobacter cloacae
atggctgaaaatcaatactacggcactggtcgccgcaaaagttccgcagctcgcgttttcatcaaaccgggcagtggtaaaatcgtaatcaaccagcgttctctggaacaatacttcggtcgcgaaactgcccgcatggtagttcgccagccgctggaactggttgacatggtagaaaaactggatctgtacatcaccgttaaaggtggtggtatctccggtcaggcaggtgcgatccgtcacggtatcacccgcgctctgatggagtacgacgaatccctgcgttctgaactgcgtaaagctggcttcgttactcgtgacgcgcgtcaggttgaacgtaagaaagtgggtctgcgtaaagcacgtcgtcgtccacagttctccaaacgt

SEQ ID NO: 19573 - DNA, 426 bp, Enterobacter cloacae
atgaaaacttttacagctaaaccagaaaccgtacagcgcgactggtatgttgttgacgcgaccggtaaaactctgggccgtctggctactgaactggctcgtcgcctgcgcggtaagcataaagcggaatacactccgcacgttgataccggtgattacatcatcgttctgaacgctgataaagttgctgtaaccggcaacaagcgtactgacaaagtgtactatcaccacactggccacatcggtggtatcaaagaagcgacctttgaagagatgattgcccgccgtcctgagcgtgtgattgaaatcgcggttaaaggcatgctgccaaaaggcccgctgggtcgtgctatgttccgtaaactgaaagtttacgcaggcaacgagcacaaccacgcggcacagcaaccgcaagttcttgacatc

SEQ ID NO: 19574 - DNA, 303 bp, Enterobacter cloacae
atgtttgtcatctggagccatgaaaaagggttcatcatgagtcatcagctcaccttcgccgacagtgaattcagcagtaagcgccgtcagaccagaaaagagattttcttgtcccgcatggagcagattctgccatggcaaaacatggtggaagtcatcgagccgttttatcccaaggctggtaatggccggcgaccttatccgctggaaagccatctacgcattcactgcatgcagcattggtacaacctgagcgatggcgcgatggaagatgctctgtacgaaatcgcctccatgcggggg

SEQ ID NO: 19575 - DNA, 1194 bp, Enterobacter cloacae
atgcgtggtgatttttacaaacagttaaacagtgacctcgacaccgcacgtgcggaagggttgttcaaggaagagcgtattatcacgtctgcccagcaggcggacatcaccgttgccgacggcagccatgtgatcaacttttgcgcgaacaactatttaggtcttgcgaatcaccctgagctgattgccgctgcaaaaaacggcatggacacccacggtttcggcatggcctccgtacgctttatctgcggtacgcaggacagccacaagcagcttgagcaaaagctggcgagcttcctcggaatggaagacgcgattctgtactcctcctgctttgacgccaacggcggtctgtttgagaccctgcttggcgcagaagatgcgattatctccgacgccctgaaccacgcctccatcatcgacggcgtacgcctgtgcaaagcgaagcgtttccgctacgccaacaacgacatggtcgagctggaagcgcgcctgaaagaggcgcgtgaagcgggcgctcgccacgtgctgatcgccaccgacggcgtgttctccatggacggcgtgatcgccaacctgaagggcgtgtgcgacctggcggataaatacgacgcgctggtgatggtcgatgactctcacgcggtcggttttgtcggcgaaaacggccgcggttcccacgaatactgtgacgtgatgggccgcgtggacatcatcaccggtacgctgggcaaagcgctcggcggcgcgtccggcggctataccgccgcgcgtaaagaggtggtcgagtggctgcgccagcgctcccgcccgtatctgttctccaactccctggcgccggccattgttgctgcctccatcaaagtgctggagatggtggagtccggcgctgagctgcgcgaccgcctgtggtccaacgcccgtctgttccgtgaaaaaatgagcgccgcagggtttaccctggccggtgctgaccacgcgatcattccggtgatgctgggcgatgcggtcgtcgcgcagaaatttgcccgcgagctgcagaaagaagggatttacgtcaccgggttcttcttcccggtggtgccaaaaggtcaggcgcgtatccgcacccagatgtctgcggcgcatacgcctgaacaaattgaacgtgcggtggaagcctttacccgcatcggcaaacagctgggcgtaattgcc

SEQ ID NO: 19576 - DNA, 1026 bp, Enterobacter cloacae
atgaaagcgttatccaaactgaaagcggaagaagggatttggatgaccgacgtgccggagccggaagtcggtcataacgatctgctgatcaaaattcgtaaaaccgccatctgcggtactgacgtgcacatctacaactgggaccagtggtcgcagaaaaccattccggtaccgatggttgtcggtcacgaatatgtcggtgaagtggtgggtatcggccaggaagtgaaaggcttccaaattggcgatcgcgtctccggtgaaggccatattacctgcggccactgccgtaactgccgcggcgggcgtacgcacctgtgccgtaataccattggcgtgggcgtaaaccgtccgggctgcttcgcggaatacctggtgatcccggcctttaacgccttcaaaatcccggacaatatctctgacgatctggcctccatcttcgacccgttcggcaacgcggtgcacacggcgctctccttcgacctggtcggtgaagacgtgctggtctccggcgcgggcccaattggcattatggcggcagccgtggcgaagcacgtgggtgcgcgcaacgttgtgatcaccgatgtgaacgaataccgtctgtcgctggcgcgcaaaatgggcgtcacccgtgcggtggatatctcgaaagagagcctgagcgacgtgatggaagagctgggcatgaccgagggctttgacgtgggtctggagatgtccggcgcgccaccggcgtttcgcaccatgctcgacaccatgaaccacggcggtcgtattgcgatgctgggtattccgccgtcggatatgtctatcgactggaacaaggtcatcttcaaggggctgttcattaagggcatctatggccgcgaaatgttcgagacctggtacaagatggcggcgctgatccagtccggtctggatctgtccccgattatcactcaccgtttctccatcgatgagttccagcagggctttgacgcgatgcgttccggccagtcagggaaagtgatcctgagctgggataag

SEQ ID NO: 19577 - DNA, 510 bp, Enterobacter cloacae
atgagtcaggtaagcgcagaatttatcccgacacgcattgctatccttaccgtttccgaccgccggggcgaagaggatgatacctctggccactggctgcgcgaggcggcccatgacgcggggcatcacatcgtcgataaagcgatcgtgaaggagaaccgctacgccattcgcgctcaggtttcgcagtggattgccagcgatgaggtgcaggtggtgctgatcaccggcggcaccggttttaccgcaggcgatcaggcccccgaagcgctgatcccgcttttcgaccgcgaggtagaaggcttcggcgaagtgttccgcatgctctcctttgaagagattggtacctccacgctccagtcgcgcgccgttgccggggtggctaacaaaaccctgattttcgctatgccgggctcgaccaaagcctgccgcaccgcgtgggaaaacatcatcgccccgcagctggacgcccgtacccgtccgtgtaatttccatccccatttaaagaaa

SEQ ID NO: 19578 - DNA, 987 bp, Enterobacter cloacae
atggcttcacaacttactgatgctttcgcgcgtaagttttattacttacgtctgtcgattaccgatgtgtgcaacttccgttgcacctactgcctgcccgatggctacaaaccgggcagcgtcaccaataacggctttctctccgtggatgaagtgcgccgcgtcacgcgcgccttctctgagctcggcaccgaaaaagtgcgtctgaccggcggcgaaccctctctgcgccgcgatttccccgacatcattgccgccgtgcgtgaaaacgaacgtatccgccagattgcggtgaccaccaacggttaccgcatggcgcgcgacgtggcgaactggcgcgatgcggggctgacggcgatcaacgtcagcgtcgatagcctggacgcccgtcagttccacgccattaccggccaggataaatttcagcaggtcatggacggcatcgacgcggcatttgcggccgggttcgagaaggtcaaagtcaacacggtgctgatgcgcgatgtaaaccaccatcagctggacaccttcctggcgtggatccaatcccgccccattcagctgcgttttatcgagctgatggaaaccggcgagggcagcgagctgttccgtcgccatcacatctccggcatggtgctgcgcgacgagctgctgaaacgcggctggatccaccagatccgccagcgcagcgacggcccggcgcaggtcttctgccacccggattacgaaggtgagatcgggcttatcatgccctatgagaaagacttctgcgccagctgcaaccgcctgcgcgtctcctccgttggcaagctccatctttgcctgttcagcgacggcggcgtggaccttcgcgatctgctggaagatgatgcgcagcaggccgcgcttgaagcacgcatttctgacgcgctgacgcataaaaaacagacccacttcctgcatcagggcaataccggtattactcagaacctgtcttatatcggcggg

SEQ ID NO: 19579 - DNA, 906 bp, Enterobacter cloacae
atgcgcaatcgcacttttgcggatcttgaccgagtggtcgctcttggcggaggacacggcttaggccgggttatgtcctctttgtcgtcactcggctcaaggctgacagggatagtgaccaccaccgacaacggcggctcaaccgggcgcattcgacgtgccgaaggcggcattgcctggggagatatgcgcaactgcctgaaccagttaattaccgagccgagcgtcgcgtcggcgatgtttgagtaccgttttggcggtaatggcgaactttccggacataacctcggaaatttgatgttaaaggcgctcgatcacctgagcgtaaggcctctggaagccattaatttaatccgtaatctgctgaaagttgacgcattcctgatccccatgtctgaacaaccggttgacctgatggctatcgatgccgaagggcatgaagtttacggcgaagtgaatattgaccagctcatcctgccgcccacggagttaatgacctatccgagcgtgcccgccacgcgagaagcggtggaggccattggggaagcggatcttatcctgatcggcccgggcagtttttacaccagcctgatgccgattctgctggtgaaagagctggcgcaggcgctgcgccgcactcctgccccaatggtttacatcggtaacctgggacgtgagctgagcccggcggcagcgagcctgtcgctggcagacaaacttgaattaatggagcagtacgtcggtaaaaaaattatcgacggcgtcgtggtcgggccaaaggtggatgtgtcgggtattggcggccgcgtggtcgtgcaggagccgctggaagcgagtgatattaaatatcgccatgaccgtcacctgctgcgcgaggcgctggagaaggcgattcaggcgctgggt

SEQ ID NO: 19580 - DNA, 1200 bp, Enterobacter cloacae
gtgcaaaatgttgatgtcgccatcgttggcggcggtatggtcggactggcgctggcctgcggtttacagggcagcggcctgcgcgtggcggtgctggagcaaaagcagcctcagcccgttgcgccagatgctccgccggaactccgcgtctcggcgatcaatgccgccagcgagaaattgctgacgcaccttggcgtctgggcagatattgtggcgcagcgcgccagctgctatcacggcatggaagtgtgggataaagacagctttggtcatattgcttttgatgatgaaagcatgggctatagccatctgggccatatcatcgaaaacgcggtgatccaccacgcgctgtggcagaaagcacagcagtgcagtgacgtgaccctgattgcgcctgcgcagatccagcaggtggcatggggcgaaaacgaggcgtttatcaccctgcagagcggcgacatgctgaccgcgcgtctggtggtcggtgctgacggtgcgaactcctggctgcgtaataaagccgacatcccgcttaccttctgggactatcgtcatgatgctctggtggcaacgatccgaacagaggagccgcacggcggcgtggcgcgccagattttccacaacgacggcattctggcattcctgccgcttgccgatccgcacctgtgctcgattgtctggtccctggtgcctgaaaaagcccggcagatgcatgaggcggcgcctgacgcctttaaccaggcgctgtgcatggcgtttgataaccgccttggcttatgcgcccttgaaagcgagcggcaggtgttcccgttaaccggccgctacgcgcgtcagtttgcggcgcaccgtctggcactggtcggtgatgcggcgcataccattcatccgctggccgggcagggcgtcaaccttggctttatggacgcggcggagctggttgaggaactgtgtcgcctgcaccgcgaaggcaaagatatcggtcagcatctgtacctgcgtcgctacgagcgtagccgcaagcacagtgcggcgatgatgctggcgggcatgcagggcttccgcgagctgtttgccggcgcgaatccggcgaaaaaactgctgcgcgatattggtcttaaactggctgatacgcttcctggcgtcaaacctcaacttcttcgccaggcgatgggtcttaacgatcttcccgactggttacgc

SEQ ID NO: 19581 - DNA, 1092 bp, Enterobacter cloacae
atggctcaacagactcctttgtacgaacaacacgtgttatgcggcgcccgcatggtggacttccatggctggatgatgccgctgcactacggctcgcagattgatgagcaccacgcggtgcgcaccgatgccggtatgttcgacgtgtcccacatgacgattgtcgatctgcgcggcagccgcacccgggagtttttgcgttatctgctggcaaatgacgtcgccaaactgaagacgccgggtaaagcgctctacaccggcatgctgaatgcctcgggcggcgtgattgatgaccttatcgtctactacttcactgaagatttcttccgcctcgttgtcaactccgccacccgcgaaaaagacctctcctggatcacccaacacgccgaaccttatgccatcgacatcaccgtccgtgacgacctgtcgctgatcgccgtacaggggccgaacgcgcaggcgaaagccgcgtctctgtttaacgacgagcaacgcaaagcaaccgaaggcatgaagccgttcttcggcgtgcaggcgggcgatctgtttatcgccaccaccggctacaccggtgaagcgggctacgaaattgccatgccgaacgagaaggccgctgatttctggcgtgcgctggtggaagcgggcgtgaagcctgcgggtctgggcgcgcgcgatacgctgcgtctggaagcggggatgaacctctacggtcaggagatggacgaaggcgtctctccgctggccgccaatatgggctggaccatcgcgtgggaaccggctgaccgtgactttattggtcgtgaagcgctggagatgcagcgtgagaagggcactgaacagctggtgggtctggtgatgaccgagaagggcgtgctgcgcggtgaactgccggtgcgctttaccgatgctgacggcaatcctcgcgaaggcgtgatcaccagcggtaccttctccccgacgctgggctacagtattgcactggcacgcgtgccggcgggtattggcgaaacggcggtggtgcaaatccgcaaccgcgaaatgccggtcaacgtaaccaaaccgatttttgttcgcgccggtaagccggtcgcc

SEQ ID NO: 19582 - DNA, 1806 bp, Enterobacter cloacae
ttcattgaacgtcacattgggccggatgctcagcaacagcaggagatgctgaagacagttggcgcggattcattaaacgcactgatcggccagattgtgccaaaagacatccagcttgccacgccgcctcaggtggggcaagccaccacggaattcgccgcgctggcggagctgaaggctatcgcaggcctgaacaagcgctataagtcttacattggcatgggctacaccaacgtgcagttgccgccggttatcctgcgcaacatgctggaaaacccgggctggtacaccgcctacactccgtatcagccggaagtctcccagggccgtctggaagcgctgctgaacttccagcaggtgacgctggatctgaccggtatggatattgcctccgcgtctctgctggatgaagcgaccgccgccgccgaagcgatggcgatggctaagcgcgtgagcaagctgaaaaatgccaaccgcttcttcgtcgcggcggacgtgcatccgcagacgctggacgtggtgcgcacccgtgcggaaaccttcggctttgacgtgatcgtcgacgacgccgacaaagtgctggatcaccaggacgtcttcggcgtactacttcagcaggtaggcaccaccggtgaagttcacgactacggcgcgctgattgtcgagctgaaatcccgcaaagtggttgtcagcgttgccgccgactttatggcgctggtgctgctgacggcaccgggcaaacagggcgcggatattgtctttggttcagcgcaacgcttcggtgtgccgatgggctacggcggcccgcacgcggcgttcttcggcgcgaaagatgaattcaaacgctccatgcccggccgtattatcggcgtctcaaaagacgctgccggtaacaccgcgctgcgcatggcgatgcagacccgcgagcagcacatccgccgcgagaaagcgaactccaacatctgtacctcacaggtgctgctggcaaacatcgccagcctgtacgccgtgttccacggcccggctggtctgaagcgcattgccagccgcattcaccgcctggccgatattctggcctgcggcctgcagcagaaaggccttaagctgcgccacgctcactacttcgacaccctgtgtgtggaagttgcggacaaagcggccgtgctggcgcgcgcgaatgcagcagagatcaacctgcgcaggacatccacaacgccgtcggcattacgctggatgaaagcaccacccgcgacgatatcctgaacctgttcagcgtgttgctgggtgacgcgcacggtctggacattgacgcactcgacaaagagatcgcgctcgacagccgctccattcaggaaagcatgctgcgtaatgatgcgatcctgacgcatccggtgtttaaccgctatcacagcgaaaccgagatgatgcgctatatgcactctctggagcgcaaggatctggcgctgaaccaggcgatgatcccgctgggctcctgcaccatgaagctgaacgccgcggcggagatgatcccgatcacctggcctgaattctccgagctgcacccgttctgcccgcaagagcaggcggaaggttatcatatgatgatcaaccagctttccgactggctggtgaagctgaccggttatgacgcgctctgcatgcagccaaactccggcgcgcagggcgaatacgcgggcctgctggcgatccgtcactatcacgaaagccgcaacgaaggtcaccgcgatatctgcctgatcccaagctctgcccacgggtaccaacccggcctctgcccagatggca

SEQ ID NO: 19583 - DNA, 720 bp, Enterobacter cloacae
atgttaagcattaaagatttacaggtcagcgtagaagacaaagccatcctgcgtggcctcaattttgacgtcaagccgggggaagtccacgctatcatggggccgaacggttccgggaaaagtacgctttccgcgacgctggcggggcgcgaagattatgaggtgacccacggctcggtcgagttcaacggtaaagatctgctggaaatgtcgccggaagatcgcgcgggagagggcatctttatggccttccagtacccggttgaaattccgggcgtcacaaccagttcttcctgcaaaccgcgctcaacgcggtgcgaaaataccgggggctggaggcgctcgaccgcttcgacttccaggatttaatggaagagaaaatcaagctgctgaaaatgccggaagatttgctcacccgctcggtgaacgtcggtttttccggcggcgagaaaaagcgtaacgacattctgcagatggcggtgctggagcccgagctgtgcattctggacgagaccgactccggtctggatatcgacgccctgaagattgtcgctgacggagttaactccctgcgcgacggcaagcgttcattcattatcgtcacccactaccagcgcattctggactacatcaagcctgattacgtccatgtgctttaccaggggcgtattgtgaaatccggagatttcacgctggttaaacaactggaggagcagggtt

SEQ ID NO: 19584 - DNA, 1213 bp, Enterobacter cloacae
atgctcaccaccatcatttaccgcagtcatatctgcgaggacgttccagtgaaagcgctggaagtcatggttgctgctgcaaatagtaaaaaccagcaatccaatatcacggggatcctgctgtttaatggcacacatttttttcagctgcttgaagggccagtggaacacgtttctgccatctatgagcagatttgcaacgaccctcgccaccacaacgtagtgtagctgatgcgcgatcacggacctgtccgtcgttttggcaacgtgggcatggagctttttgatttacgccacttcgacagggacgaggtgctgcaagaggtgctcaacagggggacgacgcgctatcagctgacgtacaacgaccgcccgctgcagtttttccgcacctttgtcgaggccacggaaaaagcgaactattttgaactgcctcctgcggattcctgggaattcgtgcgcgaagagacgcgcttgtccgcacagcccgaggtggtcgcgaaaggggcggattgcagcttcgcgttccagccgatagtcgatccgtttatgcagcaggtcgtctcctgggaggcgcttctccgcacgcctgacggcggcgcgccggggagtttacttcgccagtctgccgcgtgacgacgtgtatgcctcggatttacaaagcaagcaggttgcgctctccatggccagcgcgctggggctccaggaccaaacgttatccctcaacctgctgccgatgacgctggtcaatattcccaacgccgttgatttcctgctcaccgcgattgaagccaatgggtttgtccctgagcaaattgtggtggagtttaccgagagcgaagccatttcccgattcgatgaattcacggattcggtcaggcagttaaaaagcgcgggcatcagcttgacgatcgatcactttggtgccggatttgccgggttacagctgctggctcagtttcagccggacagaattaagattaatcgcgatctggtcgcaaacgtgcacaaaagtggtccccgacaggccattatccaggcgattatcaaatgctgtgcctcgcttgagatccagttctgcgcggtgggggtagagaaggctgaagagtggatgtggctggagtcagcgggaatatcccagttccaggggcatctttttgccagcccgcgacacggcggtattcccgcgattgcttggccggagaaaaagttc

SEQ ID NO: 19585 - DNA, 2796 bp, Enterobacter cloacae
atgacattatggattaacggtgactgggtcacgggcgaaggcgaagagcgcgtaaagaccaatccggttggaaaagaggtgctctggaaggggcatgacgccagcgccgcgcaggtagaacaagcctgccaggccccgcgccgcgcctttccggcgtgggcaaaacagcctttcgccgtgcgccaggaaattgttgaaaagtttgccggcctgctggaggcaaacaaggccgaactgacgcgcatcatcgcgtctgaaaccagtaaacctcgctgggaagcgacaaccgaagtgacggcgatgatcaacaaaatcgccatttcggtgaaggcgtaccacacccgcaccggcgaacagcataccgagatgccggacggcgcggccacgctgcgccaccgtccgcacggcgtgctggcggtatttggcccgtataacttcccgggacacctgccgaatggccacattgtgcctgcgctgctggcgggcaataccgttattttcaaaccgagcgagctcacgccattcaccggcgaggcggtggttaagctatgggaacaggccggcctgccgccgggcgtgctgaacctggtacagggcgggcgggaaaccggtcaggcgctgagcgcgctgagcgatatcgacggtctgctgtttaccggcagcgccggtacgggctatcagctgcaccgccagctggcagggcagccggagaaaatcctggcgctggagatgggcggcaacaacccgctgattgtggaagaccctgatgatatcgacgccgcggtgcacctgacgattcagtccgcctttattaccgccggacagcgctgtacctgctcccgccgcctgctggtgaagcggggcgcacagggggatgccttcctgaaacgtctggttgaagtgagcgcgcgtctggtgcctgccgcgtgggatgccgacccgcagccgtttatcggcgggctgatttccgaacaggccgcgctgaacgtgcttaaggcctggcaggaccacgtcgcgcgcggcgcgaaaaccctgctggagccgaagcaggttcagccgggggcttcgctgctgacgccgggcatcgtagagatgagcggcgcgagcaacgtgccggatgaagaggtctttggcccgctgctgtgcgtctggcgttacgacgatttcgatgcggccattgcgatggcgaacaacacccgctacggcctgtcgagcgggctgatttcgccgcatcgcgagaagtttgatcggctgctgctggaagcgcgcgccgggattgtgaactggaataaaccgcttaccggggccgcgagcactgcgccgtttggcggcgtaggcgcgtcgggtaaccatcgcgccagcgcgtggtatgccgccgattactgcgcgtggccgatggcgagcctggaaaccccggcgctgacgctgccggagacgcttaatccggggctggattttaccggagggatcgtcatgaaagcgcgtgaggttaactttgacgggctggtggggctgacgcaccactatgccggtctctcttttggtaatgaagcctcgacgaagcaccgctttcaggtgtcgaacccgaagctggcggcgaagcaggggctgctgaagatgaaagcgctggcggatgccggtttcccgcaggcggtgatcccgccgcaggaacgcccgaacgtggctgtccttcgtcagctcggctttagcggtaccgatgagcaggtcgtcgaaaaagcgggtacgcagacgccgcacctgctctccgcggcaagctccgcctcctctatgtgggtggcaaacgccgcgaccgtcgcgccgtcagccgacacgctggatggcaaagttcatctggcggtggcgaacctgaacaataaattccaccgcgccacagaagcggaaaccaccgagcgtgtgctgcgcgccattttcaaccatgatgcccattttgaggtgcatcaggctctgccgcaggtggcgatgtttggcgacgaaggcgcggccaaccataaccgcctgggaggcgactatggcgacccgggcctgcagctttttatctacgggcgagaagaggggggccacgccgcgccaacccgttatcctgctcgtcagacgctggcggccagccaggcggttgctcgcctgaaccaggtcaatccttcccaggtggtttttgcccagcaaaacccgcatgtgattgaccagggcgtgttccataacgacgtgattgccgtttctaaccgccaggtgctgttctgccacgagcaggcgtttgcccatcaggagaagctgctcgccacgctgcatgagcgcgtgcgcggcttcacgccaatccaggtgccaacggaggcggtgagcgtgcaggacgcggtagaaacctatctgttcaacagccagctgctgagccgtgacgatggcagcatgatgctggtcctgccgcaggaatcacgggatcacaaaggcgtgtggcgctacctgacggagctggtgaaggccgataacccgattgacgaactgcgcgtgtttgacctgcgcgaaagcatggccaacggcggcgggccagcctgtttacgtctgcgcgtagtcttgactcaggacgaaatgcaggcggtgaaccccgcggtcatgatgaacgatacgctctttacgcggctgaatgactgggtcgatcgctactatcgcgatcgtctgacgcaggcggatctggttgacccgcagcttctgcgtgaaggacgcgaggcgctggacgcgttatcgacaatcctgcagctgggatcggtttacccgttccagcgc

SEQ ID NO: 19586 - DNA, 963 bp, Enterobacter cloacae
atggaaaatttactggcgctgaccctggccgatgagacgccggaacagaaagagggggacggcccctcatttcgctggcggtggctggggcgcggggtgcttgagctgacgccgaccgtaaaaagcgatctctcgctgctgctttcaacgggtatccacgggaatgaaaccgcgcccgttgagattgttgatctgctgctgcgtgcgctgtatcgcaatgagatcgaactaaagtgccgcttgctggtggtgctcggcaatccgcctgcgctggcggaaaacaaacggtatctggtgagcgacattaaccgcatgttcggcggccgctggtcgcagtttccgcagagcgatgaaacggcgcgggcagagtggctggagaacgtcgtgaccgcgttttttgccgtcgcggggccggggcgctggcatctggatctgcatacggcaatccgcgcgtcttaccacgttcgcttcggcgttctgccgcagcgcagtcagccgtgggatgaagcgttcctgagctggctaggtgacgccgggctggaggcgctggtatttcatcagtcgccgggcggaacctttacccatttcacctgtgaacgtttcgctgcgctggcctgcacgctggagctgggaaaagcgctaccgttcggccagaacgatctgacccgctttgcgcctacggatctcgcccttcgggcgctgctgggaggaacggctcccgagcacgcgcatcagcccgttgagcggtatcgggtcgtgcagcagatcacgcgccgcagcgatgctttccagctccacatggccgcgcacaccctgaacttcaccccgttccgcaaaggggcgctgctggctgaggatggcgaggaacgttacgaggtgcagaacaccaccgagtatgtcttgttccctaaccccaccgtcgcgtttggcctgcgggccgggctgatgctggaaaaaatatcc

SEQ ID NO: 19587 - DNA, 492 bp, Enterobacter cloacae
atgcgtaagtttactgcactgtttgttgcttctaccctggctctgggcgctaccagcatggcgttcgccgcagatactgcgaccactacgactgccgcgcctgctgaaggcaaaatgatgatgcatcataaaggtccgggtatgcacaacgagatgatgatgtttaaggatctcaacctgacggatgcgcagaagcagcagatccgcgacatcagaaaaggtgaacgcgaccagatgaaacgtcctccgcttgaagagcgccgtgcgatgcatgacatcatcgccagcgacagcttcgataaggcgaaagccgaagcgcagatcgacaaaatggcagagcagcacaaagcccgcatgctggctcacatggaaacccagaacaagatctacaacattctgaccccggaacagaaaaaacaatttaatgcgaattttgagaagcgtctgacagaacgtccggcgatggaaggtaaaatgccagcaccaaccgaa

SEQ ID NO: 19588 - DNA, 270 bp, Enterobacter cloacae
gtgaataaatctcaactgattgacaaaattgctgcgggtgctgatatttctaaagctgcagctggacgtgcgttagatgctttaattgcttctgttactgaatctctgcaggctggggacgacgttgcactggtaggtttcggtacttttgctgttaaagagcgtgctgcccgtactggccgcaaccctcagaccggtaaagagatcaccattgctgctgctaaagtgccgggtttccgtgcaggtaaagcgctgaaagacgcagtaaac

SEQ ID NO: 19589 - DNA, 396 bp, Enterobacter cloacae
atgcagacaaaaatcaaagtacgcggttttcatctcgacgtttatcagcatgtgaacaatgcccgctatcttgagtttcttgaagaagcgcgctgggacgggctggaaaatagcgaaagctttcagtggctgaccgcgcacaacatcgcgtttgtggtcgtcaatatcaacatcaactaccgccgtccggccgtgctgggtgacgtgctcacggtcaccagccaggtgcagcagatcaatggcaaaagcggggtcttaagccaggtggtgacgctcgatccagaagggcagatggtcgctgatgcgttgatcactttcgtctgtatcgatctgaaaacgcagaaagcgctaccgctggaaggggagttgcgggagaagctggagttgatgatcgct

SEQ ID NO: 19590 - DNA, 960 bp, Enterobacter cloacae
atgtttaaaacgttaacccgcatcggcctggcaggtctgatggcgcttacctcgctggcccatgccgcagaagcggctccggaaagtttgcgcattggctatcagaaaggcagcgtcagcatggtgctggcgaaaagccaccagctgctggaaaaacgcttcccggacaccaaattctcctgggtggagttccctgctggcccgcagatgctggaggccctgaacgtcggcagtatcgatctcggcagcacgggcgatattccgccgatatttgcccaggcggcgggagcggacctcgtctatgttggcgttgagccacccaaaccgaaggccgaagtgattctggtgcctgaaaacagcgacattaaaagcgtcgccgacctcaaagggcataaagtggctttccagaaaggttcaagctcacacaacctgctgttgcgtgccctgcaggaagccgggctgaagttcactgacattcagcctgtttacctgacgcctgccgacgcccgcgccgcgttccagcagaaggacgttgatgcctgggccatctgggatccgtactactccgccgcattgctgcagggcggcgttcgcgtgctgaaagacggtaccacgctgaagcagaccggttcgttctatctggccgcgcgtccttacgcggaaaagaacggcgcatttattcagggcgtactggatacctttacccaggccgatgcgctgacccagacccagcgtcaggagagcattgccctgctggcgaaaaccatgggcttacctgagccggtgatcgcgagctatctcaaccaccgtccgccgaccaccattacgcccgtggacgcgcacgtcgccgcgcttcagcaacaaacggctgacctgttctatcaaaaccgcctggtgccaaaacaggtgactattcgcgaacgcatctggcagcccgcaggcaaagaaggagctaaatca

SEQ ID NO: 19591 - DNA, 1785 bp, Enterobacter cloacae
gtgctggctcgtaccgataccgcaacggacaaagactaccttgatatcgaacgcgttatcggccacgaatatttccacaactggaccggtaaccgcgtcacctgccgcgactggttccagctgagcctgaaagagggcctgaccgtcttccgcgatcaggagttcagctccgatctgggttcacgcgcggtgaaccgcatcaacaacgtgcgtaccatgcgcggcctgcagtttgcggaagatgccagcccaatggcgcatccgatccgcccggataaagttatcgaaatgaacaacttctacactctgacggtgtacgagaagggcgctgaaattatccgcatgatccacaccctgctgggcgaggagaacttccagaaagggatgcagctgtacttcgagcgtcatgacggcagcgcggccacctgcgacgattttgtgcaggcgatggaggatgcctctaatgtcgatctctctcacttccgccgctggtacagccaggccgggacgccagttgtcaccgtcaaagacgattacaatccggaaaccgagcagtataccctgaccatcagccagcgcacgccgccgacggcggagcaggaagagaaatatccgctgcatattccgttcagcattgagctgtacgataacgaaggcaaagtcatcccgctccagaagggcggccacccggtacaccacgtgctgaacgtgactcaggccgagcagacctttatcttcgataacgtctacttccagccggtgcctgcgctgctgtgtgaattctccgcgccggtgaagctggaatacaagtggagcgatcagcagctgacgttcctgatgcgtcacgcgcgtaacgacttctcccgttgggatgcggcgcaaagcctgctggcgacctacattaagctcaacgtaaaccgccatcagcagggccagccgctgtcgctgcctgtccatgtggctgacgcgttccgcgcgatcctgctggatgagaagattgacccggccctggccgctgaaattctgaccctgccgtcagcgactgaaatcgccgagctgtttgacatcatcgacccgattgcgatcgtggcggtgcgtgaagcgttgacccgtacgctggctgcagaactggccgatgagttcctcgccatttataacgccaacaagcttgacgcttatcgcgttgagcacgcggacattggtaaacgttctctgcgcaatacctgcctgcgctatctggcgtttggcgaaaccgagctggcgaacactttggtgagcaagcagtatcacgaagcggataacatgaccgacgcgctggccgcgctgggcgcaagcgttgccgccgaactgccgtgccgcgatgcgctaatgcaggagtacgacgacaagtggcatcaggatggtctggtgatggacaagtggttcatcctgcaggcgaccagcccggcggctgatgcgctcagcaacgtgcgcagcctgctgaagcatcgctcctttaccctgagcaacccaaaccgcgtgcgttctctgattggcgcatttgccagcagtaacccggcggcgttccacgccgaagacggcagcggttatcagttcatggtggaaatgctgaccgagctgaacagccgtaacccgcaggtggcgtcgcgtctgattgagccgctgatccgtctgaaacgctacgacgcgaagcgtcaggcgaagatgcgtgccgcgcttgagcagctgaaagggctggagaacctgtctggcgatctgtacgagaagattgctaaggcgctcgcc

SEQ ID NO: 19592 - DNA, 2583 bp, Enterobacter cloacae
atgctcaaccgaattaccgttcagctcccggtggaggggcttctgttctggaaactgacgggccgcgaggcgatgtccgagtcgtttgcgctgacgctgaccgtgctcggcacggacgcgcgcatcgaccgcagtaagctgctgggccagccggtcacggtgaccatcccgacgcagagcctgctgacgtcccgctatattaacggcaagattacccgcgtggcggtcagcgccgtcgaactgacgggcacccgctatgcggtgtaccagctgacggtggagccggacctgtggccgatgaagcgcgaccgtaacctgcgtatcttccaggggcagacggtgccgcagattgtgaaaaccctgctgggtgagcatcaggtcaacgttgaggacaaactcaccggcagctaccgggtgtgggactactgcgtgcagtatcaggagtcgagcctggacttcatcagccgcctgatggagctggaggggattgcctatcacttccgccacgaggcggacaaacacaccctggtactgaccgatgccgccacgcagcatcagccgttcagcggctatgaggtcattccttaccatcagacgccgtcaggcgcacgtacggatgaggagggcatcagccagtgggcgctggaggacagcgtgacgccggggatttacagcctcgacgactatgacttccgcaagccgaacgcgtggctgttccaggcccagcagaacccggcgtcgccgaagccgggcagcattgacgtatacgactggccggggcgctttgtggacaaaggccacggggagttctatgcccgtatccgccaggagcgctggcaggttgagcatcagcagattcaggccaccgccacggcggcggggattgcgccgggccacaccttcaccttaactaacgcgccgttcttcagcgacaacggcgagtatctggtgacggcggcgggctatcacttcgaagagaaccgctacgccagcggcgagggggaaaccattcaccgcaccgattttacggtcatcccgtcggcggtggtgtaccgtccggcgcagaccacggcgtggccgcgcacctacggcccgcagaccgcgaaggtggtggggccgaacggcgagagtatctggacggacaaatacggtcgcgtgaaggtgaagttccactgggatcggctggcgaagggcgatgacaccagctcctgctgggtgcgcgtgtcgagcgcgtgggcgggccagggctacggcggggtgcaaatcccgcgcgtcggcgacgaggtggtggtggactttatcaacggcgatccggaccgtccgattattaccgggcgcgtgtacaacgacgcgagcatgccgccgtgggcgctgccggccgcggcgacgcagatgggcttcatgagccgcacgaaagacggttccgtcgacaatgccaacgccctgcgctttgaggacaaggcgggcgcagagcaggtgtggatccaggccgagcgcaacatggacaccagcgttaagaacgatgaaacgcacagcgtcggcggggcgcgcagccattacgtgaagaaaaatgaactgcatcgcgtggaagcgaaccaaactcaggccgtgaaaggcggaaccgagatcctgacggggaaaggcaagctggacgcggcggtggagcagtacgttattgcttccgggacgaagctgcggctggtctccggtgagagcgctattgagctgaatgctaacggcaagattaacctcatcggcaaagagtttaacttcttcgtggaaggggatgggtatatcaccacgggcggtaagctgcatctgaatacctctggcaccaagccgggcacaacggcgccgggatcagggcataaaggggatattgatgcggcggtgcaggcgaagttttcaccgcaagagagcgctagtcgtcctgcccctgctgcggctccagcagcaggccaatcgaaacctgctccagcgtcggcgtcaacaacagccccgcctttgaaagggaattatgtttataaaaataatccgaatagctcagacgttatgcctttcaatgatgatgttgttaaacaaatcaacaagtcaccgacccttcaaactcagctaaaagatttgaaagacaagggatgggctattcaaccaggtgcgactggagggggaagttatactgattcggataataaactgatcgttatggatcccgaacacatggaagacacggccaatacagtacaaacactggctcatgaagcagggcatgcaacatatcctgttgcagcggactattctagtaaagaaaatttcgttaacagccagcttatggatgaaggtggtgcaaccttgaataatatcaaaatacagcgtgaaattctgggaaatggcggtattgatattgatatagcaggaagcccggaaaatctcaaagcttacaatgcagcctatgataaaatggtaaatggagagctgtcgcgggttgacgctgcaaaagctataggtaaagtctacggtaaaggcgaaatagcttcgggtaccgatctcaattacagcgattattacgggggtttctatggtaag

SEQ ID NO: 19593 - DNA, 1431 bp, Enterobacter cloacae
atgaaaaatcactccgatcttcaggaactgcaggatttcttacgtgcggcattatgcgatcccgcctccccgcagcagctggccatcagcggcagcgacgaagccttaagctggctacagctttccgctgccgtgacggactgggcgcagcgctatcagcgctgccagcctgttgccggtacgccggtcgtattgtacggacaccagcaggccgagttcgccgtggcgatttatagctgcctgctgcacaacattccgtacatcccggtggactgcatctatccgcaggagcgccttcgggagatctgccatctggccagcgccccttactattacgacgtggcgaccgggcagttcatcgccaccggggaaccgggcaaggtactggaggagcaggatctggcctacatcatgtttacttcaggcagcacaggtaaacctaaaggcgtgcagattgggcgtgaaagcgtatggcacttcatgaaatgggtcagccaggacttttcactgccggaaaaaccggtcctgatgaaccacgcggtattcagctttgacctctccctcatccctttgctggccaatctggcgatgggcgggcacatcgtgctgaacgccaaagaggacattcagaaagagaactggctggaacgactgaaaagcagcgcggtctccgcctgggtttcgaccccctcttttgcataccagcagctgctttccccgcagttcaacagcgagtatttgccagcgctgagcgtctttatcttcattggtgaagtgttaaataaggcgctggttaaacagctccgccgccgtttcccgcaggccaaaatcattaactcctatggccctacggaagcgaccatcgcgacgaccgtggttgaaatcacggatgcgatcctgaacagcgacagcgccgtgctgccggtgggggtcatgatgcctgagagcaaaatggaaatttccgccgacggcgagctgattatctggggtaaaaacgtcatgcgcggctatctcggcctgccgcaggagaacgcggcgaaattactccgtcgggaagatgaagcgtttcgcggctaccggaccggcgatctgggctatgaagcggggcttatttactgccagggccgcaacgacagccaggtcaaactgaacggttaccgtatcgaaatcaacgagatcgagaaccgcctgctggccatgtccggcatcaacgaagcggtggtcctgccgctgatgaaatcctgcggcagcgtgctgcgcatagccgcgttctgcgtgacggatatggcgccggacactatcaaaacatcgctgtcgaaggtggtaccgcactatatggtgccttcacaaattatcgtacaagacgctttgccgctgaatcctaacggcaaaattgaccgcaagctgctggacgcttacgcccgcacaaat

SEQ ID NO: 19594 - DNA, 795 bp, Enterobacter cloacae
atgactcaaatcgaccgcctgctcggcatcatgaaacgcctgcgcgatccggaaaacggctgcccgtgggacaaagagcagactttcgccaccatcgcgccttatacccttgaagagacctatgaggtgctggacgccatttcccgcgaagattttgacgacctgcgcggcgagctgggcgatctgctgttccaggtggtgttctatgcgcaaatggcgcaggaagaggggcgctttaactttgacgatatctgcgctgccatcagcgacaagcttgagcgccgtcatccccatatctttggcgatgccaccgcagggaacagcgctgaggtgctggcccgctgggagcagatcaaaagcgctgagcgggcggaaaaatcccagcactcggcgctggatgatattccgctgagcctgcccgcgctgatgcgcgcgcataaaatccagaaacgctgtccgccgtcggttttgactggacctccctcggccctgtgctggataaagtgcacgaagagattgacgaagtcatgcacgaagcgcagcaggcggtggtggatgaagcaaagcttgaggaagacatgggcgacctgttgttcgcgaccgtcaacctttctcgccacctgggtgtaaaaagcggaaaccgccctgcaaaaagccaacctaaaattcgaacgacgctttcgcgaagttgagcggatttccgcctcgcgaggcctggaaatgagcggaattgacctcgaagcgatggaagaagtctggcaggaagtaaagcgccaggaatctgatctctaacga

SEQ ID NO: 19595 - DNA, 1635 bp, Enterobacter cloacae
atgacaacgaactatatttttgtgaccggcggggtcgtatcctctctgggtaaaggcattgccgcagcctccctcgcagccattcttgaagcccgtggcctcaatgtgaccatgatgaaactggatccgtacatcaacgtcgatccgggcaccatgagcccaatccaacacggggaagtgttcgttactgaagacggcgctgaaaccgatctggatcttggccactacgagcgtttcatccgcaccaaaatgacccgtcgtaacaacttcacgactggccgcatctactccgacgttctgcgtaaagagcgccgtggtgactacctgggtgcaaccgttcaggttatcccgcacatcactaacgcaatcaaagaacgcattgttgcgggtggcgaaggccacgacgtggtgctggttgaaatcggcggtaccgtgggtgatatcgaatccctgccattcctggaagcgattcgtcagctggcggtagatatcggccgtgagcatgcgctgttcatgcacctgactctggtgccgtacatggccgccgcaggtgaagtgaaaaccaagccgactcagcactctgtgaaagagctgctctctattggtattcagccagatatcctggtttgccgctccgatcgcgcggttccggcgaacgaacgtgcgaaaattgcattgttctgtaacgtgcctgaaaaagccgttatttcaatgaaagatgtcgattccatttataaaatcccgggcctgttgaaatctcagggcctggacgattatatttgtaaacgattcagcttgaactgtccggaagcgaacctgtctgaatgggaacaggttatttatgaagaagccaacccggcaggcgaagtgactatcggtatggtcggcaagtacattgaactgccggatgcctataagtcagtgatcgaagcgctgaaacacggtggtctgaagaaccgtgtttccgtgaacatcaagctgattgattcgcaggatgttgaaacgcgtggcgttgaaatcctgaaagatctggatgctatcctcatccctggcggcttcggctaccgtggtgttgaaggcaagatcgccaccgcgcgctatgcgcgtgaaaacaatattccatacctcggcatctgtctgggtatgcaggttgcgctgatcgaatttgcgcgcaacgtagcgggaatggaaaacgcgaactctacggaatttgtgccagactgtaagtaccctgttgtggcgcttatcactgaatggcgtgacgaagaaggtaacgtcgaagtccgtaccgagaagagcgatctgggtggcaccatgcgtcttggcgcacaggcctgccagctgtctgacgatagcgtggttcgcaagctgtacggcgagccggtcatcaccgagcgccatcgtcaccgctatgaagtcaacaacatgttgttgaaacctattgaagccgcgggcctgcgtgtcgcgggccgctccggggatgatcagttagtcgagatcattgaagtgccaaaccatccgtggtttgtcgcctgccagttccacccggaatttacttcaacgccacgtgacgggcatccgctgtttgcaggcttcgtgaaggccgccagcgactaccagaagcgtcaggcgaag

SEQ ID NO: 19596 - DNA, 1296 bp, Enterobacter cloacae
atgtccaaaatcgttaaagtcatcggtcgtgaaatcatcgactcccgtggtaacccgaccgttgaagccgaagttcacctggaaggtggtttcgttggtatggctgctgctccatcaggtgcttctactggttctcgcgaagcgctggaactgcgcgatggcgacaaatcccgcttcctgggcaaaggcgtactgaaagcggttggcgctgtaaacggtcctattgctcaggcaatccttggcaaagacgccaaagaccaggctggcatcgacaagatcatgatcgatctggacggtactgaaaacaaatctaacttcggtgcgaacgcaatcctggcagtttctctggcaaacgccaaagcggctgctgctgcgaaaggtatgccactgttcgagcacatcgctgaactgaacggcaccccaggcaaatactccatgcctgtaccaatgatgaacatcatcaacggtggtgagcacgcagacaacaacgttgatattcaggaattcatgattcagccagttggcgcgaaatccctgaaagaagcggtacgtatgggttctgaagtgttccacaacctggctaaagttctgaaagctaaaggtatgaacactgctgttggtgacgaaggtggctatgcgccaaacctgggttctaacgcagaagcgctggccgttatcgcagaagcagtaaaagctgctggctacgagctgggcaaagacatcaccctggcgatggactgtgcagcatctgaattctacaaagacggtaaatacgttctggctggcgaaggcaacaaagcgttcacctccgaagagttcactcacttcctggaagatctgaccaaacagtacccaatcgtatctatcgaagacggtctggacgagtctgactgggctggcttcgcataccagactaaagtactgggcgacaaaatccagctggttggtgacgacctgttcgtaaccaacaccaagatcctgaaagaaggcatcgagaaaggcatcgttaactccatcctgatcaaattcaaccagatcggttctctgaccgaaactctggctgcgatcaaaatggcgaaagacgctggctacaccgctgttatctctcaccgttctggcgaaactgaagacgctaccattgccgacctggctgtgggtaccgctgcaggccagatcaaaaccggttctatgagccgttctgaccgtgttgctaaatacaaccagctgattcgtatcgaagaagcgctgggcgaaaaagcaccatacaacggtcgtaaagagatcaaaggccaggca

SEQ ID NO: 19597 - DNA, 1378 bp, Enterobacter cloacae
ttggaaaaagcgcagcgctttggtaaatcctttatgttgcctatcgccgtgctgcccgcggcgggcctgctgctgggaataggcggcgcgttatcgaatcccaatacgctggcggcttatccgtttttagatgtgggctggctgcaggccattttcaccatcatgagcagcgccggttcaatcgtgtttgcgaacctctcggtgctgtttgcggttggggtcgccgtcgggctggcaaaaagcgataagggtacggctgggctggcggcattactcgcgtttctggtgatgaatgccaccatcaacgcgcttctgatcctcaccggcaaactggcgcatgagaacccgggcgctgtagggcagggcatgacgctggggatacagacgctcgaaaccggcgtgtttggcggcgtggtgattgggctggtgacctgcacgctccatcatcggtttaataaaattgcgcttccgcagttcctgggcttttttggcggctcgcgctttgttcccatcatcagctcgctggcggcgatactcgtcggcgcgctcatgaccgtgatctggccgcatttccagaaactgatttttggtctcggcgggctggtggatgccaccggctatctgggcaccctgctgtacggctttattttacgcatgctgggcccgtttggtttgcaccacatcttctatctgccgttctggactaccgcgctcggcggcagtgagattgttaacggtcacctcgttgagggcacacagcggatcttcttcgcccagttggccgacccgaacacgcagcatttctatgagggcacgtcgcgcttcatgtccgggcgctttattacaatgatgtttggcctgctcggcgcgtgtctggcgatgtaccacacggcaaaaccggagaacaaaaagcgcattgccgggctgctgctctctgcggcgctaacctcgttcctgaccgggattaccgagcctatcgagttttccttcctgtttattgcgccggtgctttacgtcattcatgcgctgtttgacgggctggcgttcatgctcgcacacatgctgcatatcaccatcgggcaaaccttctccggcggtttttattgacttcgtgctgttcggcattttgcagggggaggccaaaaccaactggatgttcgttccgctggtgggcgtgccgtggttcttcctttactacttcaccttccgctacctgattaaccgctttgattttgccacgccgggtcgggaaaaggaggcgatggccaatgaagtgaccttatcccggaggaagcgcgccgttgcggtgatcgcggggttaagcggaaaagagaatctggaagaggtggactgctgcgccacgcggcttcgcgtccac

SEQ ID NO: 19598 - DNA, 1770 bp, Enterobacter cloacae
atgcgtacagaatattgcgggcagctgcgtcagtcccacgttggacagcaggtaaccctgtgtggttgggtcaatcgtcgtcgtgatcttggtagccttatcttcatcgatatgcgcgaccgcgaaggtatcgttcaggtgttcttcgatccggatcgcgcagatgcgttgaagctggcctctgagctgcgtaatgagttctgcattcaggttaccggcacagtgcgcgcgcgtgacgagaaaaacgtcaacgccgacatggcgacgggtgccatcgaagtgctggcgtccgatctggtgatcatcaaccgtgcagaagcgctgccgctggactccaaccacgtcaacactgaagaagcgcgtctgaaataccgctacctggacctgcgtcgtccggaaatggctcagcgcctgaaaacccgtgcgaaaatcaccagcctggtgcgccgctttatggatgaccacggtttcctcgacatcgaaaccccgatgctgaccaaagccacgccggaaggcgcgcgcgattacctggtcccatcccgcgtacataaaggcaaattctacgcgctgccgcagtctccacagctgttcaaacagctgctgatgatgtccggcttcgatcgctactatcagatcgttaaatgcttgcgatcggtgcgactgcgcgctgaccgccagccagaatttacccaaatcgatgtggaaacctccttcatgaccgccgagcaggtgcgtgaagtgatggaagctctggtgcgtacgctgtggaacgacgtgaaaggcgttgagctgggcgatttccctatcatgaccttcgctgaagccgagcgtcgttacggctccgacaaaccagacctgcgtaacccgatggagctggtggacgtagcagacctggtgaaaggcgttgagtttgccgtattcgctggcccggctaacgatcctaaaggccgcgtagcagcgctgcgtgtaccgggtggcgctgccctgagccgcaagcagatcgacgactacggcaacttcatcaagatctacggcgcgaaaggtctggcctatattaaagttaccgagcgtgcgaaaggtctggaaggcatcaccagcccggtagcgaaattcctgaacgcggacatcgtggaagcgatccttgagcgcaccggcgcgcaggacggcgacatgatcttcttcggcgcagacaacaagaaagtcgtggcggatgcgatgggcgcgctgcgtctgaagctcggcaaagacctgagcctgaccgacgaaaacaaatgggcgccgctgtgggttatcgacttcccaatgtttgaagacgacggtgaaggcggcctgaccgcaatgcaccacccgttcacctcgccaaaagagatgacggcggcagagctgaaagcggcaccggaagaggcggtcgcgaacgcttatgacatggttatcaacggctatgaagtgggcggcggttccgtgcgtattcacagcggtgaaatgcagcagaccgtgttcggcattctgggcatcaacgagcaggagcagcgcgagaagtttggcttcctgctggacgccctgaaatacggtacgccgccgcacgcgggtctggccttcggtcttgaccgtctgaccatgctgctgaccggcaccgataacatccgtgatgttatcgccttcccgaaaaccactgccgcagcgtgtctgatgaccgaagcgccaagctttgccaacccggccgcactggccgaactgggcattgatgtggtgaagaaggaagagaaaaac

SEQ ID NO: 19599 - DNA, 564 bp, Enterobacter cloacae
atgttaacacttgatgccagtaaaaccgcacttgttgtgattgatttacaggaaggcattctgcccttcgccggtggcccgcataccgcggatgatgtggtcaaccgcgctgctcgcctggcgcaaacatgtcgtgccagcggtgcgtctgttgtcatggtgcgcgtcggctggtccgctgattacgctgaagcgttaaaacagcccgttgatgcccaggctcctgcacgcgccctgccggaaaactggtgggcgtacccggccgcactcggcaaacgcgacagcgatattgaagtgaccaaacgccagtggggcgcattttacggtaccgatctcgagctgcagctccgccgtcgcggcatcgacaccatcatcctgtgcggcatttccaccaacatcggcgtggagtctaccgcccgcaacgcgtgggagctgggctttaatctggtgattgccgaagatgcctgcagcgcggcctccgcggaacagcaccagggcagcatgacccatatcttccctcgcatcggccgcgtgcgcagcacggatgagattgtcagcgcgcta

SEQ ID NO: 19600 - DNA, 1706 bp, Enterobacter cloacae
aaacaaaccgtggctgcatatattgcgaaaacgctcgaacaggctggcgtgaaacgtatctggggcgtaaccggcgattccctgaacggacttagcgacagcctcaacaagatgaagactatcgaatggatgcctacccgtcatgaagaggttgccgccttcgccgcaggcgctgaagcacagctcacgggcgaactggccgtctgcgccggatcgtgcggtcccggcaacctgcatctgattaacgggctgttcgactgtcaccgtaaccacgtgccggtgctggcgattgccgcccatatcccctcttccgaaatcggcagcggctattttcaggagacgcatccgcaggagctgttccgtgaatgcagccactattgcgagctggtttcatccccggagcagatcccgcaggtgctggcgatcgccatgcgcaaggccgtgctgaaccgcggcgtttctgtggtcgttatcccgggcgatgtggccctcaaggccgcgccggaaggggccagcacccactggtatcacgccccgcagcccgtcgtaacccctgcggaagaagagctgaaaaagctggcacagctgctgcgttactccagcaatatcgccctgatgtgcggcagcggctgcgcgggcgcgcacaaggagctgcttgaatttgccgggaagctgaaagcgccgattgtccacgccctgcgcggcaaagagcacgtcgagtacgacaacccctttgatgtggggatgaccggtctgatcggtttctccagcggcttccacaccatgatgaacgccgacacgctgatcctgctgggtacccagttcccgtatcgcgcgttctacccgacggatgcgaaaatcattcagattgatatcaacccggccagcatcggcgcgcacagcaaggtcgatatggcgctggtgggcgacatcaaatccacccttgccgccctgctgccgctgctggaagaaaaaacggaccgcaagttccttgataaagccctgagcgactatcgcgacgcccgcaaggggctggacgacctcgccaaaccgagcgacaaagccattcacccgcagtatctggcgcagcagatcagccatttcgctgacgacgatgccatatttacctgcgacgtgggcacgccaaccgtctgggcggcacgctatctgaagatgaacggaaaacgccgcctgctcggctcgttcaaccacggctcgatggccaacgccatgccgcaggcgctgggcgcaaaagcgacggcgccggagcgtcaggtagttgcgatgtgcggcgacggcgggttcagcatgctgatgggggatttcctgtcggtggtgcagatgaagctgccgctgaaaatcgtggttttcaacaacagcgtgctgggcttcgtggcgatggagatgaaggccggaggctatctcacggacggcaccgagctgcacgacaccaacttcgcgcgcatcgccgaggcctgcggcatcacaggtattcgcgtggagaaagcctcagaggtggacgaagccctgcagcgtgcgttttccattgacggccctgtgctggtggatgtcgtcgtcgccaaagaagagctggcgatcccgccgcaaattaagctggaacaggccaaaggctttagcctgtatatctgcgcgccatcatcagcgggcgcggcgacgaggtgatcgaactggcaaaaaccaactgg

SEQ ID NO: 19601 - DNA, 968 bp, Enterobacter cloacae
atgaccatgccaacctcacaatgtccgtggcggatgcaggttcatcacatccatcaggagacgccggatgtgtggacgctgtcgctgctgtgccacgactactatccgtaccgtgcaggccagtatgcgctggtcagcgttcgcaattcgtcggatacgctgcgcgcctacacgatctcctcaacgccgggcgtgagcgagtacattacgctcaccgtccgtcgtattgacgacggcgcgggctcgcagtggctgacgcgggacgtcaagcgcggggattatatctggctgtctgacgcgcatggcgatttcacctgtgacgacaaagcagacgataaattcctgctgctggcggcgggctgtggcgtaacgccgattatgtcgatgcgccgctggctggcaaagaaccgcccgcaggccgacgtgcaggcgatcttcagcgtccgttccccggaagatgtgatttttgccggggagtggcgtaattatccggtgacgctggtggcggacacaacgcgacccacggctttgtacccggtcgcctgagccgcgagctcctgcaaagcgtgccggatatcgcgaaccgcaccgtgatgacctgcggcccggcgccgtacatggacatcgtggaaaaagaggtgaaagcgcttggcgtgacccgcttcttcaaagagcagttcttcacgccggtggcggaagcggccaccggcggcgttaagttcaccaagctgcagcctgcgcagaccttctttggtcgcgtgggaaccacgctgctggaggcgctggaaagcaacaaggtgccggtagcggcggcctgccgcgcgggcgtgtgcggctgctgtaagacgaaggtggtttccggagagtataccgtcaccagcaccatgacgctgtccgatgcggaaattgccgagggttacgtgctggcgtgctcgtgccatccgcagggcgatcttgtcctcgcataa

SEQ ID NO: 19602 - DNA, 897 bp, Enterobacter cloacae
atgttttcaggactcctcatcattttgctgcccttgatcgtgggctatcttattccgctgcatcgtgaatccgcattaaggctcattaatcgattcctgagctggattgtctacgttattcttttctttatggggattagcctggcatttctggacaacctgtcggcgaatttactctccatcctccattattctgtcgtcaccgtggtggttattttgctgtgcaatattgccgcgctgctgtggctggaacgcactattccatggaaaaatcaccatcatcaggaaaagctcccttctcgaattgcaatggcgcttgaatcattaaaattatgcggcgtcgtggtgatcggttttcttcttgggctgacaggttgggcatttttacagcacgcgacagaggccagtgaatatacgctgatcttcctgctgttcctgattggtattcagctgcgaaataatggcatgacgctgaaacaaattgtcctcaaccgtcgggggatgatggttgcggtgattgttgtcgccagttcaatggtggcgggcgtcatcaacgcctttattctcgatctgccgctgaaaatcggcctggcgatggcatccggttttggctggtattcgctctccggtattctgctgaccgaatcattcggcccggtgatcggcagcgccgccttctttaacgatctggcgcgcgagctgattgccatcatgctgatcccgagcctggttcgccgcagtcgttctaccgcgctgggcctgtgcggtgcaacgtcgatggactttaccctgccggtactacaacgctcaggagggctggagatggttcccgcggctatcgtgcacggctttattttaagcctgctggttccggtcctgatggccttcttctctgcc

SEQ ID NO: 19603 - DNA, 693 bp, Enterobacter cloacae
atgtttagaaaattggcagcagaatgctttggtacattctggctggtatttggtggctgcggtagcgccgttctggcagcagcattcccggaattaggtatcggttttgtcggcgtcgcgctggcgtttggtttaaccgtattaaccatggcatttgccgtgggacatatttccggcggtcattttaacccggcagtgacgttaggtttatgggcgggcggccgtttcccggcgaaagacgtaattggctacattgtggcgcaggtagttggcggtattattgcggcgggcgttctgtacgtgattgccagcggtaaagccggcttcgacgcggcggccagcggctttgcctctaacggcttcggcgaacactctccgggcggttactccatgctgtctgccatcgtgattgaaatcgtgctgaccgccggcttcctgctggtgatccacggcgcaacggacaaacacgcgccagccggttttgccccgattgccattggtctggcgctgacgcttatccacctgatttctattccggtcaccaacacctccgttaacccggcacgcagcaccgccgtcgccatcttccagggcggctgggcgcttgagcagctgtggctgttctgggtgatgccaattatcggcggtatcctgggtggcgtgctgtatcgcaccctgctggaaaaacgcgat

SEQ ID NO: 19604 - DNA, 1539 bp, Enterobacter cloacae
atgcttctcgaacgtgtggaaattgtcgggtttcgcggtattaaccgcctgtcgctgcagctggagcagaacaacgtcctgatcggcgagaacgcgtggggtaagtccagcctgctggatgcattgacgctactgctttcgcccgaagacgatctgtatcacttcgttcgcgacgatttctggtttccgcccggcgacgtaacgggacgcgagaagcacctgcatatcatcctgacgttccgcgaatccgagcccggacgtcaccgcgtgcgtcgcttccgcccgctgtcaccctgctgggtgccgtgcgatgacggtttccaccggattttctatcggctggaaggcgagatggcggagaacgagggggtactcaccctgcgtgattttctcgatgagaaagcaaacccgatcccgctcgacaatatcgacgatcttgcccgccacttgacccgcctgacgccggtgttacgcctgcgcgatgcgcgctttatgcggcgtattcgtaacggaaccgtacccaatacgccggaagtggaagtcaccgcccgcgagctggattttctggccagagagctggtgtcgcgtccgcagaatctgaccgatggtcaaattcgtcaggggctgtccgcgatggtacagctccttgagcactatttttccgagcagggaacgtcggagtcgcgccaccgtctgatgcgccgccgctctcatgatgagcagcgaactggcgttatctcgacatcattaaccggatgatcgaccggcccggcggccgtacccatcgggtgattttgctgggtctgttttcaacgcttctgcaggccaaaggcaccgttcgtcttgaccgggacgcccggcctctgctgctggtggaagacccggaaacgcgcctgcatcccatcatgctctccgtggcatggcatctgctgaacctgctgccgctccagcgcattacgaccaccaattccggagagttattatcgctgacgccggttgaacacgtctgtcgcctggtgcgtgaatcctcccgcgtctccgctttccggcttgggccgggcggtttgaatgcggaagacgggcggcgcatcgcgtttcatattcgctttaaccgggcgtcgtcgctctttgcccgctgctggctgctggtggagggggaaacggaaacctgggtcatcaacgagctggcgcgccagtgcggccaccactttgatgcggaaggcattaaggtaatcgaattcgcccagtcgggattaaagccgctgataaaattcgcccgccggatggggatcgagtggcacgttctggtagacggtgatgaggcgggtaaaaaatatgcctcgaccgtgcggagcctgctgaataacgagcgcgaggaagagcgcgaccatttaaccatgctccccgcgatggacatggaacactttatgtatcgtcaggggttcgacgatgtcttccaccgcattgccatggtgccggtcgatgtcccgatgaacatgcggcgggtgatcgccaaagccattcaccgttcgtcaaaag

SEQ ID NO: 19605 - DNA, 451 bp, Enterobacter cloacae
cagcgaaacgtttcgctagtggagcaagaaaatgaagaaaggcacggtactcaactcagaaatctcatcggttatttcccgtcttgggcataccgatacgctggtggtttgcgatgcaggcttaccggttccgcggagcacaacccgtatcgatatggcgttaacgcagggtgtaccctcgtttatgcaggtactggaagttgtgacggcggagatgcaggttgaggcagccattctcgcggcggaaattaaacaacataatccgcaactccacgaaacgttgctcagctatattgagcaactgcaacaacaccagggaaacaccatagaaattcgttacacgacgcacgaacagttcaagcaacaaaccgctgacagtcaggcggtgattcgcagcggggagtgttccccgtatgcgaatatcattctctgtgctggcgtcaccttctga

SEQ ID NO: 19606 - DNA, 1866 bp, Enterobacter cloacae
atgagcactgataataagcaatcattacccgcaataacgcttgcggcgatcggggttgtctacggtgatatcggcaccagcccgctttatacgcttcgtgaatgtctgtccggccagtttggttttggtgttgaacgcgatgccgtgtttggcttcctgtccctcattttctggctgctaatcctggtggtttccgttaaatatctctccttcgttatgcgtgctgataacgcaggtgaaggtgggatcctgaccctgatgtctcttgccggacgtaatacctcggccaggatgacctctgttctggtcattatcggcctgattggcggcagtttcttctacggggaagtggtgataacgccggctatctcggtgctgtcggcgattgaggggctggagattatcgctccgcagcttgattcatgggtggttccgctggccattattgtcctgacgctgctgttcatgatccagaagcacggtacagggctggtgggtaaattgttcgcgccgattatgctggcctggttcctgatcctggcggcgcttggtttacgcagcattatcgcgaacccggaagtgctgcatgcgctgaacccttactgggcggtgcatttcttcctcgaatacaaagtggtttccttcgtggcgctgggggccgtcgtgctctccatcaccggtgtggaagcgctgtatgctgacatgggccacttcgggaaactgcctatccgcgtggcatggtttattgtggtgctgccgtcgctggtgctgaactacttcggtcagggcgcgctgttgcttaaaaacccggaagcgatcaagaacccgttcttcctgctggcgcccgactgggcgctggtgccgatgcttatcctggcgacgctggcgaccgtcattgcctcccaggcggtgatttccggcgtgttttctctgacgcgccaggccgtgcgtctggggtatctctcgccaatgcgcatcatccatacctcagagatggagtcgggccagatctacatcccgttcgttaactggctcctctatttcgctgttgttattgttatcgtcagcttcgagcactccagtaacctggcggcggcgtacggtattgccgtaaccggtacgatggtgctgacatcactgctctccaccacggtagcgtaccgaaactggcactggaataaattcctcgtggcgatgattctggtgggcttcctgtgcatcgacgtgccgctgttctctgcgaacctcgacaagattgtctccggtggctggctgccgctgacgctgggtctggtgatgttcattgtcatgaccacctggaaaagcgagcgtttccgcctgctgcgccgcatgcatgagcacggtaactccctggaggcgatgatcgcttcgctggagaaatccccgccggtccgcgtgccgggcacggcggtgtatatgtctcgtgctctgaacgtcatcccgttcgcgctgatgcataacctcaagcacaacaaggtgctgcacgagcgcgtgatcctgctgacgctgcgcaccgaagatgcgccttacgttcacaacgtgcgtcgcgtgcagattgagcaactgtctccgaccttctggcgcgtggtggcaagctacggctggcgcgaaacgccaaacgtggaagaggtgttccaccgctgcggcctggaaggtctgagctgccggatgatggagacgtcgttctttatgtcgcacgagtcgctgatcatcggcaagcgaccgtggtatctgcgtctgcgcggaaagctgtacctcatcctgcagcgtaacgccctgcgcgcgcctgaccagtttgagatcccgcctaaccgcgtgattgagctgggaacgcaggtcgagatc

SEQ ID NO: 19607 - DNA, 1593 bp, Enterobacter cloacae
gtgttagttaccagcaacgtcactatgcagtttggcagtaagccgctgttcgaaaacatttccgtcaaatttggcggcggcaaccgttacggcctgattggtgccaacggtagcggaaaatccacctttatgaagatcctcggcggtgacctggagccgacgctcggcaacgtatcgctcgaccctaacgagcgtatcggtaagctgcgtcaggatcagttcgccttcgaagagttcaccgtgctcgacaccgtgatcatggggcatggggaactgtgggaagtgaagcaggagcgcgatcgcatctacgcgctggccgaaatgagcgaagaagatggctataaagtggccgatctggaaacgcagtacggtgagatggacggttactctgcagaagcgcgcgcgggcgagctgctgctgggcgtaggcattccggttgaacaacattacggcccgatgagcgaagtggcgccaggctggaagctgcgcgtgctgctggcacaggcgctgttctctaacccggacatcctgctgctcgacgaaccgacgaacaacctggacatcgacaccatccgctggctggagcagacgctgaacgatcgcgacagcaccatgatcatcatttcgcacgaccgtcacttcctgaacatggtctgtacgcacatggcggatctggactacggcgagctgcgcgtttacccgggcaactatgacgagtacatgacggcggccacccaggcgcgtgaacgtctgctggcggataacgccaagaagaaagcgcagattgctgacctgcagtccttcgtcagccgctttagcgccaacgcctctaagtcgcgtcaggcaacctcgcgcgcgcgtcagattgataaaatcaagctggaagaggttaaagcctccagccgtcagaacccgttcatccgcttcgagcaggacaagaagctgttccgtaacgcgctggaagtggaagcccttaccaaaggcttcgatgaaggcccgctgtttaaaaacttcaacctgctgctggaagtgggcgagaagattgccatcctcggtgccaacggcgtgggtaaatccaccatgctgaaaaccctggtcggcgaactgcagccggacaacggcaccgtgaagtggtctgaaaacgcgcagattggctactacgcgcaggaccatgaatacgagttcgaaaatgacctgaccgtctttgactggatgagccagtggaagcaggaaggcgacgacgagcaggcggtacgcagcattctgggtcgtctgctgttcagccaggacgacatcaaaaagccggctaaggttctctccggtggtgagaagggccgcatgctgttcggcaagctgatgatggaaaaaccaaacatcctggtgatggacgaaccgactaaccacctggacatggaatccatcgaatctctgaacatggcgctggagatgtatcagggtaccctgatcttcgtctctcacgaccgtgagttcgtcagctcgctggcgacccgcgtgatcgaaattacgccagagcgcgtggtggacttcaccggtaactatgaagattacctgcgcagtaaaggtatcgacggc

SEQ ID NO: 19608 - DNA, 924 bp, Enterobacter cloacae
gtggcgcgagcgcggacacgcataatggagacgaaaatgagtgtgcaattaggcattaacccgctgacctggacgaacgacgatctgccttctctcggtgcggaaacctcgctggagacctgtctgagtgaaggtaaagaggccggttttgccggcttcgagctgggcaataaattcccgcgcgaagcgcgcctgcttggccccatcctgcagcgtcacgacctgcggctggtctccggctggtactccggccgcctgctggagcgcagcgtggaggaggagatcgccgccgtgcagtcccacctgactctgctgcgcgagctgggggcgaaggtgctggtgtttgcggaagtgagcggctgcattcacggcgagcagcagaccccggtgcatctgcgcccgcgcttcccgcaggcgcgctggaaggagtacggcgagaagctcaccgaatttgcccgctatacgcagcagcagggcgtgcagattgcctaccatcaccatatgggcacggtgattgagtccgccgaggacgtggacaacctgatgatccacaccggggaggcggtcggactgctgctggataccggccatctcacctttgccggggccgatccgctggcggtggcgcagcgctgggcgtcgcgcatcaaccacgttcactgtaaagacgtgcgtgccgacgtgctggcggacgtgaaaaaccgcaaaaccagcttcctcgatgcggtgctgagcggcgtgtttaccgtgccgggcgacggctgcgtcgattacccgccgattatgcggctgctgaaggcgcaggattatcacggctggctggtggtcgaggccgagcaggatccggcgattgcccatccgctgacctacgcccgtctggggtataacaacctgagccgtctggcccgcgacgccggactgatt

SEQ ID NO: 19609 - DNA, 1960 bp, Enterobacter cloacae
atgctgcagtttgaacagctgataagcgagcttgagcgcaccggccatcgtcggctggtggtgctcagcggcgaggcgcagtggacgttaacccaggcactggccctgcgtgacgccttgcccggagactgggtaaggcttgacgaacatccttcaaaagccatcagcggtctgctgggacgcgagttccggcatgccgtttttgacgccagcgtcgggtttgatgtcgccgcgtttgccgccctgagcggaacgctaagcgccggaagccttctggtgctacgggttccgccgctcgacgcgtggtccgggttgccagacagcgattcactgcgctggagcgacggcgccgaagcgatagccacgccgcattttgtccaccatttctgccggacgattgccgccgatcccgacgcgattgtctggcttcagggccgcgcgttttcccttccgcctttacccgacgcgccagactggcagcctgccagcggcgcaccgcagcggcgagcagggctgagatcctggatgtgctgcaggggatggcggagggcatcgtggccgttagccgccgcgcgcgggcgcggaaaatcagccctggcaggcatgttgctgaaccgcattgcgggcagcgccgtggttaccgcgccgtcgaaaggggcgacggatatcatcgcccgcgttcgccggagagcgttttcattttatggccccggacgcgctgcttgcctcttcacgccgggctgactggctgattgttgatgaagccgctgctatccccggacctctgctggaaaagctggctgtccgtttccctcgcgtgttgttgaccaccacggtgcagggctatgaagggacgggccggggattcctgcttaaattctgcggtcggtttaccgggctgcagcgctacagcttatctacaccggtacgctgggcggcgggctgcccgcttgagcgggttgtcgccagcgcgctgctgtttgacgatacgctgatcgaccgccgcccggagggagaggtgcgtttaacctccctgaccccggaggcctgggaacgccgcccggcgcttgcagcgagcgtatacgaactcctctgcgcggcgcattatcgcacctcgccgctcgatttacgccgcatgatggacgcgcccgggcagcagtttgccgttgcagaaacggacccggatatcgccggggcgctctggctggtggaggagggcgggctctcccctgagcttagccgcgccgtgtgggcaggataccggcgtccgcgcggtaacctggtggcgcagtctctggcggcgcacggcggctctccgctggcggcgacgctcagaggacgacgggtcacccgcattgccgtacatcctcaccgtcagcgggaagggattggccaggcacttgttcgcagcgccagcggcgaagattatctgtcggtgagcttcggctataccgatgagctttggcgtttctggcagcagtgcgggtttgtgctggtgcggatgggcagccatcgtgaagccagcagcggatgctacaccgcgatggcgttgcggccgcagagcgaggccgggcgtcagctgtgcgagcaggcgaagcggcgtctgaagcgcgatgcgcgggtattatcggcctggaacggtgaaaagatccccgtggaagacggctgggaagctacccttaataatgacgactggctggagctggcggggtttgcgtttgcacaccgggcgttttcaacctcggttgccgcactgacgcggctgttgttaaccgtggacatgccgcttccggcgctgcgcgggaaaatggaagggaaagtggaagacgtcgggcgaaaagcgttgctggcaacgttgcggagtgaaactgcgcaagcgattgaaagccttgactatccgcgctgccagcagttgaaagaagacattttgcaatggcaattttttcaatgacttcttcag

SEQ ID NO: 19610 - DNA, 1323 bp, Enterobacter cloacae
atgaacatgcgcttccccactgttattaccttgccctggcgtgcagacgccgctgaattctggtttgcccgcctgagccatcttccgtttgcgatgctgctgcattccggccatgcggaccatccctatagccgcttcgacattctggtggccgatccgctaaagacgctgacaaccgatgacctgtcgttaacggacgatccgctggtgcagcttcagcacgccattaacgcgctgggcttatctgccgcgccgaacacggatctcccttttcaggggggcgcgctgggcctgtttggttacgatctgggtcgccgtttcgaaacgctgccggagcatgcgcaggctgatatttccatgccagacatggccgtggggctgtatgactgggcgttaatagtcgatcaccagaaaaaaacggtttccctgttgagccatcatgacgtgcaggcgcgtctggcgtggcttgaggcgcaacagcctgcaccggcacaaacgtttatgttgacctcaggctggtgctcaaatatgagcgcagcggagtacgccgaaaaattcgcgcgcgttcaggcgtatctgcaaagcggtgactgctatcaggttaacctcgcccagcgtttccaggcgacataccggggagatgagtggcaggcgtttacccgtcttaacgccagcaataaggcgccgttcagcgcgtttgtccgtctggcacagggggcgatcctcagcctgtcgcccgagcgctttattcatctggccgagggcacgatccaaacccgtccgattaaaggcaccctgccgcgtcttgccgatcccgacgccgatcgccagcaggcggaaaaactcgccgcctctccgaaagaccgcgccgagaacctgatgattgtcgatctgatgcgtaacgacattggccgcgtcgccgaaccgggcagcgtgcgcgtgccggaactgtttgtcgtcgagcctttcccggcggtgcatcatctggtcagtaccattaccgcgcgtctacccgcctctcgcaccgcctgcgatctgctccgcgccgcgttcccgggcggctccatcaccggcgcgccaaaggtgcgggcgatggagatcattgatgagctggagccgcaccgccgcaacgcctggtgcggcagcatcggctatatcagcctgtgcggcaccatggataccagcattaccattcgcacgctgacggcctgcgacggaaatctttactgttcggccgggggcggcattgttgccgatagccaggtcgatgcggaatatcaggaaacctttgataaagttaaccgtatcctgaaacaactggag

SEQ ID NO: 19611 - DNA, 576 bp, Enterobacter cloacae
gtggaaaaagagaacctgacgctggacgattttttatctcgctttcagctattacgaccgcaggtcaaccgcgaagcgctgaaccagcgtcaggcggccgtgctgatcccggtcgtgcgtcgcgcgcagccgggcctgctgctcacccagcgttctccccatttacgtaagcacgcgggtcaggtcgcctttccgggtggcgcagttgacagctccgacgcctcgctgattgccgccgcgctgcgggaagcgcaggaagaggttgccattccgccggaggctgtggaagtcatcggtgtgctgccgcccgtcgacagcgtcaccggttttcaggtcacgccggtggtgggcattatcccgcctggcctgcagtatcacgccagcgtcgatgaagtttcagcggtgtttgaaatgccgctcgaagaggcgcttcggctaagccgttatcatccgctggatatccatcgtcgcgggcatgaccatcgggtctggttgtcctggtatcagcattattttgtctggggcatgacggcgggcatcattcgcgaactggcgctgcaaatcggcctgaaacct

SEQ ID NO: 19612 - DNA, 1362 bp, Enterobacter cloacae
gtgattagtatattcgacatgttcaaagtgggaattggcccttcgtcttcccatactgttggcccgatgaaggccggtaaacagttcgtcgatgatctggtcgaaaaaggattactggaaagcgttacccgtgtcgccgtggatgtttacggctcgctgtcattaacgggtaaaggccaccacaccgatatcgccattattatgggtctggcaggcaatatgccggataccgtagatattgatgccatcccggcattcatccgcgacgtggaaacacgcggccgcctgctgctggcaaacggccagcaggaagtcgatttcccgcaggatgacggcatgcgtttccgtagcgacaacctgccgctgcatgaaaacggcatgaccattcacgcttacagcggtgaaaaagagatttacagcaaaacgtactactccatcggcggtggcttcatcgtggatgaagagcattttggcaaagacagcgtcggcgacgtcagcgtaccgtacccgttcaaatcggctaccgaaatgctgggctactgcaaagagaccggtctttcactgtccggcatggtgatgcagaacgaactggccctgcacagcaaaaaagagattgaagactattttgcgaacgtctggcaaaccatgcgcgcctgtatcgaccgcgggatgaacaccgaaggcgttctgccgggtccactgcgcgtaccgcgtcgtgcctctgccctgcgccgtatgctggtgaccacggacaagttctccaacgacccgatgaacgtggttgactgggtaaacatgtttgccctggcggttaacgaagagaacgccgccggtggccgcgtcgtgacggcgccaaccaacggtgcgtgcggtatcgttccggcagtactggcatactacgatcactttattgagcccgtgacgccggacatctatatccgctatttcctggcggcaggtgccattggtgcgctgtacaaaatgaacgcctccatctccggtgcggaagtgggctgtcagggtgaagtgggcgttgcctgctccatggcggcggccggtctggcagagctgctgggcgcaagccctgagcaggtctgcgtggcggcggaaatcggtatggaacataacctcggtctgacctgtgacccggtcgcgggccaggttcaggtgccgtgcatcgagcgtaacgcgattgcctcggtgaaagccatcaacgcctcacggatggcgatgcgccgtaccagcgaacctcgcgtatcgctggataaggtgattgaaaccatgtacgaaaccggaaaggacatgaacgcgaaataccgcgagacgtcccgcggtggcctggccattaaggtgcagtgcgac

SEQ ID NO: 19613 - DNA, 438 bp, Enterobacter cloacae
atgggtctttttaacttcgtgaaagaagcaggcgaaaagctatgggataacctgaccgatcataaaggccagagtgacaaaatcaccgagcatctcaaaaaactcaatattcccggttcagataaggttcaggttaacgttaccgacggcaaagccagcgtgacgggtgacgggctgacccaggagcagaaagaaaaaatccaggtcgccgtcgggaacatcgcgggcgtcagcgaggtggagaacaacatcaccgcgaccgatgccaaagatgaagccacctactatacggtgaaatccggcgataccctgagcgctatctccaaaaccgtctacggcgatgccaacaagtacaataagatttttgaggctaaccgcccgatgctctccagcccggataaaatctatcctggccagacgctgcgtattcctaaggcg

SEQ ID NO: 19614 - DNA, 748 bp, Enterobacter cloacae
gataaaacctattgcggatttattgccatcgtcggacgtccgaacgttggcaaatccaccctgctgaataatctgcttgggcagaagatttctatcacttcgcgtaaggcgcagaccacgcgtcaccgcatcgtcggcatccatactgaaggcgcgtatcaggcgatctacgtcgatacccctggcctgcacatggaagagaagcgtgccatcaaccgcctgatgaacaaggcggcgagcagctcgatcggcgatgtagagctggtgattttcgttgtggaaggcacccgctggacgccggacgacgagatggtgctgaacaagctgcgtgacggcaaaacgcctgtcatcctcgcggtcaacaaagttgataacgtgcaggaaaaggccgacctgctgccgcatctgcagtggctcggtagccagatgaactttctcgacatcgttccgctatctgctgagaccggtctgaacgttgataccatcgcgggcatcgtgcgtaagcatcctgccggaagcgattcatcacttcccggaagagtacatcaccgatcgctctcagcgctttatggcgtctgaaatcatccgtgaaaagctgatgcgtttcctgggtgctgaactgccttactccgtaacggtggagatcgagcgtttccagaccaacgagcgcggtggctacgatatcaacggcctgatcctcgttgagcgcgaagggcagaagaagatggtgatcggcaacaaagggcca

SEQ ID NO: 19615 - DNA, 972 bp, Enterobacter cloacae
atggcgaacatgtttgccctgatcctggtcattgctaccctggtgacaggtctgctgtggtgtctggataagtttatcttcgccccaaaacgtcgtgaacgtcaggctgccgcacaggcagccactggagatgggattgacgcgaaaaccctgaagaaagtcggcccgaaaccgggctggctggaaacgggcgcctcggtatttccggtgctggcaattgttctggtggtacgttcgtttatttatgagccgttccaaatcccatcaggttcaatgatgccaacgctgctgattggtgattttattctggtagagaagtttgcctacggcattaaagatcctatctaccagaaaacgctgatcgaaaccggtcatccgaaacgtggcgacatcgtggtgtttaaatatccggaagatccgcgcctggactacatcaagcgcgcggtaggtctgccgggtgataaagtgacttacgatccggttgcgaaagaagtcaccgttcagccgggctgcagctccggtaccgcatgtgaaaacgcgctgccaatcacctactcaaacgttgagccaagtgattttgtgcagacctttgcccgtcgtaacggcggcgaagcgaccagcggattcttccaggtaccgaaaggtgaaaccaaagaggacggcatccgtctggttgagcgcaaagagacgctgggcgatgtgacgcaccgaatcctcaccgtgccaatcgcgcaggatcagctgggtatgtactatcgccagccgggccagcagctggcgagctggattgtaccgccaggacattacttcatgatgggtgacaaccgcgataactctgcggacagccgttactggggctttgtgccggaagcgaatctggtcggcaaagccaccgccatctggatgagttttgagaagcaggaaggcgaatggccgaccggtgtacgcctgaatcgtatcggcggaatccat

SEQ ID NO: 19616 - DNA, 432 bp, Enterobacter cloacae
atgagcaattacgtttatagccctaaaaataatgcattttatgctgtgtcgctaaaggatgcgtatgaaatggcaggctcctggcctgacgacagtagcgatattagtgatgagatgttcattgaatttaccgcgagcgcacctgaaggcaaagtgagggtcgccggagatgacggcatgccggtatgggctgatattccacccaagactcccgagcagttgcaggttcaggctgaaaaagagcagcagcatttacttaatactgccagcgtcattactgaggactggcgcacagagctggctcttggaattatcagcaatgatgataaggctaaattgactgcgtggatggggtatataaagcaagttaagtccgtcaagattgaggaagccaaagaaccgggattcagctggcctgaacagccggcaatg

SEQ ID NO: 19617 - DNA, 1902 bp, Enterobacter cloacae
atgattgttttctcctcgttacaaattcgtcgcggcgtgcgcgtcctgctggataacgccactgctaccatcaacccgggccaaaaagtgggtctggtcggcaaaaacggctgcggtaaatccaccctgctggcgctgctgaaaaacgagattagcgcggatggcggtaacttcaccttcccgggaaactggcagctcgcctgggtaaaccaggagacgccggcgctgagcgaaccggcactcgactatgttatcgacggcgaccgtgaataccgcaagctcgaagcggaacttcattctgctaacgagcgcaacgacggtcacgccatcgccaccgttcacggcaagctggacgccatcgacgcgtggaccattcgctcccgcgcctccagcctgctgcacggcctgggcttcagcaacgaacagctggaacgcccggtcagcgacttctccggcggctggcgtatgcgcctcaacctggcgcaggcgctgatctgccgctctgacctgctgttgcttgacgaaccgaccaaccacctcgatctcgatgcggttatttggctggagaagtggctcaagagctatcagggcactctgattctgatctcccacgaccgcgacttccttgacccggtagtggataaaatcattcatatcgaacagcaaacgatgttcgagtacaccggcaactacagctccttcgagcgccagcgcgcgacgcgtctcgcccagcagcagtccatgtacgaaagccagcagcagcgcgtggcgcacctgcagagctttgtggatcgctttaaggccaaagcctcaaaagccaagcaggcccagagccgcatcaagatgctggaacgtatggagatgatcgccccggcgcacgtggataacccgttccacttcagcttccgcgagccggaaagcctgcctaacccactgctgaagatggagaaagtcagcgcgggctatgccgaccgcattattctcgattccatcaagctcaacctggtgccgggttcacgcattggcctgctggggcgtaacggcgccggtaaatcgacgctgatcaaactgctggcgggcgagcttaacccggtcagcggcgaaatcggcctcgcgaagggcatcaagctgggttacttcgcccagcatcagctggaatttttacgcgcggatgaatcgccgattcagcacctcgcgcgtctggcgccgcaggagatggagcagaagctgcgcgactatctcggcggctttggcttccagggcgataaggtgactgaaaacaccgagcgcttctccggcggcgaaaaggcccgcctggtgctggcgctgatcgtctggcagcgcccgaacctgctgctgctcgatgaaccgaccaaccacctggatctcgacatgcgccaggcgctgaccgaagcgctgattgagttcgaaggcgcgctggtggtggtttcgcacgatcgtcacctgatccgctccaccacggacgatctctatttagtgcacggcggcaaagttgaaccgttcgacggcgatctggaagactaccagcagtggctgacggacgtgcagaagcaggaaaaccagccggaagagtcagcgaaagacaacgccaacagcgcgcaggcgcgtaaagaccagaagcgtcgtgaagcggagcttcgcacccagacgcagccgctgcgtaaagagattacccgtctcgaaaaagagatggaaaaactcaacgccacgctggctatcgttgaagagaagctcggcgatagcggcctgtatgaccagagccgcaaggctgagctgaccgactgcctgcaaacccaggcgaagaccaaatccagtctcgaagagtgcgagatggcgtggctcgacgcgcaggaacagctggaagcgatgctgcaggctgac

SEQ ID NO: 19618 - DNA, 666 bp, Enterobacter cloacae
atggctgagaatctctttccgcatctcaagtgggatcagctctgggcggctacgcttgagacgctgtacatgaccgcgctgtccggcgtggcgacctttgtgctgggcatcgtgctggggctggcgctgtttttaaccgcacgcggcgggctgttccacaaccgcacggtttacagcgtgatttcgattgtggtgaacgtgttccgctctattccgttcatcattttgattgtcctgctgatcccgttcaccaagaccgtcgtcggcaccattcttggcgccaacgcggcgctgccggcgctgattatgggcgcggcaccgttctacgcacgcctggtggagatcgccctgcgtgaagtggataaaggcgtcatcgaagcaacgcgctcgatgggcgcacgactgagcacgttagtgtttcgggttttactgccggaatcatcacccgcactggtatcgggtattacggtgacgctcattgcgctggtgagctacagcgcaatggcgggggtgattggcgccggcggtttgggaaatctggcttatctggaaggattccagcgcaaccatggtgacgtcacgctggtggcaacggtgaccattctgatcatcgttttcattatccagttctgcggcgatgtcattacttcactgttagataaacgc

SEQ ID NO: 19619 - DNA, 774 bp, Enterobacter cloacae
atgcccgcgctcgactggcagggggttctgaccggacagcctctgcagtggatactctccggattcctcaccaccctgtgggtcacgcttgccgggatgctgctggccagcctgctcgcactgctttttatgctcctgcgcctttccggcggacgccccgggaacgcggtcgtcagcagctgggtgtcgctgtttcgcaatacgccgctgctggtgcagctgctgttctggtattttgccgcctggaacgggctaccgcaggcgttccgcgacgcggtgaacgcggatcacagctggtcaattctgcctggtaacgtctggtggttcacgcccgaatttttatgttctgcctgggggttgggcgtctttacctcggcgtttttaatcgaagaggtggaatcgggcttacgttccgtgcctgccggacagcgggaggcggcgctcgcgcagggattctccgcgtggcgtctgtttcgttacatccttctgccgcaggggctggccaacgcctggcagcccgttgtggggcagtatcttaatctgatgaagctctcctcgctcgccagcgggattggcttcgccgagctgacctatcaggtcaggcagatcgagagctataacgcgcacgcgctggaggcgtttaccctcggaaccgcactctatctgctgaccggcctggtcatggggatagtgctggttcgcatcgggcctgacgcgaaacgtaaacgcccaggcgtcgccaccacagggagtgaaaaacatgattgccggact

SEQ ID NO: 19620 - DNA, 810 bp, Enterobacter cloacae
atgaaaaaaacactgacactgatcgccgccgcaaccctgagcgccctgagcttcgcctcctgggccgacaccctgaccgtgggcgcatccaacacgccgcatgccgaaattctggagcaggcaaagccaattctggcgaagcagggtatcgacctggagatcaaaccgttccaggactacattctgccgaacaccgcgctggcgggtcatgacatcgacgcgaactatttccagcacattccttacctgaacagcgtgctgaaggatcatgcgggcgataaagactacgatttcgtcagtgcgggcgcgatccacattgagccaatcggcatctactcaaaaaaatacaagtctctgaaagacctgccggaaggtggcaagatcatcatgcgtgacgcggtttctgaagaggggcgtattctctccatctttgagaaagagggcgtgatcaagctgaagccgggcatcgacaaagtgaccgcgcgcatcagcgacatcgttgagaaccctaaaaagctgaagttcacgccgaacgtggaagcctctctgctgccgcagatgtacaacaacaacgaaggcgatgcggtggtgattaacgccaactacgcgattgacgccggtctggatccggttcacgacccgattgcggtagagagcggtgaaaacaacccgtacgccaacatcattaccgtgcatcgcggtgacgagaagaagaaagatatcgttgcgctggtgaacgtgctgcactcgaaagagattcaggactggatccgcaccaagtacaaaggcgcggtcatcccagtaaacaac

SEQ ID NO: 19621 - DNA, 396 bp, Enterobacter cloacae
atgacctgggaatatgcgctaatcggtttagtcgtcggcatcgtcatcggtgctgtggccatgcgtttcggtaatcgcaaattgcgtcagcagcagtcactgcagtacgaactggaaaagaacaaagccgagctggaagagtatcgtgaagagctggtcagccattttgcccgcagcgccgagctgctggacaacatggcaaccgactatcgtcagctgtatcaacatatggcaaaaagctccagcagcctgctgccggaaatgaccgcggaaaccaacccgttccgcaaccgtctggctgactctgaagccggtaacgatcaggcgcccgttcagatgcctcgcgactattccgatggcgcgtccggcctgctgcgcggcggtgtaaaacgcgat

SEQ ID NO: 19622 - DNA, 1367 bp, Enterobacter cloacae
atgaagaaaaaaaaccagctgttgagcgctatcgcgttaagtgtcgggttatctctctcggcgtccgtccctgtatttgccgccattccttcccaggtgcctggccaggcggccattccaagcctcgcgcccatgctggaaaaagtgttgcctgcggtcgttagcgttcaggttgagggcaccgcagtacaaagccaacgcgtccctgaagaactgaaaaaatatttcggcgatgagtctcccgaccagcaggcgcaccttttgaaggcctgggctctggcgtcattattgatgcggcaaaaggctatatcctgaccaacaatcacgtcatcagccaggccgataagatcagcgtccagctgaacgatggccgtgaatttgatgccaaactgatcggcggcgatgaccagagcgacatcgcgctgctgcaggtacaaaacccgagcaacctgacccagattgccatcgcggattccgacaaactgcgcgtcggcgattttgccgtcgccgtgggcaacccctttggcttagggcagaccgctacttccgggatcgtctcggcgctgggacgcagcggcctcaacctggaagggctggaaaactttatccagaccgatgcatcaatcaaccgtggtaactccggcggagcattgcttaaccttaacggcgagctgattgggattaacacggcgattctggccccgggcggcggcagcatcgggatcggttttgctatccccagcaatatggccaaaaccctggcgcagcagctgatccagttcggtgaaatcaaacgcgggctgctgggtattaaaggtatggagatgagcgcggatatcgcaaaagccttcaatatcaacgtacagcgcggggcgtttgtcagtgaagtgctgccaaactccggctcggcaaaagcgggcgtgaaatcaggggatgtgatcgtcagcctgaacgacaaaccgttgaacagctttgcagaactgcgttcacggattgccacgacggaacctggcgccaaagtgaagctgggcctgatacgtgacggcaagccgcttgacgttgaggtgacgctggataagagcacctcttcctcggccagcgcggagcttatcgccccggcgctacagggggctacgttgagcgacgggcagctgaaggacggtacgaaaggcattagcatcgataccgtcgagaagagcagccctgccgcacaggccggattgcatcaggatgacgtgattatcggtgtcaaccgcaaccgcgtgcagtctattgccgaactgcgcaaggtgctggaaagcaaaccagcggttattgccctgcaggtcatgcgtggcaatgagtccatctatattctgttgcgctaa

SEQ ID NO: 19623 - DNA, 2634 bp, Enterobacter cloacae
atgagcgaccttgcgagagaaattacaccggttaacatcgaggaagagctgaagagctcctatctggactatgcgatgtcggtcattgttggccgtgcgctgccggacgtccgcgatggccttaagccggtacaccgtcgcgtactatacgccatgaacgtattgggcaatgactggaataaagcctataaaaaatctgcccgcgtcgtcggtgacgtcatcggtaaatatcacccgcatggtgataccgccgtttatgacaccatcgttcgtatggcgcagccattctccttgcgttacatgctggtagatggtcagggtaactttggttcagtcgacggcgactccgctgcggcgatgcgttatacggaaatccgtatgtcgaaaatcgctcatgagctgatggccgacctggaaaaagagaccgttgatttcgtcgataactacgacggcaccgagcgcatcccagatgtgatgccaaccaagatcccgaacctgttggttaacggttcatccggtatcgcggtcggtatggcaaccaacattccgccgcacaatatcaccgaggtgatcaacggctgcctggcctatatcgacgatgaagacatcagcattgaagggctgatggaacacatcccgggtccggacttcccaacggcggcgatcatcaacggtcgtcgcggtattgaagaagcttaccgcaccggccgcggcaagatttacatccgtgcccgcgccgaagtggaagcggacgctaaaaccggccgtgaaaccatcattgttcacgagatcccttatcaggtgaacaaagcgcgtctgattgaaaaaatcgccgagctggtaaaagaaaaacgtgttgaaggcatcagcgcgctgcgtgacgagtctgacaaagacggtatgcgcatcgtgattgagatcaaacgcgacgcggtgggtgaggttgtgctgaacaacctgtactcccagactcagcttcaggtctccttcggtatcaacatggttgcgctgcaccatggtcagccgaagatcatgaacctgaaagagatcctgagcgcgttcgtgcgtcaccgccgtgaagtggtgacccgtcgtaccatcttcgaactgcgcaaagcgcgcgaccgtgcgcacatccttgaagcgctggcggttgcgctggccaacatcgacccgatcatcgaactgatccgtcgtgcgccaaccccggcggaagcgaaagcagccctggtttcccgtccgtgggatctgggtaacgttgccgcgatgctggaacgtgcgggcgatgacgcagcgcgtccagagtggctggaacctgaattcggcgtgcgtgacggtcagtattacctgactgaacagcaggctcaggcgattctggatctgcgtctgcagaaactgaccggccttgagcacgaaaaactgctcgacgaatacaaagagctgctggaacagattgctgaactgctgcatatcctgggcagcgcagagcgtctgatggaagtgatccgtgaagagctggagctggtccgcgatcagttcggcgatgcgcgccgcaccgaaatcaccgcgaacagctctgatatcaacattgaagatctgatcaaccgcgaagacgtggtggtcaccctgtctcaccagggctatgtgaagtatcagccgctgaccgactacgaagcacagcgtcgtggcggtaaaggcaagtctgcagcgcgtattaaagaagaagacttcattgaccgcctgctggtggcgaacacccatgacacgatcctctgcttctccagccgcggtcgtctgtactggatgaaagtttatcagctgccggaagcgagccgcggcgcgcgtggccgtccaatcgtcaacctgctgccgctggaagcgaacgaacgtatcaccgccatcctgccggtacgcgagtacgaagagggcgtgaacgtctttatggcgaccgccagcggtaccgtgaagaaaaccgcgctgaccgagttcagccgcccacgttccgccgggatcatcgcggtgaacctgaacgaaggcgacgagctgatcggtgtggatctgacctccggttctgatgaagtgatgctgttctctgcggccggtaaagtggtgcgctttaaagagaacgccgtccgtgcaatgggtcgtaccgctacgggcgttcgtggtatcaaactggctggcgaagacagcgttgtttctctgattattccgcgcggtgaaggggctatcctgaccgtgacgcagaatggttacggtaaacgtacggcggaaggggaatacccaaccaagtctcgcggcacgcagggcgttatctctatcaaagtgaccgagcgcaacggttccgttgtgggcgcggtgcaggtagacgatgccgaccagatcatgatgatcaccgatgccggtacgctggtgcgtacccgcgtgtctgagatcagcgtggtggggcgtaacacccagggcgtgatcctcatccgtacagcggaagatgaaaacgtggtgggtctgcagcgcgttgctgagccggtggatgacgaagagctcgattccatcgacggtagcgttgcggaaggcgatgatgatatcgcgccggaagccgacaccgacgatgacgtagcggatgacgctgacgag

SEQ ID NO: 19624 - DNA, 1128 bp, Enterobacter cloacae
atggcatataccaccttttcacagacgaaaaacgaccagctcaaagagccgatgttcttcggccagccggtcaacgtggcacgctacgatcagcaaaaatatgacatcttcgaaaagctgattgaaaagcaactctccttcttctggcgcccggaagaagtggacgtctcccgcgaccgtattgattaccagtcgctgccggatcacgaaaaacatatcttcatcagcaacctgaagtaccagacgcttctggactccattcagggtcgtagcccgaacgtggcgctgcagccgctgatctccattccggagctggaaacctgggtggaaacctgggcgttctccgagactatccactcccggtcttacacccacatcatccgcaacatcgtgaacgatccggcggtggtgtttgacgatatcgtcaccaacgagcagatccagaagcgcgcggaaggcattgcccattactacgacgagctgatcgagatgaccagctactggcatctgctgggcgaaggtacgcacaacgtgaacggtaaaaccatcaccgtgaacctgcgcgcgctgaaaaaacagctttacctgtgcctgatgagcgtcaacgcgctggaagcgatccgcttctacgtgagcttcgcctgctccttcgcctttgccgagcgcaagctgatggaaggcaatgccaaaatcatccgtctgattgcccgcgatgaagccctgcacctgaccggtacccagcacatgctgaacctgctgcgcagcggtacggacgatccggagatggcggaaatcgccgaagagtgcaagcaggagtgctacgacctgttcgtgctggcggctcagcaggagaaagagtgggccgactacctgttccgcgacggctccatgattggcctgaataaagacatcctgtgccagtacgttgagtacatcaccaacatccgcatgcaggccgtcggtcttgacctgccattccagacgcgctctaacccgattccgtggatcaacacctggctggtgtccgataacgtgcaggttgcgccgcaggaagtggaagtcagctcttatctggtcggtcagattgattctgaagtcaacaccgacgacctgagcaacttccagctc

SEQ ID NO: 19625 - DNA, 480 bp, Enterobacter cloacae
atgacgaagaaaaaagcacataaaccaggctcggcgaccattgcgctcaacaagcgtgctcgccacgagtatttcattgaagaagaattcgaagctggccttgcgttgcagggctgggaagtaaaatcgctgcgcgccgggaaagccaacatcggcgatagctacgtgatcctgaaagatggcgaagccttcctgttcggcgcgaactttacgccgcttaccgtcgcctcctcacactacgtgtgtgacccaacgcgcacccgcaagctgctgctgaacaagcgtgagctggaatccctctacggacgcatcaaccgtgaaggtttcaccgtggtagccctgtcgctgtactggaaaaacgcatggtgcaaagtgaaagttggcgtcgctaaaggtaaaaaacagcacgacaaacgtactgacctgaaagagcgcgagtggcagcttgataaagcgcgcattatgaaaaacgcaggacgt

SEQ ID NO: 19626 - DNA, 864 bp, Enterobacter cloacae
atgcaacggttggagcaggcgtcacgtaacgttatactgcttctctttcttattaagacaactgtcgatgcctatatgcctgttttcgcactgatcgcccttgttgcctactctgtcagcctcgcgctgatcgttcccggcctgctgcaaaaaaacagcggctggcggcgcatggctattctttccgcggtaatcgcactgattagccacgcgtttgcgctggaatcacgcatcattcccggcgacggcagcgtgcaaaacctgagcgtcctcaacgtcggctcgctggtcagcctgatgatctgtacggtaatgaccatcgtcgcgtctaaaaatcgcggctggctgctgctgccgattgtctataccttcgcgctgatcaatctggccctcgccacctttatgcctaatgaattcattacgcatctggaggccaccccggggatgctggtccatatcggcctgtcgctctttgcctacgcgacgctgatcatcgccgcgctttacgccatgcagctcgcctggattgactaccagctgaaaaacaaaaagctggcgtttaatcatgagatgccgccgctgatggtcattgagcgtaagatgttccatatcacccaggtgggcgtggtgctgctgacgctcacgctctgcacgggcctgttttacatgaagaacctgttcagcgtggagaatatcgataaagcggtgctctctatcatcgcgtggtttgtctatattgtcctgttatggggccattatcatgaaggctggcgcggtcgtcgcgtggtctggttcaacgtcgcgggtgcgggcattctcacccttgcctattttggcagccgcttcatacagcaatttgctggc

SEQ ID NO: 19627 - DNA, 804 bp, Enterobacter cloacae
atgttgtatcgctggttgtgtagcaaaggctatgaagtgatggtcgagcagcagattgcgcaggagctgcagctgaagagcgtcaaaaccggcacgctggcggaaattggccaacaggccgatctcgccgtggtggtgggcggcgacggcaacatgctcggcgcggcccgcacgctggcgcgttatgacattaaggtcatcggcatcaaccgtggcaatctcggctttttaaccgatctcgacccggacaatgcgcagcagcagctggctgacgtgctggaagggcactatatcagcgaaaaacgctttttactggaagcgcaggtgtgccagcaggactgccagaagcgcatcagcaccgcgattaacgaggtagttcttcaccccggaaaagtggcgcacatgattgaattcgaagtttatatcgacgaaatctttgccttctcccagcgttccgacgggctgattatctccactccgaccggctcaactgcctactcgctttctgccggtggcccgatcctgacgccctcgctggatgccattaccctagtgccgatgttcccgcacacgctctccgcccgcccgctggttatcaacggcgacagcacgatacgtctgcgcttctcgcaccgccgtaacgacctggagatcagctgcgacagccagatagcgctgccgatccaggaaggtgaagatgtccttattcgtcggtgtgattatcatctgaatctgattcacccgaaagattacagctatttcaacacattaagctcgaagcttggctggtcaaaaaaattgttc

SEQ ID NO: 19628 - DNA, 822 bp, Enterobacter cloacae
atgcagcagttacagaacgttattgagtccgcttttgagcgtcgcgccgagattaccccggcaaatgtggataccgtgacccgtgaagcggtaaaccaggtgatttcccttctggattccggcgcgctgcgcgtggcagaaaaaatcgacggtcagtgggtcactcatcaatggctgaagaaagccgtgctgctctctttccgtatcaacgataaccaggttatcgacggagctgaaagccgctacttcgataaagtgccaatgaaattcgctgactacgacgaagcgcgtttccagaaagaaggcttccgcgtggtaccgcctgcggcggttcgccagggtgcgttcatcgcacgtaacaccgtgctgatgccatcctacgtgaatatcggtgcctacgttgacgaaggcacgatggttgacacctgggcgaccgtcggttcctgcgcgcagatcggtaaaaacgttcacctgtccggcggcgtgggcatcgggggtgttctggagccactgcaggctaacccgaccattatcgaagacaactgcttcatcggcgcgcgctctgaagtggttgaaggcgtgatcgttgaagaaggctccgtgatctccatgggcgtttacatcggtcagagcacccgtatttacgaccgtgaaaccggtgaagttcactacggtcgcgtaccggcgggctccgtggtggtttccggcaacctgccgtcaaaagatggcaaatacagcctgtactgtgcggttatcgtgaagaaagtggatgcgaaaacgcgcggtaaagtgggcatcaacgaattgctgcgcaccatcgat

SEQ ID NO: 19629 - DNA, 1155 bp, Enterobacter cloacae
atggctggctggcatcttgatacaaaaatggcgcaggatattgtggcgcgcaccatgcgcatcattgataccaatatcaacgtaatggatgcccgcgggcgcattattggcagcggcgatcgcgagcgtattggggaattgcacgaaggcgcgctgctggtgctttctcaggggcgggtcgtggatatcgacgatgcggtagcgaaacacctgcacggcgtacgtcagggcatcaatttaccgctgcgtcttgaaggcgaaattgtgggggtaatcggcctcaccggcgagcccgagtcactgcgaaaatacggtgagctggtctgtatgacggcagagatgatgctggagcagtcgcgcctgatgcacctgcttgcccaggacagccgcctgcgtgaagagctggtgatgaaccttattcaggcggaagagcatacgcctgcgctcagcgaatgggcgcagcgtctggggatcgatctcaaccagccgcgcgtggtagcggtcattgaggtcgatagcggccagcttggcgtggacagcgcgatggccgagctgcagcagctgcaaaatgcgctggcgacgccggagcgcgacaaccttgtagcgatagtctcactgacggaaatggtggtgctcaagcccgcgctcaatcagtttggacgctgggatgcagacgatcatcgccgtcgcgtggagcagctgatctcccggatggaggagaacggccagctgcgttttcgcgttgcgctgggcaactactttaccgggccgggcagtatcgcccgctcctggcgtaccgcgcgcaccaccatgatggtgggcaagcagcggatgccggagagccgcagctatttctatcaggatctgatgctgccggtgctgctcgacagcctgcgcgggggctggcaggccaatgagctggcgcggccattggcgcgtctgaaagccatggacaacaacggcctgctgcgccggacgctgcaggcgtggttccgccataacgtgcagccgctggcgacctcgaaggcgctgtttattcaccgcaatacgcttgagtatcggttaaaccggatttcagagctgacggggctggatctgggaaactttgacgacaggctgctgctgtatgtggcgcttcaactggacgagcagaga

SEQ ID NO: 19630 - DNA, 1434 bp, Enterobacter cloacae
atgaaaaaaaccacattagcaatgagtgcactggctctgagtttaggtttagcgctgtctcctctgactgctactgcagccgagaccgcgtcgtcggcagcaaccgcgcagcagatgccaagcctggcaccgatgctcgaaaaagtgatgccatcggtggtgagtattaacgttgagggcagcacgaccgtcaatacgccgcgtatgccgcgtaacttccagcagttcttcggcgacaactcgccgttctgtcaggacggttcgccattccagagctctccgttctgtcagggcggcggtgccggggatgacagccagggcggcggccagcagcagaaattcatggcgcttggctcgggggtaattattgatgcggcgaaaggctacgtcgtcactaacaaccacgttgtcgataacgcgaacagcattaaggttcagctgagcgatggccgcaagtttgacgccaaagtggtgggtaaagacccgcgctccgacattgcgctgatccagattcaggatccgaaaaacctgacggcgattaaaatcgccgactctgacgcgctgcgcgtgggcgactataccgtggcgatcggtaacccgttcggcctgggtgaaaccgtgacatccggtatcgtctctgcgctgggtcgtagcggcctcaacgcggaaaactacgaaaacttcatccagacggatgcggcgatcaaccgcggtaactccggcggtgcgctggtgaacctgaacggtgagctgatcggtatcaacaccgctatcctggctccggacggcggcaacatcggtatcggttttgctatcccaagtaacatggtgaaaaacctgacctcgcagatggtgcagtatggtcaggtgaaacgcggtgagctgggtatcctcggtacggagctgaactccgaactggctaaggcgatgaaagttgacgctcagcgcggggcatttgtcagccaggtgatgccgaattcctccgcggcgaaagcgggcattaaagcgggggatgtgatcacctccctgaacggtaaaccgatcagcagctttgctgccctgcgtgccgaagtgggctcgatgccgattggcagtaaagtgaccctcggcctgctgcgcgacggtaagccggttaacgtgagcctggagctgcagcagagcagccagaatcaggtggattccagcaccatcttcagcgggattgaaggtgccgagatgagcaacaaaggcgcagacaaaggcgtggtggtgaacaacgtgaaagcgaattcaccggcagcccgtatcggcctgaaaaaaggcgatgtgatcatgggcgctaaccagcagccggtgaaaaacatcgctgaactgcgcaaaattcttgagagcaagccttccgtactggcgctgaatattcagcgtggtgatacctctctttatctgctgatgcag

SEQ ID NO: 19631 - DNA, 978 bp, Enterobacter cloacae
atgcttgattatgcccatcgccagcaccgttccgataagcgtcgcctgtttttgctggtgctgttgctcattgtcgccgcaggcgtgagcctctgcgcgggcgacagatggatcgggcctgaaagctggtgggggccggacgggcagctcttcgtctggcaaattcgcctgccgcgcaccgtcgcggtggttctggtcggcgccgcgctggcgctgtgcggtaccataatgcaggcgttgtttgataaccctctggcggagcccgggctgctcggcgtgtcaaacggcgcaggcgtaggcctgattgcggcggtaatgctcggcggaggtgaactctccggatggagtattagcctgagcgctatcctcggcgcgctgctgatcaccgcgatccttcttcgtttcgccagacggcacttatcgaccagccgtctgctgcttgccggcgtggcgctggggattatctgcagcgcgctgatgacctgggcggtctacttctcaacatcctttgacctgcgtcaactgatgtactggatgatgggcggctttggaggcgttgactggcaccagggctggctgatggtgctgctggtaccggttatcgtgtgggctaccctgcaggcgcagccgctgaatatgctcgcgctgggtgaaacctctgcccgccagctcggcatgccgattgggttctggcgtaatgtgctggtaatagccattggctggctggtcggcgtcagcgtggctctggcgggcgcgatcggcttcatcgggctggttattccgcatatgctgcgcctgtgtggcctcacggaccatcggaccctgcttccggcctcggcggttgccggggccgtcacgctgctggtggccgatatcatcgcccggcttgccctgacggccgcagagctgccgattggcgtggtgaccgctacgctgggcgcgccggtgtttatctggctactattaaaagctggacgt

SEQ ID NO: 19632 - DNA, 714 bp, Enterobacter cloacae
atgattattacgctagataatgcttaccagtctgaactgctgcttctgcctgctcgtaatagcgcaggggagcttaaaggtttagaggttctggttaactttactggcgtcggcagcgatgtgcggatccccactgagcttgttatccctcggctttcagcagctgaagagttagtgctgtttaacgaaaaattgcaattgcttgatacctgtaaactgttttttattcagcatcagttaattgcatggatcaatattacacctgcaatagttgaatttttattaagtaatggaaacgctgtttcaatccttgagcgttacccgtttcttgagtttactgttaatgagaattatccaggtttaaataacggaaaggacgatctgcagctggcgagaatggccatccatttcccgttggtcctggcaaactttggcgcaggcgccgcatcgctcaaagcggtctatgatggattatttaaacgggttattctcgacaaaggcttcattcagcagcgtgccccggagctctcttttgagccttttatgcgcgccatcctctggcaaatcacaccgcactgccagtcagtgattgtctcaggcattgacgaccacggcctgttgcaacgcgttttgtccttcaatgttggcgccatgcagggcgcactctggccagccgtctctgcggagcacgttacatcgctggttcagcagcga

SEQ ID NO: 19633 - DNA, 1068 bp, Enterobacter cloacae
atgcaaaaactcattaactcagtgcaaaactacgcctggggaagtaaaactgcgttaacggatctctacggtatcgcgaacccgaacaacctgccgatggcagaactgtggatgggggcgcacccgaagagcagctcaaaaattgaagacgccagcggccaggtacgcagcctgcgtgacgtgattgatgccgataaagccgcgctgctgggcgacaaggtggctcagcgctttggggaactgccgttcctgttcaaggtgctgtgcgccgaccagccgctctccatccaggttcacccgaacaagaaagcctctgaaatcggttttgcgaaagagaacgcggcgggtattccgttggacgccgccgagcgtaactacaaagatcctaaccacaagccggagctggtgttcgcgctgacgccgttcctggcgatgaacgcgttccgcgagttttcagagatcgtctccctgctgcaaccggtcgcgggtgcccacaaggctatcgcccacttccttgaaaacccgaacgcggacgcgctgagccagctgtttgccagcctgctgaatatgcagggtgaagagaaatctcacgcgctggcggtactgaaagcggctctgggcagccagcagggtgaaccgtgggagactatccgtctgatctccgaattctacccggacgacagcggcctgttctcccctctgctgctgaacgtggtgaagctgaacccgggcgaagcgatgttcctgtttgccgaaaccccgcacgcctacctgcagggcgtggcgctggaggtaatggccaactccgataatgtgctgcgcgcgggcctgacgccgaaatacatcgatattcctgagcttgttgccaacgtgaagtttgtggcgaaacctgccgcggagctgctgactcagccggtgaaaaacggcgcagagctggacttcccgattccggttgaagattttgctttctccctgcacgacctgagccaggccgaaaccgccatcgcgcaggaaagcgcggcgattctgttctgcgccgagggcgaagcaaccgtacgcaaaggcgaa

SEQ ID NO: 19634 - DNA, 693 bp, Enterobacter cloacae
gtgggccgcgccacgctgctggccgtactggccgcgctgggggtctatttgctggtgacgctgctgtcgctgggcgtggtggcgcgtcctgaactggctgaaatgcgtaacccgtcaatggcaggcctgatggtgaaaatgctcggtccctggggcgacgtggtgattgccgcagggctgatcgtctccgtctgcggcgcttacctgagctggaccatcatggcggctgaagtgccgttcctggccgcgacgcacaaggcgtttccacgccttttcgcccgtcaaaaccaaaacagcgcgccgtcggcatcgctctggctgaccaacatcagcgttcaggtctgtctggtgctgatctggctcacaggttctgactataacaccctgctgaccatcgcctcggagatgattctggtaccctatttcttagtgggtgcgtatctgttaaaaattgccacacgcccggcgcattatgtcgtgggtgtcggagcctgtatttacggcctgtggttgttgtatgcttccgggcctatgcatctgctgctgtcggtggtgctgtacgcaccgggtctgctggtgtttatctacgcccgccgtacgcatcagttggagaacgcgctgaaacgccgtgaaatggcattaattggactgttactggttgctgccctgccggcaacctggatgttaatgggt

SEQ ID NO: 19635 - DNA, 513 bp, Enterobacter cloacae
ctcgccactgacgtctcgcgctttctgcgctatctgggcgtggagcgtcagcttagccccattaccctgctcaactaccagcgtcagcttgatgccatcatgcagatcgccgacgaaatcggcctgaaaagctggcaacaatgtgacgctgcgacggtacgcgggttcgtcgtgcgtaccgtaaaaaaaatctcagcccggcaagcctggcgctcaggctctcggcgctgcgcagtttcttcgactggctggtcaaccaggggggcttaaaagccaacccggcaaaggggatcgccacgccgaaagcgccgcgccatctgcctaaaaatatcgacgttgacgacgtaaaccgcctgctggatatcgaccttaacgatccgctcgccgtgcgcgaccgcgcgatgctggaggtgatgtacggtgccgggctgcgtctgtcagagctggttaatcttgatatcaaacacctcgatctggagtccggttgaagtttgggtaatgggcaagggcagc

SEQ ID NO: 19636 - DNA, 960 bp, Enterobacter cloacae
ttgataatgacggtaacaagcatgttagacaatgttttgagaattgccacacgccaaagccccctcgcgctctggcaggcacattatgtgaagcagcgccttgaagcctgccacagtggattgcgcgtcgagctggtgccgatggtcacgcgcggtgacgtgatcctcgatacgcccctggcgaaagtgggcggcaaaggcctgtttgtcaaagaactggaactggcattgcttgagaaccgcgccgatatcgccgtacattcgatgaaagacgtgcccgttgagttcccggaagggctggggctggtgaccatctgcgagcgcgaagatccgcgcgatgcgtttgtctctaaccactatgattccctcgacgcgctgccagaaggtagcgtggttggcacgtccagtttacgtcgtcagtgtcagctggcggaacgtcgccctgacctgatcattcgctcgctgcgcggtaacgtcggcacgcgtctgggcaagctggataacggcgattacgatgccattatcctcgccgttgccggccttaagcgtctggggcttgagtcgcgcattcgcgaggcgttgccgccagagctgtcgctcccggccgtgggacagggtgccgtcggcatcgagtgccgtctggacgatgcgcgtacccgcgaactgctcgcaccgctaaaccatgacgagaccgctattcgcgtaaaagccgagcgtgcgatgaatacccgcctcgaagggggatgccaggtaccgattggcagctatgctgaattaacagaaggcgaactgtggctgcgagcgctggtgggcgccccggacggttcgcagatggtacgcggcgaacgtcgcggtaaagcgcaagatgccgagcagcttggcgtgtcgctggcggaagaactgctggataacggcgcccgcgagatcctggctgacgtttataatggagagccccctgca

SEQ ID NO: 19637 - DNA, 783 bp, Enterobacter cloacae
atgacgtttaaggagtcatgctctgataatagtccgaatccggattcggactattatcattccccttcaacctcctttattaaaggtttcaccatgcgcattttactccaggtcttattatgcattcctgttattgcgagcaccttttgtcacgcagcaggtattcaaatcggtcgcacacgcataatctacgatgccgcgaaaaaggaagttgccctgcccttacaaaataatgataaagagcttccatggttaatacagtcatggacggatacgggcgatggtaaaacgcacggaccgtttatcgtaactccgcctctctttcggctcgatccgcaaaaagagcaaagcctgcgcattacctggaacgggacagccttagcaggggataaagagtcgctgttctatatgaacgtgcgaaccgttcctgccacggctacagatgagggtgacaaaaacgtcctgcggttaatctataaaacgcgtctgaaactgttctggcgccctgtaggtctgagcggaacaccctctgaaacctgtaaaaacctgcgcttcgctcgtcatggtcagcagctcactgtcatcaacgcgggggcgttctacagcgtctttgattcacttgcgctgggctcgcacaaagtggagaaagcagatatggctgcccctaaatcccgcgttgacattcctctccctgacaatgctcaggggacgagcgtcacctggcgctgcatcaccgattacggcaatgcttcagaaaaatacacttccacactggcgcaggat

SEQ ID NO: 19638 - DNA, 2538 bp, Enterobacter cloacae
atgatgacaggacgtattgatttgtcatacgggcggctctttagactgaatccgcttcttcgctgccttggtggtgtcttgctcatggcgagcttctcgacgctggcccgtgagtatcgtttctctccctcatcgcttgaaggagacatgctggcacagcaggatatcgacctttcactcttttcaaagtcgaatgctcagctacccggcacctattcttcacgagtgcaggtgaacgaacgccgcctgagcaccaccaatatcgcttacgtcagctcgccggaagggtcactgataccgcagctcacaccggatatgctgcgggcatgggggattgctatcgatcggtatcccgccttgcttgcattacccgccaataaggctttgcccaaagatatcagcaactatattccccaggcctccgcgcggcttgatttttcaaccatgacattagcgttgagtattcctcaggccgcgttaagtgggaccggtcacgattacatcgatccctcgcgctgggacgacggtgttcccgtgttgttcagtgactacgctttttcaggatcaaaaaataaggacagcggcgtcagcagcgccaccagtcagtatctgaatttgcgcaccggcgccaacctgggtggctggcgagtgcgcaactattctacgtggagcaattcagagagtgaaaaccagtgggaaaatatcaataccttcctgcagcatgacgttgacgccctcaaggcgcagttcacggccggggaaagcagcacgcgtggcgaggtatttgatagcttacagtaccggggcgtcaaccttgcgtcagatgaagagatgcttccctatagccaacgcggctatgcccctgtcatacgcggcatcgccagttcaaatgcagaaatctcggtgcgccagaacggctatctcatctatcagcaaaatgtcgcgccgggcgcgttcgaaatcaacgatctctactccacgaccaacagcggcgatctggacgttacggtgaaagaggctgacggcaccgagcatcgctttacgcagccctactccagtatcgcggttatgctgcggccagggcgtatgaagtatgaaatgaccgcaggccgttatcgtgctgaaagcgggagcgaccaaaaggaacccgactttttccagggaagcatgatttacggtttaaataaccttctcacctggtttggagggctgaccctctcgaaagactataacgccgccaataccggagccggtctggcgctcgggccgctgggctcgctgtcggctgacgttaccctggccgacacccggctagacgacaacagccaacataccggccagtcatggcgtctgctttataccggtaaactggattcgaccaataccaacttcagcctcggcagctaccgatactccagccgcgggtattacagctttaccgacgccaatcaaaagcgtgacggtcacgaagacgatctgctgtttcgttaccataaacgcaaccgcattcaggccagcgtgagccaaaccgttgctggggtgagtctgtatcttaatggttatcagcaggattactggggcacctctaaaaaagagtgcagcctgtcggttggattaaataccgttgttgccggcacgagttatcacgtggcctatacgtacagcaaaaccaacgacgaagagtctgacagaatggtctctttagggtttagcattcctctcgccagatggctgccacgcgcctggagtagctataacatcagcaatactaaaaatggctatacgcgacaaaacgtgggcctcagcggcacgctgctggacgacgagcgtctgagctactcgttacagcagagccattccaaccacgacggggaagatatcagcagcgtctactgcagctaccgctcgcaatacgccaacctgaacgcaggctattacgcctcgactgatgactctcagcagcttaactacggcattagcggcggtattgttgcccatcctcagggcgtcacgctggctcaacctttaggcagccagtttgctattgtcaacgccaacgacgcgtccggcgtccgtttcctgaaccagcggggtattcagaccgactggcagggtaacgcagtcattccatcgctcactccgtaccaggagaacaatattcgtattgataccgcgagcctgccggaaaatgtggacagcagcgataccgccatcaccgtcattccctcgcgcaacgcggcggtgctggccagatttgacgcccacacaggctatcggatgctgattaccctgaagcgtccaaacggcctccccgttccgttcggcgccatcgcgaccagtagcgacccggtgatgagcggtattgtcgatgaaaccggcaccgtctatctggcaggcattggagagaccgcgcagatcaccgtgaaatggggcaacggcacgggccaacagtgccgcgccagcattacgcaacagtcagccaaccaaaccgaaagccctaacggtattcgctcggttagcgagctttgtcagcaggaa

SEQ ID NO: 19639 - DNA, 642 bp, Enterobacter cloacae
atgttgcaacctgctatgaaacccgttgaagaacactcgccgagcgatatcatcgtccgcatcggcagcctgacgcgcatgctgcgtgacagcctgcgcgagctgggtctggatcaggcgattgccgaagcggcggaagccattcctgatgcccgcgatcgtctggactatgttgtgcagatgaccgctcaggccgcggaacgtgcgctgaacagcgttgaagcgtcacagccgcaccaggatgcgatggaaaagggggcgaaagcgctgagcaaacgctgggacgagtggtttgagaatcctatcgagctggcggatgcccgcgagctggtgacggatacccgtcagtacctgggtgatgtgccgggccacaccagcttcaccaacgcccagctgctggacatcatgatggcgcaggatttccaggacctcaccggtcaggtgatcaagcgcatgatggatgttatccaggagattgagcgtcagctgctgatggttctgctggagaacattccggaaccggcagcccgtccaaaacgcgagaacgaaaacctgctcaatggtccacagctcgacgccagcaaggcgggagttgtggcaagccaggatcaggtcgacgatctgctggacagcctcggcttc

SEQ ID NO: 19640 - DNA, 389 bp, Enterobacter cloacae
atcgcggataaagagcttaagtttttagttgtggatgacttttccgctacgcgtcgcatcgtgcgcaacctgctgaaagagctgggttcaacaacgttgaagaagcagaagacggcgttgatgcgctgaacaaactgcaggctggcgggtttggttttgttatctccgactggaacatgcctaacatggacggtctggaactgctgaaaaccattcgtgccgatgcgggaatggcgtctatgccggttctgatggttactgcagaagcgaaaaaagagaacatcattgccgctgcacaggcgggcgcaagcggctatgtggtgaagccattcaccgcggcaaccctggaagagaagctcggtaagatcttcgagaaactcggcatgtga

SEQ ID NO: 19641 - DNA, 1397 bp, Enterobacter cloacae
atggctaagacgttatatgaaaagttgtttgatgcgcacgttgtttacgaggcgccaaacgaaaccccgctgctgtacattgaccgtcatctggtgcacgaagtgacctctcctcaggcatttgacggcctgcgggcgcacaagcgtccggtacgtcagccgggtaaaaccttcgcgacgatggatcacaacgtatccacccagaccaaagacattaatgcctcgggtgagatggcccgtatccagatgcaggagctgattaagaactgcaacgagtttggcgttgagctgtacgacctgaaccatccataccaggggatcgtccacgtgatggggcctgagcaagggatcaccctgccgggcatgaccatcgtctgcggggactcccataccgcgacccacggcgcgtttggcgctctggcattcgggattggcacgtccgaggtggaacatgttctggcaacgcagaccctgaaacagggccgcgccaaaaccatgaagattgaagtgaagggtaaagccgcaccgggtattaccgcaaaagacatcgtgctggccatcatcggtaaaaccggcagcgcgggcggcaccggtcatgttgttgaattctgcggggaagccatccaggcgctgagtatggagggacgcatgaccctgtgcaatatggcgattgagatgggcgcaaaagccggtctggtagcgccggacgaaaccaccttcaactacgtgaagggtcgtctgcacgcgccgaaaggtcagaattttgacgacgcggtagcgtactggaaaaccctgaaaaccgacgatggcgcagcctttgacaccgtcgtcacgctgcaggcagaagagattgcgcctcaggtaacctggggcaccaacccgggccaagtaatttccgttaacgacaatatcccggacccggcatcctttaccgatccggtcgagcgcgccagtgccgaaaaagcgctggcctatatggggctgaagcccggcgtgccgttgaccgatgtcgccattgataaagtctttatcggttcctgcaccaactcccgtatcgaggatttgcgtgccgcggccgagattgccaaaggccgcaaagtggcaccgggcgtgcaggcgctggtggtacctggctccggtccggtgaaagcccaggcggaagccgaaggtctggataagatctttatcgaagcgggcttcgagtggcgcctgcccggctgctccatgtgtctggccatgaacaacgatcgcctgaatccgggcgagcctgcgcctccaccagcaaccgtaactttgaaggccgtcagggccgcggtgggcgcacccatctggtcagcccggcaatggccgccgctgcggcagtcaccggccatttcgccgatattcgcagcctgaaa

SEQ ID NO: 19642 - DNA, 813 bp, Enterobacter cloacae
atggcgtttaaattaaagaccttcgcagcagtaggcgcgctgatcggctctctggcactggtgggttgcggtcaggacgaaaaggatccaaaccacattaaagtgggcgttatcgtgggtgcagaacagcaggttgcagaagttgctcagaaagtagcaaaagagaagtatggcctggacgtagagctggtcaccttcaacgattacgttctgccgaacgaagcgctgagcaaaggcgatatcgacgcgaatgccttccagcataagccatacctggatcagcagattaaagatcgcggctataaactggtgggcgtgggtaacaccttcgtttatccaattgccggttactctaagaaaattaaatctctggacgagctgcagccaggctctcaggttgccgtgcctaacgacccgactaaccttggtcgttccctgctgctgctgcagaaagtgggcctgatcaaactgaaagacggtgttggcctgctgccaaccgttctggacgtcaccgaaaacccgaaaaatctgaaaattgttgaactggaagcaccgcagctgccacgttctctggacgatgcgcagattgccttggccgttatcaacaccacttacgccagccagattggcctgacgccagccaaagacggtatcttcgttgaagataaagactccccgtacgttaacctgatcgtgactcgcgaagacaacaaggacgcggaaaacgtgaagaaattcgttcaggcctatcagtcagatgaagtttaccaggaagccaacaaagtgtttaacggcggcgctgttaaaggctgg

SEQ ID NO: 19643 - DNA, 651 bp, Enterobacter cloacae
atgtctgagccgatgatgtggctgctggttcgcggcgtttgggaaacgctggcaatgacctttgtctctggcttctttggttttgtgattggcctgccggtcggcgtattgctgtacgtgacgcgtccggggcaaatcattgagaacgcgaaactgtaccgtacgctctccgcgctggtgaatatcttccgttctatcccgttcattattctgctggtgtggatgattccatttacccgcgtgatcgtcggaacgtctatcggcctgcaggcagctatcgttccgctgaccgttggcgctgcgccgtttattgcccgtatggtggaaaacgccctgctggagatcccaaccggtttgatcgaagcttcccgcgcgatgggcgcaacgccgatgcagatcgtccgcaaggttctgctgcctgaggcactgccagggctggtgaatgcggcaactattacgcttatcaccctggtcggttattccgcgatgggcggtgccgttggcgccggcggtttaggtcaaattggttaccagtacggctatattggatataacgctaccgtgatgaataccgttctggtattgctggttgttctggtttacttaatccagttctctggcgatcgcatcgtccgggctgttacgcacaaa

SEQ ID NO: 19644 - DNA, 1717 bp, Enterobacter cloacae
atgcgtactagccaatatctgctctccactctgaaggagacgcctgccgacgccgaagtgatcagccatcagctgatgctgcgcgccgggatgatccgcaagctggcctccgggttatacacctggctgccgaccggcgtgcgcgtcctgaaaaaagtcgaaaacatcgtgcgtgaagagatgaacaacgccggtgctatcgaggtgtccatgcctgtggttcagcccgctgacctgtggcaggagagcggccgttgggagcaatatggtcctgaactgctgcgctttgtcgatcgcggcgagcgtcctttcgttctcggcccaacgcatgaagaagtcattaccgacctgattcgtaacgagctgagctcttacaaacagctgccgctgaacttcttccagatccagactaagttccgtgacgaagttcgcccacgtttcggcgtcatgcgctctcgcgaattcctgatgaaagatgcttactctttccatacctctcaagaatcactgcaagagacttacgacgcaatgtacgcggcgtacagcaagatcttctcccgcatgggtctggatttccgcgctgtgcaggctgataccggctccatcggcggtagcgcatcccatgagttccaggtactggcgcagagcggtgaagacgatgtgatcttctctgactcttcagactacgcggcgaatatcgaatttgcagaagcgctggcgccaaaagaaccgcgcggcgcggcaacgcaagagatgacgctggttgatacgccaaatgcgaaaaccattgccgagctggttgagcagttcaatctgccagtcgaaaaaaccgtgaaaaccctgctggtgaaatccaccgaaggtagcgcttatccgctggttgccctgctggtgcgtggcgatcatgagctgaacgaagtgaaagccgagaagctgccgcaggtagccagcccgctgaccttcgcaacggaagcggaaatccgcgccgtggtgaatgcgggtccaggttcactgggtccagtcaatctgccggtgccggttgttattgaccgcacggttgctgcaatgagcgacttctctgcaggtgcgaacatcgacggtaaacactacttcggcatcaactgggatcgcgacgtggcgacgccggaagtggctgacatccgtaacgtggttgcaggcgatccaagcccggacggtcagggtaccctgatgattaagcgcggcatcgaagtcggtcacattttccagctgggcgataaatactctcgggcgctgaacgccgctgttcagggtgaagatggccgtaaccagatcctgaccatgggttgctacggtatcggggtgacgcgcgtggtggctgcggcgattgagcagaactacgacgaacgcggcatcgtctggccggacaatatcgcgccgttccaggtggccattctgccaatgaacatgcacaagtcttaccgcgtgcaggagctggccgagaagctgtatgccgactgcgcgaacaggtatcgaagtgctgatggatgaccgtaaagagcgtccaggcgtgatgtttgccgatatggaactgatcggtatcccgcacaccgtcgtcatcggcgaccgtaacctcgacagcgatgagattgaatacaaataccgtcgcagcggcgaaaaacagatgatcaagaccggcgacattcttgattacctggtgaaagccatcaaaggctaa

SEQ ID NO: 19645 - DNA, 705 bp, Enterobacter cloacae
atgagtgcatttcagttcgagcagataggcgttatccactctccttataaagagaagttcgccgtcccccgccagcccggtctggtcaccagcggaagcggtgagctacacctgattgcgccttacaatcaggccgatgcggtacgcgggctcgaggctttcagccatttatgggtggtgttcgtgtttcaccagacgatggaaggcggctggcgtcctaccgtgcgtcctcctcgtcttggcggaaatgcgagaatgggcgtatttgcgactcgctcgacctttcgcccaaacccggttggcatgtcgctggttgaactgaaaggcatacgctgccagaaagatcaggtgatactggagttaggtagtctggacctggtagacggcacgccggtaatcgacatcaaaccctatttgcccttcgccgaagcgctcccggacgcgcgtgcaagctatgctcaggacgcgccgcaggggatcatgcctgtttattttacgccagagataaccgcgcagtcgggtcagctggagaaacgctatcctcgcttacgggatttcatcactgaagttctggcacaggacccgcgtccgggctaccgtaaaaagaaggaagaaggaaaaacgtacgccgtctggctgcttgatttcaatgttcgctggcgcgtcaccggggcaggttttgaagtgtttgcccttgaacccagg

SEQ ID NO: 19646 - DNA, 1150 bp, Enterobacter cloacae
atggtcgacagtcgtccgcttacgatagccctggtcgccggagaaacctccggcgatattcttggtgccggtctcatccgcgcgcttaaggcgcgtgtacccaatgctcgctttgtcggcgttgctggtccgctaatgcaggccgaaggctgtgaagcctggtatgaaatggaagagctcgccgtgatgggcatcgttgaggtgctgggacggctacgccgtttgctgcacatccgcgccgatctcacccgtcgttttaccgaactcaaacccgatgtgtttgtcggtatcgatgcgcctgatttcaacattaccctcgaagggaatctgaaaaagcagggtatcaaaacgattcactacgtcagtccgtccgtctgggcgtggcgacagaaacgcgttttcaaaatcggacggtccaccaacctggtgctggctttcctgcctttcgaaaaagcgttttacgacagatttaatgttccgtgccgttttatcggtcataccatggcggatgcgatgccattggatccggataaaaacgcggcgcgcgacgcgctgggcatcccgcatgatgtgcactgtctggcactgctgccaggcagccgtggtgcagaagttgagatgctgagcgctgatttcctcaaaactgcgcaaattcttcgccagacctatccggatcttgaagtggttgttccgctggtaaatgccaaacgccgcgatcagtttgagcgcatcaaagcggaagtcgccccggatcttcacgtccgtcttctggacgggaaagggcgggaagcgatgtatgcgagcgatgccgcgctgctggcctccggtacggcggcgctggaatgtatgctggcgaaatgccctatggtggtcggctatcgcatgaagccgttcaccttctggctggcaaaacgtctggtgaaaacggattatgtctccctgccaaacctgcttgccgggcgcgagctggtgaaagagctgttgcaggacgagtgccagccgcagcggcttgcccgatgcgctgctgccgctgctcgccaacggcaagaccagccaccagatgcacgataccttccgcgaactgcatcaactgatccgctgtaatgctgatgagcaagcggctgatgcggtgctggagctagcaaaatga

SEQ ID NO: 19647 - DNA, 594 bp, Enterobacter cloacae
atgatggaatttgtttatcctcacactcgccttgtggcgggcgtggacgaagtgggtcgcggcccgttggtcggggcagtggtgaccgccgcggtgatcctcgatccggatcgcccgattatcgggctgaacgactctaaaaaattgtcagaaaagcgccgtctggcgctgtttagtgagatccaggagaaggcgctggcctggagcctggggcgcgctgaaccgcatgaaatagacgagctgaatattttgcatgccacgatgctggcgatgcagcgtgcggtagcaggtctgaaaatttccccggaatatgtcctgattgacggcaaccgctgtccggcattgcccatgccatcaatggcggtcgttaaaggcgatagtcgggtcgcagaaattagcgcagcttctatcattgccaaagtgacgcgcgacgccgaaatggccgcgctggacctcacttatcctcagtatggtttcgcccagcataaggggtatcccacacctttccatctggaaaggctggctgaacatggcgcaaccgaacatcaccggcgcagttttggcccggtgaagcgcgcgctgggacgggtgtcc

SEQ ID NO: 19648 - DNA, 3480 bp, Enterobacter cloacae
atggctgaaccacgtttcgtacacctgcgggtgcatagcgactactccatgatcgatgggctggcgaagaccgggccgctggtaaaaaaggcggcctcccttggcatgcccgcgctggcgatcaccgattttaccaacctgtgtggcctggtgaagttctacggaacggcgcacggcgcggggatgaagcccatcgtcggcgcagattttcacgtgcaaagcgatctcatcggcgatgaaatgacgcaaatctccgtgctggcgatgaacaacacgggctatcaaaaccttacgctgctgatctcaaaagcctatcagcgcggctatggcgcgctggggccgtggatcgaccgtgactggctggctgaactgaacgaagggctgctgctgatctcgggtggccgtatgggtgacgtcggcaaatgtctgctgcgaggcaatagcgcgctggtggatcaatgcgtctcgttctatgaagaatatttcccgaatcgttattacctggagttgatccgtaccggccgtcaggatgaagagagctatcttcatgccgcggtggcgctcgcagaggagcgcggtttgcctgtggtggccaccaacgatgtgcggttccttgaggcgggtgatttcgacgcgcatgagattcgcgtggcgatccacgatggcttcacgctcgacgatccgaagcggccgcgtaattactccgcgcaacagtacatgcgcagcgaggaggagatgtgtgagctcttctccgatatccccgaagcgctggaaaacagcgtagagattgccaagcgctgcaacgtcaccgttcgcctcggcgaatacttcctgccgcagttcccgacgggtgacatgaccacggaagatttcctggtcgcgaaatcaaaagaaggcctggaagagcgtctggaattcctgttcccggatgaagaagagcgtaaaaagcgtcgccctgaatatgacgaacgcctggacattgaactccaggtaatcaaccagatgggcttcccgggctacttcctgatcgttatggagttcatccagtggtcgaaggataacggcgtgccggttggaccgggccgtggctccggtgcgggctcgctggtggcgtacgcgctgaaaattaccgacctcgatccgctggaattcgacctgctgttcgaacgtttccttaacccggaacgtgtctcgatgcccgactttgacgtcgacttctgcatggagaaacgcgaccaggtgatcgaacatgtcgccgatatgtacggtcgtgatgcggtatcgcagattattaccttcggtacgatggcggcgaaagcggttatccgcgacgtgggacgcgtgctgggccacccgtacgggtttgtcgatcgtatttctaagctggtgccgcccgatccgggcatgacgctggcaaaagcgtttgaagccgaacctcagctgccggaaatctacgaagctgacgaagaggtcaaagcgctgatcgacatggcgcgcaagctggaaggcgtcacgcgtaacgccggtaagcatgcggggggggtggttatcgccccaactaaaattacggattttgcaccgctttactgtgacgaagcgggccaacacccggtaacccagtttgacaagaacgacgtggaatacgccgggctggtgaagttcgacttcctgggcctgcgtacgttgaccatcatcaactgggcgctggagatgattaacgcccgccgcgagaagaacggcgaaccgccgctggatatcgcggccatcccgctggatgacaagaaaagtttcgatatgctgcagcgctcggagaccaccgccgtcttccagcttgaatcccgcggcatgaaagacctgattaaacgtctgcagcccgactgcttcgaagatatgatcgcactggtcgccctgttccgtccgggcccgctgcagtcagggatggtagataactttattgaccgtaagcacggtcgcgaagagatttcttacccggacgttcagtggcagcacgaaagcctgaagccggtgctggagcccacctacggcatcatcctgtatcaggaacaggtcatgcagattgcccaggtgctctccggctatacgctcggcggcgcggacatgctgcgtcgtgcgatgggtaagaaaaagccggaagagatggctaagcagcgttccatctttgaagacggggcgaagaaaaacggcgttgacggcgagctggcgatgaaaatcttcgacctggtggagaaattcgccgggtacgggtttaacaaatcccactccgccgcctatgctttggtgtcgtatcaaacgctgtggctgaaagcgcactatcctgctgaatttatggcggcggtaatgacggccgatatggacaacaccgagaaggtggttggcctggtggacgagtgctggcgcatggggctgaagatcctgccgccggatattaactcagggctctaccacttccacgtcaacgacgacggagagatcgtttacgggatcggcgcgatcaaaggcgtgggcgaaggtccgatcgaggcgatcatcgaagcgcgtaacaacggcgggtatttccgcgagctgttcgatctttgcgctcgtaccgacaccaaaaaactgaaccgtcgcgtgctggaaaaactgatcatgtccggcgcgtttgacagactcgggccgcatcgcgccgcgctgatgaattccctcggcgacgcgctgaaagcggcggatcagcatgcaaaagcggaagccattggtcaggcggatatgttcggggtgctggcggaagagccagagcagatcgagcaatcttattccaactgccagccgtggccagaacaggtagtactggatggggagcgtgagacgttaggcttgtacctgacggggcacccgatcaaccagtacatcaaagaaattgagcgctatgtcggcggccacaggcttaaagacatgcatccgacagaacgtggtaaaatcaccacggctgcggggctcgtgattgccgcaagggttatggtcaccaagcgcggcaatcgtatcggcatctgtacgctggatgaccgttccgggcgtctggaggtgatgttgttcaccgacgcgctggataaataccagcaattgctggaaaaagaccgcatacttatcgtcagcggacaggtcagctttgatgacttcagtggggggcttaaaatgaccgcccgcgaagtgatggacattgacgaagcccgggaaaaatatgctcgcgggcttgctatctcgctgacggacaggcaaattgatgaccagcttttaaaccgactccgtcagtctctggaaccccaccgctcggggacaattccagtacatctctactatcagagggcggatgcacgcgcgcggttgcgctttggtgcaacgtggcgtgtctctccgagcgatcgtttactgaacgatctccgtggcctcattggttcggagcaggtggaactggagtttgac

SEQ ID NO: 19649 - DNA, 957 bp, Enterobacter cloacae
atgagtctgaatttccttgatttcgaacagccgattgctgagctggaagcgaaaatcgattctctgacagcggtaagccgtcaggatgaaaaactggatattaacatcgacgaagaagtgcatcgtctgcgcgagaaaagcgtagagctgacgcgcaaaatctttgccgatctcggcgcatggcaggtggcccaactggcccgccatccacagcgtccgtacaccctggattatgtccgcctggcgtttgacgaatttgacgaactggcaggcgatcgcgcatacgctgacgataaagctatcgttggcggtatcgcgcgtctggacggacgcccggtgatgatcattggtcatcagaaaggtcgtgaaaccaaagagaaaatccgtcgtaacttcggtatgccagcaccagaaggctaccgtaaagccctgcgtctgatggagatggctgagcgtttcaacatgccaatcatcaccttcatcgacaccccgggtgcataccctggcgtgggcgcggaagagcgcggtcagtctgaagctatcgcgcgcaacctgcgcgagatgtctcgtctgaaggtaccggtcatctgtaccgttatcggtgagggtggttccggcggtgcgctggcgattggcgtgggcgataaagtgaatatgctgcagtacagcacctattccgttatctctccggaaggctgcgcgtccattctgtggaaaagcgccgacaaagcgccgctggctgcggaagcaatgggcatcattgcgccacgcctgaaagagcttaagctgatcgactccatcatcccggaaccactgggtggtgcacatcgtaagccggaagtgatggcagcgtccctgaaagcgcaactgctggctgacctggcagacctggacgtgctgagcaaagacgatctgctcaaccgtcgttaccagcgtctgatgacctacggttacgcg

SEQ ID NO: 19650 - DNA, 772 bp, Enterobacter cloacae
atgaccttacccgctatcgcacaagccgtttcaccgtaccgccagctgctggtggggtttagcggtggcctggattctaccgtgttgctgcatcgtctaaagctttggcgcgatcgggaacctgacgtccagcttcgggcgatgcatattcaccacggattaagtcctcacgcagaggcgtgggtggcgcactgcgaagccttatgtgcggcctgggcgatcccgctcatcgttgagcgagtgacgcttgcggaggaagggctgggcatcgaggcgcaggcgcggaaagcccgctatgccgcgtttgccggggcattacgtgctggagaagcgctggtcacggcccagcatctggacgatcagtgtgaaacctttctgctggcgcttaagcggggtagcgggccggcgggactttctgccatgccggcgcgttctgaatttgccggcacaacgttactgcgtccgctgcttggcgagacgcgtgcctcactggaagcctgggcgcgagaacatcagctgaactggatcgaagatgagagtaaccaggatgacggctatgaccgtaacttcctgcgcctgcgcgtcctcccgcttttgggcgagcgctggccgcatttcgccgacgcggcggcaagaagcgccatgcctgtgcgacgaacaggagttgttgctggatgagctgttgagcgacgagctggctgggctgatttctgccgacgggcgtgccgatcgcaccgatgaaagcgacgagtccggtacgtcgcgccgcggg

SEQ ID NO: 19651 - DNA, 253 bp, Enterobacter cloacae
atgaaaagagtcattgtagccggcacaatcctgctgctcgcggggtgtagtatcaaccgccaggctgaagtcagcagccgcgacgcgccgaacggcatcgtccgcctcgactacggccaggcagcgctgcaaaatgcgtattccgatgagtatgtgaataacggcacggcagcaaaagcgtgtcagagcatggggtatgccactgcctcagcctatggtcagcccattaaaacctgcaccctgacgagcggct

SEQ ID NO: 19652 - DNA, 1512 bp, Enterobacter cloacae
atgcgacagtctgatccgtatctctcttttcgcggcatcgggaaaactttccccggtgttaacgcgctgaccgatatcagcttcgactgctatgccggccaggttcacgccctgatgggggaaaacggcgcggggaaatccacgctgttgaagatcctcagcggcaactatgcgcctacgaccggcacgctggccattcgcggcgaagaggtggcgtttgccgataccacggcggcgctcaatgccggggttgcgatcatctatcaggagctgcacctcattcctgagatgaccgtggcggaaaacatctatttaggacagctcccgcacaaaggcggcgtggtaaatcgttcgctacttaattatgaagcggggctgcagcttaaacacctgggtctggacgtcgatccccagacgccgctgaaatatctctccatcggccagtggcagatggttgaaattgccaaggcgctggcgcgtaacgccagaattatcgccttcgatgagcccaccagttcgctctctgcgcgtgaaatagaaaatctgttccgcgtgatccgcgaattgcgtcaggaaggccgtacgattttgtatgtctcgcatcgcatggaagagatatttgccctgagcgacgccatcaccgtatttaaagatgggcgctatgtgcgcacctttaccgacatgcagcaggttaaccatgaccagcttgttcaggcgatggtcggacgcgagctgggtgatatttatcactggcagccgcgtcagtatggccctgaacgcctgcgcctggacagcgtcaaagcgccgggcgtgcgcacgccgatttcgttatccgttcgcagcggcgaaattgtaggcctgtttggtctggtgggggcggggcgcagtgaattaatgaaaggcctgttcggtggaacccgtattaccgaagggcaggtttctattgacggtgaacgggtcgatatccagaaaccggcccacgcgatcagggcgggcatgatgctctgcccggaagaccgtaaagccgaggggattattccggtgcattcggtacgcgacaacatcaatatttccgctcgccgcaagtttattcgcgcaggctgcctgataaacgatggctgggagtcgagcaatgccgaccaccatattcgctctctgaatattaaaacgccgggtccggaacagctgatcatgaatctgtcaggcggaaaccagcagaaggcgattttaggccgctggctgtccgaagatatgaaggtcattttgctggatgagccgacccgcggtatcgatgtgggggcaaaacacgagatttataacgtgatctatgagctggcaaaacgcggcgtggcggtgctcttcgcctccagcgatctgccggaggtgcttggcgtggccgaccgcattgtggtgatgcgtgaaggcgaaattgccggtgaattacttcatgaacaggcgaatgaacaacaggcgttgaacctcgccatgcctaaagtcagccaggctgtcgcc

SEQ ID NO: 19653 - DNA, 501 bp, Enterobacter cloacae
atggctacccaaacgatgatgcaaaaacttaacgcgcagatgaaccttgagttctacgcctcgaacctgcaccttcacttaagtgcgtggtgtgccgagaatagtcttacggggtctgctacattctttcgctcgcaggcgcaaagtaacgtcacccatatgatgcgtgtcttcaattttctgaaagccgcaggggcaaatcctgtcgttaaagcccttgatgggatcaacgaaaactactcctgcctggaagaactgtttcagaaaacgcttgaagagtatgagcaacgctgcagcacgctcagcaaactggccgatgaagccaaagcgcagcaggacattacgacgctcaaattcttacgtgatatggacaaagaacagcagcaggatggcatgctgctgaagacgctggcggatgagatccatcatgcgcagcaggcgggtttatgtcctgagcaaaccgaccgtcatctgctcgacattgtggcggtacagcaccac

SEQ ID NO: 19654 - DNA, 843 bp, Enterobacter cloacae
atgaatcaaccgaagcggttaatggtgatggcaggcggtaccggtggacacgtgttcccgggactggcggttgcgcaccatttaatggatcagggctggcaggtacgctggctgggaaccgcagaccgcatggaagccgatctggtaccgaagcacggtattgagatcgactttattcgtatttccggccttcggggcaaaggcctcaaggcaatgctgctggcaccggtgcgtatttttaacgcctggcgtcaggcgcgcaccatcatgaagcgctttaagccagatgtggtgctgggcatgggcggttatgtctcgggtcctggcgggctggcggcgtggtcgttaggcattcccgttgtgctgcatgaacagaacggtattgccggactgaccaacaagtggctggcgaaaatcgctaccaaagttatgcaggcgtttcccggcgcgttcccgaaagcggacgtggtgggtaacccggtgcgtgtggacgtgctggcgctgccgctgccggatgctcgcctgacgggccgtgaagggccggttcgtgtactggtcgtcggcggctctcagggcgcacgcattctaaaccagacgatgccgcaggttgccgcaaagctgggggataccgtgacgatctggcaccagagcggaaaaggcgctcagcagaccgttgagcaagcgtacgcaggcgaaggccagccgcagcataaagtcacagagtttatcgacgacatggcggcagcgtatgcctgggccgatgtcgtggtctgtcgttcaggcgcgctgacggtgagcgagatcgccgccgcgggtctgccggcactgtttgtgccgtccagc

SEQ ID NO: 19655 - DNA, 1242 bp, Enterobacter cloacae
atgcgtttatctctccctcgcctgaaaatgccgcgcctgccaggatttgggatcctggcatgggtgtttgcggcgctcaaaggctgggtgatgggctctcgtcaaaaagataacgacagcctggtcatgtacgatcgcacgctgttctggctcacgatggggctggcggcggtcggcttcattatggtcacgtcagcttcaatgcccgtcgggcagcgtctggcgaacgatcctttcctgtttgccaagcgtgatggtctttacatcatcctggcgttctgcctggcgttggtgaccttgcgtctgccgatggagttctggcagcggcacagtacggcgatgctgatcgcctcgattattatgctgctgatcgtactggtggtggggagctctgttaacggcgcatcacgctggatcgcctttggcccgctgcgcattcagcctgcggaatttaccaagctctccctgttctgctacctggcaaactacctggtgcgtaaggtagatgaagttcgtaacaacctgcgcggcttcttaaaaccgatgggcgtgattctggtgctggcggtattactgctggcgcagcctgacctcggtaccgttgtcgtgctgttcgttaccaccctggcgatgctgttcctggcgggcgcgaacgtgtggcagttcatcgctatcatcgggatggggatttcagcggttgtgctgctgatcctcgccgagccttaccgtattcgccgtgtaacctcgttctggaacccgtgggaagatccgttcggcagcggttatcagctgacgcagtcgctgatggcctttggtcgcggtgaagtctgggggcaggggctgggtaactcagtacagaaactggagtatttaccggaagcgcatactgacttcatcttctccattattgcggaagaactgggttatatcggtgtggtattagcgctattaatggtattcttcgtcgctttccgcgccatgtccatcgggcggaaagcgctggagatcgatcaccgcttctcaggattcttagcctgctcaattggtatctggtttagcttccaggcattggttaacgtcggggccgcagcgggtatgctgccgaccaaaggtctgacgttgccgttgatcagttatggtggttccagtctgttgattatgtcgacggccatcatgtttttgttgcgcatagattatgaaacgcgtctggaaaaagcccaggcgtttacacgaggttcacga

SEQ ID NO: 19656 - DNA, 1314 bp, Enterobacter cloacae
atggcagattaccagggcaaaaaagtcgttatcatcgggttgggtctcacggggctctcctgcgtggactttttcctcgcgcgcggcgtgacgccacgcgtgatggatacgcgtgtctctccgccgggtctggacaaactgccggaacaggttgaacgccaccttggtggtctgaatgatgactggctgctggcagccgatttgattgtcgcaagcccaggtatggcgctggcgcatccttcgctgagcgctgccgcggatgcgggcgttgagattgtcggcgatatcgagctgttctgccgcgaagcgcaggcgcccgttatcgccattaccggttctaacggtaaaagcaccgtcaccaccctggtgggtgaaatggcgaaagcggcgggaatgaacgtcggcgttggcggtaacattggtttacccgctctgatgctgctggacaaaggctgcgagctctatgttctcgagctttccagcttccagttggaaaccacctccagcctgcacgctgcggctgcgacgatcctcaacgtgactgaagatcatatggacaggtatccatttggtcttcagcagtaccgtgccgccaagctccgcgtttatgaaaatgccaaagtctgcgttgttaacgccgatgacgcgctaaccatgccggtgcgtggcgcagacgatcgctgtattagcttcggtatcacgatgggggattaccacctgaaccgtcagctgggcgaaacctggctgcgcgtgaagggtgagaaagtgctgaacgtgaaagagatgaagctctcaggtcagcacaactataccaatgccctggcggcgctggcgctggcggatgcagtaggacttccgcgctcctccagcctgaaagcgttaaccacgttttctggtctggcgcaccgtttccagctggcgctggagcacaacggcgtgcgctggatcaacgactccaaagccaccaacgtgggcagcaccgaggccgcgctcaacggtctgcacgttgacggcaccctgcatttactgctgggcggcgacggtaaatcagcggatttctcctccctgaagccgtatctcgccggagataatatccgcctgtactgcttcggccgtgacggcagcgagctggctgaactgcgccctgaggttgccgagcaaaccgaaaccatggaacaggcgatgcggctgattgcccctcgcgtgaagccaggcgatatggtgctgctctctccagcctgcgccagcctcgatcaattcaagaatttcgaacagcgtggtgatgtctttacccgcctggcgaaggagttaggc

SEQ ID NO: 19657 - DNA, 1080 bp, Enterobacter cloacae
atgttagtttggctggccgaacatttggtcaaatattattcaggctttaacgtcttttcgtatctgacgtttcgcgccatcgtcagcctgctgactgcgctgttcatctcgttgtggatgggcccgcgcatgattgcccgtctgcaaaaactctctttcggccaggttgtgcgtaacgacggtccggaatcgcacttcagcaagcgcggcacgccgacgatgggcgggatcatgatcctgaccgccatcgtcgtttccgtgctgctgtgggcgtatccctccaacccgtacgtctggtgcgttctgacggtactggtgggttacgggatcatcggttttgttgatgattaccgcaaagtcgttcgcaaagatactaagggcctgatcgcgcgctggaaatatttctggatgtcggtgatcgcgctgggcgtggccttcgcactgtatctggcaggcaaagacacgccagccaccgagctggtcgtgccgttctttaaggacgtgatgccgcagctggggctgttctacatcctgctggcctactttgtgattgttggtaccggcaacgccgttaacctgaccgacggcctggatggtctggcgattatgccaaccgtctttgtggccgccggttttgcgctggtggcgtgggcgaccggtaacatgaactttgcaaattatctgcacatcccttatctgcgccacgcgggtgagctggtgatcgtctgtacggcgattgtcggcgcggggctgggcttcctgtggttcaacacctatccggcgcaggtctttatgggggacgtcggttctctggctttgggcggtgcgctcggcattatcgccgtactgctgcgtcaggagttcctgctggtgatcatgggcggcgtgtttgtggttgaaaccctgtcggtgattttgcaggtcggttccttcaagctgcgcggtcagcgcatcttccgtatggcgccgattcaccaccactatgaactgaaaggctggccggagccgcgcgtgattgtgcgcttctggattatttcgctgatgctggtgctgattggcctggcaacgctgaaggtacgt

SEQ ID NO: 19658 - DNA, 1356 bp, Enterobacter cloacae
atgattagcatcacgttaagccaggccgctgctattctgcagggcgacctctacgggcaagacctgaccattgatgccgtaacgacggacacccgtaaaatcaccgcaggctgtctgtttgtggcgctgaaaggcgagcgttttgacgcacatgattttgcggaacaggccaaagagaacggcgctggtgcgctgctcgtcagccgcaggctcgatatcgatctgccacaaattgtggtgaaagatacgcgtctcgcgttcggtgagctggccgcctgggttcgtcagcaggtccctactcgcgttgtcgccttgaccggttcatcaggcaagacgtcggtgaaagagatgacggcggcgatcctcagccagtgcgggaatacgctttataccgcgggcaacctcaataatgacatcggcgtgccgatgacattactccgtctgactaaagaacacgaatttgcggtgatcgagttaggggcgaaccaccagggcgaaatcgcctggaccgtgagcctgactcgcccggaagccgcgctggtgaataacctcgcggcggcgcatctggaaggttttggctcgctggaaggcgtagcgaaagccaaaggtgagatttacaccggcctaccggatgacggtatcgccatcctgaacgccgacaacaacgactggctgaactggcaaagcatcattggttcgcgtaaaacctggcgcttctcgccgaatgcggccaacagtgattttaccgcgaccaatatccacgtgacgtcgcacggtacggagttcaccctcaccaccccaacgggtggcattgatgtgctgctgccgctgccgggtcgccataacatcgccaatgcgcttgcggcggcggcgttgtcgacggcggtgggcgcgtcgcatgaagcgattaaaaccgggctggcgaacctgaaagccgtgccggggcgtctgttcccgattcagctttcggaaaacaagctgctgctggatgactcctacaacgcgaacgttggctcaatgacggcggcggtgcaggtgttatctgaaatgcctggctatcgcatcatggtggtgggcgatatggcagagctgggcgacgaaagcgaagcctgccatacccaggtcggtgaagcggcgaaagcggcggggctggactgcgtgctgagcgcaggaaaactgagccaggcgattagccatgccagcggcgttggcgagcattttgctgataaaagcgcgttgatagcgcgccttaaggcgttgattacagaaaaacaaatcgtgactgtgttagtgaaaggttcacgtagtgccgccatggaagaggttgtgcacgcattacaggagaacgggacatgt

SEQ ID NO: 19659 - DNA, 1485 bp, Enterobacter cloacae
gtggcagatcgtaatttgcgcgaccttctcgctccgtgggtgccaaatgcaccggagcgagcactgcgagagatggtactggacagccgcgtggctgcttctggcgatctttttgtggcggtggtcggtcatcaggcggacgggcgtcgttatatcccgcaggcgattgcgcaaggtgtggctgccattattgctgaggccaaagatgaggcaaccgacggtgagatccgtgaaatgcacggggtgccggtcatctatctcagccagttaaacgagcgtctttccgcgctggcggggcgtttttatcacgaaccttccgaccagctgcgcctggttggcgtgacgggtaccaacggtaaaaccactaccacgcagctgatggcgcagtgggcccaactgctgggtgaaaccggtgcggtgatgggtaccgtgggtaacggcctgctgggcaaagtgagcccgacggaaaacaccaccggctcggcggtagacgtacagcatgtgcttgccggtctggcagggcagggggcaaccttggctgcgatggaagtctcttcgcacggtctggttcagcaccgcgtcgcggcgctgaaatttgctgcttccgtgtttaccaacctgagccgcgatcatcttgattatcacggtgatatggagcattacgaagccgcgaaatggctgctgttctctactcaccattacggacaagccatcatcaacgccgacgacgaagtgggccgccgctggctggcgaaactgccggatgcggttgcagtgtcgatggaagaccatatcaatccgaactgccacggccgctggctgaaggcggttgaggtgaattatcacgacagcggagcgacaatccgctttgcctcttcctggggggaaggtgaaattgaaagccgcctgatgggcgcctttaacgtcagcaacctgctgctggcgctggcaacgttgctggcgctgggttatccgatggctgaactgctgaaaacctcagcgcgtctgcagcctgtttgcggccgtatggaagtgttcagcgcgccgggcaaaccgaccgttgtggttgattatgcccacacgccggatgcgctggaaaaagcgctggaggcagcgcgcctgcactgcacagggaagctctggtgcgtgtttggctgcggcggcgatcgcgacaaaggcaaacgcccgctgatgggggctattgccgagcagtttgcagatattccggttgtgaccgatgacaacccgcgtaccgaagagccgcgcgccatcattaatgacattctggcgggcatgctggacgcgggccgcgctcgcgtggtggaagggcgtgcggaagccgtgaccaacaccatcatgcaggcgcaggagaatgatgttgttctgctggcgggcaaaggccatgaagattatcagatcgttggcaatcgccgtctggactactcggaccgcgtaacggcagcacgcctgctgggagtcgtggca

SEQ ID NO: 19660 - DNA, 1714 bp, Enterobacter cloacae
cgacgcatgaaagcagcggcaaaaacgctaaaaccaaaacgtcaggaagaacaggccaactttgtcagttggcgttttgcgttgctttgcggctgcattttactcgctctgggttttctgctgggacgcgtggcctggctgcaaatcatcgcccctgacatgctggtgcgccagggcgacatgcgctccctgcgcgtccaggaagtgtcgacatcccgcgggatgatcaccgaccgttcgggtcgtccgctggcggtgagcgtgccggtgaaggcgatctgggccgatcctaaagaactgcatgatgcaggcgggatcacgcttgataaccgctggaaggcgcttgcggacgcgctgaagatgccgcttgaccagttagcttcacgcgtgaataccaacccgagagggcggtttatctatctggcacgtcaggtgaaccctgacatggcggactacatcaaaaaattgaagctgccggggatccatctgcgtgaagaatctcgtcgttactatccttccggcgaagtgactgctcacctcattggctttactaacgtagatagccaggggattgaaggcgtcgaaaaaagctttgataaatggctgaccggccagccgggcgaacgcattgtgcgtaaagaccgctacggtcgcgtgatcgaggatatttcctctacggacagccaggcggcacacaaccttgcgctgagtatcgatgagcgcttgcaggcgctggtttaccgcgagctgaacaacgccgtggccttcaataaagcggaatcgggcagtgccgtgttagtcgacgtcaacacgggtgaagtgctggcgatggccaatagcccttcctacaaccctaacaatctcaccggtacgcagaaggatgttatgcgtaaccgtaccatcaccgacgtattcgaaccgggttcgaccgttaagccgatggtggtcatgactgcactccagcgcggtatcgtcaatgaaaacaccgtactgaataccattccataccgaattaacggccacgaaatcaaagacgtggcgcgctacagcgaattgaccctgaccggggtgttgcagaagtcgagtaacgtcggtgtttcaaagctggcgttagcgatgccgtcctcagcgttagtagagacttactcacgttttgggcttggaaaggcgaccaatttggggttggtcggagaacgcagtggctatatcctcaaaaacaacggtggtctgacatagagagggccaccttctctttcggctacgggctaatggtgacaccgttacagttagcgcgagtctacgcaacgatcggcagctatggcgtttatcgtccgctgtcgattaccaaagttgatccaccggttcccggcgagcgtatcttcccggaatcaaccgtccgtactgttgttcatatgatggaaagcgtagcgctgcccggcggcggcggcgtgaaggcggcaatcaaaggttatcgcatcgccatcaagaccggtacggcgaaaaaagtagggccggacggccgctatatcaataaatacattgcctataccgcaggccgtagcgcctgcaagcaatccgcgttttgcgctggtggtcgtgataaacgatccacaggcgggtaaatagctacggcggcgccgtctccgcgcctgtgttcggggctatcatgggcggcgtgttacgcaccatgaacattgaaccggatgcgctggcg

SEQ ID NO: 19661 - DNA, 1553 bp, Enterobacter cloacae
agttaccttttagcgttagatgcagggacaggcagcgttcgcgccgttattttcgatttacagggcaaccagattgccgtcggccaggccgagtggaagcacctgagcgtggagaacgtgccgggatcgatggagttcgacctcgagaccaactggctgctggcctgccggtgcattcatcaggcgctggaacgtgcgcgcctgagcgcggcggatattaagtctgtcgcctgctgctcgatgcgcgaagggatcgtgctgtatgaccgcaacggcgaggccatctgggcctgcgccaacgtcgacgcccgcgccagccgcgaggtggccgaactcaaagagatccacgacgaccgttttgaatccgaggtgtatgaagtttccggacagacgctggcgctgagcgccatgccgcgcctgctgtggctggcgcaccatcgcccggatatttaccgcaaggccgcgaccatcaccatgatcagcgactggctggcggcgaagctctccggcgagctggcggtcgacccgtctaacgcggggcacaaccggcatgctggatctcttctctcgcgactggcgtccggcgctgctcgacatggccgggctgcgcgccgatatcctctccccggtgaaagagaccggtaccgtgctgggcgcgattaccaaagaggccgcgcagcagagcggtctgcgcgaaggcacgccggtggtgatgggcggcggcgacgtgcagctgggctgtctggggctgggcgtggtccgcgcgggccagacagcggtactgggcggtaccttctggcagcaggtggtcaatctgccgcaggtgcgcaccgaccccgacatgaacatccgcgtgaacccacacgttattcccggtatggcgcaggcggagtcgatcagcttcttcaccgggctgaccatgcgctggttccgcgacgccttctgcgccgaggaaaagctgattgccgagcggatggggatggacacctattccctgctggaagagatggccagccgcgtgccggcgggctcccacggggtgatgccgatcttctccgacgcgatgcatttcaagcagtggtaccacgccgcgccgtcgtttattaacctctccatcgacccggaaaagtgcaacaaagcgacgctgttccgcgccctggaggagaacgcggcgattgtctcggcctgcaacctggcgcagatctcgcgcttctccggcgtgacgtttgaaagcctggtgtttgcgggcggcggggctaagggcgccctgtggagtcagatcttaagcgacgtcaccgggctgccggtgcgcgtgccggaagtgaaagaggcaacggcgctcggctgcgcgattgccgccggcgcgggcgcggggctgtttgccgatatggcctcgacgggcgagcggctggtgaagtggagccgcgagttcacgccgaacccgcagcaccgcgagctgtacgacggcatgatgcagaaatggcaggcagtgtacgcggaccagctcgggctggtggacagcgggctgacgacgtcgatgtggcaggccccgg

SEQ ID NO: 19662 - DNA, 996 bp, Enterobacter cloacae
atgatacgtttcgcagtcattggaacgaactggatcacgcgccagttcgtcgacgccgcccacgaaaccggcaaactgaaacttaccgcagtctattcccgcagccttgagcaggcgcagagttttgccaacgattacctcgttgagcatctcttcacctcgcttgatgacatggcgcaaagcgacgctattgacgcggtgtatatcgccagcccgaactccctgcacttcccgcaaacgaagctgttcctcagccataaaaagcatgtgatttgcgagaagccgctggcgtcgaatatccaggaagtggaagcggccattgcgcttgcccgcgaaaaccaggtggtgctgttcgaagccttcaaaaccgccagcctgccgaatttcctgctgctgcagcagtccctgccgaaaattggcaaggtgcgtaaagcctttatcaactactgccagtactcgtcgcgctaccagcgctatctcgacggcgagaacccgaacacctttaatccggccttctctaacggctcgattatggacataggtttctactgcctggcctctgccgtggccctgtggggcgagccgcatggcgtgacggccaccgccagcctgctggagagcggcgtggatgcacacggtgtagcggtgctggattacggtgatttcagcgtcacgctgcagcactccaaggtgagcgattccgcgctgccgagcgaaattcagggcgaagcgggctcgctggttatcgagaagatctccgagtgccagaaggtgagttttgtgccgcgcggcggcaaagcgcaggagctgacgcagcctcagcatattaacactatgctctatgaggcagaggtcttcgcccgtctggtggaagacaacgaagtgaatcacccaggccttgcggtgagccgcaccacggcgaagctgcaaacggagatccgccgtcagacaggcgtggtgttcccggctgacggcgtgagtgcggaagctatcgcg

SEQ ID NO: 19663 - DNA, 966 bp, Enterobacter cloacae
atgcattctgtcggcactccaatgttgtggggcggattcgcggttgtcgtgctcatcatgctggcgatcgacctctttttgcaggggcgtcgcggcgcgcacggcatgaccatgaaacaggctgcggcctggtcgctggtgtgggtcaccctctccctgcttttctgtgccgccttctggtggtatctggcctcgaccgaaggccgcgcggtggccgatcctcaggcgctcgccttcctcaccggttatctgattgaaaaagccctggcggtggataacgtcttcgtctggctgatgctgttcagctatttcgccgtgcctgcggccctgcagcgccgcgtgctggtatacggcgtgctgggggcgatcattctgcgtaccatcatgatcttcgccggcagctggctgattacccagttcgaatggctgctgtacgtcttcggcgcgttcctgctgttcaccggggtcaaaatggcgctggcgaaagaggacggctccgcgattggcgatcgcccgctggtgaagtggatccgcggtcatctgcgcatgaccgacaagatcgagagcgagcacttcttcgtgcgcaagaacggcctgctgtttgccaccccgctgctgctggtgctgattctggttgagctgagcgacgtgattttcgcggtggacagcattccggcgatcttcgcggtgaccaccgacccgttcatcgtcctgacctcaaacctgttcgccattctcggcctgcgtgcgatgtacttcctgctggcgggcgcggcggagcgcttctcaatgctgaagtacggtctgtcggtgatcctggtgtttatcggtatcaagatgctgatcgtcgatttctaccatatcccgatcgccatttcgctcggcgtggtgtttggcattctgatcgtgacgctgattatcaatacctgggttaaccgccagcacgataagaagcagcaggtggaa

SEQ ID NO: 19664 - DNA, 1376 bp, Enterobacter cloacae
atgtgcataggcgtaccgggacaaatccattccattgacgggaaccaggccaaagtggaggtctgcggcatcctgcgcgacgtggacctgacgctggtgggcagcagcgatgaaacgggcgcatcgcgtctcggccagtgggtgctcgtccacgtagggtttgccatgagcgtgattaacgaagcggaagcccgcgacacgctggatgcattgcaaaacatgtttgacgtggagcctgatgtgggcgcgctgctgtacggcgaggagcgttagccatgcgttacgttgatgaataccgcgcgccggagcaggtgctgcagcttatcgggcacctgaaaacgcgcgcggcgctgctggattacacggcggaaaacccgttgcggatcatggaggtgtgcggcggacacacgcacgccatcttcaaatttggcctcgaccagctgctgccggagaacatcgagtttatccacggccccggctgcccggtgtgcgtgctgccgatggggcgcatcgacagctgcatcgaaattgccagccagcccgacgtcattttctgcacctttggcgacgcgatgcgcgtgccggggaaaaacggctcgctgctgcaggcgaaagcgcgcggggccgacatccggatcgtctattcgccgatggatgccctgacgctggcggaggacaaccccgcgcgcagggtggtgttttttggcctgggatttgaaaccaccatgcccgccaccgccatcacgctgcagcaggcgaaagcgcgcggcgtcgggaattttttcttcttctgccagcacattacgctcatccccaccctgcgcagcctgctggaagagccgggaaacggcattgacgcctttctggcaccgggccacgtcagcatggtgattggcacagacgcctacgattttatcgctgaacagtacaatcgtccgttagtggtcgctggtttcgaaccacttgatctactgcaaggtgtgaccatgctggttgagcagaaaatagcggccctgagtgcggtggaaaaccagtaccgccgcgtggtgccggatgagggaaatgaacgggcgcagcaggcgatcgccgacgtgttcagcgttgagggcgacagcgagtggcgtggtctggggctgattgccgaatccggcgtgcgcctgacgtcagcctatcgcgcgttcgacgccgaagcgcatttccgcccgcagccgcagcaggtttgcgacgatccccgggcccgctgcggcgacgtgctcaccggtaaatgcaaaccgcatcaatgcccattatttggcaatacctgtaacccgcaaacggcgtttggcgcgctgatggtctcctccgaaggggcgtgtgccgcgtggtatcagtatcgc

SEQ ID NO: 19665 - DNA, 894 bp, Enterobacter cloacae
atgagtaaaattggcattaacggctttggacgcattgggcgccttgtactgcgtcgccttcttgaaacccaggacagcaataccgtcgtcgccatcaacgacctcacctcaccgaaagtgctggcctacctgctcaggcatgattccaactacggtggcttcccgtggagcgtcgatttcaccgaggatgcgctgattgtggacggtaaaaccattgcggtgtacgccgaaaaagaggcgaagcacattccgtggaaagccgcaggagtggatatcgtcgtggagtgcaccggcttttatacttcagaagagaaatcacgggcgcacctggacgccggcgcgaagaaagtgctgatctctgcgcccgcgggtgagatgaaaaccatcgtctacagcgtgaatgacgacaccattgacgccagtgacaccattatttccgtcgcatcctgcaccaccaactgcctcgccccgctggcgaaagccctgaacgatgcgtttgaaataaaagtgggcaccatgaccaccattcacgcctataccggtacgcaggcgctggtggatggcccgcgcgggaaagaccttcgcgcttcacgggcggcagcagagaatatcattccccacaccaccggtgccgcaaaggctatcggtctggtgatccctgcgctcagcggcaagctgaaaggccacgcgcagcgcgtgccggtaaaaacgggttcggtcaccgagctggtggcgattctcggcaagaaagtgaccgttgaggagatcaacgccgcgctgaaaaaggcgacgcagggcaataaatcgttcgggtataccgacgaagagattgtgtcgtccgatgtgattggctcgcattacggttcggtgtttgacgccacgcagacggaggtg

SEQ ID NO: 19666 - DNA, 1818 bp, Enterobacter cloacae
atgacgatgcaggcgctactgctggacgcggttgaacaacgattattgcgtcacctggatgtgcagttcgccatgatggtggcaggcgaggagcctgccgtcatgcttgccgccgccattctgagtaaagacgcgggggaagggcacgtatgtctgccgctgtcgcgtctggcggtggatgagaaaatgcctccggctttacaggcgtgtttcgcgctgctgggtgacgcagtggactggcaggggatattactcggctcgcctgccgtgagcggagccgataccgggacgccaatgatccttgtcggcgagcgtttgtatcttaaccggctgtggcgtaacgaactgacggtagcgcgcttcttcagcgagaccaacgccccgcttccctgcgatgaagtaaagctccggcaaacgctggatacgctgtttaccgctgacgacgcgacagactggcagaaagtggcggcagccgtggccttaacgcgacggatctcggtgatttctggcggcccgggcaccgggaaaacgaccactgtggcaaaactgcttgccgcgctgattcagctctcgggtgagcaaaagtgccgtattcgcctggcggcccccaccggtaaagccgcggcacgtctgacggaatcgttaggcggcgcgctgcaaaaactgccgctaaccggggagcagcttgcgcttttccccaatgaagccagcacgctgcaccgtttgcttggcgcacagccgggtagccagcgtctgcgctatcatgccggtaatccattgcaccttgacgtgctggtggtggatgaagcgtcgatgattgacctgacgatgatgtcgcgtttgatcgatgcgctaccgccgcacgcgcgtgtcatattcctcggcgatcgcgaccagcttgcctccgttgaggcgggagccgtattgggggatatctgcacctatgccagcctgggatataccgctgaacgcgcgcaggagttagcccgtctcaccggatgttcgctcacctctgaaaaccattcgctggcaggggcgctgcgcgacagcctgtgtctgctgcaaaaaagctaccgtttcggcagcgactccggcatcggccagcttgcggcagcggtgaaccggggcgaccggcgcaccaccactgcggtgtttgacggtacctttacggatatagagaaaaaatcgctgcaaagcggggaagagtatcaggcgatgctggacgacgccctgcaggggtaccagcactttctgacgggcgtacaacagcaaagtacgccggagcaggtcattgccgcgtttggcgagtatcagctgctctgtgcgctgagggaaggcccctttggcgtccggggtcttaacgacaggctggaacagctgctggcgcaaaaacgcaaaattaaccgtaccccgcactcgcgctggtatgaagggcggccggtgatgatctcccgcaacgacagcgcgctgggattgtttaacggggatatcgggattgcgctcgactgcggtcagggcctgcgcgtctggttccagatgccggacgggaccgtgaagtccttccagccgagccgtttgcccgagcatgaaaccgcatgggcaatgacggtgcataaatcccagggctccgagtttaaccatgcggcgctgatcctgcccacgcagctttcacccgtcgttacccgcgagctgatctataccgccattacgcgcgcgcgtcagcgcctgtcgctctataccgatgaacgggtgctggtgcaggcgatcgccacccgaacggagcgccgaagcgggctgggcgcgatatttgagtcactc

SEQ ID NO: 19667 - DNA, 3503 bp, Enterobacter cloacae
tcccttgatcccttacgtttacctctgcagggtgaacgattgattgaagcctcagcgggaacgggaaaaaccttcactattgccgccctgtacctgcgtctgctgctggggcttggcggcaacgccgcttatccacgccctttgagcgtggaagagttgctggtggtgaccttcaccgaggctgccaccgctgagctgcggggccgtattcgcagcaatatccacgagctgcgcatcgcctgtctgcgtcagagcacggataaccctctctacgcgagccttctggaagagattgccgataagcaacaggcagcccagtggctgctcctcgctgaacggcagatggatgaagcgtccgtcttcaccattcacggtttttgccagcgcatgctgagcctgaatgcatttgaatccggaatgctgtttgaacagcagctcattgaagatgaatccgtgcttcgctatcaggcgtgcgcggatttctggcgtcgccactgttatcctttagagcgcgatatcgccgaagcggtacatgcgctgtggaagggcccggaggcgctgctgcgcgctatcgatcgttacctgcagggcgaagcgccggtcatcaaatccccgccgccagcggatgaaaccctggcctcacggcatgaaaaaatcatcgcgcaaattgccgacatcaagcaaaaatggatggagtccgttggcgagattgacgcaatcatcgaaaattccgggattgaccgacgcaagtttaaccgtggcaaccagggaaaatggatcgacaagatcagcgcctgggcgcaggaggagacgcgaggctaccagctcccggacgcgctggagaaattctcccggcgtttcctggttgagcggaccaaatccgacggcattgtgcctgagcatcccctgtttgtggcgattgaaaccctgctggctgagcccttaacgctcaacgatctgatgatcactcgcgccatgacggaaattcgcgaagccgtcgcgcgtgaaaaacgccgccggggtgagctggggtttgacgacatgctgagccgcctcgatgcggcgctgtgcagtgaaaatggcgaagcgcttgccgccgcgatccggacccgcttcccggtggcgatgattgacgaatttcaggataccgaccctcaacaataccgcattttccgccgtatctggcgccagcagcccggtaccgcgctgctattaatcggcgatccgaaacaggccatctacgccttccgcggtgcggatattttcacttacatgaaagcccgtagcgaagttgacgcgcactacactctcgatactaactggcgctcctctcccggcatggtggaaagcgtcaatgcgctcttcagccgcatggatacggcgtttatgttccgggagatcccgtttcagccggtaaaattcgccgagaaaaatgcctcgttgcgcttcgagttcaacggcgagacacagcctgccatgaacttctggctgctggacggggaaggctgcggcgttgccgactatcaaaatgccatggcccagcactgtgccgcacaaatccgcgactggctcagtgcgggcgcgcatggtaaagcgctgctgtggaagggggataaaccaaacccggtaaaggcatccgatatcacggtgctggttcgcagccgtcaggaagccgcgctcatccgcgacgccctgacgttactaaatatcccctccgtctacctctcaaaccgcgacagcgtctttgaaacgctggaagcgcaggagatgctatggctgctgcaggccgtgctggctccggagcgggaaagcacgctgcgtagcgcactggcgagtgcgatgctcgggctgaacgcgcgggatatcgatgcgctcaacaatgacgaagccgcgtgggatgccgtggtagaagagtttgttcgctaccgcgaaaaatggcagaagcgtggagtcatggcgatggtgcgcgagctcatggcacagcgccacattgccgagaatatgctggcgacagcgggcggcgagcgccgtttgaccgatattttacatatcagcgaactgctgcaggaagccggtacgcagctggagagcgaacacgccctcgtgcgctggctggcgcagcagattgccgatccgaacagtaattcgtccagccagcagatgcgccttgagagtgataaacatctggtgcagattgtcaccattcacaagtcgaaaggcctggaatatccgctggtctggctgccgtttatcgccaattatcgcgtgcaggatcaggccttttaccacgatcgcgaatcttttgaggcggtgctcgatctcagcaacgcggagtccagcgttgagctggctgaagccgagcgtctggcggaagacctgcgcctgctttacgtggcgctgacccgttcggtctggcactgcagcctgggcattgcgcctctgttccgtcgccgtggcgaaaagaccggggagagcgattttcatctgagcgcgctggggcggcttattcagcatggtgaacccaaagacgcggcgggcctgcgccagtgcatcgaatctctttgcacagagcatgttgccctgcatattccgtcgcagcccgacaacagccgctggcagatgccggagctgggtgagtcagagctccatgcccgccaggttgtacgtaccattgccgacgactggcgcgtcaccagctactccggtttgcagcagcacgggcagagtattgcgcaggatctgatgccaaaactggacgtggatgccgcaggagccggtagcgtacctgttgagccggtgtcacgccgcaccagttcccgcgcggcgcctcgccgggcacgtttttgcacagcctgtttgaagagctggattttacccagccggtatccgaagagtgggtgctgaagatgttacagagtggcggctacgacgcacagtggcagccggttctcaccgactggatccgcgctgtactgcacgcgccgctcacgacgcaggggatctcgctgaaccagttgaccgccaaagataagcaggtggagatggagttttatctccccatcgccagcccgctcagggccggggcgcttgatacgctgatccgcgagtacgatccgttatccgccggatgtccgccgctgaacttccgccaggtgcaggggatgctcaaaggctttatcgacctggttttccgccacgaagggcgctactacctgctggattacaaatcaaactggctgggtgaaagcagcgaagcctacacccaggacgcgatggcctcggcaatgcaaatgcatcgctacgatctgcagtaccagctttacacccttgcgctgcaccgttacctgcgccatcgcatggccgattactgctacgaagcgcattttggcggcgtaatttacctgttcctgcgcggagtggatgctaacgacacgcattccggcgtctttagcacgcgtccggctgcggaactgattgaaaaaatggataacctgtttgctgca

SEQ ID NO: 19668 - DNA, 1548 bp, Enterobacter cloacae
ttgaaaaaattaaagattaattatctgctcatcggcattgtaacgttgctgctggcagtggccctctggccttccatcccctggttcggcaaagccgaaaaccgtatcgccgccattcaggagcggggggaattgcgcgtcagtaccctcaactccccgctgatttacagcgacgtcaacggcaaaatcattggtctggattatgaactggcacaacagttcgccgactatcttggcgtgaagcttaaaatcaccgtccgccagaatatcaacgagctgtttgacgacctcgataacgacgatgccgatatgctcgccgccgggctggtgtataacagcgagcgcagcaagaactaccagccaggcccgacctactactccgtttctcagcagctggtttaccgcgtcgggagcctgcgcccgcgctcgctggcttcaattaacgatcggcagctgacgattgcgcccggccacgtggtgattgacgatctgcgggagctcaaggagaagaaatatcccgacctgggctggacggtggatccgaaactcggcacgacggagctgctggagcaggtaaaagatcagaaggtgccctacaccatcgccgattcggtcgcgatcagcctgttccagcgggtgcatccagaaatcgccgtggcgctcgacgtcaccgacgagcagcccgtgacctggtttagccagcttgatgacgatcagaccttctctgccgcgatgcttgatttcttcaacaccatcaatgaagacggtaccctggcgcgtctcgaggagaagtacctcgggcacggcgatgactttgactacgttgatacccgcagcttcctgcgagcagtagacagcgtcctgccggacctgcagccgttgttcgaaaaatacgcccaggagattgactggaagctgctggcggctatttcgtatcaggaatcccactgggatacccaggccacgtcgcccacgggcgtacgcggtttgatgatgttaaccaaaaataccgcactgagcctgggcgtcaatgaccgtaccgatgccgaacagagcatcagcggcggcgcgcgctacctgcaggatatgatggccaaagtaccggaaacggtgccggaagaagagcggatctggtttgcgctggcggcctacaatatgggctacgcgcatatgcttgatgcgcgagcgttgacggccaaaacgaaaggtaacccggacagctggtcagacgttaagcagcgcctgccgctgctgagccaaaagccatggtataacaagctgacatacggctacgcgcgcgggcatgaagcctacgcctacgtggaaaatatccgtaaatatcagattagcctggtcgggtatctgctggagaaagagaaagaggcgacggaggctaaacagctggctcaaagctacccggtcgtggcgccggacgagcttaatcgtccgacagcttcaattctgccttttgctgctttttctgctgacggcgcattcgaaagaaatcgcttaatagccccgaacactctggtgcaagcaccccaccga

SEQ ID NO: 19669 - DNA, 1359 bp, Enterobacter cloacae
atggacaaaacagcagcgctcgccagcgatatcctgcaggggatcggtggggaaaaaaatattcagcgtctcgaaaactgcatgacgcgcgtgcgcgtcgaggtgcataacgacgaccagcttgacgtgccgcgcctgaagcaactgtccggcgtcagcggctacgtgaaacaagggcagcagcaccagctgatcgtcgggccggggaaagcggcgcaggttgttgatgccatgcgcgcgctgatgggcgttagcgcgagcgcgtcgatggacgatgcggagcgcaccaaagcgcaggcaaaggccaaatacaaagcccccatgagcgatgcgctgcgtcagttggcaaacgtcttcattccgctgatcccggcgtttattgcctcaggcctgatcaccgggatcatcaacatcctcaagcgaccggatattgtgggggatttcgccacgcagtatccgaacctgctgggggttctcgggatcttcggcagcgctgttttcgccatcatgaacattctggtcggggtgaataccgcgaaggtgtttggcggatcgctggcgatgggcggggtcatggcgggcatcttgtccagcccgcagctggcgcagatcacgctgtttggcgaggcgctccagccgggccgcggcggggtgatcgccgtgctgctggtggtcatcctgatgtgctggatcgagaaaaggctgcgcgcggttctgcctggctcgatcgagctgatcctcaacccgctgttgaccaccttaattaccggtagcgtagcgattgtggccctccagccgctaggcgggtggatctccgaagccatcgctcacggtgcgtctctggctatcgaccgaggcgggctgctggttggcgctgtgctttccggtaccttcctgccgctggtgctgaccggcctgcaccaggggctggtgccgatccacgtcgagcttgtacaggcgcacggctataacgcgctgctgcctatcctgtcgatggcgggggtggggcaggtcggcgcggcaattgccgtactgatgaaaacccgcaacgcgcgtctgaaaaaaatgattaaaggcgcgctcccggtcggactgctcggcatcggcgagccgctgattttcggcgttacgctgccgctgggtaaaccgttcctcgccgcctgtctggggggcgcggtaggcggggcgctgatcagctactggaaagtcgctaccgttatcacctttgggctttccggtttaccgctggcattaaccatcgtgaccggaaaagtgatgctctatctgttaggctatttagtagcggtgatcgccgggttcctgtttacctggctgttaggtttcaacgacccagaggag

SEQ ID NO: 19670 - DNA, 893 bp, Enterobacter cloacae
atgaatcttggctcacttgtttctgaaacgcgtaacccacaaaccatggatctggatgcgctctccaccctggagctggttaaccgctttaatcaacaggatacgctggtcgcgcaggcagtgaaagagactttacccgaggtcggcgaaagcggtcgatgcggcggcggaagcccttaaggccggcggtcgcattatctacatgggagcgggtacccagcgggcgtcttggggttctggatgcgtcagaatgtccgcccacctttggggtgccgcacggtctggtcgttgggctgattgccggtggacccggcgcgctgctgaaagccgttgagggagcggaagacaataaacagctgggcgaggatgacctgaaggatctgaatctgaccgcgaaggatctggtggtcgggctggcggcatccgggcgcaccccgtacgtcattggcgggctggaatacgccaaccggacgggttgcacgacggtcgccatctcctgtaatccgggttccccgattgcgcaggtggccgctatcgctatctctccggtagtcgggccggaagcgctcaccggctccacgcgcctgaaatccgggaccgcgcaaaagctggtgctcaatatgatctccaccggcgcgatggtgaagttcggcaaggtttatcagaacctgatggtggatatgcaggccaccaacgtcaagctggtggacagagcctgccgcatggtgatggaggcgacaggcgcaggccgtgaagaggcagaagcggtgctcaggcagaccgctcacgatgttaaaccggccattctgatgatcctgagcgggctggatgcggcggccgcgagggccaaactcgctgcgcataacggcttcttacgggcggcattagaaaac

SEQ ID NO: 19671 - DNA, 926 bp, Enterobacter cloacae
atggaatataaaattcattcaggcgagcaaaattcgtatttgcgcagataatcacattttcgccaggagaccctatgaactgtttaattcgcattcgccagcgttatgcaggctttgcccaaagcgacaagaagctggcggattttctgctttctcaacccgatcatgcacgccacctcagctcgcagcagctggcgagtgaagccggcgtgagccagtccagcgtggtgaagtttgcccagaagattggctttaaggggttccccgccctcaagctggcgatcagcgaacgcttggtgagcaaccccaacccgcagtcaatgccggtgcataatcagatccgcggcgatgacccgatgcggctggttggcgaaaagctgatcaaagagaacgtggcggctatgcacgcgacgctcgacgtgaatacggaagagaagctgctggagagcgtacgatagctgcgcggcgcgcggcgcatcatcctgaccggtatcggggcgtccggacttgtggcgcgtaactttggctggaagctgacgaaaattgggcttaacgccatcgtcgagcaggatatgcacgccctgctggcgaccgtacaggcgatggatcctgacgatctgctgctggctatctcctactccggcgagcgtcgagagatcaacatggcaaccgatgaagcgctgcgcgtcggcggtaaaattctggcgatcaccggttttaccccgaatgccctgcagcagcgggcaacgcgctgtttatataccattgccgaagagcaggccacgcgcagcgcggctatctcgtccaccagcgcgcaaatgatgctgacggacctgctgtttatggcgctggtgcagcaggatctggagcgcgcgcccgaacgcattcgtcacagcgaagaactggtaaagaaactggtttgacgc

SEQ ID NO: 19672 - DNA, 258 bp, Enterobacter cloacae
atggcgctgttaattaccaaaaaatgcattaattgcgatatgtgcgagcccgaatgcccgaaccaggcgatttcgatgggcgacagcatttatgagattaacagcgaccgctgcacggaatgcatcggccactatgaaacgccgacctgtcagaaagtgtgcccgatcccgaataccatcctgaaggatccggcccacgttgagagcgaagagcagctatgggataaatttgtcctgatgcaccacgcggacaaactt

SEQ ID NO: 19673 - DNA, 378 bp, Enterobacter cloacae
atggccattctgggcttaggcaccgatatcgttgaaatagcccgtattgaagcggtgatcgcccgtagcggcgatcgcctcgcaagacgcgttctgagcgataacgagtgggccatctgggaagcgcatcagcagccggtgcgttttctggcaaagcgctttgcggtaaaagaggcggcggccaaagccttcgggaccggcattcgtaacggcctggcgtttaatcagttcgaagtgtttaacgatgagctgggcaaaccgagcctgcgtctgtggggagaagcgcaaaagctggcggaaaagctgggggtgaatcacatgcacgtgacgatcgcggatgaacgccactatgccagcgcgacggtgatcatcgaaagt

SEQ ID NO: 19674 - DNA, 540 bp, Enterobacter cloacae
atgagcgcattgaccatttattccgataaagacgccagtcaacaccagtggcacagcaccgacgccgccgagatcgcccagcagctcaacgccaaaggcgtgcggtttgaacgctgggctgcggatcgcgatttaggacacgatcccgcgcctgaagccgtgatcgcggcgtatcagcatgcgatcgacaagctggtggcggagaaaggctatcagagttgggatgtgattagcctgcgcgccgacaacccgcagaaagaggcgctgcgcgcgaagttcctgaacgaacatacccacggcgaagacgaagtgcgctttttcgtggaaggcgcggggctgttctgcctgcacattgatgatgaggtgtatcaggtgctgtgcgagaaaaacgacctgatttccgttcccgcgggcacgccgcactggtttgatatgggctcagagccgaattttaccgccattcgtattttcgacaatccggaaggctgggtggcgcagtttacgggcgatgcgatcgcggatgcgtatccacgcctcgca

SEQ ID NO: 19675 - DNA, 129 bp, Enterobacter cloacae
atgtctttgattaacaccaaaattaaacctttcaaaaaccaggcgttcaaaaacggtgagttcatcgaagttaccgagaaagataccgaaggccgctggagacggcgtttcggcggccagcacaaacgt

SEQ ID NO: 19676 - DNA, 612 bp, Enterobacter cloacae
atgacagacaacctgcaactcacacatcttgtcgacgcctgccgctggattggcgccaaaggctgggcgccagccaccggcggcaatatgtcggtgcgtcaggacgaacacctctgctggctcagcgaatccggcaaagacaaaggcagcctgacaacggcggactttctgcaggttgaaattgccaccaaccgcgcgccctctggccgcagaccgtcggcagaaaccggtcttcacacgctgatttatcgcctgttcccggaagccaacgccgtcctgcacgttcataccgtcaacgccacggtgctgtcgcgtctggtcaaagaagccgagctcaacatcagcggctttgagatgcaaaaatccctcaccgggcagaccacgcatctggacacggtggctatcccgatctttgataacgaccaggatatcgacgccctcgcctcccgaatcgcccattacgcagaggaacgcccgcttaattatggttttcttctgcgcggtcatggcttaacctgctggggacgcgacgtggccgaggcccgccgtcatctggaagggctagaattcttatttgaatgcgaaatgcgtttacgacaactggagagaata

SEQ ID NO: 19677 - DNA, 897 bp, Enterobacter cloacae
atggcaaacctctatgaccttaaaaaattcgatcttaatctgttagtcattttcgagtgcatttatcagcaccttagtatcagtaaagccgccgagacgctttatatcacaccctctgccgtgagccagtcactgcagcgtctgagagggcaactcaacgatcctctgtttatccgttccggtaaagggatcacgcccacgaccgtcggcgtcaatctgcatcatcatctggaacagaacctgaaccagctggagcagactatcaatatcatgcacagcagcgggttgaagaagaactttgtcatttattgcccgcattttatgagtatgaaagcaacgcttgaccctataaaattgctgatggaaaaccataactattcaattgaattacatgatgtttttctttcgtctgattcagcagaagatctcttagcctacagaagagccgacctgatattttcgttttcttcttctaacaatcattctgtcgcctgtagcctctaccataaacttcctttcgtcctcgtttgtcgggagggccatccccgtctcagtgaaaatcccacgcgtgaagagatcctgaatgaaaacttcacggcctacctgaacgatgagaacagctttaaagactatcaggaaaaggccgaaagcctgttaaccaaaagaaatatcgtctatcgtagcgactcttttatatcccttctgtcggtgatcggttcgtccgatctcataggattagtacctgcgccggccttcgaacaatatgggccagccctcaacctgcgaagagtggaaactgacattcaattccccagcattgatatttacatgatgtacaaccgttccgcgctcaatagctcggcattcgcgagttttattgaagagatatcattaccg

SEQ ID NO: 19678 - DNA, 949 bp, Enterobacter cloacae
gacagccctctgtccgaacgatatggatgctaaccgtgatcatgttaaacgcattagctatccggttgtcatcaaggcgtccggcggcggcggcggtcgcggtatgcgcgttgtgcgcagcgatgctgaactggagcagtccatctccatgaccaaagcggaagcgaaagccgctttcagcaatgacatggtgtacatggaaaaatacctggaaaacccacgccacatcgaaattcaggtgctggctgacggtcagggtaacgcgatctatctggcagaacgtgactgctccatgcagcgtcgtcaccagaaagtggtcgaagaagcgccagcaccgggcattactccggaactgcgtcgctacatcggcgagcgttgcgccaaagcgtgtgtcgatatcggctatcgcggggcaggtacctttgagttcctgttcgaaaacggcgagttctatttcatcgaaatgaacacccgtattcaggttgaacacccggttaccgaaatgatcaccggcgttgacctgatcaaagaacagctgcgtatcgctgcgggccagccgttgtccatcaagcaggaagaagttgtggtgaaaggccatgcggtagagtgccgtattaacgccgaagacccgaacaccttcctgccaagcccgggtaaaatcacgcgtttccacgcgccgggtggctttggtgtgcgctgggagtctcatatctacgccggttacaccgtaccgccgtactatgactcaatgatcggcaagcttatctgctacggcgaaaaccgtgacgtggcgattgcccgcatgaaaaacgccctgcaggaactgatcatcgacggtatcaaaaccaacgttgatctgcagatgcgtatcatgagcgacgagcacttccagaatggtggaactaatatccactatctggagaaaaagctgggtctgaacgagaagtaa

SEQ ID NO: 19679 - DNA, 1449 bp, Enterobacter cloacae
atgcagcttgaagtcattctgccgcttatcgcttacctgttagtggtgtttggtttatccgtttacgccatgcgtaaaagaacgacgggcaccttcctgaacgagtattttcttggcagccgctcgatgggcggcgtcgtgctggccatgacgctgaccgcgacctacattagcgccagttcgtttatcggcgggcccggtgcagcctataaatacgggttaggctgggtgctgctggcgatgatccagcttcctgccgtctggctctcgctgggcatactgggtaaaaaatttgccattctggcacgccgttacaatgccgtgacgctcaacgatatgctgtttgcccgctatcagagccgtttactggtgtggctggccagcttaagcctgctggtggcctttattggcgccatgacggtgcagtttatcggcggggcacgcctgctggaaacggcggcgggaattccctacgagacgggcctcgttatctttggggtgagtatcgcactctacaccgcgtttggcggattccgcgccagcgtgctgaacgatacgatgcagggtttggtgatgcttgttggcacccttgttctgctggtcggcattgtgcatgctgctggtggcctgagccatgcggttgaaacgctcgaggcgatcgatccaaaactggtttcgccgcagggcgcggatgacatcctttcgccaacctttatgacctcgttctgggtgttggtatgctttggggtgattggcctgccgcataccgccgtgcgctgtatctcttacaaagacagcaaagccgtgcacagaggtatcattatcggcactatcgttgtcgcaatcctgatgtttggtatgcacctggcaggcgcgttaggtcgggcagttattcctgaccttaccgtacccgatctggttatcccaaccctgatggttaaagtactgccgccatttgccgccgggatcttcctcgccgcaccgatggccgccattatgtcgaccatcaacgctcagctgctgcaaagttccgctacgatcattaaagatctctatctgaacctgcgtcctgaccaggcagagaatgaacggcgcctgaagcgcatgtcggccgttattactctggcgttaggggcattgctgctgttagccgcgtggcgcccgccggagatgatcatctggctgaacctgctggcatttggtgggcttgaagcggtattcctgtggcctctggtgttagggctctactgggagcgcgcgaatgccgccggtgcgctgagcgctatgattgtcggcggcgtgctttacgccgtcctcgcaacgtttaagattcagtacctgggcttccatccaattgtgccttcgttactgctaagtttactggcgtttgtggtggggaaccgtttcggtcagcccgtcccacaacccgctatgatttctactgataaa

SEQ ID NO: 19680 - DNA, 1266 bp, Enterobacter cloacae
atgacctggtttattgaccggcgtcttaacggcaaaaacaagagcacggtgaaccgccagcgcttcttgcgtcgttataaagcgcaaattaaacagtctatctccgaggccatcaataaacgctcggtgaccgacgtcgacagcggcgagtctgtctccatccccaccgatgacatcagcgaaccgatgtttcatcaggggcgaggcggcctgcgccatcgcgtacacccaggtaatgaccacttcgttcagaacgacagaattgagcgtcctcagggcggcggcggtggttcaggaagcggtcagggacaggccagccaggacggtgaaggtcaggacgaatttgtcttccagatttcgaaagacgaatatctcgacctgctgtttgaagacctggcgctgccgaatctaaaaaagaatcagcatcgtcagcttaatgaatataaaacccatcgcgcgggctataccgccaacggcgtgcccgccaatatcagcgttgtgcgttcgttgcagaattcgctggcgcgacgaacggccatgacggcgggcaaacggcgcgaactgcgcgagctggagagcagcctgaaggtcgtggaaaacacggaaccggcgcaactgctggaagaggagcgcctgcgtaaagagattgcggaactaagagcgaagatcgaacgggtaccgtttatcgacaccttcgacctgcgctacaagaattacgaaaaacgcccggagccctccagccaggcggtaatgttctgtctgatggacgtttccggctcgatggaccaggccacgaaggatatggcgaagcgtttttatattctgctctacctgttcctgagcagaacctataagaacgtggaggtggtttatattcgtcaccatactcaggcgaaagaagtagatgaacatgagtttttctactcgcaggagaccggcgggaccatcgtatcaagcgctctgaagctgatggatgaagtggtcaaagagcgttacgacccggcgcagtggaacatttatgccgcgcaggcgtccgatggcgacaactgggccgatgactcaccgctgtgtcacgagattctggcgaagaaaattctgccggtggtgcgttactacagctatatcgaaattacccgtcgcgcgcaccagaccctgtggcgggagtatgaacatctgcaagcaatgttcgataattttgccatgcagcatatccgtgaccaggatgatatttatccggtgttcagggagctgttccacaagcaaagc

SEQ ID NO: 19681 - DNA, 1068 bp, Enterobacter cloacae
atgcgcgtcgccgatttctcctttgaactacctgaatccctgattgctcactatcccatgcctgagcgcagcagctgtcgcttactgtcactggatgggccaacgggcgagctgacgcacggtactttcaccgatttgctcgacaagctcaaccctggcgatctgctggtctttaacaatacccgcgtgatcccggcgcgcctgtttggccgtaaagccagcggcggcaagattgaagtgctggtcgaacgtatgctcgatgataaacgtattctggcacatattcgcgcgtctaaggcgccgaagccgggcgctgaactgctgctgggtgatgacgagagcatcaaagcgaccatgaccgcgcgccacgatgcgctgtttgaggtggcgttcgatgacgaacgcacggtgctcgatatcctgaacgctatcggccacatgccgctgccgccttatattgagcgtccggacgaagaggccgaccgcgagctgtaccagaccgtctacagccagaagccaggcgccgtcgctgcgccgaccgcgggcctgcattttgatgagccgctgctggagaaactgcgcgcgaagggcgtggagatggcgttcgtgacgctgcacgtcggggcgggaaccttccagccggtgcgcgtggacagcattgaagatcacattatgcactctgagtatgccgaagtgcctcaggatgtggtggacgcggtcctggcggcgaaagcgcgcggcagccgcgtcgtggcggtcggtacaacgtccgtgcgctcactcgagagcgccgcacaggccgcaaagagcgatcttatcgagccgttctttggcgatacgcagatctttatctacccgggctatcagtacaaagtgattgacgcgctggtgaccaacttccatctgcctgaatcaacgctgattatgctggtgtcggcatttgccggttatcagcatacgatggcggcctacaagtctgcggtagaacaaaaatatcgcttttttagctacggggacgcgatgtttatcacgtacaatccgctggctttgaatgagcgtgtcggggaa

SEQ ID NO: 19682 - DNA, 1125 bp, Enterobacter cloacae
atgaaatttgaactcgataccaccgatggccgcgcgcgtcgcggtcgcctggtgtttgatcgcggcgtggtggaaacccccgcgtttatgcctgtgggcacgtacggcaccgtaaaagggatgacgccggaagaagtagaagccactggcgcacagattatcctcggcaacaccttccacctgtggctgcgtccgggtcaggagatcatgaagctccacggcgacctgcacgatttcatgcagtggaaaggcccaatcctgaccgactccggcggcttccaggtcttcagcctgggcgatatccgcaagatcaccgagcagggcgtacacttccgtaacccgatcaacggcgatccgattttcctcgatcccgaaaaatcgatggagattcagtacgatctcggctctgacatcgtgatgatcttcgacgaatgtacgccgtatcctgctgactgggactacgcaaaacgctccatggagatgtctctgcgctgggcgaagcgtagccgtgatcgttttgactccctgcagaacaaaaatgcgctgttcggcattatccagggcagcgtttacgaagatttacgcgatatctctgttaaaggtctggtagagataggttttgatggctacgctgtcggcggtttggctgtgggtgagccgaaggaagacatgcaccgcattctggagcatgtctgcccgcaaatcccggcggataaaccacgatacctgatgggcgtgggtaaaccagaagatctggttgaaggcgtacgccgcggcattgatatgttcgactgcgtcatgccaacccgcaacgcgcgtaacggccatttgttcgttaccgatggcgtggtgaaaatccgtaacgcgaagcataagagtgacaccagcccgctcgattccgagtgcgattgctatacctgtcgcaattattctcgcgcgtatctgcatcatctcgatcgttgcaacgagattttgggcgcgcgtctcaataccattcataatcttcgttattatcagcgcttaatggctggtttacgtaaggctatcgaagagggtaaattagagagcttcgtgaccgatttctaccaacgtcaggggcgggatgttccaccgttgaacgttgat

SEQ ID NO: 19683 - DNA, 1407 bp, Enterobacter cloacae
atgaaaaaataccagagtctggcgcaacaaattatctcgcagattgagcttggcgtatggctgccgggcgataagctgccttcgctgcgagagcaggtggcgagcagcggcatgagttttatgaccgttggccacgcgtatcagatgctggaaagtcaggggcgcattgtcgccagaccgcagtcgggctattacgttgcctcgcgcccgaccgcacatcagcctgctccacctgcccaggtgatgcgtgacgaagtggtggatattaatacctacatcttcgacgtcttacaggccagccgcgacccgtccgttgttccttttgcctccgcgtttcccgatccccgacttttcccgctgcagcagctcaaccgctcgctggcgaacgtcagcaaaaccgcgacggcgatgagcgtgattgaaaacctgcccccgggtaacgtcgatctccgccacgccattgcccgtcgctacgcgcagcaggggatgaatatctcccctgaagagatcgtgatcaccgcaggcgcgcttgaagcgctcaatctcagcctgcaggcggtaaccgagccgggcgactgggtgatagtcgaaaacccgtgtttttacggcgcgctgcaggcgctggaacgcctgaagctcaaagcgttgtcgattgcgacggatgtgcgcgaggggattgacctgaatgcccttgaacaggcgctgaaggagtacccggttaaggcctgctggatcatgaccaacagtcaaaacccgcttggcttcacgctgagcgcggagaaaaaagcgcacttggtcgcgctgttaacgcaacacaacgtccccctgattgaagacgatgtctacagcgagctctattttggccgcgaaaagtcgctcccggcgaaagcatgggatcgccaggacatgacgcttcactgctcgtcctttcaaaaatgtctggtagccggttttcgcatcggctgggttgcggcaggaaaacacgcgagacgcattcagcagttgcagctgatgagcacgctctccaccagctcacccgtgcagctggcgctggtggattacctggcgacgaaacgctacgacgcccatctgcgccggctgcggagtacgctcgccgagcgaaaacagcaggcctggcagtcccttttgcgccatatgcctgccggcgtcaaaatccaccataacgacagcggctactttttatggctggagcttccggcgcagctggatgcggggctgctcagcgaaaaagccttaacgcaccacatcagcattgctcccggaaagatgttttccacctccgacgcgtggacaccgttcttccggtttaatacctcctgggcctggggagagcgggaagagcaggctgtcattcagttaggaaaattaattagcacgatgctggaa

SEQ ID NO: 19684 - DNA, 927 bp, Enterobacter cloacae
atggtcaaagtttatgccccggcttccagcgcgaatatgagcgtcggatttgacgtgctgggcgcggcggtgacgccggtggatggttcactgctgggcgatacggtcacggtggaagcggcagacagcttcagcctgaataacgtgggccgcttcgccagcaaactgccgtcagacccgcgcgagaatatcgtctatcagtgctgggaacgcttctgtcaggagatcggtaaaaacgtgccggttgctatgacgctggaaaaaagtatgccgattggctcgggtctgggttccagcgcctgctcggtggtcgccgcgctggtggcgatgaacgagcactgcggcaagccgctaaacaacaaccgcctgctggggttgatgggcgagctggaagggcgcatctccggcagcattcactatgacaacgtggcgccgtgcttcctcggcggcatgcagctgatgatcgaagaaaatggcatcatcagccagcaggtgccagggtttgatgagtggctgtgggtgctggcctatccgggcattaaggtctctaccgcggaagcgcgtgcgatcctgcccgcgcagtatcgtcgtcaggactgtatcgcccacgggcgtcatctggcgggctttatccacgcctgctacacccgtcagccgcagctggcggcgaagctgatgaaggacgtcattgccgagccgtaccgcacgaagctgctgccgggctttaacgaggcgcgacaggcatccatggatatcggcgcgcaggcgtgcggcatctccggctccggcccgacgctgttcgccctgtgcgacaagcctgacaccgcgcagcgcgtggcggactggctctctaaacactacctgcaaaatcaggaaggctttgttcatatttgccgtctggacacggctggcgcacgagtactggga

SEQ ID NO: 19685 - DNA, 1033 bp, Enterobacter cloacae
ctgctgaaacaggacttcgtcacccgcagcaccaaaattctgtctgcgtttatcggcgacgaaattccgcaggagctgctggaagagcgcgtgcgtgcggcgttcgctttcccggcgcccgttaagcaggttgagcctgacgttggctgcctggagctgttccacggcccgacgctggcgtttaaagacttcggcggccgctttatggcgcagatgctgacccacatcagcggcgacaaaccggtgaccatcctgaccgcgacatccggcgataccggtgcggcggtggcgcatgccttctacggcctgaaaaacgtccgcgtggtgatcctctatccgaaaggcaaaatcagcccgctgcaggaaaaactgttctgtacgctcggcggcaacattgaaaccgtggcaattgacggcgatttcgatgcctgccaggcgctggtcaagcaggctttcgacgacgaagagctgaaggtggctctgggtctgaactctgctaactccatcaacatcagccgtctgctggcgcagatttgctactacttcgaagcggtggcgcagctgccgcaggaagcgcgcaaccagctggtgatctccgtgccgagcggtaacttcggtgacctgacggcaggtctgctggcgaaatccctgggtctgccggtgaaacgctttatcgccgcgaccaacgccaacgacaccgtgccgcgcttcctgaaagacgggaagtgggcgccgaacgctacgcaggcgacgctctccaacgcgatggatgtgtcacagccgaacaactggccgcgcgtggaagagctgttccgccgtaagatctggcgtttgggtgacctgggttacgccgcggtgacggatgaaaccaccaaagagaccatgcgcgagctgaaggcgctggggtatacctctgaaccgcacgcggcgattgccctaccgcgcgctgcgcgaccagcttaacccgggtgaatatggcctgttcctgggcaccgcgcatccggcgaagttcaaagagagcgtagaagcgata

SEQ ID NO: 19686 - DNA, 300 bp, Enterobacter cloacae
gtgtctacactgaaacctgcactcatcgcgctttcactggtgctggccgcccccatggcggttcaggcatcagaaattaccctcgtaccggcggttaaactgcagattggcgaccaggataacaacggtcattactgggacggcggccgctggcgcgaccacgactggtggaaggcgcattatgactggcgtgataaccactggcgtccacatgatgagcatcgtaaacacgacgatcgtcacgatgaccatcaccacgatgaccaccgcgacgatcgcggcccggactggaaacaccat

SEQ ID NO: 19687 - DNA, 951 bp, Enterobacter cloacae
atgacggataaattgacctcccttcgtcagttcaccactgtcgtagctgacaccggagatatcgcggcaatgaagctgtaccagccgcaggatgccacaaccaacccttctctgatccttaacgccgcacagatccctgagtatcgcaaactgattgacgacgcagtgacctgggcgaaagcgcagagcaatgaccgcgcgcagcaggttgtggatgccaccgacaagctggcagtgaacatcggtctggaaatcctgaagctggttcctggccgtatctctaccgaagtggatgcacgtctctcctacgacaccgaagcgtctatcgcgaaagcgaaacgcctgatcaaaatgtacaacgacgctggcatcagcaacgaccgtatcctgatcaaactggcttctacctggcagggtatccgcgcggcagagcagctggaaaaagacggtatcaactgtaacctgaccctgctgttctccttcgcgcaggcgcgtgcatgtgcagaagcaggcgtatacctgatttctccgttcgtgggccgtattctggactggtacaaagctaacaccgataagaaagagtacgcgccggctgaagatccaggcgtggtttctgttactgaaatctacgaatactacaaacagcacggctatgagaccgtggttatgggcgcaagcttccgtaacgtcggagaaatcatcgagctggctggctgtgaccgcctgaccatcgcccctgcgctgctgaaagagctggcagaaagcgaaggtaccatcgagcgtaagctgtcctacaccggtgaagtgaaagcacgcccagagcgcatcactgaatccgagttcctgtggcagcacaaccaggatccaatggctgtagacaagctggcggacggtatccgtaagtttgctgttgaccagggcaaactggaaaaaatgatcggcgacctgctg

SEQ ID NO: 19688 - DNA, 585 bp, Enterobacter cloacae
atgaataccttacgcatcggcttagtgtcgatttctgaccgcgcctccagcggcgtttaccaggataaaggcatccctgctctggaagagtggcttggcagcgcgctgaccaccccctttgacattcagacccgcctgatccctgacgaacagccgatcatcgagcagacgctctgcgagctggtggatgagatgagctgccaccttgttctgacgacgggcggaaccggccccgcgcgtcgcgacgtgacgccggacgcaacgctggcgatcgccgatcgtgaaatgccgggcttcggcgaacagatgcgccagatcagtctacactttgttccgacggccattctttcccgccaggtgggagtgatccgcaagcaggcgttgattctgaacctgccggggcagccgaagtcgatcaaagagacgctggaagggctgaaggcggaagatggcagcgtcctcgttcacggcatctttgcgagtgtaccgtattgtatacagctgcttgacggcccctatgtggaaaccgatgagaaagtagtagcagcttttcgcccgaaaaacgcacgccgcgaaacaatctcc

SEQ ID NO: 19689 - DNA, 1343 bp, Enterobacter cloacae
atgagtaatcgtaagtattttggtaccgatggtatccgtgggcgtgtaggcgatgctcccatcacccctgattttgtcctgcagctcggctggctggctggcaaagtgctggcgcgtcatggttcccgtaagatcattatcggtaaagacacccgtatttccggctatatgctggagtcagcgctggaagcgggtctggcggcggctggactgtccgcgtcctttacgggcccaatggccgacgccctgcagtcgcgtatctgacgcgtaccttccgtgcggaagcggggattgttatctcagcttctcacaacccgttctacgacaacggcattaaattcttctccattgacggcaccaagctcccggatgacgtggaagaagccattgaagccgaaatggaaaaagagatcacctgcgttgattccgcagagctgggtaaagcgaaccgtatcgttgatgcggcgggccgttatatcgaattctgtaaaggcaccttcccgaatgagctgagcttggctcacctcaaaattgtggtggactgtgcaaatggcgcgacctatcacatcgccccgaatgtcttccgcgaactgggtgcgaaagtcatcaccattggctgcgagccggatggtctgaacattaacgagcaggtgggggcaactgacgttcgtgccctgcaggcgcgtgttctggcagagaaagccgacctgggcattgcgctggacggcgacggtgaccgcgtgatcatggtcgaccacgaaggtaacaaggtcgacggcgatcagatcctctacatcattgcccgtgagggcctgcgtcagggccagctgcgcggcggtgcggtgggcacgctgatgagtaacatgggcctggaactggcgctgaaacagctcggtattccgtttgtccgcgcgaaacacagtgaccgctatgtgctggaaaaattgcaggagaagggctggcgcatcggcgcagaaaactcgggtcacgtgatcctgctcgataaaaccaccaccggtgacggtatcgtggccgcgctgcaggtggttgccgcgatggcgcgcaaccatatgagcctgcacgatctgtgcagcgggatgaaaatgttcccacagatcctggttaacgtacgcttcactgccgataaaggcgatccgctggaaaacgagaacgttaaagcggtgatggctgacgttgaagcggctctgggcaatcgtggtcgcgtgctgctgcgtaagtccggtactgaaccgctgatacgcgtgatggtggaaggtgaagacgaagcgcaggtaaccgaatttgcacaccgtattgcggatgctgtgaaagctgcataattg

SEQ ID NO: 19690 - DNA, 900 bp, Enterobacter cloacae
ttgctccggggtttttcatttctgtttaacgatatagataccagggatttcgccatgaaattattcgctcaggactcgcatctcgatctttcacatccccatgtgatggggatcctgaatgttacccctgactctttctcagacggcggcacgcataacacgcttatcgaggcggttaagcacgcgaatttaatgattaatgcgggcgccaccattattgacgtgggcggcgaatcgacgcgtcctggtgcggcggacgtgtctgtggaagaagagctggcgcgcgtggtgccggtggttgaagctatcgcgcagcggtttgaagtgtggatctccgttgatacctcaaaacccgaagtgattcgtgaagtggcgagagtgggcgctcacattatcaatgatattcgttcactcaccgagcctggcgcactggaagccgcggcagagaccgggttaccggtatgcctgatgcatatgcagggtcagccgaaaaccatgcaggaagcaccgaagtatgatgatgtctttgccgacgtgaatcgcttctttattgaacatattgcgcgctgcgaacgtgcaggtatcccaaaagagaaattgttgctcgacccggggttcggtttcggtaaaaatctcccccacaattatgcgttgctcgcgcgcttatcggaattccatcactttgacctgccgctgctggtggggatgtcgagaaagtcgatgattgggcagttgctgaacgtggggccgagcgaacgcctgagcggcagcctggcctgcgcagtgattgcggcgatgcagggcgcgcacattattcgtgtccatgacgtcaaagaaacagtagaagccatgcgtgtggtggaagccacactggcagcgaaggaaaacaaacgctatgag

SEQ ID NO: 19691 - DNA, 1862 bp, Enterobacter cloacae
aaaaacctaatactctggctggtcattgccgttgtgctgatgtcagtattccagagctttgggcccagcgagtcgaatggccgcaaggtggattattctaccttcctgcaggaggtcaatcaggaccaggttcgcgaagccgtatcaacggacgtgagatcaacgttaccaagaaagatagtaaccgttacacgacttacatcccggtgaacgatcctaagctgcttgataaccttctgaccaaaaacgtcaaggtggtaggtgagccgccagaagaaccaagcctgctggcttctatcttcatttcctggttcccgatgctgcttcttattggcgtctggatcttctttatgcgtcagatgcagggcggcggtggcaaaggtgccatgtcgttcggtaagagcaaggcgcgtatgctgacggaagaccagatcaagactactttcgctgacgtcgccggttgtgacgaagcgaaagaagaggtgggtgaactggttgaatacctgcgtgaaccgagccgtttccagaagctgggcggtaagatcccgaaaggcgtgctgatggttggccctccgggtaccggtaaaaccctgctggcgaaagccatcgcaggtgaagcgaaggtgccgttctttactatttcaggttctgacttcgtcgaaatgttcgtgggtgtcggtgcatctcgtgtgcgtgacatgttcgagcaggccaagaaagcagcaccgtgcattatcttcatcgatgaaatcgacgccgtgggccgccagcgtggcgcaggcctgggcggtggtcatgatgaacgtgaacagacgctgaaccagatgctggttgagatggacggcttcgaaggtaacgaaggtatcatcgttatcgcggcgactaaccgtccggacgtacttgaccctgcgctgctgcgtccaggccgtttcgaccgtcaggttgttgtgggtctgccggacgttcgcggtcgtgaacagattctgaaagttcacatgcgtcgcgtaccgctggcgccagatatcgacgcggcaatcattgcgcgcggtactcctggcttctccggtgcggacctggcgaacctggtcaacgaagctgctctgtttgccgctcgcggtaacaagcgcgtcgtatctatggtagagtttgagaaagcgaaagacaaaatcatgatgggcgcggaacgtcgctccatggtgatgacggaagcgcagaaagagtccacggcataccacgaagcgggtcacgcgattatcggtcgcctcgtgccggaacacgatccggtgcataaagtgacgattattccgcgcggtcgtgcgctgggtgtgaccttcttcctgcctgaaggcgacgcgatcagcgccagccgtcagaagctggaaagccagatttcgaccctgtacggcggtcgtctggcagaagagattatctacggtgtggaacatgtttctaccggtgcgtccaacgacattaaagttgcgacaaacctggcgcgtaacatggtgacgcagtggtgcttctccgacaaactcggtccgctgctgtatgctgaggaagagggtgaagtattcctgggccgttctgtggctaaagcgaaacatatgtccgatgagacggctcgtatcatcgatcaggaagtaaaatctctggtagagcgtaactacgcacgtgcacgccagatcctgaccgacaatatggacatcctgcattcgatgaaagatgcgctcatgaaatatgagaccatcgatgcaccgcagattgacgacctgatggcgcgccgtgaagtgcgtccgccagcgggctgggaagacccaggcgcttccaataattctgacaacaatggcaccccgcgtgcgccgcgt

SEQ ID NO: 19692 - DNA, 1173 bp, Enterobacter cloacae
atgaagtttgttgatgaagcgacgatcctggtcgtggctggtgatggcggcaatggttgcgtgagcttccgccgtgaaaagtatatcccacgtggcggtcctgacggcggcgacggcggggatggtggtgacgtgtggctggaggcggatgagaacctcaacacgctgatcgactaccgtttcgaaaaatccttccgtgctgaacgtggccagaacggccagagccgtgactgtaccgggaaacgcggtaaagacgtcaccattaaagttccggtcggtacgcgtgtgattgaccagggaaccggtgaaaccatgggtgacatgaccaaacacggtcagcgcctgatggtggcgaaaggcggctggcacggtctgggtaacagccgtttcaaatcctccgttaaccgtacaccgcgtcagaaaacgatgggtacgccgggtgataagcgcgatctgcagctggagctgatgcttctggcagacgtgggcatgctgggtatgccaaacgccggtaaatcgacgttcattcgcgccgtttctgcggcgaaaccaaaagtggcggactatccgtttaccacgctggtaccaagcctgggcgttgtccgtatggataatgaaaagagctttgtggttgccgatattccgggtctgattgaaggcgctgcggaaggcgcgggtctgggtattcgcttcctgaaacaccttgagcgttgccgcgtgctgctgcaccttatcgatatcgatcctatcgacggttccgatccggttgaaaacgcccgcattatcatcggtgagctggaaaaatacagcgaaaaactggcgaataaaccacgctggctggtcttcaacaagatcgacctgatggacaaagccgaagcggaagcgaaagcgaaagcgattgctgaagcaatgggttgggaagataaatactacctgatctctgcggcaagccaggttggcgtgaaagatctgtgctgggatgtgatgaccttcatcattgagaaccccattgttcaggcggaagaagcgaagcagcctgaaaaagtcgaattcatgtgggatgactaccaccgtcagcagctcgaagagctcgaagcggaagaagatgatgaagactgggacgatgactgggatgaagacgacgaagaaggcgtcgagttcatctacaagcac

SEQ ID NO: 19693 - DNA, 1317 bp, Enterobacter cloacae
atggtgcagaaggttggcgcacaggctcccgagattgactatcacagtcaacagatggcgctgcctgccagtacccaaaaggtgatcaccgccctcgccgccctgctccagctcggccctgatttccgttttacgaccacactcgagaccaaaggtaacgtcgagggtggcgcactgaaaggcgatcttatcgcccgttttggcggcgatccgacctttaagcgccaggatatccgcaatatggttgcggtactgaaaaaatctggcgtacagaaaattgatggcaatgtgctgatcgacacatccatctttgccagccacgataaagccccaggctggccgtggaacgacatgacacaatgttttagcgccccgcccgccgcagcaatcgttgaccgtaactgcttctcggtttcgctttacagcgcgccaaagccggatgatttagcgtttatccgtatagcgtcctactacccggtcaccatgttcagccaggtccgcacgctggcgaaaggctccccggatgcgcaatattgtgagctggacgtcgtgccaggggatcttaaccgcttcacgcttaccggctgcctgacgcagcgcgccgatccgctgccgctggcctttgcgatacaggatggtgcaagctatgcgggtgccattctgaaagatgagctaaaacaagcgggcattacatacagcggcacgctgcttcgccagacgcaggtcaaccagcccggcacggtcatcgccagcaaacagtctccgccgctgcacgatttactgcgaatcatgctgaaaaagtctgacaacatgattgccgacaccgtgttccgcatgattggccacgcgcgtttcggcgtgccgggcacctggcgcgcgggttcagacgccgttcgtcagatcctacgccagcaggccgggatcgagctgggcaataccatcgccgtcgatggctccggattatcgcgtcataatttgatctcgccggccacgatgatgcaggtgcttcagtacattgcacagcatgacactgagctaaactttatttcaatgctgccgctggccgggcatgacggttcgctgcagtatcgcgccgggcttcacgctgccggcgtggatggcaaagtatccgctaagacaggctcgctgcagggggtttacaaccttgcaggctttatcactacggccagcggacaacgtatggcattcgtgcagtatctttccggctatgccgtcgaaccggccgaccagcgcaatcgtcgtattccgcttgttcgcttcgaaagcaggctctataaggacatctaccagaataac

SEQ ID NO: 19694 - DNA, 827 bp, Enterobacter cloacae
cctttagtatcaatctatatgccgacatggaatcgtcagcaactggcgatccgcgccatcaaatccgtcctgcgacaggattacgataactgggagctgatcatcgtcgatgactgctcttcctcgtatgaacagctgcaaaagtttgtaactgacctcaacgacccgcgggtggtctatacgcataacgccattaactccggcgcgtgtgcggtgcgtaatcaggcgattatgcaggccaaagggcagtatctgaccgggatcgacgacgatgacgaatggacgccgaaccgcctgtctatcttcctgtcgcataaagagcagctggtcacgcacgctttcctgtatgccaacgactatgtctgccagggcgaggtctactcgcagcccgccagtctgccgctctatccgaaatcaccgtattctcgccgcctgttctacaagcgcaacattattggtaaccaggtcttcacctgggcgtggcgtttcaaagagtgcctgttcgataccgaactcaaggccgcgcaggattacgatatcttcctgcgcatggtggtggaatacggcgagccgtggaaagtggaagaggccacgcagatcctgcatatcaaccacggggagatgcaaatcacctcctcgccgaagaagttctccggctacttccatttttaccgcaagcacaaggacaaatttgaccgtgccagccgtaaatatcagctctttaccctctatcagatccgcaataagcgcatgaactggcgcacgctgtgacgctgctgtccgtgcgtaacggcaaacgcctggctgatggacttcgggggaaataa

SEQ ID NO: 19695 - DNA, 489 bp, Enterobacter cloacae
atgtttctggaagattgccgcgctaacagctggagcctgcgtccgtgctgcatggttctggcgtaccgcatcgcgcacttttgctcggtgtggcgtaagaaaaatgtgctgaacaatatctgggcggcgcccgtgctggtgctgtaccgcatcattaccgaatgcttttttggctatgaaattcaggccgctgccaccattggccgccgctttaccatccatcacggctatgcggtggtgatcaacaagtttgtggtcgccggggatgatttcaccattcgtcatgcggtcaccattggcaaccgcgggcctgacagcctggcctgcccggtcatcggcaataacgtcgagctgggggcgaacgtggtaatcatcggtgacattacgattggtaataacgtcacgattggtgctggcagcgtagtgctggacagcattccggataacgcgctggtggtgggagaaaaagcccgcgtgaaggtgattaaa

SEQ ID NO: 19696 - DNA, 1221 bp, Enterobacter cloacae
atgaagatcctcgtatacggaatcaactactcgccggaattgaccggcatcgggaaatacaccggcgagatggtcgagtggatggcgagccagggacatgacgtgcgggtcattaccgcgccgccgtactacccggagtggaaagtcggggagcgctactcaagctggcgctaccgtcgcgaagagggcgcagcgaccgtctggcgctgcccgctgtatgtgcctaagcagccctcaacgctgaaacggttacttcatctgggcagctttgccctgagcagcttcttcccgctgatggcgcagcgtcgctggaagccggatcgcatcatcggcgtggtgccaacgctgttttgcacgccgggcatgcgcctgctgggcaaactctccggcgcgcgcactctgctgcacatacaggattacgaagttgacgccatgctgggcctggggatggcaggcaaaagtaaaggcggcaaggtcgcgaagctcgccagcgcgtttgagcgcagcggcctgcacaacgttgattacgtctcgactatctcgcgctcgatgatgaacaaggcgcaggagaagggcgtcccggcggagaaagtcattttcttcccgaactggtcagaagtggcgcgttttcgcgatgtaactgagcaggacgctcatgccctgcgcgcgcagctcggtttgcctgaagatcaaaaaatcattctttactcaggcaacatcggcgaaaagcaggggctggaaagcgtgattgaagctgcccaactgctgagtgaacatccgtggacgtttgtgattgtcgggcagggcggtggaaaggcgcggctggaaaaaatggccggtgaacgcggcctgaccaacgtgaaatttttcccgcttcagtcttacgaggcattgcctgcgctgctgaagatgggcgactgccatctggtggtgcaaaaacgcggcgcggccgacgcggtgctgccgtccaagctgaccaacattctggcagtgggcggtaacgcggtgatcacggcagaagccgaaacagaattaggccagctgtgtgacagctatccggggattgccgtgtgcgtggagccggaatcggtcccggcgctggtaaccggaattgagcaagcgcttgccatgccaaaagtgaacacggtggcacgtgaatatgccgaacgcacgctcgaaaaagagaacgtgctgagccaatttattacagatatacgggga

SEQ ID NO: 19697 - DNA, 672 bp, Enterobacter cloacae
cgcatgtctcgcatctgcaaagaaaccgtgccggaaatggtggtgatgtccgacacctgcttctgtgaatatacctctcacggccactgcagcgtgctgtgcgatcacggcgtggataacgatgctaccctgctgaacctcggcaagcaggcggtcgtcgcggccgctgcgggtgcggacttcatcgcgccctctgccgcaatggacggacaggttcaggcgatccgtcaggcgctggacgcggcgggctttaccgacactgccatcatgtcttactccaccaaatttgcctcctccttctacggcccgttccgtgaagctgcgggcacggcgctgaagggcgatcgtaaaacctatcagatgaacccgcttaaccgtcgggaagcgattcgcgaatccctgctcgacgaagcccagggcgcagactgcctgatggtgaaacctgcgggcgcgtaccttgatatcctgcgcgacatccgcgagcgcaccgagttgccgctgggcgcttaccaggtcagcggcgagtacgcgatgatcaaattcgccgcgctggccggtgcgattgacgaagagaaagtggtcctcgaaagcctcggcgccatcaaacgcgcaggcgcggatctgatcttcagctacttcgcgctggatctggccgagaagaaaattctgcgt

SEQ ID NO: 19698 - DNA, 1424 bp, Enterobacter cloacae
atgtccatacgtatagaaggtaatatgcaaacacaacaagaaaatgggcagcttaagcgcaccatgaaaacacgccacctgattatgctctcgctgggtggcgtgattgggactgggttattcttcaataccggatacatcatttcaaccaccggggcggcgggcacgctgctggcgtacctgataggcgcgctggtggtctggctggtgatgcagtgtctgggcgagctttccgtggcgatgccggaaaccggcgcgttccacgtctatgccgcccgctatcttggcccggcgacgggctacaccgtggcgtggctctactggctcacctggacagtggcgctcggctcgagcttcacggccgcgggcttctgcatgcagtactggttcccccaggtgccggtctgggcctggtgcgtggtcttctgcgtggtgatttttggcctgaacgtcatctctacgcgcttctttgcggaaggcgagttctggttctctctggtcaaagtcatcaccattatcgcctttattattcttggcggcgcggcggtctttggctttatccctatgcaggacggttcacccgcgccgggcttaagcaacatcaccgccgagggctggttcccgcacggcggcctgccgatcctgatgaccatggtggcggtgaactttgccttctccggtaccgagctcatcggcatcgcggcgggggaaacggaaaatccgcacaaggtgattccggttgcgatccgcaccaccattgcgcgcctgattatcttctttatcggcaccgtgtttgtgctggcggcgctgatcccgatgcagcaggcgggcgtggaaaagagcccgttcgtgctggtgtttgaaaaggtcggtattccttacgcggcggatatttttaactttgtgatcctgacggcgatcctctcggcggcgaactcgggcctgtacgcttccgggcgcatgctgtggtcgctgtcgaatgagaaaacgctgccgcgctgctttgcccgcgtgaacaaaaacggcgtgccgctgacggcgctctcggtctctatgctcggcggcgtgtggcgctgttctcaagcgtcgtggccccggacacggtgtttgtcgcgctctcggcgatttctggctttgcggtggtggcggtgtggatcagcatctgcgcgtcggacttcgttttccgccgccgtcatctgcagtccgggcagccgctctctgcgctgcagtaccgcgcgccgtggtatccgctggtgccggtgcttggttttatcctctgcgtggtggcctgtgtcggcctgtggtttgacccgagccagcgcattgccctttattgcgggcttccgtttgtcgccctgtgttatggtgcgtactacctgacccgaaatatgacatcgcaggagcctgaacatgtcgcagaataa

SEQ ID NO: 19699 - DNA, 516 bp, Enterobacter cloacae
gtgctggtcaacaatgcgggtgcgatgaccaaagcgccgttccttgagatgccgtttgacgactggcggaacattttcaccgtcgacgtggacggcgcgtttctctgttcacaaattgccgcccgccagatggtgaagcaaggggaaggggggcggattgtgaacattacctcggtgcatgagcacacgccgctgccagaggcgagcgcctacacggcggcaaaacacgcgctcggcgggttaaccaaatccatggcgatggaactggttaagcacaacattctggtgaacgccgtcgcgccgggcgccattgccacaccgatgaacgacatggacgacagcgaagtgaaggagggttcaatgccggaaatcccgctggcgcggccgggccacaccaaagagatagccagcctggtggcatggctgtgcgacagcgacgccagctacacgacggggcaatcgtttattgttgacgggggctttatgctggcgaacccgcagtttaagccagagggg

SEQ ID NO: 19700 - DNA, 624 bp, Enterobacter cloacae
atgaagattgtggaagtgaaacacccactcgttaaacacaagttgggcctgatgcgtgagcatgacatcagcacgaagcgttttcgcgaactggcatctgaagtcggcagcctgctgacctacgaagcgacctctgatctggaaacagaaaaagtcaccatcgaaggctggaacggcccggtgcaggttgagcagataaaaggtaagaaaattaccgtggtgccaatcctgcgtgccggtctcggcatgatggaaggcgtgctggagcacgtgccaagcgcgcgtatcagcgtggtgggtatctaccgtaacgaagaaacccttgagcctgttccttacttccagaagctggtgtctaacatcgacgagcgtatggcgctggtggttgacccaatgctcgcgaccggtggctctatgatcgccaccatcgacctgctgaaaaacgcgggctgtaacagcattaaggtgctggtattggttgctgctccggaagggatcgcggcgctggaaaaagcgcacccggacgttgagctgtataccgcctctatcgaccaggggctgaacgagcacgggtacatcatcccggggctcggcgatgccggcgataagatctttggtacgaaa

SEQ ID NO: 19701 - DNA, 1539 bp, Enterobacter cloacae
atgaatgagaacagctccattttcaccaccaactacactctttccctgctgatgccggtgatgctctggggcgcgatgcgttttggctataagctgatttcgcttatctggacgccgatactgctggtgtctattcactatttttatcgctatatcccggtaaatccggggtatgacattcagctggcgatcacctcttccagttacctggtcttctccttcgtggtgatttatatgtcgatgctggcaacacggcagcgcgcggcgaacaaacgctcccgcaggctggcgctgctcgacccggtcgtccatatgcctaacctgcgggcgctgtcgcgcgatctggcgaaaaacccgtggtcggcgctctgcctgctgcgcattccggagctggaaattctgggccgaaattacggcgtgttgctgcggattcagtacaagcagcagctggcgcagtgggtgaatggcattctccagcccaatgagctggtgtatcacctgaccgggtatgacctggcggtacggctcaacgcggaatcgcaccagcagcggattgaagccctggacgagcatatcaagcagttccgctttgtctgggacggcatgccgctgcagccgcaggtgggcgtgagctattgctatgtccggtccccggttaaccatctttatctggtgctgggcgagctgggcgtggttgccgacctgtcgctctcctccaaccatccggaaaaccttcagcagcggggtgccgtccatttgcagcgcaacctgaaggataaagtcgcgatgatgagccgcctgcaaaaggcgcttgataacgacgaattcaccctgctggttcaacccgttcgcggcatgcgtggcgattgctatcacgaagtcctgctccggatgccggatatcaacgggctattgatctcccccgaccagttcctgcccgtcgcgcaggagtttggtctctcttcccgggtagatttgtgggtgctggagcataccttacgcttcctgtccgcgcatcgcgaaagactgcccggccagcgctttgccattaatctggccccgtcgaccgtgtgtcgggtgcagtttccgcttgaggtgagtcgcctgctggcgaaatacgccattgagccgtggcagctaatctttgaagtgacggagtgcagcaccttttgcaatgcggagcaggcgcaacacatcctccggcagctgcagaaaatgggggtacgtattgcgattgatgattttggcaccggctatgcgagctatgcgcggctgaaaagcgtggatgcggatattctcaagattgacggcagctttattcgcaatatcgtcaataacagtctggattatcagattgtggcgtctatctgccatctggcgcgcatgaaaaagatgctggtggtggcggagtatgttgaaagcgaagagatacgtagcgcggttcacgcgctaggcatcgattatgtgcagggctatctgattggcagaccggcaccgcttgagtcactgctggaagcagaggcgtccaccgcggacgcc

SEQ ID NO: 19702 - DNA, 2181 bp, Enterobacter cloacae
ttgtttaaagcgtttgttttgtttttcgccctctgggtacctgccactcaggcagactccggttggcaacccgttcaggaaactattcgtaaaagcgaaaaagatactcgtcaatatcaggctattcgtcttgataacggcatgaccgtgctgctggtttccgatccgcaggcggtgaagtccctctcggcattagtggtgccggttggatcgctggaagatcctgacgcgcatcctgggcttgcacactatctggaacatatgacgctgatggggtcaaaaaaatacccgcagccagatagcctgtccgaatttttgaaaatgcatggcggcagccacaatgccagtacggcaccgtaccgcacggccttttatcttgaagtcgaaaatgatgcgctggaaggcgcggtcgaccgccttgctgattccatcgcagcccccctgctggataaaaaatatgccgaccgtgaacgcaatgccgtcaatgctgagttgacccttgcccgcacgcgagacggtatgcgcatggcccaggtcagcgccgaaaccatcaaccctgcgcacccgggttcgcgcttctccggcggtaacctggagacgttaagcgacaaaccgaacagcccggtgcttgatgccctgcacgcgtttcgcgataaatactactctgccaacctgatgaaagcggtcatctacagcaataaaccgttgccagaactggcaggcatggcggctaaaacgtttggtcgggtgccgaataaaaatatcgacctgccgcagatagacgtaccggtggtcacggacgcgcaaaagggcattgtgatccactacgtgcctgcgctgccgcgcaaagtgctgcgcgtggaattccgcatcgataacaacaccgcaaagtttcgcagtaaaaccgatgagctggtgacctacctgataggtaaccgtagtccgggtacgctttctgactggctgcaaaaacaggggctcgtggaaggtattcgcgccgactccgatccggttgtgaacggcaatagcggcgtgctggcgatctccgccaccctgaccgacaagggcctggcaaaccgtgacgaagtggtggctgcgatcttcagctacctctctttactgcgtgagaaaggcgtcgataagcgctactttgatgagctcgcgcacgtgctggatctcgatttccgttacccgtccattacccgcgacatggattacgttgagtggctggcggataccatgatccgcgtgccggtggaacacaccctcgatgcggtcaatattgccgaccggtatgatgccgatgcggtgaaagcccgcctggcgatgatgacgccggagaatgcccgcatctggtacatcagcccgaacgaaccgcataacaagacggcgtattttgtcgatgctccttatcaggtggacaaaatcagcgcacagaccttcgccgactggcagaagaagtccggggagattgcgttgaagctgccggagctgaacccctatattccggatgacttctcgctgaccaaaacgactcaagattatccgcacccggcgctgatcgttgatgagcctacgctacgcgtggtgtatacccctagccgctatttcgcaagcgagccaaaggccgatgtcagcgtggtgctgcgtaacccgaaagcgatgaacagcgctaaaaatcaggtgatgttcgcgctcaatgactatctcgccgggattgcgctcgatcagctcagcaaccaggcggccgtgggcgggatcagcttctccaccaacgccaacaacggtttgatgctcaatgcaaacggctatacccagcgtttgcctcagctgttccaggcactgctggagggttatttcagctatacgccgacggaagagcagcttgagcaggccaaatcgtggtatgcgcagatgatggattctgcggagaagggcaaagcttacgatctggcgcttatgccggcgcaaatgctgtcgcaagttccttatttccagcgagaggaccgccgtgcactgttgccttcgatcaccttaaaagacgtgctggcttaccgtgacgcgctgaaaaccaacacgcgcccggagttcctgatcgtcggcaacattagtgacgaccaggccaaaaccctggcggagaatgtacgcactcagctcggttcgaaaggcgacgaatggtgt

SEQ ID NO: 19703 - DNA, 792 bp, Enterobacter cloacae
atgaaacagtatcttgaattgatgaaaaaagtgctcgacgagggcacgccgaaaaacgaccgcaccggcaccggtacgctctccatttttggccaccagatgcgcttcaatctgcaagaaggcttcccactggtgacgacaaagcgctgccacctgcgctcgatcattcatgaactgctctggttcctgcaaggcgataccaacgttgcgtatctacacgaaaataacgtctcaatctgggacgagtgggcagatgaaaatggcaacctgggcccggtttacggcaagcagtggcgcgcctggccgacgcctgatggtcgccatattgaccagatcaccaccgtgatgaaccagctgaaaaacgatccggactcgcgccgaatcatcgtttccgcctggaacgtcggcgaactggataaaatggcgcttgcaccgtgccatgcgttcttccagttctatgtggcggatggaaagctttcttgtcagctctaccagcgctcctgtgacgtgttcctcggcctgccgtttaacattgccagctatgcgctgttggtccacatgatggcgcagcagtgcgatctggaagtgggtgattttgtctggaccggtggggacacccatctttacagcaaccatatggaacagacgcatctccaactgactcgcgaaccgcgtgcgctgccgaagctgattatcaagcgcaaaccggcatcaatcttcgactaccgctttgatgatttcgagattgagggctatgacccgcatccgggcatcaaagcgcctgtcgctatc

SEQ ID NO: 19704 - DNA, 996 bp, Enterobacter cloacae
atgatgttagatatagtcgaactgtcgcgcttacagtttgccttgaccgcgatgtaccacttcctgtttgtgccactgacgctcggtatggcgttcctgctggccattatggaaacggtatacgttctctccggcaaacagatttataaagatatgaccaagttctggggcaagttgtttggtatcaacttcgcactgggcgtggcaaccggtttgaccatggagttccagttcgggactaactggtcttactattcccactatgtcggggatatcttcggtgcgccgctggccattgaaggtctgatggcattcttcctcgaatccacctttgtaggtctgttcttcttcggctgggaccgtctgggtaaagtccagcatatggcggtgacctggctggtggcattaggttcgaacctgtccgcgctgtggatcctggtggcgaatggctggatgcagaaccctatcgcgtctgatttcaacttcgaaactatgcgtatggagatggtcacgctttgccgagctggtcctgaacccggttgcgcaggttaaattcgttcacaccgtcgcctctggctacgtgtgcggtgcgatgtttgtactgggcatcagctcttactacatgctgcgcggtcgtgacttcgcgtttgctaagcgctcctttgctatcgctgcaagcttcggtatggcagcaatcctctctgttatcgttctgggtgatgaatccggttacgaaatgggtgacgtgcagaaaaccaaactggctgccatcgaagccgaatgggaaacccaaccggcgcctgctgcctttacgctgttcggcattcccgatcaggacgcgcaggaaaaccgcttcgccattcagatcccttacgcgctgggtatcatcgccacccgttctgttgataagcaggtgacaggtcttaaagagctgatggttcagcacgaagagcgtatccgtaacggtatgaaagcctactcgctgctggaacagct

SEQ ID NO: 19705 - DNA, 867 bp, Enterobacter cloacae
atgtcagttttaattaataaagataccaaggttatctgccagggcttcaccggtagccaggggactttccactccgaacaggcgattgcctacggcacgcagatggttggcggcgtaacgccaggtaaaggcggtaccacgcacctgggcctgccggtattcaacaccgtgcgtgaagccgtagaagcgacgggcgcaaccgcgaccgtgatctacgttccggcaccgttctgcaaagactccattctggaagcgatcgacgcaggcatcaaactgatcatcactattactgaaggcatcccgacgctggatatgctgaccgtcaaagtgaagctggatgaagcaggcgtgcgcatgatcggcccgaactgccctggcgttatcaccccgggcgaatgcaaaatcggcatcatgcctggccacattcacaagccgggtaaagtgggcatcgtgtcccgttccggtacgctgacctatgaagccgttaagcagaccaccgattacggcttcggccagtccacctgcgtgggcatcggcggtgacccgatcccgggctctaacttcatcgacatcctgaagctgttccaggaagatccgcagaccgaagcgatcgtgatgatcggtgagatcggtggtagcgcggaagaagaagccgctgcttacatcaaagaacacgtgaccaaaccagttgtcggttacatcgcgggtgtgactgcgccgaaaggcaagcgtatgggtcacgcgggcgcgatcatcgccggcggtaaaggtacggctgatgagaaattcgcagcgctggaagccgcaggcgtgaaaaccgttcgcagcctggcggatatcggcgaagcactgaaatccatcattaag

SEQ ID NO: 19706 - DNA, 2805 bp, Enterobacter cloacae
atgcagaacggcgcaatgaaagcctggctggactcttctttcctttctggtgcgaaccagagctggattgaacagctctatgaagacttcttaaccgatcctgactcagtggacgcaaactggcgttccatgttccagcagttgcctggcacaggggtcaaaccggatcaattccattccaaaacacgtgattatttccgtcgtctggcgaaggatgcctcacgttactcttctgcgatttccgaccctgacaccaatgcgaagcaggttaaagtcctgcagcttatcaacgcttatcgcttccgcggtcaccagcatgcgaatctcgatccgctgggactgtggaaacaagaccgtgtggccgatctcgatccggcatatcacgatctgaccgaggccgatttccaggaaagctttaacgtaggttcctttgccataggcaaagacacgatgaagctgggcgatctgattgacgcgctcaagcaaacctactgcggctccatcggcgcggaatacatgcacattacctctaccgaagagaagcgttggatccagcagcgcatcgaatccgtagcgggtcacgcgaccttctcggctgacgagaaaaaacgcttcctgaacgaactgaccgcagcggaagggcttgagcgctatctgggcgcgaaattcccgggcgcaaaacgcttctcgctggaaggcggcgacgcgctggtgccgatgctgaaagagctgattcgtcacgcaggcaagagcggcacccgtgaagtggtactgggcatggcgcaccgtggtcgtctgaacgtgctggtcaacgtgctgggtaaaaaacctcaggacctgttcgacgagttcgcgggcaaacataaagaacacctcggcaccggcgacgtgaagtaccacatgggcttctcgtcagatatcgaaaccgaaggcggtctggttcacctggcgctggcgtttaacccgtcacacctggaaatcgttagcccggtggttatcggttccgtgcgtgcgcgtctggatcgtctggacgagccgagcagcaataaagtactgccaattaccatccacggtgatgcggctgtaacagggcagggcgtggttcaggaaaccctgaacatgtcgaaagcgcgtggttatgaagtgggcggtaccgttcgcatcgtgatcaacaaccaggtgggctttaccacctctaacccgctggacgcgcgttctaccccgtactgcaccgacatcggtaagatggtgcaggcgccaatcttccacgttaacgcggatgacccggaagccgttgctttcgttacccgtctggcgctggacttccgtaatacctttaaacgcgatgtgttcattgacctcttctgctaccgccgtcatggccacaacgaagcggacgagccaagtgcaacccagccgttgatgtatcagaaaatcaaaaaacacccgaccccgcgcaaaatctatgctgacaagctggagagcgacaaagtgacgacgctggaagatgcgaccgaaatggtcaacctctaccgcgacgcgctggatgcgggtgaatgcgtggtcaaagagctgcgcccgatgaacatgcactcctttacctggtcgccgtacctcaaccacgagtgggatgagagctacccgaacaaggttgagatgaagcgcctgcaggagctggctaaacgcatcagcaccgtaccggacgctatcgagatgcagtctcgcgtggcgaaaatctacgctgaccgtcagtccatggcggcaggcgagaagctgttcgactggggcggcgcggaaacgctggcctacgcaacgctggttgacgaaggcattcctgttcgcctgtccggtgaagatgcgggccgtgggaccttcttccaccgtcacgcggttgttcacaaccagtccaacggttcaacctacaccccgctgcagcacgtgcacaacggtcagggccagttcaaggtctgggactccgtgctgtctgaagaagcggttctggccttcgaatacggttacgccaccgctgaaccacgtaccctgaccatctgggaagcgcagttcggtgacttcgccaacggtgcgcaggtggtgatcgaccagttcatctcctccggcgagcagaagtggggccgtatgtgtggcctggtaatgctgctgccgcacggttatgaaggtcagggtccggagcactcctccgcgcgtctggaacgttatctgcagctctgcgccgagcagaacatgcaggtctgcgtgccgtccaccccggctcaggtctaccacatgctgcgtcgtcaggcgctgcgcggtatgcgccgtccgctggtggtgatgtcgccgaaatccctgctgcgtcacccgctggcggtgtcgagcctggaagaactggcgaacggaaccttcctgccagccatcggtgaaattgacgagctggatccgcagggcgtgaagcgcgtagtgatgtgttctggtaaggtttattacgacctgctggaacagcgccgcaagaacgatcagaaagatgtcgccatcgtgcgtatcgaacagctttatccgttcccgcatcaggcgatgcaggaagtgctgaaacaatatgctcacgtacatgattttgtctggtgccaggaagagccgcttaaccagggcgcatggtactgcagccagcatcatttccgtgaagtgattccatttgggtcagccctgcgttatgcaggtcgcccggcctccgcctctccggcggtagggtatatgtccgttcaccagaagcagcaacaagatctggtcaatgacgcgctgaacgtcgat

SEQ ID NO: 19707 - DNA, 1551 bp, Enterobacter cloacae
atgaagttgccctttaagccacatctgctcgtccttgtgtgcagtgccgggctgtttgccgcctcgggcgtcatgtttgtcaaaggccgcgccacggagcccgctgcgccagccgccgtcacacaacaaccggctccaccggcagcgcctgccgcagcccagtccgcccctgctgtcgcgccagcctacactgccgcgcaaatcgatcagtgggtcgcccctgttgcgctctaccccgatgccctgctctcacaaatcctgatggcctcgacctatccggccaacgtgatccaggcggcgcagtggtcgaaagacaatcctaaaatggaaggggacgcggcgattcaggccgttgccagccagccctgggatcccagcgtaaaatcgctggtcgcgtttcctcagcttatgtccctgatgggtgaaaacccgccgtgggtacaaaatctgggtgatgcgtttctcgcgcagccgaaggacgtgatggattccgttcagcgcctgcgcgcgctggcgcagaagaccggcgcgttacaatccacgcctcagcagacggtcaccaccgtgacaaaaccggcgccagcgaaaaccagcaccgccgaaaccacgaccacgacgacgtccgcgcctacggtaatcaaaattgaatctgccgacccgcaggttgtttacgtcccgacctataaccccaatacggtttacgggacctggccaaacgccgcctatccgcccacctatctcccgcccacgcccggggagcagtttggcaacagcttcgtaaacggtttaggcttcagcctgggcgtcgccacaacctatgccatcttcagcagcatcgactgggatgatgacgatgactgggatcatcaccatgacgactgggataatcacggcggctataaccgcaacggtgataacaatatcaatatcaacgttgagaacttcaataaaatcagcggacagcgcctgacggacgccaaccgcacctggcagcacaacccggcctatcgggaaggcgtgccctatccgactaaccagctcaacactcgcttccacgccaccaacacagccacagggctcagttcaacgcagcaaaaaccggtaaatcgcgacagccagcgtcaggccgcgctgagccagatggagaaatccacgggcaaaaccttcccgcaaacggcgcgcaccggaacgaaagacgtgcagcgtcaggcctcaggtgaacagctgaagcagatttcgcagcgcaacaactaccgcggctacgacaccaaaccgcagacggcgaagcggagtaccgcgcagcagcgagaaaaccgccagaccaccgcccagagacatgagaagcgggtttcgcagcccgtgcagcaacgctctctccagcagcgaaacagtcagccccgggccaatgcgctgagcggtaacgacagccgctccgcgaactggcaggcgcagcagcagcgcggtgcgcaaagcagacagctcgctgcgcgccagcagcagccacgtcaggcgtccggtggacgtgctgaacgccgtgaaattcgacatcgc

SEQ ID NO: 19708 - DNA, 1422 bp, Enterobacter cloacae
atgagcacagaaatcaaaactcaggtcgtagtacttggggcaggcccggcaggttactccgcagcattccgtgcagcggatttaggtctggaaaccgtcatcgtagaacgttacagcaccctcggcggtgtttgtctgaacgtcggctgtatcccttctaaagcgctgctgcacgtggcgaaagttatcgaagaagccaaagcgctggctgaacacggtatcgtcttcggcgagccgaaaaccgatatcgacaaaattcgtacctggaaagagaaagttatcactcagctgaccggcggtctggcgggtatggccaaaggccgtaaagtgaaagtggtaaacggtctgggtaaattcaccggtgcgaacaccctggaagtggaaggcgaaaacggcaaaaccgtgatcaacttcgacaacgcgatcatcgcggcaggctctcgcccaatcgaactgccattcattccgcatgaagatccacgcgtgtgggattccaccgatgcgctggagctgaaaaccgttcctaagcgtctgctggtcatgggcggcggtatcatcggtctggaaatgggtaccgtgtaccatgcgctgggttcagagatcgacgtggttgaaatgttcgaccaggttatcccggctgctgacaaagacatcgttaaagtcttcaccaaacgcatcagcaagaaattcaacctgatgctggaaaccaaagtgactgccgttgaagcgaaagaagacggtatttacgtttccatggaaggcaaaaaagccccatccgaaccgcagcgttacgacgccgtgctggtggctatcggccgtgtgccgaacggtaaaaacctcgacgcgggcaaagctggcgtggaagtggacgaccgtggctttatccgtgttgacaagcagctgcgcactaacgtgccgcacatctttgctatcggtgatatcgtcggtcagccaatgctggcacacaaaggtgttcacgaaggtcacgttgccgctgaagttatcgccggcatgaagcactacttcgatccgaaagtgatcccatctatcgcgtacaccgagccagaagttgcatgggtcggtctgactgagaaagaagcgaaagagaaaggcatcagctatgaaactgccaccttcccgtgggctgcttctggccgtgctatcgcttccgactgcgcagacggtatgaccaaactgatcttcgacaaagagactcaccgcgtgatcggtggtgcgattgtcggtaccaacggcggcgagctgctgggtgaaatcggtctggctatcgaaatgggctgtgacgctgaagacatcgcgctgaccatccacgctcacccgactctgcacgagtccgtgggcctggcggcagaagtgtttgaaggcagcatcaccgacctgccaaacgcgaaagcgaagaagaaa

SEQ ID NO: 19709 - DNA, 1896 bp, Enterobacter cloacae
atggctatcgaaatcaatgtaccggacatcggggctgatgaagttgaaatcaccgagatcctggtcaaagtaggcgacaaggttgaagctgaacagtcgctgatcaccgtagaaggcgacaaagcctctatggaagtcccgtctcctcaggctggcatcgttaaagagatcaaagtctctgttggcgataaaaccgagactggcaaactgatcatgattttcgattccgccgacggtgcagcagctgctgcacctgcgcaggaagagaagaaagaagccgctccggccgccgctgctccagcagctgccgcagcagcaaaagaagtgaacgtgcctgacatcggcggtgacgaagttgaagtcactgaaatcctggtgaaagtgggcgataccgttgcggctgagcagtcactgatcaccgtagaaggcgacaaagcctctatggaagtgccggctccgtttgcgggtaccgttaaagagatcaagatcaacaccggtgacaaagtgtctaccgggtcgcttatcatgatcttcgaagtggcgggtgcagaaggcgctgccgcgcctgcgcaggccgctgctccggctccggctgctgcaccagcagctgctggcggcgcgaaagacgttaacgtaccggacatcggcggtgacgaagttgaagtgaccgaagtgatggttaaagtgggcgacaaagttgccgctgaacagtcactgatcaccgtcgaaggcgacaaagcttctatggaagtgccggcgccgttcgcgggtaccgtcaaagagatcaagatcagcaccggcgacaaagtgtctaccggctctctgatcatggtcttcgaagtggaaggagctgcgcctgccgcagctccggctgccgcggctgctccagcccctgctgctgcaccggctcaggctgctaaaccagccgcttcccctgctgctaaagcagaaaaatctgagttcgctgaaaacgacgcttacgtccacgctaccccgctgattcgtcgcctggcgcgcgagttcggtgtgaacctggcgaaagtgaaaggaaccggccgtaagggtcgtatcctgcgcgaagacgttcagacctacgtgaaagacgcggtgaaacgcgccgaagctgcacctgctgcagccgccggtggcggtatcccgggcatgctgccatggccgaaagtggacttcagcaagttcggcgaaatcgaagaagtggagctgggccgcatccagaaaatctctggtgctaacctgagccgtaactgggtgatgatcccgcacgttacgcacttcgacaaaaccgatatcaccgatctggaagcgttccgtaaacagcagaacgctgaagctgagaagcgcaaactggacgtgaaattcaccccagtagtcttcatcatgaaagccgttgctgctgcccttgagcagatgccacgcttcaacagctccctgtccgaagacggccagaagctgacgctgaagaaatacatcaacatcggtgttgcggttgatacgccaaatggtctggttgttccggtcttcaaagacgtgaacaagaagagcatcactgagctgtcccgtgaactgaccgtgatctccaagaaagcgcgtgatggtaagctgactgctggcgaaatgcagggcggttgcttcactatctccagcatcggcggcctgggtaccacccacttcgcaccgattgttaacgcgccggaagtggctatcctcggtgtgtccaagtccgcgatggagccggtgtggaacggcaaagagttcgtgccgcgtctgatgatgccaatctctctgtccttcgaccaccgcgtgatcgacggtgctgatggtgcgcgcttcatcaccatcatcaacaacatgctgagcgacattcgccgcctggtgatg

SEQ ID NO: 19710 - DNA, 1311 bp, Enterobacter cloacae
gagctggcgctggggctgggtcaggttgatacgcacaatatggaactgaccgatggcggggtgcttaacgttgccagccgtgattacgtcctgaacagcgatttgaacaacgcacgctatatcactaacgataagtacaatgccgattacgactacggtgttgtggcgattaactctaatggccatctgtcagtaaacggtgacgttgcaggtaactaccaggtgcgcatcgacgatgcgaccggtgccggttccgttgctgattacaaaaacaaagagattattcgcgtctatgacaataatgcggataccacagccagctttactgccgcaaacaaagccgatttaggcgcttacacctatcaggcgcagcagcagggtgacgccgttgtccttcagcagaaagagctgaccgactctgccaatatggcgctgagcatcccatctgccaataccaatatctggaatctgcagcaggataccgttggcacgcgtctgaccaacagccgccacggcctggcggataacggcggggcgtgggtgagctacttcggtggcaacttcgacggtgacaatggcgttatcagctacgatcaggacgtgagcggcattatggtgggtgtggacacccagattgacggtaataacgcgaaatggatcgtcggtggtgcggcaggtttcgcgaagggtgatgccagcgatcgtaccggtcaggtcgatcaggatagccagactgcgatgatctatgcgtcagcgaagttcatgaacgatctgttcctcgacagctccctgagctacacccgcttcaacagcgatctctccgccaacatgagcaacggtcagtacgttgacggcaataccacgaatgatgctgttggttttgggctgaagctgggctatgactggaagccaaacctctctggctactttacgccatatgccgccgtctctggcctgttccagtctggcgatgattatcgtctgagtaatgacatgcgcgctgatggacaatcttacgatagcctgcgttatgaactcggcgttgatacgggttataccttcaactacggcggcgaacaggctctgacgccttacttcaaactggcctacgtctatgacgacgccgataacaatgccgatattaacggtgacagcattgataacggcgtgaaaggctccgctgtgcgggtagggctgggcacccagttcagcttcacgaagaacttcagtgcgtacaccgatgctacttatctgggcggcggcgacgttgatcagaactggggcgcaaatctgggcgtgaaatatacctgg

SEQ ID NO: 19711 - DNA, 1098 bp, Enterobacter cloacae
atggctaagcagcgcgtaggtattgtctttgggggaaaatcagcggagcacgaagtgtcattgcaatcggccaaaaatatcgttgatgcgatcgataaaagccgtttcgacgtggtgctgctgggcattgataaacagggtcagtggcacgttaacgatgccagccagtatctgctgaacgctcacgatccggcccatatcgcccttaatccttcggaagtgagcgtcgccaccgtacccggcgtcgtgaaggggcagctcatcgacgccggcaacgctcaggctctcgcccagatcgacgttgtcttccctattgttcacggcaccctgggcgaagatggttccctgcaggggatgctgcgcatggccaacctgccgttcgtcggctcggacgtcctcggctctgcagcgtgcatggacaaagacgtcaccaaacgcctgctgcgcgatgccgggctgaatattgcgccattcgtgaccctcacccgcgcaaaccgcgacaaacacagcttcgcgcaaatcagcggagagctgggtctgccgctgtttgtgaagccggcaaaccagggctcctccgtgggcgtcagcaaagtcaccagcgaagcagagttcacgcaggccgtccgtctggcgtttgagttcgaccataaagtggtggttgagcagggcatcaaaggccgtgaaattgagtgcgccgtgctgggcaacgattttccacaggcgagcacctgcggcgaagtggtgttaaacagcgacttctactcgtacgacaccaaatacattgatgacaaaggcgcgcaggttgtcgttcctgcggatatcgatccggcgattaacgataagatccgggcgatcgccattcgcgcttatcagacgctcggctgctgcggcatggcgcgcgtggatgtgttcctgacggcggaaaacgaggtggtgatcaatgaaatcaacacgctgccggggttcactaacatcagcatgtatccaaaactgtggcaggccagcggcctgagctacccggaactgatcacccgcctgatcgaactggcgctggagcgtcacgccgccgacagcgcgcttaaaagttccgtaaacagt

SEQ ID NO: 19712 - DNA, 621 bp, Enterobacter cloacae
atgaacgttaatgcgaaaccgctttctgaattacgccggctcgaacagtatttaacagcggccagtactccttttacatgtgcgccccagcaattaattacgtcagacgaatggaatgagccttgtacgatcgtattacaaaccggcgttattgaggtttatcgaacttctgatgaactgctggtggggattgcgactgccccttttatattcgggctgtctacggtggtgattaatcactctcacgaatacagggtaattgctaaaacggcctgtaccggtttttatttgcccacggaaaccacccgtcaacttatccagcagtattcactctggaaagaggccttctgctggttatcctggataacttacattcttgagaaacgcgataagcagctggtgggaaataactcctatcaccagatccgctcaatgctgctgaatatggcggaatgggatgaaacgctgcgttcaaaaatcggtgtgatgaatcatattcaacagagcacaagaatttcacgctccgttgttgccgaggtgcttgccgccctgaggcagggaaactatatcaatatgagccggggcaagctggtcagcatcaaccgcttgcccacggaatat

SEQ ID NO: 19713 - DNA, 2295 bp, Enterobacter cloacae
atgctgttgtcagaattcatgtctcttatcctttttctggcttctgtcggcgtttacgcctggaaagccggccgtcacacctggtggtttatcgccacgctggtggtgctcggcatttttattattttaaacattaccttatacgccagcgactactttaccggtgacggtattaacgatgcggtgctctacacgctgacgaacagcctgacgggcgcgggcgtgggcaaatacattcttccggggctcggccttatcgtcgcgctggtgacgatttttggcgcgctggcctgggtgctgcgccgacgtcgccatcttccgcaccatcatggctacagcctgctggcgttattcctggcgctggcatccgtcgacgccagcccggcgttccatcagatcaccgagctggtgaaatcccagtcgcgcgacggcgatccggatttcgcggcttactacaaagaaccgtccaaaacgatcgccagcccgaagctcaatctggtctacatctacggtgaaagcctggagcgcacgtactttgataacgatgccttccccaacctgacgccggacctgggcgcgctgaaaaatgaagggctcgatttcagccacaccatgcagcttcccggcacggattatacgattgccgggatggttgcctcccagtgcggtatcccgctgttcgcgccttttgaaggtaacgcctcagcctcaatgtcgacgttcttcccacagaatatttgcctcggcgatatcctgaaaaactccggctacgaaaactattttgtgcagggggcaaacctgcgctttgccggaaaagacgtgttcctgaaatcccacggttttgaccacctgtatggctcagaagagttaaaaacgacggttgccgatccgagctaccgcaacgactggggcttctatgacgatacggtactcgacgaaacctggaagaaattcgaggagctttcccgcgcgggcaagcgtttctccctctttgcgctgacggtggatacccaccatccggacgggttcgtctcgcgcagttgcaaacgcaaaagctacgacgtggacggcaaaaacaacaagtccttcagcgccgtcacctgcagtcaggagcacattgccgcgctggtcgagaaaatcaaagcctcgccctggtttaaaaacaccgtcatcgtcgtttcgtctgaccatctggcgatgaaaaacagcgcctgggatcggctcaacaagcaggaccgcagcaacctgttctttgtcctgcgcggcgaccagccgcagcaggaggtaattgccaccaaacgcaactccatggataacggcgcaaccgtgctggacattctgggcggcgacaactttattggcctgggccgcagcacgctgtcggggcaatccctgtcggaagtgttcctcaacatgaaggataaaatcctcgcctggaagccagacattatccgcctgtggaacttcccgaaagagatgaaggacttcaccatcgatcgggataaaaacacgattgccttctcgggcagcagcttccgtctgccgctgctggtgcgcgtgtcggcggggcgcgtcgagccgctgccggaaagcgaatattccgcgccgctgcgctatcagctggccgattttgctccgcgcgataatttcgtctgggtcgaccggtgctacaaaatgggccagctctggtcgcagccgctggcgctttctaccgactggtgcgtctctcagggtcagcttggcggagagcaaaccgtgcagcacgtggataaagcccagtggaaaggcaaaaccgcgttcaacgatacggtgattgataccgcgcgctatcagcacaacatcgacatgctaaaagtcagcgataacgatattcgctacaaagcggacagctttatctttaacgtggccggcgcgcccgaggaagtgaagcagtttagcggcatctcgcggcctgagtcctggggacgctggtcaaacgcgcagctgggcaacgaggtgaaaattgagtacgcccacccgctgccggaacagttcgacctggtgatcaccgccagagcgtatggccctaacgctaacaagcccgtacccgtgcgcgtaggcgatcgggagcagacgctgacgctcgggaacgacgtgagcacgcagacgctgcattttgagaatccttcgcgcagcaataccctggtgatcgtgccgccggatccgcagtccacgaacgaggggaatatccttgggcactcaccgcgcgagctcgggatcggcatggttgaaatcaaaatcgtcagcaaagcgggt

SEQ ID NO: 19714 - DNA, 1848 bp, Enterobacter cloacae
atgagaagagttctgacaacgctgatgattttgctggtggtgctggtggctggcctttcggcgttggttctgctggttaaccccaacgatttccgcgcttatatggtgcggcaggtcgaggcacgcagtggttatcaactgaagcttgacgggccgctgcgctggcacgtctggccgcagctcagcattctctctggccgcatgtcgctcacggcgccgggggcggcccagccgctggtgtccgcagacaacatgcgccttgatgtggcgctgttcccgctcatttcccatcagctgcaagttaagcaggtgatgctgaaaggcgcggtgatccagctcactccgcaaaccgaagccgtgcgtgatgccagtgcgcctgttgcgccgcgcgaaaatactctgcctgatgatccgtccgataccggctggtcctttgatatcggcaagctgaaagttgccgatagcgtgttggttttccagcatgagcaccaggagcaggtgaccattcgcaacattaatctgcagatggaacaggatgctcatcatcttgcgtcgctggaatttagcgggcgcgtaaaccgcgatcagcgtgatttgaccctgtcgctgaatgctaatgtgaacgcctcagactatccgcaccagcttacggccgacatccagcagctgaactggcagctgacgggtgccgatcttcccacccagggggtcaccgggcagggaacgctgcaggccgtgtggcgcgaagagcaaaagcagctggagctggataatctcaacctgcaggcaaatgacagtagcctgaaggggcaggcgagcgtcacgctcgaagagaagccgaagtgggtgctgaatctgcagtttgacaagctcaacctggaaaatctgctgccgcctctgcccgccagcgccacggacagcgatgccacgcagacggggcaaagccaggcaccggtgtcacgtccggtaatctcgtctaacctcgatcagcctgactataacgccctgcgcgggttcacggcggatattctgctgaaagccaatagcctgcgctggcgcggcattgattttagcgacgtgagcagccagatgtttaaccacaacggtttgctggtgatctccgagctgagcggaaagatgggcgcagggagcctctcgctgcccggcacgctggacgtccgtaaagacgaagccagcgccgaattccagccgcgtctcgacaacgttgagataggcaccatcctgaacgcgtttaactatccgatatccctgacggggcagttgacgctcgcgggtgacttctcaggcacgaaaattgatgccgatgctttccgccgcgagtggcaggggcaggcgcatcttgatctgaaaaattcccgtatggaagggcttaacttccagcaactggtgcagcaggcggtcgagcgcagcagcgatgtgaaggcccaggataactacgacagcgccacgcgcctcgacagcttcaccacggacctgacgctggacaacggacaacttactctcgacggaatgcagggtacttcttcactcttatcaatgaccggtgaaggtaagctggatctggtgaaagaaaccgcggacacgcgctttaacgtgcgcgtactttccggctggcagggtgaaagcaagctcatcgacttcctgaaagagacgccggtcccgctgaccgtatacggcaaatggcaggccctgaattaccgactggaggtggatcagatcctgcgtaagcatctgcaggatgaagcgaaacgtcggcttagcggctgggcggaacgcaataaagattcacaggacggtaaggacgttaagaagctgctggataagctt

SEQ ID NO: 19715 - DNA, 1172 bp, Enterobacter cloacae
ttgtcgccatgaagacatttcgttaaagtctcgccccttctcactggcatggggattcatcgtgtttattggattcgactacggtacggcaaactgctcggttgcgattatgcaaaacggacagccacagcttctgaaaatggaaaaagagagcacgctgctgccgtcaatgctctgcgcgccgacgcgtgaagcggtaagcgaatggctgttccgccaccatcaggttccggccacggcggcggagacccaggcgctgctgcgccgggcggtcagctttaatcgtgaggaagacatcgacgtttcgccgtccagcgtgcagttcggcctctcttcgctcgggcactacattgaagatcctgaagaggtttacttcgttaagtcgccaaaatccttcctcggcgccacggactgaagccgcagcaggtggcgatgttcgaagacctggtgtgcgcgatgatgctgcatattcgcaatcaggcgcagacgcaggtctccgatgcgattacccaggcggtcattggccgcccgatcaacttccaggggctgggcggcgacgaggccaaccagcaggcgcaggggatccttgaacgcgcggcgcaccgggcaggctttcgcgacgtggtgttccagtacgagccggttgccgcggggctggattttgaagccacgctgacggaagagaagcgcgtattagtcgtggatatcggcgggggcacaacggactgctcgctgctgctgatgggaccgcagtggcataaccgacgcgatcgtgaaaatagcctgctcgggcacagcggctgtcgcgtaggcggtaacgatctcgatatcgcgctggcattcaagagcctgatgccgctgctcggcatgggcgggcaaaccgaaaaaggtatcgccctgccgatcctgccgtggtggaacgcgattgccattaacgacgtgcctgcgcagagtgatttttacagcaccgccaacggccgcttccttaacgatctggtgcgcgacgcgcaggacgccgaaaaagtcgccctgctgtataaagtgtggcgtcagcgcctgagctaccgcgtggtgcgcactgccgaagagagcaaaatagccctttccgaccgtgctgagcatgcggtctccttgccgtttatcagcgacgatcttgccaccgcgatttcgca

SEQ ID NO: 19716 - DNA, 960 bp, Enterobacter cloacae
atgagcgcaatttccctgatccagccggatcgtgacctcttctcctggccccagtactgggcggcctgctttggaccggcgccattcctgccgatgtcccgggaagagatggaccaactgggctgggacagctgcgacatcattctggtcacgggcgatgcctacgttgaccatccgagcttcggtatggccatctgtggccgtatgcttgaggcgcagggcttccgcgtggggatcatctcccagcctgactggaacagcaaagacgactttatgcgtctgggtaaaccgaacctgttcttcggcgtgaccgcaggcaacatggattcgatgatcaaccgctacaccgccgaccgtaagctgcgccatgacgacgcctacacgccggataacgtggcgggcaaacgccccgaccgcgcaaccctggtctatacccagcgctgtaaagaagcctggaaagacgtgccggtgatcctgggcggcatcgaggcgagcctgcgccgcaccgcccactacgactactggtcagataccgttcgccgctcggtgctggtggattccaaagccgacatgctgatttacggtaacggcgagcgtccgctggtggaagtggcgcaccgtctgtcgcagggtgagccggtgagcagcatccgcgacgtgcgcaataccgccattatggtgaaagaggcgctgccgggctggagcggggtggattcccgcatcattgatatgccgggcaaaatcgacccgatcccgcacccgtacggcgaagatctgccgtgtgccgataacaagccggttgagccgaaaaaagcggaagcgaaggctatcgttgtgcagccgccgcgcccgaaaccgtgggaaaagacctacgtgctgctgccgtcctacgagaaggtgaaagccgacaaggtgctctacgcgcacgcgtcccgtattctgcaccatgaaaccaaccct

SEQ ID NO: 19717 - DNA, 1494 bp, Enterobacter cloacae
gtgcttgtgcggagctctgtcgtgaagcccaacgattcgttacatgtatcccagctgcgggttgtccttcacctctgcggttttctggttctgctgtacagcctttccatgctgccgccgatggttatcgccctgctgaataaagagcggacctactttgcctttctgaccacctttttaaccttttttactctcggagggttaacctggcgggcaacccgtcacgccggcatacagctgcgcacccgcgacgggtttgtgattatcgttctgttctggctgctgttttcattcattagcgccatgccgctctggatggatgacgggctacggctctcctttgccgacgcgctctttgaaggggtttccgggatcaccaccaccggggcaacggtgatcggggacgtcagtgccctgcctaagtcgtacctttattaccgcgcacagctgaatttcattggcgggttaggcgtcatcgtgctggccgtcgcggtcctgccgctgctgggcattggcggcatgaagctctatcagtcagagatgccggggccgttcaaggaggagcgtctgactccccgccttgccgataccgcgcgcacgctgtgggtgacctacttcgcgctgggcgtggcctgcaccctggcctactggctggcgggaatgtcattttttgacgccctctgtcacgggctgtcgaccgtgtcgctgggcgggttctccacccgcagcgagagcattgggttttatgacagccacgcgattgagctggtcgccggggcgttttcactgctctccgcgttcaacttcaccctctggtacgtcgccattgtcagacgcaccctgaaaccgattcgccgcagcccggaggttaaattctttctgagcgccgccgcggtgattattgccatcaccgcctggcaggtctggcatgccgggatgtacaacgctacggatagcctggtgcacgccttcttccttgccagttcgatgatgaccgataacggcctttcgaccgccgactatgcccaatggcccgcacacaccattttcctgctgttgagcgccagcttttttggcggctgcgtaggctcgacctgcggcgggatcaaagccctgcgttttctcattatgttcaagcagagtattcaggagatgaaccagctggcgcatccgagagcgctgctgagcattaaggtgggcaaaagcgtggtgaatgaacgcgtcctgcgctcggtatggagcttcttttttctctacgtcatgatcacgggcttttttgtctggtcgctcaatctgatgggctacgacctgttcaccgcattcgcaacggtcgccgcctgcatcaacaacatggggctggggtttggggagacggcgtcgacgtttggcacgttaacagagggggcaaaactgctgatgtgcgcggcgatgatcttagggcgtctggaaatttacccggtgctgattctgttctcgcgctttttctggcgggca

SEQ ID NO: 19718 - DNA, 742 bp, Enterobacter cloacae
gagctgagcgacccggagatgatgcgctacaaccgccagattgtgctgcgcgggtttgatttcgaaggccaggaagcccttaaggcagcaagcgtgctggttgttgggctgggcggtcttggctgcgccgccgcgcagtatcttgcggcggcgggcgtgggcaggatgacgctgctggatttcgataccgtgtcggtgtcaaatctccagcgccagacgctgcacagcgacgcgacggttggccagccgaaagtggactctgcccgctcggcgctggcgcgcatcaaccccaacgttcagttcaccctgattgacgcgatgctggataacggcgcgctgtcggcgcagattgcgcagcatgacctggtgctggactgcaccgataacgtcaccgtccgtaaccagttgaacgcaggctgttttgcccacaaaatcccgctggtctccggcgcggcgatccgcatggaggggcaaatcagcgtcttcacgtacgcggaaggtgaaccctgctaccgctgcctgagccgcctgttcggcgagaacgcgctgacctgcgttgaggcgggcgtgatggcacccttggtcggcgtgattggctccctgcaggcgatggaagcgatcaaagtgctggcgcgctacggcacgcctgcccgctgggaaaatcgtaatgtatgacgcgatgacctgccagttccgcgagatgaagctgatgcgtaacccggggtgtgaggtttgcggaggt

SEQ ID NO: 19719 - DNA, 1232 bp, Enterobacter cloacae
atggattttaccgccggactgatgccgcttgagacggcactcacgcagatgcttgaccgagtttccccgctgcatgacgttgagacgctgcccctcgtgcgctgttttggccgtattgccgcgcgcgatatcgtctctccgctcaacgtgccggggtttgataattccgcgatggacggttacgcggtacgcctggcggatctccaggcgggtaacgccctgccggtggcgggtaaagcctttgcgggccagccgtttagcggtgaatggcctgcgggcacctgcgtgcgcatcatgaccggcgcgccggttccggccggctgcgacgccgttgtgatgcaggaagagacagaacagaccgacggcggcgtgcgttttaccgcgaacgttaaagcgggccagaacatccgccgcacgggcgaagatatcacccttggcgcaacggtcttcgccgccggacagaagctgacggcaggtgagctgccggtgctggcgtcgctcggcgtggctgaaatcgacgttatccgtaaagtgcgcgttgccgttttctccaccggtgacgagctgcagcttccgggccagccgctgcaggacggccagatttacgataccaaccgcctggcggtacacctgatgctggagcagctgggctgcgaggtgattaacctcggcatcattcctgacgatccggaaaaactgcgcgccgcgtttatcgaggcggataacgccgccgacgtggttatcagctctggcggcgtctccgtgggcgaagcggattacaccaaaaccatccttgaagagctgggggaaatcgccttctggaagctggccatcaagccgggcaaacccttcgcgtttggcaagctcacgcacggctggttctgcggcctgccgggtaacccggtctcggcggcactcaccttctaccagttggtgattccgctgctggcgaacgtttcaggcaacagcgccactcgctgccggaacgccagcgcgtgcgcgctgccacgcgcctgaaaaaatcgccgggtcgtcttgacttccagcgcggcattctggcgcgcaacgcggacggcgagctggaagtgagcaccaccgggcaccagggctcacacattttcagctccttcagccagggcaactgctttatcgtcctggagcgcgagcgcggcaatgtggaagcaggcgagtgggttgagatcgagcgttttaaccacctgttcggaggctga

SEQ ID NO: 19720 - DNA, 1806 bp, Enterobacter cloacae
gtgctggctgtccatcagctcaatattgcgtttcaggaagagcggcagttcatccccgcagtacagaatttatcgttcacgctcaggcgcggcgagacgctggcgattgttggcgagtccggctccggtaaatcggtcaccgcgctggcgctgatgcgcctgctggaacagacgggcgggcaaatcagcagcgagaaaatgctcctgcgccgccgcaaccgtcaggtcattgatttaaacgagctgagcggagcgcagatgcagggcgtgcgcggggcggacattgcgatgatcttccaggagccgatgacttccctgaacccggtttttccggtcggggaacaaatcgccgagtccatccgcctgcatcaggggctgagcggcgatgaagcgctcaaagaggcccgacggatgctggagctggtgcgcattccggaggcgcaggccattctgggtcgctacccgcatcagctttccggcggcatgcgtcagcgggtgatgattgccatggcgctctcgtgccgtccggcggtgctgatcgccgatgaaccgacgacggcgctggacgtgacgattcaggcgcagatcctgcagctcatcaaagtgctgcagcaggagatggagatgggggtgatctttatcacccacgatatgggcgtggtcgccgatatcgccgatcgcgtactggtgatgcacaagggcagcgcggtggaaaccggcccggtcgagcagatttttcacgcgccggttcatccttacaccaaagcgctgctggcggcggtcccgcgacttggggcgatgaacggcagcgatttgccgcgccgcttccccctgatttctcttgaggcatctgagcagcaggaggatgagcgcgagcaggacaccgtggtgccgggcaagcccattctggaagtgcgcgatctggtcacccgttttccgctgcgcagcggcatactgaaccgcgttaagcgcgaagtgcacgcggtggaaaacgtcagcttcgatctctggccgggcgaaacgctggcgctggtgggggagtccggctgcggtaaatccaccaccgggcgcgcgttgctccgtctggtggaatcccaggaaggcagcatcacctttaacggcgagcgcattgatacccttccggacagcaggctgcaggcggtgcggcgggatattcagtttattttccaggatccgtacgcctccctcgatccgcgccatacggtggggtattcgatcatggagccgctgcgggtgcataacttgctcgacggcgaagcggcccagcgccgcgtggcctggctgctggagcgcgtcggcctgaagccggagcacgcctggcgttatccgcacgagttttccggcggacagcgacagcgtatctgcatcgccccgcgcgctggcgctgaacccgaaagtggtgattgccgatgagtccgtctcggcgctggatgtctctatccgggcgcaaatcatcaacttactgctggatttacagcgggatatgggcattgccttcctgtttatctcgcacgatatggcggtggtcgagcgcatcagccatcgcgtggcggtgatgtttatggggcagatcgtggagattggtccgcgaagggcggtgtttgaaaacccgcagcatccgtacacccgcaagcttatcgcggcggtcccggtagccgatcccgcgcatcgtcacggccagcgcgtgctgctgcaggatgaaatgccgggcaatattcataaacgcggcgaggccgtggagcgcgtgcactgcgcgaggtcgagccgggtcatttcgtcgctccc

SEQ ID NO: 19721 - DNA, 909 bp, Enterobacter cloacae
atgagattgttgaactggcgacgtcaggccgttttaaacgcgatgccggggctaaaaccggaccacgtccgcaccccgtggtctgaattctggcggcgttttcgccgtcagccggtcgcgatgaccgcggggctgtttgtgctgctgctgattgcagtggcggcgattgcgccgtgggtggcaccgtttgatgcggaaaactattttgactacgaccgtctgaacgacggaccgtcgatgctgcactggttcggcgttgactccctcgggcgcgatatctttagccgcgtgctggtcggggcgcaaatctcgcttgccgccggggtgttcgcggtgctgatcggcgcggccatcggtaccgtgctgggcctcgttgccgggtattacgaaggctggtgggaccgcatcatcatgcgcatctgcgacgtgctgtttgcgtttcccggcattctgctggcgattgccgtggtggcgatcatgggcagcggcatggcgaacgtcatcattgcagtcgcggtcttttcaattccggcctttgcccgtctggtgcgcggcaacacgctggtgctgaagcagcagacctttatcgaatccgcccgcagcatgggggccagcgacgccacgatcctgttcagccatattctgccgggtacggtgtcgtccattgtggtctatttcaccatgcgcatcggcgtgtcgattatctcggcggccagcctgtcgtttctggggctaggcgcgcagcctccgacgccggagtggggcgcgatgctgaacgaggcgagggcggatatggtgattgcgccgcacgtggcgatcttcccgagtctggcgattttcctgaccgtgctggcgtttaacctgctgggggacggactgcgcgacgcgctggatccgaggattaagggg

SEQ ID NO: 19722 - DNA, 1327 bp, Enterobacter cloacae
atgagcaatgttacgcaccagccgaaaatcggcttcgtctccctgggctgcccgaaaaacctcgtggattccgaacgcatcctgaccgaactgcgcaccgagggctatgacgtggtgccaagctacgacaacgccgatatggtgatcgtgaacacctgcgggtttatcgacagcgcggttcaggaatcactggaagccatcggtgaagccctgacggaaaacggcaaagtgattgttaccggctgtctgggcgcgaaagaagaccagatccgcgaagtgcacccgaaggtgctggagatcaccggcccgcacagctacgagcaggtgctggaacatgttcatcactacgtgcctaaaccaaagcacaacccgttcctgagcctggtgccggagcagggcgttaagctgacgccgcgccactacgcgtacctgaaaatttccgaaggctgcaaccatcgctgcaccttctgcattatcccgtccatgcgtggcgatctggtgagccgtccgattggcgaagtgctggcggaagctaaacgtctggccgacgcgggcgtgaaggagctgctggtcatctcccaggacacttcagcttacggggtggacgttaaacaccgctccggtttccacaacggcgagccggtgaaaaccagcatggtcggcctgtgcgagcagctgtctaaactcggtatctggacgcgtctgcactacgtctatccgtacccgcacgttgacgacgtgatcccgctgatggcggaaggcaaaattctgccgtacctggatatcccgctgcagcacgccagcccgcgtatcctgaagctgatgaagcgtcctggctccgttgatcgccagctggcgcgcatcaagcagtggcgtgaaatctgcccggatctgaccctgcgctccaccttcatcgtcggcttccccgggtgaaaccgaagaagacttccagatgctgctcgacttcctgaaagaagcgcgtctggaccgcgtaggctgcttcaagtacagcccggtagaaggcgcaaccgccaacgagctggcggaccaggtgccggaagaggtgaaagaagagcgctggaaccgcttcatgcagctgcagcagcagatctctgccgagcgtctgcaggaaaaagtgggccgcgagatcatggtgatcgttgacgaagtggacgaagaaggcgcgattggccgcagcatggcggacgcccctgagatcgacggcgcggtgtacctgaacggcgaaaccaacgtcaaaccgggtgatattattcgcgtgaaggttgaaaacgcggacgagtatgacctgtggggtagccgggtttaa

SEQ ID NO: 19723 - DNA, 1353 bp, Enterobacter cloacae
ctggcgggagcgcttctcgttttatgggggctgattgtcgccgccgaccgcctgtggccgttgcctctgaaagaggttaaccccgcccgggtggtggtggatgagaagggcacgccgctctggcgttttgccgatagcgacggtatctggcgctacccggttaccattgaagaggtctctccccgctaccttgaggcgctgatccagtatgaagatcgctggttctgggatcaccctggcgtaaacccgctttctgtcctgcgcgctgcctggcaggatctcagttctggcaaagtcgtctctggcggaagcacgctcacaatgcaggtggcacgcctgctggacccacatccgcgcacctttggcggcaaagttcgtcagctctggcgggcgatgcagctggagtggcatctttccaagcgagacattctcaccctctatctcaaccgcgctccgtttggcggcacgctgcagggcgtcggagcggcaagctggacctatcttggcaaaccgccgtcgcagctcagctattccgaagcggcgctgctggcggtactgccgcaggcacccagccgcttgcgtccggaccgctggcctgaacgggccgaggcggcgcgcaacaaagtgctagaccgcatggtcacgcagggcgtctggtccgcgaagcaggtcaaagaatcacgcgaggaatcggtatggctggcgccccggcagatgccgcagctggcgccgctctttgcacgcatgatgctaggcaaaagccgcgacactaaaattgtcaccacgctggatgccgggctacagcggcagctggaagagctggcgatgaactggaaatctcgcctgccggcacgtagctcgctggcgatgatcgtcgtggatcatacggatatgaaagtgcgcggctgggtcggctcggtggatattaacgatgacacgcgtttcagccacgtggatatggtcaatgcgatccgatccccgggatcggtgttaaagccctttatttacggtatggcgctggacgatggcctgatccatcccgcctcgctgctccaggacgttcccagaaaaaccggtgattatcgccccgggaattttgacagtgggttccacggaccggtcagcatgagtgaagcgctggtgcgctccctcaacctgcccgcggtacaggtactggaagcctacgggccaaaacgttttgccgggatgctgagcaacgcgggattgccgctgatcctgcccgcgggggcgcagccgaatctgtccctgatcctcggcggggcaggcgcccggctggcggatatcacagcggcctacagcgcctttgcccgacacggtaaggcgggaaggctg

SEQ ID NO: 19724 - DNA, 1011 bp, Enterobacter cloacae
atgaatactgaagccactcacgaccaacatgaagcactctccactggcgttcgtcttcgcaacgcccgtgaacaactcggactcagccagcaagccgttgcggaacgcttgtgcctgaaggtttccacggttcgcgatattgaagaagataaggcacctgccgatctggcttcaacgttcttgcgcggttatatccgctcttacgcaaaactggtgcatatccccgaaaacgaattactgccaatgatggagaagcaggcaccggtccgtgcagcaaaagttgcgccgatgcagactttctccctggggaaacgtcgtaaaaaacgcgatggctggctgatgagctttacctggctggtgctgtttgtggtgatcggtctgaccggcgcatggtggtggcaaaaccacaaggcccagcaggaagagatcaccaccatggcagatcaatcctccgccgaactcaaccaggccggaagtgagaatgcccagaacgtgccgctgaataccgacggcgcagcttcctcaagcgagccacagaccgcagcgccagacgcgtcggcgaccgatgctgtacaggctccggcagcaacggctaacaccgctgcaccgcaggttcaggatcaaaacgcggttgttgccccttctcaggctaatgttgatactgcggcgaacgcgcctgcggctgctcagcctgcggacaatagcgcagcgactctgccaaccagcccggcgggtacggcgacagcagccgatcccaacgcgctggtgatgaacttcagcgccgactgctggctggaagtgactgacgcgacaggtaaaaaactgttcagcggcctgcagcgtaaagatggcacgttaaacctaaccggccaggctccctataaacttaaaatcggcgctccggcagcggtacagatccagtatcaaggaaaacctgtcgacctgagccgctttatcagaactaaccaggttgcacgtcttaccgttaatgccgaacaatcagcagcacag

SEQ ID NO: 19725 - DNA, 1116 bp, Enterobacter cloacae
atgcataaccaggctccgattcaacgtagaaaatcgaaacggatttacgttgggaatgtgccaatcggcgatggggcacctatcgccgttcagtcgatgaccaacacgcgcactaccgatgtagaagcgacggtcaatcaaatcaaagcattagaacgtgtaggcgcggacattgttcgcgtctccgtcccgaccatggatgccgctgaggcgttcaaactgatcaaacagcaggtcagcgttccgctggtggctgatattcacttcgactaccgcatcgcgctgaaagtggccgaatacggcgtcgattgcctgcgcattaacccgggcaacatcggtaacgaagagcgtatccgcatggtcgtggactgcgcccgcgataaaaatattcctatccgcatcggcgttaacgccggttccctggaaaaagacctgcaggaaaaatacggcgagccgacgccacaggcgctgctcgaatccgcgatgcgtcatgtcgatcatctcgatcgtcttaacttcgatcagttcaaagtcagcgtaaaagcgtccgacgtgttcctggcggtagagtcttatcgtctgctggcaaaacagatcgaccagcctctgcacctcgggatcaccgaagcgggcggcctgcgcagcggctctgtaaaatctgcgatcggtctggggctgctgctctccgaagggatcggtgacaccctgcgcgtctcgctggcggccgatccggtcgaagagatcaaagtcggtttcgatattctgaagtcactgcgtatccgcgcgcgtgggatcaacttcattgcctgcccaacctgctcacgtcaggagtttgatgtgatcgggacggtgaatgccctggagcagcgtctggaagacattatcaccccgatggacgtctccatcatcggctgtgtggtaaacggtccgggtgaagcgctggtgtcaaccctgggcgtgaccggcggtaacaagaaaagtggtctctatgaagatggcgttcgtaaagatcgtctggataatagcgacatgatcgaccagcttgaagcccgcatccgcgccaaagccgccatgatggacgaaacacagcgtatcagcgttcagcaggttgaaaaa

SEQ ID NO: 19726 - DNA, 1274 bp, Enterobacter cloacae
gtggcaaaaaacattcaagccatccgcggcatgaacgattatctgcctggcgaaaccgccatctggcagcgcattgaaggcacactgaagcaggtgctcggcagctacggttacagcgaaatccgtttgccgattgtagagcagaccccgttattcaaacgcgcgatcggtgaagtcaccgacgtggttgaaaaagagatgtacacctttgaggaccgcaacggcgacagcctgaccctgcgtccggaaggtacggcgggctgcgtacgcgccggcatcgaacatggtcttctgtacaatcaggagcagcgcctgtggtatatcggcccgatgttccgccacgaacgtcctcagaaaggtcgttatcgtcagttcaatcagttgggtgtggaagtctttggcctgcagggtccggacattgacgccgaactgattatgctgaccgcccgctggtggcgcgccctcggtatcgccgatcacgtttcccttgagctgaactctatcggttctctggaagctcgcgctaactaccgcgatgcgctggtagcgttcctggaacagcataaagagaagctggacgaagactgcaaacgtcgcatgtacagcatacccctgcgcgttctggattccaaaaacgcggatgttcaggcactgctgaacgatgcgcctgcgctgggtgactacctggatgaagaatctcgcgaacacttcgcgggcctgtgcaagctgcttgaagcggcaggcatcgcctataccgtgaatcagcgcctggtgcgcggtctggactactacaaccgtaccgtgtttgagtgggtgaccaccagcctcggttctcagggtaccgtatgtgcaggcggccgttatgacggtctggttgagcaacttggcggtcgcgcagcccctgctgttgcttcgcgatgggccttgagcgacttgttttgctggttcaggcagttaatccggaatttaaagcagattccgttgtcgatatatacctggtggcttcaggcgcggaaacgcagtctgcggcgatgcagcttgccgaacgcgtgcgcgatgcgctcccggacgttaagctgatgaccaaccatggcggcggcaacttcaaaaaacagtttgctcgtgccgataagtggggcgcaagtattgcactggtgctgggcgagtccgaagtggctaacggcgaagtggtggtgaaggacctgcgctctggtgagcagacaacggtaacgcaggacggcgttgcggcgcacttgcgcactctattgggctaa

SEQ ID NO: 19727 - DNA, 1060 bp, Enterobacter cloacae
atgcaattgcgtaaattacttctgccaggactgctttctgttacgttattgagtggttgttcactgttcagtggcgaagaagacgttgtgaaaatgtccccactgccgacggttgaaaaccagtttaccccatccaccgcgtgggatgtctccgtgggcaatgggattggtgatttctattccaaccttcatcctgcgtatgcagacagcgttgtctatgccgctgaccgcaaaggtaccgtgaaagcggtgaacgccgatgacgggaaagaagtatggtccgttaacctggcggaaaaagacggctggttctcccgtaaacctgcactgctgtctggcggtctgaccgttgccggtggtcatgtctacgtgggcagcgaaaaagcgcaggtttatgcgctgaacagcagcgacggctccattgcctggcaaacaaccgtagcgggtgaatccctgtctcgtccggtagtaagcgacggtctggtgctgattcataccagcaacggccagctgcaggcgctgaatgaagctgacggtctggtgaaatggaccgttaacctggatatgcctgcgctctctctgcgcggcgaatccgcgccggctaccgcatttggtgctgccattgtgggcggtgacaacggtcgcgtgagcgcagtgctgatgcagcagggccagatgatctggcagcagcgtatctctcaggctactggctcaacggaaattgaccgtctgagcgacgtagacacaacgccagtcatcgttaacggtgtggtttacgcgctggcctataacggcaacctgaccgcgctggatctgcgcagcggccagatcatgtggaaacgtgagctgggctctgtgaacgatttcatcgttgagggcaaccgcatctatatggtcgatcagaacgaccgtctgctggctctgagcaccgaaggcggcgtgacgctgtggacgcaaagcgatctgctgcaccgtctgctgactgctccggcactgtacaacggtagcctggtggttggcgacaccgaagggtatatgcactggatcgatccggataccg

SEQ ID NO: 19728 - DNA, 1597 bp, Enterobacter cloacae
cctttccttacgacgcgcaagcgccccatgaagctgaacaccctggtcacgctgatggtgtgcgcgattattgcctctgtgctgctggtggtttttgcgctctactccgtgcaaatcacccgggcgacccgcgatgatgttaaagatacggctctgggtatcgccagaacgctggcaaacagcccggagatccagcgcggcctgatgcagccaccccaggcggacatcattcagcccatcgccaaagccgtcacccaacgcaacgatctgctgctcaccgtggtgaccgacatgcggggaattcgctactcgcacccgaacgaagccctcatcggcctgcattttattggcaacgacctggaacctgcgctggaaggtaaagagaatgtctccgtaaaccgtggcgccctcgccgaagcgcttcgcgtcttcacccccgtttacgacagccagcacgaccagatcggcgtggtggtagtcggtatctccctcaaaaaagtggaagatcagattgcccgcggacggctcaacgccgtctggaccattttgttcagtatatttatgagctccatggcgatttggggtctggtgcgggtactgaaacgcatcctgttcgggctcgaaccttacgaaatttccgccttgttcgaacagcgtcaggcgatgctgcaagtcgcttcgcgagggggtgctggccgtcgatattcacgggcgcgtgacgatgatcaaccagaccgccagagaaatattgcttctcccctccggcaagcagaccgaaaacgccagcgcccccctgctggccagcctgcgtgaagtctctaagacgggcgtcgcgcgccaggatcacgagattagctgtaacgggcgtctattgctgtgcaatatggtgcccgttaaaagccaggatcgggtgatcggcgccatcaccaccttccgtgataaaacggaaatcagccagctgatgcagcgtattgatggcatggttaactacgtcgatgccctgcgcagccatacgcacgagtttatgaataaactgcatgtgatcctgggcctgctgcacatgaagcgctacgacaagctggaagagtacatcatccagacggcacataattaccagacggatatcggtacgatacagagcaaggtaaaatccccggttattgccgggttcctgctgggtaaaatcaatcgggcgaaagaagcgggcgtcaccctgacgctggcggatcaatgccagataccggataccgcgagcgaagagcaggtcgcggtgctgatcaccgtgctgggtaacctcattgaaaacgcgctcgacgcgatggaaggacagcaggaaggtgagatcggcctgctgctgcattatcagaacggctggctcagctgcgaagtgagcgacgatggccccggcattgatcccgctcagctggaggctatttttacaaagggcttctcaacaaaaggtgaaaaccgcggcgttgggctgttccttgcgcgccagcaaatccagaacctcggcggtgatatcaccgtcgagtctgagcccggcgtttttacccaattttttgttcacatcccctgggatagcgagaggaatatc

SEQ ID NO: 19729 - DNA, 1164 bp, Enterobacter cloacae
atgaaaagaaaagttctggcaattctggtacccgcattattaatggcaggcgcagccaatgcggctgaaatgtacaacaaaaacggcaacaaagttgacctgtacggcaaagtcgacgcgcgtcataccttctctgacaaccccggcgacgacggcgacgaaacctatgtgcaggttggcttcaaaggcgaaacccggatcgctaacgacctgatcggttacggtcagtgggaatacaaaaccttcgctaacgataccgaaggcgcgggtaacaaatcgttcaaccgcctggcgtatgctggcctgaaatatggcgaatacggctcatttgattatggtcgtaattacggcgtcgtgtacgacgttgaagcctggaccgatatgctgcctgtatttggcggtgactcttacacctggaccgataactttatgaacggtcgtgctaacggtctggccacctaccgtaaccaggatttcttcggtctggttgagggtctgaatttcgcgctgcagtatcagggtacgaacgaaggccaggatgcaacagaagatcaggaaggcacgaaaaacggccatgacgatgttcgtttccagaacggcgacggtttcggtatgtctaccacctatgattttgacttcggtctgagcctgggtgcggcatattcatcttccgaccgcacgaacacacaggttgcatacggtgcaggtaacgacaaccgctacagcccatatgcaggaggcgaacgcgctgaagcctggaccattggcgcaaaatatgatgcgcagggtgtttacctggccatgatgtatgcggaaacccgcaacatgacgccatatggtaattttggtatcgccaacaaaacgcagaactttgaagccgtagcgcagtaccagttcgacttcggcctgcgtccgtctctggcatgggtttactccaaaggtaaagacattggcggcaatgattacaacccaggtaatacatacaactacgttgatcaggatctggtgaactatatcgatctcggtatgaccttcagcttcaacaaaaacttctcgacttacgttgattataaaatcaacctgctggataacgatgaaagcttctacaaagccaatggcatctcaactgatgacatcgttggcgcaggcatgacctaccagttc

SEQ ID NO: 19730 - DNA, 1413 bp, Enterobacter cloacae
ttgaaacagagcgcacttttcatcgcattacttcccctgttaattacccctgccatttatgccgatactgcccaaaccagcgtgctggataatcgcgcggcaaaaggggatatcacccagcctggcggcgcacgccgtttatcagaagatcaaactgccgctattcgcgcttcgctgaatgataagccggcgaaaaatattattctgcttattggcgatggaatgggggattccgaaattacggcggcgcgaaattatgccgagggtgcgggcggcttttttaaaggtatcgacgcattaccgttgaccggacaatatacccattacgcgctggataaaaaaaccggtaaaccggattacgtcacggactcggcggcctctgctacggcgtggtccaccggcgtgaaaacctataatggcgcgctgggtgtggatattcacgaaaaagatcaccaaacccttctggagatggcaaaagcggcgggcctggcgaccggcaacgtctccaccgctgaacttcaggatgcaacgcccgcggcgctggtggcgcatgtaacctcgcgtaaatgctacggcccgtcagtgaccagcgaaaaatgcccgacgaacgcgctggaaaaaggcggcaaaggctcgattacggaacagttgctgaacgcgcgtcctgacgtgaccctgggcggcggcgcgaaaacctttgcagaaaccgcaacggcgggcgagtggcagggcaaaacgctgcgcgagcaggcgcaggcccgcggctatcagctggtgagtgacgccagttcgctggcagccatcaccgaggcgaaccaggacaagccgctgctggggctattctctgacggcaacatgcccgtgcgctgggaaggcccaaaagcctcttatcacggcaatatcgataaacctgccgtaacctgtacgcctaacccgaaacgcacggacagcgtaccgacgctggcggcgatgactgataaagccatctctctgctgagcaagagcgaaaaagggttcttcctgcaggtggaaggcgcgtcgatcgataagcaggatcatgcggcgaatccgtgcggccagattggcgaaaccgtcgatctggacgaagcggtgcagaaggcgcttgagttcgcgaaaaaagacggtaacaccctggtagtggtcaccgcggaccatgcgcacgccagccagattattccggcagataccaaagccccgggcctgacgcaggcgctgaataccaaagatggcgccgttatggtgttgagctacggcaactctgaagaagagtccatggagcacaccggcacccaactgcgcattgcagcctatgggccgcacgcggcaaacgtggtaggcttgaccgatcaaacggatctgttctacaccatgaaggcggcgctgggtcttaaa

SEQ ID NO: 19731 - DNA, 189 bp, Enterobacter cloacae
atgccaaccagacctccctatccgcgtgaagcgcgcattgttaccgttgaaaaaggccagacgggtcataccgtgacctggtaccaactgcgtgccgatcaccccaagccggactcgctgatcagtgaacacgagactgaacaggaagcactggacgcgaaacggcgctatgaagatcccgacataacc

SEQ ID NO: 19732 - DNA, 322 bp, Enterobacter cloacae
atgctccacccgctccagctcttcaaaaccctctccgacgaaacgcggctcgccatcgtcatgctgctccgcgaagcggccgaactgtgcgtctgcgatctctgcgtcgcgaccgccgagtcgcagcctaaggtctcccgccacatggcgctgctgcgcgagtccgggctggttatcgatcgccgtgaagggaaatgggtccattaccgtctctctcccaacatgccctgcgtgggcggcagtcgttatcgacaacagctggaactgcctgcgggaagagacgcgcatgaagctgaaaaatcgactttcaggctcgtgttga

SEQ ID NO: 19733 - DNA, 606 bp, Enterobacter cloacae
atgttagagaatctgaattatcagctgttttatcttatcaacgccacgccagcctcgcctgagtggacgatcgattttgccacctttctggcaaaagatctgatcagcatcgtgcctgcactggctgcgattctctggctgtgggggccccgcagccaggtgaaggcgcagcgccagctggtgattaaagtggcgatggcgctcggggtaagcgtcctggtcagctacattctcggccatgtcttcccgcacgatcgtccttttgttgatcacgtcggctataccttcctgcaccacgcgccggatgactcgttcccgagcgatcacggtacggtgatcttcaccttcgcgctggctttcctgttctggcatcgcctgtggtccggcgcggtcctgatggtggcggccctggcaatcgcctggtctcgcgtttacctgggcgttcactggccgctggatatggtgggcggtttcctggtcgggatgattggctgcgtgagcgcggctatcctgtggagcctcttcggtgaagcgctctaccgcacgctgtcttcgctctatcgcgccattttcgctatcccgatccgcaaaggctggatacgtgac

SEQ ID NO: 19734 - DNA, 1221 bp, Enterobacter cloacae
atggataaattacttgagcgttttttacagtacgtttcgctggatacccaatctaagccgggtgttcgccaggtgccgagcaccgaaggccagtggaagttattaaacctgctgaaagagcagcttgacgccatggggctggtcaacgtcacgttaagcgaaaaaggcactgtgatggcaacgctgccggcgaatgtccagggtgatattccggcgattggctttatctcccatgtcgacacctctccggattttagcggtaaacatgtgaacccgcagattgtggaaaactaccgcggcggcgacattgcgctgggcattggtgacgaagtgctctcgccggtgatgttcccggtactgcaccagctgctgggccagacgctgatcaccaccgacgggaagacgctgctgggggcggatgataaggcggggatcgcggagatcatgactgcgctggcggtgctgaagggcaaaaatattccgcacggggatatccgcgtggcctttacgccggacgaagaggtgggcaagggcgcgaagcacttcgacgtggaggcctttaacgcgcagtgggcctataccgtcgacggcggcggcgtcggtgaactggagtatgaaaacttcaatgccgcgtccgtcacgatcaaaattgtcggcaacaacgttcatcctggctcggcgaaaggcgttatggtgaacgcgctgtcgctggcgtccagaattcatgcagaagtcccggcggaagagagccctgaacagaccgaagggtatgaaggtttctatcacctgaccagcatcaaaggcaccgtggacagcgcgcagatgcactacatcatccgcgatttcgaccgcaaagcctttgaggcgcgcaagcgcaagatgatggagatcgcgaagaaggtcggtaaaggattacacccagattgctatattgagctgatcattgaagacagctattacaacatgcgcgagaaggtgatggcgcatccgcatattctcgatattgcccagcaggcgatgcgcgactgcgatattgaaccgcagctcaagccgattcgcggcggcaccgacggttctcagctgtcgtttatggggctgccgtgcccgaacctgtttaccggtggctacaactaccatggtaagcatgagtttgtgacgctggaagggatggaaaaagcggttaaggtgatagtgcggatagcggagttaaccgcgaagcgg

SEQ ID NO: 19735 - DNA, 1110 bp, Enterobacter cloacae
atgtcagataacagccagaaaaaagtgatcgtcggcatgtccggcggtgtcgattcctccgtttccgcctacctgttacagcaacagggctataaggtggagggcctgttcatgaagaactgggaggaagatgatggcgaggaatactgcaccgccgcagcggatctcgccgacgcgcaggccgtatgcgataagctcggcattgagctgcacaccgttaactttgccgcagaatactgggataacgtttttgaactcttcctcgaagagtacaaagcgggccgcacgccgaacccggatattctgtgcaacaaagagatcaaatttaaggccttcctggaattcgccgcagaagatttgggcgcagactatattgcgaccggtcactacgtgcgccgtgcagacgtgaatggcaaaagccagctgctgcgcggtctggacggcaacaaagatcaaagctatttcctctatacgctgagccacgagcaaatcgcccagagcctgttcccggtcggcgagctggaaaagccgcaggtacgtaaaatcgccgaagagctggatctgatcaccgcgaagaaaaaagactctaccggcatctgcttcatcggcgagcgcaaattccgcgatttcctgggacgttacctgcctgcacagccgggtaaaattgtcaccgtcgacggggaagagattggccagcatcaggggctgatgtaccacacgctcggccagcgtaaaggcctgggtattggcgggaccaaagaaggtagcgaagatccatggtatgttgtcgacaaagacgtcgaaaacaatattctggttgttgcccagggacacgatcatccgcgtctgatgtccgttggccttatcgcgcagcagctgcactgggtcgatcgtgagccgctgaaaggcacgctgcgctgcacggtgaaaacccgctaccgtcagaccgatattccatgcaccattaccgcgctcgatgacgatcgcattgacgtgcgtttcgacgagccggtcgccgccgtcaccccgggtcagtctgctgtcttctacagcggcgaaatctgtctgggcggcgggatcattgaacagcgcctgccgctgcctgctgtt

SEQ ID NO: 19736 - DNA, 1372 bp, Enterobacter cloacae
atggaattatcctcactgaccgccgtatcccctgtcgatggacgctacggcgataaagtcagcgcgctgcgcgggatcttcagcgaatatggtttgctgaagttccgtgttcaggttgaagtacgctggctgcaaaagctggccgcccaggcagcaatcaaggaagttcctgcttttgacgaaaaggcaaacgattaccttgataaaatcgttgccgagtttagcgaacaagacgccgcgcgcattaaaaccatcgaacgcaccaccaaccacgacgtgaaagcggttgagtacttcctgaaagagaaagtggaaagcgtccctgcgctgcacgccggtgtctgagttcattcacttcgcctgtacctctgaagacatcaacaacctctctcacgcgctgatgctctccaccgcgcgtaaagaggtggtgctgccttactggcgtaaaatcatcgacgcggtaaaagcgctgtccgtggaataccgcgacattccgctgctctcccgtacccacggccagccagccaccccatccacgatgggtaaagagatggcgaacgtcgcgtaccgcatggagcgccagtatcgtcagttggagcagattgagatcctcggcaaaatcaacggcgcggtcggtaactataacgcccacatcgccgcttatccggaagtggactggcaccagttcagcgaagagttcgtgacctctctgggcattcagtggaacccgtacaccacgcagattgagccgcacgactatatcgccgaactgtttgactgcatcgcccgcttcaacaccatcctgatcgacttcgatcgtgacgtgtggggctacatcgccctgaaccacttcaagcagaaaaccatcgccggtgaaatcggctcttccaccatgccgcacaaggtaaacccaatcgacttcgaaaactccgaaggcaacctgggactggcgaacgccgtgctgcagcatatggcgagcaaactgccggtatcccgctggcagcgcgacctgaccgactccaccgtactgcgtaacctgggcgtgggcattggctacgcgctaatcgcgtatcagtccaccctgaaaggcgtgagcaaactggaagtgaaccgtgaccgtctgctggacgagctggaccacaactgggaagtgctggcggagccaatccagaccgtgatgcgccgttacggtatcgaaaaaccgtacgagaagctgaaagagctgacccgcggaaaacgcgttgacgccgaaggcatgaagcagtttatcgacggtctggcgctgccggaagaagagaaaacgcgcctgaaggcgatgacaccggcgaactacattggccgcgccatcactatggtcgacgagctgaagtaa

SEQ ID NO: 19737 - DNA, 1461 bp, Enterobacter cloacae
atgagagggattttacgccacatactgcccctctcgctgcgggttcgtttcttactggcaacagccgccgtcgtgctggtgctgtcgctctcctacggcatggtcgccctggtgggctacagcgtcagctttgataaaaccacctttcggctgctgcgtggcgaaagcaatctgttttataccctggcgaagtgggaaaacaaccgaatcaccgtcgaaatgccggaaaacctcaaccagcagagtccaacgctggccctgatttataacgaaaaggggaaattactgtgggcgcagcgtgatattccctggctggtcaaaagcattcgcccggaatggctcaaaaccaacggatttcacgaaattgaagccgatctcaacaccaccagctcgctgatccatgaagatcgctccctgcagcaaaagctgaacgagatccgcgccgacaacgccgagacggagatgacgcactccgtcgcgattaacctctatccggcgacgctgaacatgccgcagctgaccatcgtggtgatcgacaccattccggtcgagctgaagcgttcttatatggtctggagctggttcatctacgttctggctgcgaatctcctgctggtgatcccgctgctgtgggtggcggcgtggtggagcttgcgccccattgaatcactggcgaaagaggttcgtgagctggaagaacatcatcgcgagaagctgaacccggaaaccacccgtgagctcaccagcctggtgcgtaacctcaaccgcctgctgaaaagtgaacgcgaacgctacgataaataccgtaccactcttaccgacctgacccacagcctgaaaactccgctggccgtgatgcaaagtaccctgcgttcaatgcgcagctcgaagctgagcgtcgatgatgccgagccggtgatgctggagcagatcagccgtatttcccagcaaattggctattacctgcaccgcgccagcatgcgttccggcagcgcgcttctgagccgagagctgcacccggtagccccgcttctggataacctcacgtccgccctcaataaggtgtatcagcgtaaaggggtgaacatcagcctcgatatctcgccagagataagctttgtgggtgaaaaaaatgacttcatggaagtgatgggtaacctgctggataacgcctgcaaatactgcctggagttcgtggaagtgtctgcgcgtcagacggaaaccgaactgcatattatcgttgaggatgatggtccgggcatcccgcgcaataagcgtgacgtggtgttcgatcgcggtcagcgagccgatacgctacgtcctggccagggcgtaggattggccgtcgcccgcgagattgtcgaccagtacgacgggaaaatagaaaccagtgaaagcctgctgggcggcgccagaatggaggttatttttggtcgccagcagctcacattgaacgatagt

SEQ ID NO: 19738 - DNA, 462 bp, Enterobacter cloacae
atgcgatatcatcaatactaccccgtcgacatcgtcaacggccccggcacccgctgcaccctgttcgtctcaggctgcgtccacgaatgccccggctgctataacaaaagcacctggcgcctgaattccggcatgccgttcagcgccgaaatggaagaccggatcgtcaacgaccttaacgatacgcgaattcaccgtcagggaatttcgctttccggcggcgatccgctgcatccgcaaaacgtgccggatatcctgaagctagtgaagcgcattcggggagagtgtgcgggaaaagatatctgggtctggacaggctacaggctggatgagctgaacgcgcagcaaatggaagtagtggatctgattaacgtcctggtcgacggcaagtttgtgcaagatttaaaagacccggcgctcatctggcgcggcagcagcaatcaggttgtgcaccatttacga

SEQ ID NO: 19739 - DNA, 1908 bp, Enterobacter cloacae
gtgcgatttccgaaccaacgtttagcgcaactgttcgatctgttgcaaaacgagacgctgccgcaggacgagctggcgcagcggctgtcggtttccacgcgaaccgtccgcgctgatatcacggccctgaacgcgctgctggcgagccacggcgcgcagtttatattgagccgtggcaacggctatcagctcaaaattgatgatgcccagcgctaccagcagctgcatgcatcccacccgcgcgcgctgcgtattccccggaccgggccggagcgcgtgcactatctggtggtgcgttttctcacctcggcgttttctcttaagcttgaggatctggcggacgagtggtttgtcagccgcgccacgctgcaaagcgatatggccgaagtgcgcgagtggtttcaccgctataacctgacgctggaaacgcgtcctcgccacggcatgaagctgtttggcagcgagatgtcgacccgcgcgtgcctgaccgatctgctctgggagcttgcgcagcaggacagcctgaacccgctggtgaccgacgtggcgctgaatgcaggcgtggcggagcagatggtgcccgtgctgcacgaggcgctgacgcgtcatcacatccgcctgaccgacgaaggtgagttgttcctgcgcctgtactgtgcggtatcggtacgtcgtatcagcgaaggctatccgctgccggaattccacgccgaagacgtggaagagaacgtgcgcgaggcggcgaaggatatcgccgtcactatccagcagctggcgggcaaagcgctttcaccttcggaggagagctggctgtgcgtgcacattgcggcgcggcagattcaggagattgccccgagcgcaattaacgcggatgacgacgaagcgctggtcaactacatcctgcgctatatcaacacccactataactacaacctgctgagcgacgcgcagctgcacgcggacctgctcacgcacatcaaaaccatgatcacccgcgtgcggtatcaaatcatgatccccaatccgctgctggataacatcaagcagcactacccgatggcgtgggatatgaccttggcggcggtgtcgagctggggaaaatacacgccttatgtgatcagcgaaaacgaaatcggcttcctggtgctgcatatcggcgtcgggctggagcgccactacaacatcggctaccagcgtcagccgcgcgtactgctggtgtgcgacgcaggtaatgccatggtccgcatgattgaagcggtgctgcagcgcaagtacccgcaaattgaggtggcccgcacgctcaccctgcgcgagtacgagctggcggaaacgattagcgaagactttgtgatcgccaccgcccgcgtcagcgaaaagtccaaaccggtggtgacgatcgccccgttcccgaccgattaccagttagagcagatcggcaagctggtgctggtggaccgcacccgcccgtggatgctggataaatacttcgacgcggcccatttccgcattatcgacaagcccgttgaccagcaaacgctgtttcgcgagctgtgcgcgcagcttgaaggcgaggggtttgtcggcgcggagtttctggattcggttgttgagcgtgaagccatcgtcagcaccatgctcggcgacggcatcgcgctgccgcactccctcggccttttagcgcagaaaaccgtggtctataccgtcctcgccccgcacggcgtacagtggggcgacgaaaccgcgcacgtcatcttcctgctcgccatcagcaaaagcgaatacgaagaggcgatggcgatttacgatatcttcgtcaccttcctgcgtgaacgggcgatgtcgcggctctgtagctgcagtgactttgccgaatttaaggcggtggcaatggagagtttgagtcggttt

SEQ ID NO: 19740 - DNA, 1176 bp, Enterobacter cloacae
atgaaagatgtcgtaatagtgggtgcgttgcgtacagctatcggctgttttcagggatcgctcgcgcgtcactcggcggttgagctgggtagcgtggtggtaaaagcgctggtggaacgtagcgggatcgcagcacatgaagttgatgaggtgattctgggccaggtcctcacggccggtgccgggcaaaaccctgcgcgtcaggcggcgctgaagggcgggctgcccaataccgtctccgctatcaccatcaacgacgtctgtggttcaggattaaaagcgctgcatctcgcgacgcaggccattcagtgtggtgaggcggacgtgatcatcgcgggcgggcaggagaacatgagccgcgcgccgcacgtgttgaccgacagccgtaccggcgcacagctgggcaacagccagctgctcgacagcctggtgcatgacgggctgtgggatgcgttcaatgactatcatatgggcgtgacggcggaaaacctggcgcgcgagtacggcatcagccgtgaggtgcaggatgcctatgcgctaagctcgcagcaaaaagcgcgtgcggcgattgattccggtcgctttcgcgacgaaattgtcccggtcagcacgcagcgtcagagcggcgagcgtatcctcgtggataccgatgaacagccgcgcaccgacgccagcgcagaaggcctggcgaggctgaaccccgcgtttgaaatgcagggctcggtgacggcgggaaatgcctcttccattaacgacggcgctgccgccgtgatgatgatgagcgaaagcaaagcccttgaactcgatcttccggtcctggcccgcattaaagcattcgccagcgtgggggttgatcctgcgctaatggggatcgcaccggtctacgctacccgccgctgcctggagcgcgcgggctggcagctttcggatgtggatctgatcgaagtgaacgaagcctatgccgcgcaggcgatctccgtcggaaaaatgctggagtgggatcctctgcgggtcaacgttaacggcggcgcgatcgcgctggggcatcctatcggtgcgtccggctgccggatcctggtttcgctggtccacgaaatgaaaaaacgtaatgcccgaaaagggattgccacactctgtataggcggcgggcaaggggtggcgctggccatcgaacgc

SEQ ID NO: 19741 - DNA, 702 bp, Enterobacter cloacae
atggctaaactgaccaagcgcatgtccgtgatccgtgacaaagttgatgcgaccaaacagtacgacatcaacgaagctatcgctctgctgaaagaactggcaactgctaagttcgttgaaagcgttgacgttgccgttaacctcggcatcgacgcgcgtaaatccgatcagaacgttcgtggcgcgactgtactgccacacggtactggccgttccgttcgcgtagctgtatttgctcagggtgcaaacgctgaagctgctaaagctgccggcgctgaactggtaggtatggaagatctggctgatcagatcaagaaaggcgaaatgaactttgacgttgttattgcttctccagatgcaatgcgcgttgttggccagctgggccaggttctgggtccacgcggcctgatgccaaacccgaaagtgggtactgtaactcctaacgttgctgaagcggttaagaacgctaaagcaggtcaggttcgttatcgtaacgacaaaaacggcatcatccacaccaccatcggtaaagtggactttgacgctgacaaactgaaagaaaacctggaagctctgctggttgcgctgaaaaaagcaaaaccaactcaggcgaaaggcgtgtacatcaagaaagttagcatctccaccaccatgggtgcaggtgttgcagttgaccaggctggcctgagcgctgctgcaaac

SEQ ID NO: 19742 - DNA, 426 bp, Enterobacter cloacae
atggctaagaaagtacaagcctacgtcaagctgcaggttgcagctggtatggcgaacccaagtccaccagttggtccagctctgggtcagcagggtgtgaacatcatggaattctgtaaagcgttcaacgccaaaaccgaatccctggaaaaaggtctgccaatcccagtcgtaatcactgtttacgctgaccgttctttcactttcgttaccaaaacccctccagcagctgttctgctgaagaaagcggctggtatcaagtctggttccggtaaaccgaacaaagacaaagtgggtaaaatttcccgcgctcagctgcaggaaatcgcgcagaccaaagctgccgacatgactggtgccgacattgaagcgatgactcgctcaatcgaaggtactgcacgttccatgggcctggtagtggaggac

SEQ ID NO: 19743 - DNA, 545 bp, Enterobacter cloacae
atgtctgaagcccctaaaaagcgttggtacgtcgttcaggcgttttccggttttgaaggccgcgtagcaacgtcgctgcgtgagcatatcaaattacacaacatggaagagttatttggcgaagttatggttccgaccgaagaagtggttgagatccgtggcggccaacgtcgcaaaagcgagcgtaaattcttcccgggttacgtgctggttcagatggtgatgaacgacgcgagctggcacctggtgcgcacgtaccgcgcgtgatgggctttatcggcggcacgtctgaccgtccggcgccaatcagcgacaaagaagttgatgcgattatgaaccgcctgcagcaggtgggtgataagccgcgtccgaaaacgctgtttgaaccgggtgaaatggttcgtgttagcgacggtccgtttgctgactttaacggtgtggttgaagaagtggactacgagaagtcccgcctgaaagtttctgtttctatcttcggtcgtgcgaccccggtagaactggactttgcgcaggtcgaaaaagcctaa

SEQ ID NO: 19744 - DNA, 1182 bp, Enterobacter cloacae
gtgtctaaagaaaaatttgaacgtacaaaaccgcacgtcaacgttggtactatcggccacgttgaccatggtaaaactaccctgactgctgcaatcactaccgttctggctaaaacctacggtggttctgctcgtgcattcgaccagatagataacgcaccagaagaaaaagctcgtggtatcaccatcaacacttcccacgttgaatatgacaccccgactcgccactacgcacacgtagactgcccaggccacgccgactatgttaaaaacatgatcaccggtgctgcgcagatggacggcgcgatcctggttgttgctgcgactgacggcccaatgcctcagactcgtgagcacatcctgctgggtcgtcaggtaggcgttcctttcatcatcgtgttcctgaacaaatgcgacatggttgatgacgaagagctgctggaactggtagagatggaagttcgtgaactgctgtctcagtacgatttcccgggcgacgatactccaatcgttcgtggttctgctctgaaagcgctggaaggcgacgcagagtgggaagcgaaaatcatcgaactggctggcttcctggattcttacatcccagaaccagagcgtgcgattgacaagccattcctgctgccaatcgaagacgtattctccatctccggtcgtggtaccgttgttaccggtcgtgtagagcgcggtatcatcaaagttggtgaagaagttgaaatcgttggtatcaaagagactgcgaagtctacctgtactggcgttgaaatgttccgcaaactgctggacgaaggccgtgctggtgagaacgttggtgttctgctgcgtggtatcaaacgtgaagaaatcgaacgtggtcaggttctggcgaagccaggctcaatcaagccacacaccaagttcgaatctgaagtgtacattctgtccaaagacgaaggcggccgtcatactccgttcttcaaaggctaccgtccacagttctacttccgtacaactgacgtgaccggtaccatcgaactgccagaaggcgttgagatggtaatgccaggcgacaacatcaagatggttgtgacgctgatccacccaatcgcgatggacgacggtctgcgtttcgcaatccgtgaaggtggccgtaccgttggcgcgggcgtggttgctaaagttctcggc

SEQ ID NO: 19745 - DNA, 2112 bp, Enterobacter cloacae
atggctcgtacaacacccatcgcacgctaccgtaacatcggtatcagtgcgcacatcgacgccggtaaaaccactactaccgaacgtattctgttctacaccggtgtaaaccacaaaatcggtgaagttcatgacggcgcagccaccatggactggatggaacaggagcaggagcgtggtatcactatcacctccgcagcgactactgcattctggtcaggtatggctaagcagtacgaaccgcatcgcgtaaacatcatcgacaccccagggcacgttgacttcaccatcgaagtagaacgttccatgcgtgttcttgacggcgcggtaatggtttattgcgcagttggtggtgttcagccacagtctgaaaccgtatggcgtcaggcgaacaaatataaagttccacgcatcgcgttcgttaacaaaatggaccgtatgggtgctaacttcctgaaagttgttggccagatcaaaacccgtctgggcgcgaaccctgttccgctgcagctggcaattggtgctgaagaaggcttcaccggcgttatcgacctggtgaaaatgaaagccatcaactggaacgatgcagaccagggcgttaccttcgaatacgaagatatcccagctgcaatgcaggacctggctgacgaatggcaccagaacctgatcgaatccgctgctgaagcttctgaagagctgatggagaaatacctgggtggtgaagaactgactgaagaagagatcaaaaaagctctgcgtcagcgcgttctgaacaacgaaatcatcctggtaacctgtggttctgcgttcaagaacaaaggtgttcaggcgatgctggatgcggtagttgactacctgccatccccggttgacgttcctgcgatcaacggcatcctggacgacggtaaagatactccggctgagcgtcacgcaagcgacgaagagccattctctgcactggcgttcaaaattgctaccgacccattcgtgggtaacctgaccttcttccgcgtttactctggtgtggttaactccggtgacaccatcctgaactccgtgaaagcggcgcgtgaacgttttggccgtatcgtacagatgcacgctaacaaacgtgaagagatcaaagaagttcgtgcgggcgacatcgctgcagctatcggtctgaaagacgtgaccactggtgacaccctgtgtgacccggatcacccgatcattctggagcgtatggaattccctgagccggtaatctccatcgcagttgaaccaaaaaccaaagctgaccaggaaaaaatgggtctggctctgggccgtctggcgaaagaagacccatcattccgcgtatggactgatgaagaatctaaccagaccatcatcgctggtatgggtgaactgcacctggacatcatcgttgaccgtatgaagcgtgaattcaacgttgaagcgaacgtgggtaaacctcaggttgcttaccgcgaagcgattcgcgcgaaagttaccgacattgaaggtaagcacgctaagcagtctggtggtcgcggtcagtacggtcacgttgtgatcgacatgtacccactggagccgggctctaacccgaaaggttacgagttcatcaacgacatcaaaggtggtgtaattcctggcgaatacatcccagccgttgataaaggcatccaggaacagctgaaagcgggccctctggctggctatccggttgttgatatgggtgttcgtctgcacttcggttcttaccacgacgttgactcctctgaactggcgtttaaactggctgcgtctattgcctttaaagaaggctttaagaaagcaaaaccagttctgcttgagccaatcatgaaggttgaagtagaaactcctgaagagaacaccggtgacgttatcggtgacttgagccgtcgtcgcggtatgctgcgtggtcaggaatccgaagtaactggcgttaagatccacgctgaagttccgctgtctgaaatgttcggatatgcaactcagctgcgttctctgaccaaaggtcgtgcatcatacaccatggaattcctgaagtatgatgatgcgcctaacaacgttgctcaggccgttattgaagcccgtggtaag

SEQ ID NO: 19746 - DNA, 468 bp, Enterobacter cloacae
atgccacgtcgtcgcgtcattggtcagcgtaaaattcttccagatccgaaattcggatcagaactgctggcaaaatttgtaaatatcctgatggtagatggtaaaaaatctactgcagaagcaatcgtatacagcgcgcttgagaccctggctcagcgttctggtaaaaatgaactggaagctttcgaagtcgctctcgacaacgttcgcccaaccgtagaagttaagtcccgccgcgttggtggttctacttatcaggttccagttgaagttcgtccggttcgtcgtaatgctctggcaatgcgttggatcgttgaagctgctcgtaaacgcggtgataaatccatggctctgcgtctggcgaacgaactttctgatgctgcagacaacaaaggtactgcagttaagaaacgtgaagacgttcaccgtatggcagaagccaacaaggcgttcgcacactaccgttgg

SEQ ID NO: 19747 - DNA, 372 bp, Enterobacter cloacae
atggcaacagttaaccagctggtacgcaaaccacgcgcacgcaaagttgcaaagagcaacgtgcctgcgctggaagcctgcccgcagaaacgtggtgtatgtactcgtgtatataccaccactcctaaaaaaccaaactccgcactgcgtaaagtatgccgtgtgcgtttgactaacggtttcgaagtgacttcctacatcggtggtgaaggtcacaacctgcaggaacactccgtgatcctgatccgtggcggtcgtgttaaagaccttccgggtgttcgttaccacaccgttcgtggtgcgctcgactgctcaggtgttaaagaccgtaagcaggctcgctccaagtacggcgtgaagcgtcctaaggct

SEQ ID NO: 19748 - DNA, 285 bp, Enterobacter cloacae
atgctccatactctgagccattcaccgtggcaatgtgatatcgacgcgttactgagtatgctgcgcgaaggtgatgatctgctgctgattcaggatggcgtgcttgccgcactggaaggcagtcgtttcgttgaaattctcacgaatgcccccataacagtctctgcgctgaaggacgatctggatgcgcggggtctttctggtcaaatttcaaccaaaattgacgtggttggctatactgatttcgtcaatcttactgtgacgcacgccagtcaaatgaactgg

SEQ ID NO: 19749 - DNA, 1473 bp, Enterobacter cloacae
atggctaactactttaatacactgaacttgcgccagcagctggcgcagctgggcaaatgccgcttcatggcgcgcgatgaatttgccgatggcgcgagctaccttcagggtaaaaaagtggtcatcgtcggctgtggcgcacagggtctgaaccagggcctgaacatgcgtgactccggtctggatatctcctacgccctccgtaaagaagcgatcgccgagaagcgtgcttcctggcgtaaagcgaccgaaaacggcttcaaagtgggcacctacgaagagctgatcccgcaggcggatctggtggttaacctgaccccggacaaacagcactctgacgttgtgcgttccgtacagccgctgatgaaagacggcgccgcgctgggttactcccacggcttcaacatcgttgaagtgggcgagcagatccgtaaagacatcaccgtggtgatggtggcgccgaagtgcccgggtacggaagtacgcgaagagtacaaacgtggcttcggcgtgccgaccctgatcgcggttcacccggaaaacgatccgaaaggcgaaggcatggcgattgccaaagcgtgggcagcggcgaccggcggccaccgtgcgggcgtgctggaatcttctttcgttgccgaagtgaaatctgacctgatgggtgagcagaccattctgtgcggcatgctgcaggccggttctctgctgtgcttcgacaagctggtggaagagggtaccgacccggcctacgcggaaaaactgattcagttcggctgggaaaccatcaccgaagcgctgaagcagggcggtattacgctgatgatggatcgtctgtccaacccggcaaaactgcgtgcttacgcgctgtctgaacagctgaagaccatcatggcgccgctgttccagaaacatatggacgacatcatctccggcgagttctcttccggcatgatggcagactgggcgaacgacgataagaaactgctgacctggcgtgaagagaccggtaaaaccgcgttcgaaaccgcgccacagtatgaaggtaaaatcggcgagcaggagtacttcgataaaggcgttctgatgatcgcgatggtgaaagcaggcgttgagctggcgttcgaaaccatggtggattccggtatcatcgaagagtctgcgtactacgaatcactgcacgagctgccgctgatcgcgaacaccatcgcccgtaagcgtctgtacgaaatgaacgtggtgatctctgataccgcagaatacggtaactacctgttctcttacgcctgcgtaccgctgctgaaagagtttatgaccactctgcagacgggcgatctgggtaaagcgattgcggaaggtgcggtggataacgcgcagctgcgtgatgttaacgaagcgattcgcagccaccagatcgagaaagtgggccacaaactgcgtggctacatgaccgatatgaagcgtattgcggtagcgggt

SEQ ID NO: 19750 - DNA, 2011 bp, Enterobacter cloacae
atgcgtttaaaccctggacaacaacaagcggtcgaattcgttactggaccatgcctggtgctggcaggggccggttcgggtaaaacccgcgtgatcaccaacaaaatcgcccatctgatccacaactgtggatatcaggcgcgacacattgcggcggtcacctttaccaataaagcggcgcgcgagatgaaagagcgcgtcggtcagacgctgggtcgtaaagaggcgcgcggcctgatgatttccactttccacacgctgggactggatatcatcaaacgcgagtatgcggcgctgggaatgaagtccaacttctcgctcttcgatgacaccgatcaggtggcgctgctcaaagagctcaccgaggggctgatcgaagatgacaaagtgctgttgcagcagctgatctcgacgatctcgaactggaaaaacgatctgatgacgccggcccaggccgcggcgatcgccaaaggtgaacgggatcggatcttcgcccactgctacggtctgtacgatgcgcatatgaaagcgtgtaacgtgctggactttgacgatctgatcctgctgcccacgctgctgctgcagcgcaatgaagaggtgcgcgagcgctggcagaacaaaatccgctacctgctggtggatgaatatcaggacaccaacaccagccagtacgagctggtgaagctgctggtggggcagcgcgcgcgtttcaccgtggtaggcgacgacgaccagtcaatttactcactggggcggtgcgcgcccacaaaacctggtgctgctgagcaaagatttcccggccctgcaggtgattaagctggagcaaaactaccgctcctccgggcgtatcctgaaggcggcaaacatcctgattgccaataacccgcacgtatttgagaagcgtctcttctccgaactgggctacggcacggagctgaaagtgctcagcgccaacaatgaggatcatgaagcggagcgcgtgacgggcgaacttatcgctcaccacttcgtcaacaaaaccgaatataaggattacgcgatcctctatcgcggcaatcaccagtcgcgcgtctttgaaaagatgctgatgcagaaccgcattccgtacaaaatatcgggcggcacgtcgttcttctctcgaccagaaatcaaagatctgctggcctatcttcgcgtgcttactaacccggatgacgacagcgcgtttctgcgaatcgtgaatacgcctaaacgcgagattggcccggcgacgctgcaaaagctcggcgagtgggcgatgacccgcaacaaaagtatgtttaccgccagcttcgacatggggctgagccagacgttaaccggacgtggttatgattcgttaacccgcttcacccactggcttggcgaagtgcagcgtctcgcggagcgggagccggtggcggcggtgcgcgatctcattcacggcattgactatgagtcctggctgtatgaaacctcagccagcccgaaggcggctgagatgcgcatgaaaaacgttaaccagctcttcagctggatgaccgaaatgctggagggctctgaaatcgacgagccaatgaccctgacgcaggtggtcacccgctttaccctgcgcgacatgatggagcgcggcgagagcgaagaagaggccgatcaggttcagctgatgacgctgcatgcgtcaaaagggctggagttcccgtatgtgtatctggtcggcatggaagagggattgttgccgcaccagagcagcattgatgaagataacgtcgacgaggagcgtcgcctggcctacgtggggatcacccgcgcgcagaaagagctgacgttcacgctgtgtaaagagcgccgccagtatggtgaactggtacgcccggagccgagtcgtttcctgctggaactgccgcaggatgacctgatctgggaacaggagcgcaaagtgattaccgcagaagagcgaatgcacaagggacaggctaacgtggcaaacatccgcgccatgctggcaaaagct

SEQ ID NO: 19751 - DNA, 1189 bp, Enterobacter cloacae
gtgaccaccaggccacactcgtcgttcaaaatcgtcttcattcttggcctgctggccatgctgatgccgctgtctattgatatgtacctgcccgcgctgccggtcatttccgcgcagtttggcgttccggcgggcagcgcgcagatgacgctcagcacctatattctcggttttgccctcggccagctgttttatggcccgatggcggacagccttggacgcaagcccgttattctgggcggacgctggtctttcagccgcaccggtggcctgtgcgctggcgcagaccatcgatcatctgattatcatgcgcttcttccacggtctggcggcggcagcggcaagcgtggtgattaacgccctgatgcgagatatctacccgaaagaagagttctcccgcatgatgtcgtttgtcatgctggtgacgacgattgcgccgctggtggctccgatggccggcggtgcggtgctgatgtggttcagctggcatgtgattttctggatcctggccctggccgcgctgctggcctcggcgatgatcttcttctttattgatgaaacgcttcccgtcgagcgccgtcagaaattccacatccgtaccaccatcggcaactttgcctcgctgtttcgccacaagcgcgtgctcagctatatgctggcaagcgggttcagcttcgccgggatgttctccttcctgagcgccgggccgtttgtctacatcgagctgaaccacgtttcgccgcaacacttcggctattactttgcgcttaacatcgtcttcctgttcatcatgaccatcatcaacagccgttttgtccggcgggtaggggcgctgaacatgttccgcgccgggctgtggatccagtttgtgatggctatctggctggtggtgagcgcgtttctgggcgtgggcttctgggcgctggtggtcggggtggcggcctttgtcggctgcgtgtcgatggtgtcatctaatgcgatggcggtgatcctggatgagtttccgcatatggcgggcaccgcctcttccctggcggggacgttccgcttcggcatcggcgctatcgttggcgcgttgctttcaatggccacctttacgacggcatggcccatgctgtgggcgatggctttttgcgcaaccagctcgatactcttctatctttacgccagtcgaccgcgaaaagcggcc

SEQ ID NO: 19752 - DNA, 705 bp, Enterobacter cloacae
atgcgacttgataagtttatcgctcagcaactcggcgtaagccgcgctattgccgggcgtgaaattcgcgccagccgcgttaccgtggatggcgatattgtgagagacagcgcgttcaaactgcaacctgaccatcaggtggagtatgacggcaatccgctgacccagcagcacggtccgcgctacttcatgctcaataagccggaaggctacgtctgctcaacggacgatcccgatcacccgacggtgctctatttcctcgacgaaccggtggcgcacaagctgcacgccgcaggccgcctcgacatcgacaccacgggtctggtgctgatgaccgacgacgggcagtggtcgcatcgcattacctccccgcgtcaccactgcgagaaaacctatctggtcacgctggagtcgccggtatcggatgacacggcagagcaattcacgaaaggcgttcagctgcataatgaaaaagatctgaccaaacccgccgtgcttgaggtgatcgcgccgacggaggtccgtctgaccatcagcgaagggcgttaccatcaggtgaaacgtatgtttgccgcggtggggaaccacgttgttggcctgcatcgtgagcggattggtgcgatcgaactcgatcccgacctggcgccaggcgaatatcgcccgttaacggaagaagagatcgccagcgtcggtctgccttcgcac

SEQ ID NO: 19753 - DNA, 1768 bp, Enterobacter cloacae
cgtggcatactatgtgcggaataacgaaaccgagaccccatgacttttacacttcgtccctatcagcaggaagccgttgacgccaccctcgcctggttccgtaaacatcgcgagccggcggcgcattgtgctcccgaccggcgcaggcaaaagcctggtcatcgccgaactggcgcgtctggcccgtggtcgcgtgctggtgctggcgcacgttaaagagctcgtcgcgcaaaaccacgccaagtattgtgcgcttgggctggaagccgatattttcgccgccgggctgaagcgcaaagagagccacggcaaagtggtttttggcagcgtgcagtcggtggcgcgcaatctggacctgtttcgcaacgaattttcgctgctgatcgtcgacgagtgtcaccgcatcagcgatgacgacgacagccagtaccagcaaatcctggctcacctgaaagcggtgaatcctcacctgcgcctgctgggcctgacggcgaccccgtttcgcctggggaaaggctggatctatcgctatcattatcacggcatggtgcgcggtgatgacaaggccctgtttagcgactgcatttacgaacttccgctgcgctacatgattaaacatggctacctgacgccgcctgaacggctggatatgccggtggtgcagtacgatttcagccgtttgcaggcacagagcaacggcttattcagcgaagcggatctcaatcaggaactgaaaaagcagaagcgtattacgccgcatattatcagccagattgaggagttcgccgcgacgcgcaagggggtaatgatctttgccgccaccgttgagcacgcgcgtgaaatcaccggattattgcccgccggcgacgcggcgttaatcaccggcgaaacgcccggcccggagcgcgacggcctgattgacgcctttaaagcccagcggttccgctatctggtaaacgtgtcggtattgaccaccggctttgacgccccgcacgtcgacctgatcgccattttgcgcccgaccgaatcggtcagtctgtatcagcagattgttggccgcggcctgcgtctggccccgggaaaaaccgactgcctgattctggattatgccggtaacccgcacgatctctatacgcctgaggtcggcgcgccaaaagggaaaagcgacaacgtgcccgtgcaggtcttttgccctgcctgcgggtttgccaacaccttctggggaaaaaccaccgccgacggtacgctgatcgaacactttggccgccgctgtcagggctggtttgaagatgatgacgggcatcgcgagcagtgcgatttccgcttccggttcaaaaactgcccgcagtgcaacgccgaaaacgacattgccgcccgccgctgccgggaatgcgacgcggtgctggttgacccggacgacatgctgaaagcggcgctaaagctgaaagatgccctggtgctgcgctgttccggcatggcgctgcagcccggcgccgatgaaaaaggcgagtggttgaaaatcacctattacgacgaagacggggcggacgtcagcgagcgcttccgggttcagacgcctgcccagcgaatggccttcgaacagctgtttatccgcccgcatacccgcacgccgggcgtgcccctgcgctggataaccgtagctgatatcgtgcgccagcagatgctattgcgccatccggattttgtcgtcgcccgtaagaaaggccagttctggcaggtgcgcgagaagctctttgactacgaaggt

SEQ ID NO: 19754 - DNA, 501 bp, Enterobacter cloacae
atgaaaaacgcacctaaatttgccatcgccctcatcgccgccgcgtgcgtcagcagcagcgctttcgccagcgaaaccccaaaacagcagccgctggaaaaagtggctccgtacccgcaggcggacaaagggatgaagcgtcaggtgattcagctgccggttcagcagggtgaagcgaactttaaagtggaactgttaattggtaagacgctggaagtggactgcaaccagcaccgtctgggcggtcagctggaaagcaaaaccctggaaggctggggttacgactattacgtctttgacaaagtgacctctccggtctccaccatgatggcctgcccggacggcaagaaagagaagaaatttgtgacggcgtatctgggtgacaacagtctgctgcgctacaacagcaagctgccgatcgtggtctatacgcctgaaaacgtagaagtgaaatatcgcatctggaaggctgatgagaacatcggacaagccgtagtacgt

SEQ ID NO: 19755 - DNA, 282 bp, Enterobacter cloacae
atgttcactatcgaagcagaagtacgtaacgtgcagggtaagggtgcgagccgccgcctgcgtaacgctaacaagttcccggctatcgtttacggtggcgaagctgctccagttgcaatcgaactggatcacgacaaactgtggaacctgcagaccaaagctgaattctacagcgaagttctgaccatcgttgttggcggtaaagaagaaaaagtgaaagttcaggctgttcagcgtcacgcgttcaagccaaaactgactcacatcgacttcgttcgcgcg

SEQ ID NO: 19756 - DNA, 939 bp, Enterobacter cloacae
atggcacagcctattattctcgattgcgatccgggtcatgacgacgcgatcgcgctcgtcctcgctcttgcctcccctgaactcgaggtaaaagccgtcacctcgtccgccggaaaccagacgccagacaaaaccctgcgcaacgtgctgcgcatgctcacgctgctcaaacgcaccgatattcctgtcgccggcggggccgtgaagccgctgatgcgcgagctgattattgccgacaacgttcatggtgaaagcgggctggatggtccggcactgccggagccgggcttcacgccgcaaaactgtaccgccgtggagctgatggcgaaggtgctgcgtgagagtgcagaaccggtaacgctggtggcaaccggaccgcaaaccaacgttgcgctgctgctgaacagccatcctgagctgcataataaaattgcccgtattgtgattatgggcggggcaatggggctggggaactggacgcctgcggcggagttcaacatctttgtcgacccggaagcggcggaaatcgtcttccagtctggcttaccgattgtgatggcagggctggacgttacccaccgcgcgcagattatggcggacgatattgagcgattccgctccgtgggtaatacggtcgcgacaaccgtggccgaactgctcgacttctttatggagtatcacaaagccgagaaatggggcttccacggcgcgccgctgcacgacccgtgcaccattgcctggctactgaagccggagatgttcaccacggtggacagatgggttggtgttgagacgcagggaaaatacacccagggaatgacggtggtggattactactcgctgacggggaataaagcgaataccacggtgatggtggatatcgatcgcgaggcgtttgtggatttgctggcggagagactggcttactatagtgcggcc

SEQ ID NO: 19757 - DNA, 903 bp, Enterobacter cloacae
atgcaattacgtaaactggccacagcaatgctggttatgggaatgtctgcaggcgtggttcacgctgaagatgctccggcagcaggcagcactctcgacaagattgccaaaaacggcgtcatcgtggtcggccaccgtgaatcttctgtcccgttctcttactacgacaacacgcaaaaagtcgtgggctattcacaggattactccaacgccatcgttgaagctgtgaagaaaaagctgaacaaacctgacctgcaggtgaagctgatcccaatcacttcacagaaccgtattccactgctgcaaaacggcacctttgacttcgagtgtggctccaccaccaacaacctcgagcgtcagaaacaggctgccttctctgacaccatctttgtcgtgggcacccgtctgctgacgaagaaaggcggtgagatcaaagacttcgctgacctgaaaggtaaagcggttgttgtgacctccggtaccacgtcagaagtgctgctgcacaagctgaacgacgagaagaaaatggatatgcgcatcatcagcgcgaaagaccatggcgactccttccgtaccctggaaagcggtcgtgccgtcgcgtttatgatggatgatgctctgctggcgggcgaacgtgcgaaagcgaaaaaaccagacaactgggatatcgtcggtaccgcgcagtccaaagaagcttacggctgtatgctgcgtaaagacgatccgcagttcaaaaagctgatcgatgacaccatcgctcaggtgcagacctccggcgaagcggagaaatggttcgacaagtggttcaagaacccgattccaccaaaaaacctgaacatgaattttgaactgtctgacgacatgaaagcgctgttcaaatctccaaatgacaaggctcttaac

SEQ ID NO: 19758 - DNA, 1534 bp, Enterobacter cloacae
atggcatttgccccactgcttgaacgccagcgcgtccgtttgctgctggcgctgttactcggagccagcggtacgctggctttttctccttacgatatctggcctgcggccattctctccctgattgggcttcagggcctgaccctgaatcgtcgtccggtacaggctgctgccatcggttacttctgggggctggggctgtttggctcaggtatcaactgggtctatgtcagcatcgcccagtttggcggtatgcctggcccggtaaacgtcttcctggtggtattgctcgccgcgtatctctcgctctataccggtctgttcgccggcatcctttctcgcctgtggccaaaaaccacatggtgcgcgtcgccattgccgcgccggtagtctggcagataaccgagttcctgcgcggctgggtgctgacgggcttcccgtggctacagttcggtacagccagattgacggccccctgaaggcgctggcgccggtcatgggcgttgaggccatcaacttcctgctgatggtggtgagcggcctgctggtattagcgctggtcacacgctgctggaagccgctggctgtggcgctggtgctgtttgccctgcccttccccgtgcgctatatccagtggttcacgcccgagccagagcgcaccatgcaggtttccatggtgcaggggaatattccgcagtctatgaagtgggatgagaaagagctgctgaatacgctgaagatctacgccaacgccaccgaagaggtgatgggtaaatcccagctgattatctggccggagtctgccattcccgatctggagctcaaccagcagccgttcctcaacatgatgaacgacctgctgctggctcggggcagcacgctgatcaccgggattgtcgatgcgcgtctgaatcagcacaaccgctacgacacctacaacagcatcattacgctcgggaaagacagcgagtacagctaccactccactgaccggtacaacaagaaccacctggtgccgtttggtgaatttgtcccgctggagtcgattctgcgcccgctggccccgttctttgacctgccgatgtcctctttcagccgcggcccgtacgtacagcctcagttgcacgcgcacggcctggccctgacggcggccatctgctacgaaatcattctcggcgagcaggtacgcgataacttccgcccggataccgactatctgctgaccatctccaacgatgcctggtttggtaagtcaatcggcccgtggcagcacttccagatggcacgtatgcgctctctggagctggcgcgtccgctgctgcgcagcaccaacaacggcatcaccgctgtgattggtccgcagggcgagattcaggcgatgatcccgcagtttacccgcgaggtactgaccactaaagtcacgccaaccacggggctgacgccatacgcgcgcaccggcaactggccgctgtgggtactgaccgcgctgttcggctttggcgcggtgctgatgagcctgcgtcagcgtcgtaaa

SEQ ID NO: 19759 - DNA, 878 bp, Enterobacter cloacae
atgagcgacgacaattcacacagtagcgacacgacaaccagtaaaaagggatttttctccctcattctgaaccagcttttccacggcgaacccaaaaaccgtgatgagctgctggagctgattcgtgattccgggcagaacgaccttatcgacgaagatacgcgcgaaatgctcgaaggggttatggacatcgccgaccagcgcgttcgcgatatcatgatcccccgctcgcagatgatcaccctgaaacgtaaccagactctggacgagtgcctcgatgtgatcatcgaatccgcccactcgcgtttcccggtcatcagcgaagacaaagatcacatcgaagggattttgatggcgaaagatctgctgccgtttatgcgcacgatgccgaagccttcagcatggaaaaagtgttacgccaggccgtggttgtgccggaaagtaaacgtgtggatcggatgctgaaagaatttcgctctcagcgttaccacatggcgattgttattgatgagtttggtggcgtttccggtctggtcacgatcgaggatattcttgagctgatcgtgggcgaaatcgaagacgagtacgacgaagaagaagatatcgacttccgtcagcttagccgccacacctggaccgtgcgcgcgctggcctccatcgaggacttcaacgacgccttcggtacccacttcagcgatgaagaggtcgataccattggcgggctggtgatgcaggcctttggccacctcccggcgcgcggtgagaccgttgacatcgacggttaccagttcaaagtggcaatggccgacagccgacgtattatacaggttcacgtcagaacgccggacgactcaccggtgccaaaactggaagattaa

SEQ ID NO: 19760 - DNA, 1380 bp, Enterobacter cloacae
atgacgcaattaaccatgaaagacaaaattggctacgggctgggtgacaccgcctgcggcttcgtctggcaggccacgatgttcctgctggcctacttctacaccgacgtcttcggcctgtcggcgggcattatgggcacgctgtttctggtctcccgcgtgctcgacgccgtcaccgacccgctgatggggctgctggtagaccgcacccgcacgcggcacggccagttccgcccgttcctgctgtggggcgccattccgttcggcatcgtctgcgtgctgaccttctacacgccggatttctccgtgcagggcaaaatcatctacgcctgcgtgacctacattctcctgaccctggtctacaccttcgttaacgtgccgtactgcgccatgccgggcgtcattaccgccgacccgaaagagcgtcacgccctgcagtcctggcgcttcttcctggctgcggcgggctcgctcgccatcagcggcatcgcgctgccgctggtgagcatcatcggcaaaggggacgagcaggtgggctacttcggcgccatgtgcgtgctggggctgagcggcgtggtgctgctctacgtctgcttcttcacaaccaaagagcgctatacctttgaggtgcagccgggctcgtcggtggcgaaagatcttaagctgctgctgggcaacggccagtggcggatcatgtgcgcgttcaagatgatggcgacctgctccaacgtggtgcgcggcggggcgacgctctacttcgtgaaatacgtgatggatcatccggagatggcgacccagttcctgctctacggcagcctcgccaccatgttcggctcgctctgctcttcccgcctgctgggccgctttgaccgcgtcaccgccttcaagtggatcatcgtcgcctactcgctgatcagcctgctgattttcgtcaccccggccgagcatatcgcgctgatttttgccctcaacattctgtttctgttcgtcttcaacaccaccacgccgctgcagtggctgatggcctctgacgtggtggactacgaggagagccgcagcggtcgccgcctcgacgggctggtgttctccacctacctgttcagcctgaagattggcctggcgattggcggggcggtggtgggctggatcctggcgtatgtgaactactccgccagcagcagcgtgcagccggttgaggtgctcaccaccatcaaaattcttttctgcgtggtgccggtggtgctctacgcgggcatgttcatcatgctgtcgttctacaagctcaccgatgtccgcgtagaggccatcagccagcagttgatcaaacaccgcgcggcgcagggcgaggccattcccgacgccgcgacagccgcatcccat

SEQ ID NO: 19761 - DNA, 756 bp, Enterobacter cloacae
atggattacccgcagatactcgcccccgtactcaacttcctccagtgcccgaccccgcaagcatggattgataaagcccgcgacccggcgaacctgccgctgctgctcaccgaccacatggtgtgcgagctcaaggccgcccagaccgcgctgttactcgtgcgtaaatacgtcgccgacgaaagcggtgccgacgcgctgctcgactggctcaaaccctacgaacagttcaccttccgcgacggcccggagccggacttcatcgccctgcacaggcagattggcaaaagtgtgatgcccaaaaccgacgacccgtggggccaggcgctcatcgacagcatggtgctgctgatcaaagaggagcttcaccacttctggcaggtgcgcgaggcgatgctggcccgcgacattccgtacgtcaaaatcaccgccagccgctacgccaaagggatgctgaaggaagtacgcacccacgaaccgctgacgctgatcgacaagctcatctgcggcgcctacatcgaagcccgctcctgcgaacgcttcgccgcgctggccccgttcctcgacgacgacctgcagaagttctatctctcgctgctgcgctcggaagcgcgccactatcaggactacctgacgctcgcccggcaggtgagcgacgacgatatctcaccgcgcatacagcattttggcgaaattgaagccacacttatctcgacaccggaccacgagtttcgcttccacagcggcgtgccggtg

SEQ ID NO: 19762 - DNA, 1190 bp, Enterobacter cloacae
atgttattgctcattcaccctaacggctcaaaatactggcggttccgctttcgttttggtgttaagcagcatctgatggcttttggggtttaccctgaaacttcactggctggtgctcgtcaaaagagagaagaggccagaaagcttgttactgcaggtatcgatcctcgtgagcacaagcgggctgtaaaagaagagcaggcgaaagaggttatcacctttgagtcagttgccagagagtggcacgcaactaacaagaaattgtcagaggatcacagtcgacgggtactgaagagcctggaagataatttgtttcacgctattggcaagcggagcattgaagagctgaagactcgagacatgcttgcacccattaaaatcgtagaggctataggccgctttgaagtcgcttctcgtcttcagcagcgaaccacagcaatcatgcgctatgcagtgcaaagtggcttgattgattacaacccggcccaagagatggctggagcagttgcttcaagtaaccgtgtccatcgccctacacttgagctgaaacgtctacctgaactgttccaccgaattaacggttacaagggacgccctctgacccgcttggctgttgaactcaccttgttaatcttcttcgttccagtgaactgcgctttgcgcgttggtctgaaatcgaatttgaaacggcaatgtggacgataccgtctgaacgagatgctatcaaaggagtaaaacactcacagcgtggctcgaaaatgcgaactcctcatctggtaccgttatctcgccaggtactaaatatccttcaacaggttcataagctcaatggcaatcgagattttgtttttgttggagatcacaatcctcgtagaccgatgagtgaaaatacagtgaacaaggcattacgcgtaatgggctacgatacgaaagttgaagtgtgcgggcatggtttcaggactatggcatgcagttcattgattgaatcggggttgtggtcgaaggatgcggtagaacggcagatgagtcatatggaacgtaactctgtaagagcggcttatatccataaggctgagcatttggacgagcgtaggctgatgttgcagtggtgggctgattttctagagtcattaaagtataagttgatgacaccttttgattacgcaaagactaataattctattcgttaa

SEQ ID NO: 19763 - DNA, 4494 bp, Enterobacter cloacae
gtgggaagcccgacgagcctggggaggttcactgatatgttgtacgataaatcccttgagaaggataactgtggtttcggcctgatcgcccacatagaaggcgaacctagccacaaggtagtgcgtactgctattcacgcactggcccgaatgcagcaccgtggcgctattcttgccgatggtaaaacgggcgacggttgcggcctgctgctgcaaaaaccggatcgtttcttccgcatcgtggcggaagagcgcggctggcgtttagccaaaaactacgctgtcggcatgctgttcctgaaccaggatcctgaaaaggctgccgcctcacgccgcatcgtcgaagaagaacttcagcgtgaaaccctgtcgattgtcggctggcgcaatgtgccaaccaacgaaggggtgctcggtgaaatcgccctctcctcgctgcctcgtattgaacagattttcgtcaacgcgcctgcgggctggcgtccgcgtgatatggaacgccgtctgtttattgcccgccgccgcattgaaaaacgtctccaggacgataaagagttctacgtttgtagcctctctaacctggtgaacatctataagggtctgtgtatgccggctgacctgccgcgcttctacctggacctggcggacctgcgtctggaatcggccatttgcctgttccaccagcgcttctccaccaacaccgttccacgctggccgctggctcagccgttccgctacctggcgcacaacggcgagatcaacaccatcaccggtaaccgccagtgggcccgcgcccgtacctataagttccagacgccgctgattcctgacctgcacgatgccgcgccgttcgtgaacgaaaccggctctgactccagctcaatggataacatgctggaactgctgctggcgggcgggatggacatcgtgcgcgccatgcgtctgcttgtgccaccggcctggcagaacaaccctgatatggaccccgagctgcgcgcgttcttcgactttaactccatgcacatggagccgtgggacggcccggcgggcatcgtcatgtccgacggccgcttcgccgcctgtaacctggaccgtaacggtctgcgtccagcacgctacgtcattaccaaagacaagctcatcacctgcgcctctgaagtcggtatctgggattaccagcctgacgaagtggtcgaaaaaggccgcgtcggtccgggcgagctgatggtgatcgacacccgcggtgggcgcattctgcactctgccgaaaccgatcacgatctgaaaagccgccatccgtacaaagagtggatggagaagaacgtccgtcgcctcgtgccgttcgaagatttatcggatgaagaagtgggtcgtcgcgaactggacgacgatacgcttgcaagcttccagaaacagtttaactacagcgcagaagagctggactctgttattcgcgtgctcggtgaaaacggccaggaagcggtcggatccatgggtgatgacaccccgtttgccgtactctccagccagccacgcatcatttacgattacttccgccagcagttcgcgcaggtgaccaacccgccgatcgacccgctgcgcgaagcgcacgtgatgtcgctggctaccagcatcggtcgcgagatgaacgtcttctgcgaagccgaaggccaggcgcaccgtctgacctttaaatcaccgatcctgctgtactccgattttaaacagctcaccaccatgaaagaggagcactaccgcgcagacacgctcgatattaccttcgacttgaccgaagcgagcctcgaagagacggtgaatgcgctgtgtgacaaagccgaacagatggtgcgtaacggtaccgttctgctggtgctgtccgaccgcaatatcgcgaaaaaccgtctgccggtgcctgccccgatggctgttggcgctatccagacgcgtctggtcgacaagagcctgcgctgcgacgccaacatcattgtggaaaccgccagcgcccgcgacccgcaccactttgccgtgctgttaggctttggcgcgacggcgatctacccgtacctggcctacgaaacgctggcccgtctggtggatacccgcgcgatcgacaaagattaccgcgcggtgatgctgaactaccgtaacggcatcaacaaaggcctgtacaagatcatgtccaaaatgggcatctcgaccattgcctcctaccgctgttcgaagctgtttgaagcggtcggtctgcatgacgaggtcgccaacctctgcttccagggcgtggtcagccgcatcggcggcgccggttttgctgacttccagcaggatctggtgaacctgtccaaacgcgcctggctggcacgtaagccgctggatcagggcggtctgctgaaatacgttcacggcggcgagtatcatgcctacaacccggacgtggtgcgcacgctgcagcaggcggttcagagcggtgaatacagcgattaccagcagtacgctgagctggtaaacaaccgcccggcggcaacgctccgcgacctcattgccctaaacccgggtgatgaagcggtcagcattgacgaggttgagcctgcatccgagctgttcaaacgcttcgataccgcggcgatgtccatcggcgcgctgagcccggaagcccacgaagcgctggcggaagccatgaacagcatcggcggcaactccaactccggcgaaggcggtgaagatccggcgcgttacggcaccaacaaagtgtcccgcatcaagcaggtggcatccggtcgctttggcgtgacgcctgcgtacctggtcaacgccgacgtgattcagattaaagtcgctcagggtgctaaaccgggcgaaggcggccagctgccgggtgataaagttaccccgtacatcgccaaactgcgctattccgtgccgggcgtgacgctgatctccccgccgccgcaccacgatatctactctatcgaggacctggcgcagctgattttcgacctgaagcaggtcaacccgaaggcgatgatctccgtgaagctggtttccgaaccgggcgtcggcaccatcgctaccggcgtggcgaaagcctatgctgacctgatcaccatcgccggctacgacggcggtaccggcgcaagcccgctctcctccgtgaaatacgcgggctgcccgtgggagcttggcctggttgaaacccagcaggcgctggtggcgaacggtctgcgtcacaagatccgcctgcaggtggacggcggcctgaaaacaggcctcgacatcattaaagcggcgatcctcggcgcggaaagcttcggcttcggtaccggcccaatggttgcgctcggctgtaaatacctgcgtatttgccacctgaacaactgcgcaaccggcgttgctacccaggacgagaagctgcgtaagaaccactatcacggtctgccgttcaaagtgaccaactactttgagttcattgcccgcgaaacccgcgagctgatggcgcagctgggcgtgaagcgtctggtggacctgattggccgtaccgacctgctgaaagagctggaaggcttcacggcgaagcagcagaagctggagctgagcaagctgctggaaaccgcgcagccgcaccctggcaaagcggtctactgcaccgagaacaacccgccgttcgataacggcgtgctgaacgcgcagctgttgcagcaggcgaagccgtacgtggacgacaagcagagcaaaacgttctggtttgatatccgcaacaccgaccgctccgtgggcgcctccctctccggctacatcgcgcagacgcacggtgaccaggggctggcggcggatccgattaccgcgcatttcagcggtaccgcgggtcagagcttcggcgtatggaacgcaggcggcgttgagctgtacctgaccggcgatgccaacgactacgtcggtaaaggcatggcaggcggcctgctggcggtgcgtcctccggtcggctcagccttccgcagccatgaagccagcatcatcggtaacacctgcctgtacggcgcgaccggcggtcgtctgtttgcagcaggccgtgcgggcgagcgttttgcggtgcgtaactccggtgctatcaccgtggtggaaggcattggcgataacgggtgtgaatacatgacgggcgggattgtttgcgttctgggtaaaaccggcgtgaacttcggcgcgggcatgacgggcggttttgcgtacgtcctggacgaagatggtgagttccgcaaacgcgtgaacccggagctggtagaagtgctggacgttgatacgctggctatccatgaagaacacctgcgcggcttgattaccgaacacgtgcagcataccggttcttcgcgcggcgaagagatcctggcaaactggccggcgttctctgcgaaattcgcgctggttaagccgaagtccagcgatgttaaagccctgttgggtcaccgtagtcgtagcgcagcagagctgcgcgtgcaggcgcag

SEQ ID NO: 19764 - DNA, 1373 bp, Enterobacter cloacae
cgcgaggcggttgaacccgttgatttaccggacgatctcccggcgctgcttaagcgcctctatgccagccgcggcgtgcgtcgcgctgaggatcttgaacgcagcgtgaaagggatgctgccctggcagcagctgagcggtatcgaaaaagccaccgaaatgctctacaacgcgcttcgagagggaacgcgaattgtggtggtaggggatttcgacgccgacggcgcaaccagcaccgcgctgagcgtgctcagcctgcgcgcgctgggctgcgataacgtcacgtatctggtaccgaaccgttttgaagacggctatggcctcagcccggaagtggtcgatcaggcccacgcccgcggtgcgcagatgatcatgaccgtcgataacgggatctcctcccatgcgggcgtcgatcatgctcatgctttggggatcccggtgctggtcaccgatcaccacctgccgggcgaaacgctgccggatgcggaagcgattattaaccccaacctgcgcgactgcgattttccatcaaaatcacttgcaggcgtgggcgtagcgttttatctgatgctggcgttacgtaccctgctgcgcgataagggctggttcgactcccgcggtattgccgtaccgaatctggccgaatatctcgatctggtggcgctgggcaccgtcgcggacgtggtaccgctcgatactaataaccgcattttgacctggcagggcctaagccgcattcgggcgggcaagtgccgtccggggatcaaggcgctgctggagattgccaaccgcgacccgctcaagctggcggcaagcgatttgggctttgcccttgggccgcgcctgaacgcggcaggaagactggacgatatgtccgttggcgtcgcgctgctgctgtgcgacaacatcggtgaagcgcgcgtgctggccaacgagctggacgcgctgaaccagacccgtaaagagattgagcaggggatgcaggccgaagcgctgaccctgtgcgaaaagcttgaacgcagcggcgatacgctgccgggcggcctggcgatgtaccatcccgagtggcatcagggcgtggtgggcattctggcgtcgcgtattaaagaacgtttccaccggccggtgatcgcgttcgccccccgcgggtgatggcacgctgaaaggctctggccgctcaatccaggggctgcacatgcgcgatgccgtggagcgtctcgatacgctgtatccgggtctgatgatcaagttcggcggccatgcgatggcggcaggcctgtctctggacaaggcgaaattcgacgagtttcagccgtctgtttggtgaactggtcccccactggattgatccggccctgctgcagggggaaaat

SEQ ID NO: 19765 - DNA, 711 bp, Enterobacter cloacae
atgaaaaagactttcgcgctgttcaccctgctggcagcctcatttaccggtttcgcccatgcggacgacgccgccatcaaacagtcgctggctaagcttggcgtcactggtagcgatattcagcctgcaccggttgctggcatgaaaacggtactcaccaacagcggcgtgctgtacgtcaccgaagacggcaaacacattattcaggggccaatgtacgacgtgagcggcgcgcagccggtgaacgtcaccaaccagctgctgatgaaaaacctgaacgcgctcgaaaaagagatgatcgtctataaagcggcgcaggaaaaacacgtcattaccgtcttcaccgacatcacctgcggctactgccacaagctgcatgaagagatgaaagactacaacgcgctgggcatcaccgtgcgttacctggccttcccgcgcgcgggcgtgcagagccagccagagcaggacatgaaggcgatctggtgtgcgaaagaccgcaacaaagcgtttgatgacgccatgaacggcaaaggcgttaagccagcctcctgcgacattgatatcgctaaccactacgcgctcggcgtgcagtttggcgtgagcggtacgccagcgattgtcctgagcaacggctatgtcgttccgggctatcagggaccaaaagagatgaaagagttcctcgacgcgcaccagaaacagtttggtggtaaa

SEQ ID NO: 19766 - DNA, 896 bp, Enterobacter cloacae
gtggaaaaggatctcgcactgatcgaacagtttctcgacgcgctgtggctggagaaaaatctggccgagaatacccttagcgcctaccgtcgcgatctcaccatgctggtggaatggcttgcgcaccgggggttatcccttgcgagcgcgcagcgtgacgacctgcaggcgctgctgggggaacgtatcgcagggggctacaaagctaccagttccgcgcgtttgctcagcgccatgcgtcggctgttccagcacctctaccgtgagaagatccgcgaagacgatcccagcgcgctgctggcatctcctaagctcccgcagcggctgccgaaagatctcagcgaacacaagttgagagattattacagtcaccggctgttgacctgccgctggagttacgcgataaagccatgcttgagctattgtatgctaccggcttgcgcgtttcggaactggttggtctgacgatgagcgacatcagcctgcgtcagggcgtagtgcgcgtcattggtaaaggaaataaggaaaggctggttccgctgggtgaagaggcggtttactggctggaaacgtacctggagcacggtcgtccgtggctgctaaatggtacttctatcgacgtcctgtttccgagccagcgcgcccagcagatgacgcggcaaacgttctggcatcgcatcaagcattacgccacactggcgggtatcgacagtgaaaagctttcgccgcacgtattgcgtcacgccttcgcgacgcatctgttaaaccacggcgctgatttacgcgtggtgcagatgctgctgggccacagcgatctttccacgacgcaaatttacacccatgtcgcgacggaacgcctgcggcagctacaccaacagcaccaccctcgtgcgtga

SEQ ID NO: 19767 - DNA, 1431 bp, Enterobacter cloacae
atgaaaaaattaaccttaccaaaagattttttatggggcggcgcggttgcggctcaccaggttgaaggcggctggaacaaaggcggcaaaggaccaagcatttgcgacgtattgaccggcggcgcgcacggcgtcccgcgcgaaatcacccaggaagtagtgccgggtaaatactacccaaaccacgaggctatcgacttccacggccactataaagaagacatcaagctgtttgccgagatgggtttcaagtgcttccgcacctctatcgcctggacgcgcatcttcccgaaaggtgacgaaacgcagccaaacgaagaggggctgaagttttacgacgacatgttcgacgagctgctgaaatacaacatcgaaccggtgatcaccctctcccacttcgaaatgccgctgcacctggtgcaggagtacggtagctggaccaaccgtaaagtggtcgatttctttgtgcgcttcgcggaagtggtttttgagcgctacaaaaacaaggtcaaatactggatgaccttcaacgaaatcaataaccagcgcaactggcgcgcgccgctgttcgggtactgctgctcgggcgtggtctataccgaacatgacaatccggaagagaccatgtaccaggtcctgcaccaccagtttgtggccagcgccctggcggtgaaagccgcgcgccgcatcaatccggagatgaaagtcggctgcatgctggcgatggtggcgctctatccgttctcctgcaaaccggaagacgtgatgttcgcccaggaatccatgcgcgagcgctatgtctttaccgacgtccaactgcgtggttactacccatcctacgtgctgaacgagtgggagcgccgtggcttctccatcaaaatggaggcaggcgacgagcagatcctgcgtgaaggtacctgcgactacttaggtttcagctactacatgaccaacgcggtgaaagcggaaggcggtaccggcgatgcgatttccggcttcgaaggcagcgtgccgaacccgcacgtgaaggcgtccgactggggctggcagattgacccggtaggcctgcgctattctctgtgcgaactgtacgagcgttatcagaaaccgctgtttatcgtggagaacgggttcggcgcctacgacaaggttgaagaagacggcagcatcaacgatgactatcgtatcgactacctgcgtgcccacgtggaagagatgatcaaagccgtgacgcacgacggcgtggatctgatgggctatacgccctggggctgcatcgactgcgtgtcgttcaccaccggccagtacagcaagcgctacggctttatctacgtgaacaagcacgacgacggcacgggcgacatgtcgcgttcccgcaagaagagcttcgagtggtataagggcgtgattgccagcaacggcgagaaactt

SEQ ID NO: 19768 - DNA, 408 bp, Enterobacter cloacae
gtggtcctgtggcaatctgatcttcgcgtctcgtggcgctcgcagtggatgtctttattgctccacggcctggttgcggcctttgttttactgatgccgtggccgctgagctatacgccgctgtggctgctgttactgtcgtttgtcgtttttgacagcgtacgcagccagcgtcgcattaatgcccgtcagggagagattaaattactgatggattcccgcctgcgctggcagggtaaagagtgggatatcctcggtatgccctggatgctcaactgcggcatgatgttacggttacgcaaggtggacggcgggcgttgccagcatctgtggctggcggctgacagtatggatgctgccgagtggcgagacctgcgccggatgctgttgcaacaaacgacgcagggg

SEQ ID NO: 19769 - DNA, 264 bp, Enterobacter cloacae
atggatattaacaacaaggcccgtattcactgggcgtgccgtcgcggcatgcgtgaacttgatatttccatcatgcctttctttgaatatgagtatgacagcttaagcgatgatgataagcgtctgtttgttcgcctgcttgagtctgacgatccggatttattcaactggctgatgaaccacggcaaacccgccgacaccgagttgcaacggatggtgcaattaattcaaacacggaatcgggaacgtggtcctgtggcaatc

SEQ ID NO: 19770 - DNA, 978 bp, Enterobacter cloacae
atggcatttacaccattttctcctcgccagcccgccgcctctgcgcgtctgccgctgacgcttatttctcttgatgactgggcgctggcaacgctcagcggtgccgacgccgaaaaatatctgcagggccaggtgaccgccgacgtcagccagatgaccgaacaccagcacctgctggccgcgcattgcgacccaaaaggtaaaatgtggagcaacctgcgcctcttccgccgtcaggacggctttgcctttattgagcgccgcagcctgcaagaggcccagctcaaagagctgaagaagtacgcggtcttctccaaagtcactatcgccccggacgacgaacatgtcctgctgggagtggccggtttccaggcccgtgcggccctgaaaaatctcttcagcgaactgccggatgcagaaaagcaggtggtcagcgaaggcgcgacctctatcctgtggtttgaacaccctgcggagcgtttcctgttagtcacggatgcggcaacggccgaacgcgtgaccgaagcgctgcgcggcgaagcgcagctcaacaatagtcagcagtggctggcgctgaatatcgaagcgggtctgccggtgattgacgcagcaaacagcgcgcagtttattcctcaggcaacgaacctgcaggcgctggggggtatcagctttaaaaagggctgttataccggccaggagatggtggcgcgtgcaaaattccgcggagctaacaaacgagcgctgtggacgctggcgggccatgccagccgtgtacctgaagcgggtgaagacttagagctgaagatgggtgataactggcgccgcaccggcaccgtgttagccgccgtacagctggatgatggacgtcttttggtacaggccgtcatgaacaacgacatggaagccgacagcgttttccgcgtgcgtgacgatgcgaacacgctgagcatcgagccgctgccgtattcgttagaagag

SEQ ID NO: 19771 - DNA, 657 bp, Enterobacter cloacae
atggtgagtagaccattaatcgcacagggatattcgctggctgaggaagtagccaacagcatcagccacggcattggcctggtgtttgggattgtcggtttagtgttattgctggtgcaggcggtggacgccaatgccagcgcgatggccattaccagctacagtctttatggcgggagtatgatcctgctgttcctggcctcgacgctgtatcacgcgatcccgcatcagcgggccaagatgtggctcaagaaatttgaccactgtgctatctatcttctgattgcaggcacctacacaccgtttttgctggtggggctcaactcaccgctgtcgcgtggcctgatgattgttatctggagcctggcactgctggggatcctgtttaagctgaccatcgcgcaccggtttaaggtgctgtcactggtcacctatctgacaatgggctggctgtcgctgattgtggtgtatcaactggcggtcaaactgtcggtagggggcgtgacgcttctggccttaggcggcgtggtgtactcgctcggcgtgattttctacgtctgcaagcgcatcccgtacaaccatgccatctggcacggctttgtgctcggcggcagcgtatgccactttttggcgatctatttgtacgtggggcaggtg

SEQ ID NO: 19772 - DNA, 955 bp, Enterobacter cloacae
atgaataaactcgacgcctttatccagcacgcggtcagctccgtacccgtcagcgggacctctctcatctcctcgttatacggtgacgcgctttcccatcgcggcggtgagatttggctcggtagcctggccgccctgctggaaggcatggggtttggcgagcgcttcgtgcgcaccgcgctgtttcgcctcaacaaagagggctggctggacgtttcccgcatcgggcgtcgcagcttttaccgcctgagcgataaggggcttcgcctgacgcgtcgcgcggagaataagatttaccgcgcggaactgcccgcctgggacggcaaatggctgttgctgctctccgaaggtctcgataaagccacacttgccgacgtcaaaaaacagcttatctggcaggggtttggcacgctggcgccgagcctgatggcctcgccgtcgcagcatctggcggacgtgcagtccctgcttcacgatgccggcgtggcggaaaacgtgatcttctttgaagcccactcgccgctggcgctctcccgtgccgcgctgcgttcgcgggtggaggagtgctggcagttaaccgagcaaaacgcgatgtacgagtcctttatcaattcgttccgtccgctgctgccgctgctgaaagaggccgcgcccgaggagctgacgccggaacgctgtttccagatccagctgctgctgattcacttttatcgtcgcgtggtgctgaaggacccgctgctgccggaagagttgctgcccgctcactgggcggggcaaagcgcccgacagctctgcattaatatctatcagcgtgtcgctccgggggcgctggcgtttgtcagcgagaagggcgaaacctccgtgggcgaactgcccgtgcccggcacgctttactatcaacgctttggtggtcttacaagcgcataaggagcgaagatgccagtttatcaaattg

SEQ ID NO: 19773 - DNA, 597 bp, Enterobacter cloacae
atgtctgctacaaatgccattaataacgcactgatcgtgacggctcatcctgtcgacaattcgttatcccattcgctggcagcccgtattgccggaaaattacgcgagcaaggtacgcaggttgaaattgccgatctgcatgctgaagggtttaatccggcgatgacccgcgccgatctcgatttgtatcacggcgatccgagcgcccttcctgaagatattctgcgcgagcagcagcgcgtcgagcgagcggatatgctggtgtttgttttccccgtgtactggtggtcggtccccgcgctgttgaaaggctggttcgatcgcgtattaaccctgaactgggcgtataaggtggccgacgatggccggatcgtgggcagcttacgcgatgttcccgtccgcctgattgccaccggcggcagcgatctcaccggattcgacaaacacggctattcgacggcgattcagacgcagataatcgaaggcgtgtttggcttctgcgggctgaagaacgttaagctcgatattctttaccaggcagacgcggcgacgcctgagcaggtggaggagttcctgaaggggctagagggccttaaa

SEQ ID NO: 19774 - DNA, 936 bp, Enterobacter cloacae
atgacaagaaatatcgttgcgggaatgatgatggccgcgttttcaggggcagtatatgcaggaccaacaatcgttacaccagatttttcaccggatagtttagcggtttcagcctctgccgggatgctgagcggaaaatctcacgaaatggtttatgacgaagctacaggaagaaaaattagccaactggactggaaaataaaaaatgtcgccattctgaaaggcgatatcacctgggatgcttactcatttttaacattgaacgcccgcggctggacgtccctggcatcaggttcaggtcatatggatgactatgactggatgaatgaaaaacaatcctcctggacagaccattcaagccatccggccacgaacgttaactacgccaatgaatatgacctcaacgtaaaagggtggatcctccagggcgataactataaagcgggcgtaaccgcaggctatcaggaaacacgcttcagttggacggcgactggtggtacttacaattatgataacggtgcctatcaagggaacttcccggcaggcgaacgcggcattggttatagccagcgtttttctatgccctacattggccttgcaggacagtaccgtttcaatgactttgaatttaatgccctcttcaaattcagtgactgggtgcgtgcacatgataacgacgaacattacatgcgcgatctgactttccgcgagaagacaacagattcccgctattatggtgcctctgttgatgccgggtattacgtcactccgcacgccaaagtttttgcagaatttacctatagcagttacgaagaaggtaaaggcggtacgcagattattgataccaatactggtgactccggctctattggcggggatgcggcaggtatttctaaccataactataccattacagcgggcctgcaataccgcttc

SEQ ID NO: 19775 - DNA, 432 bp, Enterobacter cloacae
gtgagtctgagagaagcgatcgaaaaagctgaagaagctggagtagatttagttgaaatcagccctaacgccgaaccgccagtttgtcgtatcatggactacggcaagttcctttatgaaaagagtaagtcttctaaggaacagaagaagaagcaaaaagttatccaggttaaggaaatcaaattccgtcctggtaccgacgatggcgattatcaggtaaaactccgcagcctgattcgctttctggaagatggcgataaggccaagatcacactgcgtttccgcggtcgtgagatggcccaccaacagattggtatggaagtgcttaaccgcgtccgtgacgatctgagtgaactggcagtagtcgaatccttccctacgaagatcgaaggccgccagatgatcatggtgctcgctcctaagaagaaacag

SEQ ID NO: 19776 - DNA, 195 bp, Enterobacter cloacae
atgccaaaaattaagaccgtacgcggtgctgctaagcgcttcaaaaaaaccggtggtggtggatttaagcgtaagcacgcaaacctgcgtcatattctgaccaaaaaatctactaagcgtaaacgtcacctgcgtccaaaaggcctcgtttctaaaggcgatctgggtctggttatcgcgtgcctgccgtacgca

SEQ ID NO: 19777 - DNA, 354 bp, Enterobacter cloacae
atggctcgcgtaaaacgtggtgtaattgcacgtgcacgtcacaagaaaattttgaaacaagctaaaggctactacggtgcgcgttcacgcgtttaccgcgttgccttccaggctgttatcaaagcaggtcagtacgcttaccgtgaccgtcgtcagcgtaagcgtcagttccgtcaactgtggattgcgcgtatcaacgcagcagcacgtcagaacggtatttcttacagcaaattcatcaacggcctgaaaaaagcttctgttgaaatcgaccgtaagatcctggctgacatcgcagtattcgacaaagtagcgttcaccgctctggtcgaaaaagcgaaagcagcactggca

SEQ ID NO: 19778 - DNA, 981 bp, Enterobacter cloacae
atgtcacatctcgcagagctggttgccagtgcaacagccgccattaatcaggcctcagatgttgccgcgttagacaatgtccgcgtcgaatatcttgggaagaaagggcacctgacccttcagatgacaaccctgcgtgagctgccggcagaagaacgcccggcagcgggtgcggtgattaacgaagccaaagagcaggtacagcaggcgctgaacgcgcgcaaagccgagctggaaagcgcggtgctgaatgcgcgtctggccgcagagacgatcgacgtttctctgccgggtcgccgtatcgaaaacggtggtctgcatcccgttacccgcaccatcgatcgcattgaaagtttcttcggtgagctcggctttaccgtggcgactggcccggaaatcgaagatgattaccataacttcgacgccctgaacattcctggccatcatccggcacgcgctgaccacgacactttctggttcgacgctacgcgtctgctgcgtactcagacctccggcgttcagatccgtaccatgaaggagcaggcgccgccaatccgcattatcgctccgggccgcgtctatcgtaacgactacgatcagacccacactccaatgttccaccagatggaaggtctgattgttgataaaaacattagcttcaccaacctgaagggcacgctgcacgatttcctgaacaacttctttgaggaagacctgcaggttcgtttccgcccatcctacttcccgttcaccgaaccgtctgcggaagttgacgtgatgggtaaaaacggcaaatggctggaagtgctgggttgcggcatggtgcatccaaacgtgctgcgcaacgtgggtatcgatccggaagtttactccggctttgccttcggcatgggcatggagcgtctgactatgctgcgctatggcgtgaccgacttacgtgcattcttcgaaaacgatctgcgtttcctcaaacagtttaaa

SEQ ID NO: 19779 - DNA, 933 bp, Enterobacter cloacae
atgatggtttctatttatactctgacgctctccccttccctggattccgccaccctgacgccgcagatttacccggaaggtaaattgcgctgtagcgccccggtctttgagcccggcggcggcgggatcaacgtggcgcgcgccattacacatctcggcggcaaagccacggcaatttttcccgcaggcggtgccaccggtgaacacctggtctctctgctggccgatgaacaggtggccgttgaaaccgttgaggccaaagactggacgcggcaaaacctgcatgtccacgtgggatccagcggcgagcagtaccgttttgtcatgccgggcgcgaaactcagcgataacgagtttcgtcagcttgaagagaaagtgctgacaatagagagcggcgcgctgctggtgataagcggcagcctgccgcccggcgtaagcacggaaaaattaacggcgctgattcaggcggcacagcaacgcgtcatccgctgcattgttgacagcagtggcgaggctctgcaggcggccctggtgccgggcaatctggagctggtcaaacccaaccagaaagagttaagcgcgctggtcaaccgtgaactgacgcagcctgatgatgtgcgcaccgccgcgcaggagctggtgcgaacgggcaaagcgcggcgcgtagtcgtctcccttggccctcagggggcgctggcagtcgatgaatcgtcgtccgttcaggttgtcccaccgccgatgaagagccagagcacggttggcgcgggcgatagcatggtgggcgcgatgacgctaaaactggcgcagggtgcgtctctgctcgaaatgacacgctacggcgtggcggcgggtagcgccgccaccatcaaccagggcacgcgtctctgttcgcttgccgatacgcaaaaaatcgtcgattacctgtcccgaaat

SEQ ID NO: 19780 - DNA, 1727 bp, Enterobacter cloacae
atgaaattcagtgaactgtggttacgcgagtgggtgaacaccacgctggacagcgacgcgctttctaaccagatcaccatggcgggtctggaagtggacggtgttgagccggtttccggagccttcaacggcgtggtcgtaggcgaagtagtcgaatgcggtcagcaccctaacgctgacaaactgcgcgtaacaaaagtaaacgtgggcggtgaccgtctgctggatatcgtctgcggtgcgccaaactgccgtcagggcctgaaggtggccgtggcgaccgtcggcgcagtgctgccgggtgatttcaaaattaaagcggctaagctgcgcggcgagccgtctgaaggcatgctgtgctccttctccgagctgggcatttccgacgatcacaacggcattattgagctgccgctggatgcgccaatcggcaccgatatccgtgaatacctgaagcttgacgacaacaccatcgaaatcagcgtcacgccaaaccgtgccgactgcttaggtatcatcggcgtggcgcgcgacgtggccgtgctcaaccagaccgaactgaacgcgccggaaatcgcgccggttgaagcgaccatcagtgacgtgctgcctattcaggttgacgctgcggatgcttgcccgcgctacctaggtcgcgtggtgaaaggcatcaacgtgaaagcgccaaccccgctgtggatgaaagagaagctgcgccgctgcggtattcgctctatcgacgcagtggtcgacgtgaccaactacgttctgctggagctgggccagccaatgcacgcgttcgataaagaccgtatcgacggcggcattgttgtgcgcatggcgaaagagggcgaaaccctggttctgctggacggcagcgaagcgaaactgaacgccgacaccctggtgattgctgaccacagcaaagcgctggcaatgggcggtatcttcggtggcgagcactcaggcgtcaacgacgagacgcaaaacgtcctgctggaatgcgcgttcttcagcccgctctccatcaccggtcgcgcacgccgtcacggcctgcataccgatgcctctcaccgctacgagcgcggcgttgaccctgctctgcagtataaagcgatggaacgtgcgacccgcctgctgatcgacatctgcggcggcgaagcgggcccggttatcgacgtcaccaacgaagcaacgctgccgaagcgtgcgaccatcaccctgcgccgcagcaagctggatcgcctgattggccatcacgttgccgatgcgcaggtaactgacatcctgaaacgtctgggctgtgaagtaaccgaagggcaggacgagtggaaagccgttgcgccatcatggcgtttcgacatggaaattgaagaagatctggtggaagaagtggcccgcgtttacggctacaacaacatccctgacgagcctgtccaggcgggtctggtaatgggcacccaccgtgaagccgacctgtccctgaagcgtgtgaaaaccatgctgaacgacaaaggctaccaggaagtgatcacctacagcttcgttgatccaaagctgcagcagctgatccacccgggtcaggaggcgctgatcctgccaagcccaatctccagcgaaatgtccgcgatgcgtctgtctctgtggacgggcctgctgggcactgtcgtttataaccagaatcgccagcaaaaccgcgtgcgaattgtcgaaagcggtttgcgcgg

SEQ ID NO: 19781 - DNA, 1926 bp, Enterobacter cloacae
atgcctgtaattactcttcctgatggcagccaacgccattttgaccgtgctgttagcccaatggatgtagccctggacattggtcctggtctcgcgaaagcgactatcgctggccgcgttaacggtgagctggtggatgcttccgatctgatcgaaaacgatgcgacgcttgcaatcatcactgcgaaagacgaagaaggtctggagatcattcgtcactcctgcgcgcacctgttaggccatgccatcaaacagctgtggccaaacaccaaaatggcgatcggtccggttatcgacaacggtttctactatgacgttgaccttgaccacaccctgactcaggaagatatcgacgcgctcgaaaaacgcatgcacgagctcgccgaaacgaactatgacgtcatcaagaagaaagtcagctggcacgaagcgcgtgaaaccttcgtgaagcgcggcgagagctataaagtctctattcttgacgaaaacatttcgcatgatgacaagcctggcttgtaccatcacgaagaatacgtcgacatgtgccgtggaccgcacgtgccgaacatgcgcttctgtcatcactttaagctgatgaagatcgcgggcgcctactggcgtggcgacagcaacaacaagatgttgcagcgtatttatggtaccgcgtgggctgataaaaaagccctgaacgcatacctgctgcgcctggaagaggcggcgaagcgtgaccaccgtaaaatcggtaagcagcttgacctgtaccacatgcaggaagaagcgccgggtatggtgttctggcataacgacggctggactatcttccgtgaactggaaactttcgtacgctccaagctgaaagagtaccagtatcaggaagtgaaaggcccgttcatgatggaccgtgtgctgtgggaaaaaaccggccactgggacaactacaaagatgcgatgttcaccacctcgtctgagaaccgtgaatactgcatcaagccaatgaactgcccgggccacgttcagatcttcaaccagggcctgaaatcctaccgcgacctgccgctgcgtatggcggagttcggtagctgccaccgtaacgagccatcaggtgcgctgcacggtctgatgcgtgttcgtggctttactcaggatgatgcgcatatcttctgtactgaagatcaggttcgtgacgaagttaacgcctgtattcgtatggtctacgatatgtacagcacctttggcttcgagaagatcgtcgtcaaactctcaacgcgtccggaaaaacgtatcggtagcgatgagacatgggatcgcgcagaagcggatctcgccgtggcgctggaagagaacggcattccgttcgaataccagctgggcgagggcgcattctacggtccgaaaattgaatttaccctgtatgactgcctcgatcgcgcatggcagtgcggtactgtacagctggacttctccctgccgcagcgtttaagcgcctcttatgttggcgaagacaacgagcgtcaggtaccggtaatgattcaccgtgcaattctcggttctctggagcgcttcatcggcatcctgaccgaagagttcgctggcttcttcccaacctggcttgcgccagtgcaggtcgtggtgatgaacattaccgattctcaggcggattacgttaaagaattgacgcagaaactacaaaatgcgggcattcgcgtaaaagcagacttgagaaatgagaagattggctttaaaatccgcgagcacactttacgtcgtgtcccgtatatgttggtctgtggtgataaagaggtggaagcaggcaaagtcgccgttcgcacccgccgtggtaaagacctgggcagcctggacgtaagtgaagtgattgagaagctgcaacaagagattcgcagccgcagtcttcaacaactggaggaa

SEQ ID NO: 19782 - DNA, 1515 bp, Enterobacter cloacae
atgtctgaacaacaagcacagggcgctgacgcggtagtcgatcttaacaacgaactgaaaactcgccgcgagaagctggcagcgctgcgcgagcagggcgtgccgttcccgaacgattttcgtcgtgaccatacctcagaccaactgcacgctgacttcgacgctaaagagaacgaagagctggaagcgctgaacgttgaagtggccgttgcaggccgcatgatgacccgtcgtatcatgggcaaagcctccttcgtgaccttgcaggacgtgggcggccgtattcagctgtacgtttcccgtgacgacctgccggaaggcatctacaacgagcagttcaagaagtgggacctgggcgatatcctgggcgcgaaaggtaaactgttcaaaaccaagaccggtgaactgtctatccactgcaccgagctgcgtctgctgaccaaagccctgcgcccgctgccggacaaattccacggcctgcaggatcaggaagcgcgctatcgtcagcgctacctggatctcatctctaacgatgaatcccgtaagaccttcaaaattcgctctcaggtcatggccggtatccgccagttcatggtgaaccgcgactttatggaagtggaaaccccaatgatgcaggtgatcccaggcggcgcgtctgcgcgtccgttcatcacccatcacaacgccctggacctggacatgtacctgcgtatcgcgccggaactgtacctgaagcgtctggtggtcggtggtttcgaccgcgtgttcgaaatcaaccgtaacttccgtaacgaaggtatctccgttcgtcataacccagagttcaccatgatggaactctatatggcgtatgcggattacaaagatttgatcgagctgaccgaatccctgttccgcaccctggcgcaggacattctgggtaccacccaggtcccttacggtgaagaagtcttcgacttcggcaagccgtttgaaaaactgaccatgcgcgaagcgatcaagaaataccgtccggaaaccaacatggcggatctggataacttcgattctgcgaaagcgatcgctgaaagcatcggtatcaaggttgagaagagctggggtctgggccgtatcgtgaccgagatctttgaagaagtggccgaagcgcacctgattcagccgaccttcattaccgagtatccggctgaagtctctccgctggcgcgtcgtaatgacgagaatccggagatcaccgatcgcttcgaattcttcatcggcggccgcgaaatcggcaacggctttagcgagctgaacgatgcggaagaccaggctcagcgcttccaggatcaggttgacgcgaaagcggcaggcgacgacgaagcgatgttcttcgacgaagactacgtgaccgcgctggaacacggtctgccaccaacggcgggtctggggattggtatcgaccgtatggtgatgctgttcaccaacagccacaccatccgcgacgtgatcctgttcccggcgatgcgcccggtgaaa

SEQ ID NO: 19783 - DNA, 1101 bp, Enterobacter cloacae
atgtttgaaattaatccggtaaaaaaccgtattcaggacctcacggagcgctctgacgttcttagggggtatctttgactacgatgccaagaaagagcgtcttgaagaagtaaacgccgagctggaacagccggacgtctggaacgaacctgaacgcgcacaggcgctgggtaaagagcgttcctctctcgaagctatcgtagatacgctggatcaaatggcccaggggctggaagatgtttccggtttgctggagctggccgtcgaagccgacgacgaagaaacctttaacgaagccgtagcagaactcgacgtgctggaagagaagctggcgcagctggaattccgccgtatgttctccggcgaatacgacagcgctgactgctatctcgatattcaggcaggttccggcggcaccgaagcgcaggactgggccagcatgctgacgcgcatgtacctgcgttgggcagaagcgcgcggcttcaaaaccgaaattatcgaagagtctgaaggtgaagtggccggtattaaatccgtgaccatcaagattatcggtgattacgcctacggctggctgcgtaccgaaacgggcgttcaccgcctggtgcgtaagagcccgttcgactccggtggccgtcgtcatacctccttcagtccgcgtttgtttatccggaagttgatgaagatattgatatcgaaattaacccggcggacctgcgtatcgacgtttatcgcgcatccggcgcgggtggccagcacgttaaccgtacggaatcagcggtgcgtattacccacattccaaccgggctggtaacacagtgccagaacgaccgttcccagcataagaacaaagaccaggccatgaagcagatgaaagcaaagctttatgagctggagatgcagaagaaaaatgctgagaaacaggcgatggaagacaacaagtccgacatcggctggggcagccagatccgttcttacgtccttgatgactcccgcatcaaagacctgcgtaccggggttgaaacccgcaatacgcaggcggtgctggacggcagcctggaccaatttatcgaagcaagtttgaaagcagggttatgagga

SEQ ID NO: 19784 - DNA, 423 bp, Enterobacter cloacae
atgctgcaatctctcaaccatctgaccctcgcggtcagcgacctgcaaaaaagcgtcaccttctggcacgagctgctggggctgaccctgcacgcccgctggaatagcggggcctatctcacctgcggcgatctgtgggtctgcctgtcttacgacgaggcgcgccggtacgtgccgccgcaggagagcgactatacccactacgcctttaccgtggcggaagcggattttgaaccgttctcgaacaagctcgagcaggcgggcgtcaccgtctggaagcagaacaaaagcgagggggcgtcgttctattttctcgacccggacgggcacaagctggagctgcacgtgggcaacctcgccgcgcggctggcggcgtgtcgcgagaagccctatgcggggatggtgtttacctcagacgaggct

SEQ ID NO: 19785 - DNA, 891 bp, Enterobacter cloacae
atgaagattttgctgaccggcggcacgggccttattggtcgtcacctcattgcgcgtctgcaggccttgcatcacgacattaccgtggtcacgcgcagcccggagaaagcgcgccaggtgctgggggcgggtatcgatatctggaaaaatctggccgatcagcaaaatctggacggcttcgacgccgtcattaacctcgcgggtgaacccatcgccgataagcgctggacggaagagcaaaaacagctgttatgcagcagccggtggaacatcaccgaaaagctggtcgagctgatccgcaacagccataccccgccttcggtgctgatttcgggttccgccgtgggctactacggcgatcttggcgaggtggtggtgaccgaggaagagccgccccataacgagtttacccacaaactctgcgcccagtgggagcgtatcgctagtgcggcgcaaagcgatcgaacccgcgtctgcctgctgcggaccggcgtcgtgcttgcgcctaaaggcggtattctggcgaagatgcttccccctttccggctcggactcggcggccctatcggcaatggccgtcagtacctggcgtggatccatatcgacgatatggtcaacgggattctctggctgctggataacgatctgcgcgggccgttcaatatggttgcgccgtatccggtgcgtaatgaacagtttgctcacgcgctggggcatgccctgcaccgcccggcgatattgcgtgtgcctgccacggtgattcgcctgatgatgggtgaagcgtctgtgctggtattaggcgggcagcgggcgctgccaaaacggctggaagcggccgggtttgcgttccgctggtatgaattagaagaggcgctgggggatgttgtgcgg

SEQ ID NO: 19786 - DNA, 780 bp, Enterobacter cloacae
atgaaaaaactcgtgttgtcactatctctggtactggccttttccagcgccaccgcggcattcgcagccattccgcagaaaatccgaattggtaccgatccaacctatgcgccgttcgaatcgaagaattcaaagggtgaactggtcggttttgacatcgatctggccaacgagctgtgcaaacgcatcaaagcacagtgtacctacgttgagaacccgctggatgcgctgatcccgtccctgaaagcgaaaaaaatcgacgtaatcatgtcctcgctctccatcaccgaaaaacgccagcaggagattgccttcaccgacaaactctacgcggccgattctcgtctggtggtggctaaagcttctgatattcagccaacgctggagtcgctaaaaggcaaacgcgtcggcgtgctgcagggcaccacgcaggaaacctacggcaacgaacactgggcgccgaaggggattgaaatcgtctcctatcagggtcaggaaaatatctacgctgacctgacggcaggccgaattgatgcggcattccaggatgaagttgcggcaagcgaaggcttcctgaaaacgccggtgggtaaagattacaagtttggcggcccgtctattaaggacgtgaagttgtttggtgtgggcaccggtatgggcctgcgcaaagaagacaacgaactgcgtgaggcgctgaacaaagcgtttgctgaaatgcgcgctgacggcacctacgacaagctggcgaaaaagtactttgattttaatgtttacggcggc

SEQ ID NO: 19787 - DNA, 684 bp, Enterobacter cloacae
atgctgtacggattttctggcgttattttacagggcgcgcttgtcacccttgagctggctatcagctccgtggtgctggcggtgctgataggtctggcgggcgcaggggcgaagctttcggctaataaaccgctggcgctcatatttgaaggctacaccacgcttattcgcggcgttcccgatctggtgctgatgctgcttatcttttacggtctgcagattgcgcttaacagcgtaacggacgcgatgggcatgagacaaattgatatcgacccgatggtggccggtattattaccctcggttttatctacggtgcctacttcaccgaaaccttccgtggtgcctacatggccgtgccgaaaggccatattgaggcggcaaccgcatttggttttacctcttcacaaacgtttcgtcggattatgttcccggccatgatgcgttatgcgctcccgggcatcggcaacaactggcaggttatcctcaaagcgacagcgctggtctcgctgctcggtctggaagacgtcgtgaaagcgactcagctggcgggcaagagcacctgggagccgttctactttgcggtggtctgcggcgtgatttatctggtctttacgaccgtctccaatggtgtgctgcttctgctcgagcgtcgctactccgtgggtgtgaagagggctgacctg

SEQ ID NO: 19788 - DNA, 497 bp, Enterobacter cloacae
cagggttacgacctgacccgacgcgtgccgggctgagattgacggtttgccctgagcgatccgtcggcgactgatgaatatctggaagatcggttcgcgccgccccgagtgggagcggatctatccgcacgacctgcaaaaaacgcgcgcgggcgcggcagatccaggcgtggctgcgaagcgatctggtgccaattcgcgtggaacgctcaacggacgtcgtgttcgccggggtgaaaaagccagcgctcagcgctgaaggtcgtgaaagcgcgcaaaaactcattgaaaccgccacctcgctcctcgcacacggcaacccgaacctgttcggcgagtggtgcattgccgacgccgatcttgcgttgatgctaaaccgcctgatcctcaacggcgatgaggtgccgcagctgctggtggattatgccgcgtttcagtggcagcgtgcctccgtgcagcgctatgtggcactatctgccaggcgcgcgggctgataa

SEQ ID NO: 19789 - DNA, 453 bp, Enterobacter cloacae
atgtcgacaccagagaacccgtccgtaaatttctttagtctgtttcgtcggggacagcattacgcaaagacgtggccgatggaaaagcgccttgcgccgatgttcattgagaatcgcaccattcgcgccacgcgctatgcgattcgctttatgccgccagtcgctgtctttacgctgtgctggcagattgcgttgggcggccagcttggccctgccgtcgcgacggcgctcttcgcattaagcctgccgatgcagggcctgtggtggttaggtaaacgctccatcacgccacttcccccatctattttacactggttttatgaagtgcgcggaaaactggaggaggccgggcaggcgctcgccccggttgaaggcaagccggactaccaggcgctggcggacacgttaaagcgcgcttttaagcaactggataaaacattcctcgatgacttg

SEQ ID NO: 19790 - DNA, 441 bp, Enterobacter cloacae
gtgctcaaaaaatggatatatgatacaaccatcacgctgcaggattgcgtggaaaactggccgcaggcgctggagctgtgcgcgaagccgcttctggatttgcaggtaattgagcctgaatacgtcacggccatcatccagcagcaccacgcgttaggaccctattatgtgctggcaccagggctggcgatgccgcatgcgcggccagaggaaggcgccaaaggactggggttgtctttattaaaactaaaacagggcgtctcgtttggtgccggtgagtttgaccctgtcgatgtgattattatgctcgcggcaccggataaacatagccatatcgaaatgatatccgcactcgcagaattattttccagcgacgaggatatggagaaactgcatcaggcgaataccctggaggaaattaaaacgattattgaccgcttc

SEQ ID NO: 19791 - DNA, 1395 bp, Enterobacter cloacae
gtggatatgtttatccttgaaacgctgaatttcgttgttgatattttaaaagtcccttcggtgctggtcggcttaattgcgcttattggtctggttgcgcagaaaaaagcgttttcggacgtggtgaaagggacgattaaaaccattctcggctttattgtgctgggcggcggcgctacggtgctggtggggtcattaaatcctttgggcggtatgtttgagcacgcctttacgattcagggcattattccaaacaatgaagcgattgtgtcaattgcgctggagaaatacggtgcagcgaccgcgctgattatggccttcggcatggtggcgaatattatcgtcgcgcgctttacccgcctgaagtacatcttcctgaccggacaccacacgttttacatggcgtgcatgattggcgtgatcctgacggtagcgggctttgagggcgtgggcctggtctttaccggctcgctgatcctcggcctgatcatggccttcttcccggcgattgcccagcgctacatgaagcgcattaccggcaacgatgagattgcattcggccacttcggcacgctgggctacgtgctgtccggctggattggcagcaaggtcggcaaaggctcccgctcaaccgaagagatgaacctgccgaagaacctgagcttcctgcgcgacagctcgatctcgatctccctgaccatgatgattatctacctgatcatggcggtgagcgccggacgtgaatacgtggaggctaccttcagcggcggtcagaattacctggtctacgccatcatcatggcgatcaccttcgcggcgggcgtgttcatcattctgcagggcgtgcgcctgattctggcggaaatcgttccggccttcaccggcttctcggagaaactggtgccgaacgcgcgtcctgcgctggactgcccggtggtgtatccgtatgcgccaaacgcggtgctgattggcttcctgttcagcttcctcggcgggattgtagggttgttcatctgcggtcagtttagctgggtgctgatcctcccgggcgtcgtgccgcacttcttcaccggcgcaacggctggcgtgttcggtaacgccaccggcggacgccgcggggcaatgattggcgcctttgctaacggcctgttgatcaccttcctgccggtcctgctgctgccggtgctgggcgccattggctttgccaacaccaccttctcggacgccgacttcggcgcggtcgggattgtcctcggcaacctggcgcgcttcctgtcgccgcttgccatcaccggactggttgtggcgttgttcgcgctgctggtggcgtacaacgtcttcgcgaaaaacaaacctgcgggcggtaacgcgcaggaaaacaccggagccaaatca

SEQ ID NO: 19792 - DNA, 951 bp, Enterobacter cloacae
atgattaaggttgcaccggcaggagagaaagacgccgttgagatgcgtaaggtctacgcgggctttgtggcaaagcagattgaggcgggaagcgagattatcgccctggaagcggatctgatgagctcgatggcaatggacggcgtggcgcgcgattatccgcagcacgtgattaactgcggcattatggaggccaacgtcatcggcacggcggcggggctgtcgcttaccgggcgtaaaccgttcgttcataccttcaccgcgtttgccagccgtcgctgctttgaccagctgtttatgtccctggactatcagcgcaacaacgtgaaggtgattgcctcggatgcgggcgtgacggcctgccataacggcggaacacatatgtcgtttgaggatatgggcatcgtacgcggtctggcgcattcggtggtgctggaggtgaccgacgcggtgatgtttgaggacgtgctgcgccagcttatcgacctcgaaggcttttactgggtacgcaccatccgcaagcaggcaccgagcgtgtacgccccgggctcaaccttcaccatcggcaaaggtaacgtgctgcgcgaaggaaccgatattaccctgattgccaacggcatcatggtggcggaagcgctggaggcggcgcgccagcttgagcaggagggggtaagcgcggcggtcatcgacatgtttaccctgaagcccatcgaccggatgctggtgaaaaactacgccgagaaaaccgggcgcatcgtcacctgtgaaaaccacagtattcacaacgggctgggatcggcggtggcggaagtactggtggaaacctgcccggtaccgatgcggcgggtgggcgtcaaggagcgttacggacaggtggggacgcaggatttcctgcagaaggagtatggcctgacggcacatgacattgtatcggcggcgcgagagctgctg

SEQ ID NO: 19793 - DNA, 970 bp, Enterobacter cloacae
tctccccctgctggcgctgtttgcgctgcctgcttttgcgaagcccgtcctgacggtctacacctatgactccttctctgccgactggggccctggcccggtagtcaaaaaagctttcgaagcggactgtaactgcgaactgaagttcgtggcgctggaagatggcgtatcgctgctcaaccgtctgcgcatggaagggaaaaacagcaaggccgacgtggtgctcgggctggataacaacctgctggaagccgcctcgcagaccaaactgtttgccaaaagcggcgtcgcggcagatgccgttaacgtgccgggcggctggaaaaacgacacctttgtgccgttcgactatggctactttgcttttgtttacgacaaaaataagctgaaaaacccgccgaagagcctgaaagagctggtcgaaagtgaccagaaatggcgcgtgatttatgaagatccgcgcaccagcacgccaggactgggcctgctgctgtggatgcaaaaggtttatggggataaagcgccggaggctgggcagaaactggccgctaaaaccgtcaccgtcaccaaaggctggagcgaagcctatggcctgttcctgaaaggcgaaagcgacctggtgctgagctacaccacctctccggcctaccacatcatagccgagaagaaagataactatgctgccgctgattttgctgaagggcactatctgcaggtggaagtggccgcgcgtaccgccgccagcaaacagccggagctggccgagaagttcctgaagtttatggtctcaccggcgttccagaatgcgattcccgcaggcaactggatgtatccggttacgaacgttgcgctgcccgcaggtttcgagcagctgaccaaaccaaacacctcgctggagtttacgccgcagcaggtcgccgcgcagcgtgcagcatgggtaagtgaatggcaacgcgccgtcagccgttga

SEQ ID NO: 19794 - DNA, 1653 bp, Enterobacter cloacae
atgccttccggtcgtctgcaacaacagtttatccgcctctggcagtgctgcgaggggcaatcgcaggagaccacgctcaacgagctggctgacctgcttagctgctcccgccgccatatgcgcacgctgctcaacaccatgcagcagcagggctggttaaactgggaagcggaggcgggacgcggcaaacgctcgcggctgactttcctctataccgggctggcgctgcagcagcagcgcgcggaagatctgctcgagcaggatcgcatcgatcagctggtccaactggtgggcgacaaagccgccgtgcgccagatgctggtttcccatctcgggcgcagctttcgtcagggccgacacattctgcgggtgctctactaccgtccgatgaaaaatctgttgcccggcacggccttacgccgctctgaaacccacatggcccggcaaatcttcagcggcctgacgcggataaatgaggaaaacggggaactggaggcggatatcgcgcaccactggcagcaggtttccccgcttcactggcgcttttttttacgccccggtatccactttcaccacggccgcgagctggaaatgcacgacgttatcgcctccctggaacgtgcccgcaggctcccactctactcgcatatttcccgcgtccactcccccacggcctggacgctggatattgagctgtcgcagcaggataagtggcttccctggctgctgggctatgtgccgtcgatgattttgcccggcgagtgggaatcaatgaacaactttgccagcctgccgattggcaccgggccttactccgtgtcccgcaataacagcaaccagctgaaaatccgcgcgttcgacgactactttggctatcgggcgctgatcgacgaagtgaacgtctgggtattgccggatctcaatgaagacctgagctgcgggctgacgctggaaggccccaccacgggagaaaaagccgtggagagtcgcctggaggaagggtgttactatctcctgtttgaccgccgtacccaccgtggggcaaaccaggccgtccgcaagtggatcagccacgttttgtccccttccaatctgatttaccatgcggaagagcagtaccagacatactggttcccggcgtacggcctgcttccgcgctggcaccacgcccgcccggtgcactgcgacaaacccgcagggctggagtccatcaccctgacctactaccgcgagcacgtggagcatcgttttatcgccagaatcatgacccggctgctggcagccgagggggtcaggttagaggtcagggaagtggactatgacgaatggcaccagggggagatcgccagtgatatctggctcaacagcgccaactttaccctgccgctcgatttttcccttttctcgcatttgtatgaagtcccgctgatccagcactgcatcgaccgtgactggcagcaggacgccgccctgtggcgcgcgggcgaaatgaatcttgcagcgtggtgccagcagctgctggccgagcaggcgatcgtacccttgatccaccactggctgatgatccagggccagcgcagcatgcgcggcctgcggatgaataccctgggctggtttgattttaaatccgcctggtttgcgccgccggagcca

SEQ ID NO: 19795 - DNA, 1860 bp, Enterobacter cloacae
atgagttttgatattgccaaatacccgacactggcgttagttgactccacccaggagctacgtctgttgccgaaagagagcctgccgaagctgtgcgacgagctgcgtcgctacctgctcgacagcgtaagccgctccagcggccatttcgcctccgggcttggcacggttgagctgaccgtggcgctgcactatgtctataacacgcctttcgatcagctcatctgggacgtgggccaccaggcttatccgcacaaaattctgaccggacgtcgcgataaaattggcaccattcgtcagaaaggcggcctgcacccgttcccgtggcgcggtgagagcgagtacgacgtgctgagcgtcggccactcctccacctccatttctgcgggcatcggtattgccgttgccgccgagaaagagaacaagcagcgccgcaccgtctgcgtgattggcgacggcgccatcaccgcagagatggccttcgaagccatgaaccacgcgggcgacatcaagccggacatgctggttatccttaacgataacgaaatgtcgatttccgagaacgtcggcgcgctgaacaaccatctggcccagctgctctccggcaagctttactcctcgctgcgcgaaggcggcaagaaagtcttctccggcgtaccgccgattaaagagctgctcaagcgtaccgaagaacacatcaaaggcatggtcgtgccgggcaccctgtttgaagagctgggctttaactatattggcccggttgacggtcacgacgtgctgggcctggtgaccacgctcaagaacatgcgcgacctgaaaggcccgcagttcctgcacatcatgaccaaaaaagggcgcggttacgaaccggcggaaaaagatccgatcaccttccacgcggtaccgaaatttgacccgtcgagcggctgtctgccaaaaagcagcggcggcatgccgagctattcaaaaatcttcggcgactggctatgcgaaaccgcagccaaagacaacaagctgatggctgtgacgcctgccatgcgtgaaggctccggtatggtggagttctccagaaaataccctgaccagtattttgacgttgccattgccgagcagcatgcggtgacgtttgcagcgggcctggccattggcggctacaagccggttgtcgctatctactccaccttcctgcagcgcgcctacgatcaggtgatccacgacgtggcgattcagaagctgccggtactgtttgctatcgatcgtgcgggcatcgtcggtgccgacggccagacgcaccagggcgcgtttgatctgtcgttcctgcgctgtattccggatatggttgtcatgacgccaagcgacgagaacgaatgtcgtcagatgctgtttaccggttaccactatcaggatggcccaagcgccgttcgctacccgcgcggcaatgcggtgggcgttgagcttcagccgctggaaaaactgccgatcggtaaaggtctggtgaagcgtcgcggtgaaaaagtggcgatcctgaacttcggcacgctgatgccagaggcggctaaagcggctgaagcattgaatgccaccctggtggacatgcgctttgtgaagccgctcgacgactctctgatcctgagtatggcagagacgcatgacgtgctggtcacgctggaagaaaacgccatcatgggcggcgcgggcagcggcgtgaacgaggtactgatggcgaaccgtacagccgtgccggtgctgaacctcggcctgccggatcacttcattccgcaaggtactcaggacgaagcccgtgcggcgataggcctggacgccgccggtatcgaagccaaaatccgtacctggctggac

SEQ ID NO: 19796 - DNA, 897 bp, Enterobacter cloacae
atggattttgccaacgagcttcaggcgcgtgtcgtacgcgccaacgacgccctgcgccgttttattgcgccacagccttttcagaacactccactggttgaagccatgcactatggcgcactcttgggtggaaagcgcctgcgcccgttcctggtgtacgccacaggcaatatgtttggcatcagcgataacacgctggacgccccggcagccgccgttgagtgcatccacgcctactcgctgatccacgacgatctcccggccatggacgacgacgatttgcgtcggggtcaacctacctgccatatcaagtttggcgaggcgaatgccattctggcgggtgatgccctgcaaacgctggcattctcgattttgagcgacgcgccgatggccgaagtggccgaccgcgaccggctggcgatgatctccgagctggcaatggccagcggcgtggccggcatgtgcggcggacaggcactggatctggaagcggaaggacgtcaggttaatctggaacagctggagcgtattcaccgccataaaaccggggcgttgattcgttccgccgttcgcctgggcgcgctgagcgcgggtgaacaagggcgcaaagccctgccgattctggacagatacgcagaaagtatcggtctggcattccaggttcaggatgacattctggatgtggtgggcgatactgcaacattgggtaaacgtcagggtgcggaccagcagcttggcaaaagtacctaccccgccctgctgggccttgagcaagcccaacgtaaagcccgggatctgattgacgacgcccgccagtcgctaaatgaactggccgcgcaatcgctggatacctcggcactggaagcgctagcggactatataatccagcgtgataaa

SEQ ID NO: 19797 - DNA, 1332 bp, Enterobacter cloacae
atgaccatgttcaagatgccggtatttacctgggcatctctgtgcgccaacatcctgattattgcctccttcccaattctgaccgtcaccatcgcgctgctgaccctggaccgctacctgggcacccatttcttcacgaatgatatgggtggcaacatgatgatgtacatcaacctgatttgggcctggggtcacccggaagtgtacattctggttctgcctgtgttcggtgtgttctccgaaatcgcggcaaccttctcgcgtaaacgtctgtttggttacacctctctggtgtgggcaaccgtgtgtattaccgttctgtcgttcatcgtttggctgcaccacttcttcaccatgggtgcgggcgcgaacgtaaacgccttcttcggtattaccaccatgattatcgcaatccctaccggggtgaagatcttcaactggctgttcaccatgtaccagggccgcatcgtgttccactcagcgatgctgtggactatcggcttcatcgtgaccttctccgtaggtgggatgaccggcgtactgctggcggtaccaggtgctgacttcgttctgcacaacagcctgttcctgattgcgcacttccataacgttatcatcggtggcgtggtcttcggctgcttcgctggcgtaacctactggtggccaaaagcgttcggcttcacgctgaacgaaaaatggggtaaacgcgcgttctggttctggatcatcggcttcttcgtagcatttatgccgctgtacgtgctgggcttcatgggtatgacccgtcgtctgagccagcagatcgatccgcagttccacccaatgctgatggttgcagcgggcggtgccgtgctgattgcctgtggtatcgcgtctcagctgattcagttctacgtgtctattcgcgaccgcgaccagaaccgtgacctgaccggtgacccatggggtggccgtacgctggagtgggcaacctcttctccacctcctttctataactttgccatcgtgccgcaggttcatgaacgcgacgcattctgggaaatgaaagaaaaaggtgaagcgtacaagcaacctgctcattacgaagagatccacatgccgaaaaacagcggtgcgggcattgtgattgccgccttcgcaacggtatttggtttcgcaatgatctggcacatctggtggatggcgattgttggcttcgccggcatcgtaatcagctggattgtgaagagctttgacgaggacgtggactactacgtaccagtccgtgaagttgagaagctggaaaaccagcatttcgacgagatttctaaagcggggctgaaaaatggcaac

SEQ ID NO: 19798 - DNA, 674 bp, Enterobacter cloacae
cccttgctctcacctccgtccagcgagggccagttgctacagcaggcacagcgtctggcaggcttttcgcttggcgagctggcggcaatggcagggcttcagatcccgaaggatctaaaacgggataaaggctggatcggcatgctgctcgagctgtggctgggcgccacgcagggagcaaacccgagcaggattttgcagcgcttggcgtggagttaaaaaccatccccatagacagccagggcaagccccttgagaccaccttcgtctgcgttgcgccattaaccggcaacaccggcgtgacgtgggaaaccagccacgttcgccacaagctgaagcgcgtgttgtgggtgccggttgaaggtgagcgtcagatcccgctggctgagcgtcgcgttggcgcgccgctgctctggagcccgaacgacgatgaggagcaacagctgcgtctggactgggaagagctgatggacatgatcgtgcttgggcaggtagagcgcatcaccgcccggcacggagaagtattacagctgcgcccgaaagcggccaacagtaaagcgcttaccgaggcaatcggcgcgcagggcgagccgatactgacgctgccgcgcggtttttatctcaaaaagaatttcaccggcgcactcctggcacgtcatttcctcctaaaaaca

SEQ ID NO: 19799 - DNA, 1099 bp, Enterobacter cloacae
atgtctgagatggatatcacaaaaagcaccgatcttgattttccccgttatacctccccggcaatacacgctaaagaaattgatcttttcggtttattagcggtccttttggcggccaaaaaacgcattgtcaccattagccttgcttttgcactggcgggggtggccatttcatttttactgccgcagaagtggaccagcaaagcggtgatcactccggcaggaacagtcgcagtggaacccgctgcgccagatgatggtggcgttacaggtgcttgatgtggacgtgaagattacccgtccggaagtctttgacctgttcattaaaaagtttcagtcgcagtcattgcttgaagagtatctgaaatcctcttcttacgtgatgtcgcagcttaaagacacggaggtggatccgcttgagctgcatcgggcgatagtcaacatctcagacagaatggtagcggtgaataacgctcagggaaaagacgcggataaaatcccctatgtctcctggacattaagcttcactgcgccgacagctgacgatgctcaagccgtactaaatggatacatcgattatatcgcggctattgttgaaaaagagacggtgcagaatatccgcaaccagatcgccctgaaaaagaatgtcgttgagcagcagctggaactggatcgtgtccgtctgactaatattcacaataccaacctgcagcgactgaattattcgctggaagtggcaaatgccgcaggcattaagaaaccagtttacagcaacgggcaggccgtaaaagacgatccggattactccgttgcgctcggcgctgacggtatcgcgcaaaagctgcagatcgaaaaaaatctgaaggacgtgaccgaactgaatgcggatttccagaaccgggaataccacctcgcacagctgaaaaagctctcctttgccgatgttaaacttgagccattccggtaccagctctctccttccatgccggtgaaaaaggatggcccgggcaaggctctgatggtcgtcctggcggcgcttctggggggcctgtttgcctgcggtagcgttttactgcgcgaggcgatgctcgcacgtact

SEQ ID NO: 19800 - DNA, 123 bp, Enterobacter cloacae
atggcaaatgccgacgatctgatcaaaagctatgtttccgccggattcaaaaagatccacctcgactgcagcatgtcctgcgaggacgacccggttcccctgaccgacgcgatcgtcgccgga

SEQ ID NO: 19801 - DNA, 228 bp, Enterobacter cloacae
gcaggccgtgttattattgttatcagtacattttgacaggaagagtattttgactactgacactcatactctgcatattgaagagattttagaacttctgccgcaccgctacccgtttctgctggtagaccgtgtgctggattttgaagaaggtcgttttctgcgcgcagtgaaaaatgtttccgtgaacgagccgttcttccaggggcacttccctggtaagcctat

SEQ ID NO: 19802 - DNA, 1023 bp, Enterobacter cloacae
atgccttcaattcgactggctgatttagctcagcagttggatgcagaattacacggtgatggcgatctcgtcatcaccgctgttgcgtccatgcaatctgctaaagctggcacgattaccttcatggtaagccctaagtaccgtgagcaactggctcaatgccaggcgtcagctgttgttctgacgcaggacgatcttccatttgccactgtaagcgcgctggtagtgaaaaacccctacctgacgtatgcacgcatggctcaaattcttgataccacgccgcagccggcccagaacattgctgccagcgcagcgattgatccgacggctaagctgggtaacaacgtcgccgttggcgcgaatgcggttatcgaatccggcgttgtactgggcgataacgccgtcattggcccgggttgcttcgttgggaaaaatacgaaaatcggcgccgggacccgtttatgggccaacgtgtccgtttatcatgacgttgaaattggcgaaaattgcctcgtccagtccagcaccgtcattggttctgatggctttggttacgctaacgatcgcggtaactgggttaagatcccgcagcttggtcgcgttattattggcgatcgcgtggagatcggcgcctgtaccaccattgaccgtggcgcgcttgacgacacgatcattggcaatggtgttatcatcgataaccagtgccagattgcgcataacgttgtgattggcgacaataccgcggttgcgggtggcgtcatcatggcaggcagcctgaaaattggccgttattgcatgattggcggcgcgagcgtgattaatggccatatggaaatatgcgacaaggtgactgtgacgggaatgggcatggtaatgcgtcctatcactgaacctggcgtgtattcctcaggtattccgctacaacccaacaaggtatggcgtaaaacagcagctctggtgatgaacattgatgatatgagcaagcgcctcaagtctcttgagcgtaagatcgatcaacaagat

SEQ ID NO: 19803 - DNA, 555 bp, Enterobacter cloacae
gtgattaacgacatcagaaaagatgctgaagtacgcatggacaaatgcgtagaagcgttcaaaaaccaaatcagcaaaatccgtactggccgtgcttccccaagcctgctggatggcatcatcgtagaatattacggtacgccaacccctctgcgccagctggcgagcgtgacggttgaagatacccgtacgctgaaaatcaacgtcttcgaccgctctatgagcccggccgttgagaaagcgattatggcctctgacctcggactgaacccaagctctgcgggcgcagacatccgtgttccactgcctccgctgacggaagagcgtcgtaaagatctgatcaaagtcgttcgtggcgaagctgagcagggtcgtgtatccgtgcgtaacgtacgtcgcgacgcgaacgataaagtgaaagcactgctgaaagaaaaagagatcagcgaagatgacgatcgtcgttctcaggacgacattcagaaaatgaccgacgcggccatcaagaaaattgatgcggcgctggcagaaaaagaagcggaactgatgcagttc

SEQ ID NO: 19804 - DNA, 723 bp, Enterobacter cloacae
atggctaccaatgcaaaacccgtgtacaaacgcattctgcttaagctgagtggcgaagcgctgcagggatcggaaggcttcggtattgacgcaagcatccttgatcgcatggcacaggaaatcaaagaactggtcgaactgggtatccaggttggcgtggtcattggcggtggcaaccttttccgtggtgctggtctggcgaaagcggggatgaaccgcgttgtgggcgaccacatgggtatgctggcaaccgtgatgaatggcctggcgatgcgtgatgcactgcatcgcgcctatgtgaacgcccgcctgatgtccgcgattccgctgaatggcgtatgcgataattacagctgggcagaagccatcagcctgctgcgcaacaaccgcgtggtgatcctctccgccggtacgggtaacccgttctttacaaccgattccgccgcctgcctgcgcggtatcgagatcgaagccgatgtggtactgaaagcgaccaaagtagacggcgtgtttactgccgacccggcaaaagatccttctgccaccatgtacgatcagctgagctacagcgaagtgctggataaagagctgaaagtgatggatcttgccgccttcacgctggctcgcgaccacaaactgccgatccgtgtcttcaacatgaataagcctggcgcactgcgtcgcgtggtcatgggcgaaaaagaaggcactttgatcacggaa

SEQ ID NO: 19805 - DNA, 849 bp, Enterobacter cloacae
atggctgaaattaccgcatccctggtaaaagagctgcgcgagcgtactggcgcaggcatgatggattgcaaaaaagcgctgactgaagcgaacggcgacatcgagctggcaatcgaaaacatgcgtaaatccggtgcgatcaaagcagctaaaaaagcaggcaacgttgctgctgacggcgtgatcatcactaagatcgacggcaactacggcatcattctggaagttaactgccagactgacttcgttgctaaagatggcggtttccaggcatttgctaacaaagttctggacgcagctgttgctggtaaaatcactgacgttgaagttctgaaagcacagttcgaagaagaacgtgttgcgctggttgctaaaatcggtgagaacatcaacatccgtcgcgtatcttctctggaaggcgacgttctgggctcttaccagcacggtgcacgtatcggtgttctggttgcggctaaaggcgctgatgaagagctggttaaacagctggcaatgcacatcgctgcaagcaaaccagaattcgttaagccagaagacgtgtctgctgaagtggtagagaaagagtaccaggttcagctggacatcgcgatgcagtctggtaagccaaaagaaatcgcagagaaaatggttgaaggccgcatgaagaaattcaccggcgaagtttctctgactggccagccattcgtaatggacccaagcaagtctgttgctcagctgctgaaagagcacaacgctgacgtaactggcttcatccgcttcgaagtgggcgaaggcatcgagaaagttgagactgacttcgctgcagaagttgctgcaatgtccaagcagtct

SEQ ID NO: 19806 - DNA, 723 bp, Enterobacter cloacae
atggcaactgtttccatgcgcgacatgctcaaggctggtgttcactttggtcaccagacccgttactggaacccgaaaatgaagcctttcatcttcggcgcgcgtaacaaagttcacatcatcaaccttgagaaaactgtaccaatgttcaacgaagccctggctgagctgaacaagatctcttcccgtaaaggtaagattctgttcgttggtactaagcgcgctgcaagcgaagctgtgaaagatgctgctaacagctgcgaccagttcttcgtgaaccatcgctggttgggcggcatgctgaccaactggaaaactgttcgtcagtccatcaaacgcctgaaagatctggaaacccagtctcaggacggtactttcgacaagctgactaagaaagaagcgctgatgcgcactcgtgaactggacaagctggaaaacagcctgggcggtatcaaagatatgggcggcctgccagacgcgctgttcgtaatcgatgcagaccacgagcacatcgcaatcaaagaagctaacaacctgggtatcccggtattcgctatcgttgataccaactccgatccggacggtgttgacttcgttatcccgggtaacgacgacgcaatccgtgctgttagcctgtacctgagcgctgtagctgctaccgttcgtgaaggccgttcccaggatctggcttctcaggcggaagaaagcttcgtagaagctgaa

SEQ ID NO: 19807 - DNA, 855 bp, Enterobacter cloacae
ttgctgaagtatcgcctgatttccgcttttgtattaatacccattgtcattgcggcgctgtttttactgcccccggtgggattcgctattgtcacgctggtggtgtgcatgctcgccgcgtgggaatggggacagtttagcggctttacctcgcgcactcagcgagtatggcttgcggtactttgtggctttatcctggccataatgctgtttacgttgcctgaatatcaccatgatattcatcagcccctggttgccggttccttgtggatatcgctggcctggtgggttgccgcgctgttgctggttcttttttatccgggttccgcgtcattgtggcgtaattcaaaagtgctgcgactgatttttggcttgctcacaattattccttttttctggggtatggttgcgctgcgagcgtggcactacgacgaaaaccactacagcggtgcgatctggctgctttatgtgatgattctggtctggggggctgactccggggcctatatgtttggtaaactgtttggcaaacataagctggcaccgaaggtttctccgggcaaaacctggcaaggattcatcggcggcctgtttacggcagcgatcatctcctggggctacggcgtctgggcgaatcttgaagtggcaccgtcaatactgctggtgtgctcgatttttgctgcgcttgcctccgtgctcggtgatttaaccgaaagtatgtttaagcgtgaagcagggattaaggacagtggacacctgattccagggcatggcggtatactggatcgcattgatagcctgacagcggctgttccagtgtttgcgtgtttgcttttactggtattcgggacgatt

SEQ ID NO: 19808 - DNA, 687 bp, Enterobacter cloacae
atggatggcaatggccgctgggcgaaaagacaagggaagatacgagcctttgggcataaagcgggggcgaaatccgttcgccgcgccgtttcttttgccgccaacaacggcattgatgcgttaacgctctatgcttttagcagtgaaaactggaatcgacctctgcaggaagtgactgcgttgatggaattgtttgtgtgggcgctagacagcgaagtaaaaagcctccaccgccacaacgtccgcctgcgtatcattggcgataccagtcgtttcaactcacgtttgcaggaacggattcgtaaagcagaagcgctgacggaaaataataccggtcttacgctgaatattgcggcgaattacggcggacgctgggatattatccagggcgttcggcatctggccgaacaggttcaggaagggctgttgagacccgaccaaattgatgaagaggcgctgagcaagcaaatctgcatgaatgaacaggcacctgtggatttggtaattaggacagggggagaacatcgcataagtaactttttgatatggcaaattgcctatgccgaactttactttacagatgttctttggcccgattttgatgaacaagactttgaaggtgcgctgcatgcctttgccaatcgagagcgtcgtttcggcggcaccgagcctggtggcgacaaagcc

SEQ ID NO: 19809 - DNA, 1745 bp, Enterobacter cloacae
tcggccgagcagctcattgaagcgcgcactgaatttatcgaccagctgctgcagcgcctgtggatcgattacgggtttgggcaaatcagcgacgttgcgctggttgccgtcggaggctatggccgcggtgagctgcatccgctttccgatatcgatctcttgatcctaagccgcaaaaagctgccggacgaacaggcgcaaaaaattggcgaactgccaacgctgctctgggacgtaaagctggaagtcggccacagcgtgcgcaccctggaagagtgtctgctggaagggttatcggacctgaccgtcgccaccaacctgattgcaacccgcctgctgatcggtgacgtcgcactgctcctggagctgcaaaaacacatcttcagcgacggcttctggccgtcagaaaagttcttcgccgcgaaggtcgaggagcaaaatcagcgccaccagcgctaccacggcaccagctataatcttgaacccgatattaaaagcagccccggcggcctgcgcgacatccacaccctgcagtgggtcgcccgccgccattttggcgccacctcgatggacgagatggtcggcttcggctttttaaccgaagccgagcgtaacgagctgaacgagtgcctgcacctgctgtggcgtatccggtttgctctgcatctggaagtcacccgctacgataaccgcctgctgtttgaccgccagctcagcgtggctcagcgtctgaattatcagggcgaaggcaacgagccggttgagcatatgatgaaggatttcttccgcgtcacccgccgggtgaccgagctgaaccagatgctattgcagctgttcgacgaggccattctggccctgacggcggacgaaaaaccgcgcccgattgatgacgaattccagctgcgcggcacgcttatcgatctgcgcgacgaaacgctgtttatccgcgagccggaagcgattctgcggatgttctacaccatggtgcgcaacagtaccattaccgggatctactccaccactctgcgccatctgcgccatgcgcgccgtcatctaacggagccgctgtgctatatcccggaagcgcgttcgctgtttctgagcatgctccgccacccgggcgccgtcagccgcggcctgctgccgatgcaccgccacagcgtgctgtgggcctatatgccgcagtggtcgcacattgtcgggcaaatgcagttcgatctgttccacgcctacacggtggatgaacacacgatccgcgtgatgttcaagctggaaagctttgcgaaagaagagacgcgctcccgccacccgctctgcgtggagctgtggccgcgcctgacccatcctgaactgatcctgattgccgccctgttccatgatatcgccaaaggtcgcggcggtgaccattcggtgctgggcgcacaggacgtgctgaaatttgccgaactgcacggcctgaactcgcgtgaaacgcagctggtggcctggctggtgcgccatcacctgctgatgtcagtcaccgcgcagcgtcgtgacattcaggatccggaagtgatcaagcagttcgctgaagaggttcagacggaaaaccgtctgcgctatctggtctgcctgacggtggccgatatctgcgccaccaacgagaccctgtggaacagctggaagcagagcctgctgcgcgagctgtacttcgccaccgaaaaacagcttcgtctctgggatgcaaaacacccccggacattcgc

SEQ ID NO: 19810 - DNA, 384 bp, Enterobacter cloacae
atggcatacagcgaaaaagtcatcgatcattacgaaaacccgcgcaacgttggctcttttgacaacagcgacgaatctgtcggtagcggcatggttggcgcaccggcgtgtggcgacgtgatgaagttgcagattaaagtcaacaatgaaggtatcattgaagacgcgcgcttcaagacctacggctgcggttctgctatcgcgtccagctccctggtcaccgaatgggtgaagggcaagtccctggacgaagcacaggcaatcaagaacaccgatattgctgaagaactcgaactgccaccggtgaaaattcactgttcaattctggcagaagacgcgatcaaagccgccattgcggactataaaagcaaacgtgaagcaaaa

SEQ ID NO: 19811 - DNA, 774 bp, Enterobacter cloacae
atgtccgaaaccaaaaacgaattagaaaccctgctggagcaggcggcgaccgagcccgcccaccgtccggcatttttccgcacgctgctggaatccaccgtctgggtgccgggaaccgcggcggaaggtgagcaggttgtagaagacagcgcgctggatttgctgcactgggagaaagacgacggcacgtcggtgatcccgttctttacctcgctggaagctctgcaggaagcggtagaagacgaacaggcgttcgtggtgatgccggtgcgtaccctgtttgaaatgacgctgggccagacgctgttccttaacgcgaagctgccgaccgggaaagagtttacgccgcgtgaaatcagccatctgataggcgaagagggcaacccgctcagcacccaggaagtgctggaagggggcgaaacgctgctgctgtctgaagtggccgagccgcccgcgcagatgattgattccctgacgacgctgttcaaaaccctgaaaccggttagacgcgcgtttctctgctccattaaagagcgtgcggacgagcagccggtgctgctgattggtattgaggcggacggcgatatcgacgacatcattcaggcggcgggaagcgtggcgaccgacacgctgccgggcgacgagccgattgatatctgccaggtgaagaacggtgaaaagggcatcagccactttattaccgagcacatcaccccgttctacgagcgtcgctggggcggcttcctgcgcgatctcaaaaccaaccgcatcatc

SEQ ID NO: 19812 - DNA, 1848 bp, Enterobacter cloacae
atggccttattacaaattagtgagcctggcttaagtgccgcaccgcaccagcgtcgtctggcggtgggtatcgatctgggcaccaccaattcccttgtggcgaccgtgcgcagcggccaggcggaaacgctggccgacgagcagggccgccatctgctgccttccgtggtccactaccagcagcagggtcacgcggtcggctatgacgcccgcgccaacgccgcgcgcgatccggccaacaccatcagctccgtaaagcgcatgatgggccgctcgctggccgatattcagacccgctatccgcatctgccgtatcagctgcaggccagtgaaaacggcctgccgatgattgcgaccgcggccggtctgctgaacccgattcgcgtttcctccgacatcctcaaagcgctggccgcgcgcgctacggcgacgctcggcggcgatctggacggcgtagtcatcaccgttccggcctattttgacgatgcacagcgtcagggcaccaaagacgctgcgcgtctggcgggcctgcacgtgctgcgccttctgaacgaaccgacggcggcggcgattgcctacggcctcgactccggtcaggaaggggtcattgcggtttacgatctcggcggcggtacctttgatatctcgatcctgcgcttaagccgcggggtatttgaagtgctggcgaccggcggggattccgcactgggcggcgatgacttcgaccatctgctggcggactacattcgcgagcaggcgggcatcagcgatcgcagcgatgcgcgcgtgcagcgtgaactgctggatgcggccatcgacgctaaaatcgcccttagcgatgcgcagacggttaccgtaaatgttgcgggctggcagggtgagatcgcccgcgaccagttcagcgatctgattgccccgctggtgaaacgcaccctgctggcctgccgtcgcgcattgaaagatgcgggcgttgaggcgaacgaggtgctggaagtggtcatggtgggcggttcgacccgcgtgccgctggtgcgcgagcgcgtgggcgaattctttggccgcacgccgctgacctccatcgacccggacaaagtagttgccgtgggcgccgctatccaggccgatattctggtcggcaacaagccggacagcgaaatgctgctgctggacgtcatcccgctgtcgctcgggttagaaaccatgggcggcctggtagagaaagtgatcccgcgtaacaccactattccggtggcgcgcgcgcaggagttcacgaccttcaaagacggtcagaccgcgatgtccatccacgtaatgcagggcgagcgcgagctggtgcaggactgccgctctctggcgcgctttgcgctgcgcggcatcccggcgctgcctgcgggcggggcgcatattcgcgttaccttccaggtggacgccgacggtctgctgagcgtcacggcgatggaaaaatccaccggcgtggaatcgtccattcaggtgaagccgtcctacggcctgaccgatggcgaaatcgcctccatgattcaggactcaatgagctacgccgagcaggatgtgaaggcgcgtatgctggctgaacagaaagttgaagccgcccgcgtgctggaaagcctgaacggcgcgctcgctgccgatgccgcgctgttaagcgccgctgagcgccaggtgattgacgacgctgccgcgcgcttaagcgcagtagcagaaggcaatgacgctgacgcaatagaagaagccattaaaaacgttgataaacaaacccaggactttgctgctcgccgcatggacaaatctgtccgcgtcgcgctgaaaggccagtccgtggacgaggtt

SEQ ID NO: 19813 - DNA, 1770 bp, Enterobacter cloacae
atgaccgacgccgatttcggcaagccgattatcgccgtggtgaactccttcacccagtttgtaccgggccacgtgcacctgcgcgatctcggtaagctggttgccgagcaaatcgaagcctccggcggcgtggcgaaagagttcaacaccattgcggtggatgacggtatcgcgatggggcacgggggcatgctctattcactgccgtcgcgcgagctgatcgccgactccgtagagtacatggtgaacgcccactgcgccgatgcgatggtctgcatctccaactgcgacaaaatcaccccggggatgctgatggcctctctgcgcctgaacattccggtgatcttcgtctccggcggcccaatggaagcggggaaaaccaagctctccgacaaaatcatcaagctcgacctggtcgatgcgatgatccagggcgcggacccgaaagtctctgacgagcagagcgaacaggtggaacgctctgcatgtccgacctgcggctcctgttccggtatgttcaccgccaactccatgaactgcctgaccgaagcgctgggtctttctcagccgggtaacggctcgctgctggcgacccacgccgaccgtaagcagctgttcctcaacgccggtaagcgcatcgttgagctgaccaaacgctactacgagcaggacgacgccagcgcgctgccgcgcaacatcgccagcaaggccgcatttgagaacgcgatgacgctggatatcgcaatgggcggctccaccaacactgttctgcacctgctggccgccgcgcaggaagccgaaatcgacttcaccatgagcgacatcgacaagctctcccgcaaagtcccgcagctgtgtaaagtcgcgccgagcacccagaagtaccatatggaagacgtacaccgcgcgggcggcgtgctgggcattctcggtgagctggatcgcgccgggctgctgaaccgtgacgtgaaaaacgtgcttggcctgacgctgcctgagtcgctggaccagtacgacgtcatgctgaccaaagacgacgcggtgaaaaagatgttccgcgccggtcctgccggtatccgtaccacccaggcgttctcgcaggattgtcgctgggatacgctggacgatgaccgcgccgaaggctgcatccgctcgctggagcatgcctacagcaaagacggcggtctggccgtgctgtacggtaacttcgcggaaaacggctgcatcgtgaaaaccgcaggcgtggacgacagcatcctgaaattcaccggtccggcgaaggtatacgaaagtcaggatgaagcggtagacgcgattctcggcggcaaagtggtggaaggcgacgtggttgttattcgctacgaaggaccgaaaggcggcccgggcatgcaggagatgctctacccaaccaccttcctgaaatctatgggactcggtaaagcgtgtgcgctgattaccgacggacgtttctccggcggcacctccggcctctctatcggccacgtttcccctgaagcggcaagcggcggcaacatcgccatcatcgaagacggcgacctgatcgaaatcgacattccgaatcgcggcattcagctgaagctgagcgaccaggaaattgcggcccgtcgtgaagcgcaggaggcccgcggcgacaaagcctggacgccgaaagaccgccagcgtgaagtctccttcgccctgcgcgcctacgcgagccttgccaccagtgcagataaaggcgcggtgcgcgataaatctaaacttgggggc

SEQ ID NO: 19814 - DNA, 927 bp, Enterobacter cloacae
atgacgacaaaaaaagctgattacatttggttcaacggtgagatggttcgctgggaggacgcgaaggtccacgtgatgtcacacgcgctgcactacggtacctccgtatttgaaggcatccgctgctacgattctcacaaagggccagtggtgttccgccatcgcgaacacatgcagcgtctgcatgactcagccaaaatttatcgttttccggtttcacaaagcgttgatgagctgatggaagcctgccgcgacgtgatccgtaaaaacaacctgaccagcgcctatatccgtccgctggtcttcgtgggtgacgtcggtatgggcgtgaacccgccagccggctataccacagatgtgatcattgccgcgttcccgtggggtgcttacctgggtgcagaagccctggagcaggggatcgacgcaatggtctcttcctggaaccgcgttgcgccaaacactatcccgaccgccgcgaaagcaggcgggaactatctatcctcattgctggtcggtagcgaagcgcgccgccacggctatcaggaaggtatcgccctcgacgtaaatggctacatctctgaaggtgcgggtgaaaacctgtttgaagtgaaagacggcattttgttcacgccgccattcacctcgtccgcgctgccgggcatcacccgtgacgccatcatcaagctggcgaaagatctgggtatcgaagtacgcgagcaggtactgtcccgcgaatccctgtatctggcagatgaagtgtttatgtccggtaccgcggctgaaatcacgccggtacgcagcgtggacggtatccaggtgggcgaaggccgctgcggtccggtcaccaaacgtattcagcaagcgttctttggcctcttcaccggcgaaacagaagataaatacggctggttggatcaggttaatcac

SEQ ID NO: 19815 - DNA, 1642 bp, Enterobacter cloacae
actatgaatggggcacagtgggtagtacatgcgttgcgcgcgcagggagtcgaaaccgtattcggttatccgggtggcgcaattatgccgatttacgatgcactgtatgacggcggcgtggaacatctcttgtgccgacacgagcagggcgcagcgatggcagccatcggttatgcccgcgcgaccggtaaaaccggcgtgtgtatggcgacttcaggcccgggcgcaacgaacctgatcaccggcctggctgacgcgctgctggattccgttcccgttgtcgccatcaccgggcaggtggcgtctccgttcatcggtaccgatgcttttcaggaagtcgacgtcctcggtttatcgctggcctgcaccaaacacagcttcctcgtccagtctctggaagagctgccgcgcgtaatggcagaagcgttcgacgtggcaaactcaggtcgtcctggtccggtactggtcgatatcccgaaagatatccaggtggcactcggcgagctggaaccgcacttctctaccgttgaaagcgacgatgtctttccggaagcggaagttgaagaggcccgtcagatgctggcccaggcgaaacagccaatgctgtacgtcggcggtggcgtcggcatggcacaggccgttcctgccctgcgcgaatttatcgcaacaacgcagatgccagcgacctgcacgttgaaaggtctcggtgcagtcgacgcggattacccctactatctgggcatgctgggaatgcacggcaccaaagcggcaaacctggcggtgcaggagtgcgatctgctcatcgccgtaggtgcccgttttgacgaccgcgtcaccggcaagctgaatacctttgcgcagaacgccaaagtcatccatatggatatcgacccggcggaaatgaacaagctgcgtcaggcgcatgtcgccttgcagggcgatctcaacgcgctgttaccggcattgcagcagccgctgggatatcaacgcatggcgtcagcacaccgctgatatgcgcgccgagcacgcctggcgttacgaccaccccggcgaggccatctacgcgccgctgctgttgaagcagttgtccgaccgtaaaccggctgacagcgtcgtcaccaccgacgtaggccagcaccagatgtggtccgcgcagcacatgacctacacccgtccggaaaacttcatcacctccagcgggttagggacgatgggcttcggtctgccggcagccgttggcgcgcaggttgcccgcccgaacgataccgttatctgtatctccggtgacggctccttcatgatgaacgttcaggagctcggcaccgttaagcgcaagcagttaccgctgaagatcgtgttgctcgataaccagcgtttagggatggtgcgccagtggcaacagctgttcttccaggagcgttacagcgaaacgacgctcaccgataaccccgatttccttaccctggccagcgcctttggcatccctggtcagcacatcacccgtaaagatcaggttgaagcggcgctcgacaccatgctgaacagcgatgggccttacctgcttcatgtctcaatcgacgaactcgagaacgtctggccgttggtaccgcctggtgccagtaactcacaaatgatggagaaa

SEQ ID NO: 19816 - DNA, 1051 bp, Enterobacter cloacae
atggcaactggcacgctgcccgatgctgggcagatcctcaattctttgattaacagcatattgctggtcgatgacgagctggccgttcattacgccaacccggccgcgcagcagctgctcgcccaaagcgcacgtaaactgttcggcaccccgcttcctgaactcctgagctatttttcgctgaatattggcctgatgcaggaaagtttgcaggctggccaggggtttaccgataacgaactcacgctggtgatcgacgggcgctcgcacattctgtcgttaaccgcgcaacggtcttcccgatggtctgatcctgctggaaatggccccgatggataatcagcgtcgactgagccaggagcagcttcagcatgcgcacagatttgccgcccgtgatctggtgcgcggtctggcgcatgaaatcaaaaacccgctgggtggattacgcggcgcggcgcagcttctgaccaaagcgctgcccgatcccgcgctggcggagtataccaacgtcatcattgagcaggcggaccgtctgcggaatctggtagaccgtcttcttgggccacaacagccgggaatgcacgtcacggaaagcatccataaagtggctgagcgggtggtgaagctcgtctcaatggagctgccagagaacgtcacgctagtacgtgattacgacccaagcctgccggaactggcccatgacccggaccagattgagcaggtcctgttgaatattgtgcgtaatgccctgcaggcgctggggcctgaaggcggtgagattattttacgcacccgcaccgccttccagctcacgttacacggcgtgcgctaccggctggccgcccgaatcgacgttgaggataacgggcccggcattccatcgcatttgcaggacaccctgttctacccgatggtaagcggtcgcgaaggcggaaccggcctgggcttatccattgcccgcagtttgatcgatcaacactccgggaaaattgaatttaccagttggccgggacataccgagttttcggttttcctgccgattaaaaaataa

SEQ ID NO: 19817 - DNA, 1407 bp, Enterobacter cloacae
atgtccgctgaacacgttttgacgatgctgaacgaacatgaagtgaagtttgttgatctgcgcttcaccgataccaaaggtaaagaacagcacgtcacaatccctgctcatcaggtgaacgccgaattctttgaagaaggcaaaatgtttgacggctcctccattggtggctggaaaggcattaacgaatccgacatggttctgatgccagacgcgaccactgcggtcattgatccgttcttcgaagaaccaaccctgatcatccgttgcgacatcctcgagccaggcacgctgcagggctacgaccgcgacccgcgttctatcgcgaaacgcgctgaagagtacctgcgttctaccggcatcgcagacaccgttctattcgggccagagccagaattcttcctgttcgatgacatccgcttcggtgcctctatttctggctcccacgtggctatcgacgacatcgaaggtgcatggaactcctccaccaaatacgaaggcggtaacaaaggtcaccgtcctggcgtgaaaggcggttacttcccggttcctccggtcgactctgcacaggacattcgttccactatgtgtctggtgatggaagagatgggtctggttgttgaagctcaccaccacgaagtggctactgctggtcagaacgaagtggcaacccgcttcaacaccatgaccaaaaaagcggacgaaattcagatctacaaatacgttgtgcacaacgttgcgcaccgtttcggtaaaaccgcgaccttcatgccaaaaccaatgtttggcgataacggttccggtatgcactgccacatgtctctgtccaagaacggtaccaacctgttctctggcgacaaatatgccggtctgtccgagcaggcgctgtattacatcggtggtgttatcaaacacgctaaagcgatcaacgccctggcgaacccaactacgaactcctacaagcgtctggtcccgggctacgaagcgccagtgatgctggcctactctgcacgtaaccgttctgcttctatccgtatcccggtggtggcttctcctaaagcgcgtcgtatcgaagttcgcttcccggacccagcggctaacccatacctgtgcttcgcagcactgctgatggccggtctggacggtatcaagaacaagatccacccgggcgaagcgatggacaaaaacctgtacgacctgccgccagaagaagcgaaagagatcccacaggttgctggctctctggaagaagccctgcaggcgctggacgcagaccgcgagttcctgactgcaggtggcgtattcactgacgacgctatcgatgcctacatcgccctgcgtatggaagagaacgaccgcgtgcgtatgactccacacccggttgagttcgaactgtactacagcgtt

SEQ ID NO: 19818 - DNA, 1821 bp, Enterobacter cloacae
gtgatcgaaaatttgcgtaacatcgccatcatcgcgcacgtagaccatggtaaaactaccctggtagacaagctgctgcagcaatccggtacgtttgatgcgcgtgccgaaacccaagaacgcgtgatggactccaacgatttggagaaagagcgtgggattaccatcctcgcgaaaaacaccgcgattaaatggaatgactaccgtatcaacatcgttgataccccagggcacgccgacttcggtggcgaagttgaacgtgtaatgtccatggtagactccgttctgctggtcgttgacgcaatggatggcccaatgccacagacgcgcttcgtgaccaaaaaagcttttgcccatggtctgaagccaatcgttgttatcaacaaagttgaccgccctggcgcgcgtcctgactgggttgttgaccaggtcttcgacctgttcgttaacctcgacgcgaccgacgagcagctggacttccctatcgtttacgcatctgcgctgaacggtatcgcaggtctggaccacgaagacatggctgaagacatgaccccgctgtatcaggcgattgttgaccgtgttcctgcaccaaacgtcgatctcgacggcaccctgcagatgcagatctctcagctcgactacaacaactacgttggcgtaatcggcattggtcgtatcaagcgcggtaaagtgaagcctaaccagcaggttactatcatcgatagcgaaggcaaaacccgtaacggtaaagtcggtaaagtactgactcacctgggtcttgagcgtatcgagagtgacgttgcggaagcgggcgacatcatcgctatcacgggtctgggtgaactgaacatctccgacaccatctgcgatccgcagaacgtcgaagcgctgccagccctgtccgttgatgaaccaaccgtatccatgttcttcaacgtcaacacctctccgttctgtggtaaagaaggtaaattcgttacctctcgtcagatccttgaccgcctgaacaaagagctggtacacaacgttgcgctgcgcgttgaagaaaccgaagatgctgatgcattccgcgtttctggtcgtggtgagctgcacctgtctgttctgattgagaacatgcgtcgtgaaggtttcgaaatggcggtttcccgtccgaaagtaatcttccgcgagatcgatggtcgtaaacaagagccattcgaaaacgtaacgctggacgttgaagagcagcatcagggttctgtgatgcaggctctgggtgagcgtaaaggcgacctgaaaaacatgaatccagatggcaaaggccgcgtacgtctcgactacgtgatcccaagccgtggcctgatcggcttccgttctgagttcatgaccatgacctccggtaccggcctgctgtactccaccttcagccactatgacgacgttcgtccgggcgaagtgggccagcgtaacaacggcgtactgatctccaacggtcagggtaaagcggttgcgtttgcgctgttcggtctgcaggatcgcggtaagctgttcctgggtcatggtgctgaagtttatgaaggccagatcatcggtattcacagtcgttctaacgacctgaccgtaaactgcctgaccggtaagaaactgaccaacatgcgtgcgtccggtactgacgaagcaacggttctggttccaccgatcaagatgactctggagcaggctctggaattcatcgatgatgacgaactggtagaagtgactccacagtcaattcgtatccgtaaacgtcacctgaccgagaacgatcgtaaacgtgctatgcgcggtgcgaaagaagag

SEQ ID NO: 19819 - DNA, 534 bp, Enterobacter cloacae
cgccttttgggggataccaccgacggaattggtttacttagcgatctggaacgactttcatttattaagcccgggttccgggtcctgctgattgatgcgggctacgcatcgcggggagtactgttgcctgtgctttcactggactgtgcggtgaccattaccaacagaaccttttcccgtgcagaagcgatggcggcgttgtttgcgcataccggtagcgtgagcgcggtagcgcttgacgatcttgccgatcgtgagttcgatcttgtcattaatgccacgtccagcggcattaatggcgagatcccggcaattcccgcttctctggtcagcgcgcatatgtacttctatgacatgttttatcagaaagggaagacgcctttccttaactggtgcgaacaacacggcgcgaaacagttagccgatgggctgggaatgctggtgggtcaggccgcgcatgcggtgctgctctggcatggcgtgttgcctgcggtcgaacctgtcattgaaaagttaaagcaggaactttcggcg

SEQ ID NO: 19820 - DNA, 171 bp, Enterobacter cloacae; identical to SEQ ID NO: 19513

SEQ ID NO: 19821 - DNA, 1893 bp, Enterobacter cloacae
cgtgcgggcctgtccgtcgacggcgtgttcaacctgaccaacatcgaccgctggttcctggtgcagattgaagagctggtgcgtctggaagagcaggtcgcggagctgggcatcaccggcctggacgctgatttcctccgcgtgctgaagcgtaaaggcttcgccgatgcgcgtctggctaagctggcgggcgtgcgtgaagcggaaatccgcaagctgcgcgaccagtacgacctgcacccggtctacaagcgcgtggacacctgtgcggcagagttctcaaccgacaccgcctacatgtactccacctatgaagacgagtgcgaagcgaacccgtccgtcgaccgcgacaagattatggtgctgggcggcggtccaaaccgtatcggccagggcatcgagttcgactactgctgcgtacacgcctcgctggcgctgcgcgaagacggttacgagaccatcatggtcaactgtaacccggaaaccgtctctaccgactacgacacctctgaccgcctctacttcgagccggttaccctggaagacgtgctggaaatcgtgcgcatcgagaagccaaaaggcgttatcgtgcagtacggcggccagaccccgctgaagctggcccgcgcgctggaagcagcaggcgtgccggttatcggcaccagcccggacgcgattgaccgtgcggaagaccgcgagcgtttccagcaggcggttgaccgtctgaagctgaaacagccggcgaacgccaccgtgaccgctatcgaacaggccgttgagaaggcgaaagaaattggctacccgctggtggtgcgtccttcgtacgtgctgggcggccgcgcgatggaaatcgtttatgacgaagccgacctgcgccgctacttccagaccgctgtgagcgtgtcgaacgatgcgccagtgctgctcgaccgcttcctcgacgacgcggtagaagtggatgtggacgccatctgcgacggcgaaatggtgctgattggcggcatcatggagcacatcgagcaggctggcgtgcactccggcgactccgcctgttctctgccggcgtacacgctgagccaggagattcaggacgtgatgcgccagcaggtgcagaagctggccttcgagctgcaggttcgcggtctgatgaacgtccagttcgcggtgaaagacaacgaagtctacctgattgaagtgaacccgcgtgcggcacgtaccgtaccgttcgtctccaaagccaccggcgtaccgctggcgaaagtggcggcgcgcgtgatggcgggccagacgctggcgcagcagggcgtgaccaaagagatcattccaccgtactactcggtgaaagaagtggtgctgccgttcaacaaattcccgggcgttgacccgctgttagggccagaaatgcgctctaccggggaagtgatgggcgtgggccgcaccttcgccgaagcgttcgcgaaggcgcagctgggcagtagctccaccatgagaaaatcaggccgtgcgctgctctccgttcgcgaaggcgacaaagagcgcgtggttgacctggccgccaagctgctgaaacagggcttcgagctggacgcaacccacggtacggcgattgtgctgggcgaagccggcatcaacccgcgtctggtgaacaaggtgcatgaaggtcgtccgcacattcaggaccgtatcaagaatggcgaatacacctacatcatcaacaccaccgcaggccgccaggcgattgaagactccaagctgattcgccgcagcgcgctgcagtacaaagtgcactacgacaccaccctgaacggcggtttcgcgacggccatggcgctgaacgcggatgccaccgagaaggtgatttcggttcaggaaatgcacgcgcagattagcaag

SEQ ID NO: 19822 - DNA, 477 bp, Enterobacter cloacae
atgatcagtctgattgcagcgctggcggtggaccgcgttatcggtatggaaaatgccatgccgtggaacctgcctgccgatctcgcatggtttaaacgtactacgttaaacaagccggtagtgatgggccgcctgacctgggagtcgattggtcgtccattgccgggccgtaagaatatcgttatcagcagccagccgggcactgacgatcgcgtcgaatgggtaaaatcagtagacgaggcgattgctgcatgcggcaatgccgaagagatcatggtgataggcggtgggcgcgtgtacgagcagttcctgccaaaagcgcagaagctgtatctgacccacattgatgcagaagtggaaggggatacccatttcccggactacgatccggacgagtgggaatcggtattcagcgaattccacgacgcggatgcacagaactcccacagctactgcttcgagattctggaacgtcgt

SEQ ID NO: 19823 - DNA, 819 bp, Enterobacter cloacae
atgactaatcgagtccatcagggccacttagcccgtaaacgtttcgggcaaaacttccttaacgatcagttcgtgatcgaaagcattgtctcggctattaatccgcaaaagggtcaggcgatggtcgaaatcggcccgggccttgccgcgctgaccgagccggtaggcgaacgcctcgacgagctgaccgtcatcgaactggaccgcgatctggccgcacgcctgcaaacgcacccgttcctcgggccgaagctgaccatctatcagcaggacgccatgaccatgaactttggcgagctgtcggaaaaaatgggtcagccgctgcgcgtcttcggcaatctgccgtacaacatctccacgccgctcatgttccacctctttagctatactgatgccattgccgacatgcacttcatgttgcaaaaagaggttgttaaccgtctggttgcaggcccgaacagtaaagcgtatggtcgtttaagcgtgatggcacagtattactgcaacgtgatcccggtactcgaagtaccgccgtcagcgttcacaccaccaccgaaagtggattcagcggttgtgcgcctcgtgccgcacaagacgaaaccgtatccggttaaagatctgcgcgtactgagccgcattaccacagaagcctttaaccagcgccgtaaaacgatccgtaacagcctgagcaattcgtttaccgttgaggtgttagccgagctggggatcgacccggcaatgcgtgcggagaacatttccgtagagcagtactgcaagctggctaattacatcagcgataatgcgccgccgaaggagagt

SEQ ID NO: 19824 - DNA, 273 bp, Enterobacter cloacae
atgccgcattcacccgaagataaaaaacgtattcttactcgcgtccgccgcattcggggccaggttgaggcccttgaacgcgcgctggagtcgggcgatccctgtctggccatcctgcagcaaatcgccgccgtgcgcggggctgccaatggcctgatgggcgaaatggttgaaattcacctcaaagatgagctggtgacgggggaaaccacgccggatcagcgagccgtacgcatggcagaagtcggccatttgctgcgctcttatctaaaa

SEQ ID NO: 19825 - DNA, 1025 bp, Enterobacter cloacae
tgttgtaactcaaacagatcaaatgttaaaaatattttgctatcaggttatcaaaattaaacaacttaacttgtcacccgcatcgctctgtttttaacatcgcctatggaaaaaaatggtctgttcagtcagcgcatacgttgcgccatttgcatacatttgtggccgtcgctcaacagggaacgctggggcgtgcggctgaaactctcaacctgagccagcctgcgctctcaaaaaccctcaacgagctggaacagctgaccggtgcccgtctttttgaccgcggccggctgggggcgcagcttaccatcgtgggcgaacagttcctcacgcacgccgtgaaagtgctggatgcgctcaataccgcaggccagtccctgcacagaaaagaagagcaaaccagtgaggtggtgcgcgtgggtgctttgcctaccgcggcgctgggcatccttccacccgttatcggccagttccacaagcagcagcggcataccacgattcaggtcgctaccatgaataacactatgctgctcgcggggctgaaatcgggcgaactggatctcggaatcggtcgcatgtccgaccctgagctgatgggcggcctcaactatgaactgctgttcctggagtccctgaagctggtggttcgtcccgatcaccccctgctgcaggacacagtcacattaagccgcgttatggagtggccggtagtggtctgcccaaaagggacagttccccgccagaccgcagaaaccttgctgcaaatgcaggggtgtacgctgccctcaggatgtatcgaaacgctgtcggcctcgctttcgcgccagcttacgctggattatgactacgtctggttcgtcccatccggcgcggtgaaagatgatttacgtcagggaacgctgatcgccctgccgattacctcccccggccccggtgaacctatcggcattttgacccgcgtagacacgccgctttcaacgggtgcgcagacgctgctgagcgctatccgtaaatcaatgccggtc

SEQ ID NO: 19826 - DNA, 882 bp, Enterobacter cloacae
atgagtgatactaaacaacgtacgaacgcttacccgcagcccccgttcccggaacagccgcaaacgccgccgggactggcatccgaaatgcagcctgtacccgaccacggggaaacaagctacaaaggacatggccgcctggccggcaaaaaagcgctgattaccggcggtgactccggtattggtcgcgcggtcgctatcgcctatgctcgtgaaggcgctgacgttgccattaactacctgcctgaagaggaaaaagacgccgctgaggtcatcgacctgattgaagccgaaggtcgcaaggctatcgcgctgccgggggacgtccgggacgaaaccttctgtcagaatctggtcgaagaagccgtgtcgaaactgggcgggctggacattctggtcaacaacgccggtcgtcagcagttccgtgaatcgcttgaagaactgaccacggaagattttgacgcaacgtttaaaaccaacgtttacgcccctttctggatcaccaaggcggcgctgcgccacctgaaagcgtcgtccgttatcattaatacctcgtccgttcaggcggtgaagcccagccccgtgctgctggactacgcccagacgaaagcctgtctggcggtgtttaccaaatccttagccaaacagctgggtccgaaaggtattcgcgtcaacgcggttgcccctggcccttactggacggtactgcagtccagcggcgggcagccgatggaaaaagtgaaggagttcggcggcgacaccccgctgggacgtccgggccagcccgttgagattgccccgctgtacgtcacgctggcctcggatgaatgttcattcacgtccggccaggtgtggtgttccgatggcggtgacggcgtgatc

SEQ ID NO: 19827 - DNA, 1743 bp, Enterobacter cloacae
atgcgagtgttgaagttcggcggtacatcagtggcaaatgcagaacgttttctgcgtgttgccgatatcctggaaagcaacgccaggcaggggcaggttgctaccgtgctctctgccccggcaaaaatcacgaaccatctggtggcgatgattgaaaaaaccatcggtggccaggatgcactcccgaacatcagcgacgcagaacgtatcttcgctgatttattgcaagggctggcagaggcgctgcctggcttcccgcacgctcagctgaagtccttcgttgagcaggagttcgcgcaaatcaaacacgtcctgcacggcatcagccttctcggccagtgcccggacagcgtcaacgcggcgctgatctgccggggcgaaaaactttctatcgccatcatggccggcgtgctggaagcgcgcggccatagcgtgaccgtaatcgatccggttgaaaaactactggcggtgggccactacctcgaatccaccgttgatattgccgaatcaacccgccgtatcgccgccagcaaaattccgtctgaccatatgatcctgatggcaggcttcaccgccggtaacgagaagggcgaactggtggtgctgggccgtaacggctccgactactccgccgccgtgctggccgcctgtttacgcgcggactgttgtgaaatctggactgacgtcgacggcgtttatacctgtgacccgcgccaggtaccggacgccaggctgctgaagtcgatgtcgtaccaggaagcgatggagctttcctacttcggcgccaaagtgcttcacccgcgtaccatctccccgattgcccagttccagatcccttgcctgattaaaaacaccggtaatccgcaggcgccgggtacgctgattggcgcgagtaccgatgaagacggtttgccggtcaaaggcatctccaacctcaacaacatggcgatgttcagcgtctccggtccggggatgaaggggatggttggcatggcggcgcgcgtctttgctgctatgtcccgcaacggtatctcggtggtgctgattacccagtcttcttccgaatacagcatcagcttctgcgtgccgcaggccgactgcctgcgcgcccgccgcgcgctggaggacgagttctacctggagctgaaagaagagctgctggagccgctcgccattcaggagcgtctggcgattatctccgtggtcggcgacggcatgcgcacgctgcgcggtatctccgccaagttctttgccgcgctggcgcgcgccaatatcaatatcgtggcgattgcccagggctcgtcagagcgttcaatttccgttgttgtggacaacgatgacgccaccaccggcgtacgcgtggttcaccagatgctgttcaacaccgaccaggttatcgaactgttcctgattggcgtcggcggggtgggcggcgcgctgctggagcaggtgaagcgtcagcaggagtggctgaagaagaaacatatcgatctgcgcgtctgtgggattgccaactccagagcgttgctgaccaatgtgcatggccttaacctggaaaactggcaggccgagatgaacgaggcgaaagagccgttcaacctggggcgcctgatccgcctggttaaagagtatcatctgcttaacccggtgatcgtcgactgtacctcgaaccaggccgttgccgatcaatacgccgacttcctgcgcgatggggttccacgtggtgaccccgaacaaaaaggc

SEQ ID NO: 19828 - DNA, 1669 bp, Enterobacter cloacae
gtggctcaattcgtttataccatgcatcgtgtcggcaaagttgtcccgccgaaacgtcatattcttaaaaatatctcgctgagcttcttcccgggcgcaaaaatcggtgttctgggtctcaacggtgccggtaagtccaccctgctgcgcatcatggccggcattgatacagacatcgaaggtgaagcccgtccgcagcctggcatcaagattggttacctgccgcaggaacctcagctgaacccggaacacaccgttcgcgaatccgttgaagaagcggtatccgaagtggttaacgcgctgaaaggtctggaccgaagtgtatgccaaatacgccgagccggatgcggacttcgacaagctggccgcacagcagggcaagtatgaagagatcatccaggcgcacgacggtcacaatctgaacgtgcagctggagcgcgcggctgatgccctgcgtctgccggactgggatgcgaaaatcgctaacctctccggtggtgaacgccgccgcgtggcgctgtgccgcctgctgctggaaaaaccagacatgctgctgctcgacgaaccgactaaccacctggatgcagaatccgtggcgtggctggagcgcttcctgcacgacttcgaaggtaccgttgtggcgattacccacgaccgttacttcctcgacaacgtcgctggctggatcctggagctggaccgcggtgaaggtattccgtgggaaggcaactactcttcctggctggagcagaaagatcagcgtctggcgcaggaagcttcacaggaagcggcgcgtcgtaagtctatcgagaaagagctggagtgggttcgtcagggcgcgaaaggccgccagtctaagggcaaagcccgtctggcacgcttcgaagagctgaacaacaccgaataccagaaacgtaacgaaaccaacgaactgtttattccacctggagcacgtctgggggataaagtggttgaagttaccaacctgcgtaagtcctacggcgaccgtgtgctgatcgacgacctgaccttctccgtaccgaaaggcgctatcgttggcatcatcggtccgaacggcgcgggtaaatcgaccctgttccgcatgatgtccggccaggaacagcctgacagcggctctatcaccctgggtgagaccgtgaagctggcctccgttgaccagttccgtgacgcgatggataacagcaaaaccgtgtgggaagaagtctccggcggtctggatatcatgcgtatcggcaacaccgagatgccaagccgcgcctatgttggccgctttaactttaaaggcaccgaccagggcaaacgcgtgggcgaactgtccggcggtgagcgcggtcgtctgcacctggcgaagctgctgcaggtgggcggtaacgttctgctgcttgatgaaccaaccaacgacctggatattgaaaccctgcgcgcgctggaaaacgccctgctggagttcccgggctgcgcgatggttatctcgcacgaccgctggttcctggaccgtatcgcgacccacatcctggactaccaggacgaaggtaaagtggagttcttcgaaggtaacttcaccgaatacgaagagtacaagaaacgcacgctgggcgccgacgcgctggagccgaagcgtattaagtacaagcgtatcgcgaaataa

SEQ ID NO: 19829 - DNA, 1467 bp, Enterobacter cloacae
ctgatactcctcggctggctctgcctcagcgcgagcgtctgcgcgcaggcgatctcgttcattgcgcccaaagatcggccgcagctggaggcgagtaaaccctggccgaagaaccagtttctggtcctggcctaccacgacgttgaagacgatgccgccgatcagcgctatctctccgttcgcaccagcgcgttaaacgagcagataagctggcttctgcacaacggctaccacgccatcagcgtgcaggacattcttgacgcgcatgacgggaaaaaaacgctgccgccaaaagccgttctgctcagttttgacgacggctacagcagcttttacacccgcgtctggccgctgcttcaggcgtggaacgttcctgcgctgtgggcgccggtgggcagctgggtggatacgccggcaaatcaaaaagttaacttcggcggcctgatgacgccccgggatcgcttcgcgacgtgggacatggtgcgcgagctcagccggtccccgctgattgagatcggatcgcacacctgggcctcgcattacggtattccggccaacccgcagggcagccgcgagccggcgatcgccaatcgcttttatgacaaagcgacgggtcgctatgaaaccgaccagcagttcagccggaggatcggcgatgacgtccgtaaagtgactgaaaaaatcacgcaggtgacgggcaaagcgccgcgcgccctgggtctggccctacggcgccgccagcggtacgtcgctcgctatcgccagacagcagggttaccagctggcctttacccttgaggacgggctggggaacgtgcaggatctgggcaacatccctcgcctgctgatcgccgggaatccctcgctcaaggcgtttgccagcacggtcagccaggttcaggagcgcgatcccgtgcgcgtcatgcacgtcgatctcgactacgtttacgatcccgatcctgcccagcagacccaaaacatcaacaggctgatccagcgggtctacgacatgaagatcagccatgttttcctgcaggcgtttgccgacccgcaagcgacggcaggatcaaggcgctctatttccccaaccgtcgtctgccggtccgggcagatctttttaattttgtcgcctggcagctgcaaacccgcgcgggcgtgaaagtcttcgcgtggatgccggtgctctcgttcgatctcaatccttccctgccgcgcgtgcagcgtcgggatcgtcaaaccggcgagctgcgcgaagccaccgagccctatatccggctctccccgtgggacccgcaggtgcgccagcaggtgacggacatctatgaagatctggcccgctatgccagcttcaacgggattttgttccatgatgatgcggcgctgacggacgtggacgatgccggtcagaacaccacgcgtcagaaaagccagacgcttatcgggtttacccacgccctgagcctggcg

SEQ ID NO: 19830 - DNA, 1326 bp, Enterobacter cloacae
atgactgatcgcattatagcattctctattttatgtctggtattcgggttgccgttaggcgtggccgccctttttaccggcgaactgattctggattttgtgttcttctggccgctgtttatgtcggtgctctggataaccggcggcctctatttctggtatcagcttgaacgccactggtcgtgggataaagacacgcccgccccgacgctcgcgggtgagccgctcatctccattcttatcccctgtttcaacgagggaaggaatgcccgggagaccatcagcgctgcgctggatcagcggtatgaaaatatagaagttattgccatcaacgacggatcttctgacaacaccgcgcaggtgctgcaggagctggcgcaggaacagccgcgcctgcgggtgattaacctcgcggaaaaccaggggaaagcgctggcgctcaaggccggggcagcggcggcccggggcgacctgctggtctgcattgacggcgacgccctgcttgaccgcgataccgccgcgtatctggtggccccgctgattcagtacccccacgtcggggcggttaccggtaatccgcgcattcgcacgcgctccacgctgattggccgcattcaggtgggcgagttctcttccataattgggctcatcaagcggacgcagcggatctatggccgggtctttaccgtctccggcgtcatcgccgcgtttcgccgacaggcgctggcagacgtcgggtactggagcccggacatgatcaccgaagacatcgacatcagctggaagctacagctgcgccactgggatatcttttttgagccgcgggcgctgtgctggatcctgatgccggagacgctgaggggcctgtggaaacagcgcctgcgctgggcccaggggggcgcggaggtgtttctggtcaacctgcgcaggattgtgcgctgggagcatcaccgcatgtggccgctgtttctggagtacgccctgtcaacgctgtgggccttcgcgtatgcgatgacggtgctgctgttcctcctcagccatgtcgcgcctgttcccgccaggctgaccgtggagagcctttttccaccggagtttaccgggctgctgctgggcgtgatgtgcctgctgcagttcctggtcagcttgtacatcgagcggcgctatgaacgaaaagtggccagctcgcttttctgggtgatctggttcccgatggtgtactggatgattggcctgttcaccaccctcgtcgcatttccaaaagtcatgcttaaacgccagcgcgcccgcgcgcgctggatcagtccggaccggggaaaagggagcatt

SEQ ID NO: 19831 - DNA, 1863 bp, Enterobacter cloacae
atgcgtaaaggaaagttaagcagtgatgcgccattcgggacattgttaggctatgcgcccggtggcgtggcgatttactcttcaaattacggcagtctggacccgcgcagctacccgcaggacgcggattttcgcagctatatcggcaacgaatacatgggccacaagtggcagtgcgttgagtttgcccgccgtttcctgtttctcaactatggctttgtgtttaccgacgtcggcatggcgtgggaaatcttctccctgcgctttttgcgtcaggtggtgaacgataacattctgccccttcaggcctttgccaatggttcgaaacgcgcgccgcgcgccggagcgctgctgatctggcaaaagggcggcgagtttcacgagaccggccacgtggcggtgatcacccagcttctcgacgatagggtgcgtattgcggagcagaacgtgattcactccccgctgccgctcgggcagcagtggacgcgcgaactgcgtctgagcgtggagaacgggtgttacaccatccatgacaccttcaacgacacggagattctcggctggatgatccagaccgacgacgcggaacacagcattccccagccggaaatcgacggcgaactgcttaaaatcagcggcgcgcggctgaaaaacaagcgtcagttcgacggaaaatggcttaacgaaaatgatgtattgcagcaggcgtatatccgcgccaacggccatgtgatcaacaaagatccctgccagtacttcaccattaccgaaagcgccgagcaggagctgatcaaggccaccaacgaactgcacctgatgtacctgcacgcgacggacaaggtgctgaaagacgacagcctgctggcgcttttcgatatcccgaaaatcctctggccgcgcctgcgcctctcctggcagtggcgtcgccaccatatgatcaccggtcgtatggatttctgcatggatgagcgcggcattaaggtttatgagtacaacgctgactccgcctcctgccataccgagggcgggctgattctcgaagagtgggtgaaaaacggctatcgcggcaacgggcataacccggcggaagggctgctggaagagctgaccggggcgtggaagcacagccacgcgcggccgttcgtccacatcatgcaggacaacgatgtcgaagaggactatcacgcgctctttattcagcgttcgctgatgcaggccgggttcgagaccaaaatcctgcacgggctggaggcgctcagctgggatgccgccggacagctgatcgacgacgaaggccgccacgtcaattgcgtgtggaaaacctgggcgtgggaaacggcgattgagcagatccgcgaggtcagcgaaaccgaatatgccgccgtgccgatccgcaccgggcatcccgagggcgaggtgcgcctgattgacgtcctgctgcgcccggaggtgctggtcttcgaaccgctgtggaccgtgattcccggcaacaaggcgattctcccggttctgtggcagctgttcccgaaccaccgttacctgctcgacaccgattttgaggttaacgagctgctgaagcagaccggctatgccgtcaagccgattgccggacgctgcggcagcaatatcgacctgattagcgcccaggacgagctgctggataaatccagcggcaagtttgttgaccgcaagaacatttaccagcagctgtggtgcctgccgaaggtcgacggtaagtacatacaggtctgcaccttcaccgtgggcgggaactacggcggcacctgtctgcgcggcgatgactcgctggtggtgaagaaagagagcgatatcgagccgctgattgtggtgaaggactcgcta

SEQ ID NO: 19832 - DNA, 1145 bp, Enterobacter cloacae
atgattatttcagcagccagtgactatcgcgccgcggcgcagcgcattttgcccccgttcctgttccactacatcgacggcggggcgtatgccgaatacaccctgcgccgcaacgtggaagacttgtcggaggtggctctgccgccagcgcgtgctgaagaatatgtctgacctgagccttgagacaaagctgtttaacgaaacgctttccatgcccgtcgcgctcgcgcctgtgggcctgtgcggcatgtatgcccgccgtggcgaagtgcaggcggccgcggcagcggatgccaaaggcattccgtttaccctctccaccgtgtccgtctgcccgattgaagaggtcgccccgaccatcaagcgcccgatgtggttcccagctgtacgtcctgcgcgatcgcggctttatgcgcaacgcgctcgagcgcgccaaagcggcgggctgctccacgctggtctttaccgtcgatatgccaacgcccggggcacgctatcgtgatgcccactcaggcatgatcggcccgaatgctgcgttacgccgatactggcaggcggttactcacccgcagtgggcgtgggatgtcggcctgaacggtcgtccgcacgatctgggcaatatctcggcatacctcggtaaaccgaccgggctggaggattacattggctggctggcgaacaacttcgatccgtcgatctcgtggaaagacctggagtggatccgcgaattctgggacggcccgatggtgatcaaagggatcctcgatccggaagatgcccgcgacgcggtacgctttggcgcagacgggattgtggtctctaaccacggcggacgccagcttgacggggtgctctcttccgcacgcgccctaccgaccatcgccgatgcggtgaaaggcgatattgcgatcctggccgacagcggcatccgcaacgggctggacgtggtgcgcatgattgcgctgggcgccgacagcgtgctgctggggcgcgcgtatctgtatgcgctggcgacggcgggccaggcaggggtggcgaatctgctcaacctgatcgaaaaagagatgaaggtggcgatgacgctgacaggagcgaaaacaatcggtgaaatcagcagggattctctggtgcaggagttaagcaaa

SEQ ID NO: 19833 - DNA, 471 bp, Enterobacter cloacae
atgcttaacatcgttttattcgaaccagaaattccgccgaataccggcaatattatccgcctgtgtgccaacaccggttttcgtctgcatatcattgagccgatgggctttacgtgggacgacaaacgtctgcgtcgcgcagggctggattatcatgaatttaccgccgtcgttcgccatcacgattacgccgcgtttctggaagcagagaagccgcagcgcatgttctccctgactaccaaaggcacgccatcgcatagcgccgtgagctatcaggcaggtgactatctgatgtttggcccggaaacccgcggcctgccggccacgatcctggatgccctgcccgccgagcagaaaatccgtattccgatgatgccggacagccgcagcatgaacctgtcgaacgcggtgtcggtggtggtgtatgaagcctggcgccagctggggtatccgggcgccattctcagaagt

SEQ ID NO: 19834 - DNA, 819 bp, Enterobacter cloacae
atgccgtgtgaagaactggatatcgtctggaacaatattaaagccgaagctcgggcgctggccgactgcgagcctatgctggccagtttctaccacgcgacgctacttaagcacgaaaacctcggcagcgccctgagctatatgctcgccaacaagctggcttcctcgatcatgccagctatcgccattcgggaagtggtggaagaggcttacgctgcagacccggaaatgatcgcctctgccgcctgcgatattcaggccgtgcgcacgcgtgatccggcggtcgataaatattctacgccgctgctgtacctgaaaggcttccacgccctgcaggcttaccgcatcggccactggctgtggaatgaaggccgccgcgcgctggcgatcttcctgcaaaaccaggtttccgtgacgttccaggtcgatattcacccggctgcgaaaattggccgcgggatcatgctcgaccacgccaccgggattgtcgtcggggaaacggcggtcattgaagatgacgtctcgatcctgcagtcggttaccctgggcggtaccggtaaaaccagcggcgatcgccacccgaaaatccgtgaaggggtgatgattggcgcgggtgccaaaatccttggcaatatcgaagtcgggcgcggtgcgaagatcggcgcaggctccgtagtgctccagcccgtgccgccgcataccaccgccgctggcgtaccggcgcgcatcgtcggtaaaccagacagcgataagccttccatggacatggatcagcacttcaacggcattcaccatacgttcgagtatggtgacggcatt

SEQ ID NO: 19835 - DNA, 912 bp, Enterobacter cloacae
atggttttctccgtcgtcagcgcgctggcgctggctgcaccggtatacgcaggtaaactcgctatcgtgattgatgacttcggttatcgtccacactatgaaaatcaggtgctggcgatgccgtcggccatctctgtcgccgttcttccaaatgcgccccacgcgcgcgaaatggcgaccaaagcccacagcagcggtcatcaggtgctgatccacctgccgatggccccgctcagcaagcagccgctggaaaaagataccctgcgcccggatatgagcagcgaggagatcgagcgcatcatccgcgacgcctacaacaaagtgccgtatgccgtagggctgaacaaccatatgggcagcgcgatgacatcaagcctgttcgggatgctcaaagtgatgcaggcgctggagcgttacaacctctacttcctcgacagcatgaccatcggcaacagccaggcaatgcgtgccgctcagggaacgggcgtaaaggtgattaagcgcaaggtgttcctggatgatacccagaacgaagccgatattcgcatgcagtttaatcgcgcggtacagctggcccgccgcaatggctcagccatcgccatcggtcacccgcacccgtctaccgttcgcgttctgcagcagatgctgccgaccttgcctgacgatatcacgctggtgcgtccgagcgatctgctgaacgagccgcaggtggattcctctaaaccaaattctgcgcagcctgtcccgacagcgccgcgcaatccgttccgcggcgtgaagcgctgtgtacctaagcaaccgcttgaaccggtctatgcaacccgcttcttctccgtcatcggagacagcatcagtaacagtacgctggtgaattacgtccagcagcagtggcagggatggggtaagaaagcc

SEQ ID NO: 19836 - DNA, 1017 bp, Enterobacter cloacae
atgagcactgttaatgcgtcaatgactgtgatcggtgccggctcatacggcaccgctcttgccatcacgctggcaagaaatggtcacgaagtggttctctggggccacgacccaaaacatatcgcaacgctgcaacgcgaccgttgtaacgtggcgtttcttccggacgttccgttccccgactccctgcaccttgaaagcgaccttgcgaccgcgctggcggccagccgcaacattctgattgtggttccgagccatgtatttggcgacgtgctccgtcagattaagccgctgatgcgcccggatgcgcgcattgtctgggcgacaaaaggactggaagccgaaaccggacgcctgctgcaggacgttgcccgcgaagcgctgggtgatgcgatcccgctggcggtcatctccggcccgacctttgccaaagagctggccgctggcctgccgacggcgatttcgctggcctccaccgatcaggccttctccgacgatcttcaacagctgctgcactgcggcaagagcttccgcgtctacagcaaccccgattttatcggcgtgcaactgggcggtgcggtgaagaacgtgattgcgattggcgccgggatgtcagacggcattggttttggtgccaatgcgcgtacggcgctgatcacccgagggctaaccgaaatgtcccgcctgggcgaagcgctgggtgccgatccggccacctttatgggaatggctggcctgggcgacctggtgctgacctgtaccgataaccagtctcgtaaccgccgttttggcatgatgctcggacagggcagcgatgttaaaggcgcgcaggagaagattggtcaggtggttgaaggctaccgcaataccaaagaagtccgcgagttggcgcaccgtttcggtgtcgaaatgccaataaccgaggaaatttatcaggtattgtattgcggaaaaaatgcgcgcgaggcagcattgaccttattaggtcgtgcgcgcaaggacgagcgcagcagtaac

SEQ ID NO: 19837 - DNA, 249 bp, Enterobacter cloacae
atggccaatattgagatctataccaaagcgacgtgcccgttctgtcatcgtgcgaaagcgctgctgaacagcaaaggcgtcacgttccaggaactgccgatcgacggtgacgcgattaaacgcgaagagatgatcaaacgtagtggtcgcacgacggttccgcagatttttattgatgcgcagcacattggcggctgtgatgacttgtatgcgctcgacgcccgtggtggactcgatccgctgctgagc

SEQ ID NO: 19838 - DNA, 429 bp, Enterobacter cloacae
atgcaagaaattatgcaattcgttagccgccatccggttctgagcatcgcgtggattggcctgctggctgctgtgctgttcaccacatttaagagcctgacgtctaaaattaaggttatcacccgtggtgaagcgacgcgtctgatcaacaaagaagatgccgtcgtggtcgatctgcgtcagcgtgacgatttccgtaaaggtcacattgcgggcgcaatcaacctgctgccagctgaaatcaaagcgaacaacgtcggtgagcttgagaaacacaaagcccagccgattatcgttgtcgatgcgaccggcatgcaggcacaggaatctgccagcgcgcttcataaagcaggcttcgaaaacgtaacggtgctgaaagaaggtatttccggctggagcggggaaaatcttcctttggtacgcggtaaa

SEQ ID NO: 19839 - DNA, 1251 bp, Enterobacter cloacae
atgctggaacaaatgggtgctgccgcgaaggccgcctcttataaactggcgctcctttccagccgcgagaaaaaccgcgtgctggaaaaaatcgctgattatctggaatcccagtctcaggaaattttgctcgccaacgagcaggatttactggaagcgcgtcgtaacggcttgagcgaagcgatgctcgaccgtctggcgctgacgccggcacgcctgaaaggcatcgccgacgatgtgcgtcaggtctgcaatctggccgatccggtagggcaggtgatcgacggtgggctgctcgacagcggtttacgcctggagcgccaccgcgtgccgctcggcgttatcggcgttatttatgaagctcgtccaaacgtgacggtggatgttgcgtccctgtgcctgaaaaccggtaacgccgctattctgcgcggtgggaaagagacatggcgtaccaacgccgcgacggtgaaagtcattcagcaggcgctggaagagtgcggcttaccggcgggtgccgtacaggcgatcgagagcccggaccgcgcgctggtcaacgaaatgctgcgcatggacaaatacatcgacatgctgatcccacgcggcggcgcgggcctgcacaagctgtgccgcgagcagtcgacgattccggtgatcaccggcggtatcggcgtgtgtcatatcgttgtcgacgacagcgctgagattgaaccggcgctgaagattatcgtgaatgcgaaaacccagcgtccaagcacctgtaacaccgtagaaacgctgctggtgcatcaggatattgcgaacaccttcctgccggctctgagcaaacagatggcagagagcggcgtgacgctgcacgctgacgccagcgcgctcgcgctgctggaggatggcccggctaacgttgttcccgtaaaagcagagcaatacgacgatgagttcctgtccctggatctgaacgtgaaaatcgttgccgatctcgacgacgccattgcgcacatccgtgaacacgggacgcagcattctgacgcgattctgacgcgcaccctgcgcaatgccgatcgcttcgtgaacgaagtggattcttcagcggtatatgtgaatgcctccacccgcttcaccgacggcggccagttcggcctcggcgcagaggtggcggtcagcacgcagaaactgcacgcgcgcggcccgatggggctggaagcgctgaccacgtacaagtggatcggcttcggcgacgatacgattcgtgcg

SEQ ID NO: 19840 - DNA, 1212 bp, Enterobacter cloacae
gtgaaactaaacgcccggcaggtggacaccgccaaacctaaagataagccttacaagctggctgatggtggtggtttgtatctcctgattaaacctaatggcggcaaatactggcggctcaagtatcgtgtagccggcaaagagaagctgttagcgctgggtgtgtatcctgaagtcacattggccgatgctcgggcaaaacgtgaagaagccaaaaggggtatcgctgggggtatcgatcctatggaagcgaaacgggaagagaagatcgcccgtgaaacgcagttaaacaacaccttcaaagatattgcccttgagtggcacagcagcaaactaaaaaaatggtctgctgggtatgcttcagacatcctggaggctttcaacaaagatgtgttcccttacattggcaaaaaaccaatagccgatatcaaaccgcttgaactgttgaatgtgttgcggcgcattgaggggcgcggcgctacagaaaaggccaaaaaagttaggcagcgctgcggggaagttttccgttacgcaatagtcaccgggcgtgctgagtataaccccgctccggatctcaccagcgccatgcaagggcatgagtccaatcattatcctttcctcacaccgaaagaattgcctgatttctttaaggcgttgtcaggatatacaggaagcgcgttagtagttttggctgctcgtctgctgattatcaccggcttgcgtaccggcgaactccgcggggcattttgggatgaaatcaatatcagtaaggcgatctgggaaataccagcctcacgcatgaaaatgcgtcgccctcatgtggtaccgttgtccaggcaagctcttacgcttattggccagctccaagagctaacaggcaattacccgcttatgttccctggccgtaacgatccgcgaaaaacaatgagtgaagccagcataaaccaagtctttaagcgtattggctatgacggaaaagtcaccggacacggtttccggcacaccatgagtaccatcctgcacgaacagggctacaacaccgcgtggatagaaacgcagctggcacacgtcgacaaaaactctattcgaggaacgtacaaccacgctcagtatatagacggccggcgtgaaatgcttcagtggtatgccgactatatggaagcgttggaaaacggtgaaaatgtagtgcatggaacatttgggaaaagcgct

SEQ ID NO: 19841 - DNA, 1335 bp, Enterobacter cloacae
atgttaaacagtattttagtaatactttgtctgattgccgtcagcgcgtttttctcgatatctgagatctcgctggccgcgtcccgtaaaatcaaactgaagctgcttgccgatgaaggcaacatcaatgctacccgcatcctgaaaatgcaggaaaaccccgggatgttcttcaccgtggtgcagattggcctcaacgcggtcgccattctcggcggtatcgtgggtgatgcggcgttttccccggcgttttatagtctgtttgttaagtacatgtccgttgaactggccgaacagctcagctttatcctctccttctcgctggtaaccggcctgttcatcctctttgcagacctgaccccgaaacgcatcggtatgattgcgccagaagctgtggctttgcgtatcatcaacccgatgcgcttctgtctgtacgtgtttcgtccgctggtgtggttctttaacggcctggcgaacgtgattttccgcatctttaagctgcctatggtgcgtaaagacgacatcacctctgacgacatctatgcggtagtagaagccggcgcgctggccggggtgctgcgcaagcaggagcacgagctgattgagaacgtgttcgaactggaatcccgtaccgtaccgtcttccatgacgggccgtgaaagcattatctggttcgatttacatgaagatgagcagagcctgaagaacaaagtggcgcagcatccgcactctaagttcctggtctgtaatgaggatattgaccacatcatcggttacgtcgactccaaagacctgctgaaccgcgtgctggcaaaccagagcctggcgcttaacagcggcgtgcagatccgtaacaccctgattgtgccggacaccctgacgctctcagaagcgctggaaagtttcaaaaccgccggggaagacttcgcggttatcatgaacgaatacgcgctggtggtgggtattatcaccctgaacgacgtgatgaccacgctgatgggcgacctggttggccaggggctggaagagcaaattgttcagcgtgacgataattcatggctgattgatggcggcacgccgattgaagacgtaatgcgcgtgctggatatcgacgagttcccgcagtccggtaactacgagaccattggcggctttatgatgtttatgctgcgtaagatcccgaaacgtaccgactcggtgaagttctccggctacaagtttgaagtagtggatattgataactaccgcatcgaccagctgctggtgacgcgcatcgacaacaaaccgaccgtactggtgccaaagctgccggacgcggaagagaaggtttcggcg

SEQ ID NO: 19842 - DNA, 3778 bp, Enterobacter cloacae
atgagtttatggaagaaaataagcctcggggtgctgatttttatcgtgctgctgctcggtacggtggcgtttctggtgggaacgacgaccgggctgcatctgctgtttaacgctgcgaaccgctgggtgccggggctggagattggccaggtaacgggcggctggcgcgatctgcgtctgaagaacatccgctacgagcagccgggcgtggcggtgaacgccggggagttccacctggcggtgaagctgggctgcctgcgtgacagcaagctctgcgtcaacgatctgtcgctaaaagacgtcaacgtggcgatagattcgaaaaaaatgccgaagcctgcgccggtcgaggaggaggacagcggcccgctgaatctctccacgccgtacccgatcgcgctctatcgggtcgcgctcgataacgtcaatatcaaaatcgacgacactaccgtgtccgtgatggatttcacctccggcctgcgctggcaggagaaaaacctcaccctgacgccgacatccctgcagggattgctgatcgcgctgccgaaggtgaccgacgtggcgcaggaagagatcgtcgagccgaagatccagaacccgcagccggaagaaaagccgctgggcgaaacgctgaaagatctcttctcgaagcctgtgctgccggaaatgaccgacgttcatctgccgctgaatctcaacatcgaggagttcaaaggcgagcagctgcgcatgaccggcgataccgatctgacggtctataacatgctgctgaaagtcagcagcattgacggcaatatgaagctcgacgcgctagatatcgacaccaaccagggctcggtgaatgcgtcagggaatgcccctgtgcgcgacaactggccggtggacattacgcttaacagtgccctcaacatcgatccgctgaaaggcgaaaaggtgaaggtcaaagtgggcggggcgctgcgcgataagctggacgtcggggtgaatctctccggcccggtggacatggtcctgcgcgcacaaacgcagctggcggaagccgggctgccgctcaatcttgaggttgtcagcaagcagctttactggcccttcaccggcgaaaagcagttccaggccgatgacctgaagctgaagctgagcggcaagatgaccgactacacgctctcgttccgcaccgcggtgaaggggcagggcgtgccgcccgcgaacatcacgctggatgcgaagggcaacgaacagcaggtcaacctcgacaagctgaccgtcgcggcgctggaaggtaaaaccgagctgaccgcgctgcttgactggcagcaggcgatcagctggcgcggcgagctgaagctgacgggcattaacaccgccaaagaggtgccggactggccgtcgaagctggatggcctgattaaaacccgcggcagcctgtacggcggtacgtggcagatggacgtgccggaaatcaagctcaccgggaacgtgaagcagaacaaggttaacgttgaaggctcggtaaaaggcaacagctatctgcagtgggttatcccggggctgcacgtggcgctgggccgcaacacggcggatatcaaaggcgagctgggggtgaaggatctcaacctggacgccaccatcgacgcgccgaatctcgacaacgccctgccgggtctgggcggcacggcgaaaggtctcgtgaaagtgcgcggtacggtggaggcaccgcagctgctggcggacattaccgccaataacctgcgctggcaggagctgagcgttgcccgcgtccgcgtggaaggggatgtgaaatccaccgatcagatcggcggtagcctgaacctgcgcgtggagcgcatttctcagccggacgtgaacattagcctggtcaccctggacgccaaagggaacgagaagcagcacgacctccagctgcgcgtgcagggcgagccggtctccggccagcttcacctcaccggcagcttcgaccgtaaggaagaacgctggaaagggacgctggacaacacccgcttcaatacgccggtcgggccgctggcgctctcgcgatccattgccctcgactaccgcaatgccgagcagaagatcagcattgggccacactgctggaccaacccgaatgcggagctgtgcgtgccgcagaccatcgatgcgggtgcggaagggcgcgcgcagatcaacctcaaccgcttcgatctggcgatgctgaagccgtttatgccggacacaacccaggccagcggcgtcttcagcgggaaagccgatgtggcctgggacactaccaaagaggggctgccgcagggcagcgtcacgctgtccgggcgtaacgtgaaggtgacgcaggaggtcaacgacgcgccgctgccggtggcgttcgacaccctgaacctgagtgccgatctgcataacaatcgcgcacagctggggtggacgatccgcctgaccaacaacggtcagctggacgggcaggtccagattaccgatccgcagggacggcgtaatctgggcggcaacgtcaacgtccgtaacttcaacctggcgatggtgaacccgattttcgcgcgcggggaaaaagcggagggtatgctgaacgctaacctgcgcctggccggtaacgtgcaaagcccgcagctgttccgttaaaatccgcttcaccgcgttgaatatcgacggcaacttcatgccgtttgacatgcagcccagccagatagcgatgaacttcaacggcatgagctcgacgctgagcggctcggtattgacgcagcaagggcaaatcaacctgagcggcgacgcggactggagccagctcgacaactggcgcgcccgtattgccgcgaagggcagcaaggtgcgcatcaccgtaccgccgatggtgcgcctggacgtctcgcctgatgtggtctttgaagccacgccaagcctcttcacgcttgacggacgcgtcgacgtgccgtgggcgcgcatcgtggttcacgacgtgccggaaagcgcggtcggcgtctcaagtgatgaagttatgctcaatgaaaatctgaaacctatagaacagaagagcgcgggcataccgattaatagcaaccttatcgtgcacgtggggaataacgtgcggttggatgcgtttgggctgaaggcgaggctcacgggcgatctgaaagtggcgcaggataaacaggggcttggcctgaacgggcagatcaatattcctgaagggcgtttccacgcctatggtcaggatctgattgtgcgcaaaggcgagctgctgttctccggtccaccggatcagcccctgttgaacatcgaagcgattcgtaacccggaagcgacggaaaacgacgtcattgctggcgttcgcgtcaccggttctgccgacgagccgaaggcggagatcttctctgacccggcgatgtcgcagcaggaagctctctcttatctgctgcgtggacaaggtctggacagcggacaaagcgacagtgcggcgatgacctcgatgttagtgggtctgggggttgcacaaagtgggcaggttgtgggtaaaatcggcgagacgttcggcgtaagcaatctggcgctggacacccagggcgtgggtgactcctcgcaggtggtggtcagcggctatgtactgccgggtctgcaggtaaaatatggtgtggggatctttgactcactggcaactctcacgttacgctatcgcctgatgcccaagctatatctggaagcagtgtccggcgtagaccaggcacttgatctgctctatcagtttgagttttag

SEQ ID NO: 19843 - DNA, 303 bp, Enterobacter cloacae
atgaaacagctttcctttttacccggcgagatgacgccacaggaccggcgtctcatccagcgggcactcagggctctggaccgacacctgcatgagcccggcgtggccttcacctcttcacatgctgtccgtgagtggctgcgactgcatatggccgcacttgagcgggaagagttccgggtgttgtatctggacaaccagaatcagttgattgcccatgagacgctcttcaccggcacgattaaccgtactgaggtgcatccccgggaagtggtcaaacgtgctctgcacttcaatgtcgca

SEQ ID NO: 19844 - DNA, 637 bp, Enterobacter cloacae
ttgagccggatgccggtgaaggtcttaaccgctatatccgcacctcaggcatccgtacagacacctccacccgctgaccgcgaagcatttacccgcaacatttcacctccccgaacacactttatatccccatacgccagccatcgccgctggcgtttttattgacggagacatacccatgacaacacagacgcagtacgatctcgcacccgctaaccaacccgaatttgaactgaccgtcacgccggtccccgatgaacaacgtctcgatttctggccgcagcactttggcaccattccgcagtggctactcctggagccgcatatcttcgcctggatggagcgtttctgtgcgacctacagcggcggtatctggtcgttatacaccctgagtaacggtggcgcgtttatggcccctgatgctgacagtgatgataaatggcatctgctcaacagcatgaacggcaatgatgcggaaatgagtgcagaagcggcaggcatcgcggtctgcctgattgcgtacagtcaccatgcctgccgtaaagaatgtgacgcgatgaccgcacactattaccgcctgcgggactatgccctgcagcatccagaggcccacgccattctgcgtatcatcgactga

SEQ ID NO: 19845 - DNA, 861 bp, Enterobacter cloacae
atgaacaattctgaaggtttgaagccgtttcagcagtcgcttgatggtctgccacaatgggtatctgaacgtatattgcagcagataaatcagttaacccgctacgagccagtgatcggcattatgggtaaatccggagccgggaaatccagcctgtgtaatgccctgtttgccagtgaggtatcgccagtcagcgatgttgctgcctgtacccgtgagccactgcgctttcggctgcaggttggtgagcggtttatgacgctggtggacctgcccggtgtgggtgaaagtggcgctcgcgataccgagtatgctgcgctgtaccgcgaacagcttcctcgcctcgacctggtgctgtggctcattaaagccgatgaccgcgcactggcagtggatgagcacttttatcatcaggtaattggggaggcataccggcataaagtactgtttgtgatcagccagtcggataaggccgaacccaccagcggtgagggactattgtccacggcgcagaagcagaatatcagccgcaaaatctgtctgctgcatgagctgttccagcccgtacatccggtgtgtgctgtgtcggtccgtctacaatgggggcttaaggtgatggccgagcgaatgattaagtgcctgccacgtgaggccaccagcccggtagtgtcgcaactccagtcttcctttcgcacgacggtagtccgggagcaggctcgtagcgactttggtgaaaccgtcggtgctgtactcgatagcatcagtgcctttcccctgatacccgccccggtgcgggccgtcattcaggccgtgcgcaacaccgtggtgtcagtggcccgcgccgtctgggatttcttcttc

SEQ ID NO: 19846 - DNA, 684 bp, Enterobacter cloacae
atggccgctgaatcgcaactcaatcccacccagcccgttaaccagcaaatctatcgcattttgcgacgtgatattgtccattgcctgatcccaccgggaacgccgctttctgaaaaagaggtctccgtgcgttttgacgtttcccgtcagccggtacgtgaagcgtttattaagcttgctgaaaacggactgattcagatccgtccgcagcgcggcagctacgtgaacaaaatttcactctctcaggtacgcaacggctgtttcgttcgccaggccattgaatgtgcggtggcgcgccgcgccgcaacgcttatcaacgacaaccagtgttaccagcttgagcagaacctgcaccagcagcgtattgcgattgaccgcaagcagctcaatgatttcttccagcttgatgatgaattccaccagaagctggcgcagatcgcggattgtcagctggcctgggacaccatcgagaacatcaaggccaccattgaccgcgtgcgctatatgagcctcgatcacgtctccccgccggaaatgctgctccgacagcatcatgatattttcagcgcgctggaaaaacgcgacccggacggtgtggaaaaagcgatgacgctgcatctgcaggaaattagcgaatccgtgcagcttattcgtcaggaaaatagcgagtggtttagcgaagag

SEQ ID NO: 19847 - DNA, 1461 bp, Enterobacter cloacae
atggaaaacaccttattacaggccaacgcgacgctgcctcagtacgatcgcgacagccttcaaccacgcattgttcatctgggttttggcgcctttcaccgggcgcaccaggcggtatacgccgacatcctcgccgctgagcacggcagcggctggggctactgtgaggttaacctgattggcggcgagcagcagattgccgatctgaacgcgcaggataacctgtacaccgtggcggagatgtctgctgacgcatggacatcccgcgtggttggcgtggttaaaaaagcgctgcatgcaaaggtcgacgggctggagtgcgtgctggcggcgatgtgcgaaccgcaggtgacaattgtctcgctgaccatcaccgagaaagggtactgccactcaccggcgaccggacaactgatgctcgatcacccgtttatcgtcgccgacctgcaaaatccgcaccagccgaaatccgcgccgggcgtggtggtggaagcgctggcgcgtcgcaaagcggcgggtctgcccgcgtttagcgtgatgtcctgcgacaacatgccggaaaacggccacgtgatgcgcaatgtgacctgtgcttacgcccgagcggtagacggcgagctggcggactggatcgaggctaacgtcaccttcccgtcaaccatggtggatcgcatcgtgccggcggtcactcccgatacgctggataaaattgagcagctgaccggcgtgcgtgacccggcggcggtcgcctgtgaaccgttccgccagtgggtgatcgaggataactttgtggcaggacgcccagagtgggaaaaagccggtgccgagctggtgtcagacgtgatcccgtttgaagagatgaagctgcgcatgctcaacggcagccactccttcctggcgtacctgggctatctggccggttacccgcatatcaacgactgtatggaagatgagaactaccgcctcgccgcacatacgctgatgcttaacgagcaggcgcccacgctgaaagtgaagggcgttgatttaggtcggtatgccgatctcctgattgcccgctacagcaacccggccctgcgccatcggacatggcaaatcgcgatggacggcagccagaagcttccgcagcgtatgctggactccgtgcgctggcacctggtgcatcagaagcctttcccactgctggcgctgggcgtggcagggtggatgcgttatgttggcggcgtggacgagcagggtaacgccatcgacgtgagcgatccgctgctggcggtgattcaggcggcggtgaagggaagtgcggaaggggaaagtcgggttaacgcgctgctcggcattgaggccatctttggtaaagagttaccgcaggagccgcgcttcgttgctgcggtgatgaccgcgtaccggacgctgctgcaaaaaggcgcgaaagcgaccttggcgcagtacgcgtctcaacga

SEQ ID NO: 19848 - DNA, 738 bp, Enterobacter cloacae
atgactgataaaatttctgcaccgcgctatgcgctacgtggcctgcagctaattggctggcgcgacatgcagcacgcgctggactttctgttcgccgacggccagatgaaatccggtacgctggtggccatcaacgcggaaaaaatgctggcggttgaggataatgcggaagtcaaaagcctgattgaagcggctgaatttaaatacgcggacgggatcagcgtagtccgctctatccgtaaaaagtatcctgacgctaatgtatcccgcgtggcgggggccgatctctgggagcagcttatggcccgcgcaggtgcgcagggtacgcccgtattcctgattggcgggaagccggagatactggcccagacggaggagaaactgcgtcgtcaatggaatgttaatattgtcggcagccagaatggttacttcaaaccggaagatcgacaggctctgtttgaacgcgttcgtgacagcggggcgaaaattgtcaccgtggcgatgggctccccgcgtcaggagatcctgatgcgtgactgccgtctggtctgtcctgatgccctctatatgggcgtcggcggcacgtacgacgtctttaccggccacgttacgcgcgcgccgaaggtctggcaaaatctggggctggagtggctgtaccgcctgctatcgcaaccgacgcgcattaaacgtcagatccgtctgcttcgctacctcgcctggcattacaccgggaaaatg

SEQ ID NO: 19849 - DNA, 1101 bp, Enterobacter cloacae
gtgaacctacttgatacgtttactgaactaaccagtattttcttgtttaccacctgttttttgtttctggcacgtaaggtggcgaaatatctggggttagtggataaacccaacttccgtaagcgtcatcaaggtatgattcctttggtcggcggtatctctgttttcgcggggatctgcttcacgtttgccatcgcggattactatattccacatgccaggctgtacctgacctgtgcgacggtgcttgtggtggttggcgctcttgacgaccgttatgatattagcgtcaaaatccgcgccttcgttcaggctgctgtagctatcgctatgatggtgttcgctaagctgcacttgagtagcctgggctatatttttggctcctgggagatggaactcggtccgttcggttatttcctgacactttttgccgtgtgggtggcaattaacgcgttcaacatggttgacggtatcgatggtttgttgggaggcttgtcctgcgtctcatttgccgcaattggtttcattttatggttcgatgggcaatatagccttgctatgtggtgttttgccatgattgcggccatcctaccttatatcctgttgaatctcggcgcattgggccgtcgctataaagtattcatgggtgatgcgggtagcacacttatcggctttactatcatttggatcttgctggaaaccactcagggtgatgtacaccccattagcccagtaacggcattatggattatcgctatcccgttaatggacatggttgcgattatgtatcgccgcctgcgtaaagggatgagtcctttctctgctgaccgtcagcacattcatcatttgatcatgcgagccggattcacttcccggcaagcatttgtgcttattacgctggcggctgctattctagcggggattggcgtgacggcggaatatacacattttgtgcctgaatgggctatgttggtattgttcttgctagctttttctctctatggctactgcatcaagcgtgcatggaaggtagcacgcttcattaaacgtattaaacgcaggatgcgtcgtaacagtggcaaaaatacaacattaactaag

SEQ ID NO: 19850 - DNA, 797 bp, Enterobacter cloacae
gaagacgtaaccgcgcgtgttctggatctgcctcaccaattggtcgctcccagcgtggttcgattgtggcaccgccaatcgcgggtacaacaatgttgctgcagaacatcgcgcagagcattgcctataaccacccagattgcgtgctgatggtgctgctgattgacgaacgtccggaagaagtgaccgagatgcagcgtctggttaaaggtgaagtagttgcttctaccttcgacgaaccggcatctcgccacgttcaggttgcggaaatggttatcgagaaggcgaaacgcctggttgagcacaagaaagacgtgatcatcctgcttgactccatcacccgtctggcgcgtgcctacaacaccgtggttccggcgtctggtaaagtgctgaccggtggtgtggatgctaacgccctgcatcgtccgaaacgcttcttcggtgccgcgcgtaacgtggaagagggcggcagcctgaccatcatcgcgacggcgctgatcgataccggttctaaaatggacgaagtgatttacgaagaatttaaaggtacaggtaacatggaactgcacctttctcgtaaaatcgctgaaaaacgcgtcttcccggctatcgactacaaccgttccggtacccgtaaagaagagctgctcaccacgcaggaagagctgcagaaaatgtggatcctgcgcaaaatcatccatccaatgggtgaaattgacgcgatggagttcctcattaataaactggcgatgaccaaaaccaacgacgatttcttcgacatgatgaaacgctcgtaa

SEQ ID NO: 19851 - DNA, 2078 bp, Enterobacter cloacae
aacgtggccgttatcactattgatgtgcctgatgaaaagatgaataccctgaaggccgaatttggtgttcaggtgcgcgcgatgctaaagcagatccgcgacaacaaagcgattcgtggtctggtctttatctctgccaagccggataactttatcgccggcgcggatatcaacatgatcgcccgggcgcaaagcgctctggaagccgaagagctggcgcgtcagggccagcaggtgatggcggagatcagcggcctgccgatcccggtcattgccgcaatccacggcgcctgtttgggcggtgggcttgagctggcgctggcctgtcacagccggatttgcaccgacgatgcgaaaacgattctgggcctgccggaagtgcagctgggcctgctgcctggctccggcggaacgcaacggttgccgcgcctggtgggcgttagcacggcactggagatgatcttaaccggtaaacagctgcgtgcccgtcaggcgctgaaagccggtctggtcgatgacgtcgtgccgcagtccattttgctggaggccgccgttgagcttgcgctgaaaggtcgtcaggcaaaacgtcctctgccggtacgcgagcgcgtgcttgccggtccgctgggaagaacgctcctgttcaacatggtgggcaaaaagaccgaacaaaaaaccaaaggcaattacccggcggcaaagcggatcctggaagtgatcgaaaccgggctgtcgcagggcagcagcagcggctatgcagcggaggccaaagcctttggcgaactggcgatgacgccgcagtcacaggcgctgcgcagcatcttcttcgccagcacggacgtgaaaaaagatccgggcagcgaggcgcagcctgcgccgctgcgtgccattggcgtactgggtggggggctcatgggtggcggaatctcttttgttaccgccagcaaaggcaaattgcctgtacgcatcaaagacattaatcctaaggggatcaaccacgcgctgcagtacagctggcagaaccttgatcaaaaggtcaagcgccgccatatcaaggcaagcgagcgtgataaaaccctggcgatgatctccggtgcgacggattacagcggttttgcgcaccgcgatctggtgattgaagccgtgtttgaagatctggcgcttaagcagcagatggtggcagacgttgagcaacattgcgccccgcataccatttttgcctccaatacatcgtcattgccgattggcgatatcgcggcgaaagccgcgcgtcctgagcaggtgattgggctgcacttctttagcccggtcgaaaaaatgccgctggtggaagttattccgcacgcgactaccagtccgcaaactgttgccaccgtggtgaaactggcgaaaaaacagggcaaaaccccgattgtggtagcggacaaagctggcttctacgtcaaccgcattctggctccctacattaatgaagcaatgcggttactgacggaaggggagaagattgagcacgtcgacgaggcgctggtaaagtttggtttccccgttggcccaatccaacttttggatgaggtgggaatagacaccggcactaaaattataccagtgcttgaagccgcatatggcgatcgttttagcccacctgcaaacattgtttctgcgattttgaaggacgatcgcaaaggcagaaaaaatgaacgcggtttctatctttacggcgcgaaagggcgtaaaagcaggaaacaggtcgacccttcggtatatgggctcatttcgactacgggtcagggaaaactctccgccgttcagtgcgctgagcgctgcgtgatgatgatgctcaatgaagcggcgcgctgttttgatgagcaggtaatcaagagcgcgcgcgatggcgacattggcgcggtatttggcattggcttcccgccgttccttggcggcccgttccgttacatggatacgctcggcgcgggtgaagtggttgctatcctgcaacgtctggttcgcaatatggtccacggtttacaccgtgtgacgaattattgcagatggcggaacgcggccagacattttggcct

SEQ ID NO: 19852 - DNA, 1330 bp, Enterobacter cloacae
tttttacaggggagtgttatgagtcaggcattaccgcttattacccgtcagggcgatcgcattgccatagtcagtggattgcgcacgccgtttgcgcggcaggcaacggcgtttcatggcataccggccgttgacctgggcaaaatggtagtgggggagatgctggctcgcagcgaaattccgccggaggttatcgaacagctggtcttcggccaggtcgtgcagatgcctgaagcccccaacattgcgcgtgaaatcgtcctgggtaccgggatgaacgtccataccgatgcctacagcgtcagtcgcgcctgcgcgaccagcttccaggccgtggctaacgtcgctgaaagcctgatggcgggcactattcgcgccgggattgcgggtggggcggactcctcttcggtgctgccgattggcgtgagtaaaaagctggcgcgcatcctggtagatgccaataaagcccgcacgacgggtcagaaactcaaactcttctcgcgtttacgcctgcgcgacctcatgcccgtgcccgcttgccgtagcggaatattctactggcctgcgcatgggcgataccgccgagcagatggcaaaaacgtacggcattacccgcgagcagcaggatgccctggcgcatcgctcgcaccagcttgcggcaaaagcctggtcggaaggcaagctgaccgacgaggtcatgaccgcctatattcccccctaccgtgaaccgcttgtggaagataacaatattcgcggcacctcaacgctggcggattacgccaaactgcgcccggcgtttgaccgcaaacacggcacggtgacggcggcgaacagcacgccgctgacggatggtgccgccgccgtgatcctgatgaccgaatcccgcgcgaaggagctgggcatcactcccctgggctatttacgcagctatgccttcaccgccattgatgtctggcaggacatgctgttaggtccggcgtggtccacgccgctggcgctggagcgcgcggggctgacgctggctgatttaaccctgattgatatgcacgaagcgtttgccgcgcagaccctggcaaacgtacagctgctggcaagcgagcgtttcgcgcgcgacgtgctgggccgcgcccatgccacaggcgaagtggatcagagtaaattcaacgtgctgggcggctctatcgcctacggtcatccgtttgccgccacaggggcgaggatgatcacgcaaacattacatgaactccgtcgccgcggcggagggtttggcctcgttaccgcctgtgcggcgggtggccttggcgcagcaatggttctggaggctgaataa

SEQ ID NO: 19853 - DNA, 1089 bp, Enterobacter cloacae
atggcaggaaacagtattggacagttattccgcgtgaccacctttggcgagtcacacgggctggcgctgggttgtatcgttgatggcgtaccgccaggcatcgaactgaccgaagccgatttacagcacgacctcgaccgccgtcgcccgggcacctctcgctacaccacgcagcgtcgcgagccggaccaggtcaaaattctctccggcgtctttgaaggtcgcaccaccgggaccagcatcggtctgctgatcgaaaacaccgatcagcgctcccaggactacggcgccatcaaagacgtcttccgtccgggccacgccgactacacctacgaacaaaagtatggcttccgcgactatcgcggcggcggacgttcttccgcgcgtgaaaccgcgatgcgcgtggcggcaggggcgattgctaagaaatacctgcagcagaaatttggcatcgttatccgcggctgtctgacccagatgggcgacattccgcttgcgatcaaggactgggatcaggtcgagcaaaacccgttcttctgcgccgatgccgacaagcttgaggcgctggatgaactgatgcgtggcctgaaaaaagagggcgactccatcggggcgaaagtgaccgtggtggcagacggcgtcccggccggctggggcgagccggtatttgaccgtctcgacgccgacattgcccacgcgctgatgagcatcaacgcggtgaagggcgttgagattggcgacggttttgacgtggttcagcttcgtggcagccaaaaccgcgatgagatcacgaaggcaggcttccagagcaaccatgcgggcggcatcctgggcggtatcagcagcgggcagcagattattgccaatatcgcgctgaagccaacctccagcattaccgtgccgggccacacgattaaccgcgatggcgaagaagttgagatgatcaccaaaggacgtcacgatccgtgcgtggggatccgcgcggtgccgatcgcggaacgatgctggcgatcgtgctgatggatcacttccctgcgccagcgcgcgcagaatgcggatgtgacgaccaccattccacgctggtaaaca

SEQ ID NO: 19854 - DNA, 304 bp, Enterobacter cloacae
atacagaggaaattgagctatgagtaaatgcagtgctgatgaaaccccggtttgctgctgtatggatgttgggaccatcatggacaactccgattgcaccgcgtcttacagccgcgtgttcgctacccgcgctgaagcggaagagaccctgaccgcgctgagcaagcgtgcgcgtgacgttgaatccgatccgtgtgaaatcaagtcaacctttaccgaagtggaaggcagcgtgaagctggacatcgactttgttttcgcctgcgaagcggaaacgctgattttccagctgggcctgcgttaa

SEQ ID NO: 19855 - DNA, 1326 bp, Enterobacter cloacae
atggtcatgagccagaaaaccctgttcaacaagactgcgctggcagtcgcagtggcactcgtctccacttccgcctggtcagcgggctttcagttaaacgaattttcttcctctggccttggccgcgcgtattcaggggaaggcgccattgctgatgatgcgggtaacgcgagtcgtaaccccgcgttgatcatgatgttcgatcgtccgaccttctctgccggagcaatttttgtcgatccaggtgttgatatctcgggccgttctccgacaggtgccgatctgaaatcggataacattgccccaacggcatgggttccaaacatgcactttgtggcgccgattaacgaccagttcggttggggcgcatccgtgacctctaactacggtttagcaaccgagttcaataacgactttgcagctggggcgtttggcggtaaaaccgacctcgaaaccctgaacctgaacctgagcggtgcttaccgtctggataatcactggagtttcggcgttggctttgacgctgtgtatgctaaagcgaagatcgaacgttacgcgggcgacctgggcaaagtcgtcgctggctcaggcgcacttccaccagccctggcacagcgtgtggctggaatcccagcagatactcagatcgcttatctgaagggcgatgagtggggctttggctggaacgccggtatcctttatgaactcgataaaaacaaccgttacggcttaacctaccgttccgaagtaaaaatcgactttgatggagattacaaaagcagcctcccttctgcttataaccagatcctcggcaacttcggtcttccgatgggaaccaatggacaaaccactggcggctctctgagcctgcacttaccagaaatgtgggaattgtcaggttataacaaagtggcgccacagtgggcagttcactatagcctgacctacaccagctggagccagttccaggagctgaaggcgaccaatagcaacggcgacacgctcttctataaagatgagagcttccgtgatgcttaccgcatcgcgctggggacaacctactatatggatgacaactggacattccgcaccggtattgccttcgatgatagtccggtaccagcagacaaacgctctatctcgattccggatcaggaccgcttctggctgagcgctggtgcgacctatgcattcaacaaggatgcttctattgatgcgggcatatcttatatgcacggtcaaaaagttaacttcaaggaaggtccgtatgagttctcttccgaaggtaaagcgtggctgtacggcatgaacttcaactacgcgttc

SEQ ID NO: 19856 - DNA, 750 bp, Enterobacter cloacae
atgaaacttcggctgtcggcgcttgcgcttggcgcgacgatgcttgtgggctgcgccagctccggggagcaaacgggacgctccgatcctctcgaaggatttaaccgctcaatgtatagcttcaactacaacgtactggacccgtatgtggttcgtccggtggcagtagcatggcgcgattatgttccacaacccgcgcgtaacgggttaagtaactttaccagcaacctcgaagagcctgcggtcatggtgaactacttcctgcagggcgacccgtatcaggggatggtccactttactcgcttcttcctgaactccattctggggatgggtggctttattgatgttgcaggtatggctaaccagaagctgcagcgtgaacagccgcaccgtttcggcagtacgatgggacactatggcgtcgggtatggtccgtacgtgcatttaccgttctacggtagtttcaccctccgtgatgatggcggcgatatggtggatacgctgtatccggtcctgtcgtggctgacctggccgctgtcggtgggtaaatggacggtggaagggattgaaactcgcgcgcaactgctcgactctgatggtctgctgcgccagtcttctgatccgtacattatggtgcgcgaagcgtacttccagaatcatgactttattgccaacggcggcaagctgaagcctgaagagaatccaaacgcgaaagcgatcgaaaacgaactaaaagatatcgattcggag

SEQ ID NO: 19857 - DNA, 2223 bp, Enterobacter cloacae
atgaccagatccaattgctggattcaggagactgacatgctctacaaaggcgacaccctgtacctcaactggctggaagatggcattgccgaactggtgttcgatgcccccggctcagtgaacaagcttgataccgcgacggtggccagtcttggccaggcgctggatgttcttgaaaaacaacctgaattaaaagggctgctgctgcgttcgaacaaagcggcctttattgtcggtgccgatatcaccgagtttctttcgctgttcctggtgccggaagaacagctgagccagtggctgcactttgccaacagcgtctttaatcgtctggaagatctgcctgtcccgaccatttccgccgttaacggctacgcgctgggcggcggctgcgaatgcgtactcgcgaccgactaccgtctggcgacgccggacctgcgcatcggcctgccggaaaccaagctgggcatcatgccgggctttggcggctccgtgcgtatgccgcgcatgctgggtgccgacagcgcccttgagatcattgccgcaggtaaagatgtcggcgcagaacaggctcagaaaatcggcctggtcgacggcgtcgtgaagccagagaaactggttgaaggtgcactcgccattctgcgtcaggccattaacggcgatctcgactggaaagccaaacgccagccgaagctggaaccgttaaaactcagcaagattgaagccaccatgagcttcaccatcgccaaaggcatggtgatgcagacggcgggtaaacactacccggcaccgatcacggcggtgaaaaccattgaagcagctgctcgtctcggacgcgatgaagcgctgaagctcgaaaatcagagctttgtccctctggcgcacaccaatgaagctcgcgcgctggtcggtatcttcctcaacgatcagttcgtgaagggtaaagccaggcagctgaccaaaaacgttgaaacgccaaaacatgcggcggtactcggcgcgggcattatgggtggcggcatcgcttaccagtcggcctggaaaggcgtgccggtagtgatgaaagacatcagcgagaaatccctgacgctgggcatgaccgaagcgtccaagctcctgaataaacagctggagcgcggaaaaattgacgggctgaagcttgcaggtgtgatctccaccattcagcccgtgctggaatacagcggtttcgaccgcgtggacgtcgtcgttgaagcggttgttgagaacccgaaagtcaaaaaagcggtgctggcagaaacggaagacaaagttcgtccagagaccgtgctggcttcaaacacctccaccattccaatcagcgaactggcgagcgtgctaaagcgtccggaaaacttctgcgggatgcacttcttcaatccggtacaccgaatgccgctggtcgaagtgatccgtggggaaaaaacctctgacgaaaccatcgctaaagtggtggcatgggcaagcaagatgggcaaaacgccgatcgttgttaacgactgcccgggcttcttcgtcaaccgcgtgctgttcccttacttcgccggcttcagccagctgctgcgcgacggtgcggacttccgcaaaatcgacaaagtgatggagaaacagttcggctggccgatgggcccggcgtatctgctggacgtggtcggcattgataccgcccaccacgctcaggcggtgatggcggcaggcttcccgcagcgcatgcagaaagattatcgcgacgctattgacgctctgttcgacgctaaccgcttcggacagaaaaacggccagggcttctggcgctataaagaagacagcaaaggcaaaccgaagaaagaagaagatgccgtggtggatggtctgctggccgacgttagccagccaaaacgcgacttcaccgacgatgagatcatcgcccgcatgatgattccaatgattaacgaagtggtgcgttgcctcgaagaaggcatcatcgccagcccggcggaagcggatatggcgctggtatacggcctgggcttccctccgttccacggcggcgcgttccgctggctggacacgctcggcagcgcccgctatctcgatatggcccagcagtatcagcacctcggcccgctttatgaggtgccggaagggctgcgtaacaaagcgcgccataacgaaccctactatccagcagttgagccagcccgtccggttggcgacctgaaaacggct

SEQ ID NO: 19858 - DNA, 1160 bp, Enterobacter cloacae
atggaaaaggttgtcattgttgatgcgattcgcaccccgatgggccgttcaaaaggcggcgcgttccgtaacgtgcgtgcggaagacctctccgcgcatctgatgcgtagcctgctggcgcgtaacccggcgctggatcctgctgcgctggacgatatctactggggctgcgtgcagcagaccctggagcagggcttcaacatcgcccgcaacgcgtcgctgctggcggagatcccgcattcggttccggccgtcaccgttaaccgcctgtgcggttcatcaatgcaggcgctgcacgacgctgcccgcatgatcatgaccggcgatgctcaggcctgcctggtgggcggcgtcgagcacatgggccacgtgccgatgagccacggggtcgatttccacccaggcatgagccgtaacgtggcgaaaccgcggggatgatgggcctgaccgccgagatgctctctcggctgcacggcatcaaccgtgaaatgcaggatgcctttgccgcgcgctctcacgctcgagcatgggcgtcgacgcagtccggcgcctttaagaatgagatcatcccgaccggcggccacgacgctgacggcgtactgaagcagttcagctacgacgaagtcatccgcccggaaaccaccgtagaagcgctttctaccctgcgccctgcgtttgatccggtcaccggtacggtaacggcaggtacttcgtcggcactgtccgacggtgccgccgcgatgctggtgatgagcgaaagtcgcgcccgcgagctgggcttaacgcctcgcgctcgggtacgttcgatggcggtcgtgggctgcgatccttcaatcatgggttacggcccggttccggcctcgaagctggcgctgaaaaaagcgggattaaccgccagcgacatcgacctgtttgaaatgaacgaagcgttcgccgcgcagagcctgccgtgcattaaagatctggggctgatggagcagatcgacgagaagattaacctcaacggcggcgcgatcgccctcggtcacccgctgggctgctccggagcgcgtatcagcacaacgcttatcaacctgatggaacgcaaagatgcccagtttggtctggcaacgatgtgtatcgggctgggtcagggtatcgcgacggtgtttgagagagtg

SEQ ID NO: 19859 - DNA, 699 bp, Enterobacter cloacae
atgacaaccttaagctgtaaagtgacctcggtagatgccatcaccgacaccgtatatcgcgtccgtttagtgccagaagcgccattctctttccgcgcgggtcagtacctgatggttgtgatggatgagcgtgataagcgtcctttctctatggcctcaacgccagcggagcaggaatttattgagcttcatattggtgcgtcagagcttaacctgtatgcgatggcggtgatggatcggatcctgaaggaacgtgaaatcgtggtggatattccgcacggcgatgcgtggctgcgcgatgacgaagaccgtccgctgatcctgatcgctggcggtacgggcttctcttatgtgcgctctattctgttgacagcactggcgcgtaaccctgaccgcgacatcaccatttactggggtggccgcgaagagaaacatctgtacgacctgtcagagctggaagcgctgagcgtaacccatcctaacctgcgcattgagccggtggttgagcagccggaagagggctggcgtggtcgtagcgggacggtgctgacggcggtgctgcaggatcacggcacgctggcagggcacgatatctacattgctggccgttttgagatggcgaaaattgcccgcgacctgttctgtaacgaacgtgacgcgcgtgaagaccgcctgtttggcgatgcgtttgccttcatt

SEQ ID NO: 19860 - DNA, 780 bp, Enterobacter cloacae
atgtttgatatcggactcaacctgaccagctcgcagtttgcgaaagatcgtgatgaggtggttgcgcgcgcgtttgccgccggggtgaaaggactgctgctgacgggcaccaacctgcatgagagcgagcaggcgcagcagctggctcaaggctacgatcgctgttggtctaccgctggcgtgcatcctcacgacagcagccagtggacagcggaaagtggcgacaccctgtacaggctggcgaagacgccagaagtggtggcgatcggcgaatgcggtctcgatttcaaccgtaatttttccacgcctgaagagcaggaaaaggcgtttactgcccagcttgcgctcgcagcagagcttgaaatgcccgtgtttatgcactgccgcgacgcgcatgagcgtttcctggcacttctggatccgtggctggagaaactgcccggcgcggtgctgcactgttttaccggctcacggcaggaagcgctggattgcctgaagcgagggctttatctgggtattaccggctgggtttgcgatgagcgccgcgggcttgaacttcgtgagctgttgccagtaatcccggctgaccggctgctcctcgaaaccgatgcgccttatctgctaccgcgcgatatgaaatccaaacctgcatcgcggcggaatgagcccgcgtatctggggcacattgttgagagcgtcgcgaagtggcgcggagaggatccgcactggctttcggcgcagacggatgacaacgtgcgtaatctgttcaggataaacgtt

SEQ ID NO: 19861 - DNA, 945 bp, Enterobacter cloacae
atgcagaaccgccttacgattaaagacatcgcgcgtttaagcggcgtggggaaatcgaccgtctcacgcgtgctgaacaacgaaagcggcgtcagcgaacgcacccgcgagcgcgttgaggcggtcatgaatcagcacggtttttctccttcccgctccgcgcgcgccatgcgcgggcagagtgacaaagtcgtcgccattattgtctcgcgtctggactctctgtctgaaaatctcgccgtgcagaccatgctgcccgccttctacgagcaggggtatgatccgatcatgatggagagtcagttctctgtgcagctggttgaagagcacctgggcatgctccagcggcgcaacattgacggtgtggtgctgttcggttttaccggcattaaggacgagatgctaaaaccctggcagccttcgctggtgctgctggcgcgcgatgcccacgggtttgcctccgtctgctatgacgacgagggcgcgattatcaccctgatgcagcgcctgtttgacgaaggccatcgccacatcagcttcctcggggtcccgcacgcggacgtcaccaccggcaagcgtcggcatgaggcctacctggctttttgcaaaaagcacaatctctccgccgtggcctccctgccggggctgggcatgaagcagggctacgagcaggtcgccagcgttctgacgccgcagaccacggcgctggtgtgcgccacggataccctggcgctgggtgcgagcaaatatctgcaggagcagcgcatcgataacctgcaggtggcgagcgtcggcagcacgccgctgatgaagttcctgcacccggaaattatcaccgtcgatccgggctacgccgagtccggcaggcaggccgccgcgcagctgatcgagcagataaacgggcgttcagagccccgtcagatcgtcattcccgctcacctttcg

SEQ ID NO: 19862 - DNA, 2706 bp, Enterobacter cloacae
atgtttaaaaatatcacccggcagctgcaggcgctgctgagccgccacctgccacaccgtcttgttcagcgcgacccgctgccaaacgccaaaaacatggcgggggcggcgatccccgcgtccctgaccgaacgctgcctgaacgtggcggcgatggatgaaaacgaagtatggcgcgcgttcggcggacacccggaagggctcaacgcggccgaagtggaaaaaatgcgcgccgtacacggcgataaccagatcccggcgcaaaagccgtctccgtggtgggtgcacctgtggctctgctaccgcaacccgttcaacctgctgctgaccgtgctcggcctcatctcctacgcgacggaagatctgtttgccgcaggggtgattgccctgatggtgggtatctccacgctgctgaactttattcaggaggcccgctccaccaaagcggcggacgccctgaaggcgatggtcagcaacaccgcgaccgtctcgcgcgtgattaacgatctcggcgaaaacgcctgggtggagctgcctatcgaccagctggtgccgggcgatctggtgaagctggccgcgggagacatgatcccggcggatttacgcatcatccaggcgcgcgatttgttcgtggcgcaggcctcgctgaccggggaatccctgcccgttgaaaaggtagcgcgcagccgcgacccgcagcagatgaacccgctcgagtgtgacaccctgtgctttatgggcaccacggtggtcagcggcaccgcgcaggcgattgtcaccgccaccgggggcaacacctggtttggacagcttgccgggcgcgtcagcgagcaggagagcgagccaaacgccttccagaaagggattggccgcgtcagcatgctgctgatccgctttatgatggtgatgacgccgatcgtgctgctgatcaacggctacaccaaaggcgactggtgggaagcggccctgtttgcgctttccgtggccgttggcctgacgccggaaatgctgccgatgattgtcacctccacgctggcgcgcggggcggtgaagctctctaaacagaaagtgatcgttaaacacctcgacgccatccagaactttggcgcgatggacatcctctgcaccgataaaaccggcaccctgacgcaggacaaaatcgtgctggagaaccacaccgatatctccggcaaaaccagcgagcgcgtcctgcacagcgcgtggctgaacagccattaccagaccgggctgaaaaacctgctcgacgtcgcggtgctggaaggggtggacgaggaatccgcccgcacgctctccggccgctggcagaaggtggatgagatcccgttcgacttcgagcgccgccgcatgtcggtggtggtgagcgagcagacggacgtgcaccagctgatctgcaaaggggcgctgcaggagatcctcaacgtgtcgacgcaggttcgctataacggcgacatcgtgccgctggacgacaccatgctgcgccgcatcaagcgcgtcaccgataacctgaaccgtcaggggctgcgcgtggtggcggtcgcgagcaagttcctgcccgcgcgcgagggtgactatcagcgtatcgatgaatccgatctgatcctcgagggctacatcgccttcctcgatccgccgaaagagaccaccgcgccggcgctgaaggcgctgaaggcgagcggtattaccgtcaaaattctcaccggcgacagcgagctggtggcggccaaagtgtgccatgaagtggggctggacgcgggcgacgtggtcgtggggagcgatattgaacatctctctgatgacgagctggcgaagcttgcccagcgtaccacgctgtttgcccgcctgacgccgatgcacaaagagcgcatcgtcaccctgcttaagcgcgaaggacacgtggtgggctttatgggagacggcatcaacgacgcgcccgcgctgcgtgcggcggacatcggtatctccgtcgatggcgcggtggatatcgcccgcgaggcggcggatatcattctgctggaaaagagcctgatggtgctggaggagggcgtgatcgaaggtcgccgtacctttgccaacatgctcaagtacatcaaaatgaccgccagctccaacttcggtaacgtcttcagcgtgctggtggcgagcgcgtttctgccgttcctgccgatgctgccgctgcacctgctgatccagaacctgatgtacgacgtgtctcaggtggcgatcccgtttgataacgtggacgacgagcagatccagaagccgcagcactggaacccggcggatctcgggcgctttatgatgttctttgggccgatcagctccatcttcgacattctgacgttctgcctgatgtggtttgtgttccacgccaacaccccggaacaccagacgctgttccagtccggctggtttgtggtaggtctgctgtcgcagacgctgattgttcatatgatccgtacccgccgcattccgttcatccagagccgtgccgcatggccgctgattgtgatgacgggcattgtgatggcgctcggtatcgcgctgccgttctcgccgctggcaggctatctgcagcttcaggcgctgccgctgggctacttcccgtggctggtggcaatccttgcgggctatatggtgctgacgcagatggtgaaaggattctatgcgcgtcggtatggatggcag

SEQ ID NO: 19863 - DNA, 1401 bp, Enterobacter cloacae
atgggcaagtttaagtttccctccgcttacaccattctcttttttctgattgccgttgtagcggcgctgagctgggtcgtccccgccggtcagtaccagatggcgatgaacgaaaccctcggtaaagaagtcccgattgccggaacgtacgcgcacgtggcggcacatccgcaggggctggtttccgtcctgatggcgcccatcgccgggctgtacgatccggtctccggccaggccggggcgatcgacgtcgcgctgtttatcctgatcatcggcggttttctcgggatcgtcaccaaaaccggggcgattgatgccgggatcgaacgcgtcactacgcgactacgcgggcgcgaggagtggatgatcccgatcctgatggcgctgtttgccgcgggcggcacgatttacggcatggccgaagagtcgctgccgttctacaccctgctggtgccggtgatgctggccgcccggttcgatccggttgtcgccgcctctaccgtgctgctcggggcggggatcggcacgcttggctctaccattaacccgtttgccacggtgatcgccgccaacgccgccgggatccccttcactaacggtatcgccctgcgcgtggcgctgctggtcatcggctggatcatctgcgtggcgtgggtgatgcgctacgcccgtaaggtgcgccaggatccgtcgctgtcgatcgttgcggataagcaggaagagaaccgcgcccatttcctcggcgacaagggcgaacagtcgctggaattcaccctggtgcgcaaaatcatcctggtgattttcgccctcgccttcgcggtgatgatctacggcgtggcggtgctgggctggtggatggcagagatctcggcggtgtttctcgccagcgcgattatcgtcggcctgattgcccgcatgagcgaagaggagctgacgtcgacgtttatcaacggcgcgcgagatttgctgggcgtcgcgctgattatcggcatcgcgcgcggtatcgtagtcatcatggataagggcatgattacccacaccattttgcacagcgcggaagggcttgtcagcgggttgtccacggtagcgtttatcaacgtgatgtactggctggaggtcgtgctgtcgtttcttgtgccttcttcatccggcctggccgttctgacgatgccgatcatggcgccgcttgccgatttcgctaacgtcaaccgcgacctggtggtgacggcttaccagtcggcctccggcatcgttaacctcgtcacgcccacttctgccgtcgtgatgggcgggctggctatcgcccgcgtgccctacatgcgttatctgaaatgggtggcgccgctgctgggcattttaacggtggtgattatggtggcgttaagtctgggtgccttgttg

SEQ ID NO: 19864 - DNA, 582 bp, Enterobacter cloacae
atgacgcttcaacctgcttttaccctggccgtccaggatgcccaacacagttttcgtcgcctgctgaaggcgatgagcgagccgggcgcgatcgtctcgctgcaccagctctcccagggctggctgccgctgaatctggcgaccaccagcgtgctgctgacgcttgccgacaacgacaccccggtgtggctttcgggcgcgctgtcgaacgatatcgccagccagaacctgcgttttcacaccagcgctccgctggtcgatcagccccagcaggcggtttttgccgtggccgatgaacaaatcagccatgagcaattgaacgccctgagcgaaggcagcaccgtcgccccggagaccagcgccaccctgattttgcaggtctccagcctgagcggcggccgcatgctgcgcctcacgggggcaggcatcgccgacgagcgcatggtcgcgccgcagctgccggagtgcatcattcacgagctgaccgagcgcccgcacccgttcccgctgggcattgacctgatcctgacctgcggcgagcgcctgctggcaatcccgcggaccacccacgtggaggtgtgc

SEQ ID NO: 19865 - DNA, 273 bp, Enterobacter cloacae
gtggcttctgtttctatcagctgtccctcctgttcagctactgacggggtggtgcgtaacggcaaaagcaccgccggacatcagcgctatctctgctctcactgccgtaaaacatggcaactgcagttcacttacaccgcttctcaacccggtacgcaccagaaaatcattgatatggccatgaatggcgttggatgccgggcaaccgcccgcattatgggcgttggcctcaacacgattttacgtcacttaaaaaactcaggccgcagtcgg

SEQ ID NO: 19866 - DNA, 954 bp, Enterobacter cloacae
atgaaaattgcgctggtcattttcatcacccttgccctggcaggttgtgcgctgttatcactccatatgggggtgatccccgtgccgtggcgcgcgctgctgaccgactggcaggacggacgcgagcattattatgtattgatggagtaccgactgccgcgcttgctgctggcactgtttgtcggtgcagccctcgccgtggcgggcgtgctggtacaggggattgtgcgtaacccgctagcatcaccggatattctcggcattaaccatgccgccagccttgcctctgtgggagcactgcttcttatgccatcactatccgtgatggtgctgccgctgctggcctttgcgggcggtatggcggggttgatcttgctgaagatgctggcaaagacccaccagccgatgaagctggcgctcaccggcgtggcgctttccgcctgctgggcgagcctgacggattacctgatgctcctgcacccgcaggatgtaaacagtgccctgctgtggctgacgggtagcttatgggggcgcgactggcactttgtgaagattgccgtgccgttgctcattctgtttttgccgctgagcctgcgcttttgtcgcgatctcgacctgctggcgctgggcgatgcacgagcagccacgctcggcgtgtcggttcagcgcacccggttccaggggctgatgctggctgtcgcgatgacagcaaccggcgtggccgtctgtggcccgataagttttattggtctcgtcgtgccgcacatggtgcgcaggatcgccggcgggcgtcaccgctggctgatgcccgtttcggccctgacgggcgcgttgttgctggtcattgccgatctgctggcacgaatcattcatccgccgctggagcttccggcaggcgtgctgaccgccattatcggcgcaccgtggtttgtctggctgcttgtgagaatgcga

SEQ ID NO: 19867 - DNA, 765 bp, Enterobacter cloacae
atgagattacgtactgaaaatctgaccgtcagctatggcgcacaaaccgtgctggatggactttctctcgccctgcctgccggaaaaatcacggccctgctcggccctaacggttgcgggaaatcgacgctgttgaactgtttttctcgcctgttaacaccagactctggcgagatattgcttgatgaaaaacccatagccggtttttccgcccgccagctggctcgccgcctggctttactgccgcaacaccatttatcccccgaggggatcactgtacgggaactggtttcctacggccgcagcccgtggctgtcgttgtgggggcgactctccgcggaagacaacgagcgggtcaacgtggcaatgagtcagacccggacgcgcaatctggctgaccgcaggttaacccagctttccggcggccagcgccagcgtgcgtttctggcgatggtgctggcacaggataccccactcattcttcttgatgagcctacgacctacctcgatatcaatcatcaggttgaactgatgcgcctgatggttgaactcaaaaggcaggggaaaaccgtagtgacggtactccacgatctgaatcaggccagccgctattgcgatcatctggtggtactggcaagcggtcgcgtgatggcgcaaggtgctccggaagcagtgatgaaaccagagcttctaaagacggtgttcagcgtagaagcggaaatccatcccgaaccggtatctggcagacccatgtgtgtggtgaag

SEQ ID NO: 19868 - DNA, 957 bp, Enterobacter cloacae
atgaatccttcgttaaccgattcccgccgtcaggcctggcgttcagcttcccactggtatgccgtgctaagcggcgagcgcgtcagccacaacaggaagcgcgctggcaacagtggtatgaacaggatcaggataaccagtgggcctggcagcaggttgaaaacctgcgcaaccagcttggcggtgtgcctggcgacgttgccagccgggcgctgcacgatacccgcctcacccgccgtcacgtgatgaaaggattactgctgttgctcggcgctggcggaggctggcaactctggcagtcggaaaccggcgaaggtctgcgggcagattaccgcaccgccaaaggcgcagtcagccgtcagcaactggaagatgactccctgctcacgctgaatacccaaagcgcggcggatgtgcgttttgatgcgcatcagcgcaccgtccggctctggtacggtgaaatcgccattactaccgccgaaagatgcgcaaaaccgccccttccgcgtcctgacccgtcaggcccaactcaccgctttagggacagaatttaccgtccgccagcaggataatttcacgcagcttgacgtgcagcagcacgccgtggaagtgcttctcgccagtgcccccgcgcaaaaacgcatcgtgaacgctggtgaaagcctgcagttcagcgcctctgagtttggcgcagtgaaaccgctggatgacgagagtacaagctggacgaagggcatcctgagcttcagcgataaaccgctgggtgaggtgatagccacgctaagccgttaccgcaacggcgtgctgcgctgcgatcccgccgttgccgggctgcgcctgagcgggacgttcccgctgaaaaataccgatgcgatcctgaacgttatcgctcaaacgcttcccgttaaaattcagtctattacgcggtactggataaacatttcaccgctgtaagaa

SEQ ID NO: 19869 - DNA, 2322 bp, Enterobacter cloacae
atgacgccgttacgcgtttttcgtaaaacaacacctttggttaacgccattcgcctgagcctgctgccgctggccggtctctcgttttccgcttttgctgcacaggttgatatcgcaccgggatcgctcgacaaagcgctcaatcagtatgccgcacacagcggaattaccctctcggttgacgccagcctgacgcgcggcaagcagagcaacggcctgcacggagattacgacgtcgagagcggcctgcaacaactgctggacggcagcggactgcaggtaaaaccgctgagaaataacagctggacgctggagaccgcgcccgcgccaaaagaagatgccctgaccgtggtcggcgactggctgggcgatgcgcgtgaaaacgacgtatttgaacatgctggcgcgcgtgacgtgatccgccgtgaggatttcgccaaaaccggcgcaaccaccatgcgtgaggtgcttaaccgcatccctggcgtcagcgcgccggaaaacaacggcaccggcagccacgacctggcgatgaactttggcatccggggcctgaacccacgcctcgccagccgctcgaccgtcctgatggacggcatccccgtcccctttgccccttacggtcagccgcagctttcactggctcccgtttcgctcggcaacatggatgccattgacgtggtgcgcggtggtggtgcggtgcgttacggaccgcagagcgtgggcggcgtggtgaactttgttacccgcgccattccgcaggactttggtatcgaggcgggggtggaaggtcagctcagcccaacctcttcacaaaacaacccgaaagagacgcacaacctgatggtgggcggcacagcggacaacggttttggcaccgcgctgctctactccggcacgcgcggcagtgactggcgcgagcacagcgccacccgcatcgacgacctgatgctgaaaagcaaatatgcgccgaatgaggtgcacaccttcaacagcctgctgcaatattacgatggtgaagccgacatgcccggcggcctgtcccgcgcggattacgacgccgatcgctggcaatccacccgcccgtatgaccgcttctggggccgtcgcaagctggcgagcctgggctaccagttccagccggacagccagcataaattcaacattcaggggttctacacccaaaccctgcgcagcggctacctggagcaaggcaaacgcatcaccctctcgccgcgtatctactgggtgcgcggtattgagccacgctacagccagagctttatgatcggcccttccgcgcacgaagtgggcgtgggctatcgctatgtgaatgaatcaacgcatgaaatgcgttactacaccgccaccagcagcgggcagttgccgtccggctcaagcccttacgaccgcgacacgcgttccggcaccgaggcgcacgcctggtatctggatgacaaaatcgacatcggcaactggaccatcacgccgggtatgcgtttcgaacatatcgagtcataccagaacaacgccatcaaaggcacgcacgaagaggtgagctataacgcaccgcttccggcgttgaacgtgctctatcacctgactgatagctggaatctttatgcaaacactgaaggctcgttcggcaccgtacagtacagccagattggcaaggctgtgcaaagcggcaatgtggaaccggaaaaagcgcgaacctgggaactcggtacccgctacgatgacggcgcgctgacggcggaaatggggctgttcctgattaactttaacaatcagtacgactccaaccagaccaacgacaccgtcactgcacgtggcaaaacgcgccataccgggctggaaacgcaggcacgttacgacctgggtacgctaacgccaacgcttgataacgtttccgtctacgccagctatgcgtatgtgaacgcggaaatccgcgagaaaggcgacacctatggcaatcaggtgccattctccccgaaacataaaggcacgctgggcgtggactacaagccgggcaactggacgttcaatctgaacagcgacttccagtccagccagtttgcggataacgccaatacggtgaaagagagcgccgacggcagtaccggccgcattcccggcttcatgctctggggcgcacgcgtggcgtatgactttggcccgcagatggcagatctgaacctggcgttcggtgtgaaaaacatcttcgaccaggactacttcatccgctcttatgacgacaacaacaaaggcatctacgcaggccagccgcgcacgctgtatatgcaggggtcgttgaagttc

SEQ ID NO: 19870 - DNA, 900 bp, Enterobacter cloacae
atgttggcatttatccgttttctttttgcaggcctgctgctggtgatcggccacgcctttgccgccacggttcaggacgaacacggcacgtttacactcgataaaacgccacaacggattgtggtgctggaactctcgttcgccgatgcgctggccgccgtggacgtcagcccgatcggtattgccgacgataacgatgcaaaacgcatcctgcccgaagtgcgtgcgcacctgaaaccgtggcagtccgtcggaacgcgcgcgcagccgagcctggaagccattgctgccctgaaaccagacctgatcattgccgacagcagtcgccatgcggggatttacactgccttgcagcaaatcgcgccggtactgctgcttaagtcccgcaacgaaacctacgctgaaaatttgcactcagcggctatcatcggcgaagtggtaggtaaaaaacgagagatgcaggcgcgtctggaacaacataaagagaagatggcgcagtggtccagccagcttcccacagggacacgcgtggcctttggcacatcacgcgaacagctattcaacctgcatacccaggagacctggaccggcagcgtgctggcttctctggggctgaacgttcccgctgcgatggcgggcgcgtccatgccgtccatcggcctggagcaactgctggcggtcaatcctgcctggctgctggttgcccactatcgcgaagagagcattgttaaacgctggcaacaagatccgctctggcagatattaaccgccgcgcagaagcagcaggttgcttcagtcgacagtaacgcctgggcgcggatgcgcggtatttttgccgcagagcgtattgccgctgacacggtaaaaatcttccaccatcagccgcttaccgatgtgaaa

SEQ ID NO: 19871 - DNA, 1497 bp, Enterobacter cloacae
atgagtctgatatcagggtttgttaaatcgctgtctaagttatcgatgattggtcgcgccttaatgctgccaatttcactgcttcccgctgcaggcctgctgctggccttcggcgataagttccatctgccgctgatgatgaacgcgggcggggttatctttgataacctgccgatgctgtttgccattggctccgccgtgggtctggcgtcagaatccggcatcgccgcgctgtctgcggcggtttcggtgtttgtcacgaatatcaccatcagcaccgtgctgagcatcacgccggaaatggcctcccagggcgggaaatacgccatggtcgtcggcatcccgacgctgcagatgggcgtcttcggcggcctgatctgcggtattctcgcggcctggtgctataaccgcttccacaccatgcagctgccggaattcctgggcttcttctccggcaagcgcttcgtggccattgcaactgcgttcctctcgttcctgatgggtctgctgctgccgtacgtgtggcagcatatccaggccggtatcgacgcgctctccgtggtggttaacggcgataatcaggcggcgtcgacctttatcttcggtctggtagagcgcgcgctgatcccgctcggcctgcaccacatctggtatccgtccttctggtattcgttcggggattacaccacccaggcaggacaggtgatccacggcgaccagaccatctggttcaagatgctggaagaaggagtgaaatccttcagcagcgacacctaccagaatgccggtaaattcatgcagggcgaattcccgctgatgctgttcgcgctgcccgccgcgtgcctggcgatgtatcacgaagcccatacgaagaataagaaaatcgcggccggtattctgttctccgcggcgctgacctgcttcctgacggggatcacggaaccggtcgagtttacctttatcttcgtggcgccgatcctgtacgtctttaacgccatcatggcgggcctggcctacatgaccatgtatctgctgcatgcgcatatcgccaagtcgttctccgcaggttttatcgactatctgtcattcgggatcctgccgtcctttaacggttatcagaccaacttcctgaatgcgattatcatcggcattccgatgggcctgatttattacttcacgttccgctttgtgatccgtcgtttcgacgtgaaaacgccgggccgcactgaagtgaccgccaacgcggatgataagtctgattcagaactcgcgaccgagatcattaccctgctgggcggggcgcataacatcgactccgtcggctcgtgtatcacccgcctgcgcctggaagtcgcaaaaagcgaggtggtagacagagacggcctgaacggactcggcgcgcgcggcgtggtcttcgtcggcgacaacggtattcaggtgattttcggtgccagagcacagtttatcgcccagaccatgtccaccatgatcggcaaa

SEQ ID NO: 19872 - DNA, 1383 bp, Enterobacter cloacae
atgttaaaaatctttaatacaatgacgcgccagaaagaggaatttaaacctatccatgccggggaagtcggcatgtacgtgtgtggtattacggtttacgatctctgtcacattggccatggccgtacctttgtcgcttttgacgtggtgtcacgctacctgcgttttctgggctacaccctgaaatacgtgcgtaatatcaccgacatcgacgacaaaatcatcaagcgcgcaaatgaaaacggcgaaagcttcgttgcgctggtcgatcgcatgatcgtcgagatgcataaagattttgacgccctgaatattcagcgcccggacagcgagccgcgcgcaacccaccacattcacgaaattattgagatcaccgaaaagctgatcgcacgcggccacgcgtacgttgcggacaacggtgacgtgatgttctccgtgccgacggacccaacctacggttcgctttcccgtcaggatctggaccagcttcaggccggcgcgcgcgttgacgtggttgacgtgaagcgtaacccgatggacttcgtactgtggaaaatgtccaaagagggcgagccaagctggccatccccgtggggcgaaggccgtccgggctggcacattgaatgttccgcgatgaactgcaagcagctgggcaagcacttcgacattcacggcggcggttcggatctgatgttcccgcaccatgaaaatgaaatcgcgcagtccacctgcgcccacggcggcgagtacgtcaactactggatgcactccggcatggtaatggttgaccgcgagaagatgtctaaatcgctgggtaatttcttcaccgtgcgcgacgtgctgaaatattacgacgcggaaaccgtgcgctacttcctgatgtccggccactatcgcagccagctgaactacagcgaagagaacctgaaacaggcgcgctcggcgctggagcgtctgtacaccgcgctgcgtggtaccgacagatcagttcctgctgcgggcggcgaagcgttcgaagcccgctttgttgaggtgatgaacgacgacttcaacaccccggaagcgtactccgtgctgttcgacatggcgcgcgaagtaaaccgcctgaagtcagaagatatggccgcggcgaatgcgctggcatcccatctgcgtaagctctcctccgtgctcggcctgctggagcaggatccggacgcgttcctgcagagcggtgcgcaggcggatgacggtgaagtggcggaaattgaagcgttgatcaaagcgcgtctggaagcgcgtcaggcaaaagactgggcggcggcagatgcggcgcgtaaccgtctgaccgagatgggcatcattctggaagatggcccgcagggaacgacctggcgtcgtaag

SEQ ID NO: 19873 - DNA, 569 bp, Enterobacter cloacae
ttgcccttcctgtttttgattctgatgaccttccgcgcggcggcagcggacacgttactgattctcggcgacagcctgagcgcaggctatcgcatggcggccagcgcggcctggcccgcgctgctcaacgacaaatggcagagcaagacgtcggtaatcaacgccagcatcagcggcgatacctcgcagcagggcctgtcgcgcctgcctgcgctgctcaaacagcatcagcctcgctgggtgctggtggagcttggcggtaacgatggattgcgcggttttcagcctcagcaaaccgagcaaacgctgcgcaccattttgcaggacattaaggcggcaaacgcccagccgctgctgatgcaaattcgcctgcccgccaactacggtcgtcggtataatgaagcctttagcgcgatctaccctaagcttgccaaagagtttgatattccgctgctgccatttttcatggaagatggctatgtcaaaccccagtggattcaagacgacgggatccacccaatcgcgatgctcagccgtttattgccgactggatggcaacgcggctggct

SEQ ID NO: 19874 - DNA, 3675 bp, Enterobacter cloacae
atgcgcaaaattttacttaccattgacaggtttgaacactatggtcaacacgagagtatcttttttgatttgatagaatattttcatcgtcacaactggcaggtcgatgtttttgccaaaaccacgggtcggtattggctcaacaatttgaatattataaacgaaaataaaaccattcgcttgttggaacaacccgatggtcagttgcacgctttctatgacctgatgtggatatttaacggctatatacccgccgagctgaacacgatttttatgcaaggagactgggtttccagagtcttcttccatcacttttacagttacgctgattatgatttaccctacggcgctgatgtggaaaatgcgctttcctgcaacagttttgcctgctctaccgctagctatgtccgcttagttgaaaagggaattaaacaacctcgaatcaagattttcccgctcacccttaataatcaatttgcgtctgcctcaggtgtattcactgataaactcgaaaaagcactgctgatctccagtgggtataataaaaatttagttgagctcaccgagtcattccagaccagaaatattgaactggattactataatctcgactctgcgccaggtcctgtaacgccagcgttgctgtcacaatatcagcttattattggtgatgaagcccgagttgtacttgccatgggcatgggtttaccagttgtgatatcagacggtatttcctcacacggttatctatcagaagcaaatctgctggaacgcagagcttatcactttgcactgacaggtgctcccaaaatcgctaaccaaaaccgctggataaaagagatccttgacggttactctcaggcagcccaatgggcttgggaataccgggctgaagcaaacgcgcagctttctttagacgcctgtgttggacggatactcgaacgtctgcctgcgccaaaagtattaaaaatttcgcaagaacagtaccgcaatctcgagtttcaccgcaaggttatggacagtttcggagaagaaacaacgcggtcagtcggtagctggatgaatgatagaaaaccgacatcattgcgttccgcaattataggtacgttgcttcagtctttccctgcctgcgccagtatttcggtcataatcatcgatcgtgaaggcgaacgagataagctgcgtgcgagtttacgctctgttaataaccagacattaagtgccgattcactcatcgtcgtaggtaagcaaccatcgcattctattactgacgattcgacaatacgcttcgtgggtgatctgaatctggcggtggacgggatcgcatccgctaatttgctcattatagaggcaggcgatatcctggaagagcatgcactacttacctgtgccgagtttacgatgcgggatccgcagaaggcgttttggtattttgatgaactcattatccgtgatgataaggaagatggcttaattcttaagccggaatgcgatatagatatgttgcgtgcgcatccttatatcggctccagtgcctttatttcgacagatgcattacgtcggcgcaatggatttaatccagactgcctgtatctcagtcatatcgatctttgctggaaattaattgaagaagaaggaccgttcgcggtcggtcatattcctgaggcgctggtcgccagaaccatcagtatgagcgaatggtgtaaaaaacccgctatcattgatgaaatgaaaaatatcaccgccgcacatctctcacgctgcggcatacgtgcaacgatcgcatccggcgaagagcctggcgtccagttcgtgacgtatcaacttcccgctatcgcgaaggtgtcggtgattattccgaccagggaccgtctggtgttgctccagcgctgtattgattctttgatggagaaaactgcttaccatcagtatgaaatcatcattgttgacaatggttcaactgatgaggatgcgagaaggtatctggatcagctagagtcgatgcaactgactcaaattagagttctgcgctgggaaactgcattcaactttgctgctatcaacaactacgctagccgttatgcaacaggtgagtacctgttgttcatgaacaatgatattgaaattcacgatggcaactggatgggggctttagtcgaactcactcaacgcccggaagtcgctattgtcgggagtaaacttgaatatccggatggtacgctggagcatggtgggtatattacaggcatcaatgacggcgtggttgtctgtgggaaagggagctcaccggatgacactggcttccttagccggctgaagatccctcggggcgctcatgcagtaagtgcagcatgcatgatggtgcgtaaagacgtatttgatgagcttggcggattcgatgaggagaatttcccgatctactatgctgacgttgatttggcattaaaagcgaaagcgcaagggtatataaccctgtggacaccgtttagccgagttaagcaccttggcggacttcgcgttttgtaccctgaaaaatttgcagtcgctactcatgctgatgtattatacaatgatgtgctgttggagaagtggggagcagaactggcacgtgatccttattacaatccaaatatgaatcgtctcgggtcgacattcagcctgaacacacgcatgtcgcgcttaccgcatgcgctgcccggaaagccgttacctgtgatcatggggacccacattaactggacaggatgcggaaattatcgcgtcattaaacctcttcacgcgcttcagcaagagttgaaggctgatggaggtttgatcctcggcctgcctacggtgatggaagtagcgcagttccagcccgatcgcctgatccttgaagtgcctatcgccgatgatattccccagacagtacaacgctatcgtcaggtctgtaatgccaaaattattatggaatttgatgattactatttagacgtccctgagaaaaatatcttcagggaaaatgtaccaaaagacatccagaatcgactgacctcggctctggcccaggctgactgggttgtcgtatcaactgagccgctggctgaagcctattctcgttttcattcggatatccgcgtggccaaaaatcgcttggatatagaactgtgggggaacctcaagtccgctaaacgccgcggtaaaaaaccgcgtgtaggttgggcggggggggcgagccatacgggcgatctcgaaatattattaccgatcatttctgaattaaaagatgaagtggaatgggtgtttatggggatgaagcctgaaggcgtcgcgtgcgagttccatttacctgtgccttttgagcattatccgcaaaagctgagtgaacttgatcttgatctggcattggtcccgctcgaacagaatctgtttaacgaatgtaaaagtaatctacgtctcttagaactgggaagttgcggattccccattatctgcacggatatcgagccttatcgctgtggcctgcccgttcatcgggtaaaaaatacccctaatgcgtggattgctgcagttcgtgaatacattcacgactggaacgcgcttgagaaggctggtgaagaactgcgcaaagcagtgcatcgcgactggatgttaagagatggcggtctggatgattggcagcgtgcatggataggc

SEQ ID NO: 19875 - DNA, 660 bp, Enterobacter cloacae
atgagtaatacgcttacgggcaccgataaaagcgtcatcctgctgatgaccattggcgaagatcgcgcggcagaggtgtttaaacacctctcccagcgagaagtgcaaattctcagtgcggccatggccaacgtgcgtcagatctccaacaagcagctgaccgaagtgctggcagagtttgaacaggaagccgaacagtttgccgcgctgaacatcaacgccaacgactacctgcgctccgtgctggtcaaggcgctgggcgaagagcgtgcctccagcctgctggaagacattctggaaacgcgcgataccgccagcggtatcgaaacgctcaactttatggagccgcagagtgccgccgaccttatccgcgacgagcacccgcagattatcgccaccatccttgtccacctcaaacgcggtcaggcggcagatattctggcgctgttcgaagaacgcctgcgtcacgatgtgatgctgcgtatcgcgaccttcggcggcgtccagccggccgcgctggcggagctgaccgaagtgctgaacaacctgctcgacggtcagaacctcaagcgcagcaaaatgggcggcgtgagaacggcggcggaaatcatcaacctgatgaaaacgcagcaggaagaggccgtcattacggcggttcgc

SEQ ID NO: 19876 - DNA, 789 bp, Enterobacter cloacae
atgaaaccaaccaccatctccttactgcagaaatgcaaacaggaaaaaaaacgcttcgccaccatcaccgcgtatgactacagcttcgccaaactctttgccgaagagggtatcaacgtcatgctggtcggagattcgttagggatgacggtacaaggacatgattccaccctgccggtcacggttgaggatatcgcttaccatacgcgtgcggtgcgccgcggggctccagcctgcctgctgctttccgatctgccgtttatggcctatgccacgccggagcaggcattcgaaaacgcggcagcggttatgcgtgctggcgctaacatggtcaaaattgaaggcggcgcctggctggtggatacggtgaagatgctcaccgagcgcgccgtgccggtgtgcggccatttgggcttgacgccgcagtccgtcaacatctttggtggatataaggtgcagggccgcggtgacgccgcccagacgctgctggatgatgctctggcgctggaagccgcaggtgcacagctgctggtgctggagtgcgtgccggttgaactggcgaagcgtattactgaagccctgtcgattccggtgattggtatcggtgcaggcaacgtgaccgacggccagatcctggtgatgcacgacgcctttggcatcaccggcgggcatattccgaagtttgccaaaaatttcctcaccgaagcgggcgacatgcgcgctgcggtcaggcagtatattgccgacgttgaatccggtgtttacccgggtgaagaacacagtttccat

SEQ ID NO: 19877 - DNA, 924 bp, Enterobacter cloacae
atggcaattgcactggagcttgagcagcttaaaaaaacctatccgggtggcgttcaggcgctacgcggaatagatctgaaagtagaggccggtgatttttacgcgcttctggggccgaacggggcggggaaatcgaccaccattgggattatcagctcgctggtcaataaaacgtccggccgggtgagcgtctttgggtacgacctgcaaaaagatgtggtgaacgccaagcgccagctggggctggttccgcaggagttcaacttcaacccgttcgagacggtgcagcaaattgtcgttaaccaggcgggctattacggcgttgagcgtaaagaggccctcgagcgtagcgaaaaataccttaagcagctcgatctgtgggaaaagcgtaacgaacgcgcgcgcatgttgtccggcgggatgaagcgccgcctgatgatcgcccgtgcgctgatgcatgagccaaaactgctgatcctcgatgagccgactgcgggtgtcgatatcgaacttcgtcgttccatgtggggcttcctgaaagatctcaacgacaaaggcaccaccattattctgaccacccactatctggaagaggctgaaatgctgtgccgcaacatcggcatcattcagcacggcgagctggtggaaaacacctctatgaagaatctgctctccaagctgaaatccgaaaccttcattctcgatctggcggcgaaaagcgcgctgccaaaacttgaaggttacaactatcgtctggtggatacctcgacgctggaagtggaagtgctgcgcgagcaggggattaacagcgtgttctcacagctgagcgcgcaggggattcaggtgttaagtatgcgtaacaaagcgaaccgactggaagagctgtttgtctctctggtacatgacaaacaaggagacaaggca

SEQ ID NO: 19878 - DNA, 591 bp, Enterobacter cloacae
atgcagaaagttgttctcgcgaccggcaacgccggtaaagtgcgcgagctggcctcgctattaaatgattttgggctcaacgtggttgcccagaccgatctgggcgtggagtccgccgaagagacggggctgacgtttatcgaaaacgcgatcctgaaagcgcgtcacgccgcgcagattaccggcctgcccgcgattgccgacgactccggcctggccgtggattttctcggcggtgcgccggggatttactctgcgcgctattccggcgttgacgccaccgaccagcagaatctggaaaagctgcttgtcgccctgaaagacgtaccggacgaacagcgcaccgcgcagtttcactgcgtgctggtctatatgcgtcacgcggaagaccctacgccgattgtctgccacggcagctggccgggcgtgattacccatgaagcagctggcaacggcggctttggctacgacccgattttctttgtcccgaccgagggcaaaaccgctgcggaactgacccgcgaagagaaaagcgcgatttcccaccgtggacgcgcgctgaaactgttactggaagcactgcgtaatggc

SEQ ID NO: 19879 - DNA, 729 bp, Enterobacter cloacae
atgcgcattccccgcatttaccatcctgaactgattaccgcaggccgcgaaatcgccttgtctgatgacgccgccaaccacgttggccgcgtgctgcgcatgggcgcaggccaggcaatacagctgttcgacggctcgaaccaggttttcgacgcggaaatcacgcggtctgataaaaaaagcgtacacgttaacgtcctgcgtggcgaagtggatgatcgggaatcaccgctgcacatccatctgggccaggtgatgtcgcgcggcgagaaaatggagttcactatacagaaatccattgaactgggtgtaagcctcattacgccacttttttctgagcgctgcggcgttaaactggatgcggaacgtctgaacaaaaagatccagcagtggcagaaaatcgccattgcggcttgcgaacagagtggccgcaaccgtattccggagatccgcccggcgatggatctggaggactggtgtgcagaagaggaaagcgggctgaagctcaatcttcatccgcgcgccagcgccagcatcaatacgctgcccctgcccgttgagcgcgtacgcctgctgattggccccgaaggcggcctgtcggcggacgaaattgcgatgacggcacgttaccagtttactgatattctgttgggacctcgcgttctgcgcactgagacaacggcactcacggccattaccgcgctacaggtacggtttggcgatctgggt

SEQ ID NO: 19880 - DNA, 699 bp, Enterobacter cloacae
atgaacgacattgcgcataacctggcacaggtccgggacaaaatctcagccgccgcagcgcgctgcggccgtgcttcagaagaaattacgctgcttgcagtcagcaaaaccaagcctgcgagcgccatcgcagaagctattgatgcaggccagcgggcgtttggtgaaaactacgtgcaggaaggcgtggataaaattcgctacttccaggaacaggggaatacggatctgcagtggcactttattggccccctgcagtcgaacaaaagccgtctggtagcagaacacttcgactggtgccacaccatcgatcgcctgcgtattgctacccgcctgaatgaccagcgtccggcagaaatgccagcgcttaacgtgctgattcaggtcaacatcagcgatgaaaacagcaagtccggcattgctctgagtgagctggatacgctggccgcagacgtggccgaactgccgcgcttgaccctgcgcgggctgatggcaattccggcgcctgagtcaagttatgaaaggcagtttgccgtggcacagcaaatggctgtagcatttgaggcgcttaaagcgcgctataacacggtagacacgctttcactgggcatgtcagatgatatggaagccgccatcgcggcaggcagcactatggtgcgcatcggtacggcaattttcggtgcgcgcgactactcaaaa

SEQ ID NO: 19881 - DNA, 978 bp, Enterobacter cloacae
atggatgtggaagaaattgtggctcttagtgtaaagcataacgtctccgatctacacctgtgcagtgattcgccaccgcgctggcgcagattaggtcggcttgaacccgctccttttccgcctcccgatgtcggagcgttattgaaagcgtggctcaacgatgagcagcaggggatatggtgggcaaaggggcaggtggattttgcctcgacggtgacgggaggccagcggctgcgcggcagtgcctttaagcagatgagaggtgtctctgtgacgctgcggctgctgccgcgtagctgcccacagctctcttcgctgggcgcgccgcgggcgatcccggaactgttgtccaatgacgccgggctgattctggtcacgggggcgaccggcagcggcaaatccactacgctggcggcgatggtcgattttctcaaccaccatgctgacggccatatcctcacgcttgaagatccggtggagtttatctaccagagcgaacgttgcttgatccagcagcgggagataggtcagcacagcccgtcatttgctgaagcgctgcgcagcgccttacgccaggatccggacgttattctgctgggggagctgcgcgacagcgaaacgatccgcctggcgctgacggcggcggaaaccggacacctggtgctggcgacgctgcatacgcgcggggcatcgcaggcgattgaacggctggtcgatacgttcccggcgcaggagaaagatccggtgcgtaaccagctgggcggcagcctgcgagcggtgctggcgcagaggctgcttcccgatctgcagggcgggcgcgtcgcgttgtatgaactgctggtgaacacagcggcggcggcgaatctgattcgcgaagggaaaacgtggcaattgcccgggatcattcaaaccggtcagcaggcaggcatgcagaactttgaccagagcctggcggagagacgggcgcaggggcggctg

SEQ ID NO: 19882 - DNA, 414 bp, Enterobacter cloacae
atgagcggaacgcttctggccttcgattttggtaccaaaagcattggcgtcgccgtggggcagcgcatcaccggtaccgcgcgtccgcttacggccctgaaggccaatgacggcacgccagactggaatcttatcgagcgtctgctcaaagagtggcagccggatgacgtgattgttgggctcccgctgaacatggacggcacagaacagccgcttaccgcccgggcgcgtaagttcgccaataaaatccatggccgctttggcgtctccgtgaagctgcacgacgagcgtctgagcaccgtcgaagcgcgcgcgggtctgtttgagcacggcggcttccgggcgctgaacaaaggcagcgtggactccgcttctgccgtcatcatcctcgaaagctatttcgagcagggcttt

SEQ ID NO: 19883 - DNA, 835 bp, Enterobacter cloacae
tggtaccgctggcagtacgacagcgccgggcgcctgctggttcaggacggcacgctacccggacaggagcagtggcgctgggacgctgccggtaacccgctggaaggggctgctgagaaggtcacgcacaaccgcctgacgcagctgaacggcattcgctggcgctatgacatccacggccgcaccgtggaaaaagataacggccagacccgctggcactaccgctacgacggtgaacatccgcctgacggaagtcatcagccagccgcgggacggcaacaagccgcagacgcaggtcagcttccgctacgatccgctcgggcgacgcatcagcaaaacgcgacgccagatactgggcggacagccaaccggcaagccggtcaccacccggtttgtctgggaagggttccgtctgctgcaggaggtgcacggggatgtgccgctgacctacgtctacagcgaacaggacagctacgactccgtggcgcgtatcgatggcgttgattccccggagattttctggttccactgccagcccaacggcacgccggagcggatgacggatatcgaagggcaggtgcgctgggaaggggtgaacagcgcctggggcaagctgctgcgggaaagcgagacgcaggtatcaggatattctcagaacctgcgcatgcagggtcaatacctggaccgcgagacagggctgcactacaatctgttccggtattatgacccggactgcggaaggtttacgcagcaggacccgatagggctggcgggggggataaacctttaccagtatgcgccgaatgcgctggggtgggtggatccgtgggggttg

SEQ ID NO: 19884 - DNA, 198 bp, Enterobacter cloacae
gtgaccggtaacaaccgttcccacgcactgaacgcgactaaacgccgtttcctgccgaacctgcactctcaccgtttctgggttgagagcgagaagcgttttgtcaccctgcgcgtatctgctaaaggtatgcgtgtaatcgataagaaaggcatcgatacagttctgtccgaactgcgtgcccgtggcgaaaagtac

SEQ ID NO: 19885 - DNA, 165 bp, Enterobacter cloacae
atggctaaaggtattcgcgagaaaatcaagctggtttcttctgctggtacaggtcacttctacaccaccacgaagaacaaacgtactaagccggaaaaactggaactgaaaaaattcgatccagttgtacgccagcacgtactgtacaaagaagctaaaatcaaa

SEQ ID NO: 19886 - DNA, 807 bp, Enterobacter cloacae
atgcctgaattacctgaggtagaaaccagccgtcgcggcattgagccccatctggtcggcgcaacgatacttcacgcggtggtccgcaatggacgtctgcgctggccggtgtccgatgagatccacgcgttaagcgataaacccgtccttagcgtacagcgccgcgctaaatacctgctgctggagctgcccgacggctggattattatccacctggggatgtccgggagcctgcgcattcttaccgaagaactgcctgcggaaaagcacgaccacgtcgatctggtgatgagcaatggcaaagtgctccgttacaccgacccacggcgctttggcgcgtggctgtggacgaaggagctggaagggcataacgtgctcgcgcatctgggcccggagccgctctcagacgcgtttaacgcggaatacctcaaggcgaagtgtgcgaagaagaaaagcccgattaagccctggctgatggataacaagctggtggtcggcgtggggaatatctacgccagcgaatccctgtttgcggccgggatccatcccgatcggctggcctcttcgctgtcggcgcaggagtgcgagctgctggtccgggttattaaagccgtattacttcgctcgattgagcagggcgggacaacgttgaaggacttcctgcaaagtgacggcaagccgggctattttgcccaggagctgcaggtgtatggccgtaaaggcgaaccgtgcagagtctgcggcacgccagtgattgccacgaagcacgcccagcgcgccacgttctactgccgtcagtgccagaaa

SEQ ID NO: 19887 - DNA, 1193 bp, Enterobacter cloacae
tggaaaaagtaaaactgcgactttatcagcttacgctgattatgagccttatttcgctcgcgctggcgctgctgagttctggtaagcagcgagagtttttctatattgcgatttatgccagcattatcggcttagcgtgcgaatataaaaaaatcacagtgcgtcctttttctatcgcattgccgatcttgctaattggactgctcaatcttggctggtatctggtgtatgaatatcatagcgaaggtctgaacgtttatagcgattatctcggtgcaagtaaaaagttgattctggcaagtattctcattttttaccttgaccggtttaagtcttatattgataaagcttccttccagaaatattttttatacgcctctggtgcagggtttatacttgccactggctatggcttatggcaggcatcacagggtatgggacgtattgagatggccataaaccgtgcgaccgtgtcggcctatgtttactctgtactgtcgctggcgtttgtatacagcctttatctacagaaaaatataaaactgtatatcaccgcaggactcatcatcttaatatcttattttgttattattctaacgggcacgcgtgccgcaatgggattatatttgatcctggcgaatgtactcacgctttataacttcaaaagaatacaccttaaatcaacgctgattttcttatgtattgtggcgggtattgttatcgttagctacaagccattaattttacccaagttacaacaaacacaaactgaagttgaaagttatcaaaaaggcaatgatgcaacttcactcggcgcacgtttttctatgtggagtgttggtattcaaaatggccttgcccatcctttagggcagtcagttgaagaccgtgaagtatggacacagcaatatgtgaaaaatggacatccacatcttgcatccgcactcgattatatcagggtgcatctacataatgagtttattgaaaaatattcgctgcaggggatccccgggctggtgatattattctttttctatatatcgatgatcgtttacgcacttaaaaacaggaatggcctgctgctgacgaccatgcttcttttattactctatggcctgacggacgtcatactgttgagttcagaagccttaatcttctttgtcaccgtgtttgcgctgagtacacctttttcg

SEQ ID NO: 19888 - DNA, 424 bp, Enterobacter cloacae
atgtttgtcatctggagccatgaaaaagggttcatcatgagtcatcagctcaccttcgccgacagtgaattcagcagtaagcgccgtcagaccagaaaagagattttcttgtcccgcatggagcagattctgccatggcaaaacatggtggaagtcatcgagccgttttatcccaaggctggtaatggccggcgaccttatccgctggaaaccatgctacgcattcactgcatgcagcattggtacaacctgagcgatggcgcgatggaagatgctctgtacgaaatcgcctccatgcgtctgtttgcccggttatccctggatagcgccttgccggaccgcaccaccatcatgaatttccgtcacctgctggagcagcatcaactggcccgtcaattgttcaagaccatcaatcgctggctgg

SEQ ID NO: 19889 - DNA, 1125 bp, Enterobacter cloacae
atgaaacaccatcgtctggtcattgttcgccaaaaatatcgccctgatggcggggcggaacgcttcgtttcgcgcgctctcaccgcgctgagcaatcagaaccttgagctcaacgtcatcacgcgcgagtggcagggagagaagcaagacgactggcatatccacatttgcaaccctcagaaatggggccgtatcagtcgagaacgcggatttgcacaggccgcgcgcgcgctgtggcagcaacagcagtttgatattgttcaaagccatgagcgcatcccggggtgtgatatttatcgcgcgggtgatggggtgcatcgtcgctggctgctgcagcgcgcgcgcattttacctgcctggcgcgcgcaaatgctgatgtatgaccgctatcaccgctatgtgatgcgtgcggaacgggaaatgtatcaggcgcctgagttaaaagccgtaatctgtaatgcggagatgatcaaacgcgaaatcgttgaagactttgatattgacgcaaagaaaattcatgtgatttataattctattgattccagccgcttcgttccggcccaggaggcacagcgtgcgattttgcgccaacaatttggtttgccagccgatgccgttgtgttctgttttgtaggctcagggtttgaacgaaaaggattggccagcgccatacgcgctattgctggaacatctgcctggctgattgtggttgggcaagataaagcagaacgtcgttaccgcgacctcgcccgttcgttaggctgcgaggggcaaatccgtttcctggggatgcaaaaagaaactctgcctttttatcagctatccgatggtttactgttgccaacgctgtatgatccctttcctaacgtcattcttgaagcgatggcctgcggcttgcccgtcattacttcagagagttgcggtggtgcagaatttattcaacaaggccagaacggattttattgtgacgcacttgatatcagtacattgaaggaagcggtagccgctatcccttcactggaaaaaaataacaatatgggacgagcggcacgtgaacgtgtaaaagacgccactcccgaaaaactatcaagtcagcttattacgctttatcaaaaattactggat

SEQ ID NO: 19890 - DNA, 927 bp, Enterobacter cloacae
atgagtattcgcataatcccgcaagatgagctggggtcgagcgagaaacgcacggcggattatattccgccgttgttattccccagactcaagaacctctacaaccgccgcgcagagcgtctgcgcgagctggcagagaacaacccgctgggcgattttctgcgctttgccgcgctggttgcccacgcgcaggaagtggtgctgtacgaccacccgctgcaaatggacctgaccgcgcgcatcaaagaagccagcgcgcagggcaagccgccgctggacattcacgtcctgccgcgcgacaagcactggcaaaagctgctgcattcgctcattgccgagctgaagccggagatgagcggtaccgcgctggcggtcatcgagaatctggaaaaagcctctgacctggagctggaagagatggcgagcgcgctgtttgcctccgacttctctctggtcagcagcgataaagcgccgtttatctgggctgcgctgtcgctctactgggcgcaaatggcaagcctgatccccggtaaagcccgcgccgaatacggcgaggcgcgccagttctgcccggtctgcggctccatgccggtatcgagcatggtgcaaatcggcacgactcaggggctgcgctacctgcactgcaacctgtgtgaaaccgagtggcacgtggtgcgcatcaagtgcagcaactgcgagcagacccgcgatctgaattactggtcgctggaaaacgaagaagcggcggtgaaagccgaaagctgcggcgactgcggcacttacctgaagattctgtatcaggaaaaagacccgaaagtcgaagccgtggccgacgatctcgcctcgctgattctggacgcgaagatggagcaggagggctttgcccgcagctcgatcaacccgttcctgttcccgggtgaaggggag

SEQ ID NO: 19891 - DNA, 633 bp, Enterobacter cloacae
atgagaaaacgtgacaccatcgtgcgctacaccgcgccggaacgcatcaaccactgggtcaccgccttctgcttcatgctggcggcgataagcgggctggggttcttcttcccgtccttcaactggctgatgcaggtactgggtacgccacagctggcgcgcatcctgcacccgtttgtgggcgtcatcatgttcgcgtcgttcatcattatgtttttccgctactggcaccataacctaatcaatcgggatgatatcttttgggcgaagaatattcgtaagatcgtcgtcaacgaggaagtgggtgataccgggcgttataacttcggccagaaatgcgtattctgggcggcgattatcttcctggtcctgttgctggtgagcggcgtgatcatctggcgtccgtactttgcgcctgctttctcaatcccggtgatccgattcgcgctgatgctgcattcatttgccgcagtggcgttaattgtggttatcatggtgcatatctacgccgccctttgggtgaaaggcaccattaccgcgatggtggaaggatgggtaaccagtacgtgggcgaagaaacatcacccgcgctggtaccgtgaagtccgccagaaacaggaaaagtcatctgaa

SEQ ID NO: 19892 - DNA, 741 bp, Enterobacter cloacae
atgtcgacacacatcctttttgagcatccgctcaacgaaaaaatgcgcacctgcgtgcgcatcgaattccttattcaacaactttcacaacatctgccagttaacgatcatgccacggcgttgcacttcttccgcaacgtaggcgatctgctggatgtgattgaacgcggcgatgtccgcacagaattactcaaagagctggagcgccagcagcgtaaattgcaggcatggacagaggtccccggcgtagatcagagccgtatcgacgcgctccgccagcagttgaaaagcagcagtgccgtcctgatggccgcgccgcgcgtcgggcagtttttgcgtgaagaccgcctgattggcctggtgcgccagcgtctgagcattcctggcggctgctgcagcttcgacctgccgacgctgcatatgtggctacatatgccacaggcgcagcgtgacgcgcaggtgaacagctggctggcaagcctggagccaatgcaccagacgctgtcgctgatcctcgatctgatccgtaactctgctccgttccgcaagcaaaccagcctgaatggtttcttccaggataacggtgatgatgccgatcttctgcgtctcaatctgtctctcggcgaacagctttacccacagatttccgggcataagagccgctttgcgattcgttttatgccgctggacagtgaaaatggcaccgtgccggaacgtctcgattttgaactggcctgttgt

SEQ ID NO: 19893 - DNA, 762 bp, Enterobacter cloacae
atggcctacagcaaaattcgccaaccaaaactatctgatgtgattgagcagcagctggagtttttaatcctcgaagggactctgcgcccgggtgagaaacttccgccagaacgcgagctggcaaaacagttcgacgtttcacgtccctctctgcgtgaggcgattcaacgtctcgaagcaaagggcttgctgcttcgtcgccagggcggcggaacctttgtgcaaaacagcctgtggcagagcttcagcgatccgctggtagaacttctctctgaccacccagaatcccagtttgacctgcttgagacccgtcacgcgcttgaaggtattgcggcctattacgccgcccttcgcagcactgatgaagatcgcgtgcgtatccgcgaactgcatcaggccattgaacgggcacagcagtccggcgacttagacgccgagtccagcgccgtcgtccagtatcaaattgccgtcaccgaagcggcccacaacgtggtgctcctccatctgctacgctgcatggagcccatgctggcccagaacgttcgtcagaattttgaattgttgtatgcccgtagggacatgctcccactggtaagcaaccatcgcacccgagtattcgaggcgataatggccggggaaccggagcaggcgcgcgaagcgtcgcaccgccatctggctttcattgaggaaatcttgctggaccgcagccgtgaacaatcgcgtcgcgaacgttcattacgccgcatacagcaacgaaaggat

SEQ ID NO: 19894 - DNA, 435 bp, Enterobacter cloacae
atggacagacaacaaggattcacactcattgagctgatggtggtcattggcatcattgcgattctgagcgccatcggcgttcccgcctatcagaactacctgcgcaaggcggcgctgaccgatatgctgcaaaccttcgttccctaccgtacggccattgagctttgcgcgctggatcacggtggcgtggagagctgcgatgcgggcagtaacggtatcccctctcccaccacgacacgctacgtttcaggaatgagcgtggcgaaagggaccgtgaccttaacaggacaggagagtcttaacgggctggaagtggtcatgacgccgcagtggaacgacggtaacggtatgacgggctggacgcgcgactgcaacatcagtgctgacagcgccctgaaacaggcctgcgaagatgttttccgcttcgacaataac

SEQ ID NO: 19895 - DNA, 819 bp, Enterobacter cloacae
atgcgtaaatctgttgtgttgttactgggaacgtttggtcttttttctggattctcacatgcggatgatggcggtgatgacaccattagcgcgaaagagctaaagacgctttttttcggtcatgacgatcgtacgcgcgtcgtcgatcccacccaggcaccctgggatgctataggccagctggaaaccgccagcggtaacttatgtactgcgacgctgatcaccccgcagcttgcactgacggcaggccactgcctgttaacgccgccaaacggcaagccggataaagccgttgccttgcggtttgtgtcgcaaaaagggacctggcgctatgaaatccacggcattgagggaagggttgatccgtctctcggcaaacgcctgaagccggatggcgacggctggatagtgccaccggcggccgcctcgtgggattatggcctgatcgttttacgctacccgccttcgggcattacgccgctgccgttatttgacggcgacaaggccgccctcaccgccgcgctgaaagccgccgaccgaaaggtgacgcagtcaggctatcctgtcgatcatctggatacgctttatacgcacaccgactgtattgtgacgggctgggcgcaaaccagcgtactctcgcatcagtgcgatacgttgccgggtgacagtggttcaccgctgatgctgaaaaccgacaagggctggcagttgattggtgtccagagctctgccccggcggcaaaagaccggtggcgcgccgacaaccgcgccttgtccgttaccggtttccgcgaccagctggaggcgctggctacacag

SEQ ID NO: 19896 - DNA, 345 bp, Enterobacter cloacae
atggctttgatccccaaaaactacgcgcggctggaaagcggctatcgcgaaaaagcattaaaaatctatccctgggtctgcggacgctgctcgcgcgagtttgtctattccaatctgcgtgaactcacggtgcaccatatcgatcacgaccataccaacaacccggaagatggcagcaactgggagctgttgtgcctgttttgccacgatcacgaacattcgaaatacaccgaagcggatcagtacggcaccaccgtggtggccggggaagacgcgcaaaaagacgtgggcgtcgccacgtttaacccgtttgccgatttaaaagcgatgatggataagaagaaa

SEQ ID NO: 19897 - DNA, 1253 bp, Enterobacter cloacae
gtgagccgtacaacgactattgatatcgatccggcaagagatatcaatgatttacccgcagcaccgcagccggtccagttcattaaacgtggtaccccccaatttatgcgcgtcacgctggcgctcttttccgccggtctggcgaccttcgccctgctctattgcgttcagccgatcctgcccgttctctctcatgagtttggcgtatcgcctgccagcagcagcgtttcactctctatttctaccggcatgctggcgattgggctgctctttaccgggccgctgtccgacgccattggccgtaaaccggtgatggtgaccgcgctgatgctggcgtcggtctgtacgttactctcgaccatgatgaccagctggcacggcattctggtaatgcgcgcgctgattgggctctcgctcagcggcgtggcggcggtcgggatgacctacctcagcgaggagatccacccgagctttgttgctttctctatggggctttacatcagcgggaactcgattggcggaatgagcggccgcctgctgagcggggtgtttacggacttctttaactggcgtattgcgctggcggtaatcggatgttttgcgctggcatcggccctgatgttctggaaaattctgccggaatcgcgtcatttccggccgacatcgctacgcccgaaaacgctgtttatcaacttccgcctgcactggcgcgacaaaggtttgccgcgcctgtttctgatgggattcctgctgatgggcgccttcgtcacgctgtttaactatattggctaccgcctgatgctctcgccgtggcatctgaatcaggccgttgtcggtttgctttctgtggcctatctcaccggcacctggagctcgccaaaagccggggcgatgaccgcacgctatggacgcgggccggtactgctggtattcacgggcgtgatgttactcggcctgctgctgacgctattatcctcgctgtggttcatctttgccgggatgctgctcttctccgccgggttcttcgccgcccactcggtcgccagcagctggattggcccgcgcgcgcgtcgcgccaaaggacaggcatcatcgctgtatctgtttagctattacctgggttcagcatcgccgggaccctcggcggcgtgttctggcattactatggctggaacggcgtgggcgggtttatcgcgctgatgctgtgcgcggcgctgctggtgggcaccagtttgcataaacgtctgcattaa

SEQ ID NO: 19898 - DNA, 1011 bp, Enterobacter cloacae
atgaccacgatgcttgaagtggcgaagcgggcaggcgtttcgaaagccacggtgtcccgggtgctatcgggaaatggctacgtcagccaggagaccaaagaccgggtgtttcaggccattgaagagagcggctatcgcccgaatttgctggcgcgcaacctggcaaccaaacgtacccagacgctgggactggtggtgacgaacaccctctatcacggcgtctactttagcgagctgctgtttcacgccgcgcgcatgacggaagaaaaggggcggcagctgatcctcgcggacggcaagcacagcgcggatgaagagcgtgaggcgatccagtacctgctcgatatgcgctgcgacgcggtgatcatctatccgcgtttcctgagcgtggaagagatggatgagatcgtcgagaagtgcgagcagcccataatggtgctcaaccgccgcctgcggaaaaacagcagccactgcgtctggtcagatcataaagcctccagccaggaggcggtgtcgcagctgattgcgaaagggcaccgggagatcgcgtttatcaccggctcgctggattctcccaccggggttgagcgtctctccggctaccgggacgcgctggcgcagcacggtattccgctgcgcgaagggctgattgcgcaggggaagtggaaccccgccagcggcgcggcggcggtttccgaactgcttgctcgcggtgaacggtttacggcgctggtggcgagtaatgacgacatggcgatcggcgccatgaagcagctgcacgacagcggcgtggccgccccggacgcggtgtcggtgattggtttcgacgatgtggccatcgcgccttacattgtgccgtcgctctccagcgtccgcatccccgtaacggagatgattaaagagaccatcagccgcctgatcttcatgctcgacggcggtgagtttaaatatcagcaaaccttctccggcgagctggtcctgcgcgactcggttattgatggcccgtaccgc

SEQ ID NO: 19899 - DNA, 1449 bp, Enterobacter cloacae
atggccaaaaattacgctgcgctggcgaacgacgttatcagcgcgctgggcggcaaagagaacatcgtcgccgtcacccactgcatgacgcgtctgcgtttcgtactgaaagacgaaagcctgaccgacgcagcgcgcctgaaaagcatcagcggcgtgctcggcgtggtacgcaacgacaaccagtgccaggtcattattggcaacacggtttcacaggcgtaccgcgaagtggtaagcctgctgcccgctgacctgcagcccgcggtgccggaaggtccgcagaagttgaccttacgccgcgttggcgccgggatcctcgacgcgctgatcggcaccatgtctccgctgatcccggcgatcatcggcggctcgatggtcaagctgctggcgatgatcctcgagatgaccggcgtgctgccaaaaggcgcgccgacgctcactattctgaccgtcatcggcgacggcgccttcttcttcctgccgctgatggtggcagcctcggcggcggtgaaattcaaaaccaacatgtcgctggccatcgccattgccggcgtgctggtgcacccgagctttatcgagctgatggcgaaagccgcgcagggcgagcacgttgagttcgccttcattccggtgacggcggtgaaatatacctacaccgtcatcccggcgctggtgatgacctggtgcctgtcatacatcgaacgctgggtggatcgtattaccccggcggtgacgaaaaacttcctcaagccgatgctgatcgtgctgattgccgccccgctcgccatcgtgctgattggcccgctggggatctggatcggtagcgccatctccgcgctggtctacaccattcacggctacctgggctggctctccgtcgccatcatgggcgcgctctggccgctgctggtgatgaccgggatgcatcgcgtgtttacgccgaccatcattcagaccattgccgaaacgggcaaggaagggatggtgatgccgtcggaaatcggcgccaacctgtcgctcggcggctcgtcgctggcggtggcgtggaaaaccaaaaacccggagctgcgccagacggcgctggcggcggcagcctccgccattatggcggggatctctgaaccggccctgtacggcgtggcggtgcgtctgaaacgtccgctgattgcgagcctaatcagcggctttatctgcggggcggtcgccggcatggccggtcttgccagccactcaatggcggcaccggggctgttcaccagcgtgcagttcttcgacccggcaaacccgatgaccatcgtctgggtgttcggcgtgatggggctggcagtggtgctgtcgtttgttctgaccctgcttttagggtttgaggatatcccggtcgaagatgaggctgaaaaagcgcgcgccctgcagaccgcaccggtacagaacaacgcagcaaaagca

SEQ ID NO: 19900 - DNA, 771 bp, Enterobacter cloacae
atggcacgttcatgggtacgccttttcgcaggggcaacgctgacgctttcacttaccggacacgcgctggcggacgaaggtaaaattacggtctttgcagcggcgtcgctgaccaacgcgctgcaggacatcgcggcggcgtataaaaaagagaaaaacgtcgaggtggtctcctcgtttgcctcgtcctctacgctggcgcgccagatagaagcgggcgcaccggcggatctgttcatctcggctgaccagaagtggatggattacgcggcggagaaaaaagcgattgatgcgataacccgcgaaacgctgctgggcaatagcctggttgtcgtggcgccaaaagccagcgtgcaggcggacttcaccatcaacaaacagaccaactggacgagactgctgaacggtggccgtctggcggtgggcgacccggagcacgttccggccgggatctacgccaaagaagcgctgcaaaaattgggcgcatgggagacattgtcaccgaagctggctccggcggaagatgtccgcggcgcgctggcgctggtagagcgcaatgaagctccgctgggcattgtgtatggctctgatgccgttgccagtaaaggggtaaaagtggtcgcaacgttcccggaagactcccacaagaaagtggaatatcctgttgcgattgttgatggacataaaaatgcggccgtgacggccttccgcgattatctgaaggggccggaagcgtccgcaatctttaaacgttacggatttactactcac

SEQ ID NO: 19901 - DNA, 1056 bp, Enterobacter cloacae
atgctggaactccatttcacccagacgcagggaaaccataccctgacgcttaacgagacgctgcctgcaagcggtatcactgccatcttcggcgtctcgggagcgggaaaaacgtcgctgataaatgctatcagtggtctgacgcggccgcagtcaggacggattgtattgaataaccgcgtcttaaacgacgtggaaaacaaggtttatctcacgccggataaacgccgcattggctatgttttccaggacgcgcgcttattcccgcactatagcgtgcgcggcaacctgcgttacggcatggcgaaaagcatggccggacagtttgaaaagctggtgacgcttttaggcattgagcctctgctcgacaggctgccatcgtcgctctccggcggagaaaaacagcgcgtggccattggccgcgcgttgctgaccgcacccgaactgctgctactcgacgagccgctggcctcgctcgatattccgcgtaaacgcgaacttctgccttatctacagcggctgacccgggaaattaatattccgatgctctacgtcagtcattcgctggatgagatcctccatctggccgacagggtgctggtgctggaagagggcagcgtgaaggccttcggcaacctggaagaggtgtggggcagcagcgtaatgcacccgtggttacccagggaacagcagagcagcattcttaaagtgagcgttctggaacatcacccgcactacgcgatgaccgccctggcgctgggcgaccagcatctgtgggtcaataagaacgacaaaccgctacagtccgcgctgagaattcgcatccaggcgtcggacgtctcgctggtgctgcagccgccgctgcaaaccagtattcgaaatattctgcgcgccaaagtcgcggagtgttttgatgataacgggcaggtggaagtgaagcttgaagtcggcagcaggacgctctgggcgcgcatcagcccgtgggcgagggatgagttagggatcaaacccggcctgtggctttacgcgcaaattaagagcgtctcgatcaccgcc

SEQ ID NO: 19902 - DNA, 1281 bp, Enterobacter cloacae
ttgaacatttccaggatttcccgtctggcgttagcactcgcctttggcgtgaccttatccgcatgcagttcaacaccaccggatcagcgcccttctgagcaggttgcgcccggtaccgcctcccgcccgattttgtccgctgatgaagcgaagaacttcgatcgtgcgcactacttctcggcgatggatcctaacgctgcgccgtggacaccgtcttctattaacctgcctaaacagcctgacttcgtggttggcccggcgggtgcgcagggcgtaacgcatacctctattcaggctgcggttgatgctgccatcactaaacacagcgcgtctcgccagtacatcgcgatcctgccgggtgaatatgaaggcaccgtgtatgttccggcggcaccgggcagcattacgctttacggtctgggcgaaaaagcgatcgacgtaaaaattggcctggcgattgattccgaaatcgacagcaacacctggcgtcacctggtgaacccggccggtaaatatatgccgggcaaaccggcgtggtatatgtttgataactgccagagcaagcgttccgccaccattggcgtgatgtgctcggcggtgttctggtctcagaataacggtctgcagctgcaaaacctgaccattcagaataccctgggcgacagcgttgatgccggcagccaccaggccgttgcgctgcgtagcgatggcgataaggtgcagattaacaacgtcaacattcttggccgtcagaacaccttcttcgtgaccaacagcggcgtgcagaacaccctgcagaataaccgcctgactcgtaccctggtgaccaacagctacgttgaaggtgacgtggatctggtgtccggtcgcggcgcggtggtgtttgataataccgatttccgcgtggtgaactcacgtactcagcaggaaggttacgtgtttgctccggcaacccagtctaacctcttctacggcttcctggccgtgaacagccgctttaacgctgccggtgacggcgtggcgcagctgggacgctccctggacgtggactctgcgaccaacggtcaggtcgtgatccgcgacagcgtgatcaacgaaggcttcaacatggcgaagcgtggggctgatgccgcgatctccaaacgtccattctccggtaataccggtgcggtggatgataaaggcaacgtgcagcgcaacctgaacgacgctaacttcaaccgcatgtgggaatacaacaaccgcggtctgggtagcaaagtggtggctgagccgaaacag

SEQ ID NO: 19903 - DNA, 1248 bp, Enterobacter cloacae
atggaaagcaaagtagttgttccggcggaaggtaaaaagatcaccctgcaaaacggcaagattaacgttcctcacaatccgattatcccgttcatcgaaggtgacggtatcggtgtagacgttaccccggcgatgctgaaagtggttgatgccgctgttgagaaagcctacaaaggcgagcgtaaaatttcctggatggaaatttacaccggtgagaaatctactcaagtttatggccaggacgtctggctgccagcagaaacgctggatctgatccgcgactaccgcgttgctattaaaggcccactgacgacgccagttggcggcggtatccgttccctgaacgtggcactgcgtcaggagctggacctgtacgtgtgtctgcgtccggttcgttactatcagggcaccccaagcccggttaagcaccctgaactgaccgatatggttatcttccgcgaaaactcagaagacatctacgcgggtatcgaatggaaagcggactctgctgacgcagaaaaagtgattaaattcctgcgcgaagagatgggcgtgaagaaaattcgcttccctgagcattgcggtatcggcatcaagccatgctctgaagagggtactaaacgtctggtgcgtgcggctatcgaatacgcgatcaccaacgaccgtgactctgtgaccctggttcacaaaggcaacatcatgaagttcaccgaaggcgcgttcaaagactggggctaccagttggcgaaagaagagttcggtggtgagctgatcgacggtggcccatggcagaaaattaagaacccgaacaccggcaaagagatcatcattaaagatgtgatcgccgatgcgttcctgcagcagatcctgctgcgtcctgcagaatacgacgtaattgcctgtatgaacctgaacggtgattacatctctgacgccctggctgctcaggttggcggtatcggtatcgcccctggcgcgaacatcggtgacgagtgcgctctgttcgaagcgacccacggcactgcaccaaaatacgcgggtcaggacaaagtgaacccaggctctatcatcctgtccgcagagatgatgctgcgtcatatggaatggttcgaagccgcagacctgatcgttaaaggtatggaaggcgcgatcaacgcgaaaaccgtaacctatgacttcgaacgtctgatggaaggcgctaagctgctgaaatgctcagagtttggcgacgcgattatcgcgaacatg

SEQ ID NO: 19904 - DNA, 1923 bp, Enterobacter cloacae
atgacggcgcacacgcatagcatcgggcaggaagtctcttcggttctcgcccagtcctggcatcgttgcagcaagtttatgcagcgggaaacctggcaggcgccgcatcaggcgcaagggctgacctttgagtcgatttgtcgtcgcaagacggcgctgctgacgattgcgcaggccgcgctggaagatgcctgggagtttatggacggtcgtccgtgcgcactgctgattctggatgaatcagcctgtattctcagccgttgcggcgatccgcagacgatagaacagctggcggagcttggatttcgcgacggcagctattgcgcggaaagcattatcggcagttgtgcgctgtcgctggcgacgatgccggggcagccgacaaaaacctctggcgctcagcactttaaacaggcgttgcatccgtggtcgttctgctcgacgccggtgttcgataaccatgggcatctgtttggctccatctcattgtgctgtctggtagaacatgagtccgtttctgatttatccctgacgctggcgattgccagagaagtcggcaattcattgctgaccgacagcctgctggcagaatccaaccgccatctgaaccagatgtacgggctgctggagagcatggatgatggcgtgatggcctggaatgagcagggggtgttgcagttcctcaatgcgcgcgcggcgctgcttttgcatctcgacgcgcaggccagccagggcaaaaacattcacgacctgctcaatatgcccatgctgctgcgtcgggcaattaaacatgcccgcggtctgaatcacgtcgaagtcacttttgaaagccagcaccagtttgttgatgctgttatcaccctgaagccgattgttgaggagcagggcaacagctttatcctgctgctgcacccggtggagcaaatgcgtcagctgatgaccagccagcttggtaaggtgagccacacctttgagcagatgtcgacggacgatccggaaacccgacgcttgatccattttggtcgccaggcggcaagggggagtttcccgatcctgctgtgtggggaagagggcgtagggaaagagctgctgagccaggccattcacaatgaaagcgaacgcgccagcggaccgtatattgccgtgaactgtcagctgtatgccaacagcgtgctggggcaggattttatgggcagtgcgcctaccgatgatgaaaatggtcggttgagccgccttgagctggcgaacggcggcacgctgtttctggagaaaattgaatatctggcaccggagctgcaatccgcgctgttacaggtgattaagcagggagtattaacccgtcttgatgcccgtcggctgattccggtggatgtgaaagtgatcgccaccactacggttgatctcgctaatctggtggagcaaaaccgctttagccgccaactgtattacgcgctgcactcttttgagattgttatcccgccgctacgggcgcggcgtaacagtattccctcgctgatttatacgcgactgaatagcctgaaaaaacgcttctcatccagcctgaagatcgacgacgacgcgctggcacaactggtggcttattcgtggccgggcaatgatttcgagctgaacagcattatcgaaaacatcgctatcagtagcgataacgggcatatccggctgagtaatttacctgattatctgtttgccgagcgtcccggtctggagaccgcgtcttccctgctgccagccagcctgacgtttaccgctatcgaaaaagaggcgattatccatgccgcccgtgtcaccagtgggcgagtacaggagatgtcgcaactgctgaatattggtcgcaccaccttgtggcgtaagatgaagcagtacgacatcgacgccagccagtttaagcgcaaacatctggag

SEQ ID NO: 19905 - DNA, 3779 bp, Enterobacter cloacae
gtgaggcgattgccggggattttattgcttacaggggcaacgctggtcgtgattgtcgcgttgctcgtgagcgggctacgcctcgtattaccgcatctggacagctggcgtccgcagctgttggctaaaattgaatccaccaccggcgtgccggtgaacgtaagccagctaagcgctaactggcagaattttggcccgacgctcgatgtccgggatatcaacgccagcctgaaagatggcggccacctgaaaatcaaacgcgtgaccctggcgctggacgtctggcaaagcctgctgcatctgcgctggcagtttcgcgatctcaccttttatcaactccagttcctgaccaatacgccgctgtctggcggcgatagcggtcagggtcttgaagccaaccgcttcagcgatcttttcctccgccagttcgatcacttcgatctgcgcgacagcgaagtgagcttcattaccctttccggccagcgcgccgaactggcgatccctcagctgacctggctcaacggtaaagaacgtcaccgcgccgaggggcaggtcaatctctcaagcctgaacggccagcacggcgtgatgcaggtgcgcatggatctgcgggacgatgacggcctgttaaacaacggcaaagtctggctgcaggccgacgatgttgacgtgaagccatggctgggcgactggatccagcaaaatatgcagctggagactgcccgtttcagccttgaaggctggctgaccctgaccaaaggcgaatttgccagcggcgatatctggctcaagcaggggggcgccagctggaaaggcgaaaaacagcagcatcagctttccgtcgataacctcaccgcgcacgtgacgcaggagaaagggggctggcagtttgccattccggatacgcgcatcaccatggacggcaagtcgtggccgcgcggtgcgtgacgctggcctggatgccggagcaggacgtcggcggtacggccagtaaacgcagcgacgagctgcgcatccgcgccagcaacctcgatttggcggccattgagggcctgcgatcgatggcggcaaagctctctccggacctgggcgagatctggctggcaacgcagccgagcgggacgatcgatgctctggggctggacatcccgcttcaggcgacggaaaaaacgcgcttccaggccacgtggaaagatcttgcctggaagcagtggaagctgctgccgggggcggagcactttagcggcaagctggaaggcagcgtggaaaacggcaggctgacggttgatatgcacgacgccaaaatgccttacgagacggtcttccgcgcgccgctggaaatcgaacagggcagcgcggtgcttaactggctccgtaacgacaagggtttccagcttgatggccgccatatcgatgtaaaagccaaagcggtgcacgcgcgcggcgatttccgctatctgcagcctgaaggcgatgagccgtggctgggcattctggccgggatcagcaccgatgacggctctcaggcctggcgctacttcccggaaaacctgatgggaaaagccctggtggactatctcagcggcgcgattcagggcggtcaggcagacaatgccacgctggtctacggcggtaatcctcatcttttcccgtacaaacataatgaaggccagttccaggtgctggtgccgctgcataacgcgacctttgcgttccagcccggctggcctgcgctgaaagacctggatatcgagctcaacttcctcaatgacgggctatggatgaagtccgacagcgtggcgctgggcggcgtgacggccagcaacctgacggccaacatcccggattactccaaagagaagctgctgattgatgctgacatcaacggtccgggcaaagcggtgggaccgtactttgaggagacgcccctgaaagagtcgctggcggcgacgctccagcagctacagcttgatggcgatgtgaatgctcgcttacatcttgatatcccgctggacggagagatgaccacagccaaaggtgacgtccgcctgaagaacaacagtctgttcatcaaaccccttgagagcacgctgaaaaatctcagcgggcagttcagctttgacaacggaaaccttaagagcgagccgcttacggccagctggtttaatcagcccgttaatatcgacttcacgaccaccgagggtgaaaaggcttatcaggtggccgtcaatctggacggtaactggcagccagcgcgcatggacgtcctgccgaagcccattgaggcgtcagtgcagggcgcagtcgcctggcagggtaaagtggcaattgacctgccttatcacgcgggtgcccagtataaggtcgacatcacgggcgatctgaaaaaccttcagagccagctgcctgcgccgctggataaacaggccggacagcccctgccggtaaagctgaacgtcgatggcaacctgaacagcttcgcgctgaccggaagcgcgggcgggacaaaccacttcaacagccgatggctacttaaccgcaagctcaccctcgacaaagccatctggacaacggatagccgctccacgccgcctctgccggagcaggctggcattgagctgaatctcccgccgatggacggcgcagagtggctggcgctgttccagaaaggcgttgggcaaaacgttgatgaaaccgcccagttcccgcaagccattaccgtacgtacgccgtcgctgatgctgggcgggcagcagtggaacaacctgagcatcgtctcgcagcctggcgctaacggcacgaaggtggaggcccagggcagagagatcaacggtactttgaccatgcgcaatcacgcgccatggcaggcggcgatccgctacctctactacaacccggcaagcgccgcgagcgggaaagataaaccggcagagacgtcgccgctgagtaatgtctcccgcgtcgattttagcggctggcccgatctccagctgcgctgcgcggagtgctggctgtgggggcagaaatatggccgtatcgacggcgatttcaccatccaggcaaatacgcttacgctctccggtggcctggttgataccggttttggccgcatgacggccgcaggggaatgggtgaataacccgggcgagcagcgaacttccctgaagggtgacattaaaggcaacaagctggatgcagcagccaatttctttggtatcagcacgccgctgcgcggctcgtcatttgacgtcgattacgatcttcactggcgcgacgctccgtggaagccggatgaggcctcgctgaacggcattctgaaaacccactttggtaaaggtgagatcgccgacgtgagcacggggcgcgccgggcagatcctgcgcctgctgagttttgatgcgctgctgcgcaagctgcgcttcgatttcagcgatacgttcagcgaaggtttctactacgattccatccgcagtacggcatggattaaggacggcgttctgcatacggacgatacgctggtggatggcctggaagcggatatcgccatgaaaggctccgttaacctcgtgcgtcgcgagctggatatggaagccgtggtggcaccggaaatttccgcgagcgtgggcgtggcggcggcctttgtggtgaacccgattgtcggtgcggcggtgtttgccgccagcaaagtgctgggtccgctgtggagcaaagtctccattctgcgctaccgcattaccggtccggtcgataaaccgcagattaacgaggtgctgcgccag

SEQ ID NO: 19906 - DNA, 1041 bp, Enterobacter cloacae
atgttgaaaaaatttcgtggcatgttttccaatgacctgtccattgacctgggtaccgcgaatacccttatttatgtaaaaggacaaggcatcgtattgaatgagccttccgttgtggccattcgtcaggatcgtgcaggctcgccgaaaagcgtggctgcagtgggtcatgacgcgaagcagatgctgggtcgtacccctggcaacatcgccgccattcgcccaatgaaagacggcgttatcgccgacttcttcgtgactgaaaaaatgcttcagcacttcatcaagcaggttcacagcaacagcttcatgcgtccaagcccgcgtgttctggtgtgtgtgccggttggcgcaacccaggtagagcgtcgcgcaatccgtgaatctgcccagggtgcaggtgcacgtgaagtattcctgattgaagagccaatggctgcggccatcggtgcgggcctgcctgtttccgaagctaccggttctatggtagtggatatcggtggtggtaccactgaagtggccgttatctctctgaacggcgtggtgtactcctcttccgtacgtatcggtggtgaccgcttcgatgaagccatcattaattatgtgcgccgtaactacggctctctgatcggtgaagccaccgcagagcgtatcaaacacgaaatcggctctgcgtatccgggcgatgaagtgcgtgagatcgaagtgcgtggccgtaacctggctgaaggtgttccacgcggtttcaccctgaactccaacgaaattctggaagctctgcaggaaccactgacgggcatcgtgagcgcggtaatggttgcgctggaacagtgcccaccagagctggcgtccgatatctccgagcgtggtatggttctgaccggtggtggtgcgctgctgcgtaacctcgaccgcctgttaatggaagagacaggtattcctgtcgtagttgcagaagatccactgacttgcgtcgcccgtggtggtggcaaggcgctggaaatgatcgacatgcacggcggcgatttgttcagcgaagag

SEQ ID NO: 19907 - DNA, 1938 bp, Enterobacter cloacae
atgcgattaacggcgaagttctcagcttttatcaccttgctgacggggcttaccatttttgtcacgcttctgggctgttccctgagtttttacactgccattcaggacaagctggttaaccgggtacagtctgttgcctcggtgattgatacgcgtctgctgacgacgccgctaccagcgctctcccgtgagctcgatgagttgatggtacctgttgatattgttcagatcgacattcagcagggaaagcatcgtgttttaagccacgaacggccgggaagttatcagcctgcgggcgtggtaagccagtatcgggaagtgacggtgcattccctcaaaaatccggggatgaccatacgcatggtctacctcgatccgatggccagctatttccgttccatgatgaccaccgcgccgctcaccgtcgccgttgcgtttatcgtcctgctgatctttctcgcggtccgctggctgcgccgccagctttccggtcaggagctgctggagatgcgctccgtgcggatcctgaacggtgagcgcggcccgcaggtgcgtggctccgttcacgagtggccgtcacgcgccagcagcgcgctcgataccctgctctccgaaatccagtttgccagcgaccagcgcagccgtatggatacgctgatccgttcttatgcggcgcaggataataaaaccggccttaacaaccgtcttttctttgataatcagctcgccacgctgctcgacgattcagagaaagtggggactcacggggtggtgatgatgattcgcctgcccgatttcgatctcctgcgcgacacctggggacagcgggccgcggaagaaaacctctttacgctgatcaacctgctctccacctttattatgcgctacccgggcgcgctgctggcccgctatcaccgcagcgactttgccgtgctgttgcctcatcgtacgctgaaggaatccgaaagcatcgccagccagctgctgaaggcggtagatgcgctgccgcagagcaaaatgctcgacagggacgatatggtccacatggggatatgcgcctggcgtggcggacaatccacagagcaggtgatggaacatgcggaagccgctacccgcaacgccgtgttgcagggggccaacggatgggcggtttacgatgactcgctgccggaaaaagggcgcggcaacgtgcgctggcgcacgctgattgagcaaatgcttagccgcggcgggccacgtatttatcaaaaacccgcggtcatgaaaaacggcaacgttcatcaccgtgaactgatgtgtcgtatttttgacggcaccgaagaggtcatctctgcggaatatctgccgatggtgctgcaatttggcctgtcggaagagtatgaccgccagcaaattacccggctgattccgtttttatccttctggcctgaagaaaacctggcgttgcaggtcaccgtggagtcgttaatacgcccacgttttcagcgctggctacgtgatacgttaatgcaatgcgaaaaatcgcagcgtaaacacattatttttgaacttgctgaggccgatgtaggtcaatacatcagccggttacgtccggtggtacgtttgatcaatgcgctcggtgcacgtatcgctgtgacgcaggcaggtttaacgctggtcagcaccaactggatcaaggagctggatgtagagttattaaagctacatccggggctggtaaggaatattgagaagcgtacggaaaaccagctgctggtacagagtctggtagaagcgtgcaagggtacgcgaacacaagtatttgccacgggcgtgcgctccagaagcgaatggcagatgttaacagcgcgcggcgtgatgggcggtcagggggatttttttgctgcctctcaaccgcttgacaccaacgtgaaaaaatatttgcaaagatactctgtt

SEQ ID NO: 19908 - DNA, 450 bp, Enterobacter cloacae
atggctctgaaatttttgctggccaccttgctcgtctcgccgctggccgcgtacgctaaacagcccttattgatacgcacccgtcggctgttagggctatggtgttttgcctgggcgacgctgcacctcaccagctacgccctgctggaactgggaattaacaatctggcgctgcttggccgcgaactggtgacacgtccttatctgacgctgggtatcgtgagctgggtggttttactggcgttagcgctgacatccacgcaatatgcgcagcgaaaactgggcaggcgctggcagcttctgcataacttcgtctatcttgtcgcgatcctcgctcccattcattacctgtggtcggtgaagatcctctcgccacagccgatcctttatgcactggcggccgtggcgcttttggcatggcgttacaagaagttccgcctgtggttgcga

SEQ ID NO: 19909 - DNA, 465 bp, Enterobacter cloacae
atggatattcgtaagattaaaaaactgatcgagctggttgaagaatcaggcatctccgaactggaaatttctgaaggcgaagagtctgtacgcatcagccgtgcagccccagccgctagcttcccggtaatgcagcaggcttatgctgcgccagtgcagcagcctgcgctctccgcagccgttgcgccacagctgaagccgcacctgccgctgcagcagaaatcagtggtcacatcgtacgttccccaatggttggtactttctaccgcaccccgagcccggacgcgaaagcgttcatcgaagtgggtcagaaagtcaacgtaggcgataccctgtgcatcgttgaagcgatgaaaatgatgaaccagatcgaagcagagcaaatcaggtactgtgaaagcgattctggtcgaaagtggtcagccggttgaatttgacgagccgctggtcgtcatcgagtaacga

SEQ ID NO: 19910 - DNA, 2105 bp, Enterobacter cloacae
aaaaaactactgaagcacgtgccttgggccttactcgggatcctcggcgctttctgtctggcggttgtcgcattacgccggggcgaacacgtaagcgccctgtggatcgtggtcgcgtccgtttccgtctatcttgttgcttatcgctactacagcttgtacatcgcgcagaaggtcatgaagctcgacccaacgcgcgccaccccggcggtcattaacaatgacggcctgaactacgtgccaaccaaccgctacgtgctgtttggtcatcactttgccgctattgtggcgcaggcccgctggttggcccggtgctggccgcgcagatgggctacctgccgggaaccctgtggctgctcgccggcgtggtgctggcgggtgcggtgcaggactttatggtgctgtttatctcttctcgccgtaacggggcctctctgggtgagatggtcaaagaagagatgggccgcgtgccggggactatcgccctgttcggctgcttcctgattatgatcatcatcctcgcggtgctggccctgatcgtggtgaaagcgctggccgaaagcccgtggggtgtcttcaccgtatgctcaaccgtgccgattgcgctgttcatgggtatctacatgcgcttcctgcgtccgggacgcgtgggcgaagtgtcggtgattggtatcgtgctgctggtggcctccatctacttcggcggcgtgattgcgcacgacccgtactggggcccggcgctgaccttcaaggacaccaccattaccttcgcgctgattggctatgcgtttatctccgcgctgctgccggtctggctgattctggccccgcgtgactacctcgcgaccttcctcaaaatcggcgttatcgtcggtctggcgatcggcatcctggtgattaacccggatctgaaaatgccggcagtgacccagtacatcgacggtaccggcccgctgtggaaaggcgccctgttcccgttcctgttcatcaccatcgcctgcggtgcggtctccggcttccacgccctgattgcctccggtaccacgcctaagctgctggcgaacgagaaagacgcgcgtctgatcggctacggcgcaatgctgatggagtccttcgtggcgatcatggcgctggttgccgcgtctatcatcgaaccgggtctctacttcgcgatgaacaccccaccggcgggcctcggcatcaccatgccaaacctgcacgaaatgggcggtgataacgcggcgctgattatggcgcagctgaaggacgcgagcgcacacgcggcggcgaccgtcagctcctggggcttcgtgatttcgccagagcagatcatgcagacggcgaaggacatcggcgaaccgtccgtgctgaaccgcgccggtggtgcaccgacgctggcggtgggtatcgcacacgtgttccacaaggtgctgccgtgggcggacatgggcttctggtaccacttcggtattttgttcgaagcgctgttcatcctgaccgcgctggacgccggtacccgtgcgggccgcttcatgctgcaggacctgctcggtaacttcgtgccgttcctgaagaaaaccgactctctggtagcgggcattctgggtactgcgggctgcgtcggcctgtggggctacctgctgtatcagggcgttgtcgacccgctcggcggcgtgaagagcctgtggccgctgttcggtatctctaaccagatgctcgcagccgttgctctggtgctgggtaccgtggtcctcgtgaagatgaagcgcaccaaatacatctgggtaaccgttgttcctgcgctgtggctgctgctctgcaccacctgggcgcttggcctgaagctgttcagcgccaacccgcagctggaaggcttcttcttcatggctaaccagtacaaagagaagattgccgcaggcggcgcggacctgaccgcgcagcagattgccaacatgaaccatatcgtggtgaacaactacaccaacgcgggtctgagcattctgttcctggtggtggtgtacagcatcatcttctacggcatcaaaacctggctgaacgttcgcaacgccgacggccgtacggataaagaaaccccgtacgtgccg

SEQ ID NO: 19911 - DNA, 201 bp, Enterobacter cloacae
atgtttggtaacttaggcgaagcaaaaaaatacctcggtcaggcggcgaaaatgctgattggcattccggactatgacaactacgttgagcacatgaagaccaaccatccggataagccgtacatgacctataccgaattcttccgcgagcgtcaggaagcgcgctacggcggaagtggagaaggcggcgtccgctgctgc

SEQ ID NO: 19912 - DNA, 851 bp, Enterobacter cloacae
gtcatcgaaaacgaattcggtgaggtctccgttgacgatcaattgatcggcgatcgcgccacccagatcaaaactctgaccaacggctgcatctgctgcacccgctctaacgaattagaagacgccctgctggacctgctcgacagccgcgatcgcggcgagatcgactttgaccgcctggtgatcgaatgcaccggcatggccgaccccggcccgattattcagacctttttctctcacgagatcctctgccagcgctacctgctggacggcgtgattgccctggtggatgcggttcacgccgacgagcagatgaaccagttcaccatcgcccagtctcaggtgggctacgccgaccgcatcctgctgaccaaaaccgacgtggcgggcgaaagcgaaaaactgcgcgacgcctgacgcgcattaactcccgcgcgccggtttacacggtgacgcacggcgacatcgatctgtctcagctgttcaacaccaacggctttatgctggaagagaacgtcaccgcgaaaccgcgcttccactttatgggagataagcaaaacgacgttgcgtcgattgtggtcgagctggactacccggtggacatcggcgaggtttcgcgcgtgatggaaaacctgctgctgtcgtttgccgacaagctgctgcgctacaaagggatgctgtggattgacggcgagccgaaccgcctgctgttccagggcgtacagcgcctgtacagcgccgactgggatcgcccctggggcgaggaagcgccgcgcagcgtgatggtgtttataggcatacagctgccggaagaagaaattcgggcggcgtttgcggggctgaagaaataa

SEQ ID NO: 19913 - DNA, 1363 bp, Enterobacter cloacae
ctggacgagggttttatctgcgacatgttcgaaggccatgcgtcttacaaaccccgttacgttctgccggattacgcaaaatttctggctaacggttcagagtgcctggagctggaaggcgcgaaagatctcgacgacgccctctcgctgttaaccatcctctaccatcatgttccgtccgtcacatcgatgccggtctatctcggtcagcttgatgcgatattgacgccatatgttagaattctaacacaagaagaggtcgatagccgaataaaacgtttctggcgctatctcgaccgtacgctgccggatgcgtttatgcacgcaaacatcgggcctgaagatacacccgtcgcgcgcgccattctgcgtgccgatgcagagctgaagcaggtcgcaccgaacctgacctttatctacgatcccgatatcaccccggacgacctgctgcttgaggtggcaaaaaacatatgtgaatgcagcaaaccgcatatttctaatggcccgatgaatgataaaattttcacaaaaggccgttacggcgtggtgagctgttacaactccctgccgcttgctggcggtggcagcactctggtgcgcctcaacctcaaagccattgctgaacgcagcgcatccattgaagacttcttcacccgcgcggtcccgcactactgccagcagcaaattgccatcatcgatgcgcgctgcggtttcctgtacgagcaatctggcttctttgagaatagcttcctggtcaaagaggggctgattgatgcggatcggtttgtgcccatgtttggcatgtacggcctggcggaagcggtgaatacgctctgtgaaaaggagggcattgaaggccgttacggaaaagacgagcaggccaacgcgctgggctatcgcatcagcgaacagcttgcggcgttcgttgaaagcacgccggtgaagcacggctggaagcaccgcgcgatgcttcacgcgcagtcggggatcagctccgactccggcaccacgccgggcgcgcgcctgccctacggcgatgagccggatcctgtcagccacctgctggccgttgcgccgcatcacaaacactatcactccggaatcagcgatattctcaccctggaggagacggtcaaacgcaatccgcaggcggtggttcagctttgcctgggcgcgttcaggggccggcatgcgtgaatttaccgccaacgtagcgggtaacgatctggtacgcgtgaccggctacatggttcgcttgtcggatctggagaaataccgggaagcgggatcgcgcaccaatactacctggctgggggaagaagccgcacgcaatacccgtattctggaacgtcagccgcgcgtg

SEQ ID NO: 19914 - DNA, 1583 bp, Enterobacter cloacae
ttgtctccttatctgcaagaggtggccaagcgccgcacttttgccattatctcgcacccggatgccggtaaaacgaccatcactgagaaggtgttgctgttcggacaggcgatccagactgccggtaccgtgaagggccgtggctccagccagcatgcaaaatccgactggatggagatggaaaagcagcgtggtatttcgattaccacctccgtgatgcagttcccgtatcacgactgcctggtgaacctgctggataccccgggccacgaagacttctccgaagatacctaccgtaccctgacggcggtggactgctgtctgatggtgatcgacgccgcgaaaggtgtagaagacaggacccgcaagctgatggaagtcacccgtctgcgcgatacgccgatcctcactttcatgaacaaactcgaccgcgacatccgtgacccgatggaagtgatggatgaagtggaaagcgagctgaaaatcgcctgtgcgcccatcacctggccaattggctgcggtaagctgttcaaaggggtgtatcacctctataaagacgaaacctacctgtatcagaccggtaaaggccacaccattcaggaagttcgcgtggtgaaaggtctggataaccctgagctggacgtggcagtcggcgaagagctggccgcgcagtgcgcgacgagctggagctggtcaaaggcgcgtctcacgaattcgataaagagctgttcctgagcggtgaaatcaccccggtcttcttcggtaccgcgctgggtaacttcggcgttgaccatatgctggacggtctggtggagtgggcgccgcgcccgatgccgcgtaacaccgacacccgtgaagtggaagcgcaggaagaaaaattcaccggcttcgtgttcaaaattcaggccaacatggacccgaaacaccgcgaccgcgtggcctttatgcgcgtggtgtccggtaaatatgaaaagggcatgaagctgcgccaggtgcgtaccggtaaagacgtggtgatttccgacgcgttgacctttatggcgggtgaccgttcgcacgttgaagaggcgtatccgggtgacatcatcggtctgcacaaccacggcactattcagatcggcgatacgttcacccagggtgaaatgatgaagttcaccggtattccgaacttcgcaccggagctgttccgtcgtatccgtctgcgcgatccgctgaagcagaaacagctgctgaaaggcctggttcagctctccgaagagggcgccgtgcaggtgttccgcccaatcgcgaacaacgacctgatcgttggcgcggtcggcgtgctgcagttcgacgtggttgtcgcgcgtctgaagagcgagtacaacgtggaagcgatttacgagtctgtgaacgtcgcgaccgcgcgctgggttgagtgttctgacgtgaagaaattcgaagaatttaagcgtaagaacgaaattcagctggcgctggatggcggcgataacctgacctatatcgcgccaactatggtgaacctgaacctgacgcaggaacgttaccctgacgttcagttccgtaaaacccgcgagcactaa

SEQ ID NO: 19915 - DNA, 776 bp, Enterobacter cloacae
atgaccgatttaactgcaagcagcctgcgcgcgttgaagctgatggacctgaccaccctgaacgatgacgacaccaatgaaaaagtcatcgccctgtgccatcaggcgaaaacgccggtgggtaacaccgcagccatctgtatctacccgcgctttatcccgattgcccgtaagacgctgaaagagcaaggcacgccggacgtgcgtattgcaaccgtaactaacttcccgcatggcaacgacgatatcgagattgcgctggcagaaacccgcgcggcgattgcttacggcgcagacgaagttgacgtggtgttcccgtaccgcgcgctgatcgccggcaacgagcaggtcggttttgacctggtgaaagcctgtaaagacgcgtgcgcggcggcaaacgtgctgctgaaagtgatcatcgaaaccggcgagctgaaagaagaggcgctgattcgtaaagcatctgaaatctccatcaaagccggtgcggatttcattaaaacctctaccggtaaagtgccggtgaatgcgaccccgaaaagcgcgcgcatcatgatggaagtgatccgcgacatgggcgtatccaaaaccgttggtttcaaacctgcgggcggcgtgcgtaccgctgaagacgcgcagagttcctggcgattgccgacgagctgtttggcgccgactgggcggactcccgtcactaccgcttcggtgcgtccagcctgctggccagcctgctgaaagcgctgggtcacggcgacggtaagagcgcaacagctact

SEQ ID NO: 19916 - DNA, 999 bp, Enterobacter cloacae
atgtctgttaaagccattgccgttaacccagaaaatccgtccaccttcattgaaatcaccccgccaatgccgcagcccggcgagcacgatctgctggtggaggtgaaggccgtctccgttaacccggtcgataccaaagtccatgcgggcattgccaggaacgggctgaatgagccgcgcatcctcgggtgggatgccagcgggatcgtcaaagccgttgggggtggcgtcaccggattcaaaccgggggatgaagtgtggtacgcgggcgacatcacccgcccgggcagcaacaccacgcaccagctgatcgacgcgcgcattgtcgggcacaagcctgccagcctcggctgggccgcggctgccgcgttgccactgaccgcccttacagcctgggaaggattattcgagcggctgaacattcaggatgccggggcggataaaacgctgctgatcattggcggcgcgggcggagtgggatcgctggcgatcccctttgcaaagcacaacagcaaggtgaaaatcatcgcgacggcatcaagagaagattccgcccgctggtgtcgcgatcgcggggctgatattgtcgtcaactaccgcgacctgaaaggcgagctggcgaaacaggggctgacctttgtggattacattttcatcctcaacgacaccgacgggcactgggatgcggtcagcgacctgattgcgcctcaggggcatatctgttccatcgttgagaatgaacgtccgctgaaccaggacaagctgaagtccaagtccgccgccctgcactgggaatttatgtacacccgcagcatgtatcagaccgcggatatggcgcgtcagggtgagatcctcaatgaggtggcaaagctggtggataacggcgtggtggaaagctcactgagtgaaacgctgcacgggctgagcgtggagagcattaccgaggcgcaccgtaaagtgctggagggacatatgcgggggaaagtggtggttgagttc

SEQ ID NO: 19917 - DNA, 1389 bp, Enterobacter cloacae
gtggcgaaagctccaaaacgcgcatttgtttgtaatgaatgtggtgcggattatccgcgctggcaggggcaatgcagcgcctgtcatgcctggaacaccatcaccgaagtgcgtggtgtggcggcttcgcgagcgtggcgcgcaatgaacgcctgagcggctatgccggtaacgcgggcgtggcgaaggtgcaaaaactttcggacatcagcctcgaagagctgccgcgcttctccaccgggttcaaagagtttgaccgcgtgctcggcggcggcgtggtgccgggcagcgcgatcctgatcggcggtaacccgggcgcgggtaaatcgaccctgctgctgcaaacgctctgcaagctcgccgaacagatgaaaaccctgtacgtaacgggcgaagagtcactgcagcaggtggcgatgcgcgcgcaccgtctgggcctgccgaccggcaacctgaacatgctctccgaaaccagcatcgagcagatctgcatgatcgctgaagaagagcagccgaagctgatggtgatcgactccatccaggtgatgcacatggcggacattcagtcctcgccgggcagcgtcgcgcaggtgcgtgaaaccgcggcctacctgacgcgctttgccaaaacgcgcggcgtggcgattgtgatggtcggccacgtgaccaaagacgggtcgctggcgggaccgaaggtgctcgagcactgtatcgactgctccgtgatgctcgacggcgacgcggattctcgcttccgtaccctgcgcagccacaagaaccgctttggggcggtgaacgaactgggcgtgtttgccatgaccgaacaggggctgcgcgaagtcagcaatccgtcggccatcttcctgagccgcggcgatgagatcacctccggcagctcggtgatggtgctgtgggaggggacgcgcccgctgcttgttgaaattcaggcgctggtggacgtgtcgatgatgggcaacccgcggcgcgtggcggtcggtctggaacagaaccgtctggcgatcctgctggcggtgctgcaccgtcacggcgggctgcagatggcggatcaggacgtcttcgttaacgtggtcggcggcgtcaaagtcacggagaccagcgcagacctgggcgctgctgctggcgatggtctccagcctgcgagacagaccgctgccgcaggatctggtggtattcggcgaagtgggcctcgccggggaaatccgtccggtacccagcggccaggagcgtatctccgaggcggcaaaacacggtttccgccgggcgatcgttcccgccgctaacgtgccgaaaaagatcccggaagggatgcaggtatttggcgtgaaaaaactcgcagatgcgttaaatgtctttgacgacttataatta

SEQ ID NO: 19918 - DNA, 273 bp, Enterobacter cloacae
gtggcttctgtttctatcagctgtccctcctgttcagctactgacggggtggtgcgtaacggcaaaagcaccgccggacatcagcgctatctctgctctcactgccgtaaaacatggcaactgcagttcacttacaccgcttctcaacccggtacgcaccagaaaatcattgatatggccatgaatggcgttggatgccgggcaaccgcccgcattatgggcgttggcctcaacacgattttccgccatttaaaaaactcaggccgcagtcgg

SEQ ID NO: 19919 - DNA, 501 bp, Enterobacter cloacae
atgccgggcaaccgcccgcattatgggcgttggcctcaacacgattttccgccatttaaaaaactcaggccgcagtcggtaacctcgcgcatacagccgggcagtgacgtcatcgtctgcgcggaaatggacgaacagtggggatacgtcggggctaaatcgcgccagcgctggctgttttacgcgtatgacaggctccggaagacggttgttgcgcacgtattcggtgaacgcactatggcgacgctggggcgtcttatgagcctgctgtcaccctttgacgtggtgatatggatgacggatggctggccgctgtatgaatcccgcctgaagggaaagctgcacgtaatcagcaagcgatatacgcagcgaattgagcggcataacctgaatctgaggcagcacctggcacggctgggacggaagtcgctgtcgttctcaaaatcggtggagctgcatgacaaagtcatcgggcattatctgaacataaaacactatcaa

SEQ ID NO: 19920 - DNA, 447 bp, Enterobacter cloacae
atgcaagttattctgcttgataaagtagcaaacctgggcagcctgggtgatcaggttaacgttaaagcgggttacgcacgtaacttcctggttccacagggtaaagctgttccagctaccaagaaaaacgtagagtttttcgaagcacgtcgcgctgaactggaagccaaactggctgacgttctggcggctgctaacgctcgcgctgaagcaatcaacgcactgggcaccgttaccatcgcgtctaaatcaggcgacgaaggtaaactgttcggttccatcggtacccgcgatatcgctgatgcagtaactgctgcaggcgttaaagtggctaagagcgaagttcgtctgccgaacggcgttctgcgtaccactggtgagcacgaagttgacttccaagttcacagcgaagtgttcgctaaactggttgttaacgttgtagctgag

SEQ ID NO: 19921 - DNA, 225 bp, Enterobacter cloacae
atggcacgttatttccgtcgtcgcaagttctgccgtttcaccgcggaaggcgttcaagagatcgactataaagatatcgcaacgctgaaaaactacatcaccgaaagcggtaagattgtcccaagccgtatcaccggtactcgtgcaaaataccagcgtcagctggctcgcgctatcaaacgcgctcgctacctgtccctgctgccgtacactgatcgtcatcag

SEQ ID NO: 19922 - DNA, 312 bp, Enterobacter cloacae
atgaccaaccgtctggcgttgtccggcatcgtatgcagggctccccttcgaaaggtcagtccatcaggaattccgcattgccagttcgtgcttgagcatcgttctgtgcaagaggaagccgggtttcaccggaaggcgtggtgccaaatgcccgttattattagcggacacgaaaaccaggccattactcacagtttaacggtcggtagcgcagtaatcgttcaggggttcatctcttgccacaaggcaaagaacggcctgagcaaaatggttctgcatgccgagcagattgatttgatagattctggagac

SEQ ID NO: 19923 - DNA, 393 bp, Enterobacter cloacae
  misc_feature (171)..(171): n=g, a, t or c
atgcgtcattacgaaatcgtttttatggtccatcctgaccagagcgaacaggttccgggtatgatcgagcgttactctgctgccatcactggtgcagaaggtacgatccaccgtctggaagactggggccgccgtcagctggcttacccgatcaacaaactgcacaaagcnaactacgttctgatgaacgttgaagcgccgcaggaagtgatcgatgagctggaaactaccttccgcttcaacgatgccgttatccgcagcatggttatgcgtaccaaaaacgcagttaccgaagcatctccgatggttaaagcgaaagacgagcgccgtgagcgtcgcgatgatttcgcaaacgaaaccgcagatgattctgatgctggggattctgaagag

SEQ ID NO: 19924 - DNA, 423 bp, Enterobacter cloacae
gtgcagttaacaagtttcaccgattacggcttacgtgcgctgatttacatggcgtcgttacccgatgggaagatgaccagtatctctgaagtcacagaggtctacggcgtatcccgtaatcatatggtcaaaataatcaatcaacttagtcgtgccggatacgttgctgccgtccgcgggaagaatggtgggatccgtctcggtaaaccggcacagagtattcgtgttggcgatgtggtacgtgaactggagccgctgtctctggtgaactgcagcagcgagttctgccacatcacgcccgcttgccgcctgaaaaaggcgctttcaaaggccgtgcaaagttttctcatggaactggataactacacgctggccgatttggttgaagagaatcaaccgctttataaattattgctggtggaa

SEQ ID NO: 19925 - DNA, 1338 bp, Enterobacter cloacae
atggtagaatccatttttaagcaaacggtgattttgaaaaaaatgggtaacaacgtcgtcgtactgggcacccaatggggtgacgaaggtaaagggaagattgttgatcttctgactgaacgggctaaatatgttgtacgctaccagggcggtcacaacgcaggccatactctcgtaatcaacggtgaaaaaaccgtcctccatcttattccatcaggcattcttcgcgaaaacgtcaccagcatcatcggtaacggcgttgtgctgtctcctgctgcgctgatgaaagagatgaaaggtctggaagaccgtggtatccctgttcgtgagcgtctgctgctctccgaagcctgcccgctgatcctggattatcacgtggcgctggacgtagcgcgtgagaaagcgcgcggcgcgaaagcgatcggcaccaccggtcgtggtatcggcccggcttacgaagataaagttgcacgtcgcggtctgcgcgtgggtgacctcttcgacaaagcaaccttcgctgaaaaactgaaagaagtgatggaatatcacaacttccagctggtgaacttctacaaagctgacgctgttgactaccagaaagtgctggatgacgtcatggcgatcgctgacattctgaccggtatggttgttgatgtgtccgatctgctggaccaggcgcgcaagcgtggcgatttcgtcatgttcgaaggtgcgcagggtacgctgctggacatcgaccacggtacctatccgtacgttacctcctctaacaccaccgcaggtggcgtggcgaccggctctggcctggggccacgttatgtggattacgtgctgggcatcatcaaagcgtactccactcgcgtgggtgcgggtccattcccgaccgagctgtttgatgaaaccggcgagttcctttgcaagcagggtaacgagtttggcgcgaccactggtcgtcgtcgtcgtaccggctggctggatgcggttgccgtgcgtcgtgcagtgcagatcaactccctgtctggcttctgcctgaccaagctggacgtactggacggcctgaaagaagtgaaaatctgcgtaggctaccgtatgccagatggccgcgaagtgaccaccactccgctggctgctgacgactgggaaggcattgagccaatctacgaaaccatgccgggctggtctgagaccactttcggtgtgaaagagcgtagcggcctgccgcaggcggcgctggattacatcaagcgtattgaagaactgaccgaagtgccgatcgatattatttctaccggcccggatcgtactgaaacgatgatcctgcgcgacccgttcgacgca

SEQ ID NO: 19926 - DNA, 1259 bp, Enterobacter cloacae
atggcgtggaatcagcccggtaataacggacaagaccgcgacccgtggggaagcagcaaacctggcggcaactctgagggaaatggcaacaaaggtggtcgcgagcaggggccgccggatctggatgatatcttccgcaaactgagcaagaagcttggtggccttggcggaggaaaaggttctggctcgggtggcaattccactcagagttcgcgcccgccaatgggtggccgcgtagtgggcatcgtggccgctgcggtagtcatcatctgggcagccagcgggttctacaccattaaagaagcagaacgcggcgtggtcacccgtttcggtaagttcagccatctggttgagccgggtctgaactggaagccgaccttcattgatgacgtgaccgcggtaaacgtggaatccgtccgtgaactggccgcctctggcgtgatgctgacttctgacgaaaacgtggtgcgcgttgagatgaacgtgcagtaccgcgtgaccgatcctgagcgttatctgtttagcgtgaccagcgccgatgacagcctgcgtcaggcgaccgacagcgccctgcgcggtgtgatcggtaaatacaccatggaccgtattctgaccgaaggtcgtaccgttattcgtagcgatacccagcgcgagctggaagagaccattcgtccgtacaacatgggtattaccctgctggacgtcaacttccaggtgcgcgtccgccggaagaggtgaaagccgcatttgacgatgcgattgctgcccgtgaaaacgaacagcagtacatccgtgaagcagaagcgtacaccaacgaagttcagccacgcgctaacggtcaggcgcagcgtattctggaagaagcgcgcgcgtataaaacgcagaccatcctggaagctcagggtgaagtggcccgcttcgcgaagatcctgccggaatataaagcggcaccggaaattacccgtgagcgtctctatatcgagaccatggaaaaagtgctgagccacacccgcaaagtgttggttaacgacagtaaaggcggaaacctgatggttctgccgctggatcagatgctgaaaggcggttctgcgccacagcgaataggcgacaccagcggcgcgaacaacctgctgcgtctgcctccagcctcaacaggcagcgccagcacgaacacaacgccttcttcgaacgatggtgacattatggaccaacgccgtgctaacgcgcagcgtaacgactaccagcgtcagggggaataa

SEQ ID NO: 19927 - DNA, 819 bp, Enterobacter cloacae
atggcagttgttaaatgtaaaccgacatctccgggtcgtcgccacgtagttaaagtggttaaccctgagctgcacaagggcaaaccttttgctccgttgctggaaaaaaacagcaaatccggtggtcgtaacaacaatggccgtatcaccactcgtcacatcggtggtggccacaagcaggcttatcgtattgttgacttcaaacgcaacaaagacggtatcccagcagttgttgaacgtcttgagtacgatccgaaccgttccgcgaacatcgcgctggttctgtacaaagacggcgaacgccgttacatcctggcccctaaaggcctgaaagctggcgaccagattcagtctggcgttgatgctgcaatcaaagcaggcaacaccctgccgatgcgcaatatcccggttggttctaccgttcataacgtagaaatgaaaccaggtaaaggcggtcagctggcacgttccgctggtacttacgttcagatcgttgctcgtgatggtgcttatgtcaccctgcgtctgcgttctggtgaaatgcgtaaagtcgaagcagactgccgcgctactctgggcgaagttggcaatgctgagcatatgctgcgcgttctgggtaaagcaggtgctgcacgctggcgtggtgttcgtcctaccgttcgcggtactgcgatgaacccagtcgaccacccacatggtggtggtgaaggtcgtaactttggtaagcacccggtaactccgtggggcgttcagaccaaaggtaagaagacccgcagcaacaagcgtactgataaatttatcgtacgtcgccgtagcaaa

SEQ ID NO: 19928 - DNA, 312 bp, Enterobacter cloacae
atggcagcgaaaatccgtcgtgatgacgaagttatcgtgttaaccggtaaagataaaggtaaacgcggtaaagtaaaaaatgttctgtcttccggcaaacttgtcgttgaaggtatcaacctggttaagaaacatcagaagccggttccggccctgaaccaaccgggtggcatcgttgaaaaagaagctgctattcaggtttctaacgttgcaatcttcaatgcggctaccggcaaggctgaccgtgtaggctttagattcgaagacggcaaaaaagtccgtttcttcaagtctaacagcgaaactatcaag

SEQ ID NO: 19929 - DNA, 1329 bp, Enterobacter cloacae
atggctaagcaaccgggattagattttcaaagtgccaaaggtggatttggcgagctcaaacgcagactgctgtttgttatcggcgcgctgattgtgttccgtattggctcttttattccgatccctggtatcgatgccgctgtacttgccaaactgcttgagcaacagcgaggcaccatcattgaaatgttcaacatgttctctggtggtgctctcagccgcgcttctatcttcgcattgggtattatgccgtacatttcggcttcaattattatccagctgctgacggtcgttcatccggccctggcagagttgaagaaagaaggggagtctggacgtcgtaagataagtcagtacacccgttacggtactctggtgctggcaatattccagtcgatcggtattgctaccggtttgccgaatatgcctggtatgcagggcctggtgttaaacccgggctttgcattctacttcaccgctgttgtaagtctggtcacagggactatgttcctgatgtggctcggcgaacagattactgagcgtggtatcggtaacggtatctctatcattatcttcgccggtattgttgcgggcctcccgccagccatcgcccatactatcgagcaagcgcgtcaaggcgacctgcacttcctcctgttgctgttggttgcagtattagtatttgcagtgacgttctttgttgtcttcgttgaacgtggtcaacgccgcattgtggtgaactacgctaaacgtcagcagggtcgtcgtgtctatgctgcacagagcacacatttaccgctgaaagtgaacatggcgggggttatcccggctatcttcgcttccagtattattctgttcccggcgaccatcgcgtcatggttcgggggcggtactggttggaactggctgacaacaatttcgctgtatttgcagcctgggcaaccactttatgtgttactctatgcgtctgcgatcatcttcttctgtttcttctacacggcgttggtcttcaacccgcgtgaaacagcagataacctgaagaagtccggtgcatttgtaccaggaattcgtccgggagagcaaacggcgaagtatatcgataaagtaatgactcgtctgactttggttggtgcgctttatattacttttatctgcctgatcccggagttcatgcgtgatgcaatgaaagtaccgttctacttcggtgggacctcactgcttatcgttgttgtcgtgattatggactttatggctcaagtgcaaactctaatgatgtccagtcagtacgagtctgcattgaagaaggcgaacctgaaaggctacggccgc

SEQ ID NO: 19930 - DNA, 432 bp, Enterobacter cloacae
atgcgtttaaatactctgtctccggccgaaggctctaaaaaggcgggtaaacgcctgggtcgtggtatcggttctggcctcggcaaaaccggtggtcgtggtcacaaaggtcagaactctcgttctggcggtggcgtgcgtcgcggtttcgagggtggccagatgccactgtaccgtcgtctgccgaagttcggcttcacttctcgcaaagcagcgatcacagcggaaatccgtctgtctgacctggcgaaagttgaaggcggcgttgtagacctgaacacgctgaaagcagcaaacattatcggtatccagatcgagttcgcgaaagtgatcctggctggtgaagtttctactccggtaactgttcgtggcctgcgtgttactaaaggtgctcgtgctgctatcgaagctgctggcggtaaaattgaggaa

SEQ ID NO: 19931 - DNA, 366 bp, Enterobacter cloacae
atgtggttgctcgaccagtgggcagaacgccatattcgcgatgcccaaaaaaaaggtgaattcgacgatctcccgggaagcggcgaaccccttgcgcttgacgatgattcgcacatcgcgcctgaactacgggctggataccgtttgctgaaaaatgcgggctgtctcccaccggagctcgaacagcgcagagaagctgttgaactggccgatcttctcagagagatccgccatgacgatccacgacattctgaacttagccgccgtctcgccctgcttgaactcaagctgcgccaggctgggatgaacactaattttcttcacggtgaatacggtgaaagattgatgcagaaaataagcgaggag

SEQ ID NO: 19932 - DNA, 369 bp, Enterobacter cloacae
atgatccaagaacagactatgctgaacgtcgccgacaactccggtgcacgtcgcgtaatgtgtatcaaggttctgggtggctcgcaccgtcgctacgcaggcgtaggcgacatcatcaagatcaccatcaaagaagcaattccacgtggtaaggtcaaaaaaggtgatgtgctgaaggcggtagtggtgcgcaccaagaagggtgttcgtcgccctgacggttctgtcattcgcttcgatggtaatgcatgcgttattttaaacaataacagcgagcagcctatcggcacgcgtatctttgggccggtaactcgtgaacttcgtactgagaagttcatgaaaattatctctctggcaccagaagtactc

SEQ ID NO: 19933 - DNA, 177 bp, Enterobacter cloacae
atggcaaagactattaaaatcactcaaacccgcagtgcaatcggtcgtctgccgaaacacaaggcaacgctgcttggcctgggtctgcgtcgtattggtcataccgttgagcgcgaggatactcctgctgttcgtggtatggtcaacgcggtttacttcatggttaaagttgaggag

SEQ ID NO: 19934 - DNA, 1314 bp, Enterobacter cloacae
gtgtttccgggcatttttatttttacggttatgaaaaaacaaaatctacgcagtatggcggctcaggccgttgagcaggttatcgagcagggccagtcattaagtaacgtcctgcctcctctgcaactaaaagtctctgataaagacaaagccctgcttcaggagctctgctttggcgttctgcgcacgctttctcagcttgaatggttgattaacaagctgatgtcacgcccaatgacaggcaagcagcgcaccgtacactatttgattatggtgggcttttatcagcttcttcatacccgcatcccacctcatgccgcgctggctgagacggtggaaggcgccgttgcgattaaacgtcctcagctgaaaggcctgatcaacggcgtactgcgtcagttccagagacagcaggaagagcttctggctgaatttgcccaaagcgaagcacgtttcctgcacccggactggctgttgaagcgcctgaaaaaagcctatccgcagcagtggcaggagattgccgatgccaacaatcagcgtccgccaatgtggttacgcgtgaatcggaatcaccacacccgagccgcatggctggcattgcttgaagaagctggaatgagtggattcccgcatgaagcctatccggatgccgtacgcttagcctcaccggcaccggtacatgcattacccggttttgatgaaggctgggtaaccgtacaggatgcctcggctcagggttgcatgacctggcttgaacccaaaaatggtgagcagatcctcgatctttgcgccgcgcctgggggcaaaacgacgcatattctggaagtggctccgcaggccagcgtgatggcagtggacgtcgatgaacagcgtctctcacgcgtctacgacaaccttaagcgtctgggcatgaaggctcaggttaagcagggcgatggacgcaaacccgcagagtggtgtggtgaaacgcaattcgatcgcattttgctggatgccccctgctctgcaacaggtgttattcgtcgtcatccggacatcaagtggctacgccgcgatcgtgatattcaggaacttgcccaactgcaatcagacattctcgacgccatttggccgcatcttaaatctggcggaacgctggtctatgcgacctgttccgtactgccggaagaaaacagccagcaaatcgcggccttccttaaacgtacgccggacgccgcgctgcgcgatacgggaacgcctgaatccccgggtctgcagaacctgccgggtgctgaagagggcgatggcttcttttacgctaagctaatcaaagag

SEQ ID NO: 19935 - DNA, 381 bp, Enterobacter cloacae
atgcgccatcgtaagagtggtcgtcaactgaaccgcaacagcagccatcgccaggctatgttccgcaacatggcaggttcactggttcgtcatgagatcatcaagacgaccctgcctaaagcgaaagagctgcgtcgcgtagttgagccgctgattactcttgccaagactgacagcgttgctaatcgtcgtctggcattcgcccgtactcgtgataacgagatcgtggcaaaactgtttaacgaactgggcccgcgtttcgcgagccgtgccggtggttacactcgcattctgaagtgtggtttccgtgcaggcgacaacgcgccgatggcttacatcgagctggttgatcgttcagagaaagcagaagctgctgcagag

SEQ ID NO: 19936 - DNA, 252 bp, Enterobacter cloacae
atgaccgataaaatccgtactctgcaaggtcgtgttgttagcgacaaaatggagaaatccattgttgtagctatcgaacgtattgtgaaacacccgatctacggtaaattcatcaagcgtacgaccaaactgcacgtacatgacgagaacaacgaatgtggtatcggcgacaaggttgaaatccgtgaatgccgtccactgtccaagactaagtcctggacgctggttcgcgttgtagagaaagcggttctg

SEQ ID NO: 19937 - DNA, 498 bp, Enterobacter cloacae
atggctcacatcgaaaaacaggctggcgaactgcaggaaaagctgatcgcggtaaaccgcgtatctaaaaccgttaaaggtggtcgtattttctccttcacagctctgactgtagtaggcgatggtaacggtcgcgttggttttggttacggtaaagcgcgtgaagttccagcagcgatccagaaagcgatggaaaaagcccgtcgcaatatgattaacgtcgcgctgaacaacggcaccctgcagcacccagttaaaggtgttcacacgggttctcgtgtattcatgcagccagcttcagaaggtaccggtatcatcgccggtggtgcaatgcgcgccgttctggaagttgctggggttcataacgttctggccaaagcatatggttccactaacccgatcaacgtggttcgtgcaactattgatggcctggaaaatatgaattctccagaaatggtcgctgccaagcgtggtaaatccgttgaagaaattctgggg

SEQ ID NO: 19938 - DNA, 1374 bp, Enterobacter cloacae
atgaagattatcattctgggtgcaggacaggtgggcggaacgctggcggaaaacctggttggcgaaaacaacgacatcacaattgttgataccaacggcgatcgtctgcgcgtcttgcaggacaagtttgacctgcgcgtggtgcagggtcatggttcgcacccacgtgttcttcgtgaggcgggcgccgacgatgccgacatgctggttgcggtaaccagttctgacgaaaccaatatggtggcctgtcaggtggcatactcgcttttcaacacgccaaaccgaattgcgcgtattcgctctccggactatgttcgcgatgctgaaaaactgtttaattccgaagcggttcccattgaccacctcatcgcgccagaacagctggttatcgacaatatctatcgcctgatcgaatatccgggtgccctgcaggtggtgaactttgccgagggcaaagtgagcctggcagtggttaaggcctattatggcggaccattgatcggtaatgcgctttccaccatgcgcgagcacatgccgcatatcgatacgcgcgttgcagcgattttccgtcacgacaggccaattcgcccgcaaggctccacgattgtcgaagccggtgatgaggtcttctttattgcggcctcacagcatattcgtgcggtgatgagtgaacttcagcgtctcgaaaaaccctataaacgcattatgctggtcggcggcggcaatatcggtgccggcctggcacatcggctggaaaaagattacagcgtgaagttgatcgagcgcgatcaacagcgtgctgctgaactggcggaaaaactgcaaaatacgattgtattttatggtgatgcgtctgatcaggagttgctggctgaagagcatatcgatcaagttgatctctttattgccgtcaccaacgacgacgaggcgaatataatgtccgccatgctcgcgaagcgcatgggggctaaaaaagtcatggtgcttattcagcgcaaggcgtatgtcgatctggttcagggcagcgttattgatattgccatttcccctcagcaggcgacaatttccgctctcctgagccatgttcgtaaagcggatattgtcggtgtgtcatcgctccgccgcggcgtagcggaagccattgaagccgttgctcacggagatgaaacgacgtcacgcgtcgtcggccgttcaatcgacgaaattaaactgccgccaggtacgattatcggcgccgttgtgcgcgggaatgatgtcatgattgccaatgataatttacgaattgagcaaggcgatcacgttattatgttccttaccgataaaaagtttattaccgacgtcgaacgtttattccagccaagtccattcttcctt

SEQ ID NO: 19939 - DNA, 987 bp, Enterobacter cloacae
atgcagggttctgtgacagagtttctaaaaccgcgcctggtagatatcgagcaagtgagttcgacgcacgccaaggtgacccttgagcctttagagcgtggctttggccatactctgggtaacgcactgcgccgtattctgctctcatcgatgccgggttgcgcggtgaccgaggttgagattgatggtgtacttcatgagtacagcaccaaagaaggcgttcaggaagatatccttgaaatcctgctcaacctgaaagggctggcggtgagagttcagggtaaagatgaagttattcttactctgaataaatctggcattggccctgtgactgcagccgacatcacccatgacggtgatgttgaaatcgtcaagccgcagcacgtgatctgccacctgaccgatgagaacgcagctattagcatgcgtatcaaagttcagcgcggtcgtggttatgtgccggcttctgcccgaattcattcggaagaagatgagcgcccaatcggccgtctgctggtcgacgcatgctatagccctgtagagcgtattgcctacaatgttgaagcagcgcgtgtagaacagcgtaccgacctggacaagctggtcatcgaaatggaaaccaacggcacaatcgatcctgaagaggcgattcgtcgtgcggcaaccatcctggcagaacaactggaagctttcgttgacttacgtgatgtacgtcagccggaagtgaaagaagagaaaccagaattcgatccgatcctgctgcgccctgttgacgatctcgagttgactgtccgctctgctaactgcctcaaggcagaagctatccactatatcggtgatctggtacagcgtaccgaggttgagttgctgaaaacgccgaacctgggtaaaaaatctcttactgagattaaagacgtgctggcttcacgtggtctgtctctgggcatgcgcctggaaaactggccaccggcaagcattgctgacgag

SEQ ID NO: 19940 - DNA, 189 bp, Enterobacter cloacae
atgaaagcaaaagagctgcgtgaaaaaagcgttgaagagctgaacgctgagctgctgaacctgctgcgtgagcagttcaacctgcgtatgcaggctgcaagtggccagctgcaacagactcacctgctgaagcaagtgcgtcgcaatgttgcacgcgttaagactttactgactcagaaggcgggtgcg

SEQ ID NO: 19941 - DNA, 351 bp, Enterobacter cloacae
atggataagaaatctgctcgtatccgtcgtgcgacccgcgcacgccgcaagctcaaagagctgggtgcaactcgcctggtggtacatcgtaccccgcgtcatatttacgcacaggtaattgcaccgaacggttctgaagttctggtagctgcttctactgtagaaaaagctatctcagaacaattgaagtacaccggtaacaaagacgccgctgcagctgtaggtaaggctgttgctgaacgcgctctggaaaaaggcatcagcaatgtttcctttgaccgttccgggttccaatatcatggtcgtgtccaggcactggcagatgctgcccgtgaagctggccttcagttc

SEQ ID NO: 19942 - DNA, 620 bp, Enterobacter cloacae
atggcaagatatttgggtcctaagctcaagctgagccgtcgtgagggcaccgacttattccttaagtctggcgttcgcgcgatcgataccaagtgtaaaattgaacaagctcctggccagcacggtgcgcgtaaaccgcgtctgtctgactatggtgtgcagttgcgtgaaaagcaaaaagttcgccgtatgtacggtgtgctggagcgtcagttccgtaactactataaagaagcagcacgtctgaaaggcaacacaggtgaaaacctgctggctctgctggaaggtcgtctggacaacgttgtataccgtatgggcttcggcgctactcgtgctgaatcacgtcagctggttagccacaaagcaatcatggtaaacggtcgtgttgttaacatcgcttcttatcaggttaaagcgaatgacgttgttagcattcgtgagaaagcgaaaaagcaatctcgcgtgaaggccgctctggagctggctgagcagcgtgaaaagccaacctggctggaagttgatgctggcaagatggaaggtacgttcaagcgtcaccagaacgttctgatctgtctgcggacattaacgaacacctgatcgtcgagctttactccaagtaa

SEQ ID NO: 19943 - DNA, 408 bp, Enterobacter cloacae
atgttacaaccaaagcgtacaaaattccgtaaagtgcacaaaggccgcaaccgtggtctggcgcagggtacggatgttagcttcggcactttcggtctgaaagctgttggccgtggtcgtctgactgcacgtcagatcgaagcagcacgtcgtgcaatgacccgtgcagttaagcgtcaaggtaagatctggatccgtgtattcccggacaaaccgatcaccgagaagccactggaagttcgtatgggtaaaggtaaaggtaacgtggagtactgggttgccttgatccaaccgggcaaagtcctttatgaaatggacggtgttccggaagagctggcccgtgaagccttcggcctggcagcagcgaaactgcctatcaaaaccacctttgtaactaagacggtgatg

SEQ ID NO: 19944 - DNA, 531 bp, Enterobacter cloacae
atgtctcgtgttgctaaagcaccggtcgttattcctgccggcgttgatgtaaaaatcgacggtcaggttattacgatcaaaggtaaaaacggcgagctgactcgtaccctcaacaaagctgttgaagttaaacatgcagataacgctctgaccttcggtccacgtgatggtttcgtggatggatgggctcaggctggtaccgcgcgtgccctgctgaactcaatggttgttggtgttaccgaaggcttcactaaaaagcttcagctggttggtgtaggttatcgtgcagctatcaaagggaatgcagtaggcctgtctctgggcttctcacaccctgttgagcatccgctgccggccggtatcactgcagaatgtccgactcaaactgaaatcgtgctgaaaggcgctgataagcagctgatcggtcaggttgcagcagatctgcgcgcctaccgtcgtcctgagccttacaaaggcaagggtgttcgttacgccgacgaagtcgtgcgtaccaaagaggctaagaagaag

SEQ ID NO: 19945 - DNA, 387 bp, Enterobacter cloacae
atggcaaaggcaccagttcgtgcacgtaaacgtgtaagaaaacaagtctctgacggcgtggctcatatccatgcttctttcaacaacaccatcgttactattactgatcgtcagggtaacgcattgggttgggcaacagccggtggttccggtttccgtggttctcgcaaatccactccgttcgcagctcaggttgcagcagagcgttgcgcagaagccgtaaaagaatacggcatcaagaatctggaagttatggttaaaggtccgggtccgggtcgtgaatctactgttcgcgctctgaacgccgctggtttccgcatcacgaatattactgatgtgactccgatccctcataacggttgtcgtccgccgaaaaaacgtcgcgta

SEQ ID NO: 19946 - DNA, 699 bp, Enterobacter cloacae
atgggtcagaaagtacatcctaatggtattcgcctgggtattgtaaaaccatggaactctacctggtttgcgaacaccaaagaattcgctgacaacctggacagcgattttaaagtacgtcagtacctgactaaggaactggctaaagcgtctgtatctcgtatcgttatcgagcgtccagcgaagagcatccgtgtgactattcacactgctcgtcctggcatcgttatcggtaagaaaggcgaagacgtagaaaaactgcgcaaggtcgtagcggatatcgctggcgttcctgcacagatcaatatcgctgaagttcgtaagcctgaactggacgctaaattggttgctgacagcatcacttcacagctggaacgtcgtgttatgttccgtcgtgctatgaagcgtgctgtacagaacgcaatgcgtctgggcgctaaaggtatcaaagttgaagttagcggccgtctgggcggcgcggaaatcgcacgtaccgaatggtaccgcgaaggtcgcgtaccgctgcacactctgcgtgctgacatcgactacaacacctctgaagcgcacaccacttacggtgtaatcggcgttaaggtatggatcttcaaaggtgagatcctgggtggtatggctgctgttgaacaaccggaaaaaccggctgctcaacctaaaaagcagcagcgtaaaggccgtaaa

SEQ ID NO: 19947 - DNA, 390 bp, Enterobacter cloacae
atgagcatgcaagatccgatcgcggatatgctgacccgtatccgtaacggtcaggccgcgaacaaagttgcggtcaccatgccttccgccaagctgaaagtggcaattgccaacgtgctgaaggaagaaggttttatcgaagattttaaagttgaaggcgacaccaagccggaactggaacttactcttaagtatttccagggtaaagctgttgtagaaagcattcagcgtgtcagccgcccaggcctgcgcatctataagaaaaaagatgagctgccaaaagttatggctggtcttggtatcgcagttgtttctacctctaaaggtgttatgactgatcgtgcagcgcgccaggctggtcttggtggcgaaattatctgctacgtagcc

SEQ ID NO: 19948 - DNA, 354 bp, Enterobacter cloacae
gtggcccgtatagcaggcattaacattcctgatcagaaacatgctgtgatcgcattaacttcgatctacggcgtcggcaagacccgttctaaagccattctggctgcagcgggtatcgctgaagatgttaagatcagtgagctgtctgaagaacaaatcgacacgctgcgtgacgaagttgccaaatttgtcgttgaaggtgatctgcgccgtgaaatcagcatgagcatcaagcgcctgatggatcttggttgctatcgcggtttgcgtcatcgtcgtggtctgccagtgcgcggtcagcgtactaagaccaacgcacgtacccgtaagggtccgcgcaaaccgatcaagaaa

SEQ ID NO: 19949 - DNA, 330 bp, Enterobacter cloacae
atggaaactttagctcaacatcgccatgctcgttcttctgctcagaaggttcgccttgttgctgacctgattcgcggtaagaaagtgtcgcaggccctggacatcctgacctataccaacaagaaagctgcggtattggtcaagaaagtactggaatctgccattgctaacgctgaacacaacgatggcgctgacatcgacgatctgaaagtcgcgaaaattttcgtagatgaaggcccaagcatgaagcgcattatgccgcgtgcgaaaggtcgtgcagatcgcatcctgaagcgcaccagccacattactgtggttgtgtccgatcgc

SEQ ID NO: 19950 - DNA, 303 bp, Enterobacter cloacae
atggctaagcaatcaatgaaagcacgcgaagtaaagcgcgtagctttagctgataaattcttcgctaaacgcgctgaactgaaagcgatcatttctgatgtgaacgcttccgacgaagatcgttggaatgcggttctcaagctgcagtctctgccgcgtgattccagcccgtctcgtcagcgtaaccgctgtcgtcaaacaggtcgtccacatggttatgtgggcaagtttgggttgagccgtatcaaactgcgtgaagccgccatgcgcggtgaagtgccaggcttgaaaaaggctagctgg

SEQ ID NO: 19951 - DNA, 276 bp, Enterobacter cloacae
atgccacgttctctcaagaaaggtccttttattgacctgcacttgctgaagaaggtagagaaagcggtggaaagcggagacaagaagcccctgcgcacttggtcccgtcgttcaacgatctttcctaacatgatcggtttgaccatcgctgtccataatggtcgtcagcacgttccagtctttgttaccgacgaaatggttggtcacaaactgggtgaattcgcaccgactcgtacttatcgcggccacgctgctgataaaaaagcgaagaagaaa

SEQ ID NO: 19952 - DNA, 537 bp, Enterobacter cloacae
atggcgaaactgcatgattactacaaagacgaagtagttaacaaactcatgactgagtttaactacaattctgtcatgcaagtccctcgggtcgagaagatcaccctgaacatgggtgttggtgaagcgatcgctgacaagaaactgctggataacgcagcagccgacctgacagcaatctccggtcaaaaaccgctgatcaccaaagcacgcaaatctgttgcaggcttcaaaatccgtcagggctatccgatcggctgtaaagtaactctgcgtggcgaacgcatgtgggagttctttgagcgcctgatcactattgctgttccacgtatccgtgacttccgtggcttgtccgctaagtctttcgacggtcgtggtaactacagcatgggtgtccgtgagcagatcatcttcccagaaatcgactacgataaagtcgaccgcgtgcgtggtttggatattaccattaccactactgcgaaatctgacgaagaaggccgttctctgctggctgcctttgacttcccgttccgcaag

SEQ ID NO: 19953 - DNA, 1360 bp, Enterobacter cloacae
atgattagcgtattcgatatcttcaaaatcggtattggtccttccagctctcacaccgtcggaccaatgaaagccggtaagcagttcacggatgacttgattgcacgcggcatcttgcatgacgttacccgcgtggttgtcgatgtatacggctcgctttccctgaccgggaaaggccaccataccgatatcgccattatcatgggcctggcgggaaacctgccggataccgttgatattgatgcgatccctggcttcatccaggatgtgaacacccacggtcgcctgctgctggcgaacggtgagcatgaggttgaattcccggttgaccactgcatgaatttccatgcggacaacctgtcgctgcacgaaaacggcatgcgcattaccgcgctggccggcgacaaagcggtatacagccagacgtattactctatcggcggcggcttcatcgtcgacgaagaccactttggtcaaaccaatacctcttctgtcgaagtgccgtatccgtacaaaacggcggcggatcttcagcgtcactgtcaggagacgggcctttccctctccggcctgatgatgaaaaacgagctggcacttcacagtaaagaagagctcgaacagcacttcactaacgtctgggaagtgatgcgcggcggtattgagcgcgggatcaccaccgaaggcgttctgccgggcaagcttcgcgtgccgcgtcgcgctgctgcgctgcgccgtatgctggtgagcaccgacaaaacgacgacggacccgatggccgttgtagactggatcaacatgttcgccctggcggtaaacgaagagaacgccgcaggggggccgcgtggtcaccgcgccgactaacggcgcctgcggtatcgttccggcggtgctggcgtactacgacaagtttatccgtgaagtgaacgcgaactcgctggcgcgctacctgctggtcgccagtgcgattggttcgctgtataagatgaacgcgtctatttccggtgcggaagtgggctgtcagggtgaagtcggcgtggcgtgctccatggcggcggcgggtctggccgaactgctgggtgcaagcccgacacaggtgtgcattgctgcggaaatcggcatggaacataacctgggactgacctgtgacccggttgccggacaggtacaggtgccgtgcatcgaacgtaacgcgattgcctcagtgaaggcggtgaacgcggcacgtatggcgctgcgccgcaccagcgagccgcgcgtctgtctcgataaggttatcgaaaccatgtacgaaacaggtaaagatatgaacgccaaataccgcgaaacctctcgcggcggcctggcgatgaagatcgtgacc

SEQ ID NO: 19954 - DNA, 1293 bp, Enterobacter cloacae
atggaaaccactcaaaccagcaccgttgcttcgattgaatcccgaagtggttggcgcaaaacggataccatgtggatgcttggcctttacggcacggcaatcggcgctggtgtactgttccttcctatcaacgcaggcgtcggcggtctgatcccgctgatcattatggctatcattgctttcccgatgaccttctttgcacaccgcggtctgacccgcttcgtgctgtccggtaaaaacccgggtgaagacatcactgaagtggttgaagagcatttcggcgtgggcgcaggtaaactgattaccctgctctacttcttcgcgatttaccctatcctgttggtttacagcgtggcgatcaccaacaccgttgaaagcttcatgctgcaccagctgcacatgacgccgccaccgcgtgccatcctgtctctgatcctgattgtcggcatgatgaccatcgtgcgcttcggtgagcagatgattgtgaaagcgatgagcgtactggtgttcccgtttgtggccgcactgatgctgctggcctgctacctgatcccacagtggaacggtgcagcgctggaaaccctgtccctgagcagcgcatcggcaaccggtaacggcctgctgatgaccctctggctggcgattccggtgatggtgttctccttcaaccactccccaatcatctcctctttcgccgtggcgaaacgtgaagagtacggtaatggcgcagagaagaagtgctccagcatcctggcgcgcgctcacatcatgatggtactgaccgttatgttcttcgtcttcagctgcgtactgagcctctccccggcggatctggcggcagcgaaagagcagaacatctctattctgtcttacctggcgaaccactttaacgcaccggtcattgcgtggatggcaccaatcatcgcgattatcgccatcaccaaatccttcctgggccactacctcggcgcgcgtgaaggcttcaacggtatggtgattaaatctctgcgcggtaaaggcaagagcattgaaatcaacaagctgaacaaaatcactgcactgttcatgctgctcaccacctgggcggtagcgaccctgaacccaagcatcctgggcatgattgaaaccctgggcggcccggtcatcgcgatgattctgttcctgatgccgatgtacgcgattcagaaagtccctgctatgcgcaagtacagcggtcatgtcagcaacgtctttgtggttatcatggggcttatcgctatctctgcgatcttctactccctgtacaccatgttc

SEQ ID NO: 19955 - DNA, 948 bp, Enterobacter cloacae
atgaaccagctagacggcatcaaaaaattcaccaccgtggttgcagacagcggcgatatcgagtcgattcgccactatcagccggaggacgcgaccactaacccttcgctactgctcaaagctgcagggcttgcccattttagccatctgattgatgacgccattgcctacggtaaacagcgcgggaaaacgcaggagcagcaggtcgccgaagccagcgataagctggcggttaattttggtgcggaaattcttaaaagcatcccgggccgcgtctcgaccgaagtcgacgcccgcctctcgttcgataaagaaaagagcattaataaggcgcgtcgcctggtggaactgtacgaggagcaggggatcgataaatcacgcattctgatcaagctggcctccacctgggaaggcatccgcgcggcagaggtgctggagaaagaaggcatccactgcaacctgacgctgctgttttcgtttgcccaggcgcgcgcctgcgctgaggcgggtgtgttcctcgtctcgccgtttgtcgggcgcatctacgactggtatcaggcgaaacagccgatggatccatacgtggtggatgaggatccgggcgtgaaatcggtccgtaatatctacgactactacaaacagcaccgctacgaaaccatcgtgatgggggccagcttccgccgtaccgagcagatcctcgccctggcaggctgcgaccgtctgaccatctcccctaacctgcttcaggagctacaggacaaagaagaaacggtgatccgcaagctggtgccgacctccaccgttctgccaaaaccgaaacccatgaccgaagcggagttccgctgggagcacaatcaggacgccatggccgtggaaaaactggcggacggcatccgccagttcgccgtcgaccagcgcaaacttgaagatcttctcgccgccaaactt

SEQ ID NO: 19956 - DNA, 594 bp, Enterobacter cloacae
atgacccaattccctgaagtttctgcttcacgccaggacatccgtcagttaattcgtcagcgccgccgtgcgttaaccgccgatcagcaagcgcattttgcccagcaggccgccgcccgtatgatggcgtatccccctgtcgtgatggcgcacaccgttgcgctgtttctgtcatttgatggagagctggatacccaaccgctgatagagcagctctggcgcgccgggaagaaggtctatctgccggtgctgcacccgttcagcgaaggtaatttgctgtttctgcactaccacccgcacagcgaactggtggtgaatcgcctgaaaatcaccgaaccgaaactcgacgtgcgcgacgtgctcccgctgtcacagctggatgtgctgattacaccgctggtggcgtttgatgaacagggccagcgtttagggatgggcggcggtttttatgaccggacgctgcaaaactggcagcagtacgggttgcagccggtgggctatgcgcatgattgtcagggcgtggaggcgttgccggtggagaagtgggatgtgccgttgccggcggtggtgacgccgtcgaagttgtgggaatgg

SEQ ID NO: 19957 - DNA, 1161 bp, Enterobacter cloacae
atgtctgtaattaagatgaccgatctggatctggctggtaaacgcgttttcatccgtgccgatctgaacgtgccggttaaagatggcaaagtgaccagcgacgcgcgtatccgtgcatcactgccaaccatcgaactggctctgaagcagggcgcgaaagtgatggtcacctcccacctgggtcgtccaactgaaggcgagtacaacgaagagttctctctgctgccagtggttaattacctgaaagacaaactgtccaacccggttcgcctggttaaagattacctggacggcgttgaagtggcagccggtgaactggttgttctggaaaacgttcgcttcaacaaaggcgaaaagaaagacgacgaaactctgtccaaaaaatacgctgcactgtgcgacgtgttcgtgatggatgcattcggtacggctcaccgtgctcaggcgtcaacccacggtatcggtaaattcgcagacgttgcgtgtgccggtcctctgctggctgacgaactggaagcgctgggtaaagcactgaaagaacctgctcgtccaatggtggctatcgttggtggttctaaagtttccaccaaattgaccgttctggattccctttctaaaatcgctgaccagctgatcgttggcggtggtatcgcgaacaccttcgttgccgctcagggccacaacgtgggcaaatccctgtacgaagcagacctagttgacgaagccaaacgcctgctgggtacctgtgatatcccggttccaactgacgttcgcgtcgcgaccgagttctccgagaccgcaaccgcgactctgaaatctgtcaacgacatcaaagacgaagagcagattctggatctgggcgacgtttctgcacagaaactggctgaaatcctcaaaaacgcgaaaactatcctgtggaacggtcctgttggcgtgttcgaattcccgaacttccgcaaaggtactgaaatcgttgctaacgctatcgcagacagcgaagcgttctctatcgcaggcggtggtgacaccctggcagcaatcgacctgttcggtatcgctgacaagatctcctacatctccactggtggcggcgcattcctcgaattcgtggaaggcaaagtactgccagcagtagcaatgctcgaagagcgcgctaagaag

SEQ ID NO: 19958 - DNA, 891 bp, Enterobacter cloacae
atgaaacgtccggactacagaacactacaggcacttgatgcagttattcgtgaacgcggttttgagcgcgcggcgcaaaagctttgcatcacccagtccgccgtatcacagcgtatcaaacagcttgaaaacatgttcggccagccgctgctggtgcgcaccgtgccgccacgtccaaccgagcaagggcaaaagcttctcgccctgctgcgccaggttgaactgctggaagacgagtggctgggtgacgaacaaacgggctctacgccgctgctgctctctctggcggtcaacgccgacagtctcgcaacctggctgctgccggcccttgcgccggtattagcggactcccctatccgcctgaatttacaggttgaggatgaaacccgtacccaggaacgcctgcgtcgcggtgaagtggttggggcggtcagtatccagcctcaggccttgccaagctgtcttgtcgatcagttgggcgcgctggactatctgtttgtgggttcaaaagcctttgccgagcgctacttcccgaacggcgtcacccgcgccgcgctgctgaaagcccctgcagtggcgttcgaccatctggacgatatgcatcaggcgttcctgcagcaaaacttcgatctgccgccgggcagcgtgccgtgccatatcgtcaactcgtctgaagcctttgtgcagcttgcgcgtcagggcaccacctgctgcatgatcccgcatctgcagattgagaaagagttaaaaagcggtgagctgattgacctgacgccggggctgtatcagcgccggatcctctactggcaccgttttgcgccggaaagccgcatgatgcgcaacgtcaccgacgcgctgctagcgtacgggcacaaggtgttgagacaggat

SEQ ID NO: 19959 - DNA, 1989 bp, Enterobacter cloacae
atgtcctcacgtaaagagcttgctaatgctattcgtgcgctgagcatggacgcagtacagaaagccaaatccggccacccaggggctcctatgggtatggctgatatcgccgaagtcctgtggcgtgatttcctgaaccacaacccgcagaacccgtcatgggctgaccgcgaccgcttcgtgctgtccaacggccacggctcaatgctgatctatagcctgctgcacctcaccggctacgatctgccaattgaagagctgaaaaacttccgtcagctgcactccaaaactccaggtcacccggaagtgggttacaccgctggcgtagaaaccaccaccggcccgctgggtcagggtattgctaacgctgtgggtatggcgattgccgagaagacgctggcggcgcagttcaaccgtcctggtcacgacatcgtagaccacttcacctacgcgttcatgggcgacggctgcatgatggaaggcatttctcacgaagtgtgctccctggcaggtaccctgaagctgggcaaactggttgcgttctatgacgacaacggtatctccatcgacggtcacgttgaaggctggttcaccgacgacaccgcagcacgtttcgaagcctacggctggcacgtagtgcgtggcgttgatggtcacgatgctgactcgattaaacgtgcagtggaagaagcgcgcgcggtgacggacaaaccgtccctgctgatgtgcaaaaccatcatcggcttcggctccccgaacaaagcgggtactcacgactcccacggcgcgccattgggtgatgcggaaatcgcacttacccgcgaagcgctgggctggaaacaccctgcattcgaaatcccatctgagatctacgctcagtgggatgcaaaagaagtaggccaggcgaaagaagcggcctggaacgagaaattcgctgcctatgcgaaagcgttcccgcaggaagcggctgaattcacccgtcgtatgaaaggtgatatgccgtctgacttcgacgcgaaagcgaacgaattcatcgctaagctgcaggcgaacccgtctaaaatcgcgagccgtaaagcgtctcagaatgcgattgaagcgttcggcccatggcttccagaattcctgggcggctccgctgacctggcaccatctaacctgaccctgtggtctggttctaagccaatcaacgaagatacagccggtaactacatccattacggtgtacgtgaattcggtatgaccgcgattgccaacggtatctccctgcacggcggtttcctgccgtacacctctaccttcctgatgttcgttgaatacgcacgtaacgccgtgcgtatggccgcgctgatgaaacagcgtcaggtgatggtctacacccacgactccatcggtctgggcgaagatggtccaactcaccagccggtagagcaggtggcttccctgcgcgtgaccccgaacatgagcacatggcgtccatgtgaccaggttgaatccgcggtggcgtggaaatatggcgttgagcgtcaggacggtccaaccgcgctgatcctctcccgtcagaacctggcacagcaggagcgtacgccagagcagctggcgaacatcgctcgcggtggttacgtgctgaaagattgcgcgggccagccggagctgatcttcatcgccaccggttctgaagttgaactggcggttgcagcgtgggaaaaactgactgccgaaggcgtgaaagcgcgcgtggtttccatgccgtctaccgacgcgttcgacaagcaggatgccgcttaccgtgaatccgtgctgcctaaagcggtttccgctcgcgtggcagtggaagcgggtatcgctgactactggttcaaatacgtgggcctgaacggcgctatcgtcggtatgaccaccttcggtgaatctgctcctgcagaacagctgttcgaagagttcggcttcaccgttgagaacgttgtcgcgaaagcgaaagaactgctg

SEQ ID NO: 19960 - DNA, 738 bp, Enterobacter cloacae
gtgaagtttaaggtgatggccctggcggcattagtaagttttggtgcggtgtcggtgcaggcaagtgaactgccggatggcccgcacatcgtcacttcaggcaccgcaagcgtggacgcggtacccgatgtcgcaacgctggcaattgaagtcaatgtgtctgcgaaagatgcggcatctgccaagaagcaggctgacgatcgtgttgcgcaatacctctctttccttgagcagaacggtgtcggtaaaaaagatatcaactccgcgaacctgcgtactcaacccgattatgactaccagaatggtaaaagcatcctgaaaggctaccgtgccgtgcgtaccgtcgaagtgaccgtgcgtcagctggataagcttaactcgctgctggatggcgcgctgaaggcgggtcttaacgaaattcgttcagtgtcgctgggcgttgcgcaaccggaaaaatacaaagacgaagcgcgtaaagcggcgattgatgatgccattcaccaggcggaacagctggcttcaggctttaagagcaagctcggcccggtttacagcgtgcgttaccacgtctctaactaccagccaagcccgatggtacggatgatgaaggctgatgcagccccggtgtctgctcaggaaacatacgagcagccaaccattcagtttgacgatcaggtggatgtggtgttccagctggagccaactcaaactcagcaaactgaggcggctaaggcgcag

SEQ ID NO: 19961 - DNA, 815 bp, Enterobacter cloacae
gtgatcaccggcgtgccgttcgatatggcaacatctggccgcgcgggtggtcgtcacggcccggcagcgatccgtcaggtttccactaacctggcctgggagcataaccgcttcccgtggaacttcgacatgcgcgacgcctgaacgtggtggactgcggtgacctggtgtacgccttcggcgacgcgcgtgagatgagcgagaagctgcaggcgcacgccgagaagctgctggctgccggtaagcgcatgctctccttcggcggcgaccacttcgtgaccctgccgctgctgcgcgcccacgcgaagcacttcggtaaaatggcgctagtgcacttcgatgcgcataccgacacctacgcgaacggctgcgagttcgaccacggcacaatgttcttcaccgcgccgaacgaaggtctgatcgacccgaaccactccgtgcagatcggtattcgcaccgagttcgacaaagacaacggtttcaccgtgctggatgcgggccaggttaacgatcgcggcgtcgacgacatcatcgctcaggtgaagcagatcgtgggtgatatgcccgtgtatctgaccttcgacatcgactgtctggatccggcatttgcaccgggcaccggtacgccggtcatcggcggtttgacctcagatcgtgccattaagctggtgcgcggcctgaaggatctgaacattgtcgggatggacgtggtggaagtggcgcctgcgtacgaccagtccgagatcaccgcgctggccgcagcgactctggcgctggaaatgctctacattcaggcagccaaaaaaggcgaataa

SEQ ID NO: 19962 - DNA, 291 bp, Enterobacter cloacae
gtggcgcacgtattcggtgaacgcacgttggtcacgctggagcgtcttctgggcctgctgtcggcctttgaggtcgtggtatggatgacggatggctggccgctttatgaatcacgcctgaagggagaactgcacgttatcagcaagcgatatacgcagcgcattgagcggcataacctgaatctgaggcagcatctggcaaggctgggcaggaagtcactgtctttctcaaaatcggtggagctgcatgacaaagtcatcgggcattatctgaacataaaacactatcag

SEQ ID NO: 19963 - DNA, 273 bp, Enterobacter cloacae
gtggcttctgtttctatcagctgtccctcctgttcagctactgaaggcgtggtgcgtaacggtaaaagtactgccggacatcagcgctatctctgctctcactgccgtaaaacatggcagctacagttcacttacatcgcctctcagcccggtacacaccagaaaattattgatatggccatgaatggcgtcggatgtcgcgccagtgcacgcattatgggcgttggcctcaacacgattttacgacacttaaaaaactcaggccgcagtcgg

SEQ ID NO: 19964 - DNA, 1020 bp, Enterobacter cloacae
atgatcagaattatagggtgctcgctctgctccattaccgagcacgaaggccgtattatccagagccgctctgaagattcgatcatcaatgagatcgaagcgattcgcgactcggtgccgggctttaccggcgtgatttccgaccttggcggcccaaccgcgaacatgtacatgctgcgctgcaagtcgccgcgcgcggagcaaacctgccgtcgcctctcctgcgtctatccgagcatttgcgagcatatggacaccaaccatgagccgacgatcaacctctaccgccgcgcgcgcgacctgaagggcatcaagaagatcctgatcgcgtccggagtacgttacgacatcgccgtggaagatccgcgctacatcaaagagctggcgacgcaccacgtcggcggctatctgaagattgcgccggagcacaccgaggaaggcccgctgtcgaaaatgatgaagccgggcatgggcagctacgatcgctttaaagagctgttcgatacctattcaaagcaggcgggtaaagagcagtatctgatcccatactttatctccgcccacccgggcacgcgcgatgaagacatggtgaacctggcgctgtggctgaagcagcgtcgcttccgtctggatcaggtgcagaacttctatccgtcaccgctcgccaactcgacgaccatgtattacaccggcaagaacccgctgagtaagattggccacaagagtgacgaggtggtggtgccgaaaggggataaacagcgtcgtctgcataaagcgctgctgcgttaccacgatccgaaaaactggccgctgatccgtcaggcgctggaagagatgggtaaaaaacacctgatcggctcgcgccgcgactgtctggtaccggccccaacgctggatgagatgcgcgaagcgcgtcgccagaaccgcaatacgcgcccggcgctgaccaagcacacgccgattgtgcatcagcgttcgaacggtaattcgagtgtgaagaagcccgtgaagcgcaaagcg

SEQ ID NO: 19965 - DNA, 1038 bp, Enterobacter cloacae
atgtcctggcacccttaccctggccgctatgagagtatgcaatatcgttattgcggtaaaagtggcctgcgcctgcccgcgctgtcgctgggactgtggcatagtttcggccacgtccagcctcttgacgcccagcgcgcactgctgcgaaaagccttcgacctcggcatcacccatttcgatctcgccaataactatggcccgccgccgggcagcgcggaggagaatttcggccgcctgctgcgtgaggactttgccgcgtaccgcgacgagctgattatctccaccaaggcgggttacgacatgtggccggggccgtacggttcgggcggttcacgcaaatatctgctcgccagcctcgaccagagcctgcagcgtctgggcgtcgactacgtggatattttctactcccaccgcgtggatgaaaacacgccgatggaagagacggcctccgcgctggcccacgccgtgcagagtgggaaagcgctgtatgtcggcatttcctcctactcgaccgatcgtacgcagaaaatggccgagctgctgcgcgagtggaagatcccgctgctgatccaccagccgtcctataacctgcttaaccgctgggtcgataagaccggcctgctggatgcgctggaagcaaacggtacggggtgtattgcctttaccccgctggcgcaggggctgctgaccggaaaatacctgaacggtattcctgaaggttcacgcatgcagcgcgaagggaataaagcgcgcggcctgacgcagaagatgctgaccgacgccaacctgagcagccttcgcctgctgaatgagatggcgcaggcgcgcggacaaacgatggcgcagatggcgctaagctggctgctgaaagatacgcgcgtgacgtccgtgctgattggcgcaagccgcccggaacagctggaagagaatgttcaggcgctggaaaacctgcgctttacggaggacgaactcaagcggattgaccagcatgttgcggatggagagttgaatctgtggcaggcgtcgtcggataaa

SEQ ID NO: 19966 - DNA, 639 bp, Enterobacter cloacae
atgaaatcgtatcagcgccagtttattgagtttgcgcttaacaagcaggtacttaagtttggcgaatttacgctgaaatccgggcgtaagagtccctatttcttcaacgccgggctgtttaataccgggcgcgatctggcactgttaggccgtttctatgccgaagcgctggtggattccgggattgattttgacctgctgtttggcccggcctacaaaggcattccgattgcgaccaccaccgcggtggcgctggcggaacaccatgaccgcgacgtgccctactgctttaaccgcaaagaggctaaaacccacggcgaaggcgggaatctggtcggcagcgcgctgcagggccgcgtcatgctggtcgatgacgtaatcactgcgggcacggcgatccgcgaatcgatggaaattatccaggccaacggtgcgacgctggctggcgtgctgatttcgctggatcgtcaggagcgtggccgtggcgagatttccgctattcaggaagtggagcgtgactataactgcaaagtgacgtcgattattaccctgaaagagctgattgcgtatctggaagagaagcctgaaatggcggaccatctggcagcggtaaaagcgtatcgcgaagagttcggggtg

SEQ ID NO: 19967 - DNA, 2112 bp, Enterobacter cloacae
ttgtatctgtttgaaagcctgaatcaactgattcaaacctacctgcctgaagaccagattaagcgtcttcagcaggcgtatctcgttgcacgtgacgctcacgagggccagacacgttcaagcggtgaaccctatatcacgcacccggtagcggtggcctgtattctggccgagatgaaactcgactacgaaacgctgatggccgccctgctgcatgacgtgatcgaagatacccctgccacttatcaggacatggaacagctgtttggcaaaagcgttgccgaactggtggaaggggtctctaagcttgataagctgaatttccgcgacaagaaagaggcgcaagccgaaaacttccgcaagatgattatggcgatggtgcaggatatccgcgtcattctcatcaaactcgctgaccgtacccacaacatgcgcacgctgggctcacttcgcccggataaacgtcgccgcattgcccgtgaaactctcgaaatctacagtccgctggcgcaccgtttaggtattcaccacattaaaaccgagctggaagagctgggttttgaagcgttgtacccgaaccgctatcgcgtgattaaagaggtggtgaaagccgcacgcggtaaccgtaaagagatgattcaaaaaatcctctcggaaattgaagggcgcttacaggaagcgggaatcccgtgccgcgtcagcggtcgtgaaaaacatttgtactccatctactgcaaaatggtgctcaaagagcagcgttttcactcgatcatggatatctacgcttttcgcgtgatcgtccacgactcggacacctgttatcgcgtgctggggcagatgcacagcctctacaaaccgcgtccggggcgcatgaaagattacatcgctatcccaaaagcgaacggctatcaatctttgcacacctcgatgatcggtccgcacggcgtgcctgttgaggtgcaaattcgcaccgaagacatggaccagatggcagagatgggtgttgccgcacactgggcgtataaagagcacggtggcgaaagcagcacgaccgcacaaattcgcgcccagcgctggatgcagagcctgctggagcttcagcagagtgcgggtagctcgtttgaatttatcgagagcgttaaatccgatctcttcccggatgagatttacgttttcacccctgaaggccgcattgtcgaactgcctgcgggcgcaacgccggtcgacttcgcttacgccgtgcacaccgatatcgggcatgcctgcgtcggcgcgcgcgtcgacagacagccttatccgctctctcagccgctctccagcggccagacggtagaaattattaccgcgccgggcgcacgtccgaacgcggcctggctgaactttgtcgtgagctccaaagcacgcgccaaaattcgccagctgctgaaaaacctcaagcgtgatgattccgtcagcctggggcgtcgtctgctcaaccacgcgttgggcggcagccgtaagctggctgaaattccgcaggagaacgtccagcgcgagctggagcgcatgaagctcgcgtcgcttgatgacctgctggcagagattggcctcggcaacgccatgagcgtggtggtggcgaagaacctgcagcaaggcgacacgacagcggtgcctgcaaccacgcaaagccacggacacctgccgattaaaggcgcggatggggtgctgatcaccttcgcaaaatgttgccgtccaatacctggcgacccgattattgcgcacgtcagcccgggcaaagggctggttatccaccacgaatcctgtcgtaacattcgcggctaccagaaagaggccgagaagtttatggcggtcgagtgggataaagagacggcgcaggaatttatcaccgaaattaaggtggatatgttcaaccatcagggtgccctggcgaacctgacggcagcgatcaacacggcttcttccaacattcaaagcctgaatacggaagaaaaagatggccgcgtgtacagcgcctttattcgtctgaccgcccgcgaccgcgtgcatctggcgaatattatgcgcaagatccgcgtcatgccggacgtgattaaagtcacccgaaaccgaaac

SEQ ID NO: 19968 - DNA, 861 bp, Enterobacter cloacae
atgatccgcagtatgaccgcctacgcccggcgtgaaatcaagggtagctggggtagcgccacatgggaaatgcgctcggtaaaccagcgttacctggaaacgtatttccgtatgccggagcagttccgcagccttgagcctgtcgtacgtgaacgtatccgtacgcgtctgacgcgcggaaaagtggaatgtaacctgcgctttgagcccgatgccagcgcacagggcgagctcatcctcaacgaaaaactggcgaaacagctcgtgaatgcagcgaactgggtcaaaatgcagagcgatgaaggcgaaatcaacccggttgatattctgcgctggcctggcgtcatggcggccggtgagcaggatctggatgctattgccgctgaaatcctggcagccctcgacggcacgctggacgactttatcgttgcccgcgaaaccgaaggccaggcgctgaaagcgatgattgagcagcgccttgaaggcgtgagcaccgaagtagcgaaagtccgcacccatatgccagaagtgctgcaatggcagcgcgagcgccttgtcgccaaactggaagaagcggaagttcagctggaaaacacccgtctggaacaagagctggtgctgatggcgcagcgtattgatgtcgctgaagagctggaccgtctggaagcgcacgttaaagaaacctacaacattctgaagaagaaagaagctgtgggccgccgtctggactttatgatgcaggagttcaaccgcgagtcgaacaccctggcgtctaaatcgatcaatgcagaagtgacgaattcagcgattgagctgaaagtgctgattgagcagatgcgcgagcagatccagaatatcgaa

SEQ ID NO: 19969 - DNA, 1318 bp, Enterobacter cloacae
atgccattagtcatcgttgctatcggtgttgtgttattactgctcttgatgatccgcttcaaaatgaacggatttatcgctctggttctggtggcacttgcagtcggtctgatgcagggtatgccgctggttaaagttataagttccatcaaagccggcgtcggcggcacgctcggcagcctggcgctgatcatgggcttcggcgccatgctcggcaaaatgctggcagactgcgggggcgcgcagtaatcgccaccacgctgattgccaaatttggcaagaagaacatccagtgggcggtggtattaaccggttttaccgtcggcttcgcgctgttctatgaagtgggcttcgtgctgatgctgccgctggtattcaccatcgcggctgcggcaaacatcccgctgctgtatgtcggtgtgccaatggctgcggcgctgtccgtgactcacggcttcctgccgccgcacccgggtccaaccgctatcgcaaccatcttccacgcggatatgggtaaaaccctgctgttcggtacgattctggcgatcccaaccgtgattctggcgggcccggtttatgcccgcttcctgaaaggcattgataagccgattccggaaggtctgtacagcgccaaaaccttcacggaagaagagatgcctggctttggcgtcagcgtctggacctctctggtaccggtgatcctgatggcgatgcgcgccgtggcagagatgatcctgccgaaaggtcatccgttcctgtccgttgcggaattcctgggtgacccggtaatggcaacgctgattgcggtgctgatcgcgatgttcaccttcggcctgaaccgcggccgttcaatggatcagatcaacgatacgctgacctcttccatcaaaatcattgccatgatgctcctgatcatcggcggcggcggtgcattcaagcaggttctggtcgacagcggcgtggacaaatacatcgctgccatgatgcatgaaaccaacgtatcgccgctcctgatggcctggtctattgccgcggttctgcgtattgcgctgggttctgcgaccgttgcggcgatcaccgcgggcggtatcgttgccccgctgattgcgaccacgggcgtaacgctgagctgatggttattgccgtcggttccggtagcgtgattttctctcacgttaacgaccctggcttctggctgttcaaggagtacttcaacctgacgatcggtgaaaccatcaagtcctggtccgcgctggaaaccattatttcggtgtgtggtctggtcggggtgctgctgttgaatatggtggtttgatgt

SEQ ID NO: 19970 - DNA, 936 bp, Enterobacter cloacae
gtggaaaggtttgatgccgtggtaattggcgccggtgcggcgggtatgttttgtgcggcaatggccggacaggcgggtcgtcgcgtactgctgctggataacggtaaaaagcccggccgtaagatcctgatgtccggcggcgggcgctgcaactttactaatctgtatgttgaacccgcggcctatttgagccaaaaccgtcatttttgtaaatctgcgctggcgcgctacacacaatgggattttatcgatctcgtgggcaagcacggcatcgcatggcatgagaagacgctgggacagctgttctgcgacgactccgcgcagcagattgtcgatatgctggtggccgagtgcgagaagggcggcgtcgtcatgcgcctgcgcacggaagtgctggaagtcgcccgcgacgaccagggctatacgctgcagctgaacggtgaaaccgtcagcgctgacagcctggtgatcgccagcggcggcctgtcgatgccggggctgggcgcctccccgttcggctataagattgccgaacagtttggcctgaaagtcttgcctacgcgcgccgggctggtgccgtttacgctgcataaaccgcttctcgaacagcttcagacgctgtccggcgtgtctgttccctcggtcattaccgccgaagacgggacggtgttccgcgaaaatctgctctttacccatcgcggcctctccggaccggcggtgctgcaaatctccagctactggcagccgggtgagttcgtcacggtgaatctgctccccgattgcgatctcgacgcgttccttaacgagcagcgtaccgcgcacccgaatcaaagcctgaaaaacaccctggcaatgcagctgccaaaacgtctcgtggaatgtttgcaggtgctggggcagattccggacgtgtcgcttaagcagttgaatagccgc

SEQ ID NO: 19971 - DNA, 1497 bp, Enterobacter cloacae
atgctacatttgtttgccggcctggatttacataccgggcttttattattgcttgctctggtttttgtactgttttacgaagcgatcaacggcttccacgacactgcaaacgcagtagcgacggttatctacactcgcgcaatgcgatcgcagcttgcggttgttatggcggcggtatttaacttttttggtgttctcctgggcgggctgagcgttgcgtatgccatcgtgcatatgctgccaacggatctgctgcttaacgttagttctggccatggcctcgctatggtgttctcaatgctgcttgctgcaattatctggaacctcggtacctggtatttcggcctgcctgcatccagttctcacacgctcatcggcgcgattatcggcatcgggttaaccaacgccctgatgaccgggacatcggttgttgatgcgctgaacctgcctaaagtactgggcattttcggctccctgatcatctcccctatcgtgggtctggtagtcgcggggggattgattttcatcctgcgtcgctactggagtaacacgaaaaaacgtgcgcgtatccacctgacgccagcagagcgtgagaagaaagacggcaagaaaaagccgccgttctggacgcgtatcgccctgatcatttctgctatcggcgtggctttctcacacggcgcgaacgacgggcagaaaggcattggtctggtgatgctggttctgatcggcgtcgcaccggcaggcttcgtggtgaacatgaacgcctctggttacgaaatcacccgtacccgcgatgcggtcaacaacgttgaaacctatttccagcagcatcctgacctgctgaaaaaagcgaccggcgttgatcaattgatcccttctccggaagcaggtgcaaccaccgcgcctggcgaattccactgccatccagctaacgcgattaacgcgctggaacgcgccaagggcatgctgggcgacatcgaaagctacgacaaactggccgttgaacagcgtggtcagctgcgtcgtatcatgctctgcatctctgacgtgaccgataaagtcgcgaagctgccagaggtgaatggtgacgacaaacgtctgctgaagaaactgaaaagcgatatgctcaacaccattgagtacgcgccaatctggatcatcatggccgtcgcgctggcactcggtattggtacgatgattggctggcgtcgtgtggcgaccaccatcggagagaagatcggtaagaaaggcatgacctatgcgcagggtatgtccgcgcagatgacggcggcagtgtctatcggtctggcgagctacaccggtatgccggtatccaccacccacgtactctcctcgtccgtggcaggtacaatgattgttgacggcggcggtctgcagcgcaaaaccgtgaccaacattctgatggcctgggtgttcacccttccggcgtccatcctgctgtcaggcggtttgtactggatttcgctgaagctgatt

SEQ ID NO: 19972 - DNA, 840 bp, Enterobacter cloacae
atgctcagttatcgccacagcttccacgcaggcaaccacgccgacgtccttaaacacaccgttcagagcctgatcatcgaatcgctcaaagagaaagagaagccgtttctctatctggacacgcacgcgggcgcgggccgttatcagctgagcggcgagcatgccgagcgtaccggtgaatatctggaagggattgcccgcgtctggcagcaggacgacctgcctgccgagctggagccgtacatcggcgtggtgaatcacttcaaccgtaacggccagttgcgctactaccctggctcaccgctgattgctcgccagctgctgcgcgagcaggacagcctccagctgaccgaactgcatccgagcgactacccgctgctgcgttccgaatttcagaaagacagccgcgcccgcgtggaaaaatccgacggttaccagcagctgaaggccaaactgccgccggtttcccgtcgcggcctggtgctgatcgacccgccgtacgaaatcaaaaccgactatcaggcggtggtgaccggtatccacgaaggctacaaacgctttgctaccggcacctatgccctgtggtacccggtggtgctgcgcgcgcaaatcaaacgcatgatcaaagacctggaagccaccggcatccgcaagatcctgcagatcgagctggcggtacgccctgacagcgatcagcgcggcatgaccgcctccggcatgattgtgatcaacccgccgtggaagcttgaagcgcagatgaacaacgtgctgccgtggctgcataaaacgctggtgccagcgggtacaggccacgccaccgtcagttggatcgtgccggag

SEQ ID NO: 19973 - DNA, 1350 bp, Enterobacter cloacae
atgactaagcattatgactacatcgccatcggcggcggcagcggcggcatcgcctccatcaaccgtgcggccatgtacggccagaagtgcgcgctgattgaagccaaagcgctgggcggcacctgcgtgaacgtgggttgtgtaccgaagaaagtgatgtggcatgcggcgcagatccgtgaagctatccatatgtatggcccggactacggctttgacaccaccatcaaccacttcgactgggaaaaactgatcgccagccgtaccgcctacatcgaccgcattcacacctcgtacgacaacgtgctgggtaaaaataacgttgacgttatccacggtttcgcccgctttgtggacgcgaaaacgatcgaagtgaacggcgagacgatcaccgccgatcacatcctgatcgccaccggcggtcgtccgagccacccgaacatcccgggcgtggaatacggcatcgactccgacggttttttcgaactgcctgccctgccaaaacgcgttgccgttgttggcgcgggttacattgcggtggaactggccggcgtgattaacggcctgggcgcagaagcgcacctgttcgtacgtaaacacgcgccgctgcgcagctttgacccgctgattgtcgatacgctggttgaagtgatgaacaccgaaggcccgaccctgcacaccaacgccgtgccaaaagcggtggtgaaaaacgcggacggcagcctgacgcttgagctggaagatggccgtagccagaccgtcgattgcctgatctgggcgattggccgtgaacctgcgaacgataacttcaacctgggcgtgacgggcgtaaaaaccgacgaaaaaggctatatcgtcgtcgataaattccagaacaccagcgtaccgggcatttatgcggtcggcgacaacaccggcgcggttgagctgacgccggtcgccgttgcggcgggtcgtcgtctctccgagcgcctgttcaacaacaagccggacgagcatctggactacagcaacatcccgaccgtggttttcagccacccgccaatcggcaccgtcggcttaaccgagccgcaggcgcgcgagcagtacggcgacgaccaggtgaaagtgtataaatcggcgtttaccgcgatgtacaccgccgtcacctcacaccgtcagccgtgccgcatgaagctggtctgcgtaggtccggaagagaagattgtcggcatccacggcatcggcttcggcatggacgagatcctgcagggcttcgccgtagcgctgaagatgggtgcaaccaagaaagacttcgacaacaccgtggccatccacccgacggccgcggaagagtttgttactatgcgt

SEQ ID NO: 19974 - DNA, 933 bp, Enterobacter cloacae
atgagcgataaacgcactgcggaagaaggacggtttgccgggctggcactggcggaagaagaactcgtggcgcgcgtggcctggtgctactaccacgacgggctgacccaaaacgacatcggcgagcggctcgggctgccgcgcctgaagatctcccgcctgctggaaaaaggccgtcagtccggggtgatccgcgtgcagatcaactcccgctacgagggctgcctggcgctggagaccgagctacagcagcgctttggcctgaagctggtgcgcgtgatgcccgcgttaaatacgccgccgatgaacgtgcggctcggcattggcgcggcgcagtcgctgatgggcgtgctggagcccggccagctgctggcggtggggtttggtgaaaccaccatgagcagcctgcagcacctgagcggctttatcagctcgcagcagatccgcctggtgacgctctccggcggcgtcgggccgtatatgaccggtatcggccagctggacgcggcctgcagcgtcagcatgatccccgccccgcttcgcgtgtcatccgcagaggttgccgggatcttaaaacgcgagaccagcgtacgggacgtgatcctcgccgcgaccgccgccgacgtggcagtggtcggcattggttcagtgaaccagcgccgtgacgccacgatactgcgatccggctatatcagcgaaggtgaacagctgatgtacgcccgcaaaggcgcggtcggcgacattctcggctatttcctcaatgccgaagcgagtgccgttgaggagctggagatccacaaagaactgctgggcgtcacgctcgatgaactggcgcaactgcccaccatcgttggcgtggccggagaagaagagaaagccgatgcgatttatgccgcacttaagggtcgccgtataaatggcctggtgacggag

SEQ ID NO: 19975 - DNA, 932 bp, Enterobacter cloacae
tttctcgccattctggcgctgttcgccgtgctggtggcgctgaacccgtcctacttcagcctgcagacgctggggatgatcttcgccagctcgcagatcctgatcctgctggccatcggcgcggcgctggtgatgctgacccgcaatatcgacgtgtccgtcggctccatcgtcgggctgtccgccatcgccgtcggcgtggcgcttaatagcggctacagcctgcccgtttccattctcttcgcgatgtctattggcgcgttggccggggcgttcaacgggttcctggtggtggggctgcgcatcccggcgattgtcgccaccctcggcacgctggggctgtaccgcggcgcgatgctgctctggaccggcggaaagtggattgaaggctgccgcccgggctgaaatccctctctgagcctgccgccatcggcatttcgccgctcggcatgctggtgttgattatcgccgtcgtgggcgcatggacgctgtcgcgcaccgcgttcgggcgtgatttctacgcggtgggggataacctcgccgccgcgcgccagctgggcgtggcggtgaaccgcacccgcatgatcgcctttaccctgaacggcatgctggcggcctgcgccgggatcgtctttgccgcgcagattggttttgtgcccaaccagaccggcagcgggctggagatgaaggccatcgccgcctgcgtgctcggcggtatttcgctgttgggcggcacgggcacgctggttggcgcgctgcttggcgccttcttcctgacccaaatcgacaccgtgctggtgctgttcaggctcccggcgtggtggaacgactttatcgccgggctggtgctgctgggcgttttggtgctcgacgggcgcctgcgccaggcgctggcacgccatcagcgggcgctgaagtacggccgcttccag

SEQ ID NO: 19976 - DNA, 1377 bp, Enterobacter cloacae
ttgaacaggttaccttccagcgcctcggctcttgcctgtaccgcgcatgcactgaatctcattgagaagcgaacgctcgatcatgaggagatgaaacaacttaaccgagaggtcatcgattactttaaagagcacgtcaatccaggttttctggagtatcgcaaatctgttaccgccggcggggattacggagccgtagagtggcaagcggggagtcttaacacgcttgtcgacacccagggacaggagtttatcgattgcctgggtggttttggtatcttcaacgtggggcaccgtaatccagttgtggtttccgccgtacagaatcaacttgcgaaacaacctctccatagccaggaactgctcgacccgcttcgcgccatgctcgcgaaaacgctggcggccttaacgcccggcaaactgaagtacagcttctttagcaacagcggcacggaatcggtcgaagcggcgattaaactcgccaaagcgtaccagtcgccgcgcgggaaattcacctttatcgccaccagcggcgcgttccacggtaaatctctgggcgcactgtctgctaccgccaaatccaccttccgcaaaccgtttatgccgctgctgccgggattccgccacgtgccgtttggcgacatcaacgccatgcgcaccgtgctgagcgaatgccgtaaaaccagcgatgacgtggcggcggtaatcctggagccgattcagggtgaaggcggcgtaatcctccctccgcagggctatctgcccgccgtgcgtcagctgtgcgatgagtttggcgcgctgctgatcctcgacgaagtccagaccgggatggggcgcactggcaaaatgtttgcctgcgagcacgaaaacgttcagccggacatcctgtgcctggcgaaggcgctcggcggcggcgtgatgccgattggtgcgacggttgcgactgaagaggtcttctcggtgctgttcgacaacccgttcctgcataccaccacttttggcggtaacccgctggcctgtgcggccgcgctggcaaccatcaacgtgctgctggagcaaaacctgcccgcccaggcggaacagaaaggcgacatgctgctggacggcttccgtcagctaggccgggagtatccggacctggtgcaggacgcgcgtggcaaagggatgctgatggcgattgagtttgtcgataacgaaaccggctatagcttcgcgagcgagatgttccgccagcgggtgctggtggccggcacgctcaacaactcgaaaaccatccgcattgaaccgccgctgacgctgacgattgagcagtgcgagcaggtgctgaaagcggcgcgtaaagcactggcagcgctgcgaataagtgtggaagaggcg

SEQ ID NO: 19977 - DNA, 1314 bp, Enterobacter cloacae
atgacatcgttacgacacacagctttgggtctggcactgggtctggcttttgcgacgaacgcaatggctgtgaccaccattccgttctggcattccatggaaggggagttgggtaaagaagttgactccctggcgcagcgcttcaacgacacccatccggattacaaaattgtgccggtgtacaaaggcaactacgagcagagcctgagcgcgggcatcgccgccttccgtacgggcaacgcgccggccttgttacaggtttatgaagtgggtaccgccaccatgatggcctccaaagccatcaagccggtctatgaagtgttcaaagaagcgggcatcaacttcgatgaatcccagttcgtgccgaccgtagcgggttactacaccgattccaaaaccggccatctgctgtctcagccgtttaacagctccacgccggtgctgtactacaacaaagacgccttcaaaaaagccggtttagacccggagcagccgccaaaaacctggcaggacctggcggagtacaccgcgaagctgaaagcggcggggatgaagtgcggctacgccagcggctggcagggctggatccagattgaaaacttcagcgcctggcacggcctgccggtggcgaccaaaaacaacggcttcgacggcaccgatgcggtactggagttcaacaagccggagcaggtgaagcacatcgcgctgcttgccgatctgaacaagaagggcgacttcagctacttcgggcgtaaagacgaatccaccgagaagttctacaacggcgactgcgccattaccaccgcctcttccggctcgctggcggatatccgccactacgccaaattcaactacggcgtgggcatgatgccgtacgacgctgacgtgaagggcgcgccgcagaacgccatcatcggcggagcgagcctgtgggtgatgcagggtaaagacaagggcacctacaaaggggtggctgagttcctcgacttcctggccaagcctgaaaacgccgccgaatggcaccagaagaccggctacctgccgatcaccaaagccgcgtacgacctgacccgcgagcagggcttctacagcaagaacccaggggcggacatcgcgacgcgtcagatgctgaacaagccgccgttgccgttcaccaaaggcctgcgtctgggcaacatgccgcagatccgcaccatcgtggatgaagagctggaaagcgtgtggaccggtaagaaaacgccacagcaggcgctggactctgcggtagagcgcgggaatcaactgctgcgccgctttgagcagtcgacgaaatcg

SEQ ID NO: 19978 - DNA, 1743 bp, Enterobacter cloacae
atgatgaaaccaacgtttttgcgctgggtcgccattgccgcgctgatggcaggcggtacatttagcgtggcggccaacccgcccgcggcgcctccggtctcttacggcgtggaggaagatgtctttcatcccgtgagggcaacccacgggatggtggcatccgtggatgcactggcgacccgcgtgggcgtcgacattctcaggcagggcggtaacgcggtggatgcagcggtcgccgtcggctatgcgctggcggtgacgcatccgcaggcggggaacctgggtggcggcggttttatgatgctgcgcaccaaagacggcaaaaccaccgccatcgacttccgcgaaattgccccttctcaggcgtcccgcgatatgttcctcgacgatcagggtaaccctgacagcaaaaaatccctgacctcgcatcttgcttccggcacgccgggtaccgtcgcgggcttctcgctggcgctggaaaaatacggcacgatgccgctgaacaaggtggtgcagcctgccatcaagctggcgcgcgacggctttgtggtaaacgatgcgctggcggacgatctcaagacctacggcagcgaagtcattccgaatcacgaaaatagcaaggccatcttctggaaagacggtgagccgctgaagaagggcgataggctagtgcagaagaacctcaccaaaagcctggagctgattgcggagcacggtccggacgccttctacaaaggggcaattgccgaccagattgccgaagagatgcagaagaacggcgggctcatcaccaaagcggatctggcggaatacaaggcggtggagcgcgagccgattagcggcacctatcgcggatacgaggtcttctccatgccgccgccgtcctccggtgggatccacatcgtgcaaatcctcaatattctcgaaaacttcgatatgcacaagttcggcttcggcagcgcggacgccatgcaggtgatggcggaagcggaaaaacgcgcctacgccgaccggtcggaatatctcggcgatccggacttcgtgaaggtgccatggcaggcgctgaccaacaaggcgtatgccaaatccattgccgatcagatcgacatcaacaaggccaaaccgtcgagcgagatccgccccggcaagctggcgccgtacgaaagcaaccagaccacccacttctcggtggtggataaagacggtaacgcggtggcggtgacctatacgctcaataccaccttcggcaccgggattgtggcgggcaacagcggcattctgctgaacaacgagatggatgacttctccgccaaaccgggcgtgccgaacgtctacgggctggtgggcggcgatgcgaatgcggtagggccgaagaaacgtccgctatcgtccatgtcgcccaccattgtcgtgaaagacgggaaaacctggctggtaaccggcagccctggcggcagccgtattatcaccaccgtgctgcagatggtggtgaacagcatcgactttgggatgaacgtcgccgaagcgaccaacgcaccgcgtttccatcaccagtggctgccggacgagctgcgcgtggagaagggctttagcccggacaccatcaagctgcttgaacagcgcgggcagaaggtggcggtgaaggaggcgatgggcagcacccagagcattatggtcgggccggacggggcgctgtttggcgcgtcggatccgcggtcggtggatgatttgtcggcggggtat

SEQ ID NO: 19979 - DNA, 744 bp, Enterobacter cloacae
atgagcaactggccttatccccacgtcgtcgcccaccgtggcggcggtaagctggcgccggagaacaccctggcggcgattgacgttggcgcacgctacggtcacacgatgatcgagttcgacgccaagctgtcgaaagacggcgagattttcctgctgcatgacgataacctcgaacgcaccagcaacggatggggcgtggctggcgagctgccgtggcgcgatctgctgaaggtcgacgccggaagctggtatagcggcgaattcaaaggcgaaccgctgccgctgctggcggaagtggccgatcgctgtcgcctgcacgggatgatggccaacatcgaaatcaaaccgaccaccggcacctggccgctgacgggcaaagtcattgccctggccgcgcgcgagctgtgggaagggatgaccgcgccgctgctgtcatcatttgaaatcgatgcgctggaggccgcacaggcggccgtgccggagctgccgcgcgggctgctgcttgacgagtggcgcgaggactggcgcgagctgacgacacgcttagcgtgcgtttctatccatctcaaccacaggctgctggatgaggcgcgggtgaagatgctgaaggacgcgggtctgcatattctggtctacacggttaacaaaccccagcgcgcagccgaactgctgcgctggggcgtggacagcatctgtaccgatgcaatcgacctgatcggcccggactttagttctgcggat

SEQ ID NO: 19980 - DNA, 1275 bp, Enterobacter cloacae
atgaaaccgatgcattttgcaatggcgctgctctctgccgccatgttcttcgtgctggccagcgtctttatgggcgtccagcttgagctgaatggcaccaaactggttgtcgataccgcagctgacattcgctggcagtgggtatttatcggtacggccgtggtgttcctgttccagctgctgcgtccgctgttccagaagacgctgaaaaacgtctccggtccgaaattcatgctgccggcaatcgacggttctacggttaagcagaagctgttcctcgtggcgctgctggtggccgccgtggcgtggccgtttgtggtgtctcgcggcaccgtggatattgccactctgaccatgatctacgtgattctcggcctcggtctgaacgtggtcgtggggctctcgggcctgctggtgctgggctacggcggcttctacgccatcggggcctataccttcgcgctgctgaaccactattacggtctcggcttctggacctgcctgccgctggcggggctggtctctgccgctgctggcttcctgcttggcttcccggtgctgcgcctgcgcggtgactacctggcgattgtgaccttaggcttcggcgaaatcgtccgtatcctgctgctcaacaacaccgaagtgaccggcggcccgaacggtatcagccagatcccgaaaccgaccttcttcggcctggagttcagccgtaccgcccgcgaaggcggctgggataccttcagcaacttcttcggcgtgaagtatgacccgtccgaccgcgtgatttggctctatctggtggcgctgctgctggtggtgattaccctgttcgtgatcaaccgtctgctgcgcatgccgctgggccgcgcgtgggaagcgctgcgtgaagatgagatcgcctgccgctccctgggcctgaacccgacccgcatcaagctgaccgcgttcaccatcagcgccgcgtttgctggtttcgccggaacgctgtttgccgcgcgtcagggcttcgttagcccggaatcgttcacctttgccgaatccgcctttgtgctggcaattgtggtgctcggcgggatgggctcgcagtttgccgttatcctcgcggccatcctgctggtggtctcacgcgagctgatgcgcgactttaacgaatacagcatgctgatgctgggtggtttgatggtgctgatgatgatctggcgtccgcagggtctgctgccgatgacccgtccacagctgaagctgaagaacgggcaagcgaaaggagagcaggca

SEQ ID NO: 19981 - DNA, 587 bp, Enterobacter cloacae
atgcacagtgcggcgcaggttaacctgcgcccaaataatagattgtcagatatgcaggcaataatggaacaaacccaggcctttgaaaatcgtgtgcttgagcgtctgaatgctggcaaaaccgtacgaagcttcctgattgccgccgtcgagctgttaaccgaggcggtgaatatcctggtgcttcaggtgtttcgcaaagacgactacgcggtaaagtatgctgtagaaccgttactggacggagacggaccgctgggcgatctatccgtgcgtctgaagctgatttatggtcttggcgtgctcaaccgacaagagtatgaagatgcggagctgttaatgagctgcgcgaagaactcaatcatgacggtaacgagtacacctttaccgatgatgagatcctggggcccttcggcgagctgcactgcgtcaccgcgctgccccctgcgccccattttgataacagcgaccctgagctctacgcgatgcaaaagctgcgttatcaacaggttgtccgttccacgatggttctctccctgactgagctgatttcccgaatcagcttaaaaaaagcgtttcagaagtaa

SEQ ID NO: 19982 - DNA, 1146 bp, Enterobacter cloacae
atgaaagcattacattttggcgcaggtaatatcggtcgtggttttatcggtaaactgctggcagacgcgggcattacgctgacattcgccgatgtgaatcaggtggtcctggatgccctgaatgcgcgtcatagctatcaggtccatgtagtcggtgaaaacgagcaggttgagacggtatccggcgtcaacgcggtcagcagcatcggggaagacgttatcgacctgatcgccagcgtcgatctggtcaccacggccgtgggtccggtcgttcttgagcgcatcgcccctgcggttgcgaaaggcctggcaaaacgtaaagcgcagggcatcgacaccccgctgaacatcatcgcctgtgaaaacatggtgcgcggcaccacgcagctgaaaggccacgtgctcaacgctgtagcagatgaagacaaagcctgggttgaagcgcacgtcgggtttgtggattccgccgtggatcgcatcgttccgccgtctgaatccgccaccaacgacccgctggaagtgactgtggaaaccttcagcgagtggatcgttgataaaacccagtttaaaggcgccctgccgaccattccgggaatggaattaaccgataacctgatggcatttgtcgaacgcaaactcttcacgctgaacaccgggcatgctataaccgcgtacctcggaaaattggccggtcatcagaccattcgtgatgcgatcctcgatgagaagatccgcgcggtggtaaaaggggcaatggaagagagcggcgcggtgctgatcaaacgctacggttttgatgctgataaacacgcagcatacatccagaaaatcctcggtcgctttgaaaatccgtatctgaaagatgacgttgaacgcgtgggccgtcagcctctgcgcaaactgagcgcgggcgaccgtctgattaagccgctgctgggcacgctggaatacggcctgccgcacgccaacctggtgaaagggattgccgccgcgatgcactaccgcagcgagcaggacccacaggcgcaggaactggctcagctgattgatgacaaaggcgcgcaggctgcgctggcgcagatttccggtctggacgccaacagcgacgtggttgtggaggcggttaacgcatacaacgcaaccaaa

SEQ ID NO: 19983 - DNA, 896 bp, Enterobacter cloacae
ctgacagagctggaagtggtgatggcggtggtgcggcgcggcagctttcgcgccgcggcgcaggagctgggcatgtccgccacggcggttagcaacgccatcgccgggctggagagccgccttgatacccgcctttttaaccgcaccacccgcagcgtggcgctcaccgacgccggacagcgctacgtggcgcgtatcggcccggccctgcaggagatccgtctcgccagcgaggagatccacagcgacaccggggaacccgccggcacgctgcgtctgaacgtgccgaaccatatcggcgccctgtttctggaccagctgctgatcgactttatgatccgctacccgaagatgcgcgtagagaccgtcagcgaagcgcgaatgatcgacatcgtcgcggaaggctacgacgcggggatccgccttgaggagtccgtgcctcaggacatgatcgccgtgccgctgaccggggagatccgccagttggtcaccgccacgccggactattttgcacgccacggcattccgcagacgccggacgatctgctttcgcatcaggggattggcatgcgcatggcccacggcgggatctacctttgggagctggcccgtcggggggaaacgtacgcccttgccgtgccgccgcgctttgcgacgtccgatctttttgcctcgatccgggcggtaaaagcgggattaggggtgggatttttgccggaactgtatatccgggaagagctggagcgtggagagctggtgagcgtcttaaacgactgggcgcagcgtttgccggactgcgcctgtactaccccggccatcgccacgtcccgccaggcctgcgggcgctggtggcaacgatccgcgagcgcgggattattccaggttagccttgttca

SEQ ID NO: 19984 - DNA, 486 bp, Enterobacter cloacae
gtgacgagaggtttccccatgagcgaagaagaactgtttagccgcaggccgatgggcatgcggatggcgatgattgtgcgccagtggcgtgcggtaatcgacgacgccattctcgataccgggttaacccagtcgagctggacggtgatgatgcagcttcatcagctcggggataacgtctccgtgagtgagctggcggaggtgcagggcattgaactgccgccgctgatgcgcaccctggcacagctggaaaagcagggttacctgctgcgctccgtatcgccttatgacaagcgcatccggcttctgacgctgacgcccgagggaaaagccatattaaaaaggctcactcaggtgattgagacctatcaggcgcgcgtatcgcaaaacatcgcgccggaacatatcgacattttcagcgccaccctgaatcaattcgcctgcaatttgcggactatccgcgaagaagataacaagaccgaaaaa

SEQ ID NO: 19985 - DNA, 1302 bp, Enterobacter cloacae
atgaaaacccgtacccaacaaatcgaagagttaaagaaagagtggacacaacctcgctgggaaggcatccgccgtccttacagcgcggaggaagtggtgaaattacgcggctcggtcaatccggaatgcacgctggcacagaacggtgcggcgaaaatgtggaagctgctgcacggtggctctaaaaagggctacatcaacagcctcggcgcgctgaccggcggtcaggcgctgcagcaggcgaaggccggtattgaagctatctatctttccggctggcaggtcgcggcggatgccaacctggcgtccagcatgtacccggatcagtcgctctatccggctaactccgtgccgtcggtggtggatcggatcaacaacaccttccgccgtgcggatcagatccagtgggctgccggtatcgaacctggcgatccgcgctttactgactactttctgccgatcgtcgcggatgcggaagcaggcttcggcggcgtgctgaacgccttcgagctgatgaaatcgatgattgaggccggtgcagcggccgttcacttcgaagatcagctggcatcagtgaagaaatgcggacacatgggcggtaaggtgctggttcctacacaggaagccgtacagaagctggttgccgcgcgtctggctgctgacgtgctcggcgtgccgacgctggtgattgcccgtaccgatgcggacgcggcggacctgatcacctctgactgcgacccgtacgacagcgaattcatcaccggcgagcgtaccagtgaaggcttctaccgcacccatgccggcattgaacaggcgatcagccgcggcctggcgtatgcgccttatgcggacctggtctggtgtgaaacctccacgccggatctggcgctggcaaaacgctttgccgacgccatccacgcgaagtatccgggcaaactgctggcctataactgctcgccgtccttcaactggcagaaaaagctggatgacaaaaccatcgccagcttccagcagcagctgtccgacatgggctacaaataccagttcattaccctggcaggtatccacagcatgtggttcaacatgttcgacctggcgcacgcctatgcgcagggtgagggcatgaagcactacgttgagaaggtgcagcagccggagtttgcggcgggcaaagacggttacaccttcgtgtctcaccagcaggaggtggggaccggctactttgacaatgtgaccacgattattcagggcggcacctcctccgtcactgccttaacgggttcaacggaagaagcacagttc

SEQ ID NO: 19986 - DNA, 828 bp, Enterobacter cloacae
atggtcgcgaccgttcccgctaaacgcggcagaaaacctgctgccaccgccgccgccgcacaacagggcggacaggttcaatcgctcacgcgcggtttgaagctgctggagtggatagccgagtcgcacggcagcgtggccctgacggagctggcccagcaggctggcctgccgaactccacgacgcatcgcctgctgaccaccatgcagcagttgggctttgtccgccaggtcggcgagctggggcactgggcggtgggcgcgcacgcgtttatcgtcggcagcagcttcctgcagagccgcaacctgctggcgattgtgcacccgattctgcgcaagctgatggaggagtccggcgagacggtcaacctcgcggtgctggaccagagcgaccatcaggcgattatcatcgaccaggttcagtgtacgcagctgatgcgtatgtccgcaccgattggcggcaagctgccgatgcacgcctccggggcggggaaagcgtttctgtcgcaactgagcgaagagcaggtgacgggactgctgcaccgtaaagggctgcacgcctatacccacgccacgctggtgtcgcccgtgcatctgaaagaagatctggccctgacccgcaagcgtggctattcgtttgatgatgaagaacatgccctgggcctgcgctgcctcgcggcctgcatttttgacgagcaccgcgagccgtttgccgctatctccatctccgggccgatttcgcggatgaccgacgaccgcgtgaccgagctgggtgcgctggtgattaaggcggcgaaagaggtaacgctggcgtatggtgggattcgc

SEQ ID NO: 19987 - DNA, 3681 bp, Enterobacter cloacae
gtgagcagcaaagtagagcaactgcgtgcgcagttaaatgaacgaattctggtgctggacggcggcatgggcaccatgatccaggggtatcgtctgagtgaagacgatttccgcggcgagcgctttgccgactggccctgcgacctgaaagggaacaacgatctgctggtgctcagcaagccgtccgtcattaaggatatccacaacgcctacttcgaagcgggtgcggatatcgttgagaccaacacctttaactcgacaaccatcgccatggcggattaccagatggaatccctgtcggcggaaatcaacctggaagccgcgaagctggcgcgcgcctgcgccgacgagtggacggcacgtacgccggacaagcctcgctacgttgccggggtgcttggcccgacgaaccgaaccgcgtcgatttcaccggacgtcaacgacccggcgtttcgtaatatcaccttcgatcagctcgttgcggcctaccgtgaatcgaccaaagcgctggtggaaggcggttccgatctgatcctgatagaaaccgtattcgacacccttaacgccaaagccgcgatttacgcggtgaaagaggagtttgaggcgctgggcgttgacctgccgatcatgatttccggcaccatcaccgacgcctccggccgtactctgtccggtcagacaaccgaagcgttttataactctctgcgccacgccgaagcgctctcctttggcctgaactgcgcgctggggcctgatgagctgcgccagtacgtgcaggagctttcccgtatcgcggaatgctacgtcaccgcccacccgaacgccggtctgccgaacgcgttcggtgaatacgatctcgatgccgacaccatggcggcgcaaatccgcgagtgggccgagtctggcttcctgaacatcgtcggtggctgctgcggcaccacgccggagcacatcgcggccatgagcaacgccgtcgccggactgccgccgcgcaagctgcccgagcttccggttgcctgtcgtctgtccggccttgagccgttgaccatcggcgacgacagcctgtttgtgaacgtgggtgagcgtactaacgtcacaggttctgcaaagttcaagcgcctgatcaaagaagagaaatacagcgaagcgctggacgttgcccgccagcaggtggaaagcggcgcgcagattatcgatatcaacatggacgaggggatgctcgacgccgaagcggcgatggtgcgtttcctcaacctgatcgccggtgagccggacatcgcccgcgtgccgatcatgattgactcctccaagtgggaggtcatcgaaaaagggctgaagtgcattcagggtaaaggcatcgtcaactctatctcgatgaaagagggcgttgatatctttatccaccacgcgaagatggtccgccgctacggtgccgccgtggtggtgatggcctttgacgaggtgggccaggcggatacccgcgagcgtaaaattgagatatgccgccgcgcgtacaagattttgaccgaagaggtgggcttcccgccggaagacattatctttgacccgaatatcttcgccgtcgcgaccgggattgaagagcacaacaactatgcccaggactttatcggggcatgtgaagacatcaagcgcaagctgccgcacgcgctgatctccggcggcgtgtcgaacgtgtcgttctcgttccgcggtaacgacccggtgcgcgaagcgatccacgccgtgttcctctactacgccatccgcaacggcatggacatggggatcgttaacgccggccagctggcgatttacgacgatctccctgccgagctgcgcgacgccgtagaggacgtgatccttaaccgccgcgacgacgccaccgagcgcatgctggacctggcggagaaatatcgcggcagcaaatcggatgaggcggcaaacgttcagcaggccgagtggcgttcctgggacgtgaaaaagcgtctggaatactcgctggtcaaaggcatcaccgaatttatcgagctcgataccgaagaggcgcgccagcaggcagaccgcccgattgaggtgatcgaaggcccgctgatggacggcatgaacgtggtcggcgatctgttcggtgagggcaaaatgttcctgccgcaggtggttaaatccgcccgcgtgatgaagcaggcggtagcgtatcttgagccctacatcgaagccagcaaagagaaaggttccagcaacggcaagatggttatcgccaccgtgaagggcgacgtgcacgacatcggcaagaacatcgtcggcgtagtgctgcagtgtaataactacgaaattatcgacctcggcgtgatggtcccggcggacaaaatcctcaagaccgcgcgcgaagtgaacgccgacctgattggcctctccggcctgattacgccgtcgctcgacgaaatggtcaacgtggcaaaagagatggagcgacagggcttcaccattccgctattgattggcggggcgaccacctcaaaagcgcacacggcggtgaagatcgagcagaactacagcggcccgacggtctacgtgcagaacgcctcgcgcacggtgggcgtagtctccgcgctgctctccgacacccagcgcgacgattttgtggcgcgcacccgcaaagagtacgaaaccgttcgcatccagcacggccgtaagaagccgcgcacaccgcctgtttcgcttcaggcggcgcgcgacaacgatctggccttcgactggtccagctatacgccaccggtggcacatcgtctgggcgtgcaggacgtgacggccagcatcgagacgctgcgtaactacatcgactggacgccgttctttatgacctggtcgctggcgggcaaatatccgcgcatcctggaagatgaggtggtcggcgaggaggcgaagcgcctgtttaaagatgccaacgacatgctcgacacgctgagcgcagagaaaaccctcaacccgcgcggcgtggtgggcctgttcccggcgaaccgcgtgggcgacgacatcgaaatttatcgcgatgaaacccgcacccacgtgctggcggtcagccgccatctgcgccagcaaacggagaaagtgggctttgccaactactgcctggccgatttcgtcgcgccgaagctgagtggtaaagccgactatatcggcgcctttgcggtgaccggcggtctggaagaagacgcgctggcggacgcgttcgaagcgcagcacgatgattacaataaaatcatggtgaaagcgattgccgaccgcctggcggaagcctttgccgagtatctccacgagcgcgtgcgtaaggtgcactggggctacgcggcgaatgaaaacctcagcaatgaggatctgatccgcgaaaactaccaggggattcgcccggcgccgggctatccggcctgtccggagcacaccgaaaaaggcactatctggaaactgctggatgtggaagcccataccggcatgaagctcaccgagtcgttcgccatgtggccaggcgcgtccgtctcaggctggtacttcagccatccggacagcaagtactttgccgtggcgcagctgcagcgggatcagattgaagattacgcactgcgcaaagggatgagcgtgtctgaagtggagcgctggctggcgccaaatctcggctacgacgccgac

SEQ ID NO: 19988 - DNA, 1609 bp, Enterobacter cloacae
gtgctgacgttgttacacctgctctctgcagtcgcactgctcgtatggggcacccatatcgtccgtaccggcgtgatgcgcgtatttggcgcgcgcttacgtaccgttctcagcagcagcgttgagaagaagccgctcgccttctgcgcgggcattggcgtaacggcactggttcagagcagtaacgccacgaccctgcttgtcacctcctttgtggcgcaggatctggtggcgctggccccggcgctggtgattgtgctgggggcggatgtaggtaccgcgctgatggcgcgtatcctgaccttcgatctctcctggctgtcgccgctgctgatttttatcggcgttatcttcttcctcggccgcaagcagacgcgcgccggacagctcgggcgcgtagggataggcctggggctgatcctgctggcgctggagctgattgtgcaggcggtcacgccaatcaccgaggccaacggcgtgcaggtcatcttcgcctccctgaccggggacatcatgcttgacgcgctgattggcgcggtgtttgccatcgtcagctactccagcctggcggcggttcttctgacggcgaccttaaccgccacaggggcgatctccttcccggtggcgctgtgtctggtgatcggggccaacctcggctccggcctgctggcgatgctcaataacagcgcggctaacgccgcagcccgccgcgtggccctcggcagcctgctgtttaagctggtgggcagcctgattattctgccgttcgttcacccgctgggcgaacctgatggacaacctaccgctgccgaaggcggagctggtgatctatttccacgtgttctacaacctggtgcgctgcctggcgatggtgccgtttgccgcgccgatggcccgcttctgcgaacgcctcattcaggacgaaccggagctggatgcgcgcctgaagccgaagcacctggatacctccgcgctggatacccctgcgctggcgctggcgaatgccgcgcgcgagacgctgcgcatgggcgacgcaatggaaaccatgctcgaaggcctgcaaaaggtgatgcacggcgagccgcgtgaagagaaagaactgcgcagactggcggacgatatcaacgtgctctataccgccattaagctttacctggcgcgtatgccgcaggacgagctggcggaagaggagtcccgccgctgggcggaaattatcgagatgtcgcttaaccttgagcaggcctcggatatcgtggagcgtatgggcagcgagatcgccgacaaatcccttgccgcgcgtcgtgcgttttcaggtgaaggcctgaaggagctggaagcgctacacgaacagctggtcagcaacctcaagctggcgatgctggtcttcttctccagcgacgtgccgagcgcgcgccgtctgcgtcgcaacaagcatcgtttccgtattctgaaccgccgctactcgcatgcccacgttgagcgtctgcaccagcagaacgtgcagagtatcgagaccagctccctgcatctggggctgctgggggatatgaagcgtctcaactcgttgttctgcgcggtggcgtacagcgtgatggaacacccggatgaa

SEQ ID NO: 19989 - DNA, 1632 bp, Enterobacter cloacae
acgcagaccgctgcctggcaggcactccagaaacattttgatgaaatgaaagacgtcaccatcgcggatctgttcgcgaaggatgccgatcgtttcaacaagttctccgcgaccttcgacgacctgatgctggtggatttctctaaaaaccgcattaccgaagagacgctggcaaagctgcaggatctggcgaaagaaaccgagctggcggatgccatcaaatccatgttctccggcgagaagatcaaccgcaccgaagaccgtgcagtgctgcacgtggccctgcgtaaccgtagcaataccccaatcatcgttgacggcaaagacgtcatgccggaagtgaacgcggtgctggaaaagatgaaagccttctccgaagcgatcatctccggtagctggaaaggctacaccggcaaagcgatcaccgacgtggtgaacatcggtatcggcggttctgacctcggcccgttcatggtgaccgaagcgctgcgcccgtataaaaaccacctcaatatgcactttgtgtctaacgtcgatggcacccacatcgccgaagtgctgaagaacgtgaacccggaaaccaccctgttcctggttgcgtccaaaaccttcaccactcaggaaaccatgaccaacgcccacagcgcgcgcgactggttcctgaaaaccgcgggcgacaacaagcacgtggcgaaacacttcgcggcgctgtctaccaatggtaaagcggtcagcgagttcggcattgataccgcgaatatgttcgagttctgggactgggtcggcggccgctactccctgtggtctgcgatcggtctgtccatcatcctgtccgtgggcttcgacaacttcgttgagctgctctccggcgcgcacgcgatggataaacacttctccactaccgcaccagagaaaaacctgccggtactgctggcgctgatcggtatctggtacaacaacttcttcggcgctgaaaccgaagcgatcctgccgtatgaccagtacatgcaccgttcgcagcctacttccagcagggcaacatggaatccaacggtaaatacgttgaccgtaacggcaacgcggtggattaccagactggcccaatcatctggggcgagccgggcaccaacggtcagcatgccttctaccagctgatccaccagggcaccaaaatggtaccgtgcgatttcatcgccccggcaatcacccataacccgctgtccgaccaccatccgaagctgctgtcgaacttctttgcacagaccgaagcgctggcgttcggtaaatcccgcgaagtggttgagcaggaataccgtgaccagggtaaagatccggcaaccctggaccatgtggtgccgttcaaagtgttcgaaggcaaccgcccaaccaactccatcctgctgcgcgaaatcacgccgttcagcctgggccgcgctgatcgctctgtacgagcacaaaatcttcacgcagggcgccatcctgaacatcttcacctttgaccagtggggcgttgagctgggcaaacagctggcaaaccgtattctgccagagctgggtgacgataaagcgattgccagccatgacagctcgacaaatggtttgatcaaccgttataaagcatggcgcgcgtaa

SEQ ID NO: 19990 - DNA, 870 bp, Enterobacter cloacae
atgctgccaactcaatcaacacgattaaacaaatacattagcgagagcgggatctgctcacgtcgcgaggctgaccgttacattgaacaaggtaacgtgtttcttaacggcaaacgcgccaccatcggcgaccaggtggtgcctggcgatgtggttaaagtgaatggtcaggtcatcgaaccgcgtgatgctgaagacctggtgtttatcgcgttgaacaaaccggttgggattgtcagcaccacggaagacggtgagcgggacaacatcgttgatttcgtgaaccacagcagccgtatcttcccgattggccgtctggataaagactcacaggggctgattttcctcaccaaccacggcgatctggtcaacaaaattctgcgtgccggtaacgaccacgagaaagagtacattgtgacggtgaataagccggtcacggacgaatttattcgcggcatgggcgccggtgtgccgatcctcggcaccgtcacgaagaagtgtaaggtcaagaaagaagcgccgttcgcgttccgcattacactggttcagggcctgaaccgccagatccgccgtatgtgcgagcacttcggttatgaagtgacgaagctggaacgcacgcgcatcatgaacgtcagcctgtcaggcatcccgctgggcgagtggcgcgatttaacggatgacgagctgattgaactcttcaagcttatcgagaattcctcgtccgaagcgaagccgaaggccaaagcaaaaccgaaaacccaggcgattaagcgcccggtggtgaaggcgccgcaggcggaagataaggggcgaggcaagccgggtaatggaaaacgctttacccagccgggacgcaaaaagaaagggcgc

SEQ ID NO: 19991 - DNA, 225 bp, Enterobacter cloacae
atgcaattcactccagacagtgcatggaagataaccggttttacccgcgaaattagcccggcctatcggcaaaagctgctgtcgctgggcatgctgcccggctcgtcattccaggtcgtgcgcgtggcgccgctgggcgatccggttcacatcgaaacccgccgcgtgaatctggtgctgcgtaagaaagacctcgcgttaatagaagtcgaagccttatcccga

SEQ ID NO: 19992 - DNA, 2328 bp, Enterobacter cloacae
atgatgaaagattcgctctgccgcattattgcgggtgatattcaggccagagccgaacaggtagaagctgccgttcgcctgcttgatgaagggaacaccgtgccgtttattgcacgctatcgtaaggaagtcaccggcggtctggatgacacgcagctgcgtaacctggagacccgtctgggctatctgcgcgagctggaagaacgtcgtcaggcgatcctcaaatccatcggcgaacagggcaagctgaccagcgagctggaaagcgccatcaacggcaccctgagcaaaaccgaactcgaagatctctatctgccgtacaaaccgaagcgccgcacgcgcgggcagattgcgattgaagcgggtcttgagccgctggccgacctgctgtggaacgagccgtcccacgacccggaaaccgaagcggcgaaattcatcgacgccgacaaaggcgtagcggacaccaaggccgccctcgacggcgcgcgctacattctgatggagcgcttcgccgaagacgccaccctgctcgctaaagtgcgtgattacctgtggaagaatgcccacatcgtctctaccgtcgtcgcgggtaaagaggaagaaggcgcgaaattccgcgactacttcgatcaccacgaaccgatctctaccgccccttcacaccgcgcgctggcgatgttccgcggccgcaacgaaggcgtgctccagctctccctgaacgccgacccgcagtttgacgagccgccgaaagagagccactgcgagcagatcattatcgaccatctcggcctgcgcctgaacaacgccccggcggacagctggcgcaaaggcgtggtgagctggacctggcgcatcaaggtgctgatgcacctcgaaaccgagctgatgggcaccgtgcgcgagcgcgccgaagatgaagcaatcaacgtcttcgcccgtaacctgcacgacctgctgatggccgcccctgccggcctgcgtgcgaccatgggtctcgatccgggcctgcgtaccggcgtgaaggtcgctgtggttgacggcaccggcaagctggtggcgaccgataccatttatccgcacaccggccaggcagcgaaagcggccgtcgtggtagcggcgctgtgcgaaaaatacaacgtggagctggttgccatcggcaacggtacggcctcacgcgaaaccgagcgtttctacctcgacgtgcagaagcagttcccgaaagtgacggcgcagaaagtgatcgtcagcgaagcgggggcatccgtctattccgcgtccgagctggcggcccaggagttcccggacctggacgtttccctgcgcggtgcggtctctatcgcacgccgcctgcaggatccgctggcggagctggtgaagatcgacccgaaatccatcggcgtgggccagtatcagcacgacgtgagccagactcagctggcgcgcaagctggatgcggtggtggaagactgcgtaaacgccgtcggcgttgacctgaacaccgcctccgttcccctgctgacccgcgtggcgggcttaacccgcatgatggcgcagaacatcgtcgcctggcgtgatgagaacggccagttccagaaccgtcagcagctgctgaaggtgagccgtctggggccaaaagcctttgagcagtgtgcaggcttcctgcgaatcaaccacggcgataacccgctggatgcctctaccgttcacccggaagcgtaccctgtggtggaacgcattctggccgccacccagcaggcgctgaaagatctcatgggtgacagcagcgccctgcgcaacctgaaagccgttgatttcaccgacgacaagtttggtgtcccaaccgtcaccgacatcatcaaagagctggaaaagccgggccgcgatccgcgtcctgagttcaaaacggcgacctttgctgacggcgtggaaaccatgaacgaccttctgccgggcatggtgctggagggcgcggtgaccaacgtcaccaactttggcgcgtttgtggatatcggcgtgcatcaggacggtctggtgcatatctcttccctcgccgacaagttcgttgaagacccgcacaccgtggttaaagcgggtgacatcgtgaaggtcaaagtgctggaagtggatctgcagcgcaagcgtatcgcgctgaccatgcgtctggacgaacagccgggcgacaccagcgcgcgccgcggcggcaatggcggtggccgcgagcagcagcgcccggccgcgaaagcggcaaaaccgcgcggacgtgatgctcagcctgcaggcaacagcgcgatgatggatgcgctggcggcagcgatgggtaagaaacgc

SEQ ID NO: 19993 - DNA, 1336 bp, Enterobacter cloacae
atgaggcgaatgcgcttctcgccgcgtagctcgtttgcccgcaccctgttactgatcgtcaccctgctgttcgtcagcctggtgacgacctatctggtggtgctgaactttgcgatcctgccgagcctccagcagtttaataaggtcctggcctacgaagtccgtatgctgatgaccgataaactgcagctggaggacggcacgcagctcgtcgttcccccggcgtttcgccgtgaaatctaccgtgagctgggcatttcgctctactccaacgaagcggcggaagacgctggcctgcgctgggcgcagcactacgaatttctcagccagcagatggcgcacagctgggcggcccgacggaagtgcgcgttgaggtcaacaaaagctcgcccgtcgtctggctgaaaacctggctgtcacccaatatctgggtgcgcgttccgctgaccgaaatccatcagggcgacttctcgccgctgttccgctacaccctggcgattatgctgctggcgataggcggtgcgtggctatttatacgtatacagaaccgaccgctggtcgacctggagcacgccgcgctgcaggtcggtaaagggattattccacctcctctgcgcgagtatggcgcctcggaggtccgttcggtgacgcgcgcgtttaaccatatggcggcaggcgtgaagcagctggcggacgatcgtacgctgctgatggcgggcgtaagcaatgacctgcgcacgccgctgacgcgtattcgtctggcgacggagatgatgggggaagaggacggttatctcgcagagtccatcaacaaagacatcgaagagtgtaatgccatcatcgagcagttcatcgactacctgcgcaccgggcaggagatgccgatggagatggcggatctgaacgcggtgctgggcgaggtggtggcggcggaaagcggctacgagcgggagattgataccgacctgcaggccggtgaaattcaggtacgcatgcacccgctctccattaagcgcgcggtggcgaacatggtggtcaacgcggcgcgctacggcaatggctggattaaagtcagcagcgggtctgaactcaaccgcgcctggttccaggtggaagacgacggtccgggcatcaagcccgagcagcgtaagcatctgtttcagccgtttgtgcgcggcgacagcgccgcagcaccagcggcacgggcttaggtctggcgattgttcagcgtattatcgataaccacaacggactgctggaaattggcaccagcgagcggggtgggctgagcattcgcgcctggctgccggtaccggtgacgcgggggcaggtgaaa

SEQ ID NO: 19994 - DNA, 1617 bp, Enterobacter cloacae
atgcgtgttactggtttaaccccgcaagatctcaaggcttatggtattcacgacgtccaggaaatcgtctacaaccccgactacgatacgctgtatcaggaagagctcaatccagcactggaaggatacgagcgtggtgtgttgacgaatcttggtgctatcgccgtcgatactggtatctttaccggtcgttcgccgaaagataagtatatcgtccgagacgaaaccacccgcgatacgctgtggtgggctgacaagggcaaagggaagaacgacaacaaaccgctctccccggaaacctggcagcacctgaaagggctcgtcacccatcaactttccggcaagcgtctgttcattgtcgacgctttctgcggcgctaacgccgatacccgtctctccgtgcgttttatcactgaagtggcctggcaggcgcatttcgtgaaaaacatgtttattcgtccaaccgacgaagagctgcaggatttcaccccggatttcatcgtgatgaacggtgcgaaatgcactaacccacagtggaaagagcagggtctgaactccgaaaactttgtggccttcaacctgaccgaacgtatccagctgatcggcggtacctggtacggcggcgaaatgaagaaagggatgttctcggtcatgaactacctgctgccgctgcgcggtatcgcctccatgcactgctcggctaacgtcggtgaaaaaggcgacgtggcggtattcttcggcctgtccggcaccgggaaaaccaccctatccaccgatccaaaacgtcgcctgattggtgatgacgaacacggctgggatgacgacggcgtattcaactttgaaggcggctgctacgcgaagaccattcgcctgtctgaagaggccgagccggatatcttccatgcgatccgtcgcgatgcgctgctggaaaacgtcaccgtgcgtgccgacggctccatcgacttcgacgatgcgtcgaaaacggaaaacacccgcgtctcttacccgatctaccacatcgacaatatcgtgaagcctgtgtcaaaagcgggtcatgccacgaaggtcattttcctgacggcggatgcgttcggcgtgctgcctccggtgtctcgcctgacggccagccagacgcagtaccacttcctctccggcttcaccgccaagctggcgggtaccgagcgcggcgtgacggagccaaccccaaccttctccgcctgcttcggcgcggctttcctgtcgctgcacccgacgcagtacgctgaagtgctggtgaaacgcatgcaggcatccggcgcgcaggcctacctggtgaacaccggctggaacggtaccggcaaacgtatctctatcaaagatacccgcgcgattatcgacgccattctggatggttctctggacgacgccgaaacctttacgctgccgatgtttgacctggcgatcccaacgtcgctgccgggtgtggatacgcatatcctcgacccacgcaacacgtacggttctccggagcagtggcgcgagaaagcggaatcgctggcgaagctgtttatcgagaacttcgagaagtataccgataccccggcgggtgctgcgctggtgagcgcaggaccgaagctg

SEQ ID NO: 19995 - DNA, 2478 bp, Enterobacter cloacae
ttgtacaaatatattgagccacagctacctgatgtcgccacgcttcgcgatgtgcgcctccagatcccgatgcaagtctatagcgccgatggcgagctgatggcgcagtatggcgagaagcgtcgtattccgctgaccttaaaccaaattccacccgtgatggtgaaagcctttatcgccacggaggacagccgtttttacgagcaccacggtgtcgatccggtggggattttccgtgccgcgagcattgcgttattctctggtcacgcctctcagggggcgagtaccattacgcagcagctggcgcgtaacttcttcctcagccctgaaaagacgctgatacgtaagatcaaagaggtgttcctcgcgatccgtattgagcagctgctgagcaaagacgaaatccttgagctgtacctcaacaaaatctacctgggttaccgagcatatggcgtgggggctgccgcacaggtgtacttcggtaagcccgttgagcaactcaccttaagcgaaatggcaaccattgctggtctgccgaaagcgccgtccacgtttaacccgctctactcgctcgatcgcgccaccgcgcgccgtaacgtcgtcctgtcacgcatgctgagcgaaggctacatcagccagagcgagtacgaccaggcgcgtaacgatgtgattgacgcaaactaccacgcccctgagatcgctttcgcgtccccttacctgaccgaaatggttcgccaggagatggtgaatcgctatggtgacaaggcctacgaagatggctatcgcgtgtacaccaccgtcacccgtaaggtccagcaggcggctcaggaagcggtgcggaacaacgtgatggactacgatatgcgtcacggctatcgcggcccgtcaaacgtgctctggaaagtgggcgaaagcgcgtgggacagtaaaaaaatcaccagtacgctgaaggcgctgccaacctatggtccgctccttcctgccgtggtgacgcaggccgatcctcaggaagccgttgcgacgctcgcggacggtacttccgtctcgctgcgtatggacggtatccgctgggcgcgtccttaccgctcggataccctgcagggcgcaacgccgcgtaaagtgaccgatgccgtgcagaccggacagcaaatctgggtgcggaaggtaggcgaatcctggtggctggcacaggtgccggacgtcaactcggccctggtctctatcaatccacagaacggtgccatcctggccctggtcggcgggtttgatttcaaccagagcaaatttaaccgcgccacccaggcgctgcgtcaggtcggttccaatatcaaaccgttcctctacacggcagcgatggataaaggcttgaccctcgccagcatccttaacgacgtgccaatctcccgctgggatgccggtgccggttccgactggcagccgaagaactcccctgcggagtatgccggcccaattcgtctccgtcagggcctgggacagtcgaaaaacgtggtgatggtgcgcgccatgcgcgcgatgggcgtcgactatgccgcagagtatctgcagcgcttcggtttcccggcgcagaacatcgttcgcaccgagtcgctggcgttaggctccgcctcgtttacgccgcttcaggtcgcacgcgggtactcggtgatggccaacggcggcttcctgattgatccgtacttcatcagcaagattgaaaacgatcagggcggcgtgctgttcgaagcgaagccgaagattgcctgccctgactgcgatattccggtcatttatggcaatacgccgaaatccgacgtgcttgaaaacaaggacatggaagaccctgccgtgtctcaggagcagcagaacggcgtcgtgccgcagccgcagctcgagcaggctaaccagtctctggtggcacagaccggcgcgccggagtatgccccgcatgtgatcaacacgccgctgtccttcctgatcaaaagcgcgctgaacaccaacatcttcggtgaaccgggctggcagggcacaggctggcgcgcagggcgtgatttgcagcgccatgatatcggcggtaaaacggggacaaccaacagctcgaaagacgcgtggttctccggctacggcccgggcgtggtgacatcggtttggatcggtttcgacgatcaccgccgtgacttaggtcgtacaacggcctccggcgcgattaaggatcagatctccggctacgaaggcggtgcgaagagcgcgcagccggcctgggacgcctacatgaagtccgttcttgaaggcgtgccggagcagccgttaacgccaccgccaggcgtggtgacggttaatatcgaccgcagcaccggtcagctcgccaacggcggtaatagtcgcgaagagtatttcatcgagggcacgcagccaaccacgcaggcggtgcacgaggtggggacagagattattgataacggcgagacgcacgagctgttc

SEQ ID NO: 19996 - DNA, 882 bp, Enterobacter cloacae
atgaaaatggcccaacacgaccaattacaccgctatctgtttgaacaattcgccgtgcgcggcgagctggtcaccgtatccgaaacctggaaacagattctggaaaaccacaactacccgctgccggtgaagaccctgttgggcgaactgctggttgccaccagcctgctgacggcgacgctgaagtttgccggtgatatcaccgtgcagctgcagggtgacggcccgatgacgctggcggtgatcaacggcaataaccagcagcagatgcgcggcgtggcgcgcgttcagggcgacgtgcctgaaaatgcagacctcaaaacgctggtgggtaatggctacctggtgatcaccatctcccctgaggaaggcgagcgctatcagggcgtggtgggtctggaaggcgataccctggcagcctgcctggaagattacttcatgcgttctgaacagctgccgacgcgtctcttcattcgtaccggtgaagtggacggtcagcctgctgcgggcggcatgctgctgcaggttctgcctgcgcaggacgcgcagaccaatgactttgagcacctggcaacgctgaccgaaaccatcaaagcggaagagctgttcaacctgtcggcgaccgacgtgctgtggcgtctgtaccacgaagaagaagtgacggtttacgatccgcagtccgtggaatttaagtgcacctgctcccgcgagcgctgcgctggcgcgctgaaaaccctgccggatgaagagatcgacagcatcatggcggaagacggcgaaattgatatgcactgtgactactgcggtacgcactacgtgttcaattcgatggatatcgctgagatccgcaataacgcctccccggcggatccgcaggttcac

SEQ ID NO: 19997 - DNA, 793 bp, Enterobacter cloacae
acgggcgataaggagatcgtgaagcatggctttcaaaatatggcaaacgggcgttcatattcaacaggatagggtgctgatcgtcgccctggcccgggagaagttgagctggtgcatgcgccgctggtgggcgattcctctggacgagggcatcattcgtgacggcaaaatttgtcagccagaacagctggttgatgcgttacgcgactggcgcaaaacgctgccgcactaccatcgggcattcctctctttcccggcagcacgcactctgcaacgggcgctcccccgcccgaccgttgcgctgcgcgacagcgagcagctctcatggcttggtgcggcgctcgcgcgcgaactggagatgtctgctgatacgctctgtttcgattacgcgcaggataccttcagcaatacctttcacgtgaccgccgcgcaaaacaacgagatcgacaccctactggcgctggcgaaaacgctgcgtttgcggctggtggccattacgccggatgccagcgcgctggcgaatcttcttcccgcggtggcgccagcgacgtgcgtcgcctggcgggacgatcggcagtggctgtgggcgatgcgccaccagtggggacgccgcattaccacagaagccgaaaacgtgtctgagctttcagcgctgctggggcttggttcggatgacatcgcgctgtttgatagccgacgtgatccgtgggaaatcctggaacgctgccatgccccgctaccggactgcggcgctgattataccgttgcgctggcgttggccatgagcgaggtg

SEQ ID NO: 19998 - DNA, 399 bp, Enterobacter cloacae
atgaaagaaaaaccctctgacggggtaagactggataaatggctgtgggcagcgcgtttttacaaaacacgcgcccttgcccgcgagatggttgacggcggaaaagtgcattacaacggccagcgcagcaaaccgagcaagctggttgagctgaatgccaccttaacgctgcgtcagggcaacgatgaacgtactgtggtgattaaagccgttaccgaacagcgtcgacccgcagcggaagccgtactgctttatgaagagacggcggagagcattgaaaagcgcgagaagaccgcgctggcgcgcaaaatgaacgcgctgacgatgccccacccggaccggcgaccggataaaaaagagcgccgcgatctgatgaaatttaaacacggtgagactgat

SEQ ID NO: 19999 - DNA, 1038 bp, Enterobacter cloacae
ttgcccgcgctcaaaagctatctttcccttaaatcgtccgccctgcgcaacgccgccaggattagcgttatgctcagtaccgccagcctgatgggcatggcgctgcacctgccgaaaccgtactggatcttaatgaccgtgctgtttgtcactcagaacggctacggcgccacgcgggtgcgtattctgcaccgggctggcggaacgatggccgggctgatcattgcgggcgtaacgctgcacttccacgtgccggaaggctataccctggcaggcatgctggcgatcacgctggtgagctacctgattatccgcaaaaattacggctgggcgatggtgggctttacggtgacggcggtatataccctgcagctgctcacgctcaatggcgaacagtttattatcgccaggctgattgataccctgatcggctgcctgattgcctttggcggaatggtctggctgtggccgcagtggcagagcgggctgctaaggcagaacgcccacgacgcgctggaagccgaccagcaggctattcgcctgatcctgagcgacgacccgcagccctccccgctggcctatcagcggatgaaggtcaaccaggcgcacaacgccctgtttaactcgctcaaccaggcgatgcaggagccgggctttaactcgcactatctggcagacatgaagctctgggtgacgcacagccagtttatcgtcgagcacattaacgccatgaccacgctggcgcgtgagcacacgatgctgacgccggatctggcgcagcgctatttgcagtcgtgtgaaattgcgttgcagaggtgtcagcagcgtctggagtatgacgcgccgggcgagtcgggcgactcaaacattctggaagcgccggagacgttaacccacgggccaatgagcacgctggagcagcatttgcagcgcgttctggggcatctgaacaccatgcacaccatttcgtcggtggcatggcgtcagcgtccgcatcacggcatttggttaacgcgccggttaaagcgaaccgagtat

SEQ ID NO: 20000 - DNA, 1218 bp, Enterobacter cloacae
atggcaactgaacaaccagcaataacccgcgcgacattcgatgaagtgatcctgccgatttatgcaccggctgagtttatcccggtgaagggaaagggcagccgcgtctgggatcagcaggggaaagagtatgtggatttcgcgggcggtattgcggtcacggcgctgggtcattgccatcccgcgctggttgaggcgctgaaaacccagggagaaaccctgtggcacaccagcaacgtgttcaccaacgaaccggcgctgcgcctgggccgcaagatcattgatgcgacctttgccgagcgcgtgctgtttatgaactccggcaccgaagccaacgaaaccgcctttaagctggcgcgctactacgcaacaacgcgccacagcccgtacaaaaccaaaatcatcgccttccacaatgccttccacggacgctccttctttaccgtctccgttggcggccagccaaagtattctgacgggtttggcccgaagccggccgatatcgtccacgtgccgtttaacgatctgcacgcggtgaaagcggtcatggacgatcacacctgcgcggtagtcgttgagccgatccagggtgaaggcggcgtgacggcggcaactccggaattcctgaaagggctgcgcgagctgtgcgacgaacataaggcgctgctggtctttgatgaagtgcagtgcgggatggggcgtaccggcgatctgttcgcgtatatgcactacggcgttacgccggacatcctgaccagcgccaaagcgctcggcggtggtttccctgtgagtgcggtactgacgacgcaggagatcgcctccgcgttccacgtcggctctcacggctctacctacggcggtaacccgctggcgaccgccgtggcgggcgctgcattcgacattatcaacacgccggaggtgttgaacgccgtgagcgcgaagcgcgagctgttcgtaaaacacctgcaaaagattgatgagcagtacgatgtgttcagcgaaatccgcgggatggggctgttgattggcgccgagctgaagccgcagtacaaaggtcgcgcgcgcgacttcctgcacgccgccgcgcacgaaggagtgatggtgctcaatgccgggccggacgtgatgcgctttgcgccgtcgctggtggtagaagacaaagacatcgaagaggggttaacccgctttgcctcggcggtcgcgaagatcgttaaaggc

SEQ ID NO: 20001 - DNA, 582 bp, Enterobacter cloacae
gtgaaaaagctcaccgacaagcaaaaatcccgtctctgggaacagcagcgtaacgtcaatttacaggccagttgtctccttgaaaaaggtaatggtccctcagagccccatattgagacgctggagcttgggccttccgcgcccgggttgccccatctgtgccttattcatcgtcatttgtaccgcagcgagatgaagcgggcaggtgagttccgcactgacgatatttttaagggtgacattcctttctgccatttcgaatacatcgagaagatgggtaacgagctgatggcggcgctggaaagcgaaaagtatctcgtgggtcttgagaaagcggcgtttgttgaccgggttagccactattactgcgaaatcaacatgctacatccgtttatgcgcggcaacggtattgcccaacgcgttttctttgagcagctggcgctccacgcgggctactcgctggactggcgcgatatcgatcccgaccagtgggtggcggctaaccgaagcggcgcaacgggagatttaaccgcgctaaacgctatctttgccaaagtagtgagcgaagcgcgggaatctgag

SEQ ID NO: 20002 - DNA, 1371 bp, Enterobacter cloacae
gtggatcacctgccgattttctgtcaattacgcaaccgcgactgcctgctcgtgggcggcggcgacgtggctgaacgcaaagcccgcctgctgttagaggctggcgcccggctcaccgtcaacgccctcaccttcgccccacagtttgaggtctgggcacaggaagggatgctcacgctggaacagggtgagtttaatgaatctctgctcgatacctgctggctgacgattgccgcgacggatgatgatgaagtgaaccagcgcgtcagcgacgcctgcgaagtgcgccgaatcttctgcaacgtggtggatgcgccgaaagaggccagctttatcatgccgtcgattatcgaccgctcgccgctgatgattgcggtatcgtccggcggacgctcgccggttctcgcccgcctgctgcgggaaaagctggaggccgtgctgccgcagcaccttggtcagattgcccattacgccgggcagctccgctcccgcgtgaagcaaaccttctcgaccgttggcgagcgccgtcgcttctgggaaaaattttttgtgaacgacaggctggcgcagtcgctggcgaatcaggacaccaaagccgttgaagagacgaccgaacagctgctgagcgagccgctggaccatcgcggcgaagtggtgctggtgggcgcaggccccggcgatgcaggcttgctgacgctgaaagggctacagcagatccagcaggccgataccgtggtttacgatcgcctggtctccgatgacatcatgaacctggtacgccgcgatgccgaccgcgtcttcgtgggcaaacgggcgggctatcactgcgttccgcaggaggagattaaccagatcctgctgcgcgaggcgcagaaaggtaagcgcgtggtgcgccttaagggtggcgatccttttatctttggtcgcggcggcgaggagctggaaaccctgtgtgacgcgggcattccgttctccgtggtgccgggcattacggcggcatccggctgctcagcttactctggcattccgctgacccaccgcgactatgcccagagcgtgcgtctggtaacgggccatctgaaaaccggctgcgagctggactggcataacctggccgcggaaaagcagacgctggtcttctacatggggctaaaccaggccgctacgattcaggcgaagctgctggagcacggcatggaggctgatatgccggttgcgctggtggaaaacggtacgtccatcaagcagcgcgtggtggatggcgtactgacgcagctcggtgaactggcgcagcaggtcgaaagcccggcgctgattgtggtgggtcgcgtggttgagctgcgcgagaagctgaactggttctcaaatcac

SEQ ID NO: 20003 - DNA, 168 bp, Enterobacter cloacae
atgttcaaactggcaaaagccgccgttctggttggcctgttatcgactctgactgcctgcaccggtcatgtacagaacaccaaaaataactgcagctacgattacctgctgcacccggcgatctccatttcgaagatcatcggcggttgcggcccggcggcgcagcag

SEQ ID NO: 20004 - DNA, 1167 bp, Enterobacter cloacae
atgactaacagcaatcgcatcaagctcacatggatcagcttcttctcctacgctctgaccggcgcgttggtgatcgtcaccgggatggtgatggggaatatcgcagactacttccagctgcccgtttccagcatgagtaacaccttcaccttcctcaacgcggggatcctgatctctatcttcctgaatgcctggctgatggaaatcgtcccgctgaaaacccagctgcgttttggctttgtgctgatggtcgccgccgtggcgggcctgatgctgagccacagcatcgccctgttctccgccgccatgttcgtgctcggtctggtgagcgggatcaccatgtcgatcggtacgttcctcattacccacatgtatgaaggccgccagcgcggcgcgcgtctgctgtttaccgactctttcttcagcatggccggtatgattttcccgatggtcgcggccgttctgctggcgcgcacatcgagtggtactggggtctatgcctgcatcggcctggtctacgtggcgatctttattctgaccttcggctgtgaattcccggtgctgggcaagaaagcgcaaaccaccgccgagcccgttgcgaaagaaaaatggggcatcggcgtgctgttcctctccgttgccgccctgtgctacattctgggccagctgggctttatctcctgggtaccggagtacgccaaaggtctgggcatgagcctgaacgacgcgggtaaactggtgagcgatttctggatgtcttacatgttcggcatgtgggcgtttagcttcatcctgcgcttcttcgaccttcagcgcattctgaccgtgctggccgggctggcgaccgtgctgatgtacctgttcatcaacggttcaccggagcatatgccgtggttcattctgaccctgggcttcttctccagcgccatttatacctcgatcatcaccctgggctctctgcagaccaaagtggcctcgccgaagctggttaacttcgtcctgacctgcggcaccatcggcaccatgctgaccttcgtagtcaccggcccgatcgtcgcccacagcggtccgctggcggcgctgcacaccgccaacggtctgtatgccgtggtgttcatcatgtgcttcatcctgggcttcgtgacccgccaccgccagcacaacgcg

SEQ ID NO: 20005 - DNA, 1002 bp, Enterobacter cloacae
atgactaagcccatcgtttttagtggcgcacagccttcaggtgaattgaccattggtaactacatgggtgcgttacgtcagtgggtcagcatgcaggatgagtaccattgcatttactgcatcgtcgatctccacgcgattaccgcgcgtcaggatcctgagaagctgcgtaaagccaccctggatacgctggcgctgtacctggcctgcggcatcgatcctgagaagagcaccattttcgttcagtctcacgtgccggagcacgcgcagctgggctgggcgctgaactgctacacctatttcggcgagctgagccgcatgacccagttcaaggataaatccgcacgctactctgaaaacatcaacgccggtctgttcgactatccggtgctgatggcggcagacatcctgctgtatcaaaccaaccaggtgccggtgggtgaagaccagaagcagcatctggagctgagccgcgatatcgcccagcgctttaacgcgatttacggcgatgtgttcaaagtgccagagccgtttattccgaagtccggcgcgcgcgtgatgtcgctgctggagccgaccaagaagatgtccaagtctgacgataaccgcaacaacgttatcggcctgctggaagatccgaaatccgtcgtcaaaaagctcaagcgcgcggtcaccgactccgacgaaccgcctgtggtgcgctacgacgtgcagaacaaagcgggtgtttccaacctgctggatatcctctccggcgtgactggccagagcattcctgaactggaaaaacacttcgaaggcaagatgtacggccacctgaaaggtgaagtggcagacgccgtttccggtatgctgaccgagctgcaggagcgttatcaccgctaccgtaacgacgaagctttcctgcagaaggtgatgaaagacggcgcggaaaaagccagcgcgcgtgcgtccgaaaccctgaaagcggtgtacgaagcgattgggtttgtgggtaaaccg

SEQ ID NO: 20006 - DNA, 2541 bp, Enterobacter cloacae
atgagcaaagtcagactcgctatcatcggtaacggcatggtcggccaccgctttattgaggatcttctcgataaggccgatgctgagcagttcgatattaccgtgttctgtgaagaaccccgcaaggcgtacgaccgtgtacacctgtcttcctacttctcccatcataccgccgaagagctctctctggtgcgcgaaggtttctacgagaagcatggcgtaaaagtgctggtgggcgaacgcgctatcaccatcaatcgtcaggaaaaagtgatccactccagcgccgggcgtacggttttttacgacaagctgatcatggcgacgggctcctatccatggatcccgccgatcaaaggctcggaaactcaggattgcttcgtctaccgtaccattgaagacctcaacgccatcgaatcctgcgcccgtcgcagccgtcgcggcgcagtcgtcggcggcggtctgctgggtctggaagcggcaggcgcgctgaaaaacctcggcgttgaaacccacgtcatcgaatttgccccgatgctgatggccgaacagctcgaccacatgggcggtgaccagctgcgtcgtaaaatcgaaagcatgggcgtgaaggttcacaccagcaagaacaccaaagagatcgttcaggaagggactgaagcgcgcaaaaccatgcgctttgccgacggcagcgagctggaagtggacttcatcgtcttctccaccggtattcgtccgcgcgacaagctggcgacccagtgcggtcttgccgtggcgcagcgcggcgggatcatgatcaacgacacctgccagacctccgatccggatatctacgcgattggcgaatgcgccagctggaataaccgcgtctacggtctggtggcgccgggctacaaaatggcgcaggtcgccgtggaccatatcctcggcagcgaaaacgcgtttaccggtgcagacatgagcgccaagctgaagctgctgggcgtggacgtgggaggcattggcgatgcgcatggccgcacggccggcgctcgcagctatgtctatctcgacgaaagcaaagaagtctacaaacgcctcatcgttagccaggacaacaaaactctgctcggtgcggtgctggtgggcgacaccagcgacttcggcaacctgctgcagctggtgctgaacgccatcgagctgccggaaaacccggacgcgctgatcctcccggcgcacgcgtccagcggcaagccgtctatcggcgtggataaactgccggacagcgcgcaaatttgctcctgcttcgacgtcaccaaaggcatgctgatctccgccatcaacaaaggctgccacaccgttgcggcgctgaaagcggaaaccaaagccggtaccggctgcggcggctgtattccactggtcactcaggtgctgaacgccgagctggcaaaacagggcatcgaagtgaacaacaacctgtgcgagcacttcgcgtattctcgccaggagctgtaccacctgatccgcgtggagggcattaagtcctttgacgagctgctggcgaagcacggtcagggctacggctgcgaagtgtgtaaaccgaccgtcggctccctgctggcctcctgctggaacgagtacgtgctcaagcccgagcatacgccgctgcaggacaccaacgataacttcctggcgaacatccagaaagacggtacctactccgtgatcccgcgttccgctgggggcgaaatcacgccggaagggctggtggccgtgggccgtattgcgcgtgaatttaacctgtacaccaaaatcaccggctcccagcgtatcggcctgtttggcgcgcagaaagacgatctgccggaaatctggcgtcagctgattgaagccggcttcgaaaccggtcacgcgtatgccaaagcgctgcgcatggcgaaaacctgcgtgggcagcacctggtgccgctacggcgtgggcgacagcgtgggcttcggcgtggagctggaaaaccgctacaaaggcatccgcaccccgcacaaaatgaagtttggcgtctccggctgtacccgcgaatgtgcggaagcgcagggtaaagacgtgggtatcatcgccaccgagaaaggctggaacctgtacgtctgcggcaacggcgggatgaagccacgccacgcggacctgctggcggcggatctcgatcgcgatacgctgattcagtatctcgaccgcttcatgatgttctatatccgcaccgccgataagctgacccgtaccgcctcctggctcgataacctggaaggcggcatcgattacctgaaatcggtgatcatcgacgacaagctgggtctgaacgaacatctggaagcggagatggcgcgcctgcgcgaggcggtgatctgcgagtggactgaaaccgtcaacaccccggcggcgcagacgcgcttcaaacacttcatcaacagcgcccagcgcgacccgaacgtacaggttgtgccggagcgtgaacagcatcgtccggcgacaccgtatgaacgaattccggtcacgctggtggaggaaaacgca

SEQ ID NO: 20007 - DNA, 324 bp, Enterobacter cloacae
atgagccagtggataaacatttgcgatattaacgacatcatcccggccaccggcgtatgcgcgctgctgggaagcgagcaggttgcgattttccgccctcgccacgatgaacaggtttttgccatcagcaatatcgacccgttcttcgaggccagcgtgctctcccgcggactgattgccgagcatcagggcgaactgtgggtcgccagcccgctgaaaaagcagcgtttccgcttaagcgacggatactgcatggaagatgagagtcattcagtgaagcactatgatgtccgcgtgaaggacggcaaggtgcagctgaaaggc

SEQ ID NO: 20008 - DNA, 1296 bp, Enterobacter cloacae
atggatgaattcaaaccagaagacgagctgaaacccgatcccagcgatcgtcgtactggtcgttctcgtcaatcttcagaacgtgataacgagccgcagatcaaatttgacgatgttgatctggatgcagacgatcgtcgcccttcgcgcagccgcaacgcgcacgaagagcgagcagaagaggattatgagtccgaagaagattcaatggacgaacagcctgtagagcgtcgcccgcgtaaacgtaaaaaagccgctgcgccgaaaccggcttcccgccagtacattatgatgggccttggcgttctggtgcttgtgctgctgattgtcggcattggctccgcgcttaaagcaccgtcaacgaactcaaccgagcaaactgcttccgctgagaagagcatcaacctgtccggtaacgatgcaactaatcaggcgaatggtgcacagcctgcgccgggtgcgacttccgcagagcagaccgcaggtaacaccacagcgccgcaggatgtttctctaccgcccgtttcttcaacccctgctcagggtcaggcacctgctacgcctgaaggccagcagcgcgtagaagttcagggagatctgaacaatgcgctgacgcagccgcagaaccagcagcaggttgataacgtcgtggttaactctacgctgccaactgagccggcaaccgttgccccgattcgcggtggtaacgctcagccacaaacggctgcgacggaaaccaaaccgcgccagacgcaagctgcgacgcgtcctgaacgtaagcaggcggtgattgagcctaagcgtgaaaccaaacctcaggcagtcgtgaaagcgcctgaagtgaaagctgcaccggcacagccgaaacacaccgaaacggctgcggtgagcgagcctgctaaagcgccagtcacgcagaccgcgccgaaagcaacggcgaccacagctgcacctgcagcaacagctccggcagccacggcagcagcatccagcgccgcagcaggcaaaacggcaggtaacgttggctcgctgaagtctgcgccatccagcaactacacgctgcagctgagcagttcgtctaactatgacaacctcaacggttgggcgaagaaatcaaatctgaaaaactacgttgtttatcagacgacccgcaacggtcagccgtggtatgtgctggtcagcggcgtttattcgtccaaagatgaagcgaaacgtgccgtagcggcactgccagctgatgttcaggcgaaaaacccatgggcgaagccgattcatcaggttcaggccgatctgaag

SEQ ID NO: 20009 - DNA, 870 bp, Enterobacter cloacae
atgagtattatctcgacgaaatatcttctgcaggacgcgcaggcaaaaggctacgccgttccggcgttcaacatccacaacgcggagacgatccaggcgatcctcgaagcgtgcagcgaaatgcgatcgccggtgatcctcgcgggcacgccgggcacctttaagcatattgcgctggaagagatctacgccctgtgcagcgcctactcccacacctacgacatgccgctggcgctgcacctcgatcaccacgaatcgctggacgatattcgccgcaaggtcaacgcgggcgtgcgcacgcgcatgatcgacggcagccactacccgtttgaacaaaacgtgaagctggtgaagtcggtggtcgatttctgccacctcaacgactgcagcgtcgaggccgagctgggccgtctgggcggcatggaagatgacatgagcgtggacgcggaaagcgcattcctcaccgatccgcaggaggcaaaacgcttcgtcgaactgaccggcgttgacagcctcgccgtcgccatcggcaccgcccacggcctgtataccaaacgcccgaaaatcgacttccagcggctggccggaattcgcgaagtggtcaccgtgcagctggtgctgcacggcgcgagcgatgtgccggatgagtttgttcgccgcaccatcgagctgggcgtgtgcaaagtcaacgtggcgaccgagctgaaaattgcgttctctgacgcggttaaggcctggtttgccgaaaacccgcagggcaacgatccgcgcttctatatgcgggtcggcatggacgccatgaaagaggtggtcagaagcaagatcgccgtttgcggctcggcaaaccgattgctgcttccggcagaagcc

SEQ ID NO: 20010 - DNA, 861 bp, Enterobacter cloacae
atgaaacaacacgaaacggcagataattctcaaggccagctttatattgtacctactcctatcgggaatttgtctgatattacccaacgtgcgctcaccgtactgcaagctgttgatttaattgccgctgaagatacccgccacaccggcctgctgctgcaacatttcgcgattaatgcccgtttgtttgctctgcacgatcacaatgagcaacaaaaagccgaaacgctggtggcgaagctgaaagaggggcagaacattgccctggtctcagatgccggtacgccgctgatcaacgatcccggctatcacctggtgcgtacctgtcgtgaagccggtattcgcgttgtgccgctgccggggccgtgcgctgccattgctgcgctgagcgcggcgggtctgccgtctgaccgtttctgctatgaaggcttcctgcctgctaaatccaaaggccgccgtgacgtgttaaaaggtctggaagcggaaccgcgcaccctgattttctacgaatccacgcaccgcctgctggagagcctggaagatatggtgaccgtgtggggagaagcccgctacgtggtgctggcgcgcgagctgaccaaaacctgggaaaccattcacggcgcctcagtgggtgaactgctggcgtgggtgaaggaagacgaaaaccgccgcaagggcgaaatggtgctgattgtcgaagggcataaggcgcaggaagacgcgctgccagccgacgcgctgcgcacgctggcgctgctgcaggcggaactgccgctgaagaaagacgctgcgctggcggcggaaattcacggcgtgaagaaaaatgcgctgtataagcatgcgctggagcagcagggggag

SEQ ID NO: 20011 - DNA, 2136 bp, Enterobacter cloacae
ttgctgaatccgatcgttcgtaaattccagtatggtcaacataccgtcacgctggaaaccggcatgatggcacgtcaggctactgctgccgttatggtaagcatggatgacactgcggtattcgttaccgttgttggccagaaaaaagctaaaccaggtcaggacttcttcccgctgaccgttaactaccaggagcgtacctacgctgccggtaaaatcccgggtggtttcttccgtcgtgaaggccgtccaagcgaaggcgaaacgctgattgcgcgtctgattgaccgcccggttcgtccgctgttcccggaaggcttcgttaacgaagtacaggttatcgcgaccgttgtttccgttaacccacaggttaacccggacatcgttgccatgatcggcgcatccgctgccctgtcactgtctggtattccattcaatggcccaatcggtgccgcgcgcgttggctacatcaatgaccagtacgtgctgaacccaacccaggaagagctgaaagaaagtaagctggacctggttgttgcgggtactgaagcggctgtactgatggttgaatccgaagctgaactgctgagcgaagaccagatgctgggcgctgtggtatttggccacgaccagcagcagatcgttatccagaacatcaacgacctggtgaaagaagccggtaaacctcgttgggactggcagccagaagcagcaaacgacgcgctgaacgcacgcgttgcagccctggcagaatcgcgtctgagcgatgcataccgcatcactgacaaacaggagcgttacgctcaggttgacgtgatcaagtctgaaactatcgcgacgctggttgctgaagacgaagcgctggatgctaacgaactgagcgacatcctgcacgctatcgagaaaaacgttgttcgtagccgtgtactggcaggcgagccgcgtatcgatggccgtgaaaaagacatgatccgtggtctggatgtgcgtactggcgttctgccacgtactcacggttccgcgctgttcacccgtggcgaaacgcaggcgctggttaccgcgaccctgggtactgcacgtgacgcacagatcatcgacgaactgatgggcgagcgcactgacagcttcctgttccactacaacttccctccgtactccgtaggcgaaaccggtatggttggctcgccgaagcgtcgtgaaattggtcacggtcgtctggcgaagcgcggcgtgctggcagtaatgccagaagctgacaagttcccgtacaccgttcgtgtggtttctgaaatcaccgaatccaacggttcttcttccatggcttccgtgtgtggtgcttctctggcgctgatggatgcaggcgtgccaatcaaagccgccgttgcgggtatcgcaatgggcctggtgaaagaaggcgacaacttcgttgttctgtctgacattctgggtgacgaagaccacctgggtgatatggacttcaaagtagcgggttcccgcgaaggtatctctgcgctgcagatggatatcaaaattgaaggtatcaccaaagagatcatgcaggttgctctgaaccaggctaaaggtgctcgtctgcacatcctgggcgtgatggaacaggcgattaacgcgccgcgtggcgacatttctcagttcgctccacgtatccacaccatcaagatcaacccagataagatcaaagatgttatcggtaagggcggttccgtaatccgtgcgctgaccgaagagactggcaccacgatcgaaatcgaagatgacggtactgtgaagatcgcagcaaccgacggcgagaaagcgaaattcgcgatccgtcgcatcgaagaaatcacggcagagatcgaagtgggccgcgtctacgcaggtaaagtgacccgtatcgttgactttggcgcgttcgttgccatcggtggcggtaaagaaggtctggttcacatctctcagatcgctgacaagcgcgttgagaaagtgaccgattacctgcagatgggtcaggaagtaccggtgaaagttctggaagttgatcgccagggccgtatccgtctgagcattaaagaagcaaccgagcagtctcagccagctgctgcgccagaagcacaggcagcagaacagcaaggcgag

SEQ ID NO: 20012 - DNA, 267 bp, Enterobacter cloacae
atgtctctaagcgttgaagctaaagctaaaatcgtttctgagtttggtcgtggtactaacgacagcggttctaccgaagttcaggttgcactgctgactgcacagattaaccacctgcagggtcactttgcagagcacaaaaaagatcaccacagccgtcgtggtctgctgcgtatggtttctcagcgtcgtaaactgctcgactacctgaaacgtaaagatgttgcacgctacaccgcgctgatcgagcgtctgggtctgcgtcgc

SEQ ID NO: 20013 - DNA, 1893 bp, Enterobacter cloacae
atggctgaattcgaaaccacttttgcagatctgggcctgaaggctcctatccttgaagcccttaacgatctgggttacgaaaaaccatctccgatccaggctgagtgtatcccacacctgctttctggtcgtgacgtgctgggcatggcccagactggtagcggtaaaactgcagcattctcactgccgctgctgaacaacattgatccggacctgcgtgcaccgcagatcctcgtcctggctccaacccgtgaactggctgttcaggttgcagaagcaatgacggaattctctaaacacatgcgcggcgtaaacgtggtagccctttacggcggccagcgttatgacgtgcagttacgcgccctgcgccagggcccacagattgttgtcggtacgccgggccgtctgctggatcacctgaagcgcggtactctggacctctctaaactgagcggcctggtactggatgaagcagatgaaatgctgcgtatgggcttcatcgaagacgtcgaaaccatcatggcgcagatcccggacggtcatcagaccgcgctgttctctgccaccatgcctgaagcgattcgtcgtatcaccaagcgcttcatgaaagatcctcaggaagtgcgtattcagtccagcgtaaccactcgcccggacatcagccagagctactggtctgtgtacggcatgcgcaaaaacgaagcgctggtacgtttcctggaagcagaagattttgatgcggcgattatcttcgttcgtaccaaaaacgcgaccctggaagtggctgaagccctggagcgtagcggctacaacagcgcagcgctgaacggcgacatgaaccaggccctgcgtgagcagactctggagcgtctgaaagacggtcgtctggatatcctgattgcaaccgacgtggcagcacgtggtctggacgttgagcgtatcagcctggttgtaaactacgacatcccgatggattccgagtcttacgttcaccgtatcggccgtaccggtcgtgcgggtcgtgctggccgcgcgctgctgttcgttgagaatcgcgagcgtcgtctgctgcgtaacattgaacgcaccatgaagctgaccattccagaagctgacttgccaaacgcagagctgctgggcaaacgccgtctggaaaaattcgccgcgaaagtacagcagcagctggaaagcagcgatctggatcagtatcgcgcgctgctgtcgcagattcagcctgttgctgaaggcgaagagctggacatggaaaccctggccgcagcactgctgaaaatggctcagggcgaacgtagcctgatcgtgccaccagatgcgccgatgcgtcctaagcgtgaattccgtgaccgtgacgatcgcttcgaacgtcgtggcgaccgtaatgaccgtggcccacgcggtgaccgtccagagcgtggtggtgaagaccgtccacgtcgtgaacgtcgtgacgcgggtgacatggaactgtaccgcattgaagtgggccgtgatgatggcgttgaagttcgtcacatcgttggcgcgatcgctaacgaaggcgacatcagcagccgttacatcggtaacatcaagctgttcgcatctcactccaccatcgagctgccaaaaggcatgccgggcgaagtgctgcagcactttacgcgtacccgcatcctgaacaagccgatgaacatgcagctgatgggtgatgcacagccacgccctgaccgcggtggtgaacgtcgtggcggtggtcgcagcttcggtggcgagcgtcgtgaaggcggccgcagcgaaggtcgcggtggtgaaggtcgtcgtttctccggcgagcgtcgcgaaaaccgtggcccacgtcgtgaagaaggcaccagccgccgtcgtttcggtgacgcg

SEQ ID NO: 20014 - DNA, 627 bp, Enterobacter cloacae
atgtataagcccgatttcccgcccgtcccctaccgtttagggctctatccagtggtggacagcgtggagtggatagagcgcctgctggagacaggcgttcgaacgatccagctgcgcatcaaggataaacgcgacgacgaggtagaagccgatgtggttgccgccatcgcgctggggcgtcggcataacgcccgtctgtttatcaacgactactggcggctggccgttaagcaccaggcgtacggcgtgcatctgggtcaggaggatttggaaacaacggatctgagcgctatccgcgaagccgggctgcgtcttggcgtttcaacacacgatgacatggagatcgacgtggcgctggcggcccgtccctcttacatcgcgctgggtcacgtcttcccgacgcaaaccaagcagatgccctccgcaccgcagggctgacgcagctgacgagtcacgttaaacgccttgccgattaccccaccgttgccatcggcggaatcagtcttgaacgcgccccggcggtgctggagaccggcgtcggcagtatcgccgtcgtcagcgccatcacccaggccgcagactggcgtctcgccaccgaacagctgttacagttggcaggagcgggtg

SEQ ID NO: 20015 - DNA, 839 bp, Enterobacter cloacae
gcgagcagtgggaacatcagcaggtcaatgacggcgaccagatcctgctgtttcaggttatcgcagggggctgagatgttacgtattgccgataaagtctttggttcacatttgtttaccggaaccggaaaattcgcctcgccgcagctgatggtggatgccattcgcgaaagcggcagccagctggtgacgctggcgctcaagcgcgtggatctgcgtcatcacagcgacgccattctggcgcctttactggaggctggcgtcacgctgctgcccaacacctccggtgccaaaacagccgaagaggcgatttttgccgcgcactggcccgcgaggcgctcggcacccgctggctgaagctggaaattcatcctgacgcccgctggctgctgcccgaccccatcgaaacgctgaaagcggctgaaaagctggtgcagcaagggtttaccgtcctgccttactgcggcgccgaccctgtcctgtgcaaacggctggaagaggtcggctgcgccgccgtcatgccactgggcgcccccattggctccaaccaggggctggaaacccgcgcgatgctggaaatcattattgagcaggctaccgtaccggtggtggttgatgcgggcattggcgtgcccagccatgccgcgcaggcgctggagatgggcgccgacgcggtactggtcaatacggccatcgcggttgccgacgatccggtcatgatggcgcgtgcgttccgcatggccgtagaggctggcctgctggcaagggagtccggtcccggctcgcgcagtttccaggcgcaggccaccagcccgctgaccggttttctggaggcgatc

SEQ ID NO: 20016 - DNA, 315 bp, Enterobacter cloacae
atggaagacttagaaaccacgattatggaactgctggtcaacgcgggcgcggcgcgcagtgcagccctgacggcgttgcagatggcgcgtaaaggtgattttgacgaagctgaaaaagcgatggaagagtcgcgtgaatatgtgaagcatgcgcacactatacagacgcagcttatcggtcttgatgaggggaccgggaagcttccggttaacctgatcaccgtccactcgcaggatcacctgatgaacgcgatggtcattcaggatctggcgggcgatatgattgagctttatcgtcggatcccgttggtgaat

SEQ ID NO: 20017 - DNA, 4221 bp, Enterobacter cloacae
gtgaaagatttattaaagtttctgaaagcgcagactaaaaccgaagagtttgatgcgatcaaaattgctctggcttcgccagacatgatccgttcatggtcattcggtgaagttaaaaagccggaaaccatcaactaccgtacgttcaaacctgagcgtgacggccttttctgtgcgcgtattttcgggccagtaaaagattacgagtgcctgtgcggtaagtacaagcgcctgaaacaccgtggtgtgatctgtgagaagtgcggcgttgaagtgacccagaccaaagtgcgtcgtgagcgcatgggccacatcgagctggcgtctccgaccgctcacatctggttcctgaaatctctgccgtcccgtatcggtctgctgctggatatgccgctgcgcgatatcgaacgtgttctgtacttcgaatcttatgtggttatcgaaggcgggatgacgaacctggaacgtcatcagatcctgactgaagagcagtatctggacgcgctggaagagttcggtgacgaattcgacgcgaagatgggtgcggaagctattcaggccctgctgaagagcatggatctggagcaagagtgcgagcagctgcgtgaagagctgaacgaaaccaactccgaaaccaaacgtaaaaagctgaccaagcgtatcaaactgctggaagcgttcgttcagtctggtaacaaaccagagtggatgatcctgaccgttctgccggttctgccgccagatctgcgtccactggttccgctggatggtggtcgtttcgcaacgtccgatctgaacgatctgtatcgtcgcgttatcaaccgtaacaaccgtctgaaacgtctgctggatctggctgcgccggacatcatcgtacgcaacgaaaaacgtatgctgcaggaagcggtagatgccctgctggataacggtcgtcgcggtcgtgcgatcaccggttctaacaaacgtcctctgaaatctttggccgacatgatcaaaggtaagcagggtcgtttccgtcagaacctgctcggtaagcgtgttgactactctggtcgttctgttatcaccgtaggtccatacctgcgtctgcatcagtgcggtctgccgaagaaaatggcactggagctgttcaaaccgttcatctacggcaagctggaactgcgtggcctcgccaccaccatcaaagccgctaagaaaatggttgagcgtgaagaagctgtcgtttgggatatcctggacgaagttatccgcgaacacccggtactgctgaaccgtgcaccaactctgcaccgtttgggtatccaggcatttgagccagtcctgatcgaaggtaaagctatccagctgcacccgctggtatgtgcggcatataacgccgacttcgatggtgaccagatggctgttcacgtaccgctgacgctggaagcccagctcgaagcgcgtgcgctgatgatgtctactaacaacatcctgtccccagcgaacggtgaaccaattatcgttccttctcaggacgttgtattgggtctgtactacatgacccgtgactgtgttaacgccaaaggcgaaggcatggtgctgactggcccgaaagaagctgagcgtatttatcgcgctggcctggcctctctgcatgcgcgcgttaaagtgcgtatcaccgaatacgaaaaagatgaaaacggcgaattcgttgcgaaaaccagcctgaaagacacgaccgttggccgtgccattctgtggatgatcgtaccgaaaggtctgcctttctccatcgtcaaccaggcgctgggcaagaaagcgatctccaaaatgctgaacacctgttaccgcattctgggtctgaagccgaccgttatcttcgctgaccagacaatgtataccggctttgcttatgcagcgcgttcaggtgcatctgttggtatcgatgacatggtcatcccagagaagaaacacgagatcatctctgaagcggaagccgaagttgctgagatccaggagcagttccagtctggtctggttaccgcgggcgaacgctataacaaagttatcgatatctgggctgcagcgaacgatcgtgtatccaaggcgatgatggataacctgcagaccgaaaccgtgattaaccgtgacggcgtagaagagcagcaggtttccttcaacagcatctacatgatggccgactccggtgcgcgtggttccgcagcacagattcgtcagctggcaggtatgcgtggtctgatggcgaagccagatggctccatcatcgaaacgccaatcaccgcgaacttccgtgaaggtctgaacgtactccagtacttcatctccacccacggtgctcgtaagggtctggcggataccgcactgaaaacggcgaactccggttatctgacgcgtcgtctggttgacgttgcgcaggatctggttgtgaccgaagacgattgtggcaccctcgaaggtatcaccatgaccccggttatcgagggtggtgatgttaaagagccactgcgcgatcgcgttctgggtcgtgtaaccgcggaagacattctgaagccgggtactgcagacatcctggttccacgcaacacgctgctacacgagcactggtgtgacctgctggaagcgaactctgttgactccgtgaaagtacgttccgttgtatcctgtgacaccgactttggtgtatgtgcgcactgctacggtcgtgacctggcgcgtggccacatcatcaacaaaggtgaagcaatcggcgttatcgcggcacagtccatcggtgagccgggtacacagctgacgatgcgtacgttccacatcggtggtgcggcatctcgtgcggctgctgaatccagcatccaggtgaaaaacaaaggtagcatcaagctcagcaacgcgaagtctgttgttaactccgctggcaagctggttgtgacctcccgtaacaccgagctgaagctgatcgacgaattcggtcgtaccaaagagagctataaagtgccttacggtgcggttatggcgaaaggtgatggcgagcaggttgccggcggtgaaaccgttgcaaactgggatccacacaccatgccggttatcaccgaagtgagtggtttcatccgcttcactgacatgatcgacggccagaccattactcgtcagaccgacgagctgaccggtctgtcttctctggtggttctggattctgctgaacgtactaccggtggtaaagatctgcgtcctgcactgaaaatcgttgatgctcagggtaacgacgttctgatccctggtaccgacatgcctgcgcagtacttcctgccgggtaaagcgatcgttcagctggaagatggcattcagatcggtgcgggtgatgctctggcgcgtattccacaggaatccagcggtaccaaggacatcaccggtggtctgccacgcgttgcggacctgttcgaagcacgtcgtccgaaagagcctgcaatcctggctgaaatcagcggtatcatctccttcggtaaagagaccaaagggaagcgccgtctggttatcactccagtagatggcagcgaaccgtacgaagagatgattcctaagtggcgtcagctcaacgtgttcgaaggtgaacgtgtagaacgtggtgacgtggtttccgatggtccagaagctccgcacgacattctgcgtcttcgtggcgtacacgcggtaacgcgttacatcaccaacgaagtacaggacgtttaccgtctgcagggcgttaagattaacgataagcacatcgaagttatcgttcgtcagatgctgcgtaaagcaaccatcgaaaacgcaggcagctccgagttcctggaaggcgagcaggttgaatactcacgcgtcaagatcgctaaccgcgaactggaagcgaacggcaaaatcggtgcgaccttctcgcgcgatctgctgggtatcaccaaagcgtctctggcaaccgagtccttcatctctgcagcatcgttccaggaaacgactcgtgtcctgaccgaagccgctgttgcaggtaaacgtgatgaactgcgcggtctgaaagagaacgtcatcgtgggtcgtctgatcccggcgggtaccggttatgcgtaccatcaggatcgtatgcgtcgtcgtgctgcgggcgaactgccagctgcaccgcaggtgactgctgaagatgcatccgcgagcctggcagaactgctgaacgcaggtctgggcggttccgacaacgag

SEQ ID NO: 20018 - DNA, 1428 bp, Enterobacter cloacae
atgaaagtaacactgccagagtttgaacgtgctggggtaatggttgttggggatgtgatgctggatcgctattggtatgggcctaccagccgcatctctccggaagcaccggtaccggtggttaaggtcgacaccattgaagagcgtcccggcggcgcggcaaacgtggcgatgaacattgcctctctgggcgcgcagtcgcgtctggtgggcctgaccggcatcgacgatgcggcgcgcgcgctgagcaagtcgctggcggacgtgaacgtgaagtgcgacttcgtctctgttccgacccacccgaccatcaccaagctgcgcgtgctgtcgcgcaaccagcagctgatccgcctcgactttgaagaaggattcgaaggcgttgatcccgagccgctgcacgagcgtatcaaccaggcgctgggcaatattggcgcgctggtgctgtccgactacgccaaaggcgcgctggcgagcgtgaagacgatgattcagctggcgcgtaaagccaacgtcccggtgctgatcgacccgaaagggaccgattttgagcgctatcgcggcgcaaccctgctgacgccaaacctctccgagtttgaagctgtggcgggcaagtgcaaaaccgaggaagagctggttgagcgcggcatgaagatcattgccgatttcgagctgtccgcgctgctggtcacccgctccgagcaggggatgacgctgctgcagccgggcaaagcgccgctgcatatgccaacccaggcgcaggaggtgtacgacgtgaccggtgccggtgatacggtgatcggcgtgctggcggcgacgctggcagcaggaaactcgctggaagaggcgtgctacttcgctaacgccgcggcgggcgtggtcgtcggtaaactcggtacctcaaccgtttcgccaatcgagctggaaaacgcggtgcgcggtcgtgcggataccggttttggcgtcatgaccgaagacgagctgaaggtggccgtcgccgccgcgcgcaagcgtggtgaaaaagtggtgatgactaacggcgtgttcgacattctgcacgcgggccacgtttcgtatctggcgaacgcgcgcaagctgggcgatcgcctgattgtggcggttaacagcgatgcatcgacgaagcgcctgaagggggaaacgcgtccggtgaacccgctcgagcagcgcatgattgtactcggtgcgctggaagccgtggactgggtggtgtcgtttgaagaagataccccgcagcgcctgattgccggcattctgccggacctgctggtaaaaggtggggattacaagccggagcaaatcgcgggcagcgaagaggtctgggcgaacggcggcgaggtgatggtgctcaactttgaggacgggtgctcaaccaccaacatcatcaagaagatccagaaggacagtcag

SEQ ID NO: 20019 - DNA, 651 bp, Enterobacter cloacae
atgaatcagacgctactttcctcttttggcacttcaactcaacgtgttgaacatgcactggatgcactgcgcgaaggccgcggtgtgatggtgcttgacgatgaaaaccgtgaaaacgaaggcgacatgattttcgccgccgaaaacatgaccgttgaacagatggcgctgaccatccgtcacggcagcggcatcgtatgcctgtgtattaatgaagatcgtcgtaagcagctcgatctgccgatgatggtcgaaaacaacaccagcgcctttggtaccggttttaccgtgaccattgaagcggcgcatggcgtgaccaccggtgtgtctgcggctgaccgtctgaccaccgtacgtgcagcgattgctgatggtgccaaaccatccgatctgcaccgtcctggccacgtcttcccactgcgtgcgcaggcgggcggcgtgttgacccgcggtggtcacaccgaagcgacgatcgacctggtgacgctggctggcttcaaacctgctggcgtgctgtgcgaactgaccaacgatgatggcaccatggcgcgcgcaccggagtgcatcacttttgcccgcctgcacaacatgccggtggtcacgattgaagatctggttgagtatcgccaggcgcacgagcgcaaagccagc

SEQ ID NO: 20020 - DNA, 420 bp, Enterobacter cloacae
atgaagcgctatacgcctgacttcccagaaatgatgcgcctgtgcgaaaccaatttcgcacagctgcgccgcctgctgccgcgaaacgacgcacccggcgaaacggtaagctatcaggtgagcaacgcgcagtatcggttaacgataacagaatcaacgcgctacactacgctggtggagattgagcaaacggcacccagcattagctactggagcctgccgtcgatgacggtgcgtctctatcacgacgcgatggtcgctgaagtgtgttcaagccagcagatctttcgcttcaaggcgcggtatgattacccgaataaaaagttgcatcaacgcgacgaaaagcatcaaattaaccagtttttagccgactggctaagatattgtttagcacatggagcaatggcgattccggtttgt

SEQ ID NO: 20021 - DNA, 825 bp, Enterobacter cloacae
ttggaaagcctgttgaacctgactgttgctggtggggcgccagtcaggatattacaaatcaccgatacccacctttttgccgaaaagcatgagacgctactgggggttaacacctgggagagttatcaggcggtgcttagcgccattcacgctgaaaaccgtgcatgcgatctgattgtcgcaacgggcgatctggcgcaggatcagtcctccgcggcctaccagcattttgctgaaggcatcgcgagctttagcgtgccttgcgtctggctgccaggaaaccatgacttccagcccgctatgtacagttctcttcaggatgcgggcatttcgccggcgaaatgtgtttttgcgggtgaacagtggcagatcctgctgctggacagccaggtgttcggcgtcccgcacggtgagttaagcgagtttcagctcgactggcttgagaccaaactggctgctgaacctgaacgccacacgctgctgttgctgcatcatcatcctctgccggcgggctgcagctggctcgatcagcacagcctgcgcaactccgcagcgctggatcgcgtgctggcgaagttcccgcgggtgaaaaatctgctgtgtgggcatattcaccaggaacaggatctcgactggaacggacgccgcatgctggcgacgccatcgacctgcgttcagtttaagccgcactgcgccaactttacgctggataccatcgcgccaggctggcgctggctggaactgcatgccgacggcacgctgactactgaagtctgccgtttgaccggtgcaaaattccgcccggataccgcttcagaaggctat

SEQ ID NO: 20022 - DNA, 273 bp, Enterobacter cloacae; identical to SEQ ID NO: 19291

SEQ ID NO: 20023 - DNA, 375 bp, Enterobacter cloacae
atggacgaacagtggggttatgtcggcgctaaatcacgccagcgctggttgttttacgcgtatgacaggatacggaggacggttgtggcgcacgtattcggtgaacgcacgttgtccacgctggagcgtcttctgggcctgctgtcggcctttgaggtcgtggtatggatgacggatggctggccgctttatgaatcacgcctgaagggagaactgcacgttatcagcaagcgatatacgcagcgcattgagcggcataacctgaatctgaggcaacatctggcaaggctgggcaggaagtcactgtcgttctcaaaatcggtggagctgcatgacaaagtcatcgggcattatctgaacataaaacactatcag

SEQ ID NO: 20024 - DNA, 990 bp, Enterobacter cloacae
atgtttcagcagaaaaaggactgggaaacacgagaaaacgcttttgctgctttctctatggggccgctgaccgatttctggcggcagcgtgaggaagatgagtttacgggcgtcgggggcatcccggtgcgtttcgttcgtttccgaaatgaaaaaaatgaccgggtgattgtggtctgccccgggcgtattgaaagctacgttaaatacgccgagctggcctatgacctggtccatatggggttcgatgtcctgatcatcgaccatcgtggacaggggctgtccggacgtatgctgccggacacgcaccgtgggcacgtcgatcgcttcagcgattacgtcgacgattttgccgcgttctggcagcaggacgttcagcccggcccctggcgcaagcggtatattcttgcgcactccatgggcggcgccatttcgacgctgtttttgcagcgttacgcgcacgagtgcgacgccattgcgctcaccgcgccgatgtacggtatcgtgatccgttttcctgactggatggtgcgccatcttcttgactgggctgagggccatcagcgcattcgtgaaggttacgccattggcacaggacgctggcgcgcgctgccgttcgccatcaacgtcttaacccatagccggcagcgttatcgccgcaacctgcgcttttatgccgatgaaccgcgcttgcgcgtcggcggcccgacctggcactgggtgcgggaggggattctggccggtgagcaggtgctggcgggcataggcgatgatgacacgccgacgcttctgatccaggcggaagaagagcgtgtggtggataaccgcatgcatgaccgctattgtgaactgcgcgctgcagccggtcacccttgtgaagggggtaaaccgctggtcattaacggcgcgttccatgagatcctttttgaaaaggacgctatgcgctcagtcgcgcttaacgccattgttgaatttttcaacaggcataat

SEQ ID NO: 20025 - DNA, 815 bp, Enterobacter cloacae
cagaggttgaaatccctatgtaccaggttgttgcatctgatttagatggcacgctgctttcccccgaccacaccctgtcgccttacgcgaaagagaccttaaaactcctgactgcccgtggcgtgaactttgtgttcgccaccggccgccaccacgtggacgtggggcagatccgcgataatcttgagatcaaatcgtacatgatcacctccaacggtgcgcgcgtgcatgataccgacggcaacctgatctttacccacaatctggatcgcgatattgccgccgatctgttcggcgtggtgcatgacaacccggctatcgttactaacgtttaccgcgacgacgactggtttatgaaccgccaccgcccggatgaaatgcgtttcttcaaggaagcggtattcaactactccctttacgaaccgggcctgctggagccggaagggatcagcaaggtgttcttcacctgtgacagccacgaagagctgctcccgctggaacaggcgatcaacgcccgctggggcgatcgcgtcaacgtgagcttctcaaccctgacctgtctggaagtaatggcgggtggcgtctccaaaggtcacgcgctggaagcggttgcgaaacgtctgggcttcgggctgaaagactgtatcgccttcggtgacggcatgaacgacgccgagatgctttcgatggcgggcaagggctgcatcatgcagaacgcgcaccagcgtctgaaggatctgcaccctgagctggaagtgattggttctaacgctgacaacgcggtaccgaagtatctgcgtaaactgttccttgaa

SEQ ID NO: 20026 - DNA, 1827 bp, Enterobacter cloacae
gtggcgcaggcggaagtattgaatcaggagtcgctggctaaacaggttttgcatgaaacctttggctaccagcagttccgccctggccaggaaaccatcattgaaacggtgctggaaggtcgtgattgcctggtggtaatgccgaccggcggcggcaagtccctctgttatcaggtgcccgcgctggtgcttaacggcctgacggtcgtggtatcccctctcatttctctgatgaaagaccaggttgaccagctgctcgccaacggcgtggcggcagcctgtcttaactccacgcaaacccgggagcagcagcaagaggtgatggccgggtgccgcaccgggcagatccgcctgatgtatatcgccccggaacgcctgatgctggataacttcctcgatcatctcgcgcactggaacccggtgctgctggcggtggatgaagcgcactgtatttcccagtggggacacgatttccgcccggaatacgccgccctcggccagctgcgtcagcgcttccccgagctgccgtttatggcgcttaccgccacggcggatgacaccacgcggctggatatcgttcgcctgctcgggctgaacgacccctatattcaggtcagcagcttcgaccgcccaaacatccgctatatgctgatggaaaagttcaagccgctggatcagctcctgcgctacgtccaggagcagcgcggcaagtccggcatcatctactgcaacagccgtgcgaaggtggaagacaccgccgcgcgtctgcaaaaccgcggctttagcgccgccgcctatcacgccgggttagagaaccacatccgcgcggacgtgcaggagaaattccagcgtgacgacctgcagatcgtcgtcgcgaccgtggcgttcggaatgggcatcaacaagccgaacgtgcgctttgtggtgcatttcgacatcccgcgcaatatcgaatcctactatcaggaaaccggccgcgccgggcgtgacggtctgcctgcggaagcgatgctgttttacgatccggccgatatggcgtggctgcgccgctgtctggaagagaagccgcagggacagctgcaggatatcgagcgccacaagctcaacgcgatgggcgcgtttgccgaagcgcaaacctgccgtcgtctggtgctgctcaactactttggtgaagggcgccaggagccgtgcggcaactgcgatatctgcctcgatccgccaaagcagtacgatggcctgatggacgcgcgtaaggcgctctcgaccatttaccgtgtgaatcaacgcttcgggatgggctatgtggtggaggtgctgcgcggcgccaataaccagcgtatccgcgatatgggccacgacaagctgccggtctacggtattggcaaggagcagagccacgaacactgggtgagtattattcgccagctgatccaccttggcttcgccacgcagaacattgcccagcactccgccctgcagctgaccgaggcggcgcgtccggtcctgcgcggtgacgttgagctcaagctcgccgtgccgcgcgtcatcgccctgaagccacgcgtgatgcagaaatcctacggcggcaactacgaccgcaagctgttcgccaaactgcgcaagctgcgtaaagccatcgccgacgaagaaaatattccgccttacgtggtgttcaacgacgcgacgctgatcgagatggccgaacagatgccgctcagcgccagcgagatgctgagcgtcaacggcgtgggaacacgcaagctggagcgcttcggtaaagagtttatggcgctcatccgctctcacgccgacggtgatgatgaggag

SEQ ID NO: 20027 - DNA, 618 bp, Enterobacter cloacae
atgaccttcgaatggtggttcgcctacctgctgacatccattatcctcagcctttctccgggctcgggggctattaacaccatgaccacctccatcaatcacggctaccgcggtgcggcggcatcgattgccggtttgcagaccgggctgggtattcatattgtgctggtcgggatcggtctggggaccctgttctcccgctccgtgctggcctttgaggtgctgaaatgggccggggcagcgtatctgatttggctcggcatccagcagtggcgcgcggcaggctccatcaacctgaatacgctggctctgacgcaaaaccgcggccatctgtttaagcgtgcggtattcgtcaacctgaccaacccgaagagcatcgtgttcctcgccgcgctgttcccgcagtttatcgttccgcatcagcctcaggtgatgcagtacgtggtgctgggcgcgaccactattatcgtcgatatcatcgtgatgattggttacgcgacgctggcgcagcgaattgcggcgtggattaaagggcctaagcagatgaaggccctgaataaagtctttggctcgctgtttatgctggttggcgcgctgcttgcgtcagcgcgtcacgct

SEQ ID NO: 20028 - DNA, 753 bp, Enterobacter cloacae
atggctgacgattcacaagacacaacgcactttggctttcagactgttgccaaagcgcagaaagctgacatggtggcccacgtatttcattccgtggcggcgaagtacgatgtgatgaatgacctgatgtcgttcggcattcatcgcttgtggaagcgcttcaccattgactgtagcggcgtacgccgtggacaaacggtgctggatttagccggtggtacgggcgatttaaccgcgaaattctcccgtctggtgggcgaaaccggtcgcgttgttctcgccgatattaatgactccatgctgaaaatgggacgcgaaaagctgcgtaacatcggcgtggtggggaatgtggagtatgtgcaggcaaacgccgaagcgctgccattcccggacaatacctttgattgcatcacgatctctttcggtctgcgtaacgtgaccgataaagaaaaagcgctgcgctccatgttccgcgtgctgaagccgggtggacgtctgctggtgctcgagttctcaaaaccgatcattgagccgctgagcaaagcctacgacgcctattccttccacgtgctgccgcgtattggtgagctggtggctaacgacgctgaaagctaccgctatctggcggagtctatccgtatgcacccggatcaggacacattaaaagccatgatgcaggacgcggaatttgagaacgttgaatatttcaacctgacggcgggtgtcgtcgcgctgcatcgcggttacaaattc

SEQ ID NO: 20029 - DNA, 258 bp, Enterobacter cloacae
atgaaacccgatatccacccagcctatcgcaccgtggtattccacgacactagcgctaatgaatactttaaagtcggctcaaccattaggaccgaccgcgaaattgaactcgacggtgaaacgtatccgtacatcaccatcgaggtttcttcaaaatcgcacccgttttataccggtaagcagaaaacgttctccacggacggcagcgcagcgcgcttccgcaagcgttttggcggttttctcaatgcgaagcggggc

SEQ ID NO: 20030 - DNA, 138 bp, Enterobacter cloacae
atgcaggtacttaactcattacgcagtgcaaagcagcgtcacccggattgccagatagtcaaacgcaagggacgcttatacgtgatttgcaaatctaatccgcgctttaaggcggttcagggacgtaaaaaaagacgc

SEQ ID NO: 20031 - DNA, 1872 bp, Enterobacter cloacae
atgaaaggacaagaaacccgtggtttccagtcagaagtaaaacagcttctgcacctgatgatccattccctgtattccaacaaagaaattttcctgcgtgagctgatttccaacgcctcggacgcggcggacaagctgcgcttccgcgcgctgtctaacccggacctgtacgaaggcgacggcgagctgcgcgtgcgcgtctcgttcaataaagagaaccgcaccctgaccatcgccgataacggcatcgggatgaaccgcgacgaggtgatcgaccacctcggcaccatcgccaaatccggcaccaaagcgttcctcgagtccatgggctctgaccaggcgaaagacagccagctcattggccagttcggcgtcggtttctattcggcgtttatcgtggccgacaaagttaccgtgcgcacccgtgcggcaggcgacagcgccgagaacggcgtgctgtgggaatccaaaggggaaggcgagtacaccgttgatgacatcaccaaagcggatcgcgggaccgaaatcaccctgcacctgcgcgaaggggaagacgatttcctgaatgactggcgcgtgcgctccatcatcagcaaatactccgatcacatcgcgctgccggttgagattgaaaaacaggaagagaaagacggtgaaaccgtggtttcctgggagaaaatcaacaaggcgcaggcgctgtggacgcgcaacaagtctgagattaaagacgacgagtacaacgaattctacaagcacatcgcccacgactttaccgacccgctgacctggagccacaaccgcgtggaaggtaagcaggagtacaccagcctgctgtacattccggcacaggcaccgtgggacatgtggaaccgcgatcacaagcacggcctgaagctgtacgtgcagcgcgtgttcatcatggacgacgccgagcagttcatgccgaactacctgcgctttgtgcgcggtctgatagattccaacgatctgccgctgaacgtttcgcgtgaaattctgcaggacagcaccgtcacccgtaacctgcgcaacgccctgaccaaacgtgcgctgcagatgctggaaaaactggcgaaagacgatgctgaaaaatatcagaccttctggaaacagttcggcctggtgctgaaagaaggcccggcagaagacaccgcgaacgttgaaaccatcgccaaactgctgcgcttcgcctctacgcacaccgactcctccgcgcagaccgtgtcgctggaagagtacgtctcccgcatgaaagaagggcaggagaagatctactacatcaccgccgacagctacgcggcggcgaagagcagcccgcacctggagctgctgcgtaagaaaggcatcgaagtgctgctgctttctgaccgcatcgacgagtggatgatgaactacctgaccgagttcgacggtaaggcgttccagtccgtagccaaagccgacgaatccatcgacaagctggcggatgaagtggacgaaagcgcgaaagaagccgagaaggcgctggagccgttcgttgagcgcgtgaaaaccctgctgggcgagcgcgtgaaagaggtgcgcttcacgcaccgtctgaccgacactccggcgattgtcaccaccgatgccgacgaaatgagtactcagatggcgaagctgttcgctgcggcgggccaggcggtaccggaagtgaaatatatctttgagcttaatccggatcatcctctggtgaaacgcgcggcggatacccaggacgacgcccgctttgccgagtgggttgaactgctgctggatcagtccctgctggccgagcgcggcacgctggaagatcctaacctgttcattaaacgtgtgaatgcgctgctgctggcg

SEQ ID NO: 20032 - DNA, 549 bp, Enterobacter cloacae
atgagcttagaaaaacagaaaatgattgccggtgaacattaccgccccggcgatgagacgttacgggctgaccgactgcgggcccgccatctggtttaccgctataaccacaccgcgcctgatgaaaaaacagaacgacagaacattctggcggaacttctgggacaaagcgcaggagcttatattgagccgagcttccgctgcgactacggatataacatttatctgggcaaaaacttttatgcaaacttcgactgcgtgatgctggatgtctgccctgttcatattggcgataactgcatgctcgcgccgggtgttcatatttatacggctacccatcccctgaacgcggaagaacgaaacagcggcgtggagtttggaaaacctgtcaatattggcaataacgtctggattggtggccgggcggtcattaaccctggcgtcaccattggtgataatgtggtcgtggcctccggcgccgtcgtgacgaaagacttcccggctaacgtcgtcgttggcggcaacccggcaaaaatcatcaaaacgctg

SEQ ID NO: 20033 - DNA, 3278 bp, Enterobacter cloacae
cctgtttttgcattgctctttgcgatgctgtttttcttcgctacggcgccgctgacctgggcccgcgccgataacagcaacgatattccctcgcgcggcgatgttcagtcgcagctcgacacgctgaacaaacaaaaagatctctcccctcaggagaaactcgtccagcaggatctgacggaaacgctggaaacgctggataaaattgaacgcatcaaagcggaaaccgtccagcttcgccagaaggtggcgcaggcccctgaaaatatgcgtaaggccaccgaagcgctgaatgctctcagcgatgtggataacgacgacgagacgcgtaagacgctctcgacgctctccttacgtcagctggagtcccgcgtcgcacaactgctcgacgacctgcaaaccgcgcagtcggatcttgcaacgtataacagccagcttgtctctctgcagacccagcccgagcgcgtgcaaaacgcgatgtacgccgcgtctcagcagctgcagcagatccgcaaccgtctgaacggcacgacggtaggcgaaggtacgctgcgcccgacgcagcaaaccctgctgctggttcagcagaccttgctcaatgcgcagatcgaacagcagcgtaaaagcctggaagggaatacggtgctgcaggacacgcttcagaaacagcgtgattacgtcaccgcgaacattaatcgcctggaacaccagcttcagctgttgcaggaggcggtaaacagcaaacgcctgaccctgacggaaaaaaccgcccaggaggccgtatcgcctgacgaaaccgcccgcattcaggcgaatccgctggtgaaacaggagctcgaggccaaccaccagcttagccagcgcctgatactggcgacggaaaacggcaactcgctggttcagcaaaatatcaaagtgaagaactggctggatcgcgcgctgcaggctgagcgcaacatcaaagagcagattgcggtcctgaagggcagcctcctgctgtcgcgtattctctaccagcagcagcagaccctcccgtccgccgatgagctggaagacatgaccaaccgcattgcggatttacgtctggaacagtttgacgttaaccagcagcgcgatgcccttttccagagcgatgcctttgtcgccaaaattgaagaggggcattccagcgacgtgaacccggaagtgcacgacgcgctgctccaggtcgtcgatatgcgtcgcgagctgctggaccagctcaacaaacagctgggcaaccagctgatgatggccattaacctgcaaatcaaccagcagcagctggtgagcgtctcgaaaagtctgcaggagatcctgacccagcagattttctgggtaaacagcaacaagccgatggactgggactgggtcaaatccttcccggagacgctgaaaacgcagattaagagcatgaagatcaccgtaaactgggagaaagcctggcctgcggtcatgattgctttcctggccggtttaccgctgctgctgattgccggtctgatccgctggcgtctgggctggctgaaaaaataccaggcgaagctggcctccgaagtggggcaactgcgcaacgatagccagctccatacgccaaaagcgattctcatcgatctcatccgcgccctgccggtgtgtctgattattctggccgtgggcctgattctgctcaccatgcagctcaacgtcagcgatctgctgtgggcgttcagtaaaaagctggcgctgttctggctggtgtttggcgtgtgctggaaggtgctggaaaaagacggcgtggcggtgcgtcatttcaacatgccagcgcagctgaccacccactggcgtcgtcagattgtggcgcattagccctggcgctcctgccgctgcacttctggtcggttgtctctgagctttctccgctgcacctgatggatgacgtgctgggccagctggtcatcctgctgaacctgctgctgattgcgatcctgatgtggccgatgtgccgcgacagctggcgtgataaagagtcccacaatattcgcctggccaccgtaacggtgctggcgatcattgcgctggcgctgatggtgctgacggcaacgggctacttctatacccacgtgcgcctgtccgggcgctggattgaaacggtctatctggtgatcgtctggaacctgctctatcagaccgtgctgcgcggcctgagcgtggcggctcgccgtatcgcctatcgccgtgctatcgcgcgtcgtcagcatcaggtgaaagaaggggccgaaggcgcggagccgcaggaagagccgaccatcgcgctggagcaggttaaccagcagacgctgcgtatcaccatgctggtgatgatcgccctgtttgcggtgatgttctgggctatctggtccgatcttattaccgttttcgcctatctcgacagtattaccctctggcaatacaacggtaccgaagcgggcgctgcggtcatgaaaagcgttaccatgggcagcctgctgtttgcgctggtgtcgtcggtggtggcctgggcgctgattcgcaacctgccaggcctgcttgaagttctgctcctgtcacgtctgaatcttcgccagggggcgtcctacgccattaccacgatcctcaactacgtgatcattattgtcggggcgatgacggtctttggctcgcttggcgtctcgtgggataaactgcagtggctggcggcggccctctcggtcggtcttggttttggcctgcaggagatcttcggtaacttcgtgtccggcctgatcatcctgttcgaacgtccggtacgaatcggcgataccgtcaccatcggcacgttctcgggaacggtcagcaagatccgtattcgcgccaccaccatcaccgacttcgatcgcaaagaggtgatcatcccgaacaaagcgttcgtgaccgagcgcctgatcaactggtcgctctccgatacggtgacgcgcgtggtgatccgcctgggcgtagcctatggatcggatctggagaaggtgaaagaggtgctgctcaaggcggcgtcagaacatccgaaagtgatgcacgatccggctccggcggtcttcttcaccacctttgggccgagcacgctggatcacgagctgcgtttgtacgtgcgcgagctgcgcgaccgcagctatacggtggatgaacttaaccgctctatcgatcgtctgtgtcgtgaaaacgatattaatatcgccttcaaccagcttgaggttcacctgcgcaacgagaagggtgatgagcatacg

SEQ ID NO: 20034 - DNA, 642 bp, Enterobacter cloacae
atgcgtattattctgcttggcgctccgggcgcgggtaaaggaactcaggctcagttcatcatggagaaatacggtattccgcaaatctccaccggtgacatgctgcgcgccgctgtaaaatctggctccgagctgggtaaacaagcgaaagacatcatggacgcaggcaagctggtgaccgacgagctggttattgctctggtcaaagagcgcattgctcaggaagattgccgtaacggtttcctgctggacggcttcccgcgcaccattcctcaggctgacgccatgaaagaagcgggcatcaacgtggactacgttctggagttcgacgtgccggacgagctgatcgttgaccgtatcgttggccgtcgcgtacacgctgcttctggccgcgtttaccacatcaaattcaacccacctaaggttgaaggcaaagacgacgtgaccggcgaagagctgaccacccgtaaagacgatcaggaagagaccgtgcgtaaacgcctggtggaataccatcagatgaccgcgccgctgatcggctactacaccaaagaagcgcaggcgggtaacaccaaatacgccaaagttgacggcaccaaagccgtggctgacgtacgtgcagagctggaaaaaatcctcggc

SEQ ID NO: 20035 - DNA, 525 bp, Enterobacter cloacae
ttgaaaacagcactgcttcttgagaggctgcaaaatcagctcattgctctgcgggagcaggctacaccgctgatgggccacgccacgctgaaaccgcgctttgaccggcagctttttcgtacccgcagcaccgtcattcaggattatctggcagaaacgcagaccaacctcgacgagcttcgccatgcggttgagagtgaacagcaggaacaggtggcgtggcttgcggagcatctcacagagcagatcaccgctctgcatcgcgaaatcgccgcctggccgctgcgcgcctgggacagcgcctcgccggggctcggtaaatggcagcgcaagcggctggagaatcaggagtttgagcgccggctgtttgagatgaagcgcgagcgcgagacgcggctgaacaacagcgaaacgctggaagagcagcagctattgatgcgcgagatttgcgcgctggaaggacgcatcgtccgctgccgtcaggcgctggatgagattgagcgcgtcattgaacgtttgacccgt

SEQ ID NO: 20036 - DNA, 1302 bp, Enterobacter cloacae
atgaaatttcccggtaaacgcaaatccaaacactacttccccgtcgatgcccgcgatccgctcctgcagcaaatccagcctgaaaatgaaaccagcgcggcatgggtcgtcggtatcgatcagacgctggtggacattgaagcgaaagtggatgatgcgtttgtcgcccgttacggtctgagcgccggtcactcgctggtgattgaggacgacgttgccgaagcgctgtaccaggagctggtgcgcgaaaacctgattacccatcagttcgccggtggcaccatcggcaataccatgcataactactccgtgctggccgacgaccgctcggtgctgctcggcgtgatgtgcagcaatattgaaatcggtggctatgcctaccgctatctctgcaacacctccagccgtaccgatctgaactaccttcagggcgtcgacgggcctattggccgctgctttacgctgattagcgattccggcgagcgtacttttgccatcagcccgggtcatatgaacaagctgcgcgccgagagtattccggaagaggtgatcgcgggcgcctcggcgctggtgctgacctcctacctggtgcgctgtaagccgggcgagccgatgccggaagcgaccatgaaagcgattgagtacgcgaagaaatacaacgtgcctgtcgttctgacgctgggcacgaaatttgttatcgccgataacccggagtggtggcaggcgttcctgaaagagcacgtctcgattctggcgatgaacgaagaagaggccgaagcgttgaccggcgaaagcgatccgctgctggcgtctgacaaagcgctggactgggttgatctggtgctctgcaccgccggcccggttgggctgtacatggcgggcttcacggaagaagagagcaagcgcaaaacccagcacccgctgctgcccggtgcgattgccgagttcaaccagtacgagttcagccgcggcatgcgctacaaagattgcgtgaatccgctgcgtatctactctcatatcgcgccatacatgggcgggccggagaagatcatgaacaccaacggtgcgggcgacggcgcgctggccgcactgctgcacgacatcaccgcgaacgcctaccacaaaaccaacgtgccgaactccagcaagcacaagttcagctggctgacctattcctcgctggcgcaggtgtgtaaatatgccaaccgcgtgagctatcaggtgctgaaccagcactccccacgcttaacgcgcggtctgcctgaaagagaagacagcctcgaagaggcctactgggacaga

SEQ ID NO: 20037 - DNA, 3144 bp, Enterobacter cloacae
atgcctaatttctttatcgatcgccccatatttgcgtgggtgatcgccattatcatcatgctggccgggggacttgcgatcctgaagctgcctgtcgcgcaatatccaacgattgcgccaccggcggtgacaatttccgcaacctacccgggagctgatgcgaaaacggtgcaggacaccgttacccaggttatcgaacagaacatgaacggtatcgataacctgatgtacatgtcctcaaacagtgactccaccggtacggttcagatcaccctgaccttccagtcaggtacggatgctgacattgcgcaggttcaggtgcagaacaaactgcagttggcgatgcctttactgccgcaggaagtacaacagcagggtgtgagcgtcgagaaatcgtccagtagcttcctgatggttgtcggcgttatcaacaccaacggcaccatgacgcaggaggatatttccgactacgtgggcgccaacatgaaggacgccatcagccgtacttccggtgtgggtgacgtgcagctgttcggttcccagtacgcgatgcgtatctggatggatccgaacaagctgaacaacttccagctgaccccggttgacgtgatcagcgcgattaaagcgcagaacgcccaggtggcggccggtcagttaggcggtacaccgccggtgaaaggccagcagcttaacgcctcgatcatcgcgcagacccgtctgacctcagccgatgagttcagcaaaattctgctgaaagtgaatcaggacggttcgcaggttcgcctgcgcgacgtggcgaaagttgagctgggcggtgagaactacgacatcatcgcgaagtacaacggcaagccggcttccggtctgggtatcaaactggcgacaggcgctaacgccctggacaccgccacggcgatccgcgcagagctgaagagaatggaaccgttcttcccgtcaggtctgaaaatcgtttacccgtacgacaccacgccgttcgtcaaaatctcgattcatgaagtggttaagacgctgatcgaagccatcatcctggtattcctggtgatgtacctgttcctgcaaaacttccgcgcgacgcttatcccaacgattgccgtgccggttgttctgctcgggacctttgcgatcctgtcgatatttggctactcgataaacaccctgacgatgttcgggatggtgctcgccatcggcctgctggtggatgacgccatcgtcgtggtcgagaacgtcgagcgtgtgatggcagaggaaggtctgccgccgaaggaagctacccgtaaatccatgggtcagatccagggcgcgctggtcggtatcgcgatggtgctgtctgcggtatttatcccgatggccttcttcggaggctctaccggtgcgatttaccgtcagttctccattaccatcgtttccgcgatggccctgtcggtactggtggcgttgatcctgacgccagccctgtgtgccaccatgctgaagccgattcagaaaggcggtcacggcgagcataaaggcttcttcggctggtttaaccgcatgtttgacaagagcacgcaccactacaccgacagcgtgggcaacatcctgcgcagcaccggtcgttacctgctgctctatatcatcatcgtggtgggcatggcctacctgtttgttcgtctgccaagctccttcctgccggacgaagatcagggcgtgttcctgagtatggctcagcttccggcgggtgcgtcgcaagagcgtacccagaaagtgctggatgagatgaccgattactacctcaccaaagagaaagccaacgttgaatccgtgtttgcggttaacggctttggctttgcgggtcgcggtcagaacaccggtattgccttcgtctctctgaaggactggtctgaacgtccgggcaaagagaacaaggttgaagccatcaccggccgtgcaatgggcaccttctcgcagattaaagatgcgatggtattcgcctttaacctgccagcgattgttgaactgggtaccgcaaccggcttcgacttccagctgatcgaccagggcggtctgggtcacgaaaaactgacgcaggcgcgtaaccagctgtttggtgaagtcgctaaacaccctgacctgctggtcggcgtgcgtccaaacggcctggaagatacgccacagtacaaaatcgatatcgatcaggagaaagcccaggcgctgggcgtatccatcagtgatatcaataccacgctgggcgcagcctggggcggtagctacgttaacgacttcatcgaccgcggtcgtgtgaagaaagtgtacgtgatgtcagaggcgcagtaccgtatgctgccgaacgatattaacaactggtacgttcgcggcagcaatggtcagatggtaccgttctcggcgttctcaacctcacgctgggaatacggttcgccgcgtctggaacgctataacggtctgccatcaatggagatcctgggtcaggcagcgccgggccgaagcaccggggaagccatgaaccttatggaagaactggcaagcaagctgcctgcgggtatcggctacgactggaccggtatgtcctatcaggaacgtctgtccggtaaccaggctcctgccctgtacgccatttcactgatagtggtcttcctgtgtctggcggcactgtacgagagctggtcgattccgttctccgttatgctggtggttccactcggggttatcggtgcgctgctggcggcaacgttccgcggactgaccaacgacgtgtacttccaggtaggcctgctgacaaccattggcttgtcggcgaagaacgcgatacttatcgttgaattcgccaaagatctgatggagaaagaaggcaaaggccttattgaggcgacgcttgaggcggttcgtatgcgtctgcgcccaatcctgatgacgtcgctggcgtttatcctcggcgtactgccgctggttatcagctccggtgcgggttccggcgcgcagaatgcggtaggtacaggcgttatgggtgggatgatcaccgcgaccgtactggctatcttcttcgtaccggtgttcttcgtggtggttcgccgccgcttcagccgtaaaaatgaagatattgagcacagtcattcggtagaacctcac

SEQ ID NO: 20038 - DNA, 1926 bp, Enterobacter cloacae
atgagttatcaggtgttagcccgtaaatggcgaccacaaacctttgctgacgttgtcggtcaggaacatgtgctgacggccctggcgaacggcttgtcgctaggtcgcatccatcacgcctatcttttctccggcacccgcggcgtcggtaagacctctattgcccgtttgctggcaaaaggtctcaactgcgaaaccgggatcaccgccacgccgtgcggcgtatgtgataactgccgcgagatcgagcaggggcgttttgtcgatctgatcgagatcgacgccgcctcgcgcaccaaagtggaagatacccgcgatctgctcgataacgtgcagtacgccccggcgcgcggccgcttcaaggtctacctgatcgatgaagtgcacatgctgtcgcgccacagctttaacgccctgctgaaaacgctggaagagccgcccgcgcacgtgaagttcctgctggcgaccaccgatccgcaaaagctgcctgtcaccatcctgtcgcgctgcctgcagttccacctgaaggcgctggacgttgagcagatccgcgcgcagcttgagcacattcttgatgaagagaaaattgtccacgaaccgcgcgccctgcagctgctggcccgcgcggcggacggcagcctgcgtgatgcgctcagcctgaccgaccaggcgattgccagcggtgacggcaagctctccaccgaggcggtcagcaccatgctcggcacgctggatgacgatcaggcgctgtcgcttatcgaagcgatgatcgccgccaacggcgaacgcgtgatgtcgcaggtgaacgcggccgctgcccggggtatcgaatgggaagggctgctggttgagatgctcagcctgctgcaccgcgtggcgatgctgcagctttctccgtccgccatcggtgcggatatggccgctattgaacagcggatgcgtgagcttgcccgcaccgtgccgcctgccgatgtgcagctgtattaccagacgctgctgattggtcggaaagagctacctttcgcgccggatccacggatgggcgttgaaatgacgctgctgcgcgcgctggcgttccatccgcgcatgccattgccggagccggaagcgccgcggcagtctttcgcgccggtcgcccctacggcggtgatgtcgccgcagcaggtgccgccgcagccgacaccgccgccacagcagaacgttccgctgtcggatgccaccagttcggtgcttgccgcacgcagccagctgcagcgtgcgcagggagtaaccaaaccaaaaaagagtgaaccggcagcgccaggaagagcgcggccggtgaacaacgccgcgcttgaacgtctggcctcggtaacggagcgcgtacagtcgcgtcctgcaccgtccgcgctcgagcagaaagccccggtgaaagaagaggcttaccgctggaaggcaaccaccatcactgaaacggtgaaggaagaggtcgccacgccgaaagcgctgaaaaaggcgctggagcatgagaaaacgccggagctttccgcgaagcttgccgaagagtccattgcgcgcgacgcctgggccgccgaggtcagcaaactccagctgccgaagctggtcgagcaggtcgcgctgaatgcctggaaagagcaggacggcaatcaggtgcgtttgcacctgcgtccgggtcagcggcacctcaattcccctggcgcgcaaaaggcgctggcggaggcgctcaccgcattacagggcgcaccggttgaattgactatcattgaagatgataatccggcagtgaaaacgccgctcgagtggcgccaggccatttatgaagaaaagctcgcgcaggcgcgcgaggcgattattgcggataacaacattcagaccctgcgccggttcttcgacgccgatctggatgaagagagtattcgccccatt

SEQ ID NO: 20039 - DNA, 330 bp, Enterobacter cloacae
atgtttggtggaaaaggcggtctgggtggcctgatgaagcaggctcagcagatgcaggaaaaaatgcagaagatgcaggaagagatcgctcagctggaagtcacgggtgagtccggcgccggtctggtcaaagtgaccatcaacggtgcgcacaactgccgtcgcgtggaaatcgacccgagcctgctcgaagacgacaaagagatgctggaagatctggttgcagccgcgtttaacgatgccgctcgccgtatcgacgaaactcagaaagagaaaatggcctctgtttccagcggtatgcagctgccgcctggcttcaagatgccattc

SEQ ID NO: 20040 - DNA, 603 bp, Enterobacter cloacae
atgcaaaccagtccgctgctcacgcagttaatggaagcactgcgctgcctgccgggcgttggcccgaagtcggcgcagcgcatggcgtttacgctattgcagcgcgaccgcagcggcgggatgcgcctggcgcaggctttaacccgcgccatgtcagaaattggtcactgtgcggattgccgcacttttaccgagcaggaggtgtgtaacatctgtacgaacccgcgtcgtcaggaaaacggtcagatttgcgtggtggagagtccggcggacatctacgccatcgaacaaaccgggcagttttccggccgctacttcgtgctgatggggcatctttccccgctggacggtattggcccggatgatatcggtcttgaccgccttgaacagcgtcttgagtccgaaaccatcaaagaggtgatcctcgccaccaacccaacggtggaaggggaggcaaccgccaactacatcgccgaactgtgctcgcagtacggcgttgacgccagtcgcatcgcccacggcgtgccggtgggcggcgagctggaaatggtcgacggcaccacgctgtcgcactctctggccgggcgacacaagattattttc

SEQ ID NO: 20041 - DNA, 1326 bp, Enterobacter cloacae
atgagtcactacaaaccgtatccagcctacaaggattccggcgttgagtggattgggctggtgccggagcattggaaggttgcgcagatcaagcgtatttccgccttgaatcccaagaaatcgaccctaagcaaggaaaaggattctctttgcacatttctcccaatggagaagctgagaaccaatgctataacacttgatgaaactcgtcctattcatgaggtgtatgacggatatagctatttctgcgatgacgatattctgatcgccaaggtaacgccttgcttcgagaatggaaacatagcggtagccaatggtctggttaacggcattgggtttggctctacagaaatcaatgtccttcgggtaaatggaaagggacataaccgatttctttactaccgtctgcaagaagagcagttcagaacaattgccaaatctgagatgagaggcactggaggcttaaagcgagttccaacggagctgtttgagtcatttactttcgggcttcccgacactgacgaacaagtcaccattgccgccaccctcgaccgcgaaaccgcccgtattgatgcgcttgtcgagaagaaaacccgctttatcgagctactgaaggaaaagcgccaggcgctgattacccatgctgtcaccaagggactagaccgcaacgccaagatgaaggactccggcattgagtggattgggcaggtgccagaggagtggttaaataggaaggtttttcatgctttccaagccattgggagtggaacaacgccaccggcaaaggagcatgaatggtatcagggaggaaccattccgtggataacaacaagtgagcttagagaaaacaccgtcgttaaaacaaagaagtgtgttacctcagatgccatgcagaaattctcagccttgaaaatttttcccgctggttcattagctattgccatgtatggtgcaacaattggtcgcctagggtttcttggaatcccagcaacaaccaaccaagcttgctgtgtgctgtctggtgaacgcgatttgaatatccagtttttgtattactggttgatggcattcagagccgatatcgtggctttcttctctgagggcgggggccagccgaatatcaaccaagaggtgatagccagccttagggtgccatccccagcccctgatgaacaagccaccattgtcgccaccctcgaccgcgaaaccgcccgcattgatgcactgattagcaaggcggaacaaagtatcaccctgctcaaagaacgccgcgccgcctttatcaccgccgctgtcaccggccagattgatttgcgaggaaaacaa

SEQ ID NO: 20042 - DNA, 2025 bp, Enterobacter cloacae
atgaacgaatttacgggatcggcagcttcacaggctgactttatttggaagaacgcggaagacctgtggggggacttcaagcatacggactttggcaagatcattttgccgtttaccttgctgcgccgcctggagtgtgcgctggagccgactcgcgaggcggtgagagaagcgcatgacgctttcaaggatgccgatgttgagctggataccattctgcgctcaaccgctgaataccccttctacaacacctctgaatactcccttggcaccctgggtagcaccaagacgcgccgcaatctggaagactacatcgccctgttttcggataacgcccgcgctatcttcgaggagtttgagtttggcaatacggtgatccggctggagaaagcgggcttgctgtacaagatttgccagaactttgccaagatcgacctgcacccggacgtggtgccggatcgggtgatgagtaacatctacgaacacctgattcgccgctttggtgccgaggtaaatgaaggggccgaggacttcatgacgccgcgtgacatcgttcacctggcgaccgcattgctgcttgacccggatgatgccctgtttgaggccagccccggtttgattcgtactctgtatgacccgacctgtggtacgggtggcttcctcaccgatgccatgaaccatgtgggcgactacggtaaccgcgacaagatcccgccagtgctggtgccgcacgggcaggagttggagccggaaacccatgcggtttgtgtggccggtatgctgatccgccgtttggagtccgaccctggccgagatctgtcgaagaacattcgtcagggcagcacgctgtccaacgaccagtttgccggtgagcgtttccactactgcctgtccaatccgccttttggcaagaaatgggagaaggacaaaaccgccgtcgaagcggaacacaaaaaaggcgagctgggccggtttgggccgggcctgccgaaaattagcgatggctccatgctgtttttgatgcacctggcgagcaagctagaactgccgatcaacggcggtggccgcgccgctatcgtgctgtcgggttcgccactgtttaacggcggtgccgcgtctggcgaatcggaaatccgccgttggttgctggaagacgacctgattgaagccattgtggctctgccaacggatctgttcttccgcaccaatatcgccacctacctgtggattctgtccaacaagaagccgcaggagcgcaaaggcaaggtgcagttgatcaacgccaccgacctgtggactgcaatccgcaacgagggcaacaagcgccgtattgtcagcgatgagcagcgccgccagattctggacatctacgccgcaggcgaaaccggtgcgctttcccggatgctggactaccgtacctttggctaccgccgtatcaaggtcctgcgcccgctgcgcatgaccctggagctggataaggtgggcatggagcggctggaagccgaagctgcctgggaaaaactctctgacgcgcatcagacattctggcgcaaagccctcaagccgttgatcgggcaaacgcagccctatagctgggcagaaacctttgttaggaactcgatcaagtccgacgaagccaagcagctcaaggtcaaatccaacaagacattgatcaccgcgctgatcaacgcctttggtcacaaagacccgaaagccgagccagtcacggattccaacggcgagctggtgccagacacagatttaactgattacgagaacgtcccctatctggaggacatcgacgactactttgcccgcgaagtgcttcctcatgtgccggatgcctggctggatgagagctttaccgatgccagggatggtcaattgggccgcgttggctacgagatcaacttcaaccgcttcttctaccagtaccagccgccgcgcaagctgcatgatattgatgaagacctgaagcaggtagaagccgagattgccgcgctactggcggaggtggccagcgaa

SEQ ID NO: 20043 - DNA, 1368 bp, Enterobacter cloacae
ttatcaaaatgcctttgttgggatctatcaaaaagattctggcagcattctttttcaggtgaaagagatcgattcccattcagcgaaagaagcacttgaaaactgtactctcgatggtgcactttggaattaaacctggtgctgcagcgttcagtcatggataacatgtggttggggcgttatccaaccaagggtgtctttgtcgatcaggacaaaatgtatcgcgacaccaaagcgatttttgatgagctggatattgatatcgatccgcgcgcccgcgtgggaacattatccgtctcccagatgcagatgatcgaaatcgccaaagcgttctcctatgatgcgaaaatcgtcattatggacgaaccgacatcgtcattaacggaaaaagaggttaatcacctttttaccattattcgtaagctaaaagatcgcggctgcggcattgtgtatatctcccacaaaatggaagagatcttccagctgtgcgatgagattaccatcctgcgcgacggtcagtggattgccacgcagccgctggaagggctggacatggacaagatcatcgccatgatggtcggacgttccctgaaccagcgcttcccggacaaagaaaacaagccgggcgaagtgatcctggaagtgcgtaatctgacctcgttacgtcagccgtctattcgcgatgtctccttcgacctgcataagggcgaaatcctggggattgccggtctggtcggggcaaaacgtaccgacatcgtggaaaccctgttcggtatccgtgagaaagccgaaggcactattacgctgcacggtaagaaaattaacaaccacaacgccaacgaagccattaataatggttttgcgctggtgacggaagagcgtcgttcgactggtatttatgcctatctggatattaactttaactcgttaatttctaacattcgcaattacaaaaacaaagtcggactgctggataactcccgcatgaagagcgatacccaatgggttattgactccatgcgcgtgaaaacgccagggcaccgcacccaaattggttcgctgtcaggcggtaaccagcagaaagtcattatcggacgttggttattaacccagccagaaattctgatgctggatgaaccgacccgcggtattgacgtcggcgcgaagtttgaaatttatcagctgattgccgagctggcgaaaaagaataaagggatcattattatttcttccgaaatgccggaattgttagggatcacggatcgtattctggttatgagcaatggtctcgttgccggtattgttgacaccaaaacgacaacgcaaaacgaaattttgcgtcttgcgtctttgcacctttaagatcag

SEQ ID NO: 20044 - DNA, 498 bp, Enterobacter cloacae
atgcacgagaatcaacaaccacaaaccgaggcttttgagctgagtgaagcagaacgtgccgccattgagcacgagatgcaccactacgaagacccgcgtgcggcgtccattgaagcgctgaaaatcgtacagaaacagcgtggttgggtgccggatggggcgatctatgagatcgcgaaagtgctgggtattccggcaagtgacgtagagggcgtagccacgttctacagccagatcttccgtcagccggtaggccgccatgtgatccgctactgtgacagcgttgtctgccacatcaccggttatcagggcattcaggctgcgattgagaaaaagctcaatatcaagccgggccagaccacgttcgatggacgctttaccctgctgccaacctgctgcctgggtaactgcgacaaggggccgaccatgatgattgatgaggacactcacagccatctgacgccggaagcgattcctgacctgctggagcagtacaaa

SEQ ID NO: 20045 - DNA, 1335 bp, Enterobacter cloacae
atgaaaactgtaattcgtactgctgagacgcatccgctgacctggcgtctgcgcgatgacaaacagccggtatggctcgatgaataccagagcaaaaacggctatgccggcgcgcgtaaagcccttggcggcatggcgccggacgacatcgttaacgcggtgaaagactccggcctgaaagggcgcggcggtgcgggcttctccaccggtctgaagtggagcctgatgccgaaagacgaatccatgaacatccgttacctgctgtgtaacgccgatgaaatggagccgggcacctataaagaccgcctgctgatggaacaactgccgcacctgctggtggaaggcatgctgatctccgcgtttgcgctgaaagcctaccgtggctacatcttcctgcgcggtgagtacatcgaagcggcggaaaacctgcgtcgcgcgattgctgaagccaccgaagcgggcctgctaggtaaaaacattctgggtaccggctttgactttgaactgttcgtgcacaccggcgcaggacgttatatctgcggtgaagaaaccgcgctgattaactccctggaaggccgccgcgcgaacccgcgttccaagccaccgttcccggcaagctccggcgtatggggtaaaccgacctgcgtaaacaacgttgaaaccctgtgtaacgttccggctatcctcgccaacggcgtggagtggtatcagggcatctcctcaagcaaagatgctggtaccaagctgatgggcttctctggtcgcgttaaaaatcctggcgtctgggaactgccgttcggtaccaccgcacgtgaaattcttgaggactacgctggcggcatgcgcgatggcctgaaattcaaagcctggcagccgggtggggcagggacagacttcctgaccgaagcccaccttgatctgccaatggaattcgaaagcattggtaaagcaggcagccgtctgggtacggcgctggcgatggccgtcgaccacgagatcggcatggtctcgctggtgcgtaatctggaagagttcttcgcccgcgagtcctgcggctggtgtacaccgtgccgtgatggtctgccgtggagcgtgaagatcctgcgtgcaatcgaacgtggcgaaggccagccaggggatatcgagacgcttgagcagctgtgtcgattcttaggcccgggtaaaaccttctgtgcccacgcaccgggtgccgtcgaacctctgcagagcgcgatcaaatatttccgcgacgagttcgaagcaggtatcaagcagccgttcagtaatacccatgcgattaatgggattcagccgaacctgcttaaagcgcgctgg

SEQ ID NO: 20046 - DNA, 1839 bp, Enterobacter cloacae
atgaacatgcttgccttaaccattatttttccgctgattggcttcgtgctgctggcgttttctcgcggccgctggtctgagaatctgtctgcgaccgtgggcattggctccatcggtctggctgcgctggtgacggcgtatgcgggtatcgatttctttaacaacgggcgtcagcctttcagcgtgccgctgtggacctggatgtcggtcggtgatttcaacatcggcttcaacctggtgctggatggcctctcgctgaccatgctttccgtggtcaccggcgttggcttcctgatccacatgttcgcctcctggtatatgcgcggtgaagagggttactcccgcttcttcgcctacaccaacctgtttatcgccagcatggtggttctggtgctggccgataacctgctgctgatgtatctgggctgggaaggcgtaggtctgtgttcttacctgctgatcggtttctactacaccgatccgaagaatggcgcagcggccatgaaagcgttcgtcgtgacccgcgtgggtgacgtcttcctcgctttcgcgctgttcattctttacaacgaactgggcacgctgaacttccgcgaaatggtggaactggcgccggcgcacttcgctgcaggcaacaacatgctgtggtgggcaacgctgatgctgctgggtggtgccgtgggtaaatccgcgcagctgccgttgcagacatggctggccgacgcgatggcgggtccaacccctgtctccgcgctgatccacgccgcgaccatggtaaccgccggtgtctacctgattgcgcgtacccatggcctgttcctgatgaccccggaaattctgcatctggtgggtatcgtcggtgcggtcactctggtgctggcaggctttgccgcgctggtgcagaccgacatcaaacgcgttctcgcgtattccaccatgagccagatcggttacatgttcctggcgctgggcgttcaggcatgggacgcagccattttccacctgatgacgcacgcgttctttaaagcgctgttgttcctgtcatctggttccgtgatcctggcctgccaccacgagcagaacatcttcaagatgggcggactgcgtaagtccattccactggtttatgtctgcttcctggtaggcggcgcggcgctggcggcactgccgctgatcaccgcgggcttcttcagtaaggacgaaatccttgcgggtgccatggcgaatggtcatatcaatctgatggttgcgggtctggtcggtgcgttcatgacctccctgtataccttccgtatgattttcatcgtattccacggtaaagaacaaattcacgctcacgcagggaaggggattacccaccacctgccgctgattgtgctgctggtactgtccaccttcgttggcgcgatgattgtgccaccgctgcagggcgtactgccagacaccaccgagcttgagcacggtcgcgttctgacgcttgaaatcacctccggtgtggtcgctatcgcgggcatcctgatcgctgcatggctgtggctgggcaaacgtacgctggtgactgccgttgccaacagtgcgccgggccgcctgctgggcacctggtggtacaacgcgtggggcttcgactggctgtacgacatgatcttcgttaagccgttcctgggcattgcgtggctgctgaagcgcgacccgctgaacagcctgatgaatatcccggcgatcctttcccgctttgcaggtaaaggcctgctgtacagcgagaacggttacctgcgctggtatgtggcgtccatgagcatcggtgcggttgtcgtgctggcgctgctgatggtgttgcgt

SEQ ID NO: 20047 - DNA, 441 bp, Enterobacter cloacae
atgaagaatgcaacgttctaccttctggacaacgacacccatcaggatggtctcagcgccgtagaacagctggtgtgtgaaattgccgcagaacgttggcgcgcaggtaaacgcgttctgattgcctgtgaagatgaacagcaggcgattcgcctggatgaagcgctgtgggcgcgcccgccggagagttttgtgccgcataacctgtcgggcgaaggcccgcgcggcggtgcaccggttgaaattgcctggccgcaaaagcgcaacagcagcgcgcgcgatattctgattagcctgcggatagattttgcagattttgccaccgctttcacagaagtggtagactttgtcccttacgaagaatctttgaaacaactggcgcgcgaacgctataaagcgtaccgcctggctggttttaacctgaatacggcaacctggaaa

SEQ ID NO: 20048 - DNA, 852 bp, Enterobacter cloacae
atggtgctgatgattgtcagtggccgttcagggtcggggaaatccgttgctctgcgcgccctggaagacatgggtttttactgcgtcgataacctgccggtcgtgttgttacccgacctggcccgcacgctggcggagagacaaacctctgccgccgtcagtatcgacgttcgcaacatgcctgaatcgccagagatcttcgaacaggccatgagcaacctgcctgacgcgttctcgcctcagctgctgttccttgatgcagaccgcaatacgctgatccgccgctacagcgatacccgtcgcttgcacccgctatccagcaagaacctctctctggagagcgctatcgatgaagagagcgacctgctggaaccgctgcgttcccgtgccgacctgattgtcgacacctctgagatgtccgttcacgagctggcggaaatgctgcgtacccggctgttgggtaaacgcgagcgcgaactgacgatggtgttcgaatccttcggctttaagcacggtattccaatcgatgcggattacgttttcgacgtgcgcttcctgccgaacccgcactgggatccgaagctgcgtccaatgaccggtctggataagccggtggcggcgttcctcgaccggcacacagaagtacacaattttatctaccagacgcgaagctaccttgagctatggttacctatgctggagacaaacaatcgtagctacctgacggtggcgattggctgtaccggcggtaaacatcgttcggtttatatcgccgaacagctggccgactatttccgctcgcgcgggaagaacgttcagtcccgtcatcgcacgctggaaaaacgtaaaaca

SEQ ID NO: 20049 - DNA, 2853 bp, Enterobacter cloacae
atggaaaagacatataacccacgcgatatcgaacagccgctttacgagcactgggaacagcagggctatttcaagcctaacggcgacgaaagcaaagagtccttctgcatcatgatcccaccgccgaacgtcaccggcagtttgcatatgggtcatgctttccagcagaccatcatggacaccatgatccgctaccagcgcatgcagggtaaaaacaccctgtggcaggcggggactgaccacgcgggtatcgcgacccagatggtagttgagcgtaaaattgccgctgaagaaggaaaaacccgccacgactacggtcgcgacgcgttcatcgacaaaatctggcagtggaaggcggaatccggcggcacaattacccgtcagatgcgccgtctcggcaactccgtggactgggagcgcgagcgcttcaccatggacgaaggcctgtccaacgccgttaaagaagttttcgtccgcctgtacaaagaagacctgatttaccgcggcaaacgcctggtaaactgggatccgaaactgcgcaccgccatctctgacctggaagtggaaaaccgcgagtctaaaggctccatgtggcacatccgctatccgctggccgatggcgcaaaaaccgccgacggtaaagattacctggtggtcgcaacgacccgtccggaaacccttctgggcgataccggcgtagccgttaacccggaagatccgcgttataaagatctgatcggcaaattcgtggtgctgccgctggtaaaccgccgtattccgattgtgggcgacgaacacgccgacatggaaaaaggcaccggctgcgtaaaaatcacccctgcacacgacttcaacgactatgaagtcggccgtcgtcacgccctgccgatgatcaacattctgaccttcgacggtgatatccgcgaaagcgcagaagtgtacgacaccaaaggcaacgaatccgacgtttactccagcgacatcccggctgagttccagaagctggagcgttttgccgcgcgtaaagccatcgtggctgccgttgacgcgctcggcctgctggaagagatcaaacctcacgatctgaccgtgccgtacggcgaccgtggcggcgtggttatcgagccaatgctgaccgaccagtggtacgtgcgtgccgacgtgctggcgaaaccggctgtggaagcggttgagaacggcagcattcagttcgtgccgaagcagtacgaaaacatgtacttctcctggatgcgcgacattcaggactggtgtatctcccgtcagctgtggtggggtcaccgtattccggcgtggtacgacaacgaaggcaacgtttacgttggccgtagcgaagacgaagtgcgtcaggaaaacaacctgagcgcggacgttgcgctgcgtcaggacgaagacgttctggacacctggttctcctccgcgctgtggaccttctccaccctcggctggccagaaaacaccgacgcactgcgtcagttccacccaaccagcgtgatggtgtccggcttcgacattatcttcttctggattgcccgcatgatcatgatgaccatgcacttcatcaaagacgaagacggcaagccgcaggttccgttccataccgtctacatgaccggtctgatccgcgacgatgaaggccagaagatgtccaagtccaaggggaacgtgattgacccgctggatatggttgacggtatctctctggaagatctgctggaaaaacgtaccggcaacatgatgcagccacagctggctgagaaaatccgcaagcgcaccgagaagcagttcccgaacgggatcgagtctcacggtaccgacgccctgcgcttcaccctggcggcactggcctcaaccggtcgtgacatcaactgggacatgaagcgtctggaaggttaccgtaacttctgtaacaagctgtggaacgccagccgcttcgtgctgatgaacaccgaagatcaggattgcggcttcaacggcggcgagatgacgctgtctctggcagaccgctggatcctggcggaattcaaccagacggtgaaagcgttccgcgaggcgctggacagctaccgcttcgatatcgcggcgggcattctgtatgaattcacctggaaccagttctgcgactggtatctggagctggcgaagccggtgatgaacggcggcactgaggcggaactgcgcggcacgcgcaacacgctgattaccgttctggaaggcctgctgcgcctggcgcatccggtcattccattcatcaccgaaaccatctggcagcgcgtgaaggtaattgcgggcatcaacgccgataccatcatgctgcagccgttcccggaattcgatgcggccaaggttgatgaagcggcgtccgcggataccgagtggctgaaacaggcgatcgttgcggtacgtaacatccgcgctgaaatgaacatcgcccctggcaaaccgctggagctgctgctgcgtggctgcagcgaagcggtcgttcgtcgcgtcaccgagaacaacactttcctgaagaccatggcgcgtctggaaagcatcaccgtgctgcctgcggatgacaaaggtccggtttccgtgaccaaaatcatcgacggtgccgagctgctgatcccgatggcaggcctgatcgacaaagacgccgagctggctcgtctggcgaaagaagtggcaaaagtcgacgtggaaattggcaaaatcgaaagcaagctggcgaacgaaggctttgtggcccgcgcgccggaagcggtcatcgcgaaagagcgcgagcgtctggttgctttcgccgatgcgaagaccaaactgatcgagcagcaggcggttatcgcagccctg

SEQ ID NO: 20050 - DNA, 723 bp, Enterobacter cloacae
atgaggcgtaaatttgccgcaggcgcaggagtgaaacgttttctcttgcgcatcgtacttgtgctggcggtattctggggaggcgggctggctttattcagcattatgccggttccgttctctgccgttatggttgagcgccagcttagcgcgtggttcagcggcgatttcggctacgttgcccactctgactgggtgagcatggacgagatctccccgttcatggggctggcggtcatcgcggctgaggaccagaaattcccggagcactgggggttcgacgtggcggccattgagaaggcgctagcccataacgaacgccatgaaaaccgcgtgcgcggtgcgtcaaccttgtcgcagcagacggccaaaaatctgtttctgtgggatggtcgaagctgggtgcgaaaagggctggaagcgggattgaccctgggaatggaaacggtctggagcaaaaaacgcattctgaccgtctatctgaacgtcgctgagtttggcgacggcatatttggcgtggaagctgccgcacagcggtatttcaataagccagccagccgtctgagcatgtcagaagcggcgctactggccgctgtgttaccgaaccctatccgctttaaggccagcgccccatcagggtacgtgcgaagccgtcaggcgtggattatgcgccagatgaatcaactgggtggagaggggtttatgcagcgtaataatcttatg

SEQ ID NO: 20051 - DNA, 1509 bp, Enterobacter cloacae
atggagttcagtgtaaaaagcggtagcccggagaaacagcggagtgcctgcatcgttgtgggcgtctttgaaccacgccgactctccccgatcgccgagcaactcgataaaatcagtgacggctatattagcgccctgctgcgccgtggcgaactggaaggcaaacctgggcagacgctgttactgcaccatgttccgaacgtactgtcagaacgtattctgctgattggctgcggcaaagaacgcgagctggatgaacgtcagtataagcaggtgattcagaaaacaatcaatacgctgaacgataccggctcaatggaagccgtctgcttcctgacggaactgcacgttaaaggacgtaacacctactggaaagtgcgtcaggcggttgaaacggcaaaagagagcctgtacagcttcgatcagctgaagaccaataaaagcgagccgcgtcgtccactgcgtaaaatggtctttaacgtgccaacccgtcgcgagctgaccagcggcgaacgcgcgatccagcacggtctggcgatcgcagccggcattaaagcggccaaagatctcggcaacatgccgcctaacatctgtaacgcggcgtacctggcctctcaggcgcgtcagctggccgacgcctacagcaaaaacgtcattacccgcgtcatcggcgaacagcagatgaaagagctggggatgcactcttacctggcggtcggtaacggctcgcagaacgaatccctgatgtccgtcatcgagtacaaaggcaatccgtccgaagacgcgcgcccgattgtgctcgtcggtaaaggcctgaccttcgactccggcggtatctccatcaagcctgccgaaggcatggatgagatgaagtatgacatgtgcggtgcggcggcggtttacggcgtgatgcgaatggtcgcggaactacagttgcctatcaacgtgatcggcgtactggcgggctgcgaaaacatgcctggcgggcgcgcctatcgtccgggtgacgttctgaccaccatgtccggccagaccgttgaagtgctgaacaccgacgccgaaggccgtctggtactctgtgacgtgctgacctacgttgagcgcttcgagccggaagcagtgattgacgtcgctaccctcaccggagcctgtgtgattgcgctgggccaccatatcaccggcctgatgtcgaaccacaatccgctggcgcacgagcttattggtgcttcagagcaggccggggaccgcgcatggcgtctgccgctgggtgacgagtatcaggatcagctggagtctaactttgcggatatggcgaacattggcggacgtcctggcggggcgatcaccgcgggctgcttcctggcacgcttcacccgcaagtacaactgggcgcacctggatatcgcgggcaccgcatggcgctccggtaaagctaaaggcgcaaccggtcgtccagtggcgctgctgtcgcagttcctgctcaatcgtgcgggttttaacggcgacgag

SEQ ID NO: 20052 - DNA, 875 bp, Enterobacter cloacae
gtgaaacatctgacagaaatggtggaacaacataaacgagggaattcgaacgggatctatgccgtctgctccgcacatccgctggtacttgaagctgcaattcgttatgcgcattcgcatcagacgccgctgctgatcgaggcgacctccaaccaggtggatcaatttggcggctataccggcatgacgcctgcggattttcacgcgtttgtctgccggctggccgagtcgctcggttttccgacatcacagctgatactcggcggcgatcatctgggccctaaccgctggcaaaatctccctgcggaacaggcgatggcaaatgccgacgatctgatcaaaagctatgtttccgccggattcaaaaagatccacctcgactgcagcatgtcctgcgaggacgacccggttcccctgaccgacgcgatcgtcgccggacgcgccgcacgcctggcgaagattgccgaagtgacctgtcgcgagcagtttggtgaatccgatctggtctacgttatcggcacggaagtgccggttcccggtggcgcgcacgagacgctcaccgaacttgccgtcaccacgccggacgcggcccgcgccacgcttgaagcgcaccgccacgcgttcgaaaaggaaggcttaagcgacatctggccgcgcattattggcctggtggtccagcctggcgtggagttcgaccacgcgcacgtctgcgactatcagccgcagaaagccgtggccctgagcaaaatggttgaagcctacgatacgctggtgtttgaagcgcactccaccgactaccagacgccgcaggcgtgcgccagctggttaacgatcactttgccattctgaaagttggccccgccctgaccttcgcc

SEQ ID NO: 20053 - DNA, 768 bp, Enterobacter cloacae
atgaataacgatatcttcccgaataaatttaaagcggccctcgcggcacaccagattcagattggctgctggtccgcgctggcaaaccctatcagcaccgaagtgctgggcttggccggttttgactggctggtgctggacggcgaacatgcgccgaacgatatcagcacctttattccgcagctgatggcgctgaaaggcagccccagcgccccggtagtgcgcgtgcccaccaacgagccggtgattatcaagcgcctgctggatatcggtttctacaacttcctgatcccgtttgtggagacggaagaacaagcggccctggccgtagcctcaacgcgctatccgccagaagggatccgcggcgtttccgtttcgcatcgcgccaatatgtttggcaccgtgccggactatttcgcgcagtctaatagcaacatcaccattctggttcagatcgagagccagcagggcgttgataacgtcgacgcgattgccgccacaaacggcgtggacgggatcttcgtcggcccaagcgatctggctgccgcctttggtcatctgggtaacgccggccaccctgacgtgcagcgcgcgatccagcacatctttgcccgcgctaaagctcacggcaaaccgtgcggcattctggcgccggttgaggctgatgcccgtcgctatctggagtggggagccacgtttgtagccgtcggcagcgacctcggcgtattccgctcggccacgcagaaattagccgacgcttttaaaaaa

SEQ ID NO: 20054 - DNA, 2292 bp, Enterobacter cloacae
atgaaagtaacaatcgatacgggcgtcgcgccctacagcgacgcatgggccgggtttcgcggtgaagaatggaaaaacgccgtcaacgtccgcgattttattcagcataactacaccccttatgaaggcgatgaagctttcctcgcgcaggcgacgccagcaacgacggcgctgtggcagaaggtaatggtcggcattcgccaggagaatgccacccacgccccggtggattttgacaccaacattgccaccaccattacggcccacgggccgggctatatcgaccaggatctggagacgatcgtcggcctgcaaaccgataagccgctcaagcgcgcgctgcatccgtatggcgggatcaacatgatccgcagctcgttcgaagcctatggccgggagatggatccgcagttcgaatacctgtttaccgacctgcgcaaaacccacaaccagggcgtgtttgacgtctactccccggagatgatgcgctgccgtaaatccggcgtgctgaccggtctgccggacggctacgggcgcggacgcatcatcggtgactatcgccgcgtggcgctgtacgggatcgcttatctggtgcgcgagcgcgaacttcagtttgccgatctgcagggcaggctggagcgcggtgaagatctggaggcgacgatccgcctgcgtgaagagctggcggagcacaggcgcgcgctgctgcagatccagcagatggcggcgaactacggctttgatatctcacgtccggcgatgaacgcccaggaagcggtgcagtgggtctattttgcctaccttgcagcggtgaaatcccagaacggcggggcgatgtcgctggggcgcacggcctcgttcctcgatatctacattgaacgcgacatgcaggcggggcgcctgaatgaagtccaggcgcaggagctgatcgaccacttcatcatgaagatccgcatggtgcgcttcctgcgcacgccggagttcgacacgctcttctccggcgatccgatctgggcgacggaagtgatcggcggcatggggctggacgggcgcacgctggtgaccaaaaatagcttccgctatcttcataccctgcacaccatggggcctgcgccggagccgaacctgacgatcctctggtctgaacaactgccgatcgcgttcaagaaatacgccgctcaggtgtcgatcgtcacctcttcgctgcagtatgagaacgacgatttgatgcgtgcggacttcaacagcgacgactacgccattgcctgctgcgtcagcccgatggtgatcggcaagcagatgcagttctttggcgcgcgcgccaacctcgccaaaacgctgctgtacgcgatcaacggcggggtggacgagaagctgaagatccaggtcggcccgaaaaccgagccgctgctggacgacgagctggattacgacaccgtgatggcgagcctcgatcactttatggactggctggcggtgcagtacatcagcgccctgaacctcattcactacatgcatgataagtacagctacgaagcctcgctgatggcgctgcatgaccgcgacgtctatcgcaccatggcctgcggaattgccgggctgtcggtggcggcggattccctgtcggccattaaatacgccacggtgaagccggtgcgcgaccataccggactggcggtcgattttgtgattgaaggggactatccgcagtacggcaacaacgacgaccgcgtggacagcatcgcctgcgacctggtggagcgctttatgaagaaaattcaggcgttgccaacctaccgcaacgcggtgccaacccagtcgatcctgaccatcacctccaacgtggtatacggccagaagaccgggaacacgccggacggacgccgcggcggcacgcagtttgcgccaggtgcgaatccgatgcacggccgcgacagaaaaggggcggtagcctcgctaacgtcggtggccaagctgccgttcacctatgcgaaagacgggatctcctacaccttctccatcgtgccgcaggcgctgggcaaggacgagctggtgcgcaaaaccaacctggtggggctgctggatgggtacttccatcacgaagcgtccattgagggcgggcagcatctgaacgtcaacgtcatgaaccgggaaatgctcctcgatgccattgcgcatcccgagaattacccgaacctgacgatccgcgtttcaggctatgcggtgcgttttaatgcgctgacgcgcgagcagcagcaggatgtgatttcgaggacgtttacgcaatcaatc

SEQ ID NO: 20055 - DNA, 381 bp, Enterobacter cloacae
atggttatctcaccgctcgccctgcgccgttttgccgttgccgtgattacgctgatcgtcctcagcgccatgctgctggcatggagtgcgctttcgcatcaggaatcgacgctggccatccgcccggtaaaccagggcgccagcgtgcctgacggtttttctgtctggcatcatctggatgcgaacgggatccgctttaagagcattaccccgcaggacgatgttttactgatcaagtttgattcccgtgcgcaaagtgccgccgcgaaagtggttctcgatcgtacgctgccgcacgggtatatcattgcccagcaggaagatgacagccagcctgcagcctggctgtcattgattcgcgatacgtcgcatcggtttgga

SEQ ID NO: 20056 - DNA, 1329 bp, Enterobacter cloacae
atgagcaacacagaaagcattatcgttggccagacaaaaacgtcctcctggcgtaagtctgataccacctggacgcttggcctgtttggtaccgccattggcgcaggcgtgctgttcttccccattcgcgcaggttttggtggattgatccctatcctgctgatgctggttctcgcgttcccgattgcgttttactgccaccgcgcgctggcgcgtttgtgcctctccggcagcaacgtctcgggcaacatcaccgaaacggtggaagagcactttggaaaaaccggcggggtggtgatcaccttcctctacttcttcgctatttgcccgctgctgtggatttacggcgtcaccattaccaacacctttatgaccttctgggaaaaccagctccagctacctgcgctgaaccgcggcgtggtggcgctgttcctgctgctgctgatggcctttgttatctggtttggtaaagacctgatggtgaaggtcatgagcttcctggtgttcccgtttatcgccagcctggtgctgatttccctgtcgctgatcccttactggaactcggcggtgattgaccaggtcaacctgagcgatatcgccttcaccggtcatgacggcattctggtcacggtgtggctgggtatctccatcatggtcttctccttcaacttctcgcctatcgtctcctcgtttgtggtctccaagcgcgaagagtacgagccggagttcggtaaagaattcaccgagcagaaatgttccaaaatcatcggtcgcgccagcctgctgatggtggccgtggtgatgttcttcgcctttagctgcctgtttacgctctctccgcagaacatggcggacgctaaggcgcagaacattccggtgctctcttacctggcgaaccactttgcgtcaatgtcaggaaccaaatcgacgttcgcgacggtactggaatacggtgcctccatcatcgcgctggtcgctatcttcaaatccttcttcggtcattacctgggcacgctggaagggctgaacggcctgatcctcaagttcggctacaagggcgataagaagaaagtctccgttggcaagctgaacaccatcagcatggtgttcatcatgggctccacctgggttgtggcctacgccaacccgaacattctggaccttattgaagccatgggcgcaccaatcatcgcctctctgctgtgcctgctgccgatgtatgccatccgcaaagcaccggcgctggcgaagtacaaagggcgtaccgagaacattttcgttaccgcggtcgggctgctgaccattctgaatatcgtttacaaactgttc

SEQ ID NO: 20057 - DNA, 984 bp, Enterobacter cloacae
atgggacaactcgtagacggcgtatggcaggatgtctggtatgacaccaaatccaccggaggtcgcttcaagcgctcagtttcggccttccgtaactggctgaccgccgacggcgcgcccggcccaagcggcgaaggcggcttcgcggctgagaaagaccgttatcatctttatgtttcgcttgcctgcccgtgggcacaccgcacgctgattgtgcgcaagcttaaaggtctcgaatccttaattccggtttcggtcgtgaacccgctgatgctggaaaacggctggacgtttgacagtgatttccccgcggcgaccggcgacgatctttaccaccacgatttcctttaccagctctatctgcgcgccgatcctcactacaccgggcgcgttaccgtgccggtgctgtgggacaagaaaaaccagacgattgtcagcaatgagtctgcggaaatcatccgcatgttcaataccgcctttgacgcgcacggcgcccgtgccggagattactatccggctgagctgcgtgagaaaattgacgagctgaacagctggatttacgacaacgtcaacaacggtgtctacaaggccggtttcgccaccagccaggaagcgtatgacgaagcggtcggaaaggtgtttgaatcacttgagcgtctggagcagatcctgggccagcatcgctacctgacgggcgatcgcctgacggaagcggacattcgcctgtggaccacgctggttcgcttcgatccggtctatgtcacccactttaagtgcgacaagcaccgcatcagcgactacctgaacctgcatggttttctgcgcgacatctaccagatgccgggtattgccgacacggtcgacttcgaccatattcgcacccactatttccgcagccacaagaccatcaacccgacgggtattatctccatcggcccgtggcagaacctggaagaaccgcacgggcgcgacgtgcgttttgga

SEQ ID NO: 20058 - DNA, 1176 bp, Enterobacter cloacae
atgcaatacatcaaaatccattcgctggataatgtggccgtcgcgctgacggatctcgctgaaggcgacgtggtgaccgttgataaccagagcgtcaccctgcgtcaggcgatcgttcgtggacataagtttgccctgatccccattgcgaaaggggagaacgtggtgaagtacggtttgcccatcggccatgcgctggcggatattgcgccgggtgaatacattcactcacacaatatccgcaccaatctgagcgatctggacgagtacagctatcaacctgatttacccgcagaagaacgtcaggcggcggatcgtgaggtgcagatttaccgtcgcgccagcggcgacgtggggatccgcaacgagctgtggatcctcccgaccgtcggctgcgtcaacggaattgcgcgtcagatccagacacgttttctgaaagagaccaacgatgccgaaggcactgacggcgtgcatctgttcagccacacctacggctgctcgcagctcggcgacgaccacatcaatacccgcaccatgctgcaaaacatggtgcgccacccgaatgcgggcgcggtgctggtgattggcctcggctgcgagaacaaccaggtggacgccttccgcgacacgctgggcgagttcgatcctgagcgcgtgcattttatggtgtgccagcatcaggacgacgaagtggaagcgggcgtggaacagcttcacctgctttatgaggtgatgcgccacgacaggcgcgagccgggcaagctgagcgagctgaagtttgggctggagtgcggcgggtcagatggcctgtccgggatcaccgctaaccctatgctgggccgcttctcggattacgtgattgccaacggcggcacgacggtgttgaccgaagtgccggaaatgttcggcgcggagcgtattctgatgagccactgccgcgacgaagagacctttgagaagaccgtcaccatggtgaacgacttcaaacagtacttcatcgcccacaatcagccgatttacgagaatccatcgccgggcaacaaagcgggtgggatcaccacgctggaagagaaatccctcggctgcactcagaaagcgggcgcgatccaggtggttgacgtgtgcgctacggcgagcgcctgaaaacccacggtctgaatctgctgagcgcgccgg

SEQ ID NO: 20059 - DNA, 461 bp, Enterobacter cloacae
atggacgggtgtagggattggtgccgcagtgggtgtggtactgggtgtccttctgacgcgtcgttgatatggaagatcctcgtcacgcacaagggcctgctaacaacgtcctcggcatcggccagcgtattttaacgacgctggtcgggattgccgaaacgcgcgtccggctggcagtggtcgagctggaagaggagaaagcgaacctcttccagatgctgctgatgctcgggctgaccatgctcttcgccgcatttggtctgatgagcctgatggtgttaatcatctgggccatcgatccgcagtatcgtcttaacgcgatgattgccaccaccgtcgttctgctggtcgccgcgttgataggcggtatctggacgctgcgtaaagcgcgcaagtccactttcctgcgccatacgcgtcaggagctggcgaacgatcgcgctctgctggaggatgacaag

SEQ ID NO: 20060 - DNA, 303 bp, Enterobacter cloacae
atgtcaaaagatacgacgtctgaacatctgcgcgctgaactgaaatccctggccgatacccttgaagaggtgctgaactcctctgctgacaagtcaaaagaagaggtcagcaagctgcgcagcaaggcggagcaagcgctgaaagagagccgctatcgcctgggtgaaaccggtgatgcgctggcgaaacagacccgcgaagcggctgcccgcgcggacgaatatgtgcgtgataatccatggacgggtgtagggattggtgccgcagtgggtgtggtactgggtgtccttctgacgcgtcgt

SEQ ID NO: 20061 - DNA, 385 bp, Enterobacter cloacae
atggaaggtttcgataatgaaattccgcatgactctggctctggcccttttttctttaagcacagcatctttggcaggggggaggggggaggagaaagaacaggatattcagcgtgagatcggttatgccgaaaagcataacaatcagcaccgtgttgatggtcttaaaaaagcgctgagcgaagtgaaagcgaactgttcagacagcaagcttcgtgccgaccacaagaagaaaatcgctgaacagaaggacgagatagccgagcgccgtcgcgacctgcaggaagcgaaagagaaaggagatgcggaaaaaattgccaagcgcgagaagaagttgaaagaagcgcaggatgacctgaaagcgctggaagctcgcgattattga

SEQ ID NO: 20062 - DNA, 645 bp, Enterobacter cloacae
atgatggtttctgcctgcgcaaatgcttccggcggtattgcgctgggggccacgcgcgttatttatcccgcagaggcgaagcaaacgtcgctggcgatcaccaacagcaacaaacaggaacgctatttaattaacgcgtggatcgaaaatgcgagcgggcaaaaagaaaaaacctttgccgtcactccgcccctgtttgtcagcgagccgaacagtgaaaacacgctgcgtattatttacgccgggccagcgctgccagccgatcgtgaatcgctcttttacatgaacgtgaaggcgatcccgtcggtgaacaaagcgaaaacggaaaacaataacgtgctgcagctggcgatcctctcacgtatcaagctgtttgtgcgcccgaacaacctggcgatgcagccggaagaggcgctttcccagctgcggtttgagcgcgcgggcagccatctcaaggtcagcaacgcttctccgtattacatcaccctcgtcaatctgaagatgggcgggcagacgctggaaaacctgatggttgcgccgaaaagctcggcacagcaggtgctgccagccggtgccagcggcacgctttcctggcagagcgtgaatgactacggtgccatcactccggcgcgtagcgttaacctg

SEQ ID NO: 20063 - DNA, 2506 bp, Enterobacter cloacae
tctggcgcgcaggctggctggagcgaaagttatttcaacccggccttcttgtccgacgacaccgccagcgtgggcggatttgtcgcgttttgaacaaggacaccagcaggcacccggcgtttatcgcgtggatatctggcgtaacgatgagtttatcggtacccaggacgtgcgttttgagcaggccgagaacacgccgccggtggcgggcggtttgtcggcctgcattacgcgcgcgatgctcgatcgctttggcgtcaacgtcgcggcgtttcccgagctggctaaggtacagggcgacacctgcgttccgttgaccacggccatacccggcagcgaaacggtattcaactttgcctctcagcgtctggacgtcagcctgccgaaggtggcgttgcaaaacagcgcccggggctacattccgcctgaacagtgggatgaaggcattcccgccgcgctggtgaactacagcttcaccggtaaccggggaagcgaagacgacagctattatctgaacctgcagagcgggttgaactatggcgcctggcgtttacgtaacaacggcgcatggcggtacacgcagaataacgggcagcggcacagcgagtggcagaatattggcacctgggcgcagcgcaccgtcatcccgcttaaaagcgaactggtgctgggcgacagcaataccgggaatgacgtcttcgacagcatgggttttcgcggtgggcggctcttctcgtctgacagcatgtacccggacagcctgcagggctacgcgccgaccgtgcgcgggattgcccgtacgccagcaaaagtggtggttcgccagaacggctacgttatctatcaaagctatgtgcagccgggcgcatttgcgattaccgatcttaacccgacctcctcaagcggtgacctggaagtcacggtcgaagagaaagacggtacccagcagcgctataccgtgccgtactccaccgtcccgcttctgcagcgtgaagggcgctggaagtatgatctcgttgccggggattaccgcagcggtaacagcgatcaggatacgccgttcttcactcagggcaccctgattaccggtcttgccaacggttacacgctctacggcggtacgcagctggcgtcacgctataccgcggtggccgtcggggccgggaaaaacctgggcgactggggcgcggtctcgctcgatatcacccacgcccgcagccagctcgcggacgacagcaagcatgaaggccagtctctgcgcttcctctacgcgaaatcccttaacggcttcggcaccaacttccagctgctgggctaccgctactccacaaaagggttttacaccctcgacgatgtcgcctggcgctcaatggagggctatcagtatgccgatagccagaacgataacgatgtgccggacgtgcagagctatcacaacctgacgtggaataaaaaaggccgtttccagctcaacgtttctcagtctctcggggactacggctcggtctatatctccggcagcgagcagacctactggggaacagacgagacgaacctctggtaccagttgggctacgcgggcggcgtgaaggggatcaactactccgtctcgtggtcgtggaacaaatccgtggggatagacggtaccgatcggatcgcgtcgtttaacgtctccgtgccgttcagcctctttacccgccagggctatcgccgggacagcgcgattgaccgcgcctacgctacggcatccgccagtcgaaacagtgatggcgacacaagctggcaaaccggcgtcagcggaacgctgctggaggaccgcaacctgaactacagcgtgactcagggacacgccagcaccaacggctcaagcggaagcgccagcgccaactggcaggcgacctacggcacgctgggcgtgggctacaactattcccgcgatcagcacgatctcaactggcagctctccggtggggtggtcggccacgccgacggcgtgaccttcagccagccgctgggcgacaccaacgtgctgatcaaagcgccgggggcatcgggcgtcagtattgaaaaccagaccggcgtgaaaaccgactggcgaggctacgcggtgatgccgtatgccaccgtctatcgttacaaccgcgtggcgctggataccaacaccatgagcaacaacaccgatatcgaaaacaacgtgagcagcgtggtaccgaccaaaggcgcgctggtacgcgccagctttgatacccgcattggcgtgcgcgccctgctgacggtgatgcgcggcaaccagccggtgccgttcggtgcggtggtacgcgaaaccaaaagcggcgtgaccagcatggtgggggatgacgggcaaatttacctgagcgggctgccgctggaaggcgaactgctgatccagtggggcgacggggcgcagtcccagtgtcgcgcgccttacagcttacctgaaaagagcctgcaacaggcgatcacactgaaggggattcgctgtgaa

SEQ ID NO: 20064 - DNA, 1005 bp, Enterobacter cloacae
gtgcccttgtctgaaatcggagaacaactcatgagcgaaacggccacctggcagccgagcgcatccatccctaatctgttaaaacgcgctgcaattatggcggagatccgccgtttctttgccgaccgcggagtcctggaggtggaaacgccgtgcatgagtcaggcaacggtaacggatattcatctggtgccgtttgaaacccgttttgttggccccggccactctcagggcatgaatttgtatctgatgaccagcccggaataccacatgaaacgcctgctggcggcgggatgtggtccggtgtatcagctatgccgcagcttccgtaatgaagagatggggcgtcaccacaacccggaattcaccatgctggagtggtaccgcccgcattatgatatgtaccgcctgatgaatgaggtggacgatctgctgcaacaggtgctggactgctcggaagccgaaacgctctcctatcagcaggctttccagcgccatctggaaatcgatccgctatcggcggacaaaacccagctgcgcgaagtggcggcaaaactggatctcagcaacgtggcggataccgaagaggatcgcgacacgctgctgcagctgctgttcaccttcggcgtagaaccacagattggcaaggatcgtccgacctttgtctatcacttcccggcaagccaggcgtcgctggcgcagatcagtaccgaagatcatcgtgtcgcagagcgttttgaggtctattacaaaggtattgagctggcgaacggcttccacgaactgaccgacgcccgcgagcaggcgcagcgtttcgagcaggataaccgcaagcgcgccgcgcgcggtctgccgcagcagcctattgatgtgaatttgcttgaagcattaaaagcgggcctgccggattgctccggcgtggcgctgggtgttgaccgtctggtgatgctggccctgggcgcagagcagcttggcgatgtgattgcgtttaccgtagatcgcgcc

SEQ ID NO: 20065 - DNA, 597 bp, Enterobacter cloacae
atgttcaaaattcttttgattgaccgttgtcacttcacccgcacagggtttgaagcatggctcaatcattccggtttgttcccgggacactacgttgtgaccgggttaaataatctgttccttgccagggagcacattctgcaatggaaacccacgctggttatcgccgatctttacggcttcaggcaggatattcatcattttcagcagctctcgtcgttgctgagtgccagtgaacgattaccgtttattttgctgcaatcgggagaggaccgcggcatgaccgactggctcggacagttcccggtgtggtcgtcgctgttgaaaaacgccagtctcgaagaagtggcaacgacgatcaacgacgcattaatctcacgcgccagcgctgacaggccaacggcggcggcccccttgctgacccgacaggaagagaaagtgctgacattgtggatggacggtgcgagcaatcaaaaaattgccgctcacctgagtatcaacggaaaaacggtgtatacctataaacgcaatatccgcatgaaattgcatatggatacgcgtttttctccgttcttatccctccaggaatcagaaagc

SEQ ID NO: 20066 - DNA, 351 bp, Enterobacter cloacae
atgcgcgtaaaagtctgtgcagggattgtaggggcagcattgctgctggcgggttgtagctccagcaatgagctgtcggcagcgggccagggcgttcgctttgtggaagataagcctggcagtgaatgccagctgttaggctcggcaaccggtgagcaaagtaactggatgtcaggtcagcatggcgaggaaggtggctcgatgcgcggtgcggcgaatgccctgcgtaaccaggctgcggcaatgggcggtaacgtgatttacggcgtgagcagcccaacgcagagtatgctgtccagcttcgtaccgaccgccagccagatgaacggccaggtctacaagtgcccgaac

SEQ ID NO: 20067 - DNA, 1641 bp, Enterobacter cloacae
atggcagctaaagacgtaaaattcggtaacgacgctcgtgtaaaaatgctccgcggcgtaaacgtactggcagatgcagttaaagtgactctgggcccgaaaggccgcaacgtagtgctggataaatccttcggcgcgccaaccatcaccaaagatggtgtttctgtagcacgtgaaattgagctggaagacaagttcgaaaacatgggcgcgcagatggtgaaagaagttgcctctaaagcaaacgacgctgctggtgacggtaccaccaccgcgaccgtactggcgcaggcaatcatcaccgaaggtctgaaagccgttgctgcgggcatgaacccaatggatctgaaacgtggtatcgacaaagctgtcgcctccgctgttgaagagctgaaagcactgtccgtaccatgctctgactctaaagccattgctcaggttggtactatctccgctaactccgacgaaaccgtaggtaaattgatcgctgaagcgatggacaaagtcggtaaagaaggtgtgatcaccgttgaagacggtaccggtctggaagacgaactggacgtggttgaaggtatgcagttcgaccgcggttacctgtccccatacttcatcaacaagccagaaacgggtgctgttgagctggaaagcccgttcatcctgctggctgacaagaaaatctccaacatccgcgaaatgctgccagtactggaagccgttgcgaaagcaggcaagcctctggttatcatcgctgaagatgttgaaggcgaagcgctggcgaccctggtggttaacaccatgcgcggcatcgtgaaagtggctgctgttaaagcacctggcttcggcgatcgccgtaaagcgatgctgcaggatatcgcaaccctgaccggcggtaccgtgatctctgaagagatcggtatggagctggaaaaagcgaccctggaagacctgggccaggcgaaacgcgttgtgatcaacaaagacaccaccaccatcatcgacggtgtgggtgaagaagccgctattcagggccgcgtgggtcagatccgtaagcagatcgaagaagcgacttccgattacgaccgtgaaaaactgcaggagcgcgtagcgaaactggctggcggcgttgcggtaatcaaagtcggtgcagctaccgaagttgaaatgaaagagaaaaaagcacgcgttgacgatgccctgcatgcgacccgtgctgcggtagaagaaggcgtggttgctggtggtggtgttgcgctggtgcgtgttgccgctaaactggcaggcctgactgcacagaacgaagatcagaacgtgggtatcaaagttgcgctgcgcgcaatggaagcccctctgcgtcagatcgtttctaacgccggtgaagagccatctgtggttgcgaacaacgtgaaagcgggcgaaggtaactacggttacaacgcagcaactgaagaatacggcaacatgatcgacttcggtatcctggatccaacgaaagtgacccgttctgctctgcagtacgcggcatctgtcgctggcctgatgatcaccaccgagtgcatggtaaccgacctgcctaaaggcgatgcacctgacttaggtgttgctggcatgggcggcatgggcggtatgggcggcatgatg

SEQ ID NO: 20068 - DNA, 1398 bp, Enterobacter cloacae
atgccacattcctacgattacgacgcaatagttattggttccggccccggcggcgaaggtgctgctatgggtctggtgaaacagggagccagagtagcggtcatcgagcgctaccataatgtcggcggcggttgcacccactggggcaccatcccttcgaaagccctccgccacgccgttagccgcattatcgaatttaaccagaaccctctttacagcgaccactcccgacttcttcgttcatcctttgctgacatcctgaatcatgcggataccgttattaaccagcagacacgcatgcgtcagggcttttatgagcgtaaccactgtgaaattttgcagggcaatgcgcattttgtggatgaacacaccctggcactcgaatgccacgacggttcggttgaaaccatcacggctgaaaaatttgttatcgcctgcggctcacgcccttaccatccggccgacgtggacttctcgcacccgcgcgtttacgacagcgactcgattctgagcctgcaccatgagcctcgccacgtcattatctatggcgcaggggtcattggttgcgaatatgcgtcgatcttccgcggaatggacgtcaaagttgacctgatcaacacccgtgaccgcctcctggcattcctcgatcaggagatgtcggactccctctcctaccacttctggaacagcggcgtggtgattcgccacaacgaagagtacgagaagattgagggctgtgacgacggggtgatcatgcacctgaagtccggtaagaagctgaaagcagactgcctgctgtacgccaacggtcgtaccggcaacaccgattcactgcagctggaaaatatcgggcttgaaaccgacagccgcggtcagctgaaggtcaacagcatgtatcagaccgccctgccgcacgtttacgcggtcggcgacgtgattggctacccaagcctggcctcagccgcttacgaccagggacgcattgccgcacaggcgctggtaaaaggcgaagcgacggcgcacctgatcgaagatattccgacgggcatctataccatcccggaaatcagttctgtcggcaaaaccgaacagcagctgacgtcaatgaaggtgccttacgaggtgggacgcgcccagtttaaacatctggcgcgggcgcaaatcgtggggatgagcgtgggaacgctgaagatactgttccatcgcgagaccaaagagatcctcggcattcactgctttggtgaacgcgcggcggaaatcattcatatcggccaggcgataatggagcagaaaggcggtggtaacaccattgagtacttcgttaacaccacctttaactacccgaccatggcggaagcctatcgggtagctgcgctgaacggcttaaaccgcctgttt

SEQ ID NO: 20069 - DNA, 1374 bp, Enterobacter cloacae
atggcactttggggtgggcgttttacacaggcagcggatcagcggttcaaacagttcaacgactctttgcgcttcgactaccgcctggccgaacaggatattgtcggctctgtggcctggtccaaagcgctggtgacggtgggcgtactgaccgcagacgaacaattacggctggaagaggcgctgaacaatctgctggaagaggtacgtcttaatccgcagcagatcctcgaaagcgatgctgaagatattcacagctgggtggaaggcaagcttatcgacaaagtcggccagctgggtaaaaagctgcataccggccgcagccgtaacgaccaggtcgccaccgatctgaagctgtggtgtaaagataccgttggcgaactgctggcggctaaccgtcagttgcagagcgcgctggtggagaccgcgcagaacaaccaggacgcggtgatgccgggttatacccacctgcagcgcgcgcagccggtgaccttcgcacactggtgtctggcctacgtcgagatgctggcgcgtgacgaaagccgtcttcaggataccctgaaacgtctggacgtcagcccgctgggcagcggcgcgctggccggtacggcgtatgaaatcgaccgtgagcagctggcaggctggctgggctttgcctcagccacccgtaacagcctggacagcgtgtccgaccgcgaccacgtgctggagctgctatccaatgcgtctatcggaatggtgcacctttcgcgctttgccgaagacctgatcttctttaactctggcgaagcgggcttcgtcgagctgtctgaccgcgtgacctcaggctcatccctgatgccgcagaagaaaaacccggacgcgcttgagctgatccgcggcaaatgtggccgcgtgcagggcgcgctgaccggtatgatgatgaccctgaaacggctgccgctggcgtataacaaagacatgcaggaagacaaagaagggctgttcgacgcgctcgacacctggctggactgtctgcctatgggcgcgctggtgctggacggcattcaggtgaaacgtccgcgctgccaggaagcggctcagcagggctatgcgaactctaccgaactggcggattatctggtggcgaaaggcgtaccggtccgcgaagcgcaccacattgtggggtgaagcggtggtggaagccattcgtcagggtaaaccgctggaagatctggcgctggccgacctgcagaagttcagcgcggttatcggggatgatgtgtatccgagccttgcgctgcagtcttgcctggataaacgtgccgcgaaaaggcgcgtgtcgcctaagcaggtggcgcaggccataccggatgcgaaaaaccggtttggttt

SEQ ID NO: 20070 - DNA, 660 bp, Enterobacter cloacae
atggaactgtatctggataccgccaacgtggcggaagttgaacgtctggcccgcatcttccctattgcgggcgttaccaccaacccgagcatcattgccgccagccgtgaatccatctgggacgtgctcccgcgcctgcaaaaagccactggaccggaaggcacgctgtttgctcaaaccatgagccgcgatgcagaaggcatggtagcggaggcaaaacgtttgagtaacgccgtccccggcatcgtggtgaaaatcccggtgacggctcaggggctcatcgcgattaaggcattgaaaaaagagggtataaccacgctggggaccgccgtttatagcgcggcacaaggtttgcttgccgcgctggcaggcgcgaaatatgtcgcgccgtatgtgaaccgcgttgacgctcagggcggtgatggcattcgcatggtccaggagctgcagtccctgctggaactgcacgcgccggaaagcaaagtgctggccgccagcttcaaaacgccgcggcaggcgctggactgcctgctggcgggatgcgaggcaatcacgcttcccttagacgtagcgcaacaaatgctcggcacgccagcggtagagtcagccatagagaagttcgagcaggactggaaaaacgcgtttggtaacctcaacctc

SEQ ID NO: 20071 - DNA, 2144 bp, Enterobacter cloacae
tcggtcggcaaatgcccgttccaccagggcggcgtcgatcacagcgcgggggcaggtacaggcagccgcgactggtggccaaaacaactccgcatcgatcttcttaatcaacattccaatcgttcgaacccgctgggtgaagacttcgactaccgcaaagaattcagcaaacttgattactccgcccttaaaggcgaccttaaagcccttttaaccgactctcaaccgtggtggcctgccgactggggcagctatgcgggcctgtttatccgtatggcctggcacggcgcgggtacctatcgctccgttgacggacgcggcggtgccggacgcggtcaacagcgctttgcgccgctgaactcctggccggataacgtgagcctggataaggcgcgccgtctgctgtggcccatcaagcaaaaatacggacaaaaaatttcctgggccgacctgtttatcctcgcgggtaacgtggcgctggagaactccggcttccgtacgtttggttttggtgccgggcgtgaagacgtctgggaaccagacctggacgtgaactggggtgatgaaaaagcctggctgacccaccgtgacccggaagcgctggccaagcgtcctctggccgccaccgaaatgggcctgatctacgttaacccggaagggccaaacgccagcggtgaacctctgtctgctgcggcggcaattcgcgcgaccttcggcaacatggggatgaacgacgaagagaccgttgcgctgatcgcgggcggccacaccctcggcaaaacccacggcgcgggtgaagccacgcacgtcggcaccgacccggaagcctcgccgattgaagcgcagggcctgggctgggccagcacgcacggcacgggcgttggcgcagatgccattacctccggtctggaagtcatctggtcgcaaaccccgacccagtggagcaactacttcttcgagaacctattcaaatacgaatgggtgcagacccgcagcccggcgggagcgattcagtttgaagccgtggatgcgccggaaatcatgcctgacccgttcgacccgtcaaaaaaacgcaaacctaccatgctggtcaccgacctgacgctgcgttttgacccggaattcgagaaaatttcccgccgtttcctgaacgatccgcaggccttcaacgaagccttcgcgcgcgcgtggtacaagctgacccaccgcgatatggggccaaaatcgcgttaccttggcccggaagtgccgaaagaagatctgatctggcaggacccgctgccgcaggcggtgttcaatccgtcgaaagaagacattgaaagcctgaaggcggaaatcgctgcctctggcctctccgtgagcgaactgatttccgttgcctgggcgtcagcttcaaccttccgcggcggcgacaagcgcggtgcgccaacggcgcgcgtctggcgctggcccctcagcgcgactgggatgtgaacgccgcagcggttcgcgcgttgccggctctggaagctatccagcgcaccaccaacaaagcctctctggcggatatcatcgtgctggcgggcgtggtgggcgttgagcaggcggcgaaagcggcaggcgtttacgtcaacgttccgttcaccccgggccgcgtcgatgcgcgtcaggatcagacggatatcgagatgtttaacctgctcgaaccgattgccgacggcttccgcaactaccgtgcgcaggtggatgtgtccacgacagagtcactgctgattgataaagcccagcaactgacgctgaccgcgcctgagctgacggtgctgatcggtggcctgcgcgtgctgggtgccaactttgatggcagcaagaatggcgtgttcaccgaccgcgagggcgtgctgagcaacgatttcttcgtgaacctgctggacatgaacacccagtggaaggcgaccgacgaatctaatgaactgtttgccggaagcgatcgcgccagcggtgaagtgaaatacaccgccacccgcgccgatctggtcttcggttctaacgccgttctgcgcgcgctggcagaggtttatgccagtgatgatgcgcatgagaagtttgttcgcgacttcgttgccgcatgggcgaaggtgatggatctggaccggtttgacctgctg

SEQ ID NO: 20072 - DNA, 861 bp, Enterobacter cloacae
atgtgcgccagcactcataacttaaatttatgcaacggagatcacacaaacggggggtggggcgtaggggttgggaggatggaaagaggatgtcaaataaggagactgagtcacgttgaaccaccttatgtatccacgagcacatcaccaaaaaggatggcagatatgaatatcaagactggcgcacgcgttttcgcattgtccgcccttgcagcaatgatggtttccgccccagcgctcgccaaaattgaagaaggcaagctggttatctggattaacggcgacaagggctataacggcctggccgaagtgggcaaaaaattcgaaaaagataccggcatcaaagttaccgtagaacacccggacaaactggaagagaagttcccgcaggttgcagcaaccggcgacggcccggacattatcttctgggcgcatgaccgtttcgggggttacgcgcagtctggcctgctggcagaagtgacgccagataaagccttccaggacaagctgttcccgttcacctgggatgccgttcgctataacggcaagctgatcgcttaccctatcgcggttgaagccctgtctctgatttacaacaaagacctggtaccaaacccaccgaaaacctgggaagagataccgaaactggataaagagctgaaggcgaaaggtaaatccgccctgatgttcaacctgcaagagccgtacttcacctggccgctcattgctgccgatggcggttacgcgttcaagtttgaaaatggcaaatatgacgtgaaagacgtgggcgtggacaacgctggcgcgaaagcgggtctgaccttcctggtggatctgatcaagaacaaacacatgaacgcg

SEQ ID NO: 20073 - DNA, 1458 bp, Enterobacter cloacae
atggcaaaacaaaaaaaacgtggcttcttttcctggctgggcttcggtgaaaaagagcaagaaacagaacagaaaaccgaagagcaacaagccgttgaagagcagtcgcagcctgaaacgcctgtagaaaccgccgcggtagtcgaagcggaagaaacggcgcacagcaaagaagagattgaatcctttgcacaagaggtggttgaggtcactgaacaggttcaggagagcgagaagccagaaccgattatcgttgaggacattaccgaagcgccacaggccgttatcgaacatgaagagctgccgctgccggaagaggtgaaagccgaagaggtttctgccgaagagtggcaggcggaagcggaaaccgttgaaattgttgaggcggtggaagaagaagccgcactcgagccagagcttaccgacgaagagctggaagcccaggcgctggcggcagaagccgcggaagaagcggtcatcgtcgtgccggtagaagagcaggccgaagaagagagcgtccaggagcaggaaaaaccgaccaaagaaggtttcttcgcgcgcctgaagcgcagcctgctcaaaaccaaagaaaacttaggttccggatttatcagtctgttccgcggcaagaagatcgacgacgatctctttgaagagctggaagaacagctgctgattgcggacgtcggcgtggaaaccacccgtaagatcatcgccaatctgaccgaaggggcgagccgcaaacagctgcgcgacgccgaagcgctgtacggtctgctgaaagacgagatgggcgaaattctcgcaaaagttgacgaaccgcttaatattgaaggcaaaacgccatttgttattctgatggttggcgtgaacggcgtgggcaaaaccaccaccatcggcaagctggcgcgtcagttcgagcagcagggcaaatcggtgatgctggcggcgggcgataccttccgcgcggcagcggttgagcagctgcaggtctggggccagcgcaacaacattccggtgattgcccagcataccggcgcggattccgcgtccgtgatcttcgatgccatccaggcggcgaaggcgcgcaacgtggacgtgctgattgccgataccgcagggcgtttgcagaacaaatcgcacctgatggaagagttgaagaaaatcgtccgcgtcatgaagaagctggacgaagacgcgccgcatgaaattatgctgaccattgatgccagcaccggacagaacgccatcagccaggcgaagctgttcactgaagcggtaggactgaccgggatcgcgctgaccaagctggacggcaccgcgaaaggcggggtgatcttctccgtggccgatcagttcggcattcctatccgctacatcggtgtgggcgagcgtattgaggatttgcgtccgtttaaagcggacgactttattgaggcattatttgcccgagaggac

SEQ ID NO: 20074 - DNA, 1305 bp, Enterobacter cloacae
atgattactctgcgcaaacaagtccctctggcaatcgccgttgcggcaggcatcctgtctgcccaggcaggcgccgtggactttaaaggttatgctcgttccggcattggctggaccgggagtggcggtgaacaacaatgtttccaggcaacgggtgctcaaagtaaataccgtcttggtaacgaatgtgaaacctatgcggaattgaaactgggtcaggaagtgtggaaagaaggcgacaagagcttctatttcgacactaacgtagcgtattccgtttctcagcagaacgactgggaatccaccagcccggccttccgtgaagctaacgtgcagggtaaaaacctgattgaatggctgccaggctccaccatctgggccggtaagcgtttctatcagcgtcatgacgttcacatgatcgacttctactactgggacatctcaggtcctggtgccggtattgaaaacatcgatctgggctttggtaaactctctctggcagccacccgctcttctgaatcaggcggttctgcaaccttcgccgatcgtgatgcgaacggcgaccgtatttatgacaacgttgtaccaaatgacgtcttcgacgtgcgtttagcggggctggaaactaacccgggcggtacgctggaactgggcgttgactatggtcacaccaacattcctgacgactactacctgcagccaggcgcttctaaagatggctggttgttcactgctgaacatacccagagcatgatgaagggcttcaacaagttcgtactgcagtacggtacagactccatgacctctaacggtaaaggtattccacagggcggcagcgttgataacgacggctccatgtggcgtgtgctggaccacggtgcaattaccctggcagaccgttgggacctgatgtacgtcggtatgtaccagaacatcgatcgtgacaacaacaacggtaccgagtggtggactgtgggtgttcgtccgatgttcaaatggacgccaatcatgagcaccctgcttgaagtgggctacgacaacgtcaaatctcagagaactgacgagaaaaacagccagtacaaaatcaccctggcacagcaatggcaggcaggcgacagcatctggtctcgtccggctatccgtgtcttcgcaacctacgcgaagtgggatgagaaatggggttacgcaaacaacagcgacacgggttacacctctggtgtggcttacagtgacacctctgcgaaaaccttcagccgtggcgacaacgatgaatggaccttcggcgcccagatggaaatctggtgg

SEQ ID NO: 20075 - DNA, 1107 bp, Enterobacter cloacae
atggcgagcgtacagctgcgtaatgtaacgaaagcctggggtgacgttgtggtgtcgaaagacatcaatctggacatcaacgaaggcgaattcgtggtgtttgttggcccatcaggctgtggtaaatctactctgctgcgtatgattgccggtcttgaaacgattaccagcggcgacctgctgattggtgatacccgaatgaacgacatcccgcctgccgaacgtggcgtcggtatggtgttccagtcttatgcactctatccacacctttccgttgccgaaaatatgtcctttggcctgaagctggccggcgcgaagaaagaagtcattaaccagcgcgtgacgcaggtggcggaagtgttacagctggcccacctgctggagcgtaaaccaaaagcgctttccggtggtcagcgtcagcgtgtggcgattggccgtaccctggtggccgaaccgcgcgtgttcctgctcgatgaacctctctctaacctggatgccgccctgcgcgtccagatgcgtattgaaatctcccgtctgcacaagcgtcttggccgcacgatgatttacgtcactcacgatcaggtggaagcgatgaccctcgccgacaaaatcgtggtgctggatgccggccgcgtggcgcaggtgggtaaaccgctggagctgtatcactacccggcagaccgctttgttgcgggctttattggctcgccaaagatgaacttcctgcccgtcaaagtgaccgcgacagccattgaacaggtacaggtggagctgccaaaccgccagcaggtctggctgccggtcgacagcgccaacgtacaggtcggggcaaacatgtccctcggtattcgtcctgagcacctgctgccgagccacatcgctgatgtgaccctggaaggtgacgttcaggtcgtcgaacagcttggtcacgaaacacagattcatatccagatccccgccatccgtcagaacctggtctaccgccagaacgacgtggtgttggtagaagagggtgccacattcgctatcggcttgccgccagagcgttgccatctgttccgtgaggatggcaccgcatgtcgtcggttgcacaaagagccaggcgtt

SEQ ID NO: 20076 - DNA, 1284 bp, Enterobacter cloacae
atgaaaacctcactcttcaaaagtctttatttccaggtcctgacagccatcgccatcggtattctgctgggtcactattaccctgagctgggcgcgcaaatgaaaccgcttggcgacgcgttcgttaagctcattaaaatggtcatcgctccggtgatcttctgtaccgtcgtgacgggcatcgctggcatggaaagcatgaaggcggtcggtcgtaccggtgcagtggcgcttctctattttgaagtggtcagtacccttgcgctgattatcggtctgatcatcgtcaacgtggtgcagccgggcgcggggatgaacgtagacccgtcaacgctggatgccaaagcggtcgcggtgtatgccgagcaggcgaaggatcagggcgtggtggcattcctgctggacgtaatcccgggcagcgtcattggcgcgttcgccagcggaaacatcctgcaggttctgctgtttgccgtgatgtttggttttgccctgcaccgtctgggcagcaaaggccagcttatctttaatgtgattgaaagcttctcccaggtaattttcggcatcatcaatatgatcatgcgcctggcgccgattggtgctttcggcgcgatggcctttaccatcggtaagtatggcgtcggtacgctggtgcagctgggtcaactgattatctgcttctatatcacctgtatccttttcgtggtcgtggtgttgggctccatcgcccgcgcgacgggtttcaacatcttcaaatttatccgttacatccgcgaagaactgctgattgttctggggacctcctcttcagaatcggcgctgccgcgtatgctcgacaagatggaaaagctggggtgccgtaaatcggtggtcgggctggtgatcccgacgggctactccttcaacctggacggcacctcgatatacctgacgatggcggccgtgtttatcgctcaggcgaccaacagccatatggatattttccatcagattaccctgctggtggtgctcctgctctcttctaaaggcgctgcaggggtgacgggcagcggatttatcgtgctggctgccaccatttccgctgtgggtcacctgccggtggcgggtctggcgctgattctgggtattgaccgctttatgtctgaggcgcgtgcgttaaccaacctggtgggtaacggcgtggcgacggtagtggtggcgaaatgggtgaaagagctggatcacaaaaagctcgacgatactctgaataaccgttcaactgacagcaaaaatcctggcttaacctct

SEQ ID NO: 20077 - DNA, 2004 bp, Enterobacter cloacae
ttgcgtgtcagccgttccttaacaatcaaacagatggcgatggtttctgccgtcaccatgctgtttgtactgctcttctgcgtaattttgctgtttcattccgtacagcagaatcgctataacacggcttcgcagttagaaagtatcgcccgctcggtgcgcggcccgctctctgcctctatcctgaaaggggatattcccgaagcggaaaccattttaaaacgcattcagcctgccggcgtcgtgagccgcgccgacgtcgtcttgcccaaccagtttcaggcgctgcggatgagctttatcccggagcgtcccgtcccgatgatggtgatgcgcctgtttgaactgccggtgcagatttcgctgcccgtttattcgctcgaacgccctgccaatccgcagccgctggcctacctggtattacaggcggattcctaccgcatgtataaattcgtcatgagctgggtggttacgttagtgaccacttgcttacttatgacgcttattctcagcgtggcgctcacctggtgcattaaccggctgattgttcatccgctgcgccgtatcgcccgcgagctgaatacgcttgcgccgcaggatcagatgggacatcagcttgagctcccgcgtctgcatcatgacgatgagataggcatgctggtgcgcagctacaacctcaaccagcagcgcatccagcgccagcaggatgagttaaacagcagcgccacgcgcttcccggtgtcggagcttcctaataaagccttcctgatggcgatgctggagcagaccgttgcccgtcagcaaactacggcgctgatggttatcgcctgtgaaaccctgcaggacacggctggcgtgctcaaggagagccagcgcgaaatgctgctgctgactctggtcgaaaaagtgaagtctgtcctggccccgcgcatggtgctgacccaggtcagcggttacgacctggtggtgattgccaacggcgtaaaagaaccctggcatgcgatcactttaggtcagcaagtactcactgtcattaatgagcggttgcccattcagggtatccagcttcgtccaagcgccagtatcggtattgcgatgtactatggcgatttaacggcagagcagctttatcatcgcgcgttctcggcggcattcaccgcccggcgcaaaggcaaaaatcagatccagttcttcgcgccggaagagatggaaaaggcgcagcagcgcctgacggaagagagcgacatcctgaccgcgctggataaccgccagtttgccctctggctacagccgcaggtgaatttgctgacgggagaagtgaaaagcgccgaggcactgctgcgcgtgcagcagccggatggctcatgggagctgccggaagggctgattgagcgcattgagtcctgcggcctgatggttaccgtcggctactgggtgctggaagagtcctgccgtcagcttgccgcctggcaggagcgcggcgtgacgctgccgctgtcggtcaatttgtctgccctgcagcttatgcacccgaccatggtttcagaaatgctggagctgatccatcgttaccgaatcaagcctgatacgttaactcttgaagtgacggagagccgacgcatcgacgaccctaatcaggcggtcgcgatcctgaaaccgctgcgtagtgccggcattcgcatcgcgctggacgattttggcatggggtacgccgggctgcgtcagcttcagcacatgaaaacccttccggtggatgtgctcaaaattgataaagcgtttgtcgacggtctgccgggcgacagcagcatggtgcaggcgattatccagatggcgcgcagcctcaatctgcatcttattgccgagggaattgaaaccgaagcgcaacgcgcctggctggcagaggcgggcgtggagagtggacaaggcttcctttttgcccctgctgttccttcggatgtctttgaagaacgatacctttctggtgctgacaataacgcaaaagtg

SEQ ID NO: 20078 - DNA, 1104 bp, Enterobacter cloacae
atgaaagcctttcgctggtgtgcattagcagcgttgatgctggcggcgcttcctcttcgcgccgcctgtacctggcctgcctgggagcagtttaaaaaggactacatcagtgagggcgggcgtgtcgttgatcccagcgacacgcgcaaaattacgacctcggaagggcaaagctacgccttgttctttgcccttgcggcgaacgatcgcagcgcgtttgaccagctgctgacctggacgcgcgataatcttgccagcggcaatctcaacgacaacctgcccgcctggctatggggccagaaagataaagagacgtgggcggtgattgataccaactccgcctctgacgccgatgtctggatcgcctggtctctgctcgaagcgggccggttgtggaaacatccggactatacccgcacgggtaaggcgctgctgaaacgcattgtcagtgaggaagtggtgaaagtgccggggctcggcgcaatgctgcttcccggtaaagtcggttttgccgatgaaaacgtctggcgttttaaccccagctatcttcctccgcagctagcgagttatttcacgcgttttggtaccccgtggacccagcttcgtgaaaccaatcagcgtctgctgcttgagagcgcgccgaaaggtttttcgccggactgggttcagtatcagaaaaacaaaggctggcggttacagcaggataaatcgctggtgggcggctacgatgccatccgcgtttatctctgggtgggaatgatgagtgataaagatcctcagaaagcccggctgctgacgcgctttcagccgatggtggcaaagacaatgaaacggggtgtgccgccggagaaagtggatgtggcgacgggtaaacgcaccgggaatggtccggtcgggttctctgccgccatgctgccgtttttacaacaacgtgatgcccaggcggttcagcgccagcgcgttgcggaccattttcccgataataatgcctattacagctacgtgctgactctctttgggcaaggatgggatcagcatcgttttcgcttcaccgcaaaaggtgaattaataccggattggggccaggaatgcgcaagttcacag

SEQ ID NO: 20079 - DNA, 1677 bp, Enterobacter cloacae
atgactaattctacctataccgcttcgtcaccctcgccgctctggcaatactggcgcggcctttccggctggaacttctactttctggtgaagtttggcctgctgtgggcaggctatctgaatttccatccccttctcaacctggtgtttatggccttcctgctgatgccgctaccgaatatcaggctacatcgcttgcgccactgggtcgctatacctgtcggctttgcgctgttctggcatgatacctggctaccggggccggacagcattatgagccaggggtcgcaggtggcgggctttagcgccagctatgtcctcgatctgaccgagcgctttattaactggcagatgattggcgcggtgtttgtgctgctggttgcctggctgttcctgtcacagtggatccgcgtcacggtgtttgtcgtcgcgattatgatctggcttaacgtgctgacgctggctgggccgaacttttcgctgtggcctgccggtcaaccgaccaccacggtgactactacagggggaagcgcggcggcaaccgtcacaacggcaggcgatacgcctgtagtgggcgatatcccaacccagaccgcaccgccgacctcaaccaacctgaacgcctggctctccagtttctataccgcggaagacaagcgacagactaaattcccggatgcgctgccggcggatgctcagccgtttgaactgctggtgatcaatatctgctctctctcctgggccgacgtggacgccgccggtttgatgtctcatccgctgtggtcacacttcgatattcagtttaaagatttcaactctgccacctcgtacagcggcccggcggcgatccgcctgctgcgtgcaagctgcggtcagacatcgcataaaaacctgtatcaacccgccggcaaccagtgttatctgttcgataacctcgcaaagctgggctttacgcagcacctgatgctggggcataacggccagttcggtaacttcctgaaagaggtgcgcgaacagggcggcatgcaggcaccgctgatggatcaaaccggtcttcctgtctctctgctgggcttcgacggttcgcccgtttatgacgatactgccgtcctgcagcgctggctgcagaccatcgaaaaagacagtaatccgcgcagtgcgacgttctttaacaccctgccgctccacgacggtaaccatttcccgggcgtgagcaaaacggctgattataaagtgcgtgcgcagaagttctttgacgagctggacgcgttcttcacggagctggaaaaatcaggccgtaaagtgatggtggttgtggtgcctgagcacggtggtgcgctgaaaggtgacagaatgcaggtgtcgggtctgcgtgatatcccaagcccgtccatcactaacgtgcctgcaggcattaaattctttgggatgaaggcaccgcatcagggcgcaccgattgagattacacagccaaccagctatctggcgatctcagaactggttgcccgcgccgttgacgggaagctgtttgtggaagatagcgtgaactgggatcagctcaccagcaaactgccgcaaacggcagaagtctcagagaacgctaacgcggtcgtcattcagtatcaaaacaaaccttacgttcgcctgaacggcggggattgggtaccgtatccgcag

SEQ ID NO: 20080 - DNA, 1026 bp, Enterobacter cloacae
atgaaccactcccttaagccctggaatacctttggcattcaacgcaatgctaaacaaattgttcgtgccgataatgcacagcaactgctggatgcatggcaaagcgcaacagaaaataacgaacccgtactaattctgggcgaaggaagtaatgtcctgtttctcgatgatttttcgggaacggtaatcgttaaccgcatcatggggattgatgttgaagagcgtgccgatagctggcacctgcacgtgggggccggtgaaaactggcatcatctggtgcaattcaccctcgaaaaagggatgccgggcctggaaaaccttgcgcttattccaggctgcgccggatcgtcaccaattcaaaacatcggtgcctacggcatcgaactgaaacatgtctgcgaatatgtcgactgcatcgaactggcgaccggaacggctaaacgtttaacggcggaacagtgccagtttggctatcgtgacagtatcttcaaacatgaatatcaggatcgctacgtgattgtcgccgtgggtctgtgcctgtcgaagaactggcagcccgtgttgacctacggggatttaacgcgtctcgatccggctaccgtaaccgcccgcgacgtttttgattccgtttgccatatgcggatgaccaaacttcccgatccaaaagtaaacggaaacgctggaagcttcttcaaaaacccggttatcagcagcgaaaatgcaaaaatctttcttgaaggatggccagccgcgccacattaccctcaggcggatggcagcgtgaagcttgccgcgggatggcttatcgatcaatgccagcttaaaggcacttcagtaggcggtgctgccgttcaccagcagcaggctctggtgctgattaatcaacgcgatgcgaccagcgatgatgttgtacagctggctcattatgttcgtcagcgtgtgggcgaaaaatttaacgtctggctggagccagaagttcgcttcattggctgcacaggtgaagttaatgccgtggagactatcgcg

SEQ ID NO: 20081 - DNA, 366 bp, Enterobacter cloacae
atggccaataataccactgggttaacgcgtatcatcaaagccgccggctattcatggaaaggtttccgtgccgcgtggatcaacgaagctgcctttcgccaggagggcgtcgccgctatcatcgcggtgatcgtcgcctgtttccttgatattgatgctattacccgcgtacttctaatcggttccgtgcttctggtgatgatagtggaaattcttaatagcgctattgaggccgttgttgatcgcattggttcagatttccacgagctttctggccgcgcaaaagacatgggctctgctgccgtgctgctggcgattatcactgccgttatcacctgggtcacgctgctttggtcacatttccga

SEQ ID NO: 20082 - DNA, 1410 bp, Enterobacter cloacae
atggcaggaaacaaacccttcaacaaacagactgaacctcgcgagcgtgatttccaggtcgcagggttaaaggtcccgccgcactcgattgaagcggaacagtcggtgttgggcggtttaatgctggataacgagcgctgggacgacgtcgccgagcgcgtcgtggcggaagatttctacacccgcccgcaccgccacatctttactgaaatggcgcgcctgcaggaatcgggcagtccgatcgacctgatcacgctcgcggaatcgctggagcgtcttggtcagctcgacagctgcggcgggtttgcctatctggcggaactgtcaaaaaacacgcctagtgcggcgaacatcagcgcttatgccgatatcgtgcgcgaacgtgccgtcgtccgcgagatgatctcggtggcgaatgagatcgccgaggccggttttgatccgcaggggcgcaccagcgaagacctgctcgacctggctgaatcccgcgtctttaaaatcgccgaaagccgcgccaataaagacgaaggcccaaaaaacatcgccgatgtcctcgacgccaccgttgcccgtatcgaacagctgttccagcagccgcacgacggtgtgaccggggtaaacaccggctatgacgatttgaacaagaaaaccgccggcctgcagccgtcggatttgattatcgtcgccgcgcgtccgtcgatgggtaaaactacctttgcgatgaacctcgtcgaaaacgcggcgatgttgcaggataagccggtgctgatcttcagccttgagatgccctccgagcagattatgatgcgttctctggcgtcgctgtcgcgcgtagatcagacccgcattcgtaccggccagctcgatgatgaagactgggcgcgcatctccggcaccatgggcattctgctggaaaaacgtaacatctatatcgatgactcgtccggcctgacgccgacggaagtgcgctcccgcgcgcgccgtatcgcccgtgaacacggtggcatcggcctcatcatgatcgactaccttcagctgatgcgcgtcccgtcgctttccgacaaccgtacgcttgaaattgcggagatttcccgctcgctcaaggcgttagccaaagagctgcacgtaccggtagtcgcgctgtcgcagctgaaccgctctctggaacaacgtgccgacaagcgcccggtcaactctgacctgcgtgagtccggctccatcgagcaggatgccgacttaattatgtttatctaccgtgatgaggtttatcacgagaacagtgacctgaaagggatcgccgaaattattattggtaaacaacgtaacggcccaatcgggacggtgcgtctgacctttaacggacagtggtcgcgtttcgacaactatgccggtcctcaatatgatgatgag

SEQ ID NO: 20083 - DNA, 2820 bp, Enterobacter cloacae
atggataagatcgaagttcggggcgcccgcacccacaatctcaagaatatcaacctcataatccctcgcgacaaactcattgtcgtgaccgggctttcggggtctggcaaatcctcactggctttcgacactttgtatgccgaaggacagcgtcgttacgttgaatcgctctctgcgtacgcgcgtcagttcctgtcgctgatggaaaaaccggatgtcgaccacattgaagggttgtcccctgctatctctattgagcagaagtccacctcgcataacccgcgttcaacggtcggtaccattaccgaaattcatgactacctgcgtctgctgtatgcccgcgtgggcgagccgcgctgcccggaccacgacgtcccgctggcggcccagaccgtcagccagatggtggataacgtgctgtcgcagccggaaggcaaacgcctgatgctgctggcgccgatcattaaagagcgaaaaggcgaacacaccaaaacgctggaaaacctggcaagccagggctatatccgcgcccgtatcgacggcgaagtgtgcgacctgtccgatccgccaaagctggagctgcagaagaagcacaccatcgaagtggtgattgaccgctttaaggtgcgcgacgatctcgccacgcgcctggcggaatcctttgaaacggcgctggaactctctggcggcacggccgtggtctccgacatggacgacccaaaagcggaagagctgctcttctccgccaacttcgcctgcccgatttgcggctacagcatgcgcgagcttgagccgcgcctgttctcattcaacaacccggcgggcgcgtgcccgacgtgtgacggcctgggcgtgcagcagtatttcgacccggaccgcgtgattcagaacccggaactgtcgctggcgggcggcgccattcgcggctgggacaagcgtaacttctactacttccagatgctgaaatcgctggcagagcactataagttcgacgtcgaagccccgtgggcgagcctgaccccgaacgtgcacaaagtgatcctgttcggttccggcaaagagaacatcgagttcaagtatatgaacgatcgcggcgatacctccgtgcgtcgccacccgttcgaaggggtgcttcacaacatggagcgccgctacaaagagaccgaatccagcgcggtgcgcgaggagctggcaaagttcatcagcaaccgctcctgcgccacctgtgagggcacgcgtctgcgtcgcgaagcgcgccacgtgtttgtggaaaacaccgcgctgccgaccatctcagacatgagcatcggccatgcgatggacttcttcaacaacctgaagctctccggccagcgcgcgaaaattgccgaaaaagtgctgaaagagatcggcgatcgcctgaagttcctggtgaacgtcggcctgaactacctgacgctttcccgctcggcagaaacgctctccggcggtgaagcccagcgtatccgtctggccagccagattggcgcgggcttagtcggcgtgatgtacgtgctggatgagccgtccatcggcctgcaccagcgcgacaacgagcgcctgctcgggacgctggttcacctgcgcaacctcggcaacacggtaattgtggtcgagcacgatgaagatgcgatccgcgcggctgaccacgtcatcgacattggcccaggcgctggcgtgcacggcggtcaggtagtcgcggaagggacgctgaaggacattatggcggtacccgaatcgctgaccggccagttcatgagcggcaagcgcaagattgaagtgccgaaacagcgcgtagcggcagatccggaaaaagtgctgaagctgaccggcgcgcgcggcaacaacctgaaagacgtcaccctgacgctgccggttggcctgtttacctgtatcaccggcgtgtccggttccggtaaatcgacgctgatcaacgatacgctgttcccgattgcgcagacggcgctgaacggcgcgacgctggccgagcctgcaccgtaccgcgacatccaggggctggagcatttcgataaagttatcgacattgaccagagcccgattggccgtaccccgcgctctaacccggcaacctatactggcgtcttcacgcccgtacgtgaactgtttgccggcgtgccggaagcgcgctcccgcggctatacgccaggacgtttcagctttaacgtgcgcggtggacgctgcgaagcgtgccagggcgacggcgtgatcaaggttgagatgcacttcctgccggatatctacgtgccgtgcgaccagtgcaacggcaaacgctataaccgcgaaacgctggagattaagtacaaaggcaagaccatccacgaagtgctggacatgaccatcgaagaggcgcgcgagttctttgacgccgtccctgcgctggcgcgtaagctgcagacgctgatggacgtaggcctgacctacattcgtctggggcagtcggcaaccacgctgtccggaggtgaagcgcagcgcgtgaagctggcgcgtgagctgtcaaaacgcggaaccggtcagacgctctacattctggacgagccgactacgggcctgcactttgccgacatccagcagctgctcgaggttctgcatcagctgcgcgatcagggcaacactatcgtggtcatcgaacataacctggacgtgattaaaaccgcggactggattgtcgatctcggcccggaaggcggcagcggcggcggtgaaattctcgtctccggtacgccagagaccgttgcagagtgcgaagcctcgcacaccgcgcgcttccttaaaccgttgctg

SEQ ID NO: 20084 - DNA, 207 bp, Enterobacter cloacae
atgaataaagacgaaatcggcggcaactggaagcagttcaaaggtaaagcgaaagaacagtggggtaagctgactgatgacgatatgaccgtcattgaaggtaaacgcgatcagcttgtcggtaaaattcaggaacgttacggctacgcgaaagaccaggcggaaaaagaagtgggcgactgggaaaaacgcaacgactaccgctgg

SEQ ID NO: 20085 - DNA, 1077 bp, Enterobacter cloacae
atgcaagcggcaactgttgttattaaccgccgcgctctgcgacacaacctgcaacgtctgcgtgaactggcgcctgccagcaagctcgttgcagtcgtgaaagcgaacgcttacggacacggtcttcttgagaccgcgcgaacgctccccgatgccgacgcctttggcgtcgcccgtcttgaagaagccctccgcctgcgcgcgggcggcattactcaacccatactgctcctcgaaggctttttcgaagccagcgatctgccgaccattgctgaccagcatctgcacacggcggtacataacgaagaacagctaaccgcactcgaaaccgccgaactgagcgagccggtgaccgtctggatgaagctcgacacgggcatgcaccgtcttggcgtgcgtccggaaagcgcggaagcgttttatcagcgtttatgccggtgcaaaaacgtgcgtcagccggtgaatatcgtcagccacttcgcccgtgccgatgagcccgagtgcggtgcgaccgagcggcagctggatatctttaacaccttctgcgaaggcaagccggggatgcgctcgattgcggcatccggcgggattctgctgtggccgcagtcgcatttcgactgggcgcgaccaggcattattctctacggcgtgtcgccgctggagaacaaaccctgggggccggactttggcttccagccggtcatgtcgctggtctctaacctgattgccgtgcgtgaccataaagcaggtgagcctgtgggctatggcggtacctggaccagcgagcgtgatacccgtctcggcgtggtggcgatgggttatggtgacggctatccgcgcgccgcgccttcgggcacgccagttctggtcaacggtcgcgaggtgaagattgttggccgcgtggcgatggacatgatttgtgtcgatctcgggcctgaagcccaggataagcccggcgacgatgtcgtgatgtggggcgaggggctgcccgtcgaacgcattgctgaaattacgaaagtgagtgcttacgaacttatcacgcgcctgacgtcaagggtggcgatgaagtatctggat

SEQ ID NO: 20086 - DNA, 528 bp, Enterobacter cloacae
atggccagcagaggcgtaaacaaggtgattctcgtcggtaatctgggccaggacccggaagtacgctacatgccgagtggtggcgcagttgccaacattacgctggctacttccgaatcctggcgtgataaagcgaccggtgagatgaaagagcagaccgaatggcaccgcgttgtgctgtttggcaaactggccgaagtggccggtgagtatctgcgtaaaggttctcaggtctatatcgaaggccagctgcgtacccgcaaatggaccgatcagtccggtgctgagaagtacacgactgaagtcgtggtcaacgtgggcggtaccatgcagatgctgggtggccgtcagggcggtggcgcaccggctggcggcggtcagagccagcagcagggcggttggggtcagcctcagcagccgcagggcggcaatcagttcagcggcggcgcgcagtctcgtccgcagcagcagtctgctccggcgccgtctaacgaaccgccaatggatttcgacgacgacattccgttc

SEQ ID NO: 20087 - DNA, 993 bp, Enterobacter cloacae
atgtcgtcagaattacagaccgctttccctgcacaccgtttctccattgcgccgatgctcgactggacggacagacactgccgctatttcctgcgccagctctcccgccatacgctgctgtacaccgaaatggtgaccacgggcgcaatcattcacgggaagggcgactatctggcctatagcgaagaagagcatccggttgccctgcagctgggcggcagcgatccggccgcgctggcgcagtgcgcgaagctggcggaagaacgcggctacgacgagatcaacctgaacgttggctgcccgtctgaccgcgtgcagaacggcatgtttggcgcctgtctgatggggaatgcacagctggtagcggactgtatcaaggcgatgcgcgatgtggtctccattccggtcacggtcaaaacccgtatcggcattgacgatcaggacagctacgaattcctgtgcgacttcatcaacacggtatccgggaaaggcgagtgcgagatgttcatcattcacgcgcgaaaagcctggctctccggcctcagcccgaaagagaaccgtgagatcccgccgctggactatccgcgcgtgtatcaactgaagcgtgacttcccgcacctgacgatgtccatcaacggcggcatcaagtcgctggaagaggccaaagcgcatctggcgcatatggatggcgtgatggtcggccgcgaggcgtatcagaacccgggtattctggcgacggtcgatcgcgaaatctttggtatcgaaggcgcggacaccgatccggttgccgtcgtgcgtgccatgtacccctacattgagcgcgagctgagcaatggcacgtatcttggccatatcacccgccatatgcttggtctgttccaggggattccgggcgcgcgtcagtggcgccgctacctgagcgagaatgcgcataaagccggtgccgatattgaggtgctggaacatgcgctgcgactggtggcagacaagcga

SEQ ID NO: 20088 - DNA, 457 bp, Enterobacter cloacae
atgtttgtcatctggagccatgaaaaagggttcatcatgagtcatcagctcaccttcgccgacagtgaattcagcagtaagcgccgtcagaccagaaaagagattttcttgtcccgcatggagcagattctgccatggcaaaacatggtggaagtcatcgagccgttttatcccaaggctggtaatggccggcgaccttatccgctggaaacccatgtacgcattcactgcatgcagcattggtacaacctgagcgatggcgcgatggaagatgctctgtacgaaatcgcctccatgcgtctgtttgcccggttatccctggatagcgccttgccggaccgcaccaccatcatgaatttccgtcacctgctggagcagcatcaactggcccgtcaattgttcaagaccatcaatcgctggctggccgaagcaggcgtcatgatgaccgggggatcca

SEQ ID NO: 20089 - DNA, 1641 bp, Enterobacter cloacae
atggattcgcaacgcaatcttcttatcatcgctttgttgttcgtgtctttcatgatctggcaggcatgggagcaggataaaaatcctcaaccccagcagcagaccacgcagactacgaccaccgcagcgggtagcgccgccgaccagggcgtaccggccagtggccaggggaaacagattacggttaagaccgatgtgcttgagctgacaatcaacacccgtggtggtgatgttgagcaggcgctgctgttgacctacccgaaagagctgaagtctaacgaaccgttccagttactggaaaccacgcctgagtttatctaccaggctcaaagcggcctgaccggtcgtgatggcccggataacccggctaacggtgcgcgtccactgtataccgtcgagagcgacacctttgtgctggctgatggtcagaacgaactcgcgatcccgatgacgtacaccgacgccgcagggaacaccttcactaaaaccttcaccctgaagcgcggtgagtatgcggtgaacgtgggctacagcgtacagaacgccagtgcgaaaccgctggaactgtctacctttggccagctgaagcagtccatcaatctgccgtctcaccgtgacaccggaagcagcaactttgcgctgcataccttccgtggcgcggcgtactccacgccagacgcgaagtatgagaaatacaaattcgacaccattgccgataacgaaaacctgaacgttagttccaaaggcggttgggttgcgatgctgcagcagtatttcgctacggcctggatcccaaacaacgacggtacgaataacttctataccgcgaacctgggcaacggtattgccgccatcggctacaagtctcagccggttctggttcagccgggtcaaaccggtaagatggcaagcaccctgtgggtcggcccggaaattcaggacaaaatggccgctgttgcgccgcacctggatctgaccgtcgattacggttggttgtggttcatctctcagccgctgtttaagctgctgaagttcatccacagcttcctgggtaactggggcttctccatcatcgttattaccttcatcgttcgtggcatcatgtacccgctgactaaagcgcagtacacctccatggcgaagatgcgtatgctgcagccgaagattcaggctatgcgtgagcgtctgggcgatgacaaacagcgtcagagccaggaaatgatggccctgtacaaagcagagaaagtaaacccactgggtggttgcttcccgctgctgattcagatgccaatcttccttgcgctgtactacatgctgatgggttccgttgagctgcgccacgcgccgttcgcactgtggatccatgacctgtccgcacaggacccgtactacatcctgccgatcctgatgggcgtgacgatgttcttcatccagaagatgtcgccgaccaccgtgaccgacccgatgcagcagaagatcatgacctttatgccggtcatcttcaccgtgttcttcctgtggttcccgtcaggtctggtgctgtactatatcgtcagcaacctggtgaccatcatccagcagcagctgatttaccgtggtctggaaaaacgtggcctgcatagccgcgaaaagaaaaagtcc

SEQ ID NO: 20090 - DNA, 1362 bp, Enterobacter cloacae
atgagccataacgacactatcgtcgcccaggcaaccccaccgggacgcggtggtgtaggcattctgcgtatctccggcctgaaggcgcgcgaggtggccgaagcggtgctgggtaaactgccaaagccgcgctacgctgattacctgccgtttaaagataccgacggcacgccgctggaccagggcattgcgctgtggttccccggcccgaactctttcaccggcgaagacgtgctggagctgcagggccacggcggcccggttatcctcgacctgctgttaaaacgtatcctgaccctgcctggcctgcgcattgcgaagccgggcgagttctccgagcgtgccttcctcaacgacaagctcgacctggcgcaggcagaagcgattgcagacctgatcgacgccagttctgaacaggcggcccgctccgccctgaactcgctgcagggggcattctccgcccgcgtaaatcaccttgtggaagcacttactcacctcaggatctacgtggaagcggctatcgacttcccggatgaggagatcgacttcctctctgacggtaaaatcgaagcgcagctcaaccaggtgatggccgatctcgacgccgttcgcgccgaagcgcgccagggcagcctgctgcgcgaagggatgaaggtggtgattgccggacgccctaacgccgggaaatcaagcctgctgaacgccctggcgggccgtgaagcggcaatcgtaaccgacattgccggcaccactcgcgacgtgctgcgcgagcacatccacatcgacggcatgccgctgcacatcatcgacaccgccggcctgcgcgatgccagcgacgaggttgagcgcatcggtatcgaacgcgcctggcaggagatcgaacaagctgaccgtgtgctgtttatggtggacggcaccacgaccgacgccgttgacccggctgagatctggccagactttatcgcccgtctgccggctaaactgcccatcaccgtggtgcgtaacaaagcggacgtcaccggcgaaatgctgggtatcagcgatgtaaatggtcactcactgattcgcctgtcggcgcgtaccggtgaaggcgttgacgacctgcgtaaccatctcaagcagagcatgggctttgataccagcatggaaggcggcttcctggcgcgtcgtcgtcacctgcaggcgctggaagaggcggcaaaccaccttgttcagggtaaagcgcagctgatcggcgcgtgggcgggtgaactgctggcggaagagctgcgtctggcgcagcagaatctgagcgagatcaccggggagtttacgtcggacgatctgctgggacggattttctcgagcttctgtatcggtaag

SEQ ID NO: 20091 - DNA, 771 bp, Enterobacter cloacae
atgagtatggttgatactgccccgggtaagattcaggttcgtgatttgaacttctactacggcaaattccatgccctgaagaacatcaacctggatatcgcgaagaaccaggtcacggcatttatcggtccgtcaggttgtgggaagtccacgctgctgcgtacctttaacaaaatgtattcgctctatccggagcagcgcgctgaaggtgaaatcatcctggacggtgaaaacattctgacccaggctcaggatatcgccctgctgcgcgccaaagtggggatggtgttccagaaaccaacgcctttcccgatgtcaatttacgacaacatcgcgtttggcgtgcgtctgtttgaaaaactctcccgtgccgatatggacgagcgcgtgcagtgggctttgaccaaggccgcattatggaacgaaaccaaagataagttgcaccagagcggttactctctctccggcggtcagcagcagcgtttgtgcattgcgcgcggtattgctattcgcccggaagtgttgctgctggatgagccgtgttcagcgctggacccgatctcaaccggccgtattgaagagctgatcaccgagctgaagcaggattacaccgtggttatcgtgacccataacatgcagcaggctgcacgttgttccgatcacacggcgtttatgtacctgggcgagttgattgagttcagcgatacggacgcgctgttcaccaggcccgcgaagaaacaaaccgaagattatattactggccgctacggt

SEQ ID NO: 20092 - DNA, 1539 bp, Enterobacter cloacae
atgcaactgaattccaccgaaatcagcgaactgatcaagcagcgcattgctcagttcagtgttgtgagtgaagctcacaacgaaggtactattgtttctgtaagtgacggtgttatccgcatccacggcctggccgattgtatgcagggtgagatgatttccctgccgggtaaccgttacgctatcgcactaaacctggagcgcgactccgtaggtgcagttgtgatgggtccatacgctgacctcgccgaaggcatgaaggttaagtgtactggccgtattctggaagtgccggttggccgtggcctgctgggtcgcgttgttaacaccctgggtgcgccaatcgacggtaaaggtccggttgagcacgatggcttctccccaatcgaagttatcgcaccaggcgttatcgaccgtcagtccgtagatcagcctgttcagacaggttataagtccgttgatgccatgatcccaatcggtcgtggtcagcgtgaactgatcatcggtgaccgtcagaccggtaaaaccgcgatggctatcgacgccatcatcaaccagcgtgactccggcatcaaatgtgtgtacgtggctatcggccagaaagcgtccaccatttctaacgtggttcgtaaactggaagagcacggcgcactgtctaacaccatcgttgtggtagcaaccgcgtctgaatctgctgcactgcaatacctggcaccatacgccggttgcgcaatgggcgaatacttccgtgaccgcggtgaagatgcgctgatcgtatacgatgacctgtctaaacaggctgttgcttatcgtcaggtttccctgctgctccgtcgtccacctggacgtgaagcgttccctggcgacgtattctacctccactctcgtctgctggagcgtgcttcccgcgttaacgcggaatacgtcgagaacttcaccaaaggtgaagtgaagggtaaaacgggctctctgaccgctctgccgatcattgaaacccaggcgggtgacgtttctgcgttcgttccgaccaacgtaatctccattaccgatggtcagatcttcctggaaaccaacctgtttaactccggtattcgtccggcggttaacccgggtatctccgtatcccgtgttggtggtgctgctcagaccaagatcatcaagaaactgtccggtggtatccgtaccgcgctggcacagtatcgtgaactggctgcgttctctcagttcgcatccgatctggacgaagcaacccgtaaacagctgagccacggtcagaaagtgaccgagctgctgaagcagaaacagtacgctccaatgtctgttgctcagcagggcctggtactgttcgcggctgaacgcggttacctcgaagatgtggaactggcgaaaatcggtagcttcgaagccgctctgctggcttacgtcgaccgtgatcacgctccgctgatgcaagagatcaaccagaccggtggctataacgacgaaatcgaaggcaagctgaaagctatcctcgattccttcaaagcaacccaatcctgg

SEQ ID NO: 20093 - DNA, 531 bp, Enterobacter cloacae
atgtctgaatttgttacggtagctcgcccctacgccaaagcagcttttgactttgctgtcgaacaccaaaatgtcgatcgctggcaggatatgctggcgtttgccgctgaggtgacgaaaaacgaacaaatggctgagttgctttccggtgcgttagcacctgaaactctcgccgcgtcgtttatcgccgtgtgcggagagcaactggatgccaacggccagaacctgattaaggtgatggcagaaaatggtcgtctccgtgtgctcccggatgttctcgagcagtttgagcacttacgtgcccttagtgaagcaaccgctgaagtcgaagtgacttctgcgactgaactgagtaatgaacagcttgcgaaaatcaccgccgcgatggaaaaacgtctgtcacgcaaagttaagctgaattgcaaaatcgataagtctgtaatggcaggcgtaatcatccgttcgggtgatatggtcattgatggcagcgtacgcggccgtcttgaacgccttgcagacgtcttgcagtct

SEQ ID NO: 20094 - DNA, 957 bp, Enterobacter cloacae
atggctgcaaccaagcctgcatttaaccctccgggtaaaaaaggtgacatgattttcagcgcgctggtgaaactggctgcgctgattgtgctattgctgctgggcggcattatcgtgtctctgattttctcctcatggccgagcatccagaaattcggtttttccttcctgtggactaaagagtgggacgcgccgaacgatatctacggtgccctggtgccgatttacggcacgctggtgacctcgttcatcgccctgctgattgcggttccggtgagctttggtattgccctgttcctgacggagctggcgccgggctggctgcgacgcccgctgggtattgccatcgaactgctggcggctattccaagtatcgtttacggcatgtggggcttgttcatctttgctccgctgttcgccacgtatttccaggaaccggtcggtaacgtgctttccgctattccgtttgtgggtgctctgttctctggcccggctttcggtatcggcattctggcggctggcgtgatcctcgccatcatgattattccgtacattgcggcggtgatgcgcgatgtcttcgaacaaacgccggtgatgatgaaagagtcggcctacggcatcggctgcaccacctgggaagttatctggcgcattgtccttccgttcaccaaaaatggggtgatcgggggcgtgatgctgggtttaggtcgtgcgctgggtgaaaccatggcggtcacctttatcatcggtaacacctaccagctcgacagcgcgtcgctctacatgccgggtaacagtattacctcggcgctggcgaatgaatttgcggaagcggaatctgggctgcacgtggcggcgctgatggagctgggtctgattctgttcgttatcaccttcattgttctggcgatttccaagttgatgattatgcgcctcgctaaaaatgagggagcacgc

SEQ ID NO: 20095 - DNA, 1827 bp, Enterobacter cloacae
atgtgtggaattgttggcgcagttgcgcagcgtgatattgctgaaatccttctcgaaggtttacgtcgtctggaataccgtggttacgactcagccggtctggctgtcgtcgatgcagaaggtcatatgacccgtctgcgtcgtctcggtaaagtgcagatgctggcccaggccgcggaagaacatccgctgcacggtggaaccggtattgctcacacccgctgggcgacgcacggcgaaccgtctgaaggtaacgcgcacccgcatgtgtctgaacacatcgtggtcgtgcacaacggcattatcgaaaaccacgaaccgctgcgcgaagaactgaaagcgcgcggctacaccttcgtctcagaaactgacaccgaagtgattgctcacctggtgcactgggagctggagcagggcggcacgctgcgtgatgcggtgctgcgtgctatccctcagctgcgcggtgcgtacggtacggtgatcatggattcccgcgatccgtccacattgctggccgcgcgttccggtagcccgatggttatcggtctgggcatgggcgaaaacttcatcgcttctgaccagctggcgctcctgccggttacccgtcgctttatcttcctcgaagagggtgatatcgcggaagtgacccgtcgcagcgtgaccgtctttgataccaaaggcgagcaggtgaaacgtcaggagattgaatcgaatctgcagtacgacgcgggcgacaaaggcgcttaccgtcactacatgcagaaagagatttacgagcagccaaacgccatcaaaaacacgctgaccgggcgcatcagccacggtgaagtggatctgagcgagctgggcgcaaacgcgaacgaactgctcggcaaggtcgagcatattcagatcgtggcctgcggcacctcatacaactccggtatggtctctcgctactggtttgaatccctggctggcgtgccgtgcgatgtggaaatcgcgtctgaattccgctatcgcaaatccgcggtgcgtcgtaacagcctgatgatcaccctttcccagtctggtgaaacggcggatacgctggcagcgctgcgtctgtctaaagagctgggttacctgggctctctggctatctgtaacgttcctggctcatcgctggtgcgtgagtccgatctggcgctgatgaccaaagcgggcaccgaaatcggtgtggcctctaccaaagcgtttaccactcagctgaccgttctgctgatgctggtggcgaagctggcgcgtctgaaaggtgaagatgcgtccgttgagcacgacatcgttcacggcctgcaggcgctgccgagccgtattgaacagatgctgtctcaggacaaacgcattgaagcgctggcggaagatttctccgacaaacatcacgccctgttcctgggtcgtggcgatcagtatccgattgcgctggaaggcgcgctgaagctgaaagagatctcctacattcacgctgaagcctatgcggctggcgagctgaagcacggcccgctggcgctaattgacgcggatatgccggtcatcgttgtggcaccaaacaacgaactgctggaaaaactgaagtctaacatcgaagaagtgcgcgcccgcggcggtgttctgtacgtcttcgccgacaaagatgccggttttgtcagcaacgacaacatgcatatcatcgagatgccgcatgtggaagaggtgattgcaccaatcttctacaccgttccgctgcagctgttggcctatcacgttgcgctgatcaaaggtaccgacgttgaccagccgcgtaacctggcgaaatcggttaccgtagaa

SEQ ID NO: 20096 - DNA, 815 bp, Enterobacter cloacae
atggcttcagaaaatatgacgccgcaggattacataggtcaccatctgaataaccttcagctggacctgcgtacattctcgctggtggatccacataaccccccggccaccttctggacgatcaacatcgactccatgttcttctcggtggttttgggtcttctgttcctggccatgttccgcggtgttgctaaacgagcgaccagcggtgtaccagggaaattccagaccttcatcgaaatgatcatcggcttcgtccatggcagcgtcaaagacatgtaccatggtaagagcaagctgattgctccgctggccctgaccgtgttcgtttgggtcttcctgatgaacctgatggacctgctgccaatcgatctgctgccgttcatcggtgagcacatcttcggcctgcctgcgctgcgtgttgtaccgtctgcggacgtgaacatcaccctgtcgatggcgctgggcgtgtttatcctgattcttttctacagcatcaaaatgaaaggcgtaacggctttgtgaaagagcttaccttgcagccgttcaaccactgggcgtttattccggtcaacctgatcctggaaggcgttagcctgctgtccaaacctgtttcactgggtctgcgactgttcggcaacatgtatgcgggtgagctgattttcattctgatcgcgggtcttctgccgtggtggtcacagtggattctgaatgtgccatgggccattttccacatcctgatcattacgctgcaagcctttatcttcatggttctgacgatcgtctatctgtcgatggcgtctgaagagcactga

SEQ ID NO: 20097 - DNA, 1368 bp, Enterobacter cloacae
atgtcaaacagtgcgatgagcgtggtgatccttgccgctggcaaagggacccgcatgtattccgatctgcctaaggtgctccacacgcttgcaggaaagccaatggtgcagcatgtcattgatgcagcgaacgaactgggtgccagtcaggtccacctggtctacggccacggcggcgatctgcttaaaaagacgctgagcgatgacaagctcaactgggtgcttcaggccgaacagctgggcacaggccatgcgatgcagcaggctgcgcctttctttgcggatgacgaagacattttgatgctctacggcgatgtcccgctgatctccgttgaaaccctgactcgcctgcgtgaagccaaaccgcagggcggcatcggtttgttgaccgtcgtgctggacgatccaagcggttatggtcgcatcacccgtgaaaacggcaacgtcacgggtattgttgagcacaaagatgccagcgacgaacagcgccagattcaggagatcaacaccggtatcctgattgccaacggcgcggatatgaagcgctggctgtccagactcgacaacaacaacgcgcagggtgaatactacatcaccgacatcattgcgatggcgtaccacgaagggcgtgaaattgccgccgttcatccggcgcgcatcagcgaaacggacggcgtgaacaaccgcctgcagctctcccgtcttgagcgtatttatcagtccgagcaggccgaaaaactgctgctggcgggcgtgatgctgcgcgatccggcgcgtttcgatctgcgtggttcgttatctcacgggcgtgacgttgaaattgatacgaacgttatcctcgaaggtcacgtcacgctgggcaatcgcgtcaaaattggcgccggctgcgtgattaaaaacagcgtcatcggtgacgactgcgaaattagcccgtacagcgtgatggaagatgcccgtctggacgctgcctgtaccattggcccgtttgcgcgtctgcgcccgggcgctgagctgctggaaggcgctcacgtgggtaacttcgtggaaatgaaaaaagcgcgtctgggtaaaggctcgaaagccggtcatctgacctatctgggcgacgcggaaattggcaataacgtgaatattggtgcagggactattacctgtaactatgacggcgcgaataagtttaaaaccatcatcggtgacgacgtgtttgttggctccgatacgcagctggtggcgcctgttaccgtgggtaacggggtgaccattgccgcgggaacaaccgttacgcgcgatgtggccgagaacgagctggtgttaagccgcgttccgcaggtcagcaagcagggctggaaacgcccggagaagaaaaag

SEQ ID NO: 20098 - DNA, 1361 bp, Enterobacter cloacae
tacgcatttcccgataacttctggtggggcagcgcaactccgctctccagaccgaaggggcaagagagggcgaaaccacatgggattactggtttgcccgcgagccgaaccgttttcacaacggcgtggggccgcagcagacctccacgttctatcagcactggaaaacggacattcagctgttaaagcagctgaaccacaacagctttcgcacctcgattagctgggcgcgcctgatccccgacggtatcggtgaagtgaacccggaagcggtcgatttttacaatcaggtcattgatgagctgaatgaacagggcatcacgccgtttatgaccctgttccatttcgacatgccgatggcgatgcaggagatcggcggctgggaaaaccgcgacgtggtggacgcctacgcccgctatgcgcagatttgctttgagctgttcggcgatcgcgtgctgcactggtttaccttcaacgagccgatcgtgccggtggaaggcggttatctgtacgacttccactaccccaacgtggtggattttcgtcgggcggccaccgtggcgtatcacaccgtgctggcccatgcgaaagcggtgcaggcctaccgcgccgggcattacgcgggggagattggcatcgtgctgaacctgacgccgtcgtacccgcgctcgcagaacccggcggacgtgaaggcggcgcacatcgcggacctgatgtttaaccgcagcttcctcgacccggtcctgcgcggcgaatacccggcggacctggtcgcgctgctgaaatcctgcgatcaattacccgcctgtaaaccggaagacggtttcctgattgcggaagggaaaatcgacctgctcggcgtgaactactatcagccgcgtcgcgtgaagtgtcgcgacaccgcggtgaacccgcaggcgccgtttatgccggagtggttctttgatagctacgagatgccgggccgcaagatgaacccgtaccgcggctgggaaatctacgagccgggtatttacgatattctggtcaacctgcgcgacaattacggcaaccctcgctgctttatttctgaaaacggcatgggcgtcgaaaacgagcagcgctttattgaaaacggccagattaacgatcaataccgcatcgagtttatttccgaacatttagcctggctgcataagggtattagcgaagggtgcaattgtcttggctatcatatgtggacgtttattgataactggtcgtggtgcaacgcgtataaaaatcgctacggatttatccagctcgatttagagacgcagaaacgcaccattaagaaaagcggagagtggtttgccgccaccgcgttaaataatagttttgat

SEQ ID NO: 20099 - DNA, 983 bp, Enterobacter cloacae
gtgagggcatcaggccacacacaaccatgctatgctgttgaccgaattaacgacaacatcgcaggggagaacatgggttccacacgtaaagggatgctaaacgtcctgatcgccgccgttttatggggcagttccggcgtttgcgcgcagtacatcatggagaaaagccacatttcttcgccatacctgaccatggttcgcctgctgtttaccggcgtgatcctcctgacgctttctttcgttcacggcgacaagattttctcagtgatcaaacatcgcaaagacgccctcagcctgctgtttttctcgctggtcggcgcgctcaccgtgcagctcaccttcctgctaacgattgaaaaatccaacgccgcgaccgctaccgttctgcagtttctgtcaccaaccattatcgtggcgtggttcgcgctggcgcggaaaaagcgccctggcgtgtttgttttatccgcgattgtgacctcgcttgtcgggacgttcctgctggtcacccacggcgacccgacctcgctctccatctcgcctgccgcgttgttcttcggtatcgcctcggcgtttgccgcggcgttttacaccacctatccgtcaacgctgatcgcccgctacggcacattgccgattgtcggctggagtatgttgattgccggattgatgttgacgccgttctacgccgggcgcgggacgaccttcgtcattgacggcagcctgctgctggcgtttttctatctggtggtgatcggcacggccctgacgttcagcctgtatctgaaaggcgcgcagacgatcggcgggccgaaggcgagcattctgagctgcgccgagccgctgagcagcgcgctgctgtcggtgattttgctgggggtggcgtttaccctgccggactggctggggacgctattgatcgtgtcgtcggtggtgttgatttcaatggattcgagaagacgggttcagacatcggcgtacctgat

SEQ ID NO: 20100 - DNA, 591 bp, Enterobacter cloacae
atgagtgaaatcatttccgcggcggttttattgatcctgattatggatccactgggaaacctgcctatcttcatgtcggtgctgaagcacaccgagccgaagcgccgccgggcgatcatgatccgcgagctgctcatcgccctgctggtgatgtttatcttcctgtttgccggtgaaaaaattctcgcattcctcaacctgcgcgccgaaaccgtttcgatttccggcgggattattctgttcctgattgccattaagatgattttcccgagcgcggaaggcagcagcagcggcctgcccgcgggtgaagagccgtttatcgtgccgctggcgattccactcgtcgccgggccaacgattctggccacgctgatgctgctgtcgcatcagtatccgaaccagatgagccatctggtgattgccctgctgatcgcctggggcgggacgtttatcatcctgctgcagtcgtcgctgttcctgcgcctgctgggtgagaaaggggtgaacgcgctggaacgcctgatggggctgattctggtgatgatggcaacgcagatgttcctcgacgggatcagggcgtggatgaaaggc

SEQ ID NO: 20101 - DNA, 663 bp, Enterobacter cloacae
atgacgtcgttttctgaatcacagcgcgtaaaagcgttgttctggctttcgcttttccatttgctggtgatcacctccagcaactatctggtgcagctcccgatctccatctttggttttcacaccacctggggcgcattcagcttcccgtttattttcctcgcgacggatttgaccgtgcgtatctttggcgcaccgctggctcgccgtattattttttcggtcatgctcccggcgctgttcatctcgtacgtggtttcgtctctgttttatatgggaagctggcagggctttgaggcgttaacccacttcaacctgtttgttgcccgtatcgctgccgcaagctttatggcctacgcgctggggcagatcctcgacgtgcacgtgtttaaccgcctgcgtcagaatcatcgctggtggatggcgccaaccgcctccacgctgttcggtaacgtgagcgatacgctggccttcttcttcatcgccttctggcgcagcccggatgcgttcatggccgaacactggatggaaatcgcgctggtggactactgcttcaaggtcctcatcagcattgtgttcttcctgccgatgtacggcgtgctgctcaatatgctgctgaaaaggctggcagataaatctgaaatcacggcattgcaggctggt

SEQ ID NO: 20102 - DNA, 387 bp, Enterobacter cloacae
gtgaaaggagcgttctgggccatatgcagcgtgctgttagtcagcgcggcgcagctgctgctgcgcaatgccatgcaggcactgccaccggtcagtgagatcctggtgtttgtttccgcgttgtggcacttctcgtccggcacgggcgcgctgctgctggggttgacggggtatgtggcgtccatgggctgctggtatctggcgctgcaccgtatggcgctcagcaaagcctatgccctgctgagcctcagctatattctggtgtggggcgccgcgatcctgctgcctggctggggggagcgcttctcctggcacgggctggtgggcgtcgggtttattattctgggcgtgttagtgatttttctgccccgaacgtcccaacgtgaa

SEQ ID NO: 20103 - DNA, 195 bp, Enterobacter cloacae
ggtgaaaacgagccgttcgacgtagcactgcgtcgcttcaaacgttcatgcgagaaagcaggtgttctggctgaagttcgtcgtcgtgagttttatgaaaaaccaacgaccgaacgtaagcgcgctaaagcttccgctgtgaaacgtcacgcgaagaaactggctcgcgaaaacgcacgccgtactcgtctgtac

SEQ ID NO: 20104 - DNA, 360 bp, Enterobacter cloacae
atgtccaccacactgtttaaagatttcaccttcgaagccgcccaccaccttccgcatgtccctgaagggcataaatgcggccgtctgcacgggcactcgttcatggtgcgtcttgagatcaccggtgaagttgatccgcataccggttggatcatggattttgccgagctgaaggcggcgtttaagccgacctacgatcgtctggatcattactacctgaatgatatcccgggccttgaaaacccgaccagcgaagtgctggcgaaatggatttgggatcagatgaagccgctggtgccgctgctgagcgcagtgatgatcaaagagacctgcaccgctggctgtatctatcgaggggag

SEQ ID NO: 20105 - DNA, 2431 bp, Enterobacter cloacae
catacgccgatgatgcagcagtatctgaagctgaaagcacagcatccggaaatcctgctgttttaccgtatgggcgatttttacgagctgttttatgacgatgctaagcgtgcatcgcagctgctcgacatctcgctaaccaaacgtggcgcatcggcaggcgagcccattcctatggcaggtatcccgcaccacgcggtagaaaactacctggcgaagctggtgaatcagggcgagtccgttgccatctgcgaacagatcggcgatccggcgacctcaaaaggcccggtggaacgcaaagtcgtgcgcatcgtcacgcctggcaccatcagtgatgaagccctgttacaggagcgccaggataacctgttggcagcgctgtggcaggacggtaaagggtttggctacgcgacgctggatatcagctccggacgttttcgtctgagtgaaccggctgaccgtgaaacgatggctgccgaactgcagcgcaccaaccctgcagaattgctctatgccgaagatttcgctgaaatggcgctgattgaaggtcgtcgcgggttgcgccgtcgtccgctgtgggaattcgaaattgataccgcgcgccagcagctgaatctgcagtttggcacccgcgatctgattggctttggcgttgaaaattccccgcgcgggctgtgtgcggcaggttgcctcctgcagtacgtgaaagatacccagcgcaccgccctgccgcatatccgctctatcactatggagcgccagcaagacagcatcatcatggatgccgccacgcgccgtaacctggagatcacgcagaacctggcgggtggcgtagaaaatacgctcgcgtcggtcctcgacagtacggttacgccaatgggcagccgcatgctgaaacgctggctgcatatgccgatccgcaataccgagacgctgctttgccgtcagcagacgattgccgcgctgcaggatcgctataccgagctgcagccggtcctgcgccaggtgggcgatctggagcgtatccttgcgcgtctggcactacgaacagcgagaccacgcgacctcgcgcggatgcgtcatgctttccagcagctgccggaactgcgcgcgcagctgagtgacgttgacagcgcgccggtacagaaactccgcgaaaccatgggcgaatttaccgagcttcgcgaactgctggagcgtgccattatcgatgcgcctccggttctggtgcgtgatggcggcgtgattgccccgggctacaacgaggagctggacgaatggcgcgcgctggccgatggtgcgacggactacctcgataagctggaaatccgcgagcgcgagcgtcttgggctcgacaccctgaaagtggggtataacgcggtacacggttactacattcaaattagccgcgggcagagccacctggcgccgattcactacgtgcgtcgccagacgttgaaaaacgccgaacgctacatcattcctgaactgaaagagtacgaagacaaagtcctcacctcgaaaggcaaggcgtgggcgctggaaaaacagctttatgacgagctattcgacatgctgatgccgcacctgggcgacctgcagcagcagcgccagcgcgcccccggagctggatgtgctggtcaatctggcagaacgcgctgaaacgctgaactacacctgcccgacctttaccgataagcccggcattcgcatcactgaaggccgtcaccctgtggtagagcaggtgctcaacgaaccattcatcgccaacccgctgagcctgtcaccgcagagaagaatgttgatcattaccggtccgaacatgggcggtaagagtacctatatgcgtcagacggcgcttattgcgctgctcgcgtatatcggcagctacgtcccggcgcaaaacgtggagattggccccatcgaccgcatctttacccgcgtcggggctgcggacgatctggcgagcggacgctcaaccttcatggtcgagatgaccgaaacggcaaacattctgcataacgcgacggagcacagcctggtgctgatggacgaagtcggacgcggaacgtcaacctatgatggtctgtccctggcatgggcctgtgcggaaagccttgcgaataaaatcaaggccatgacgctttttgccacccattatttcgaactcacgcagctgccggagaaaatggaaggtgttgcgaacgttcatctggatgcgctggagcacggcgataccattgccttcatgcatacggtgcaggatggcgcggcgagcaagagctatggcctggccgtcgcggcgctggcaggcgtaccgaaggacgtgatcaagcgcgcgcgtcagaaactgcgtgaactggaaagcctgtcaccgaatgcggcggcgacgcagattgatggcacccagatgtcgctgctggtgcctgcg

SEQ ID NO: 20106 - DNA, 605 bp, Enterobacter cloacae
atggccgcccatgatgagaacgtcgtctggcatcctcatccggtgaccgtcgctcagcgcgaacagctccacgcgcaccgtggggttgtgctgtggtttaccgggctgtccggctcgggtaaatcgacggtggcaggcgcgctggaagaggcgttgcatcagcagggcgtaagcacgtacctgctggatggcgataacgtgcgtcacggcctgtgcagcgatttagggtttagcgacgatgaccgcaaagaaaacatccgccgggtgggcgaagtcgccagcctgatgctgacgccgggctggtggtgctgaccgcgtttatctccccgcaccgcgccgagcgccagatggtgcgcgaacgcgtgggccaggatcgctttatcgaggtgtttgtcgatacgccgctggagatttgcgaagcgcgcgacccgaaagggctgtacaagaaagcgcgtgccggagagctgcgcaacttcaccggaattgacgcggtatacgaagcgcctgaatcgcctgaaattcacctggaaggtcaacaattggtaacaaatttagtaagccaattattagacctgctcaggcgggacgatattatcagatcctga

SEQ ID NO: 20107 - DNA, 708 bp, Enterobacter cloacae
atggcagtaactttttcggacgtatgcgccgtggtgccggccgcaggttttggccggcgcatgcagacagaatgtcccaagcagtacctctctattggcgataaaacgatcctcgagcacgccgtggcggcgctgctggcgcacccgcgggtgacgcgtgtgatcgtcgctatcagccctggcgatgcgcgcttcgcgcagctgccgctggcaaatcatccacagattaccgtcgttgacggtggcgccgagcgcgccgattccgtgctggcgggcattcaggccgccggcaacgctccgtgggtgctggtgcatgacgcggcgcgtccttgcctgcatcaggacgatcttgcgcgcctgctggcgctgagcgaaacaagcaaggttggcgggattctggccgcaccggtgcgcgacaccatgaagcgcgccgagccgggcaaacaggctatcgcccacaccgtcgatcgcgtcgatttatggcacgcgctgacgccacaatttttcccccgcgaattactccacgactgcctaacgcgagcgcttaaagaaggcgcgaccatcacggacgaagcctccgcgctggagtattgcggtttccaccctgagcttgttgaaggacgcgctgataatataaaagtgacgcgtccggaagatttacagctcgcggaattttatcttacccgttcgacccatcaggagaaggca

SEQ ID NO: 20108 - DNA, 475 bp, Enterobacter cloacae
atgcgaattggacacggttttgatgtacacgcctttggcggagaaggcccaattatcattggcggcgtgcgcattccctatgaaaaaggactgtggcgcattctgatggcgacgtggcactgcatgcgctgaccgacgcgctgttgcgcgctgccgcgctgggtgatatcggcaagctgttcccggacaccgacccggtatttaaaggggcggacagccgcgagctcttgcgcgaagcgtggcgccgcattcaggcgaaaggctacaccctcggcaacgtcgacgtgacgattattgcccaggccccgaaaatgctgccgcacattccgcagatgcgcgtgtttattgcagaagatctgggctgccatatggacgacgtgaacgtcaaagcgacgacgaccgagaagctgggctttaccgggcgtggcgaagggattgcctgtgaggccgtggcgctgctggtgaaggcgagcaa

SEQ ID NO: 20109 - DNA, 1323 bp, Enterobacter cloacae
atgtggatccgcccgttgcaggcggaactgagcgataacacgctggctttgtatgcgccaaaccgttttgtgctcgattgggtaagggacaagtaccttaataacatcaatggactgctgaacgatttctgcgggtctgatgccccgcagctgcgctttgaagtgggcacaaagccggtcacccaaaccgttcgtgaaaccgtgaacgtagcagcacctgctcaggccgcgcctgctccggcccctcgcgtcgcacccgctcgtcagggctgggataatgtccccgcaccggctgagccaacctaccgctctaacgttaacgtgaaacacacgttcgataacttcgttgaaggtaagtcgaaccagctggcgcgcgcggcggctcgtcaggttgctgataaccctggtggggcctacaacccgctgttcctttatggcggtacgggtctgggtaaaacgcacctgctgcatgcggtgggtaacggcattatggcgcgcaagcccaatgccaaagtggtgtatatgcactccgaacgcttcgttcaggacatggtaaaagccctgcaaaacaatgcgatcgaagagtttaaacgctactatcgttctgttgacgcgctgctcatcgatgacatccagttctttgccaataaagaacgatcgcaggaagagtttttccacacctttaatgccctgctggaaggcaatcagcagatcattttgacctcggatcgttacccaaaagagatcaacggcgttgaagatcgtctgaaatcccgcttcggctggggcctgacggtggcgatcgagccaccggagctggaaacccgcgtcgcgatcctgatgaagaaagccgatgaaaacgacattcgcctgccgggcgaagtggcgttcttcattgccaagcgtctgcgctccaacgtgcgtgagctggaaggggcgctgaaccgcgttatcgccaatgccaacttcactggtcgtgcgatcaccatcgattttgtgcgtgaagcgctgcgagatttgctggcattgcaggaaaaactggtcactatcgacaatattcaaaagacggtggctgagtactacaagatcaaagtggcagatttactgtctaaacgtcgttcccgctcggtggcgcgtccgcgtcagatggcgatggcgctggctaaggagttaaccaaccacagtctgccggaaatcggggatgcgtttggtggccgtgaccatacgaccgtgctgcacgcttgtcgcaagattgagcagttacgcgaagaaagccacgacataaaagaagatttttccaatctaatcagaacattatcatcg

SEQ ID NO: 20110 - DNA, 1102 bp, Enterobacter cloacae
atgaaatttaccgttgaacgtgaacatttattaaaaccgctgcaacaggtgagtggcccattaggtggccgcccaacgctgcctattctcggaaacctgctgcttcaggtcgcggacggtacgctgtcgctgaccggtacagatctggaaatggaaatgatcgcgcgcgttacgctgacgcagccgcacgacgcgggcgcgaccacggttccggcacgtaaattctttgatatctgccgcgggctgccggaaggcgctgaaatcgccgtgcagctggaaggcgaccgtatgctggtgcgctctggccgcagccgtttctcgctctccacgctgcctgctgcggacttcccgaacctggacgactggcagagcgaagttgaattcaccctgccgcaggcgacgatgaagcgtctgattgaagccacgcagttctccatggcgcatcaggacgtccgttactacttaaacggcatgctgttcgaaaccgaaggtgaagagctgcgtaccgtagccaccgacggccaccgtctggcggtctgttctatgccgattggcgacgcgctgccaaaccattcggtgatcgtgccgcgtaaaggggtgattgagctgatgcgtatgctcgacggcggcgacacgccgcctgcgcgtgcagatcggcagcaacaatatccgcgcacacgtgggcgattttgtcttcacttcgaagctggttgacggtcgtttccctgattatcgccgcgtattgccgaagaatccggacaaaacgctggaagcaggctgcgacagcctcaagcaggcctttgcccgtgcggccattctctcaaacgagaaattccgcggcgtgcgcctgtacgtgagtgaaaaccagatcaaaatcaccgctaacaacccggagcaggaagaggcagaagaaattctggacgtcacctacgccggaaccgagatggaaatcggctttaacgtcagctacgtgctggatgtgctgaatgcgctgaagtgcgagaacgtgcgcattctgctgaccgactccgtttcaagcgtacagattgaagatgccgcatcacagtcggctgcttatgttgtcatgccaatgagactgtaa

SEQ ID NO: 20111 - DNA, 2409 bp, Enterobacter cloacae
atgtcgaattcttatgactcctccagtatcaaagtcctgaaagggctggatgcggtgcgtaagcgcccgggtatgtatatcggcgacacggatgacggcaccggtctgcaccacatggtattcgaggtggtagataacgctatcgacgaagcgctcgcgggtcactgtaaagacatcgtggtcaccatccatgcggataactccgtctccgtcaccgatgatggtcgtggcatcccaaccggtattcacccggaagagggcgtctctgccgcggaagtgatcatgaccgtgctgcacgcaggcggtaagttcgacgataactcctataaagtttccggcggcctgcacggcgtaggcgtctccgtggttaacgccctgtcgcagaagctggagctggttatccagcgcgaaggcaagatccaccgtcagctctatacgcacggcgtgccgcaggcaccgctggccgttactggcgataccgacaaaaccggtaccatggtgcgtttctggccgagcctcgaaaccttcaccaacgtcaccgaattcgagtacgacatcctggcgaaacgcctgcgtgaactgtcgttcctgaactccggcgtctctatccgcctgcgcgacaagcgtgacggcaaagaagaccacttccactacgaaggcggtatcaaggcgttcgttgagtatctgaacaagaacaaaacgcctattcacccgaatatcttctatttctccaccgaaaaagacggtatcggcgtggaagtggcgctgcagtggaacgacggtttccaggaaaacatctactgcttcaccaacaacattccacagcgtgacggcggtacgcaccttgcaggcttccgtgcggcgatgacccgtaccctgaacgcctacatggacaaagaaggctacagcaaaaaagcaaaagtcagtgccaccggtgatgacgcccgtgaaggcctgattgccgttgtctcagtgaaggtgccggatccgaagttctcctcacagaccaaagacaagctggtctcttccgaggtgaaatcggcggttgaacagcagatgaacgaactgctgagcgaatacctgctggaaaacccgtccgacgcgaaaatcgtggtgggtaaaattattgatgcggcgcgtgcccgtgaagcggcgcgtaaagcccgtgaaatgacccgtcgtaaaggcgcgctggacttagcaggcctgccgggcaaactggctgactgccaggaacgcgacccggcgctgtccgaactgtacctcgtggaaggggactccgcgggcggttctgcgaagcagggccgtaaccgtaagaaccaggctatcctgccgctgaagggtaaaatccttaacgttgagaaggcgcgcttcgacaagatgctctcttctcaggaagtggcgacgctcattaccgcgctgggctgcggcatcggccgtgatgagtacaacccggacaaactgcgctaccacagcatcatcatcatgaccgatgcggacgtcgacggctcgcacattcgtacgctgctgttgaccttcttctatcgtcagatgcctgaaatcgttgagcgtggccacgtctacattgcacagccgccgctgtacaaggtgaagaaaggcaagcaggaacagtacattaaagacgacgaagcgatggatcagtaccaaatcgcaatcgctcttgatggcgcaaccctgcatgcgaactcgcacgcccctgcactggccggcgagccgctggagcgtctggtgtccgagttcaacgcgacgcagaaaatgatcacgcgtatggaacgccgctatccgaaaacgctgctgaaggagctggtttatcagccaaccctgaccgaagccgatctgagcgacgagcagaccgtgacccgctgggtgaacgccctggtgaccgatctcaacgagaaagagcagcacggcagcatgtggaaatgcgatatccagcagaacgccgataagcagttcgagcctattattcgcgtgcgtacccacggcgttgacactgactatccgctggaacacgagtttgtgaccggtccggaataccgccgcatctgcacgcttggcgagacgctgcgtggcctgatcgaagacgatgcgttcatcgaacgtggcgaacgtcgtcagccggtagccagcttcgagcaggcgctggactggctggtgaaagagtctcgtcgtggtcttgcgatccagcgctataaaggtctgggtgaaatgaacccggagcagctgtgggaaactaccatggatccggaaagccgccgcatgctgcgcgtcaccgttaaagacgcgattgctgcggaccagctgttcacgaccctgatgggcgatgcggttgaaccacgtcgtgccttcatcgaagagaacgccctgaaagcggcaaatatcgatatt

SEQ ID NO: 20112 - DNA, 810 bp, Enterobacter cloacae
atggctatcaaactcattgcaatcgacatggacggcacgctgctgctgccagaccacaccatttctccagccgttaaaaacgcgatcgccgcggcgcgcgcaaagggcgtgaatgtggtcctgaccacggggcgtccgtatgcgggcgtacacagctatctgaaagagctgcacatgaatcagccgggcgactactgcatcacctataacggcgcgctggtgcagaaagccgctgacggcagtacggttgcgcaaaccgcgctgagctacgatgactatctgttcctggaaaaactgtcccgtgaagtgggttcccacttccacgcgctcgatcgcaatacgctctatacagccaaccgcgatatcagctactacacggtacatgaatcctacgttgcgaccattccgctggtgttctgtgaagcggagaaaatggacccggcgacgcagttcctgaaagtgatgatgatcgacgagccagagatcctggataaagcgattgcgcgcattccggcggaggtaaaagagaagtacaccgtgctgaaaagtgcgccgtacttcctcgaaatcctcgataaacgcgtcaataaaggcaccggtgtcaaatcactggccgatgcgctgggtattaaacaggaagagatcatggcgctgggtgaccaggaaaatgacatcgcgatgatcgaattcgccggtatgggcgtggcgatggataacgccattccatccgtgaaagaagtggccaacttcgtgacaaaatccaacctggaagacggcgttgcttacgcgatcgagaagtttgtgctgcag

SEQ ID NO: 20113 - DNA, 1503 bp, Enterobacter cloacae
atgagttccgctttttcacggctgatcgccgtcgtcgccagcttttttatcttctccgccgcctggttttgcctgtggagcatcagcctgcacctggtggaacgccccgagctggcggtgctgctgtttcccttcgggctgcgtctgggcttaatgctccagtgtccgcgcgcctactggccggttttgctcggcgctgagtggctgatgctggtctggctggcgcaggaagttgccctcgcgcacctgcccttattgatgaccggaagcctgctcacgcttctcccggttgccctcatctcccgctaccgccaccagcgcgactggcgcacgctgctgcgtcagggggcggcgctgatggccgccgcgctgctgcagtcgcttccgtgggtcggcgagaaggagatgctcaatgccctgctgctgaccctcaccggcggcctgacgctggcgccaacctgcctcgtgatctggcactatctcaccagcaccgtctggcagccgctcggcccggcgctggtttcccagccggtgaactggcgcgcccggcacctcatctggtatctgctgctgtttgtggtgagcctgtggctccagcttggcctgcccgccgagctttcacgcttcacgccgttctgcctggcgctgccgattatcgccctggcctggcactacggctggcagggggcgctgatcgccacgctgatgaacgccatcgcactgatcgccagccagacctggcacgatcatcctgttgatttactgctttccctgctggctcaaagcctgaccgggctgctgctgggagcgggcattcagcgcctgcgcgagctgaaccagtccctgcaaaccgagctggcgcgcaaccgccgtctggcggagcgcctgctggagacggaagagagcgtgcggcaggaggtcgcccgcgagctgcacgacgatatcggccagaccatcaccgccattcgcactcaggcgggcattgtccagcgcctggcagcggaaaatgcgggcgtgaagcagggtggggcgcatatcgaacagctttcgctgggagtctatgactccgttcgtcgcctgttaggacgactgcgcccgcgccagcttgacgacctgtcgctggagcaggcggtgcgttccctgatgcgcgagatggagctggaaagccgcggaatagtgagccatctcgactggcgcattaacgaatctacgctcagcgaaggccagcgcgtgacgctgttccgcgtctgtcaggaagggctgaacaatatcgtcaagcacgccagcgccagcgcggtcacgatccagggctggcagcaggacgacagcctgaagctgataattgaagacgacggctgcggcctgccgccgggctccggccagcagggttttggcctggcgggcatgcgggagcgcgtcaaggcgctgggcggcacgctgaacctctcctgcacccacgggacgcgcgtcagcgtcagcctgccgctacggagttaccatgtt

SEQ ID NO: 20114 - DNA, 549 bp, Enterobacter cloacae
gtgagcggcccacccgaacttgcttgccgtaacgggagcatatgcgaatccatcaggatttgcaggaataactgtgcacaaaattacactgtgccgaactcgcttctcagaaggagatttagtatgcgtaactatgatttatcccccctgctgcgtcagtggattggttttgacaaactggctaacgccctgcaaagcaccaccgagcaacagacgtttccgccgtacaacatcgaaaaaagcgacgataaccactatcgcattacccttgcgctggccggtttccgccaggacgatctggacatccagcttgaaggcactcgcctgaccgtgaaggggtcgccggaaaaacaagagaccgagaccaaatggctgcatcaggggttggttaatcagccgtttagcctgagctttaccctggcagaccatatggaagtgtccggcgcaacgtttaccaacggtctgctgcatatcgacctgatccgcaacgtgccggaagccatcgcgccgcagcgtatcgccattagcgagcggccggcgttgaacagt

SEQ ID NO: 20115 - DNA, 1295 bp, Enterobacter cloacae
ttgtgtccttacatgtccatatttacgccaaaaagtagacctgattggtcaaaataaaaccatgaatgcgatcacgaatcgcagcggcacgccatgttcgcgcatcagtaagttcttatgctcacctcaggccagcaaaaaaccataaaggcctctacccctacaggttgtttcatgaggatttaaaaatgctcagtcaaatacaacgttttggcggtgccatgtttaccccggtgttgctgtttccgttcgccgggatcgtggtgggaatcgccatcatgcttcgcaacccgctgtttgtcggggaagccttaacggcccccgatcatcttttcgcgcagattgttcacatcattgaagagggcggatgggcggtgtttcgcaatatgccgctgatttttgccgttggcttaccgattggcctggcgaagcaggcgcagggccgcgcctgtctggcggtgctgataagctttctgacctggaactacttcatcaacgcgatggggatgacctggggccacttcttcggcgtcgacttctccgccgagccgacggcgggaagcgggctggcgatgattgccggcatcaaaacgctcgataccagcatcatcggcgccattgtgatttcaggcatcgtcaccgccatccacaaccgctacttcgaaaagccgctgccggtctttctggggattttccagggcagctcgtttgtcgttatcctcgcgttcttcgtcatgatcccctgcgcctggctgacgctgctgggctggccaaaagtacagatgggcattgagtccctgcaggcgttcctgcgctccgccggtgcgctgggcgtgtgggtgtataccttcctggaacgcattctgatcccaaccggattgcaccacttcgtctacggtccgttcatcttcggcccggcggcggtggaaggcgggattcaggtctactgggcacagcacctgcaggagttcagccagagcaccctgccgctgaaaaccctcttcccggaaggcgggttcgcgctgcacggcaactctaaagtgtttggctcggtcgggattgcgttcgctatctggtacaccgcgtcgccggaaaaccgcgtcaaggtggcggggctgctggtgccggccacgctcaccgccgtgctggtgggcatcacggaacctcttgagttcaccttcctgtttatctcgccgctgctgtttgccgtccatgcggtgctggcggcgactatggcaacggtgatgtacgcctttggcgtggtcgggaacatgggcggcggcctgctggaccag

SEQ ID NO: 20116 - DNA, 276 bp, Enterobacter cloacae
cagtatcgtatgagaaggtatcaaaacatccttaaagaacaaggcattacacagagcatgtccagaaaaggcaattgtctggataatgcagtcgtggaatgtttctttggaaccttaaagtcggagtgtttttatcttgacgagttcagtaatataagcgaactgaaggatgctgttacggaatatattgactactacaacagcagaagaattagcctgaaattaaaaggtctgagtccaattgaatatcgaacccagacctatgtgcctcgtgtt

SEQ ID NO: 20117 - DNA, 543 bp, Enterobacter cloacae
gaaattctggtggtcctgtttatctatttcggctcctcacagctgctgctgacgctgtcggacggcttcacgatcaatcttggctttgcgcagatcccggtgcagatgcagattgaaaacttcgacgttagcccgttcctgtgcggcgtgattgctctctccctgctctactccgcgtacggtcgcaaaccctgcgcggtgcgctgaaaaaaatgccgcagggcagtgggagtccggccaggcgttaggcttgtcgaaatcagcgatcttcttccgcctggtcatgccgcagatgtggcgtcaaaaaaaccgggcctcggcaaccagtggctggtgctgctgaaagataccgcgctggtgagcctgattagcgtcaatgatttgatgctgcaaaccaaaagcatcgccacccgcacccaggagccttttacctggtacattgtggcggcggctatctacctggtgatcacgttgctcagtcagtacatcctcaagcgttatggactgggtgcgacgcgctttgaacggagaccaggctgatgc

SEQ ID NO: 20118 - DNA, 1136 bp, Enterobacter cloacae
atgattatcaataacgtcaggctggtgctggaaaatgaagtcgttgatggctcggttgaagttcatgaaggcgttattcgcgcctttgccgaaacccagagccgtactcctgaagcgatggacggtgaaggcggctggctgctgccggggctgattgagcttcataccgataatctggacaaattcttcaccccgcgcccgaaggtcgactggcccgcccattcggcgatgagcagccacgacgcgctgatggtagccagcggcattaccaccgtgctggacgcggtggcgattggcgacgtgcgcgacggcggcgatcgcctggagaatctcgagaagatgatcaacgccgtggaggagacgcaaaaacgcggcctcaaccgcgccgagcaccgtctgcacctgcgctgcgagctgccgcaccacaccaccctgccgctgtttgaaaagctggtcggacgcgagccggtctcgctggtctccctgatggaccactcgccggggcagcgccagttcgccaacattgaaaagtatcgcgaatactatcagggcaaatattctctcagcgatgcggagatggcgcgctacgaggaagagcagctggcgcttgcggcgcagtggtcgcagccaaaccgtctcaggattgccgcgatgtgccgggaccgcaatatcgccctggccagccatgacgacgccacgcacgatcacgtgcgcgaatcccaccagcttggcagcgtgatcgccgaatttcccaccacgtttgaagcagcggaagcctcccgcagcacggcatgaacgtgctgatgggcgcgcctaacatcgtgcgcggcggatcgcactccggcaacgtcgcggcaagcaggcttgcctcccttggtctgctggatatcctttcatccgactactaccccgccagcctgctggatgcggcattccgggttgccgacgacgagaacaacacctttacgctgccgcaggcgattcgactggtgacgaaaaacccggcctcggcgcttaatcttcaggatcgcggggaaatcgccgagggtaaacgcgcggatctggtactcgcccaccgcaagggcgagcacgttcacatcgaccacgtctggcgtcagggaaaaagggtgttctga

SEQ ID NO: 20119 - DNA, 858 bp, Enterobacter cloacae
atgccattgatctctcttgccgacggtctggagcacgccagggcgcatcgctacgcgctgggcgcgtttaacgtgctcgactcccacttcctgcgcgcgctgttcgccgccgcgaagcaggaacgctcgccgtttatcatcaacatcgccgaagtgcattttaagtacgtttctctggattcgcttgtcgaagcggtgaagttcgaggccgcccgtcacgatattcccgtggtgctcaatctcgaccacggcctgcatttcgaggcggtggtgcgcgccctgcgcttagggttcagctcggtgatgtttgacggctctacgctaagctatgaggagaacattcgccagacgcgggaggtggtgaagatgtgccacgcggtcggcgtgtcggtggaagcggagctgggcgcggtcggtggcgatgaaggcggcgcgctgtacgggcatgcggatgaagcgttctttaccgacccgcagctggcgcgcgaatttgtcgattcaaccggcattgacgcgctggcggtcgccatcggcaacgcgcacggcaaatacaagggcgagccgaaactcgatttcccacgcctggacgccattcgccagcatacggggctgccgctggttttacacggcggctccgggattagcgatgccgacttccgccgcgccatcgagctgggcattcataaaataaacttctataccggcatgtcgcaggccgcactcgccgccgtggagcagcgcatggcgaaccgccagccgctgtacgatgagtttgccgaactgctgctggggatagaagaggcgattaccgatacggttgccgaacagatgcgcatcttcggcagcgcggggcaggca

SEQ ID NO: 20120 - DNA, 2148 bp, Enterobacter cloacae
atgaaaaaagtcgtcacggtttgcccttattgtgcctcaggttgcaagatccacctggtggtcgataacggcaaaatcgtccgggcggaggccgcacaggggaaaaccaaccagggcacgctatgcctgaaaggttactacggctgggattttattaacgatacccaaatcctcaccccgcgcctgaaaacccctatgatccgccgcgagcgcggcggcaagctggaagccgtctcctggagcgaggcgctggattacgtcgccacgcgtctgagcgccatcaaggccaagtatggcccggatgcgattcagaccaccggctcttcacgcgggacggggaatgaaaccaactatgtgatgcaaaaattcgcgcgcgccgttattggaaccaataacgtcgactgctgcgctcgcgtctgacacggcccatcggttgcaggtctgcaccagtcggtcggtaacggcgcaatgagtaatgccatcaacgagatagataacaccgatctcgtcttcatctttggttataacccggcggattctcatcctatcgtcgcgaaccacgttattcgcgctaagcagaacggggcgaaaatcatcgtctgcgatccgcgcaaaattgaaaccgcgcgcattgcggatatgcacatcgcgttgaaaaacggctcgaacatcgcgctgttgaacgcaatggggcacgtcattattgaggagaacctgtacgaccaggcgtttgtcgccacccgtacggaaggctttgaagagtataagaaaatagtcgaaggctatacgcctgaatccgtcgaagcgatcaccggcgtcacgcgcaggagatccgccaggcggcacggatgtatgccggggcgaaaaccgccgccattctgtggggaatgggcgtgacccagttctatcagggcgtggaaaccgtgcgttctctgacgagtctcgcgatgctgaccggcaatctgggtaaagcgcacgtcggcgttaacccggtgcgtggtcagaataacgttcagggtgcctgcgatatgggcgcgctgcctgatacctatccgggctaccagtacgtgaagttcccggaaaaccgcgagaaattcgcgaaggcctggggcgtggaaagcctgccggaacacaccgggtatcgcatcagcgagctgccgcaccgcgcggcgcacggcgaagtgcgtgcggcctacatcatgggtgaagatcctctccagaccgacgccgagctgtctgccgtgcgcaaagggtttgaggatgttgacctcgtcatgggtcaggatatcttcatgacgaaaaccgcggcggcttgcggatgtgattttaccgtcgacctcctggggcgagcatgaaggcgtctacacggcggcggaccgcggcttccagcgcttctttaaggcggtcgagccgaagtgggacctgaaaacggactggcagatcatcagcgaaatcgccacccgcatgggctacccgatgcgctacaacaacactcaggagatctgggacgaattgcgcagtctgtgtccggacttctacggggcaacctacgaaaaaatgggtgagctgggatacatccagtggccgtgccgggatgagtccgaagccgaccaggggacgtcatacctctttaaagagaagttcgacaccccgaacgggctggcgcagttcttcacctgcgactgggtcgcgccgatcgataaactcaccgacgagtatccgatggtgctctccaccgtgcgtgaagtgggccactactcctgtcgttcgatgacgggtaactgcgccgcgctggcggcactggcggacgaaccgggctacgcgcaaatcaacaccgccgacgcagcgcgcctcggcattgaggacgaagcgctggtgtgggtgaattcgcgcaaaggccggatcattacccgtgcgcaggtcagcgatcgtccgaacaaaggggcggtctatatgacctaccagtggtggattggcgcctgtaacgaactggtcacggagaacttaagcccgataaccaaaacgccggagtataaatactgcgccgtacgcgtggagccgattgcggatcagcacgcagcggaacagtacgtcatcgacgaatataacaagctgaaagcccgactgcgcgaaagcgcaatgggttga

SEQ ID NO: 20121 - DNA, 849 bp, Enterobacter cloacae
gtgaaagtactcaacgagctaaggcagttttaccctcttgatgagcttctcaaggcagcggagataccgcgcagtacgttttattaccatctaaaggctctcagcaagcctgataagtatgcggatgttaaaaagcgtattggtgagatttatcacgagaataaaggtcgttacggataccgtagggtaacgttgtctctccatcgagacggggaacggattaaccataaagccgttcagcgcctgatgggaaccctctcgcttaaggcagcgattaaggtcaagcgatacagctcctacagaggagaggtagggcaaaccgcccccaatgttctccaaagggatttcaaggctacacggccaaacgagaagtgggttaccgacgttactgaatttgcagtcaatgggcgaaagctgtatttgtctccagtaatagatctcttcaacaacgaagttatttcttacagcctgtcggaaagacctgtgatgaacatggtcgagaatatgctcgatcaggcattcaaaaagcttaagcctcacgagcatcctattctgcactctgaccagggatggcagtatcgtatgagaaggtatcaaaacatccttaaagaacaaggcattacacagagcatgtccagaaaaggcaattgtctggataatgcagtcgtggaatgtttctttggaaccttaaagtcggagtgtttttatcttgacgagttcagtaatataagcgaactgaaggatgctgttacggaatatattgactactacaacagcagaagaattagcctgaaattaaaaggtctgagtccaattgaatatcgaacccagacctatgtgcctcgtgtt

SEQ ID NO: 20122 - DNA, 1644 bp, Enterobacter cloacae
atggaaatcttcttcacaatactcatcatgacccttgtggtctcgctatccggggtggttacacgcgtactgccctttcaggtccccctgccattaatgcaaattgccatcggcgcgctgctggcgtggccgacgtttggcctgcacgtggaatttgaccccgaactgttcctcgtgctgtttatcccgccgctgctgtttgccgatggctggaaaacgcccacgcgcgaattccttgagcacgggcgcgagatcttcggcctggcgctggcgctggtggtggtcaccgtcgtcgggattggttttctgatctactgggcggtaccgggtattccattaataccggcttttgcgctggccgccgtgctgtcgccaaccgatgccgtggcgctgtccggcattgtgggtgaaggccgtattccgaagaaaatcatggggattttacagggtgaggcgctgatgaacgacgcctccggcctggttgccctgaagtttgccgtggccgttgcgatgggcacgatggtgtttaccgtcggcggcgcgacgctggaattcttcaaggtggcgattggcggtattctcgcaggcttcgtggtgagctggctgtatggccgctcattgcgcttcctcagccgctggggcggcgatgagcccgcaacgcagatcgtactgctgttcctgctgccgtttgcctcttatctgattgccgaacatatcggcgtgtcgggcattctggcagcggttgcggcggggatgaccattacccgttccggcgtaatgcgccgtgcgccgctggccatgcgcctgcgtgccaacagcacctgggccatgctggaatttgtctttaacggcatggtgttcctgctgttgggcctgcagctgccgggcattatggaatcctcgctggtggcggccgaagccgatccgaacgttgaggtctggatgctgtttaccgacatcgtgctgatctacatggcgctgatgctggtgcgtttcggatggctgtggacgatgaaaaacttcagcgtacgtttcctgaagaaaaagccgatggagtttggttcgtggacaacgcgtgaactgctgatcgcctcttttgcgggcgtacgcggggcgatcacccttgccggtgtactctccattccgctgctgctgcccacgggcgatgtcttcccggcgcgctacgagctggtcttcctggcggcgggcgtgattctgttctccctgtttgtcggcgtgattatgctgccgattttactccagcatattgatgccggtgattcgacccagcagcataaagaggagcgtattgcccgggcagccaccgccgaagtggcaattgtcgcgattcagaagatggaagagcgtctggccgcggatgcggaagagaacatcgacaatcagctgctgacggaggtcagttcccgcgtgattggtaacctgcgccgccgcgcggacgggcgtaacgatgtggaaagctcgctgcaggaggaaaacctggagcgccggttccgcctggcggcgctgcgctcagagcgcgccgagctgtaccatctgcgcgccacgcggcagatcagcaacgaaacgctgcaaaagctgcttcacgatctggacctgctggaagcgctgttgatagagaatcag

SEQ ID NO: 20123 - DNA, 519 bp, Enterobacter cloacae
atgtcaaagccaaaataccccttcgaaaagcgccttgaagtcgtgaatcactacttcacaactgatgatggttacaggatcatctctgcacgttttggtgtgcctcgaacccaggtcaggacgtgggttgccctctatgaaaaacatggagaaaaaggtttaattcccaaacctaaaggcgttagtgctgatccagagttgcgcattaaggtcgtgaaagccgtgaccgagcagcagatgtccctcaatcaggctgctgctcactttatgcttgctggtagtggttctgtagccaagtggctgaaagtctatgaggagcacggagaagctggtttacgcgcactcaagatcggcaccaaaagaaacattacaatgtcagttgatccagaaaaagcggcgttagcattggagctgtcgaaagaccgacgtattgaggatcttgaaagacaagttcgattccttgaaatgcggcttacgtatctaaaaaagctgaaagccttagctcatcccgcgaaaaag

SEQ ID NO: 20124 - DNA, 672 bp, Enterobacter cloacae
atgaaacatatttttctgttgttgttactttttacatcgcttgtccgtgccgacgagattggcagccagtacaaagaacaggctgaagcgggtgacgcccgtgcccagtattatttggccgatacatactttagctccggtgacagcaagcaggccgcgctgtgggccgagaaagccgctaaaggtggcgacgtcgacgccatggggctgctctcgcaaatcctctttacccagggaaattatgcgcaagctaaggcactggcgcagcaggcaaccatcgcaggcagcaaacgcggcgcgatcatgctggcgcgcgtgctggtcaacactcaggcaggtaaaactgactatcctcaggccatcaaactgctgcaaacggcggccgaagatattgacaacgactctgcggtagatgcgcaaatgctgctggggctgatttatgccaacggcgttgaagtggcccaggacgacgtgcaggccgcctcgtggttcaagcggagctcggcactttcacgcacgggctactccgagtactgggcagggatgttgttcagacagggtgagaaaggctttatcacgcccaataaacagaaagcgctgtactggttgaacctgagctgtactgaaggctttgataccggatgcgaagagtttgatgcgctgagcggagag

SEQ ID NO: 20125 - DNA, 2017 bp, Enterobacter cloacae
tgtagcccaaataataaacaaagcttgtaaagcccctacaattaacgtttttgcgacatattattaacatcttacaaggagaaaaaaagccatgagccaaatacataaacacgacattcccgcaaatattgcggaccgttgcctgatcaccccggagcagtaccacgagaaatatcagcagtctatcaccgccccggacaccttctggggtgagcagggccatatccttgactggatcaaaccttatcagaaggtgaagaacacctcctttgcgcccggcaatgtctccattaaatggtatgaagatggcacccttaacctggcggcgaactgcctcgatcgtcacctcgccgagcgcgggaatgagacggccatcatctgggaaggcgatgacgcctcgcaaagcaaacatattacgtacaaagagctgcaccgcgacgtgtgccgcttcgccaacgtcctgctggaaaagggcattaaaaaaggcgatgtggtcgctatctatatgccgatggtgccggaagcggcggtggccatgctggcctgcgcgcgtatcggtgcgatccactcggtgattttcggcgggttctcgccagaggcggttgcgggccgtattgtcgattccagttcaaaactggtgatcaccgccgatgaaggcgtgcgcgccgggcgcggtatcccactgaagaaaaacgtcgacgaagcgctgaaaaacccgaacgtcaaaacggtcagtaacgtcatcgtccttaagcgtaccggcggcaaaatcgactggaacgaggggcgcgacctgtggtggagcgacctgatcgagaacgcgagcgaccagcatcaaccggaagagatgaacgcagaagatccgctgttcattctttatacctccggctccaccggtaagccgaaaggcgtgctgcacaccaccggcggctatctggtctatgcggccaccaccttcaaatacgtcttcgactaccatccgggcgacatctactggtgtaccgccgacgtgggctgggttaccggacacagctacctgctgtacggcccgctggcctgtggcgcaacaacgctgatgtttgagggcgtaccaaactggccgaccccggcgcgtatgtgtcaggtggtcgacaaacaccaggtcaacattctctacaccgcgccaacggcgatccgcgcattaatggctgaaggcgataaagccatcgaaggcactgaccgctcttcattgcgcatcctcggttccgtgggtgagccaatcaacccggaagcctgggagtggtactggaagaaaatcggcaacgagaaatgcccggtgatggacacctggtggcagaccgaaaccggcggcttcatgatcaccccgatgccgggcgccacgcagctgaaggccggttccgcaacccgtccgttcttcggcgtgcagcctgcgctggtggataacgaaggcaacccgctggaaggcgccaccgaaggcaacctggtgatcactgactcctggcctggtcaggcgcgtaccctgttcggcgatcacgatcgcttcgagcagacctacttctcgacctttaaaaacatgtacttcagcggcgacggcgcgcgtcgtgacgaagatggctattactggataaccgggcgcgtggacgacgtgctgaacgtctccggccaccgtctgggcaccgctgagattgaatcggcgctggtgtcgcatccgaagattgccgaagcggcggttgtgggcattccgcacaacatcaaaggccaggcgatttacgcctatgtcaccctgaaccacggtgaagaaccgtcgcctgagctctacgctgaggtgcgcaactgggtgcgtaaagagattggcccgctggcgacgccggacgtgctgcactggaccgactcgctgccgaaaacccgttccggcaaaattatgcgtcgtatcttgcgcaaaatcgcggctggagacaccagcaacctcggcgatacctcaacgctcgcggatcctggcgtggtggaaaaactgctc

SEQ ID NO: 20126 - DNA, 312 bp, Enterobacter cloacae
atgatccgcaaagcctttgttatgcaggttaacccggacgcgcataaggagtacgcgcatcgccacaaccccatctggcccgagctggaagcggtactgaaagaccatggtgcgcaccgctacgccatctatctcgacagagaacgcagcctgctctttgccaccgtggagattgattcggaggagcgctggaacgcggtcgcgagtactgacgtctgccagcgctggtggaaacacatgcgtgatgtcatgccgtcgaacccggacaacagcccggtgagtaccgggctggaagaggtgttttacctggac

SEQ ID NO: 20127 - DNA, 698 bp, Enterobacter cloacae
atgaataaaatcctgttagttgatgatgaccgagagctcacatcccttttaaaggagttgctcgacatggaaggtttcaacgtcctggttgcccatgatggcgagcaggcgctgagtctccttgacgacagcatcgatttacttttgctcgacgtgatgatgccgaagaaaaacggtattgatacgttgaaagagcttcgccagacacaccagactcccgtaatcatgctgaccgcacgcggcagcgaacttgaccgcgtactcggccttgagctgggcgcggatgactatttaccgaagccgtttaacgaccgtgaactggttgcccgtattcgcgctatcctgcgccgttcgcactggagcgagcagcagcaaaataccgacaacagctcacccacccttgaagtcgattccctgagcctgaacccgggccgtcaggaagcaagctttgatggccagacgctggaactgaccggcacggagttcaccctgctgtatctgctggcgcagacctcggccaggtggtttcgcgtgaacatctaagccaggaagtgctgggcaaacgcctcaccccgtttgaccgcgccatcgacatgcacatctctaacctgcgccgtaagctgccggagcgtaaagacggtcacccatggtttaaaaccctgcgtggtcgcggttatctgatggtttctgcttcatga

SEQ ID NO: 20128 - DNA, 315 bp, Enterobacter cloacae
atggctgaatggagcggcgaatatatcagcccatacgctgagcacggtaagaagagtgagcaagtaaagaaaattacggtttccattcctctgaaggtgttgaagatcctcaccgatgaacgtacgcgtcgtcaggtgaacaacctgcgccacgcgaccaacagcgaactgctgtgcgaagcgtttctgcatgcgtttaccggtcaaccgttgccgaacgatgaagatctgcgcaaagagcgcagtgatgaaatcccggaagaggcgaaggtgatcatgcgtgaactgggtattgacccggatacgtgggaatac

SEQ ID NO: 20129 - DNA, 843 bp, Enterobacter cloacae
atgagtcagacatcaaccttaaaaggccagtgcattgccgagttccttggtaccgggttgttgatattcttcggagtgggctgtgttgctgcactgaaagtggcgggtgccagttttggtcagtgggaaatcagtatcatctggggtctgggcgtggcgatggccatctacctgactgcaggggtttctggtgcacatcttaacccggcggtgacaatcgcactgtggctgttcgcgtgcttcgacggacgcaaagttgttcctttcattctttctcagtttgccggcgcgttttgcgcagcggcgttagtttacgggctttattacaatcttttcatcgacttcgaacagacgcatcatatggtacgcggcagcgtcgaaagtctggatctggcaggcatcttctcaacctaccctaacccgcatatcaattttgtgcaggcgttcgcagttgaaatggtgattaccgctattctgatgggcgttatcctggcgctgaccgacgacggaaacggcattccgcgcggcccgctggcacccctgctgattggtttgctgattgcggtgattggcgcatccatgggcccgctgaccggcttcgcgatgaacccggctcgtgatatcggaccaaaagccttcgcctttatcgccggctggggcgacgtcgccttcaccggtggcaaagacattccttacttcctggtaccgctgtttgcgccggttgtcggggctgcgctgggtgcgtttagctaccgcaaattaattggtcgccacttaccgtgcgacacctgtgtggaagaggagaaggaaacgacttctaccgcacaacaaaaagcttcgctg

SEQ ID NO: 20130 - DNA, 1506 bp, Enterobacter cloacae
atgaccgaaaaaaaatatatcgttgcgctcgaccagggcactaccagctcccgcgctgtcgtaatggatcatgacgcgaacatcgtcagcgtgtcacagcgcgaatttgagcaaatttatcctcgtccaggctgggtagaacacgacccgatggagatttgggcgtcacaaagctccacgctggtcgaagtgctggcgaaagccgatatcagttccgacgagattgccgcgattggtattaccaaccagcgtgaaacgacgattgtctgggaacgtgaaaccggtaagcccatttacaacgctatcgtctggcagtgccgccgtacatccgagatctgcgaacagctgaagcgcgacggtatggaagagtacgtgcgcagcgccaccggtctggtggttgacccgtatttctccggcaccaaagtgaaatggatcctcgaccacgtagaaggttcacgcgagcgtgctaaacgcggcgagctactgttcggtaccgtcgatacctggcttatctggaagatgacccagggacgcgtgcacgtaaccgactacaccaacgcctcgcgtaccatgctgttcaacatcaataccctggagtgggatgacaagatgctggacgcgctggacattccgcgcgcgatgctgcctgaagtgcgtaagtcttcagaagtgtacggtcagaccaacatcggcggtaaaggcggcacccgtattcctatcgccggtatcgccggtgaccagcaggcggcgctgttcggccagctgtgcgtcaaggaagggatggcgaagaacacctacggcaccggctgctttatgctgatgaacaccggcgagaaggcggtgaaatcagaaaacggcctgctgaccaccatcgcctgcggtccgcgcggcgaagtgaactatgcgctggaaggtgcggtgttcatggctggtgcatccattcagtggctgcgcgacgaaatgaagctgatcagcgatgcgttcgactccgagtacttcgcgaccaaagtgaaagacaccaacggcgtgtacgtggtgcctgcgttcaccggtctgggcgcaccgtactgggacccgtatgcacgcggcgcaattttcgggctgacgcgcggtgtgaactctaaccacattattcgcgccaccctggaatccatcgcctaccagacgcgcgacgtgctggaagcgatgcaggctgactccggtattcgtctgcacgccctgcgcgtggacggcggtgcggtagcgaataacttcctgatgcagttccagtccgacattctcggcacccgcgttgagcgccctgaagtgcgtgaagtcacggcgctgggcgcggcgtaccttgccggtctggcggtaggcttctggcagaacctggacgagctgcaggaaaaagcggttatcgaacgcgaattccgtccgggcatcgaaaccaccgagcgtaacttccgctacagcggctggaaaaaagcggtgaaacgcgccctggcgtgggaagagcacgaagag

SEQ ID NO: 20131 - DNA, 532 bp, Enterobacter cloacae
gtgacaacaatagtaagtgtacgccgtaacggccatgtggtaatcgccggtgatggccaggccacgctgggtaataccgtcatgaaaggcaacgtgaagaaagtgcgccgtctctacaacgacaaagtgatcgccggttttgctggcggcacggcggacgccttcacgctgtttgaactgtttgaacgcaaactggaaatgcaccagggtcatctggtgaaagctgccgttgagctggcaaaagactggcgtaccgaccgccatgctgcgcaagctcgaagcgctgctggccgtggccgatgaaaccgcctcgctgatcatcaccggtaacggtgacgtcattcagccggaaaatgacctgattgccatcggctctggcggcccttatgcccaggctgcagcccgcgcgctgttggagaataccgacatgaacgcgcgtgatatcgcggtgaaggcgttggatattgcaggcgatatctgcatttataccaaccacaaccacaccatcgaagaattgacctccaaagcgtaa

SEQ ID NO: 20132 - DNA, 1008 bp, Enterobacter cloacae
atgaaacgtgaacttgctatcgagttttcccgcgtcaccgaagcagcagcccttgcaggctataaatggctgggccgtggcgacaaaaataccgcagacggcgctgccgtccatgccatgcgcatagtacttaaccaggtcaacattgacggcaccatcgtgatcggcgaaggcgagatcgacgaagcgccgatgctctacatcggtgaaaaagtcggtaccggcaaaggcgatgccgtggatatcgccgtcgacccgatcgaaggcacccgcatgacggcgatgggtcaggccaatgcgttagcggtgctggccgtcggcgataagggctgcttcctgaacgcgccggacatgtacatggaaaagctgattgtcggcccaggcgcgaaaggcgcaatcgaccttagcctgccgctggaagagaacctgcaaaacatcgccaaagccctgggcaaaccccttagcgaactcaccgtcaccattctggcgaaaccgcgccacgacgccactattgcgcagatgcaaaagctcggcgtgcgcgtgtttgctatccctgacggtgacgttgccgcctcgatcctgacctgcatgccggacagcgaagtcgacgtgctgtacggcatcggcggcgcgccggaaggtgtggtctctgcggcggtgatccgcgcgctggatggcgatatgcaggcccgtctgctgccccgccatgaggtaaaaggcgacagcgaagagaaccgccgtatcggggaaaacgagctggcgcgctgcgaagcgatgggcatcgaggccaataaagtgctggctctggacgaaatggcgcgtagcgataacgttgtcttctcggcgaccggcatcaccaaaggcgatctgctggacggcatcacccgcaagggtaatatggccaccactgaaaccctgctgattcgcggtaaatcacgcaccattcgccgcatccagtcaatccactatctcgaccgcaaagacccggacgtgcagacgcacattctg

SEQ ID NO: 20133 - DNA, 1261 bp, Enterobacter cloacae
ttagaacaagcctgggagctggctaaacagcgtttcgccgccgtcggcgtggatgtcgaaacggcgctgcgccagctcgaccgtctgcccgtctctatgcactgctggcagggtgatgacgtcgccggcttcgagaacccgggcggttctctgacgggggggattcaggcgacgggtaactatccgggcaaagcgcgcaacgccaccgaactgcgtgccgacctggagctggcgctgagcctgatcccggggccaaaacgcctgaacctgcatgcgatttatctggagtccgacgcaccggtagcgcgtaacgagatcaaaccggaacactttaaaaactgggtggagtgggcgaaaaccaacaatcttggtctggactttaacccgtcctgcttctcgcacccgctgagcgccgatggttttaccctcgcgcacgccaacgacaaaatccgtcagttctggatcgaccacgtgaaggccagccgccgcgtttcggcgtatttcggcgagcagctcggcacgccgtcagtaatgaacatctggatcccggacggcatgaaagacatcaccgtcgaccgcctggccccgcgtcagcgcctgctggccgcgctggatgaggccatcagcgagaagctggacccggcgcaccacatcgacgccgtggagagcaagctgttcggcattggcgccgagagctacaccgtcggctcgaacgagttctacatggggtacgccaccagccgccagaccgcgctgtgcctggatgccggtcacttccatccgaccgaggcgatctccgacaaaatctccgctgccatgctctacgtgccgcgcctgctgctgcacgtcagccgcccggtgcgctgggacagcgaccacgtggtgctgctggatgacgaaacccaggcgattgccagcgaaattatccgtcacgacctgttcgaccgcgtgcacattggcctcgacttcttcgatgcctccatcaaccgcatcgcggcgtgggttattggcacccgcaatatgaagaaagccctgctgcgcgcgctgctggagccaaccgcagtgctgaaacagctggaagaaaacggcgactacaccgcgcgcctgggcgctgctggaagagcagaaatccctgccgtggcaggccgtttgggagatgtactgccagcgtaacgacgctccggcaggcagccagtggctggaaaacgtgcgcgcgtacgagaacaacgtgttgagcaagcgcgggtaattttgccctcac

SEQ ID NO: 20134 - DNA, 1473 bp, Enterobacter cloacae
atgcatagcaaaccgtccagacgacctttctcactcgctctgcggctgaccttttttatcagcctgtccacaatactggcgtttatcgccttcacctggtttatgctgcattctgttgaaaagcattttgccgagcaggatgtcagcgatctgcaacaaatcagcaccacactgagccgtatactccagtccccggcagatccggatgaaaaaaaagtaagcaaaataaaggaatcaattgccagctaccgcaacgttgcccttttgctcctcaatcccaggggtgaagtgctcttgagctcagctcagggggcggcactacgcccggcagtgaattcagcagattttagcgagcacagccgcgcacgggatgtctttctctggacggtggaggatcctgcgggaccgatggataccgggtccggaatgaagatggaaacataccggattatcgcctcctctggccaggcgatatttcagggcaaacagcagaactatgtcatgctgactggcctctccattaatttccatctccattaccttgatgcgctgaaaaaaaatctgattgcaatcgctgttgtgataagcctgctgattgttctgatcattcgcatcgctgtccgtcaggggcatctgccccttcgtaatgtcagcaatgccattaaaagcatcacctccgagaatcttgatgcgcggctggaaccgacacgggttcccattgagctggagcaactggttatctcgttcaatcatatgattggaaagattgaggatgtctttacccgccaggccaatttctctgccgatatcgcgcacgagatcagaacgcccatcaccaatctggtgacacagactgaaatcgcactgagtcaggatcgaacccagaaggaacttgaggatgtcctctactccagcctggaagagtataaccggatgaccaaaatggtcagcgacatgctgttcctggcgcaggcagacaataatcagctgatacctgacagggtcatgtttgacctcagagcggaagtcatgaaagtcttcgagtttttcgaagcctgggccgaagaacgcaatatcacgctcaaatttgacgggatgccctgcctggttgagggagatccacaaatgttcagaagggcgatcaataatctgttatccaatgccctgcgttataccccggagggacaggcaatcaccgtctcaataagagagcaggagagcttttttgaccttgtgattgaaaatccggggaaaccgatccctgaagaacatttatcaaggctgtttgaccgtttttatcgggtggatccatccagacaacgaaaaggagaaggcagcggcatcggccttgcgattgtgaagtcaatcgtggaagcacatcacggaagagtgcaggtggaatcagacgtacgctccacgcgttttatcttatccgtgcccagactggagaaaatgatcccggaaacccaatgc

SEQ ID NO: 20135 - DNA, 1023 bp, Enterobacter cloacae
gtgatgccccgttcgctttcgcaaaccggtgagtcaaagcgccgattcagctggccaaccggcacgccgcaaatcgcagcgctgctggttgttctgctggttgatagcctggtcgcgccgcatttcttccagattatcgtgcaggatggtcgcctgtttggcagcccgatagacattctaaaccgtgccgcgccggtggcgctgctggccatcgggatgacgctggtcatcgccaccggcgggattgacctttccgtcggcgcggtgatggccatcgccggggccacggcagcctccatgaccgtatccggacacagcctgccggtggtactgctggcggccttaggcaccggcgtgctggccggattatggaacggcattctggtggcggtgctgaaaattcagccctttgtcgccacccttatcttaatggtggccgggcgcggcgtggcgcagctgattacctccgggcagattgtcacctttaactcgccgagcctggcgtggatcgggagcggcaacctgctgttcttcccgacgccggtgatcgttgccctggtcacgctcattgtcttctggcttttcacccgcaaaacggcgctgggcatgttcattgaagccgtcgggatcaacatccgcgccgcgcgcaacgccggggttaacacccgcctgatagtgatgctgacctacgtgctgacgcgcgtctgcgccgccatcgccggggtcatcgtcgcggcggatattcgcggggccgatgccaacaacgcgggactctggctggagctggacgcgatcctcgcggtagtgatcggcggtgggtcgctgatgggcgggcgctttaacctgctgctctcggtgattggcgcgctgatcattcagggaatgaacaccgggatcctgctttcggggttccagccggaactcaaccaggtggtgaaagcggtggtcgtgctttgcgtgctgatcgtccagtcgccgcgctttgtcagcatcattaaggggatccgtggccatgataaaacg

SEQ ID NO: 20136 - DNA, 375 bp, Enterobacter cloacae; identical to SEQ ID NO: 20023

SEQ ID NO: 20137 - DNA, 2046 bp, Enterobacter cloacae
atggcactggagccgctcgtagctacggcatccacggggccgagtgatgaacttcacgacatgacaagacgcttctggctggggttgttgctggcgtttccggttctggtactcgaaatgggatctcatctgtttcccgacttgaggaatacagtaccgccacagtacaacacatggctgcagttgcttctggcctcccctgtcgtgttgtggtgtggctggccattcttcgcccgggccggaatgtcgttacgtaaccgctccctgaatatgtttacccttgttgcaatggggaccggcgtagcctgggtttacagcgtcattgcaaccgtcttcccctcctggtttcctgcatcgttcagaaacatggatggcctggtggccgtttattttgaagccgcagcagttattacggtgcttgttctgctgggacaggttcttgagctgcgggcacgggaacaaacctcaggcgccattactgcgcttctgaaccttgcccccaaaaccgccagacggctggatcatgacggtcatgaaacggatattaatgcggaagatgtcctgcctggcgataagctccgcatcagacctggagagagtattccggtcgacggtatcgtgatcgaaggcaaaacaaccgtggatgaatcgatggtgaccggggagtctatgccggttaccaaaacgaagggtgaccctgtcattggggggacgattaatcagacaggtagtcttatcatccgtgcagagaaagtcggtgatgaaacgatgctctcacgaattgttcagatggtcgctgatgcacagcgttcgcgtgcccccatccagagaatggcagacagcgtttcaggctggtttgttcctctggtgatacttatcgcggttgttgctttcttgatctggtctgtctgggggcccgagcccaggatggtgcacggtctcattgcggctgtgtcggtcctgattattgcctgtccctgcgcgctgggactggccacgccgatgtcgataatggtgggggtgggcaaaggcgcccaggccggggtgttaatcaagaatgccgaagcccttgagcgtcttgaaaaagtggacacgctggttgtcgacaaaacaggcacgctcacggaaggttcgcctacggtgacagggattatcagtctcagtccgggtggggaaatatctcttttacgtgtaacagctgcagtggaaaaaggttcgcagcatccgttgggtatggctgttgtcagagccgcgcatgaaaaggggatcgtgatacctgccgtcagtaatttcaatgccccgtcggggaaaggtgtctcaggcgatgtcgaaggtcaacgggttgttattggtaatgaactggctatgcaggaaaacagtatcgttattgataatcaaaaggccgttgcggatacgttgcggatggaaggcgctaccgttatctatgtggccacagacgggaaccttgcaggcctgatagctatctcggatcccgtgaaagcaaccacgccggatgcgcttaaagctttgcgtcaggcggggatccgcattgttatgctcaccggggataaccagcttactgctgaagcagtcgcacggaaactgggaatagatgaggttgaagccgggattctgccggatggcaaaaaagcagtgataacccgactgaaagagtctggccatgtggttgcgatggccggagacggtgtgaatgatgccccggcgctggcagcggctgacgtgggtatagccatgggaacgggtacagatgtggcaatagaaagtgctggcgttacccttctcaaaggcgatttgatgatactcaacagggcccgtcatctgtcagagatcaccatgaaaaatatccggcagaatctgttttttgcgtttatctacaatgctcttggggtgcctgtagctgcaggtctgctttatcctgtgtatggaatactgctgtcgccagttattgcggcggcggccatggccctttcctccgttagcgtcattgcaaatgcgttgcgtctgaaaagtgtcaggctcgggaaa

SEQ ID NO: 20138 - DNA, 273 bp, Enterobacter cloacae
gtgacttctgtttctatcagctgtccctcctgttcagctactgaaggcgtggtgcgtaacggtaaaagtactgccggacatcagcgctatctctgctctcactgccgtaaaacatggcagctacagttcacttacaccgcttctcaacccggtacgcatcagaaaatcattgatatggccatgaatggcgtcggatgtcgcgccagtgcacgcattatgggcgttggcctcaacacgattttacgtcacttaaaaaactcagaccgcagtcgg

SEQ ID NO: 20139 - DNA, 1452 bp, Enterobacter cloacae
atgtatatcgggatcgatcttggcacatcgggtgtgaaagctatcctgttgagcgagcagggcgacgtgttagcaacgcagacggaaacgctgcaggtttcacgtccgcattcgctgtggtcggaacaggatccggaacagtggtggcaggcgacggatcgcgcaatcaaagccttaggtgagcagcacagcctgcgcgacgtgaaagcgctggggattgccggacaaatgcacggcgctacgctgctcgatagccagcatcgtgtgttgcgtcctgcgatcctctggaacgatggccgctgcgcggaagagtgcgcgcttcttgaggaacgcgtacccaattcccgcgagattaccggtaacctgatgatgcccggctttactgcgcccaaattgctgtgggtgcagcgccatgaaccggagattttccgtcaggtggcgaaagtcctgctgccgaaagactatctgcgttttcgcatgacgggcgatttcgccagcgacatgtcggatgccgcgggcaccatgtggctcgacgtggcgaagcgcgactggagcgaggcgatgctggatgcctgccatttgacccgggaacatatgcccgcgctgtacgaaggctgtgaggtgacaggcgcactgctgccagccgttgctgaacgctggaatatgcctgccgtaccggtggtagccgggggcggcgataacgcggcgggcgctgtcggtgtagggatggttgaggcgggccaggcgatgctgtcgctgggaacgtctggcgtctattttgccgtcagcgacgggtatcgcagtaatcctgaaagcgctgtgcacagtttctgtcatgcccttcccgggaaatggcatttgatgtcggtgatgctcagcgcggcatcctgcctggactgggcggcaaaactcaccggcatggccgacgttccggcgctcatttccgcagcccagcaggcggatgacgctgcgggtaccgtctggtttttaccgtatctttccggcgagcgtacgccgcacaacaacccggaagcgaaaggggtgttctttggtttaacccatcaacatggcccggcagaactggcgcgtgcggttctggaaggcgtgggctatgcgctggccgacgggatggacgtggtgcacgactgtggcctgaaaccgacgagcgtcaccctgattggcggcggtgcgcgaagcccttactggcgacagatgctgtcggatatcagcggtttgcagctggatttccgcaccggcggggatgtcgggcccgcgctcggcgccgcacgtctggcgcagatagccattcatccggaacagccgttttcgcaactgttgccgcagcttacgcttgaacaggcgcatttgcctgacgcggagcgccatgcgcggtacgcggaaaggcgcgacgtgttccgcaaaatctaccagcagctgctgcctctgatgtcg

SEQ ID NO: 20140 - DNA, 909 bp, Enterobacter cloacae
atgcaaaagtttgataccaagaccttccagggcctgatcctgaccttacaggattactgggctcgtcagggctgtaccattgttcaacctttggacatggaagtcggcgccggcacttcacacccgatgaccagcctgcgcgcgttggggccagagccaatggcgaccgcgtatgtgcagccttcccgtcgtccgaccgatggtcgttacggtgagaacccgaaccgtctgcagcattactatcagttccaggtggtgattaagccatcacccgacaacattcaggaactgtacctcgggtcgctgaaagagctgggtatggatccaaccatccacgacattcgcttcgtggaagataactgggaaaacccaacgctgggtgcctggggtctgggttgggaagtgtggctgaacggcatggaagtgacccagttcacctacttccagcaggtgggtggtctggaatgtaagccaatcaccggtgagatcacctacggtctggaacgtctggccatgtacattcagggcgtagacagcgtttacgacctggtctggagcgacggcccgctgggtaaaaccacctacggcgacgtgttccatcagaacgaagtggagcaatccacctataacttcgaatacgcggacgtggacttcctgttcacctgcttcgagcagtacgagaaagaagcgcagcagttgctggcgctggagactccgctgccgctgcctgcctacgagcgtattctgaaggccgcccacagcttcaacctgctggacgcccgcaaagccatctccgtgactgaacgtcagcgctacattctgcgtattcgtaccctgaccaaagccgttgcagaagcttactacgcgtcccgtgaagcccttggcttcccgatgtgcaaccgaaacaaa

SEQ ID NO: 20141 - DNA, 2066 bp, Enterobacter cloacae
atgtctgagaaaactttcctggtggaaatcggcaccgaagagctgccaccaaaagccctgcgcagcctggctgaatctttcgctgcgaacgtgaccgccgagctggataacgctggcctggcacacggtaaaattgagtggtttgccgcacctcgccgtctggcgctgaaagtggcaaatctggcggcgtctcagccggatcgcgaagttgaaaaacgtggcccggcgattgcccaggcgtttgacgcggaaggcaagccgagcaaagcggctgaaggctgggcgcgcggctgcggcatcaccgtcgatcaggccgagcgtctgaccacggataaaggcgagtggctgctgtaccgtgcgcacgtgaaaggcgaaagcgcggaagcgctgctgccggacatgattgccacttctctggcgaagctgccgattcctaagctgatgcgctggggcgcgtccgacgtgcacttcgtgcgtccggttcacaccgtgaccctgctgctgggcgataccgttatcccggcgaccattctgggcgtggcgtccgatcgcgtgatccgcggccaccgctttatgggcgagcctgagttcaccatcgacaatgcagaccagtacccgcagatcctgctggagcgcggtaaagttattgccgactacgaacagcgtaaagccaaaatcaaagcggacgccgaagacgcggcgcgcaagattggcggtaacgcagacctgagtgacagccttctggaagaagtgacctctctggtggaatggccggttgtgctgaccgcgaagttcgaagagaaattcctggccgttccggctgaagcgctggtgtacaccatgaagggtgaccagaaatacttcccggtctatgccaacgacggcaagctgctgccaaacttcatcttcgtggcaaacatcgaatcgaaagatcctatccagattatctccggtaacgagaaagtcgttcgtccgcgtctggcggatgcagagttcttcttcaacaccgaccgtaaaaagcgtctggaagataacctgccgcgccttcagaccgtgctgttccagcagcagctgggcacgctgcgcgacaagaccgaccgcattgcggagctgtccggctggattgcccgtgaaatcggtgcagacgtcaaccacgcgactcgcgcgggcctgctgtccaagtgcgacctgatgaccaacatggtgttcgaattcaccgacacccagggcgtgatgggcatgcactacgcgcgtcacgatggcgaagcggaagacgtagccgttgccctgaacgagcagtatcagccgcgctttgcgggtgacgagctgccgtccaacccggttgcatgtgccgtcgcaattgccgataagatggacaccctggcgggtatcttcggtatcggtcagcatccgaaaggcgacaaagacccgtttgcgctgcgtcgtgccgctctgggcgtgctgcgtatcatcgttgagaagaacctgaacctcgatctgcagaccctgaccgaagaagcggtgcgtctgtacggcgacaagctgaccaacgcgaacgttgtggatgatgtgatcgactttatgctcggtcgtttccgcgcgtggtatcaggacgaaggttacaccgttgacaccattcaggcggtgctggcgcgtcgtccgacccgtccggctgatttcgatgcgcgtatgaaggcggtttcccacttccgtaccctggaagcggcatctgccctgccgcggccaacaagcgtgtatccaacattctggcgaaatccgacgagacgttgaacgagcgcgtgaacgccgcaaccctgaaagagccggaagagatcgctctggcgatgcaggttgtggtgctgcgcgataagctcgagccgtacttcgcggaaggtcgctaccaggaagcgctggtggagctggccgagctgcgtgacgtgatcgatgccttcttcgagaaagtgatggtgaacgtagaagataaagagctgcgtattaaccgtctctctatgctcgagatactccgcgagctgttcctgcgcgtagcggatatttcgctgctgcag

SEQ ID NO: 20142 - DNA, 210 bp, Enterobacter cloacae
atgtctgctaaaatgactggtctggtaaaatggttcaacgctgataaaggtttcggcttcatcactcctgacgatggctctaaagacgtgttcgtacacttctctgctatccagaacgatggctacaaatctctggacgaaggtcagaaagtttccttcaccatcgaaagcggcgctaaaggcccagcagctggtaacgttgtaagcctg

SEQ ID NO: 20143 - DNA, 399 bp, Enterobacter cloacae
atgtttgtcatctggagccatgaaaaagggttcatcatgagtcatcagctcaccttcgccgacagtgaattcagcagtaagcgccgtcagaccagaaaagagattttcttgtcccgcatggagcagattctgccatggcaaaacatggtggaagtcatcgagccgttttatcccaaggctggtaatggccggcgaccttatccgctggaaaccatgctacgcattcactgcatgcagcattggtacaacctgagcgatggcgcgatggaagatgctctgtacgaaatcgcctccatgcgtctgtttgcccggttatccctggatagcgccttgccggaccgcaccaccatcatgaatttccgtcacctgctggagcagcatcaactggcccgtcaattg

SEQ ID NO: 20144 - DNA, 738 bp, Enterobacter cloacae
atgactattaaatacaatttactcatcgcggccacgttatttgcaacatcctcagcaatggccggtgacttttcactaggagcgggggctgtatttaatgagtctccttacaaaggctataacgaaaatacgaccgcagtaccgttaattagttacgaaggcgacaacttttatgttcgccagaccacgggcggatggatcctgtggaaagacgcaaaaaatgaactcagcctgaccgcatcgtggatgccgctgcatttcgatccagatgacaacgacgaccatcagatgaaacagcttgatgagcgtaaagcctctgccttcctcggcggcgcgtactaccgccacgaaagctggggttctctgaaagtggcggtctctggtgatgccacggatgaaagcggcggtatgatcggcgaggtttcttacttccgtccaatcaggatggaacgcctgaccctgacgccctctgtcggtattttctatagcgacgaaagctataacgactactactacggcgtatccggcagcgagtctcgccgctcaggtctggatgaatacaccgccggtgacagctggacgccatacgttggcctggcggccaaatatcagttaacccagaagctgtatctcaacgccagcgcggtctacaccgtattgcctgacgacgtgaagaacagcccgatgatcgaccgcgacgacagcttcgcgctgatgaccggcctgacctggcgtttc

SEQ ID NO: 20145 - DNA, 606 bp, Enterobacter cloacae
atgaaactcatcggtagctacaccagtcccttcgtgcgaaagatctcgattctcctgctggagaaagggattgaatttgaattcatcaatgaacagccctacaacgctgaaaacggcgtcgcgcagtacaacccgctggggaaagtcccggcgctggtgacggacgagggcgaatactggttcgattccccgattattgcggagtatatcgagctgctgggcgttgccccggcaatgctgccggctgacccaaaagcagcgctggcagtgaagcaaattgaagccctggccgatggcattatggatgcggcgttaacctccgtgcgtgaacaggcaaggcccgtcgcccagcagtcggaaacggaactgttacgccagcgggaaaaaatcagccgcagcctggacaggtgcgaacagcttatccgggaaggaaagattcaaaccgacagcctgaacctggcaaccatcgctatcgcctgcgccatcggctatctcaacttccgccgggtttctcctggctggtgcgtcgaccgtccgctgctggtgaaacttgcagacacgctttttagccgcgagagctttgcccgtaccgaaccgccaaaggct

SEQ ID NO: 20146 - DNA, 1197 bp, Enterobacter cloacae
atggaggacctcaacgacgggctgcgcacaccgggcgcaatcatgctcggcggcggaaacccggctcaaattccggagatgaatacctatttccagacgctgctcgctcagatgctggaaagcggcaaagcaaccgatgcgctttgcaattacgacggcccgcaggggaaaactgaactgctggcactcctcgccgaaatgctgcgtgacgagctgggttgggatatcgaaccacagaatattgcactgacaaacggcagccagagcgcgtttttctacttgtttaatctgttcgcagggcgtcgcgccgacggcaccaccaaaaaagtgctgttcccgctggcgccggagtatatcggctacgccgattccggcctggaagaggatctgttcgtctccgcgcgcccgaacatcgagctgctgccggaaggccagttcaaatatcacgtcgattttgaacacctgcatattggtgaagagacgggcatgatctgcgtatcgcgcccgactaacccaacgggcaacgtgatcaccgacgacgaactgatgaagctggatgcgctggcgaatcagcacggcattccgctggtgatcgataacgcctacggcgtgccgttcccgggcattatcttcagcgaagcgcgtccgctgtggaacccgaacattgtcctgtgcatgagcctctccaagctgggtctgccgggcagccgctgcggcatcatcatcgccaacgagaaaatcatcaccgccattaccaatatgaacggcattatcagcctttcaccgggcggcattggcccggcgatgatgtgcgaaatgattaagcgcaacgacctgctgcgtctgtccaatgacgtgatcaagccattctattaccagcgcgttcaggagacgattgcgatacttcgccgctacttgccggaagaacgctgcctgatccacaagcctgaaggggcgattttcctgtggctgtggtttaaggatttgcctatcaccaccgaactgctctaccagcgcctgaaaaagcgcggcgtgctgatggtaccaggcgattatttcttcccggggctggataagccgtggccgcatactcaccagtgcatgcgcatgaactacgtgcccgatccggaaaaaatcgaagcgggtgttaaaattctcgccgaagaaattgaaaaagcctggcgcgaagacggtcag

SEQ ID NO: 20147 - DNA, 1604 bp, Enterobacter cloacae
cccactggcgagaaaaacgccagccggaactacccttgttgtacaccaacagcaaggagacggtcatgacaaacaatcctccctcatcgcgtatccagcccggcgagtatggttttcccctcaagctgaagcctcgttatgacaactttattggaggcgactgggtagctcccgtcgacggcgaatactattccaacctgacccccgtaaccggccagccgctgtgcgaaatagccagctccggcaagcgcgatatcgatctggcgctggatgcggcgcacaaagcgaaagataaatggggccatacctcagttcaggaccgcgcggctattttgttcaaaatcgctgaccggatggagcagaatctggagctgctggcgacggcggaaacctgggataacggcaagccgatccgggaaacgatggcggcagacgtgccgctggccatcgaccacttccgctattttgcctcctgcattcgcgctcaggagggcggaataagtgaggtagacagcgacaccgtggcgtatcatttccacgaaccgctgggcgtcgtcgggcaaatcattccgtggaacttcccgctgctgatggcgagctggaagatggcgcccgcgctggcggctggaaactgtattgtgctcaaaccggcgcgtctgaccccgctctcggtcctgctgctgatggaaatcgttggcgatctcctgccgccgggcgtgattaacgtggtcaacggtgcgggcggtgagataggggaatatctggccacctcaaaacgtatcgccaaagtggcgtttaccgggtcgacggaagtgggccagcagattatgcagtacgccacgcaaaacatcattccggtgaccctggagctgggcgggaaatccccgaacatcttcttcgcggacgtgatggaggaagaggatgccttcttcgataaagccctggaagggtttgcgctgtttgcgtttaaccagggcgaagtctgcacttgcccgagccgcgcgctggtgcaggagtccatctatgagcgctttatggagcgggccattcgccgcgtagagtctatccgcagcggtaacccgctcgataacgtgacgcagatgggggcgcaggtctcgcatggacagctgaaaaccatcctcaactacatcgatatcggcaagaaagagggggcggatattctgaccggcggtcgccgtaaggtgctcggtggggatctgcaggaagggtattacctggagccaacgatcctgttcggtcagaacaacatgcgcgtcttccaggaggaaattttcggaccggtactggccgtgaccaccttcaaaacgatggaggaggcgctggagattgccaacgacacaccgtatggcctgggtgcgggcgtctggagccgcaacggtaatctggcctataaaatgggcagaggtattcaggccgggcgcgtctggaccaactgctaccacgcctatcctgcccacgctgcatttggcggttataagcaatcgggtatcgggcgtgaaacccacaagatgatgctggagcattatcagcaaacgaaatgtttgctggtcagctactccgataaaccgctggggctgttctaa

SEQ ID NO: 20148 - DNA, 990 bp, Enterobacter cloacae
atgaagataaagaatctgactctaacgctctgcgccacgctcctccttgcaagctttgcaggacatgccaaagaggtcaaaattggtatggcgattgacgacctccgcctggagcgctggcaaaaagatcgcgatatttttgtgaagaaagcagaatccctcggcgccagcgtgtttgttcagtcggctaacggcaatgaagaaacacaaatgtcgcagatcgagaatatgatcaaccgtggcgtcgatgttctggtcattatcccctataacggccaggtattaagtaacgtggtgaaagaagccaaacaggaaggcataaaagtcctggcctatgaccgcatgattaataatgcggatattgattattatatttcgttcgataatgaaaaagtcggggaattacaggcgcaaagcctgatcgacaaagtgcctcagggcaattattttctgatgggcggctctccggtagataacaacgccaaactgttccgcgaagggcaaatgaaagtccttaagccgtacatcgataacgggaaaattaaagtggttggcgatcagtgggccgacggctggctgccagaaaacgcgctgaaaattatggaaaacgcgctgacggccaacaacaacaaaattgatgcggttgtggcctccaacgatgccactgcaggcggtgctatccaggccctgagcgcacaggggctggccggaaaagtcgccatttcaggacaggatgccgatctggctggcgtaaaacgcattatcgcaggcacccaaaccatgacggtctacaaaccgattacccagttggccaatacggcggcggaaatcgccgtggagctgggcaatggcaaacaacctaaagcagatgcaacgctgaataacggcctgaaagacgttccagctcgcctgctcacgccgattgaagtcaataaagagaacattgacgccaccgtggttaaagacggtttccacaagaagagcgaactg

SEQ ID NO: 20149 - DNA, 1383 bp, Enterobacter cloacae
atgtctattcagtattactcctgtatcaacgactcgccgcataccctgattatggagctcaatatgcaagcttatttcgaccaactcgatcgtgttcgttacgaaggcccaaaaacgaccaatcctttagcatttcgtcactacaacccggatgagctggtgctgggtaagcgcatggaagatcatctgcgctttgccgcctgttactggcataccttctgctggaacggcgccgatatgttcggcgtgggttcctttgaccgcccgtggcagcagccgggtgaggccattgagctggcaaagcgcaaagccgatgtggcgtttgagttcttccacaagctgaacgtgccgtactactgcttccatgacgtggacgtgtcgccggaaggggcgtcgctgaaagagtatctgaacaattttgcgcagatggtggatgtactggcggcgaaacagcagcaaagcggcgtgaagctgctctggggcacggcaaactgcttcaccaacccacgctacggcgcgggcgcggctaccaatccggatccggaagtgtttagctgggcagccacgcaggtggtgacggcaatgaacgctacgcatcagctgggtggcgagaactatgtcctgtggggtggccgtgaaggttatgaaacgctgctgaacaccgacctgcgtcaggagcgcgagcagattggccgctttatgcagatggttgtcgaccataagcacaaaatcggcttccgcggcacgctgctgatcgagccgaaaccgcaggaaccgaccaagcatcagtatgactacgacgtggcgacggtgtatggcttcctgaagcagttcggtctggaaaaagagattaaagtgaacattgaagccaaccacgccacgctggcgggccactctttccatcacgagatcgcgtctgccattgcgctgggcattttcggctctgtcgatgcgaaccgtggcgatgcacagctgggctgggacaccgatcagttcccgaacagcgtggaagagaatgcgctggtgatgtacgagatcgtcaaagcgggcggtttcaccaccggcggcctgaactttgacgccaaggtacgccgtcagagcaccgacaaatacgatctgttctacggccacattggcgcgatggacaccatggcgctggcgctgaaagtggccgcgcgcatgattgaagacggcgagctggataagcgcgtagcgaagcgttacagcggctggaacagtgagctgggccagcaaatcttgaaaggtcagttatcgctggcggaaattgcgaagtacgctgaacaacagcaactggcgccgcagcaccagagcgggcaccaggaactgctggaaaatctcgtaaaccactatctgtttgataag

SEQ ID NO: 20150 - DNA, 520 bp, Enterobacter cloacae
gtggagaatctcacgatcgaaatgttatcagagggaaccgattatgacttcgaggattttgattgtggcgaacactcgctaaatgccttccttgctgaacatctggtgcgtcagcacaatgggcgtattttacgagcctacctgcttaaagagcgcgatcgtccgcgtgtcctgggttattacacgttatcgggaagctgttttgaaagagcgatgcttccttctaagactcagcagcgccggatcccttatatcaacgtacccagcgtgacgctgggacgtctggctgtagataaaacactacagggaaacgagtggggaacaacgctcgttgcgcatggctatgcgcgttgtctacctggcttcacaggctgtgggggtacacggaatatttgttgatgcccttaacgagcgggcaaaacgattttatctgaagcagggctttatcccgctgacaggtgaaaacagccattctttgttcttccctacaaaatctatcgaacggctgtttgagcaagag

SEQ ID NO: 20151 - DNA, 150 bp, Enterobacter cloacae
atgctttcagcacttatcttttccgcatttagctaccgggcagtgccattggcatgacaacccgaacaccagtgatgcgtccactccggtcctctcgtactaggagcagcccccctcaattctccagcgcccacggcagatagggaccga

SEQ ID NO: 20152 - DNA, 4894 bp, Enterobacter cloacae
attatcgccaccgcggtgagcgacgaagaggaagagcgggccacccggctgcttaaaaacgagtttgcgctgcgcgacgcgctgcaggacagctgggccatccgcgccgttgcgtccacccagtaccgggggcgcttcgcgctggtgtaagccccgttttcgtttgagctgctggcgcggcgcgcgggcagggcgatctcggggatcgcgcgctttctcgagatggcgatccagatctgcgttcccctgcgccatatgcatctgcaaaacctgatccacggcgatatcaagcccggcagtatttttgttcatcacgatgccacctgccgtctgggcagctttggcctttccagcagcctttccgatgccgtcacccagacccggcttgccgtttcagggggcacgcccgcctatatgtcgccggagcacaccacccgcacccagcgccccgtcgacggccgcagcgatctctacagcctcggcatggtgctgtatgaactcctgaccggacgcctgccgtttgagctgggggaggacgagcagaccaactgggcgcactaccatattgcctcggcgccgctggccccggacgcgatccgcccggacgtgccgggaatgctgtcgaccatcatcctgaagctgctggaaaagcaccccgataaccgctaccagacggtcgacggattgattgccgaccttcgccgctgccaggcgacgctgacctgcgagggcgagatcgtcgcctttacccccggccagcaggaccgcaccccggcgatccatctggcggactccctgttcgcgacgcatccgcaggcgaacgacgttattgcggcgtttgagcgggtggggcagagcctggtgccggagctggtgacgatcggcgggccgtcggggatcggcaaatcttcgatcatcgcgacggcgctcaaaacgctgcagcagcgcacggtgctgctggcggtgggcaaagtcgaccagttttcgccgtcgctgccctacggcgtattaagctccgcgttccgcaccctgacgctgcacctgctggggctgcccgcagaggaggtggcgaagtggaaaatccgcctgtctcgcgccctggaggggtacgaggcgctggccgtcagcctggtgcccgagctggggcctgctgcttgagagcaagccgcgcttctcggcggatacgttttccattgatgcccgggcgcgcttcagccatatggtgctggcgctggtaaaaacctttgcctcgcagggctgcccgctggtgctggtgctcgacgacctccagtggagcgatgccgccagcctgcatacgcttaagtatctgctgatgaactgcggcgctgttccgctgctggtggtggcggcccaccgggatatcagcgccgtgtccgacgccgccctgcaggcgctgctggcgggcctgccggaggcggcgcaaaacgcgagcgagattgtcccgcaggcgctttccgtgaaagcggtggcgcgctggctggcgacggtatttcgcacccgcagcgcggcgacgaccgatctcgccacgctgatccacgagaagacgggcggcaacccgctctttgtgcacgagtttttccgccgcatcgtggatgacggcctggtagtgcacaacaaatatcaggacaagtggcactacgatctgcaggcgatccgcgccaggcattacaccgaaaacgtcgtcaccctggtgctggagcagctcgaagagctgcccgacgaaacgcgccgcctgctgggcagcatcgcctgcctcggcggcacgggcgagatggagatgatctgccgcgtggtcggcatgtcgatggcggaaatgcgctatgcgctgcacccggcggtgatggcccagctcatcgtgctggcggaaaaaaagtacgctttcacccatgaccgggtgcaggaggcggcctttgcgctgctcgatcggcatgagagaagccatattcacctgaccaccgccagcctgctggccgacgccgcgcgtcaggcggcggggaatgagctgctgttccgtgccgttcaccacgtcacggccgcgctggacagcatccagcccgccccgcagcgggagatgttccgcgagctgagcctgctggccgcgcgacgcgcgaagcgttcgggggattacctttcggcgcttggctatatccagaccgccagagcgctgggcaacgccgggacggtgtcggactttatgctcgacatcgaagaggcgggctgcgagtttgcgctggggcatctggagcgcacccgcgagctgtgtgacgccattctcggctgcccaggcgggctgacagaaaaggcgctggcggccaacctgctggtggaggtgtacattcgtcagtcggacagccgtctggcgctggaggcggcgctctgctggctggggattttcggtattcagattagccgctatccggaagatgccgactgcgacgaggcctgggcgctcttttgcaaccgcacggccgacgcgccgcaaaacctgtttgcccagctgtcgcggttggataacccggaaaccgaagcggtgatgaacctgctctacagcgccagcatttgcgccagcttcatctgcccgcgcctgcactttttgctgctctgccgcatgatgcacctgaccctcgaccacggcattaccggcgcctccaccacggcgatggcctggtttggcgtgctgattggccaccgctacgccgagtaccgcctcgggttccagtacggcaccctggcccgcgagctggtgaatcgccacggctacgacgcgttcgaagccaaaaacctgctgccgctcgaccagctcagcgtctggacccagcctttatcgtttaccatcgagtgcgcgaaggcctgcttcacctcggcggtgacccacggggatatgacgatggcctgctttgcggcctgccaccaggtgattaacttcctctcgcggggcgatcacctggacggggtgttgaccagcatcgagcgcggcctggcgttcgtgcgtaaaacccacttccaggacgtggagaccattctgatggtccagcgcggctacgttgagttcctgcgcacgccggtcatcggcacctggaccgcgtcgcaggtgctaccggaggcgctgcttcccgcgtcgccggagcaggcgccggagaagaactccaccatgctgttctggtactggctgtatcgcggcatggcgcactttacctgcggcgaatatgccgacgcgcaggcggatctcgagatggcgggctggtacgcgtggtctgcgccggggcatatccatctgctggattaccatctctacagcgccctggcgctctcccgtcagctgacgccggagaccttctcggcgaaccaccgccgcagcattcacgcccactacgacaaaatcgccctctgggcgcgcgttaatcccggcacgttcgcggataaagaggcgctgatctacgccgaaatcgtgcgtctggacgggatgaacagcattgcgctcgagcagtatgagaaggcggtccggctctcccgcgagggcgggtttaacccgatcaacgccctggcccacgagctggcggggcgctttgcgctggcctgcggctacccgaccgcctcggacgcccacttccgcggcgcaattgccgcctggggccgcgcgggcgcgcaggccaaggtgcgccagctggagcaggatttcccgcacctgctggcctccgggcaggccagcgcctacgacacggtggccttcgcccagaacgagaccatccgcgatctccagagcgtcatcaaagcctcccgcgcgctgtcggaagaaatcaacctggagcgcttaatcgaaaacctgatgactatcctgctcgaacgcgccggggcgcagcgcggcctgctgctgcgcgtgagcgagagcctgattccggagatcgaggccagcgcctggaccagcaccgagggcgtgcgggtgcggatcctgaaagacgtgccgacggcgaccgacctgccgctgtcggtgctggcggcggtgatccgcaccgggcaggagatccgcaccggcaggccggaggagttccatcccttcagccaggacccttatctggtgacctcgggggcggcggtcatgtgcgtcccgatgttcaaacaggcgcggctggtgggcgtgctctacctcgaaaaccgcctgatgccggaggtcttcaccgccgagcactcgcgcgtggtgagcctgctgggcgcgcaggccgcggtatccctggagacggcgcggctgtacgccgagctgctggcggagaacatccagcgccgacgggtggagaaagagctgcgctccagccagacctcgctgatgctcggcgagcagatcagccacaccggcagctggcgctgggagctggagcaggatctgatgtttgtctcggaagagtacgcccgcattctcggcctgcccgagcggcaaaagacgatctccatggcggagtttttgaccttcgtccatgaggacgattacgcccgcatcagcgccatcgtcacccaaagcgtgcgcgatgggctctccatgcgcgcggagtttcgcgttaagcgtaccgacggctccacgcgctacatactcgggattggcgatccggtgggcgtgggcagcgaggtgaacgagtattacggcatcatcaccgatatcaccagccagcgcgccgcggaggatgcgatgcgggttgcgcaggcggatctggcgcgggtctcccgggccaccaccgtcggacagctgacctcctccattgcccacgagatcaatcagccgctgatgtcgatcgtctcgaacgccggggcgagcctgcgctggctcaaccgcgagcccgcccggctggataaagtgcgcgaagggctggaggagatcgccgcg

SEQ ID NO: 20153 - DNA, 366 bp, Enterobacter cloacae
atgctttcagcacttatcttttccgcatttagctaccgggcagtgccattggcatgacaacccgaacaccagtgatgcgtccactccggtcctctcgtactaggagcagcccccctcaattctccagcgcccacggcagatagggaccgaactgtctcacgacgttctaaacccagctcgcgtaccactttaaatggcgaacagccatacccttgggacctacttcagccccaggatgtgatgagccgacatcgaggtgccaaacaccgccgtcgatatgaactcttgggcggtatcagcctgttatccccggagtaccttttatccgttgagcgatggcccttccattcagaaccaccggatcac

SEQ ID NO: 20154 - DNA, 1527 bp, Enterobacter cloacae
atgaaaactgcacgtatcctgattaacacccctgcttctcagggtggtatcggtgatctgtacaactttaaactcgcaccttccctgactctgggttgtggttcctggggtggtaactccatctctgaaaacgttggtccaaaacacctgatcaacaagaaaaccgttgctaagcgagctgaaaacatgttgtggcacaaacttccgaaatctatctacttccgccgtggctcactgccaatcgcgctggatgaagtgattactgatggccacaaacgtgcgctcatcgtgactgaccgtttcctgttcaacaacggctacgctgaccagatcacctctgtactgaaagcggctggcgttgaaactgaagtgttctttgaagttgaagctgaccctaccctgagcgttgtgcgtaaaggtgctgaactggctaactccttcaaaccagatgtgattatcgcactgggtggtggttccccaatggacgccgcgaaaatcatgtgggtcatgtacgagcatcctgaaacccacttcgaagaactggcgctgcgctttatggacatccgtaaacgtatctacaagttcccgaaaatgggcgtaaaagcgaaaatgatcgcggtaaccaccacttccggtaccggttcagaagttacgccattcgcagtagtaacggacgatgcaacaggtcagaaatatccactggctgactatgcactgaccccagacatggctatcgttgatgcgaacctggtcatggagatgccgaaatcactgtgtgcgttcggtggtctggatgcggtaactcacgccctggaagcttacgtttctgtgctggcatctgagttctctgacggtcaggctctgcaggctctgaaactgctgaaggaaaacctgccagcgtcctacaacgaagggtctaaaaacccggtagcacgtgaacgcgttcacagtgcagcaaccatcgccggtatcgcgtttgcgaacgccttcctgggtgtttgccactctatggcgcacaagctgggttctcagttccacattcctcacggtctggcgaacgccctgttgatcagcaacgttatccgttataacgctaacgacaacccaaccaagcagactgctttcagccagtatgaccgtccgcaagcgcgtcgtcgttacgctgaaatcgcagaccaccttggtctgagcgcaccgggtgaccgtactgctgcgaagattgagaaactgctggcatggctggaaagcctgaaagctgagctgggtattcctaaatctatccgtgaagcaggcgttcaggaagctgacttcctcgctcatgtagataagctgtctgaagatgcattcgatgaccagtgtactggtgctaacccgcgctacccactgatctccgagctgaaacagattctgctggataccttctacggtcgtgagttcaaagaaggtgacgttgccgctgtgaaaacagaagctcctgtcatcaaagctgacaagaaagcgaagaaaagcgcttaattgaaagtagaa

SEQ ID NO: 20155 - DNA, 189 bp, Enterobacter cloacae
atgtttgtcatctggaagcctgaaaaagggttcatcgtgagtcatcagctcaccttcgccgacagtgaattcagcagtaagcgccgtcagaccagaaaagagattttcttgtcccgcatggagcagattctgccatggcaaaacatggtggaagtcatcgagccgttttatcccaaggctggtaatggc

SEQ ID NO: 20156 - DNA, 989 bp, Enterobacter cloacae
ggtctgtttgccatcaccggcgcaaccggggcaggtaaaaccaccctgcttgacgccatctgtctggcgctttatcacgaaacgccgcgcctgcagaaggtttctcaggcgcaaaacgacctgatgacgcgcgacaccgccgagtgcctggcggaagtggagttcgaggtaaaaggcaccgcctatcgcgcattctggagccagaaccgcgcgcgcaaccagccggacggaaacctgcaggcgccgcgcgtggagctggcgcgctgcgaagatggcaaaatcctggccgacaaagtgacggataaactggagcaaaccgccgcgctcaccgggctggactatggccgcttcacccgctccatgctgctctcacaggggcagtttgccgccttccttaatgccaagccgagcgatcgcgccgagctgctggaagaactgaccggcaccgagatctacggccagatttccgccatggtgtttgagaaacacaaagccgcccgcagcgtgcttgaaaagtgcgaggcgcaggcggcgggcgtcgtgctgttgagcgaagagcaacagcagcagttgcagcaaagtttgcaggcgcttactgacgaagagaaaaccctgctggttcagcagcaaagccaacagaaagattttcagtggcttacgcgccatgatgagctcgtgcttgagcaacagcgcgtcaccgcgatgcagcagcaggcgcaacaggcgctgacgaacgctgcgccagaactggcaaagctccagcttgctctgcccgccgcccagcttcgaccgctttgggagcaccagcaggagcaaaccgcgcgcctgaggcaaacccagcagcgaattattgaagtaaatactcgcttacaagccaaaaccgcgctgcgcgcgcggatccgtcataccgcccagcggaatcatgagcagcttcagaccgaactgacggcgctggcgcagtggcctggcggagcacgaacgctatcgcc

SEQ ID NO: 20157 - DNA, 1108 bp, Enterobacter cloacae
taccttggtcgatgtactatctgaacggtcaggacaacagcatgatcctgatctctacgctgccgttaaaagatctctcatccgggtttaaagagacaaccgtgggcagcatcgtcgattcccgccgggcagagatgctgcagcaggcgaacgcccttgatgagcgtgagagcttctcttccctgcgtcgtctggcctggcaaaacggtcattattttaccctacgcaccacgttcaaccagccagggcatctggcgacggtggtggccttcgatttaccgattaatgatttaatcccgccggatatgccgctcgacagcttccgcctggagccagacagcagcacccagaacatgcgtgcggcgtccgacaaagaggccgcagagagcgtatcgatctcctttaacggttcgaaaatcgaaattgcctcatcgctgaactcgaccggcatgcgtctcgtgtggcaggtgccgtttggcacgctgttgctcgacaccctgcaaaatattctgctgcctctgctgctgaatatcggtctgctggcgctggcgctgtttggctacagcaccttccgtttccagacggggcgtcagagcgacgcctctgcggttccggccggtaccaacaatgagctgcgcgtattgcgtgcactgaatgaagagattgtttccgtgctgccgcttggcgtcctggttcacgaccaggaggcgaatcgtacggtgatgagcaacaaaattgccgaccatctgctgccgcatcttaacctgcagaacatcaccaccatggcggatcaacaccagggggtgattcaggccaccatcaacaatgaactgtacgagatccgtcagttccgcagccaggtggctccccgcacgcaaatcttcattattcgcgatcaggatcgcgaagtgctggtcaataaaaagctcaagcaggcgcaaaggctgtatgagaaaaaccagcaggggcgcgccgcatttatgcagaacatcggcgatgccttcaagcagccgttaaaaacgctggcgacccaggcggcggcgttaaacacctctgaaagccaccagcttgcctgccaggccgattcgctggtcagaatggttgatga

SEQ ID NO: 20158 - DNA, 2051 bp, Enterobacter cloacae
gtcgccacgcgctaccgcgtcgcctgctcgcccggctcgctcatcgcgggcgcgccgtggctaaaaggcaaaccgatggtgcccgccctcacccagttggcccgcgaagagcatgatcgtttcagctccttaccgacgatcggcaggcgatcaacagctggcgtctgccggtagtggtggcgatgaacgacggcaggatcggcgtgatcgagcatttcgacggggacgatacgctggaaggtccgctttttcgccgatgagacctacaccaaccggctgtcgatgacggcgatgctgcccgctatccgccacgttattgccctgcgtcccctcgccgcgctgaaggacagccgcgtggacgcctatatctcaaaataccgtccggactggctctaccggctggtgatgcgcgacctgcgcccctacagctgggtcatgctggccgccctctttatcaacgtgctgtcgctctccgggattgtcttttccatgcaggtctatgaccgggtgatccccgcccagtcctatccgacgctttacgtcctgaccatcggggtgctgattgccaccctgtttggctttcgtgtgcgcgtggcgagcgggcacattatggatctgctcggcaagcgatcggacatgcgcgtttcagatcgcgtcttaggccacgcgctgcggtgcgcaacagcgcgatcccccgctccaccggcagctttatctctcagctgcgtgagctggagcagatccgcgagatggtcacctcgtccaccatctcgaccattgtcgacctgcccttctttttactgttcgtggtggtgctggcgatcatcgccccgcagctggcgtggatcgccccggtcgcggcggtgatcatggtcctgcccggcctgctgctgcagaagaagctggcggagctggcgaagcagtcggcccatgaatcgaccctgcgcaacgcggtgctggtggagagcgtgcaaggtctggaggacatcaagctgatgcaggcggaaaaccgctttttgcaacagtggaacagctatatccagatcaccgcagaatccggcctgcgcacccgcgagctgacgcagaacctgattagctgggggatgaccattcagagcctggtctacgccggggtgattgtggtcggcgccccgatggtgatcgacggcaccctgactaccggctcggtggttgccgcgtcgatgctggcctcccgcatgatcgccccgatggcgacgctgtgcggcgtgctggcgcgctggcagcaggtcaaagcggcaaaagaggggctggacagcatcatgcagcttcccaccgaaaaccagcgcgaggagacgccgatccgccaggacgtgctgcgcggacactacctcttcgagcaggcgcagttccgctatcagccggacgatccgcgcatggcgctgcgcattaaccggctggagatccggccgggagaaaaagtggcgatcctcgggcgcaacggcgcgggcaaatcgaccctgctgcaggccatggcgggcgggatggatctggcggccggcgagctgcggcttgataacttcagcctgccgcatctcgacgtcgccgacgtccggcgcaacgtcggctttatgacccagaacgcgcggctgttttacggcaccctgcgcgaaaacatcaccctcggcatgccgcgcgccaccgacgaagagattttcgaggcgctggagctgaccggcgcggcaggcttcgtgcagaagctgcccaaggggctggactacccgatcatggaaaacggcgtggggttatccggcgggcaacgccagtcgattctgctggcgcggatgctgctgcgcgatccgaatattgtgctgatggatgaacccaccgcgtcgctggacgagcacaccgagcgggaattcatccagcgtctgggcgactggctcgggcatcgcaccctgattgtcgccacgcatcgcgtaccggtgctggaactggtggagcgcgtcgtggtgttgaaagagggaatgctggtgatggacgcgccaaaggcccaggcgctgaacaacagc

SEQ ID NO: 20159 - DNA, 2032 bp, Enterobacter cloacae
ctggaagaagacaaggtggcgtgcgaaaagcactccgggccgcagtatctggcggaaggctctaaaagcgtctttatcaacgggcagcccgcggtgcgtgcgaaagatcgcaccacctgcgaaggcacagtttccgacgacgtctccccgaacgtgatcatcggcggggacacgctcacggtccgcgatatcaaaagcggtaaaacgccgggtctggcgctggggatgattgcgctctccctgctgcgcgggcgtccgggcaagatcctgaaaaacatgccctgcgcgctggcggcagccggcggcgggatgctggccgatatggcggtgaatgccgtgtttggctcctcgcaccctgttcacgccgccaccggcgtgaaggtgctgaatgacgacgacgagctcgacttctcgctgccggggcgctttccgcttcgctggcagcgcagctacaacagccttaccacccgggaagggctgttcggtctgggttgggcaacgacctttgacagctatctcacgctggaggacaacaacgccacctggttcgacgaaaccgggcgcgagctgagcttcgagctgccccctgtcgaccgcgcgttttacagcatcagcgaaggcattatcatccgccgcaatgagaacggcgacgtggcgattgccgatgatgacggctcggtgtggcgtctgtataaaccgacccgggcgaatccatctatcctgcgtctggcctccctcagcgacgaatacggcaacgcgctgctgacggagtgggacgagcacggcaggctggttggtcttcacgacgagccgcgggcgatagacgtcaccctgcgctatgacgatgaacgtttcccgcagcgcgttaccgctgccagccatttcgacggcagccatacatggccgctgatgcagtggggctacgacgcgcgcggccagctggcgagcgcgacggacgcctccggcgtggtgacgcgtgaataccgctataacgagcacgggctgatggtctggcaccggatgccgggcggtctggagagcgaataccgctggaaaaaattcgatcactggcgcgtggtggaaaaccgcaccagcaccggcgacgggtgccgctttagctacgatttagccgccgggctggcgaccgtcgagcactacgacggccagacgcgccgccactactggaacgcgcaaaacctgattgtccgctacgtggacgagcgcggtgcaaaactggcgctacgagtgggacgagaacgagcttctgacgcgtcgcatcgatccgctcggcaatgccgttaccttcgtctacgacgacatgggcaaccgggttcaggagatcgacgtcgacggcaatacccgcactaccacctggctggagcaccgcgcgcttcctgcggccataatcgaagccgacggcagcgccacccggttctggtacgacgaacatcacgggcttaagcgcgtggtggacccgatggggcagaccacgcagctgcgccgggacgcgttcggccaggtcgttgaagaggttgatgccgccggaaacagccgctaccaggagtacaacgaggccgggcagatcgttcgttcgacggactgttccggtcgtattacccgctaccgctaccatccgctgggctggctggtggccgagaccggcgccgacggggaagagacgcgatatcgctacgacgctgcagggcgtccggtacagctcgatcgtcctgaaggctggacggaatcgctcaaatggaacgaacgtggcctgccggtgaagcatgcgggcgccgacggtaaagagagcgagttcatatacgatgaggcggggcgcttaaccgccacccgtaatcctcagggtgaagtggtccgtcgccgctgggacagccgcgggcgtctgattgccctggaaaacgaaaacggcgaacgtagtcagttccgctggggcgcggactcgctgctgctggaagaggtggggctggatgcgtactcgcagtatcgctatgacgcctgcggacgcacgatagcacgc

SEQ ID NO: 20160 - DNA, 438 bp, Enterobacter cloacae
atgaaatacaccctccaggaaggttcgttttccctttttcctgctgcctggcaggataacagcatgaatattattcgcgatgacgaaagcgggctgtccgtggtggtcagccgcggcgtgattcccgatggcagcgactacgaacaagagttccaccgccagtgggatgtgctgcgtcctcagatgggcgaaattgcccagagcgaattccggaacgtaaaagccgggcctgacggaaaaattaacgggctagaagttgagaccacctttgaacgtaacgggcagcgcctgtggcaaaaacagctggctgtgcagacgccgggcaaaccggtattgatgatttttaccctctcggcactcagggcgttcaccgaagaggacgaggtgcgctggagcgcgcttaagcagagtctgacgctaaacgacaaccggaatgtg

SEQ ID NO: 20161 - DNA, 987 bp, Enterobacter cloacae
gtgcgccagtctaacctgtgcctggagatcgccctgccgaccaaaccgctggaagacgtgaacgacgaaaacggcgaaatcgcgctgtgtacgctgtccgcgttcaacctgggcgcgattaagagcctggacgagctggaagagctggccgtgctggcggttcgcgcgctagacgccctgctggactaccaggattacccaatcccggccgctaaacgcggtgcgatgggccgccgtaccctgggtatcggcgtgatcaacttcgcctactggctggcgaaaaacggcaagcgttactccgacggcagcgctaacaacctgacgcaccagacgttcgaagcgattcagtactacctgatgaaagcctctaacgagctggcgaaagagcaaggcgcgtgcccgtggttcaacgaaaccacctacgcgaaaggcattctgccaatcgacacctacaagaaagacctggatgcgatcgtcagcgagccgctgcatctcgactgggaaggcctgcgcgagtccatcaagacccacggcttgcgtaactctacgctctctgccctgatgccgtccgagacctcttcgcagatctctaacgccaccaacggtattgaaccgccgcgcggccacgtcagcatcaaagcgtcgaaagacggcgtgctgcgtcaggtggtaccggactacgaaacgctgggcaacaactacgagctgctgtgggaaatgccaaacaacgacggctacctgcagctggtgggtatcatgcagaagtttatcgaccagtcgatctctgccaacaccaactatgacccgacgcgcttcccgtccggcaaggtaccgatgcagcaattgctgaaagacctgctcaccgcctacaaatttggcgtgaaaaccctgtactatcacaacacccgtgacggtgcggaagacgcgcaggacgacatggtaccgtcaattcaggacgatggctgcgaaagcggcgcatgtaagatc

SEQ ID NO: 20162 - DNA, 180 bp, Enterobacter cloacae
atgtcgactattgacgcacaagctgtagcacaacgaattgataccgtgctggatatcctggtggcgggcgattatcactctgctatccgtaatctcgagatcctgaagtctgaacttcttgctcagaatggtgccgacaatgcgccagaaaacggacagccaaaagcgccgtgggaagtt

SEQ ID NO: 20163 - DNA, 2151 bp, Enterobacter cloacae
gtgtcccgtactattatgctgatccctaccggaaccagcgtcggcctgaccagcgtcagccttggcgttatccgtgctatggaacgcaaaggcgttcgtctgagcgtctttaagccaatcgcccagccacgtgccggtggcgatgcaccagaccagaccaccaccatcgttcgcaagaactccaatctgccagcggctgaaccgctgaagatgagccacgttgaatctctgctgtccagcaaccagaaagacgtgctgatggaagagatcatcgccaactaccatgctaacgcgcaagacgcggaagtggtgctggttgaaggtctggtcccgacgcgcaaacaccagtttgcccagtctctgaactttgaaatcgcgaaaaccctgaacgcagagatcgttttcgtgatgtctcagggcaccgacaccccagagcagttgaacgagcgtatcgaactgacgcgcagcagcttcggcggcgcgaaaaataccaacatcaccggcgtgatcgtgaacaagctgaacgcaccggtggatgagcagggccgaactcgccctgacctgtccgagattttcgacgattcttccaaagcgaaagtcatcaaagttgacccggctaagctgcaggaatccagcccgcttccggttctgggcgcggtgccatggagcttcgatctgattgccacccgtgcaatcgatatggcgcgtcacctgaacgccaccatcgttaacgaaggcgacatcaacacccgccgcgtgaagtccgtgaccttctgtgcgcgcagcattccgcacatgctggaacatttccgcgcaggttccctgctggtaacctccgcagatcgtcctgacgtgctggttgcagcctgcctggccgcgatgaacggcgtggaaatcggtgcgatcctgctgaccggtgcctacgagatggacccacgcgtcagcaagctgtgcgaacgcgcgttcgctaccggcctgccggtcttcatggtgaacaccaacacctggcagacctccctgagcctgcagagcttcaacctggaagtgccggttgatgaccacgagcgtattgagaaagttcaggaatacgttgcgggctacatcaacgcagactggatcgaatccctgactgcaacctccgagcgcagccgccgcctgtctcctccagcattccgttatcagttgaccgagctggcgcgtaaagcgggcaaacgcgttgttctgccagaaggcgacgaaccacgtaccgttaaagcggctgctatctgtgcagagcgcggcatcgcgacctgcgtgctgctgggtaacccggatgagatcacccgcgttgcggcgtctcagggcgttgagctgggcgctggcatcgaaatcgttgaccctgaagtggttcgcgagagctacgttgcccgtctggttgagctgcgtaagagcaagggcatgaccgaagccgttgcgcgcgaacagctggaagacaacgtggtgctgggcacgctgatgcttgagcaggacgaagttgacggtctggtttccggtgcggttcacaccacggcgaacaccatccgcccaccgctgcagctgatcaaaactgcaccgggcagctctctggtttcttccgtgttcttcatgctgctgcctgaacaggtttacgtttatggtgactgcgcgatcaacccggatccaaccgcagagcagctggcagaaatcgctatccagtccgcggactccgcgattgccttcggtatcgaaccgcgcgtagcgatgctctcctactccaccggtacctctggtgctggtagcgacgtagagaaagtgcgtgaagcgacccgtctggcgcaggaaaaacgccctgacctgatgatcgacggtccgctgcagtacgacgccgccgtgatggccgacgttgcgaaatccaaagcgccgaactcgccggttgcaggtcgcgctaccgtgttcatcttcccggatctgaacaccggtaacaccacctataaagcggtgcagcgttcagcagacctgatctccatcgggccaatgctgcagggcatgcgcaaacctgtgaacgacctgtctcgtggcgcgctggtagacgatatcgtctataccatcgctctgaccgcaatccagtcttcgcagcagcagtaatgttaaaaa

SEQ ID NO: 20164 - DNA, 1431 bp, Enterobacter cloacae
atggtgcgcaacctattgtgtcagccaattcgttgccaggcgctattttccctgtccccggctgggcaaacctcgcaacgaacggcatcacttaaccctgaggaatacgaaatgacaacgacgcgcactctttttaaaggcggcatcatccttactttggatgccgatatacccaacctctccgtgggcgatgttctcgtccatggcgaccgtatcgcagctgtgggtccggaactgcaggcggatgatgccctggtaattgatgcagctggccatatcgttatgcccggcctggtggatgctcatcaccatatgtggcttggcgtaatgcgccgcatgatgccaaatgtcgacgatctgtttgattacattgatgtggtcgcagagaaactgggcaaacattatcgtcccctggacatgtacctgagtaccaggctcacggcacttgcctcactggatgccggtattactaccatcattgatgcctgccacaactcgcgcagccccgagcatactgatgcagcattagatgctctaaaggaaagcggcatccgtgcgttacatatggtcggtgcagcaatggataaagaagcttcatcggcgcatttgcctgccgatttggagcgactctcgcgaagctggaatacaagtgacagcctggtgcacgttggtctgtttggtcagctcaatcttgactggtggaaggtcgctcgcaaactcgacatgcgcattctgacagaattcatcggcgatctcgccaatctaggccctgagtttgccacgccgggcgtactgggcacacataacatcttcaaccattgttcaagggttcctcaggatacctggaagctcctggccgattcaggagtaaacatcactgtcaatccacggtcggatgcgctatttggcttcgacgatgaaagttttgcctaccagcaggctgtcgatcgcggcttgaccccggcactgggcattgaccttgatactgcctttggcagcgatatgttcggtgaaatgcatgctctgttcgggcaacagcgatcggctatgcgctaccgtcgcttccgtggtgaggacaatgtgccgtcacccatcacggccgaggaggtcctgaaagcggcaacggttaatggcgcgcgtgcggccggtttggaggaccagattggcacccttacgccaggcaagcaggccgacattatcatggttcgcaccagcggagccgctgttttcccggtaaccaacgtaattggtaccgtcgtgcaggcgatagagcggtctgatgtggataccgtgatggtggccggccagcttcgtaaacgtgcgggcaagttggtggatattgaactggcggcgctaagcacagagataaccgcttctcgtgattacctgctcaatgccagcggctatcacatcgatctttttaaagcatcc

SEQ ID NO: 20165 - DNA, 1020 bp, Enterobacter cloacae
atgtttgtcatctggagccatgaaaaagggttcatcatgagtcatcagctcaccttcgccgacagtgaattcagcagtaagcgccgtcagaccagaaaagagattttcttgtcccgcatggagcagattctgccatggcaaaacatggtggaagtcatcgagccgttttatcccaaggctggtaatggccggcgaccttatccgctggaaaccatgctacgcattcactgcatgcagcattggtacaacctgagcgatggcgcgatggaagatgctctgtacgaaatcgcctccatgcgtctgtttgcccggttatccctggatagcgccttgccggaccgcaccaccatcatgaatttccgtcacctgctggagcagcatcaactggcccgtcaattgttcaagaccatcaatcgctggctggccgaagcaggcgtcatgatgacccaaggcaccttggtcgatgccaccattattgaggcacccagctcgaccaagaacaaacagcagcaacgcgattcggagatgcatcagaccaagaaaggcaatcagtggcactttggcatgaaggcccacattggtgtcgatgccaagagtggcctgacccacagcctggtcaccaccgcggccaacgagcatgacctcaatcagctgggtaatctgctgcacggtaaggagcaatttgtctcagccgatgccggctaccaaggggcgccacagcgcgaggagctggccgaggtggatgtggactggctgatcgccgagcgccccggcaaggtaagaaccttgaaacagcatccacgcaagaacaaaacggccatcaacatcgaatacatgaaagccagcatccgggccaaggtggagcacccgtttcgcatcatcaagcgacagttcggcttcgtgaaagccagatacaaggggttgctgaaaaacgataaccaactggcgatgttattcacgctggccaacctgtttcgggcggaccaaatgatacgtcagtgggagagatctcactaaaaa

SEQ ID NO: 20166 - DNA, 3255 bp, Enterobacter cloacae
atgcaatcagcagcacatcaggaaaaatacttccagcaatacatcatcgaccggtttgtagaacagggctggaagctgggtgattccaagttctacgacaccgagagggcggtgtaccccgaagatctggaaaactggatcaaatccagcggccagcaggaaaaatgggacaagctggaacggctcaacggggccaaaacccttgaagtgctgatggaccgcttggataaagcactggagaaacaaggcaccatgcaggtgttgcgccagggcttttctattgccggttgcggcctgatcgagatgaccgaggccgcaccggaagacaagcgcaatgcagcagtcattgagcgctaccaggccaatatcctgcgcgtggtgccggagctgaagtatcacccggcccgtgaatttgccattgatctggtgctgtttatcaacggtctgccggtggcaaccgtcgaactgaagaccgacttcacccagtcctgcgaagcggccatggatcagtaccgcaataatcgccgaccgtatgacgccaagaccaaacgcagggaaccgctgctgaccttcaagcgtggggcggtggtgcatttcgccatgtccgactctgaaatcatgatggcgaccaagctggatggagaaaacacctttttcctgccgttcaataaggggcgcaaggacgaaagcggcacggtacatgcgggtaacccgccaggtgagattaaggccgatggtactcaggaataccctgtagcctacttctgggaggaggtctgcgaaccggatgcctggctgcggattttccatagctttgtctacgtcgagaaaaaggacgtggtggatattcagggcaactggtcgaagaaagaaaccctgattttcccgcgcttccaccaatggacggcagtgaaccagatgctggccgatgcccgcgaaaacggcgcaggcatgacctacctgtgtgaccacagcgccggttccggcaagaccagcaccatttcctggacggctcatgacttggtgaaactgcgcgaagataacggcgacgcggtatttaacagcgtgatcattgtcaccgaccgtaatgtgctggacggccagcttcaggacgcggtgaagcagattgaccatcagtttggggtaatcgccgccattgaccggcagaagtcatccaagtccaagagcaagcagctctcggaggccttgttgtctggcacgccgattgttgtggtcacgatccagaccttcccttacgcgatggaagccatcatcactgacaaggccctgaaagggaaaaactttgctgtgatcattgatgaggcgcataactcgcagacaggctctaccgccgctaagctgcaagccgcgctgggaatgagcggacaaggcaagatgtccaccatgacggtggatgaactgctggagcaactgcaaaagtcccgcgcccgcccggagaatatcagctacttcgcctttaccggcacgcccaagcactccactttgatgctgttcggtcgcccggcagatacaagccaaccggcctcggacgataacccgccacaagccttccacctgtacaccatgcgccaggccattgaggagaaattcattctcgatgtgttgaacggctatgtaccctacaaaacggccttcaatctttccaagcagcttgaagacagcaagcgggtgagcggcaaggccgccaaacgcgccctggcacagtggatgtcattgcaccctaccaatgtgacccagaaggtgcagtttatcgttgagcactttaccaagaacgtcgcccaccggctggatggcaaggcaaaggcgatggtcgtgaccagctcccgcgccgctgccattcgctacaagaaggcgtttgaccgctatatcgagcagcacagcgagtacggctttattcattcactggtggccttctccggcaagatgaccggtaagcaggtgatgcaccaggatgacggcgagttcaaggacgatgtgtttatcgtcgatgagaacgaggagttcaccgagcagagcatgaacccggatgtccacgggcaggatttgcgctttgcctttgaccgcccggaataccgggtgatgttggtggccgacaagttccagaccggctttgaccagccgaaactggtcgccatgtatgtggacaagaaaatcgccaaccatgtggagattgtgcagaccttcgcccgcctgaaccggacggcaccagggaaggatgaggtctttatcatcgacttcgtgaacgacccggagaacgtgcgcaaggcctttgccacctatgacaagggcgctcacatcggcgaagtgcaagacctcaatgtggtctacgagatcaaggagcgactggacgagcacggcctttacgacgagaaggatttggccgcgttcaaggaagcccgcttcaagaccatccgcgacatcactcatactaaatcgccgcagcacaaggcgctgtatgccgctacggctggagcgacggccttgtataacgacaagatgaaaatgctgcgcgatggcatggcaacctgggaagcagcgtttgagaaggcccgcgccaagggtgacgaggcgggcatgaagtctgccgatcaccaccaggatgagtatgccgagcaaatcaaggcgttgatgggcttcaagtcggacctggggcgcttctgccgtacctattcctatatcgcccaactgattgattttggcgatccggagttggaaaactttgccgctttcgccaagctgctgcaaaagcgccttcagcacgaagcaccggaaaccgtggacttgacaggcctggtgcttactggctttgacatcaatgctcgacccgatgacgtagaagacgaaggcaaaaccccggtattgcaaccagcaggtgcaggcggtggtggcgcggtaggcgacaagcctaaattcgtcaaagaaattatcgagaggctcaacagcctgtttggtgaggcgacgccgatccaggatcaggtggctttcgttaatcagatttcagcgattaccggtgaaagcgatgtcgtcatggctcaggtggaaagcaacacccgtgagcaggctatgaaaggcaacctccccggtgctgttcagcaagcggttgttcgtgctttgtccagtcatcagaagctggcaacccaggtgctcaagtctgaccgtcagggcatgaccgcattggttgatatggtgtatgacctgctgcgcgaaggcaaagacatcgacctggatatggat

SEQ ID NO: 20167 - DNA, 2874 bp, Enterobacter cloacae
cttttgttccagagcggacgccgtgatgaaggctttgcggtattgcaggagatggctaaatcgaccaacgggcgcagcaggtcgtctgatatgtggtatgaccaaatcaaaggccagcctgccagcagcgccaggttcaggccgctgcaaaaaatacctgagcatattcagcagtggtgatagcgtcgtggcggcgcgtgcccagctcgaagaacagcaaaaacagctcgctgacccggcgttccgcgcgaaagccggaagggctggcggcggtggatgccgggcaggggagtaaggcggtggcagagctgcaaaaagccgtcagcgccaaccatgccgacagtgaagcggtaggcgcccttggccaggcctattcccagaaaggcgaccgcgcccgcgcggtggcgcagtttgaaaaggcgatagccctcgatccccagagcgataaccggggtaaatgggacagtttgctgaaagtcaaccgctactggctgctgatccagcagggcgatgcggccctgaaggcgaataacactgcgcaggcggagcgttactatcagcaggcgcgcggtatcgacaataccgacagttatgccgtgctggggctgggcgatgccgccgcggcgcgtaaagataacgacgcggcggaacgttactatcgccaggcgctgcgtatggacagcggcaacagcaatgcggtccgcggcctggccaatatttaccgtgcccagtccccggagaaggcctcgcagtttatccagtctctctccgccagccagcgccggagcattgatgatattgagcgcagcctgaccaacgagcagctctccgctcaggcagaacagttggaaaatcaggggaaatacgcccaggcggcagagattcagcgtcgtcgtctggcgctctctcccggcgacgtgtggataacctatcgtctctcgcgcgatctctacagcgcgggtcagcgcagccaggcggataccctgatgcgtcagcttgccagccagaaaccgtccgacccagatcaggtgtacgccagcgggctctatctttccggcaacgatcaggaccgcgccgcgctggcgcatctggacacgctgccgcgcagccagtggaacggcaatattcaggagcttgccgaccgcctgcaaagcaaccaggtgctggaaaccgccaaccgtctgcgcgacagcggcaaagagcaggaggcggaaaaccttctgcgtcagcagccgacctccacccgcatcgacctgacgctggcggactgggcgcagcagcgtggcgatctggcgtcggcgaaaacgacgtacagcgccgttctgcagcgtgaaccgcagaacgaagacgcgatcctcggcctgaccgagatttacagcgcgcagggtgacaaagatgccgcgcgcgcagagctggcgaaactgcccgccgcgcaaaacggccagccgctgtcgctcaacatgcagcgccggatcgcgatggcgcaggcaggcctgggcgattccgccgccgcagaacagaccttcaacaaaatcattccgcaggctaaatcgcagcccggctccatggaaaacgcgctggtgttacgtgatgccgcgcgtttccaggcgcaaaacggtcagcctcagcaggcgctggaaacctataaagacgcgatggtgtcgacgggcatcaccacgacgcgtccggccgacaacgacagtttcactcgtctgacgcgtaacgatgaaaaggacgactggctgaagcgcggcgtgcgcagtgatgccggtgacttgtaccgtcagcaggatgttaacgtcacgctgcagcacgactactggggttccagcggaacgggcggctattccgacctgaaagcgcacaccaccatgctgcaggtggatgccccgctgtctgacgggcgcatgttcttcagaagcgatctggtcaacatggacgccggttcatttgataacaataacgggacctacgatccaaaatgggggacctgctacgaaacgccgtgtagcggcaacacccatcagtccgacaatggcgcaagcgtcgccgtcggctggcagaataaaacctgggcgatggatattggcactacgccaatgggctttgacgtcgtcgacgtggtgggcggtatcagctacagcagcgatctgggccccactcggctataccgttaacgcccatcgccgcccaatctccagctccctgctggcgttcgccgggcaaaaagatactaacaccggcaccacctggggcggcgtacgtgccaccggtggcggcgtaagcatgagctatgacaaaggggaagcgaacggcgtctggtcaagcctgaacgcggaaacgctgacgggtaaaaatgtggaagataactggcgcgtccgctggatgacgggttactactacaagctcattaataaaaacaacgagcgcctgacggtcggcgtctccaatatgctctggcactatgacaaagacctgagcggttataccctgggtcagggcggctactacagcccgcaggagtatgtctctttcgcgctgccggtgacctggcgtaaacgcacggagaactggtcctgggagttgggcggctcggtgtcctggtctcactctaaaaccaaagacgagctgcgctacccgatccagaacctgatcccgaccgatgagccagaccgctataccgaccggggcgcgatggaaaccggcagcagctcctcaggcacgggttataccgcgcgggccattatcgaacgccgcgtaacgtccaactggtttgtgggcatgggcgtggatattcaggaagcgaaagactataccccaagccatgcgctgatctatgtgcgttactctgctgcaggctggcagggcgatatg

SEQ ID NO: 20168 - DNA, 496 bp, Enterobacter cloacae
aatctactcactttatcgcttggcctggcactgatgccgatggctgaggccgccaactctccgcagcagaaacagctgctggaacaggttcggctgggcgagtcgacacagcgtgaggatttggttcgtcagtcgctttatcgtctggagctgattgacccgaacaaccctgacgtcattgccgcacgctttcgctacctgctgcgccagggcgataacgccggtgcgcaaaaagagctggatcgtctgaaagggatcgcgccgggctcaagtgcataccagtcatcacgcaacacgatgctgctgtccaccccggatggccgccagcagctccagcaggcgcgtttgctcgccacaacgggacacacgcaggaggcgattgcagcctatgacaagctgtttgacggcaacccgccgggcggcgacgtggcgacggaatactggaatgtggtcgcgaaagatcctgctcgccggaatgcggccattaaccagctca

SEQ ID NO: 20169 - DNA, 1675 bp, Enterobacter cloacae
atgcaccacgccacaccgcttatcaccaccattgttggtggacttgtgctcgcttttatcctcggcatgattgccaataagctgcgtatttctcctcttgtcggctatctgttagcgggtgtactggcgggaccgtttacgccaggcttcgtggcggataccaagctggctcctgagctggcggaattgggcgtgattctgctgatgtttggcgtcggcctgcatttctccctgaaggatctgatggcggtaaagtcgatcgccataccgggagcgatcgcccagattggggtggcgacgctgctggggatggcgctttcggcggtgctgggctggtcgttaatgaccggtatcgtatttgggctgtgtctctcaaccgccagcaccgtggtgctgctgcgcgcgcttgaggagagacagctgatagacagccagcgcgggcaaatcgcgataggctggctgattgtggaagacctggtcatggtcctgacgctggtgctgctgccagccgtcgccgggatgatggaaaaagacaacgtaggcctggcctcgctggcgctggatatgagtatcaccatcggtaaggtggtggcgtttatcgccatcatgatgctggtgggacgccgtctggtgccgtggatcatgtcccgcagcgcgcaaccggctcacgcgagctgtttaccctctccgtgctggcgctgacgctgggtatcgcttttggtgccgtagagctgtttgatgtctcctttgccctgggcgcgttcttcgccgggatggtgctgaacgagtccgagctgagccaccgcgcggcgcacgacactctgccgctgcgcgatgccttcgccgtgctgtttttcgtctccgtcgggatgctgtttgacccgatggtcctgattcaccagccgctggccgtgctgggcacgctggcgatcatcatctttggtaagtcgctcgccgccttcttcctggtgagaatgttcggccactcccctcgtacggcgttgaccatcgccgccagcctggcgcagatcggtgagttcgcctttattctggccggtctgggcatggccctgaacctgctgccgcaggcggggcaaaacctggtgctggcgggggcgatcctgtcgattatgctgaacccggtgctgtttgccctgctggaaaaatacctcgataaaaccgaaacgctggaagaacagacgctcgaagaggccatcgaagaagagaagcagatccctgtggatatttgcaaccacgccctgctggtcggctttggccgcgtgggcagcctgctcggtgagaagctaatggcgcagggcattccgctggtggtgattgagacctcacgcacccgcgtcgacgagctgcgcgagcgcggtattcgtgcggtgctgggcaatgcggcaaacgaagagatcatgaatctggcgcatctggactgcgcacgctggctgctgctgaccatcccaaacggctatgaagcgggcgagattgtggcttccgcgcgcgcgaagtgcccaacgattgagattatcgcccgggcgaactatgacgacgaggtggagtacattaccgagcgcggggcagataaggtggtgatgggcgagcgcgagattgccaacaccatgctgatgctgctggagaaaccgccggttgaagaggctgtgacggggta

SEQ ID NO: 20170 - DNA, 1416 bp, Enterobacter cloacae
atgagccagaacgtataccagtttatcgacctgcagcgtgttgatccgccaaagaaaccgctgaagatccgcaaaattgaatttgttgaaatctacgagccgttttcagaaggccaggccaaggcacaggcagaccgctgcctgtcctgcggtaacccttactgcgaatggaaatgtccggtacacaactacatcccgaactggctgaagctggccaacgaagggcgtatttttgaagccgccgagctgtctcaccagaccaacaccctgccggaagtgtgcggccgcgtgtgccctcaggaccgtctgtgcgaaggctcctgtacgctgaacgacgagttcggcgcggtgaccatcggcaacatcgagcgctatattaacgataaagccttcgagatgggctggcgtccggatatgaccggcgtgaagcaaactgacaagcgcgtggcaatcatcggtgcgggcccggcgggcatggcctgtgcggacgtgctgacccgcaacggcgtgaaggcggtggtctttgaccgccatccggaaatcggcggtctgctgaccttcggtatcccggccttcaagctggaaaaagaggtcatgacccgtcgccgtgaaatcttcaccggcatgggcattgagttcaaactgaacgtggaagtgggccgcgacgtgcagctcgacgacctgctgaaggattacgacgccgtgttcctcggcgtgggcacctatcagtccatgcgcggcggtctggagaacgaagatgcgccgggcgtgtacgacgcgctgccgttcctgattgccaataccaagcagatcatgggctacggcgaaaccgccgatgagccgttcgtcagcatggaaggcaaacgcgtggtggtgctgggcggcggtgataccgcgatggactgcgtgcgtacctccattcgtcagaatgcggcacacgtgatctgcgcctatcgtcgtgacgaagagaacatgccgggctctaaacgcgaagtgaaaaacgcgcgtgaagagggcgtggagttccagttcaacatccagcctctgggtattgaagtgaatgccaacggtaaagtgagcggcgtgaagatggcgcgcactgagatgggcgcaccggatgcgaaaggccgtcgtcgcgccgagatcgtagccggttctgagcacgtgatcccggccgatgccgtagtgatggcgttcggtttccgtcctcacagcatggaatggctggcgaagcacagcgttgagctggattcgcagggccgcgtgattgcgccagaaggcagcgacaacgcattccagaccagcaaccctaaaatcttcgccggtggcgatatcgttcgcggttctgacctggtggtaacggcgattgccgaaggtcgtaaagcggctgacgggatcctgaactacctggaagtg

SEQ ID NO: 20171 - DNA, 150 bp, Enterobacter cloacae
atgacagctcagactcagggtgcggaaaatgaagtttcagccgttatcagccagtcgtggcatcgctgcagcaaatttatgcagcgtgaaacctggcaggcgccgcatcaggcgcaggggctgacctttgaatcgatctgccgtcgcaaa

SEQ ID NO: 20172 - DNA, 1167 bp, Enterobacter cloacae
atgagcacaccgatcaaacggctagaaatcattaaaaatgccattgaactggaagatgacgacatcatccagagccagctgacacggctgaaaaatgaagcgtttgacgatgagctacaggcaatcgtcgtggcgcttgaggagaagaactacacctctgcgatggcggccattaccgcctggctgcagggtcagcgcgccgtaacccagtggcgcgatccgcaggtggccgccagcaagctggaactgaaggcgctggaagaacgtctgcgcgatctgattgaccgccgcaacgcccgggtgcagcagcttgatgagttcaacgatctctatttctctcgcctcgggccgctgatgcagcagatcctcgccctgcgtaaaaccctggccgagctgaacctgcgccgtcagcaggcggaagcgcgtcgtcgcgaggaagattaccgtcgctgccagcgctatatggcgcaggcggtagaggtgctggcgacgctcacccagcgctggcgcgatctcccggccgactccgtgcaggccgctgaggcgcgcaagcatcttgaacagcaaagcaatctgattgccaatctgctagccgaagcgctggagctggagagcggcttaacgcgcgaagaggagcctgcgcgtcaggcgcgagacgacgctaacgaagagtacgagaaatatcgcgagcagcatcacgatgccgaagtgcggctgcgcaagggtaaggatctttcggaagaggatcggaacgagctgaagcgcctctggcggcaggcgagcaagctctgccatccggatctggtggcggacgatctgaaagaggaagctaatgcgatgatggtgcagctcaaccaggcgaagcagcgtggcgacgttaaaaccattcgctcactggtggcccgcctgcagcagggctttgagccattgatggcaagcgacaggctgaacgatctggaacgtatccgcaaaaaaatggcgcaggttcgcgagcagatagacattttagtgaacgagctggcggagcttgagaaagaggagtcctggcttctggtctcgtcgctgaacaatatggaagcttacttcgctcagcaggagaaagccctgcacgaggtccgcgcctcgctcgaacatcaggtgagcgaagcgcagctggattccgccgcc

SEQ ID NO: 20173 - DNA, 465 bp, Enterobacter cloacae
gcaagaaaagaaacaatacacaataatcaaatgatccagaatgaactacgtttcatttgctttaattcactatctagtgaagcaaaagaagtaatgcgtggaataatccaggaaagtacttttctaggtaaacaccgtgtaccggaagaagatgtatttgcgatagtaaagaatgctcctgaattcagtgaagtgatggtatttgaacatctaaaactattcagacagagtaaaaatcaaaactatccagatagtaaatcatcgcgtgaaaagtacaaacgcatagcaaccctagtatcacaggcgtttgaagtactagtaaaggaagggaaatcccttaatagaatgaagcaatacaaaccaaagaaaaccgtaactgaagaacatgtagcactagttgaactgctaaaagatgaaggtgcggatcttattaccttaattgaacgactagtagcaatgaataag

SEQ ID NO: 20174 - DNA, 510 bp, Enterobacter cloacae
atgactcttcgaattcgccaggcctccggggccgattcaacgcttttaagcgagctgggataccgaatctatcccgcccattttcagcatctgtgggtgtcagacgcagagatgaaggattttctcgacggcgaatacgcgctttccgtacttgaacagagcctgaaagaggacgctgtttcctggtatgttgccgagaccgatcggccagtgggattcatgaaagtgacctgggaagccctgctcccggaaacggacaagaagggggttctcctcaacaagctctacctcgatcccgccgagaccggcaagaactatggcctggtgatgttcaacagcatcaccgacatggcccggagcagggggaaagactatctctggctggaagtgcttgagcagaatgcgggagcgtatcggttctaccagaagcagggcatgctctgcgttaataacgtccttttcgaaaccgcttcacagcagagcattctcagaattatggggatgtctctt

SEQ ID NO: 20175 - DNA, 1146 bp, Enterobacter cloacae
atgaaaataaccaaactcaccacgtaccgtttacccccgcgctggatgttcctgaaaatcgaaaccgatgaaggggttgtgggctggggcgaaccggtgattgaagggcgggcgcgtaccgtagaagcggcggtgcacgagctgggtgaatacctgattggtcaggatccggcgcgcattaacgacctttggcaggtgatgtaccgcgcgggcttctaccgcggagggccgatcctgatgagcgccatcgccggcatcgaccaggcgctgtgggatatcaaaggcaaagtgctgaacgcgccggtctggcaattgatgggcggcctggtgcgcgacaaaatcaaagcctacagctgggtcggcggtgaccgtcctgcggaagtgattgatggcatcacgcagctgcgcaacatcggcttcgacactttcaagctcaacggctgcgaagagatgggcattatcgacaactcgcgcgcggtagaccgggcggtgaataccgtggcgcaaatccgtgaagccttcggcaacgagattgagtttggcctggatttccacggccgcgtcagcgcgccgatggccaaagtgctaatcaaagagctggagccttatcgtccgctgtttatcgaagagccggtgttggccgagcaggccgagtactacccgaaactggctgaacagacccacatccctatcgcggcgggtgaacgtatgttctcgcgcttcgagttcaaacgcgtgctcgaagcgggcggcattgccatcctgcagccggacctctctcacgcgggcggcatcaccgaatgctacaaaattgccgggatggcagaggcttacgatgtggcgctggcgccgcactgcccgcttggcccgatcgcgctggctgcctgtttgcacgtcgactttgtctcccgcaatgcggtgttccaggaacagagcatggggattcactataacaagggcgcggaactgctcgattttgtgaaaaataaagaagacttctgcatggaaggcggtttctttaaaccgttaacgaagccgggccttggcgtagaaattgacgaagccaaagtcattgagctgagtaaaaatgcgccagactggcgtaacccgctgtggcgtcatgaggacggcagcgtagcggaatgg

SEQ ID NO: 20176 - DNA, 468 bp, Enterobacter cloacae
gtgaacatgaacgcaacaatcctcggccaggccatcgcgtttattctctttgtctggttctgcatgaagtatgtatggccgcctttaatggctgccatcgaaaaacgtcagaaagaaattgctgacggtctggcttctgcagaacgcgctaagaaagatttggaccttgcacaggccaacgcgacagaccagctgaaaaaagcgaaagctgaagctcaggtaatcattgaacaggctaacaaacgccgttctcagatcctggacgaagccaaagctgaagcagaacaggaacgtactaagatcgtgacacaagctcaggcagaaattgatgctgagcgtaaacgtgctcgtgaagaactgcgtaagcaggttgcgattctggctgttgctggcgccgagaagatcatcgaacgttccgtggatgaagctgctaacagcgacatcgtggacaaacttgtcgctgaactg

SEQ ID NO: 20177 - DNA, 111 bp, Enterobacter cloacae
atgcgcaggatcgttaactttctgatgaataatattcgcgagcatttcatgctctacatcttattgtgggcgctgctggccattattgattttgtttacattgtattttac

SEQ ID NO: 20178 - DNA, 135 bp, Enterobacter cloacae
gtggccgcgataagtacgagtcggtgcgaattcacccagtttgtgaccaaccatttcgtcggtaacaaagactggaacgtgctgacgaccattatggacagcgatggtcaaaccgatcatgttaggaaagatcgt

SEQ ID NO: 20179 - DNA, 1044 bp, Enterobacter cloacae
ggggcgccgctgctgctgtggctgctcccggcctgcgcagcatgagcgcaccggcgatggacgccggcgataaagtttacgatgaacgtcggtcggtgctgtggtttagcccagacggtctggctgtgctgattatcgcttcatttgcggcgctctcatttggacgcgatgccgtgggctggcactgggcgacgggggatttactcaatgaactggtgcagtggcgctggccgcgtatctatcgtgcgctgatcgcaggggtaatgctggcggtggcggggtgcattattcagcgtctgaccggcaacccgatggcaagcccggaagtgctcgggatcagctctggcgcccctttggcgtggtgctgatgctgttctttgtgccggggaatgcgtttggctggctgatcctgccggcagtatcggcgcggcagtcacgctgatgattatccttattgccgccggtcgcggcggattttcaccgcaccgcatgctgctggccgggatggcgctcagcaccgcgtttaccatgctgctgatgatgctgcaggccagcggcgatccgcgtatggcgaagatcctgacctggatttccggctcaacctacaacgccaccggcagccaggtggtctggtccgggatcgcgatgctcgtgctgctggcgatggtgccgctgtgccgccgctggatgaccattctgccgctcggcggcgaaaccgcgcgcgcggtgggaatggcgctgacgccagcgcgcgtggccctgctgctgctggcggcgtgcctgacggctgtggcaaccctgacgattggaccgctgagttttgtcggattaatggccccgcacattgccagaatgatggggttccgccggacgatgccgcatattgtgatgtcggcactgacgggcgggatgatgctggtgtttgcggactggtgcggaagaatggtgctgttcccgtatcagatcccggcgggtctattgtcgacctttatcggtgcgccgtactttatttatctgttgagaaagcagagccggtaataaaag

SEQ ID NO: 20180 - DNA, 375 bp, Enterobacter cloacae
atgcagcggcgctgcaattatcccagcgatgcgtattacggagattatggtggtcgcggaatttcagtttgtgagcgttggggcaattttgaagctttcctgaaagacatgggcgagcgtccagcaggtcatacacttgatcggattgatgtagataaggcgtactcaccagaaaattgccgatgggcgacaccaaaagaccaggcaagaaaccgacgaagtaaccatatgcttgatacaccagcaggtcgaatgtgcattaccaaagcagcagaaacctatggtgtaaaagtaaagacaatagcgcaccgattgagcaggggatggagtgttgaaaaggcgctgctaactcaaccatggcagggcaacaatgag

SEQ ID NO: 20181 - DNA, 1149 bp, Enterobacter cloacae
atgctggtgttactggtggccgtcggtcagatggcgcaaaccatctacattccggcgattgccgacatggcaaaggaattgaacgtccgcgagggcgcggtgcagagcgtgatggcagcctacctgctgacctatggcgtttcgcagctcttttacggcccgctgtctgaccgcgtcgggcgtcgcccggtgatcctggtgggcatgagcattttcatggtggcgacggtgattgccattaccacgcacagcctgaccgtactgattgccgccagcgccctgcagggcgtcgggaccggcgtcggtggggtgatggcgcgaaccttaccgcgcgatatgtatcagggcacccagctccgtcatgccaacagcttgttgaatatgggaattctggtcagcccgcttctcgccccgctgattggcggcctgctggacacaatgtggtcctggcgcgcctgctacgccttcctgctggtgctgtgcatcattgtcaccttcagcatggcgcgctggatgccggaaacgcgcccgcaggacgcgccgcgcacgaagctcatcaccagctataaaacgctgttcggcaacgggtcgtttacctgctacctgctgatgctgatcggcggcctggcgggcattgcggtgtttgaagcctgttccggcgtgctgctgggcgcgggtctgggcctgagcagcatggtcgtgagtattctgtttattctgccgatcccggcggcgttcttcggcgcgtggtttgccggacgcccgaacaaacgcttctccaccctgatgtggcagtcggtgatcagctgtctgctggcgggtctgatgatgtggatcccggggctgtttggcgtgatgacggtctggacgctgctcatcccggcagcgctgttcttcttcggcgcggggatgctgttcccgctggcgaccagcggcgcgatggagccgttcccgttcctcgcaggcacggctggcgcgctggtgggcggtttgcagaatatcggctccggcgcgctggcctggctctcggcgatgatgccgcagaccgggcaggctagtttgggcctgctgatgacgctgatggggctgctgattttactgtgctggctgccgctggcgtcgcgtgttccgcatcacgagcagccggtt

SEQ ID NO: 20182 - DNA, 1395 bp, Enterobacter cloacae
atgcctgacaataaaaaacaggggcgtacgtccaacaaggcgatgacattcttcgtctgtttcctcgccgccctggcaggattactttttggcctggatatcggcgtcattgccggtgcattacctttcatcactgacgagttccagatcagcgctcacacccaggagtgggtggtcagctccatgatgtttggcgcggccgtcggggccgtcggtagcggctggctctccttcaagctcgggcgtaaaaagagcctgatgatcggcgcgatcctgttcgttgccggttcactcttctctgccgctgcgcctaacgttgaggtcctgctggtttcccgcgtgctgctcggcctggccgtgggcgtggcgtcctataccgccccgctttacctgtctgaaatcgcgccggagaaaatccgcggcagtatgatttcgatgtaccagctcatgatcaccatcggtattttgggcgcgtacctttccgataccgcgtttagctacagcggcgcatggcgctggatgctcggcgtgatcatcatcccggccattctgctgctgattggcgtcttcttcctgccggacagcccgcgctggttcgccgccaaacgtcgattccacgatgccgaacgcgtgctgatgcgcctgcgcgataccagcgccgaagcgaaaaacgagctggaagagatccgcgaaagcctgaaggtcaaacagtccggctgggcgctgtttaaagagaacagcaacttccgccgcgcggtgttccttggcgtactgcttcaggtgatgcagcagttcaccgggatgaacgtcatcatgtattacgcgccaaaaatttttgagctggcgggctataccaacaccaccgaacaaatgtgggggaccgtcatcgtgggtctgaccaacgtgctggcgacctttatcgccatcggtctggtggaccgctggggacgtaagccaacgctgacgctgggcttcctggtgatggcagccggtatgggtgtcctcggtaccatgatgcatgtgggcattcactcaccaaccgcccagtactttgcggtcggcatgctgctgatgtttatcgtcgggtttgcaatgagcgctggcccgctgatttgggtgctgtgctctgagatccagccgctgaaagggcgtgattttggtatcacctgctctaccgcaaccaactggattgccaacatgatcgtcggcgcaacgttcctgaccatgctcaataccctgggcaacgcgaacaccttctgggtctacgcaggtctgaatatcttctttattgtgctgacaatctggctggttccagaaaccaaacacgtttctctggaacatattgaacgtaacctgatgaaaggtcgtccgctgcgcgaaatcggcgcccacgac

SEQ ID NO: 20183 - DNA, 1135 bp, Enterobacter cloacae
atggcaaaacacctgtttacgtccgagtccgtatcagaaggacatcctgataaaattgctgaccaaatctccgatgcggtgctggatgcgatcctggcgcaggatccaaaagcgcgcgtagcgtgcgacaacctatgtcaaaaccggcatggttctggttggcggtgagatcaccaccagcgcatgggttgatatcgaagagatcacccgtaatacggtgcgtgagatcggctatgtgcattctgatatgggctttgatgccaactcctgcgcggttctgagcgcgattggcaaacagtctccagacatcaaccagggcgttgaccgtgccgatccgctggaacagggcgcgggcgaccagggcctgatgttcggctatgcaaccaacgaaaccgacgtgctgatgccagcaccggtcacctacgcacaccgtctggtgcagcgtcaggctgaagtgcgtaaaaacggcaccctgccgtggctgcgccctgatgcgaaaagccaggtcactttccagtacgacgacggtaaaatcgtcggtattgacgcggtggttctgtctacccagcacgccgaagatatcgatcagaaatccctgcaggaagcagtgatggaagagatcatcaagccggttctgccgaccgaatggctgagctctgcgaccaaattcttcatcaacccaaccggacgcttcgttatcggcggcccaatgggtgactgcggcctgaccggtcgtaaaatcatcgttgatacctacggcggcatggcgcgccacggtggcggtgcgttctccggtaaagatccgtctaaagttgaccgttctgcggcgtacgcggcgcgttatgtggcgaaaaacatcgttgctgccggcctggctgaccgctgtgagatccaggtttcctacgcgatcggcgtggctgagccaacctccatcatggttgaaacctttggtaccgagaaagtgccttcagaacagctgactctgctggtgcgcgagttcttcgacctgcgtccatacggcctgattcagatgctggatctgctgcacccaatctacaaagaaaccgctgcatacggtcactttggtcgtgaacatttcccatgggaaaaaaccgacaaagccgccctgctgcgt

SEQ ID NO: 20184 - DNA, 494 bp, Enterobacter cloacae
gtgatgcgcaaagttaccgctgccgtcatggcctcaacgctggcgttcagtgcgtttagccaggctgctgaagctatcatcagcgataacagtcccttacaagagggtgcaacgcagaacagcagccaaagccatatgtttgacggcataagtttaaccgaacatcagcgtcaacagatgcgagatctgatgcagagggcacgacacgaccagccccctgttaatgttagcgaaatggagacaatgcatcgccttgtcaccgcagaaaattttgacgaaagcgctgtacgcgctcaggccgaaaaaatggcacaggaacaggttgcccgccaggtagagatggcgaaggtccgcaaccagatgttccatctgctaacgcccgagcagcaagcggttttgaacactaaacatcagcagcgaatggaccagctgcgtgaggttgcacggatgcagcgaagtcagaaacgtcgtttttcagtagcaatagcagtacc

SEQ ID NO: 20185 - DNA, 363 bp, Enterobacter cloacae
atgcaagaatgggcggcggctgattgctcagtgttcatgcccgagcaaacgtcgggaatattacccgaacaatatctaccggccaacctggcgaacggtcgggaactcagaaaccagccacatatcagattcttcaaacatttcctccagcatgcggttcagtttttcccgatcgcttttgctggcgtcgctattcaggccgtttgcctgcatcggcttcaccttcacttcggcatcagggaaaatctggtgcacccgcttcgtcagctcggccagaatgatctctctggccccttcgagcccctcaacattacgcttgtcataaaccagctcaacaaacatcacgatccctccttgcaaact

SEQ ID NO: 20186 - DNA, 522 bp, Enterobacter cloacae
ttggcgtttggagcgggatgtatcgccgggcggcggctacgcctgacccggcctacacaactatttaaggagagttgcccagtgctcgacccacgggttcgattcgctttcgggttcaggatgctccccggcatcaatcagcagcatctcgccgacgcgctgggcgctctgttcctgcaggagcgcatcgaactgcttgccgccgccgcagaagttagcgtaagagctgtcgcccagagcaatgatgccgtagtgcacgtccggctgatagccaagctggtctttaattccctggaaaagcggcacgatgctgtccggcagatcgccctgcccggtggtggaggtcaccaccagaatgtatttatctttatacttttcccagtctgccagttccggatcttcatagaccgtggctttatggccctggctggcgagtattgcctcagcctcttccgctaccagcagcgagttgccgtacattgtcccgacaaaaatgcctacttcagccatgatgttttccca

SEQ ID NO: 20187 - DNA, 183 bp, Enterobacter cloacae
atgtcgctggaaaatgcacccgatgaggtcaagctggccgtcgatttgattatgctgctggagaatcatgagatccccgccgaaacggtgcttaaggcgctggagattgtacggcgggattttgaagcaaaggtgaaggcctgttgccctcaccctaaccctctcccacagggagaggggaaa

SEQ ID NO: 20188 - DNA, 597 bp, Enterobacter cloacae
ttgggaatagcggaggagataaccgtgcaacgtgaagacgtactgggacaagccctacaactacttgagattcaagggatcgccagcaccacgcttgagatggtagccgaccgtatcgattatcctctggatgaacttaagcgcttctggccggataaagaggcgctactctatgatgccctgcgctatctcagccagcaggttgatatctggcgcagacagctgatgctgaatgaagaactgaccgcggagcaaaagctgctggcgcgctataccgcgctgacggaatgcgtcagcaacaaccgctacccgggttgtctgttcatcgccgcctgcacttattttcccgacccaggccatcctatccaccagttggcggagcagcaaaaacgggcggcgcatgacttcacccacgagctgctgaccacgctggaagtcgatgaccctgcgatggtggctaaacagatggagctggtgctggaaggttgcctcagccgcatgctggtgaaccgtagccaggcagatgtggatacggcgcaccgcctggcggaagatattctacgctttgcccaatgcagaatgggtggagcgctgacc

SEQ ID NO: 20189 - DNA, 2148 bp, Enterobacter cloacae
aaagcgggcaacgtctatgcgaagcaggtgatgcagtcctgggctgatgccgaatggttcctgaaccgcccagcgctggctgaaaaaatcaccgttaccgtctttaaagtgaccggtgaaaccaacaccgatgacctctctccggcaccggacgcgtggtctcgcccggatatccctctgcacgctctggcgatgctgaaaaacgcccgtgaaggtattgagccggatcagccgggcagcgttggcccgatcaaacagatcgaagccctgcagaaaaaaggattcccgctggcctatgtgggtgacgttgtgggtaccggttcttcccgtaagtccgcaaccaactccgtgctgtggttcatgggcgacgacattccgcatgtgccaaacaagcgcggcggcggcctgtgcctcggcggcaaaattgcgccaatcttcttcaacaccatggaagatgcgggcgcactgccgatcgaagtggatgtttctaacctgaacatgggcgacgtgattgacgtttacccgtacaaaggcgaagtgcgcaaccacgagaccaacgagctgctggcaagctttgagctgaaaaccgacgtgctgatcgacgaagtgcgcgccggtggccgtatcccgctgatcattggtcgtggcctgactaccaaggcgcgcgaagctggagtctgccgcactctgacgttttccgtcaggcgaaagacgttgctgaaacaaccgcggttattctctggcacagaaaatggtgggccgcgcgtgcggcgttgctggtattcgtcctggcgcgtactgcgagcctaagatgacttccgtgggctctcaggacaccaccggtccaatgacccgtgacgaactgaaagacctggcgtgcctgggcttctcttctgacctggtgatgcagtccttctgccacacggcggcctatccgaagccggttgacgtgaccacgcaccacacgctgccagacttcatcatgaaccgcggcggcgtttccctgcgtccgggtgacggcgtcatccactcctggctgaaccgcatgctgctgccggataccgtcggtaccggcggtgactcccatacccgtttcccaatcggtatctccttcccggcgggctccggtctggtggcgtttgctgctgcgacgggcgtgatgccgctggatatgccggaatcggtgctggtgcgcttcaaaggtaaaatgcagccgggtatcaccctgcgcgacctggttcacgcgatcccgctgtatgcgattaaacagggcctgctgaccgttgagaagaaagggaagaaaaacatcttctctggccgcattctggaaattgaaggtctgccggatctgaaagtggagcaggcgttcgagctgaccgatgcttccgccgagcgttctgcggcgggctgtaccatcaagctgaacaaagagccgattattgagtatctgaactctaacatcgtgctgctgaagtggatgattgcagaaggctacggcgaccgtcgtacgctggagcgtcgtatccagggcatggagaaatggctggccgatccgcagctgctggaagccgatgctgacgcagagtacgcggcggtgatcgacatcgatctggcggatatcaaagagccaatcctgtgtgcaccgaacgatcctgacgacgcgcgtccgctgtctgaggttcagggcgagaagatcgacgaagtgttcatcggatcctgtatgaccaacatcggtcacttccgtgctgccggtaagctgctggatacccacaaaggccagctgccaacccgtctgtgggtgcgccgccaacccgtatggacgcggctcagctgaccgaagagggctattacagcgtgtttggtaagagcggtgcgcgtatcgaaatccctggctgttccctgtgcatgggcaaccaggcgcgcgtagccgacggtgcgacggtggtttccacctctacccgtaacttccctaaccgtttaggtaccggagctaacgtcttcctggcctctgcggagctggcggcggttgcggcgctgattggcaaactgccaacgccggaagagtaccagacctttgtggctcaggtggataagacggcggtggatacctatcgctatctgaacttcgaccagctttctcagtacacc

SEQ ID NO: 20190 - DNA, 549 bp, Enterobacter cloacae
atgactaagcagcccgaagactggctcgacgacgttcccggtgatgacatcgaagacgaagatgatgagatcatctgggtcagtaaaagtgaaattaaacgtgacgccgaagagttaaaacagcttggcgcggaaatggtagaactgggtaaaaacgcgctggacaagatcccgctcgaccaggatctgcgcgatgccattgaactggcacagaaaatcaagaaagaaggccgtcgtcgccagcttcagcttatcgggaaaatgctgcgtcagcgcgacgtcgatccgatccgccaggcgctggacaagctgaaaaaccgccacaaccagcaggttgcgctgttccataagctggagcagatccgcgatcgtctgattgaacagggtgatgacgccgtgccggaagtgctgaacctgtggccggatgccgaccgccagcagctgcgttccttgatccgcaacgcgaagaaagagaaagaagggaataagccgccgaagtctgcgcgcctgattttccagtatctgcgcgagctgtctgagaacgaagag

SEQ ID NO: 20191 - DNA, 168 bp, Enterobacter cloacae
atggcagtgacggtacgtacagaaacggtaaaacagatgtgtcagcatcgtgacaacggccacagagggcgtaaagcacctgcgactgttgtacccgcgtcctggaaactaacgccgcagcagcaagcgtttattgatgtgttcgcagaagacgaacccaaaaaacaa

SEQ ID NO: 20192 - DNA, 993 bp, Enterobacter cloacae
atgcagtcaaaaattaactggattgataacctgcgaggaatagcgtgtctgatggtggtcatgatccacacgacgacctggtacgtcacgaatgcccacagcatcagccccgttaactgggatatcgccaatattctcaactccgcgtcgcgcgtcagcgtgccgttattctttatgatttccggctttctcttttttggcgagcgcagcgcgcagccgaggcacttcatccgcatcgcggcctgcctggggttctacagcgccgttgccctgctctatatcacgctgtgcacctccattaacgccgggctatcgctgaaatacgtgctgcaaaaaccggtgttctaccacctgtggttcttcttcgccattatcgttatctatctggtctccccgctcatccaggtaaaaaacgtcagcggtaaaatgcttctggccctgatggtggttatcggtattgtcgccaacccgaatacggtttcgcagaaaatcgacggatttgagtggctgccggtcaatctctatatcaacggcgatactttttactacgtgctttacggcatgctggggcgcgccatcgggatgatggacacgcaaaaacgcggtctgaactggctctgcgggacgctgtttatcgctggggtggcggtgatttcgcgcgggacgctgcacgagctggagtggcgcggcaattttgccgatacctggtatctctactgcgggccgatggtctttatctgtgccgtttcgctgctcacgctcgccaaaaataccctgaacgcgcgcgccctgcccgtgctgagtcttatctcgcggcactctcttgggatttacggttttcacgcgctggtgatccacgcgctgcgcacgagaggcgttgagctaaaaagctggccggtgctggatatcgtctggatttttgccgccacgctggcgatcagcctgctgctgtcgatgctgctgcaaaaaatagacgttcgccgcttcgtcagt

SEQ ID NO: 20193 - DNA, 1647 bp, Enterobacter cloacae
atgaaaaaaatgactgccatgctcttttctctggccgtggggcttaacaccgtctccatggcggcgaaagctgacgcaccaaaagagcaggaaacggacgtccttttaattggtggcggtatcatgagcgccacgctgggaacctatctgcaagaactgcagccggactggtctatgaccatggtcgagcgccttgatggcgtggcgcaggagagttcgaacggatggaataacgccggtaccggacattcggcactcatggaactgaactatacgccgcagaaaaaggacggttccattagtatcgagaaggcggtagagatcaacgaagcattccaggtttctcgccagttctggtctcatcaggtcaacagcggcgtgatgcacgacccgcactctttcatcaacaccgtgccgcacatgagctttgtgtggggagagcagaacgtcaacttcctgcgcgcgcgctacgccgctctgcagcagagcacgctgttccgcgggatgaaatactctgaagaccacgcgcagattaaagagtgggctccgctggtcatggaaggtcgtgacccgaaccagaaagtggcggcgacccgtaccgaaattggtaccgacgttaactacggggaaattacccgtcagctggtgacgtctctgaagaaaaaagagaacttcaacctgcagctcagcaccgaagtgcgcggtttcaagcgcaacgcggataacagctggagcgtgaccgttgccgatctgaaaaacaacgaagccgagcacgtcatcaaggcgaagtttgtctttatcggtgcgggcggcgcggcgctgaagctgctgcaggagtccggtattcctgaagcggacgactacgcgggcttcccggtgggcggccagttcctggtgtcagaaaacccggaagtggtgaaccgtcatctggcaaaagtgtacggccaggcttccgttggcgcaccgccgatgtctgttccgcacatcgacacccgtgtgcttgacggcaaacgcgtggtgctgtttgggccgttcgcgaccttctccacaaagttcctgaaaaatggctccctgtgggatctgctcagcgccacgaccacctctaacgtcaagccgatgatggacgtgggtctggataacttcgacctggtgaaatacctgatcagccaggtgatgctctctgacgacgaccgcttcgaggcgctgaaagagtactatccgcaggcgaagaaagaagactggcgtctgtggcaggcgggtcagcgcgtacagatcatcaagcgcgatccgaaagagggtggcgtgctgcgtctgggtaccgaagtggtaagcgataaggatggcaccattgccgcgctgctgggtgcgtcgccgggcgcgtctaccgctgcgccaatcatgctgcacctgatggaaaaagtgtttaaagacaaagtcgccagcccggaatggcaggcgaagctgaaaaccattattccatcctacggcacgaagctgaacggcaacgtgagcgcgacggagcaggagctggaatacaccagccgcgtactgcagctgcagtacatcaaaccgcaggctgcggatgctgcgccaaaagcggagctgaagcctcagccggaaaacaaaccggttgcggatatcgcgctg

SEQ ID NO: 20194 - DNA, 405 bp, Enterobacter cloacae
atgcagctgatgcagttgatcagcgaattaccggtcaccagcattgtcgctatccacgatctcaaccacgcctcgatgttctgcgactcgctgattgtgatgcagaaaggccaaattgtggcgacggggacaccgcaggacatcctgtccgagtcgttgctctgggacgtcttccgggtcaaaaccaaaatcgagatctcgccccagtctctggtggcacagaccggcgcgccggagtatgccccgcatgtgatcaacacgccgctgtccttcctgatcaaaagcgcgctgaacaccaacatcttcggtgaaccgggctggcagggcacaggctggcgcgcagggcgtgatttgcagcgccatgatatcggcggtaaaacggggacaaccaacagctcgaaagac

SEQ ID NO: 20195 - DNA, 705 bp, Enterobacter cloacae
atgtcccgtaatttttctctcgcggtcgcctttctgacgacggcgctctcaggccatgctctggccgacggtatcaacagtttttcccaggccaaggcagcaggcgtgaaggtaaacgccgatgtgccgggcgatttctactgcggctgtaaaattaactggcagggtaaaaaaggggtcgttgaccttgagtcctgcggctataaggtgcgtaaaaacgaaaaccgcgccagccgcattgaatgggaacatgtcgttccggcttggcagtttggccaccagcgccagtgctggcaggatggcggacgaaaaaactgcgccaaagatccggtttatcgccagatggaaagcgatatgcataacctgcagcctgccgtaggtgaagtgaacggcgaccggggtaatttcatgtacagccagtggaacggtggcgaaggccagtacggccagtgcggtatgaaggttgattttaaagagaaagtcgccgagccccctgcccgcgcgcgcggcagcattgcccgcacctacttctatatgcgtgaccgttacgacctcaacctctcccgccagcagacgcagctgttcaacgcctgggacaagcagtacccggtgacggagtgggaatgccagcgcgacgaacgtatcgccagagtccaggggaatcacaacccttacgtccagcgggcttgccaggcgcaaaagagc

SEQ ID NO: 20196 - DNA, 960 bp, Enterobacter cloacae
atgattaagaaaatcggtgtgttgacaagcggcggtgatgcgccgggcatgaacgcggcaattcgtggtgttgtccgtgcagcgctgacggaaggcctggaagtttttggcgtttatgacggttatctgggcctgtatgaagatcgtatggttcagctcgaccgttacagcgtgtctgacatgatcaaccgtggcggtactttcctcggttccgcgcgcttcccggaattccgtgatgaacacgttcgtgaagtggctatcgaaaacatgaagaaacgcggcctggacgccctggtggttatcggtggtgacggctcctacatgggtgcaaaacgtctgaccgaaatgggcttcccgtgcatcggtctgccgggcaccatcgacaacgacatcaaaggtactgactacactatcggcttctttactgcgctgggtaccgttgttgaagcgattgaccgtctgcgtgacacctcttcttctcaccagcgtatctctatcgttgaagtgatgggccgttactgtggcgacctgacgctggcggcagccattgcgggcggttgtgaatttatcgtcgtgccagaagtcgaatttagccgtgaagatctggtggctgaaatcaaagcaggcatcgcgaaaggtaaaaaacacgcaatcgtggctatcaccgagcacatctgtgacgttgacgagctggcgaagtacatcgaagccgaaaccaaacgcgaaactcgcgcgaccgtactgggtcacatccagcgcggcggttccccaggcccgtacgaccgtattctggcgtcccgtatgggcgcgtacgctatcgatctgctgctgcagggccacggcggccgctgcgtcggtattcagaacgaaaaactggttcaccacgacatcatcgacgcgattgaaaacatgaagcgtccgttcaaaggtgactggctggactgcgcgaaaaaactgtac

SEQ ID NO: 20197 - DNA, 315 bp, Enterobacter cloacae
atgaacatctgcgcgcagcgggccgccagggaattctggggtgtcacgtaccatgaccaccagctcaataccctgctgttcctgctgctgttcctgctgctgttcctgctgctgttcctgctgctgttcctgctgctgttcctgctgctgttcctgctgctgttcctgctgctgttcctgctgggcaggatttttatcagcggtctgctgatctgcaagctttcaccgcttcacgctgcgcgcgctgctcttttgttaatccggccatcgggcctcctgaataacaaaggggccgaagccccctgggttaaccca

SEQ ID NO: 20198 - DNA, 993 bp, Enterobacter cloacae
atgaaacatgaaattgcggtgagtgtaataatccccgtttacaacgcagaaaaaaccatcaaatccttgatcgaagatatcttgatagaagacaggatcaacattgaagttattatcgttaacgatggctcctcagacaacacgtcaacgataattaactccataaaggatggcagggttcaagtgattgaacaaaataataaaggtgtatacgcggccagaaataatggattagacaagcataaaggccagtgggtcatgtttctggatgccgatgacgatgtgtctgaaggattcatttataacaggtatatccaggcttccagccataatgctgatgtgcttttgtccaatgcctggaagctttggcatgaaggcgataataaaaaacccgtgcatactaaccagccttatgatgaggttttatccggcaatgcgtggatgagtcacgcagtaaaagtcagggaatggccacattacctttggttacagatagttagatctgactatatcaggaataacaatctgtcatttcatgatggccggagtcataaagatattttatggacgatggaattggcgttggcaaatgggcgtttctacatatcaaaagatatggactacacctacaagtacaataatgaatccatcacaaatcgcggtgattatttcgacgtccgagcagaatgctatattgatgtaatatctaaaaccatcggtcacgcaaagtcgataaaaaataatgatttgagcgtatcgctgtttaggcatgccctgtatgaggctagacactttctaggtttatatagaaaaaaggtgagggacaaagaaaaaatcaggcggttatttgttagagaaatagcatataaagatttaataaaaggtgtatatagccttagtgatattttctttttactgaaagttttcgtaaaaacaaaaaaattcactggtgctagcccgaaattaaaatggataattatattgctattggct

SEQ ID NO: 20199 - DNA, 492 bp, Enterobacter cloacae
atgttcacggcgcttcgccacactcccggtatgaaaaaagagaacggttttacgcttatcgaaacgctggtcgcgatttcgcttgtcgttatcctcagcgcctcagggctgtacggctgggacagctggcagcggcagcagcggctgtggcaaaccgccagtcaggtgcgagattacctgctgtttctgcgcaaccatgccaaccgctacaaccgcgaccatcaaattacccgtctgcgggtgggaggcatggattgtctggtgagctctgccgtgcaaggctgtgagaagggcagtccctttgtgctgataccactctggcctgaggtcgcgatcggcgaggtaacgccgtcgctcgcgttctatggattaaaggatacggcatgggcagggcggatacgcgttcaaagccgcgcgggagaatggctgattattgtctcaaatggaggacgcatcaggatgtgtaaggtctctgcgggaggttcatgtcga

SEQ ID NO: 20200 - DNA, 414 bp, Enterobacter cloacae
ttgcggtactcgaaggtgatacatagctgtactctctcttgttacccgcggccacgccggccagttggctcatacctggagccagaatgtgacggggccatcgttcaccagcgaaacctgcatatctgcagcgaatcgtccggtttgcgtattcatttcctgctggcgacaacgctcaacaaagtactcgtaaagtgcttctgcacgatccggcgcggcgcctttagagaagctcgggcgcatgccgcgctcggtatccgctgccagtgtaaactgggaaaccaccagcacgctgccgcccgcctgctggacgttcaggttcatcttgccttccgcatcgctgaaaatacggtagcccagcacgcgctcacacaagcggttggctttttgttcgtcatcatccttttcgacacc

SEQ ID NO: 20201 - DNA, 1199 bp, Enterobacter cloacae
atgctaatcaaattgttaactaaagtttttggtagtcgtaacgatcgtaccctgcgccgtatgcgcaaagctgttgccgtcatcaacggtatggaaccggcgatggagaagctctctgatgacgagctgaaagcgaaaacggcggaattccgcgctcgtctggaaaaaggtgaaaccttagaaagcctgatcccggaagcgtttgctgtcgtgcgcgaagagctaagcgcgtattcggcatgcgtcacttcgacgtccagctgctgggtggtatggtgctcaacgagcgctgcatcgcggaaatgcgtaccggtgaaggtaaaaccctgaccgcaacgctgccggcttacctgaacgcgctgaccggtaaaggcgttcacgtcgttaccgtcaacgactatctggcgcagcgtgacgccgaaaacaaccgcccactgttcgaattcctcggtatgaccgtcggtatcaacatgtccggcctgcctgcgccagccaagcgcgaagcgtataacgcggacatcacctacggcaccaacaacgaatacggcttcgactacctgcgtgacaacatggcgttcagcccggaagagcgcgtccagcgtaaactgcactatgcgctggtggatgaggttgactccatcctgatcgatgaagcgcgtactccgctgatcatctccggcccggctgaagacagctccgagatgtaccgtaaagtcgacaaaatcattccacacctgctgcgtcaggagaaagaggactcggataccttccagggtgaaggccacttctccgtagatgaaaaagcgcgccaggtgaacctgaccgagcgcggtctggtgaaaattgaagagctgctggtggctgaaggcatcatggaagagggcgagtccctgtactccccgagcaatatcatgctgatgcaccacgtgaccgctgcactgcgcgcccacgcgctgttcacccgcgacgtcgattacatcgttaaagacggcgaagtgatcatcgtcgatgaacacaccggccgtaccatgcagggacgtcgctggtctgacggtctgcaccaggctgtggaagccaaagaaggtgtggatattcagaatgaaaaccagacgctggcatctatcaccttccagaactacttccgtctgtatgagaagctggcggggatgaccggtactgctgataccgaagcgtttgaa

SEQ ID NO: 20202 - DNA, 1821 bp, Enterobacter cloacae
gtgcgccgcatactctcccggcctgaagtgctgcactgcaactttgcggagttccgccaggcgtggccgaagctggcggagagcgacctctatcagcctttcgggcattactgcatggtgccgctggcggcagagggccagatttttggcggctgcgagtttatccgcacgaccgaccagccctggagcgaggcggaatacgagcgcctgcacacctttacccagattgtggccgtcgtcgcggagcagatccaaagccgcgtcaccaataacgtcgattacgacctgctgagccgcgagcgcgacaacttccgcattctggtcgccatcaccaacgccgtgctctcccgcctggacatggacgagctggtcagcgaagtttcgaaagagatccaccactatttcaaaatagacgccatcagcattgcgctgcgcggccatcgcaagggcaagctgaacatctactccacgcactatctcgatgaagccaacccggcgcacgagcagagcgaagtggacgaagcgggcaccctttccgagcgggtcttcaagagcaaagagatccttctgctcaacctgaacgagcaggacccggtcgcgccgtacgagcggatgctgtttaacacctggggcaataaaattcagaccctgtgcctgctgccgctgatgtccggcaacaccatgctgggcgtgctaaagctggcgcagtgcgaggaaggcgtgtttaccaccgccaacctgaagctgctgcgccagattgccgagcgtatttccatcgcgctcgataacgccctcgcctatcaggaaattcatcgtctgaaagagcggctggtggatgagaacctggccctgaccgaacagctcaacaacgtggacagcgagtttggtgaaatcattgggcgcagcgacgccatgtacagcgtgcttaagcaggttgagatggtggcgcaaagcgacagcacggtgctgattctgggcgaaaccggcacgggcaaagagctgatagcccgcgccatccacaacctgagcaaccgcaacagccgccggatggtgaagatgaactgcgccgcgatgcctgcgggactgctggaaagcgatctgttcggccacgagcgaggcgcattcaccggggccagcagccagcggctgggccgttttgagctggcggacaaaagctcgctgttcctcgacgaagtgggcgatatgccgctggagctacagccgaaactgctgcgcgtcctgcaggagcaggagtttgagcgccttggcagcaacaagcttatccagaccgacgtgcggctgattgcggccaccaaccgggacctgaaaaaaatggtcgccgaccgcgagtttcgcagcgacctttactatcgtctgaacgtctttccgatcttcctgccgccgctgcgcgaacgcccggaagatatccccctgctggttaaagcctttaccgcgaagatcgcgcgccgtatggggcgaaacatcgacagtattcctgccgagacgttgcgtaccctttcatcgatggaatggcccggcaacgtgcgcgagctggaaaacgtcatcgaacgcgcggtgctgctgacgcgcggaaacgtgctgcaactctccctgcctgaagttacgcttcctgacgtaaccgcgcccgccgccgagacagcgaaagagggagaagatgaatatcagctcattatgcgcgtgctgaaagagaccaacggcgtggtcgccgggccaaaaggtgccgcccagcgcctggggttaaaacgcaccaccctgctgtcacgcatgaagcgtctcggtattgataaagagagcctggtt

SEQ ID NO: 20203 - DNA, 189 bp, Enterobacter cloacae
atgtttgtcatctggagccatgaaaaagggttcatcatgagtcatcagctcaccttcgccgacagtgaattcagcagtaagcgccgtcagaccagaaaagagattttcttgtcccgcatggagcagattctgccatggcaaaacatggtggaagtcatcgagccgttttatcccagggtggtaatggcc

SEQ ID NO: 20204 - DNA, 168 bp, Enterobacter cloacae
gagtccggaatctttcgctactgcagtggaaaatatcagtggcacggtagcgtctgccattacaccggcagggacgttccggatatcgcaggtgtcctcgcggtatacgccgaacgccgccaggaccgcaacgggccttatgcctgcctgatgagcatcactctgaac

SEQ ID NO: 20205 - DNA, 1962 bp, Enterobacter cloacae
atgcgcctgcaatcccatcatcttgaacttttaagcccggcccgcgacgccgccattgcccgtgaagcgatccttcatggcgctgacgccgtctacattggcggccctggcttcggtgcccgccataacgccagcaacagcctgagcgatattgctgaactggtgccgttcgcccaccgtttcggggctaaagtgttcgtgaccctgaacaccattctgcatgatgatgagcttgagcctgcgcaacgtctgattaccgatctctaccaggccggggtggatgccctgatcgttcatgacatgggcgttctggagctggatattccgcccattgaactgcatgccagtacccagtgcgatatccgcacggtcgagaaggcgaagtttctctccgacgtcggcttttcgcagatcgttctggcgcgagagctgaacctgaatcagatccgcgatattcaccaggcgacagacgcgacgattgaattctttatccacggtgcgctgtgcgtcgcttactccggtcagtgcaacatttcccacgcgcagacgggccgcagcgccaaccgcggcgactgttctcaggcctgccgtctgccgtataccctgaaagacgatcggggccgcgtcgtggcgttcgaaaaacacctgctctccatgaaggataacgatcagacggccaacctgggcgcgctgatcgacgcgggcgtgcgttcctttaagattgaagggcgctacaaagatatgagctacgtgaaaaacatcaccgcgcactatcgccagatgctggacgccattatcgaagatcgcggcgacctggcgcgcgcgtcggccggccgcaccgagcatttctttattccgtcgacggacaaaacgttccaccgcggcagcacggactattttgtgaatgcccgtaaaggggatatcggcgcgttcgactcaccgaagtttatcggtttaccggtgggcgaagtgctgaaagtggcgaaagatcaccttgatgtcgaagtgacggaaccgctggcgaacggcgatggccttaacgtgatgattaagcgtgaggtcgtgggcttccgtgccaatacggtcgagaaaaccggcgagaaccgctaccgcgtctggccgaatgaaatgcccgccgatctctacaaggcgcggccgaacgcggcccttaaccgtaacctcgatcataactggcagcaggcgctgctgaaaacctccagcgaacgccgtatcgccgtggatattgagctgggcggctgggaagagcagctgattctgacgatgacctgcgaagacggaattagcgtgacgcatacgctcgatggccttttcgaggtggcaaacaacgcggaaaaagcgctcaacagcctgaaggatggcgtggcgaagctgggccagacgatttactacgcgcgcgctatcgacgtgaatctgccggacgcgctatttgtgccaaacagcctgcttaaccagttccgtcgtgaaacggcagagatgctggatgccgcgcgcctggcacagtatccgcgcgctagccgaaaagcggaagccgttcctgcacccgtatacccggagacacatttatccttcctggccaacgtttataaccataaagcgcgtgaattctatcatcgccacggcgtgcagctgatcgacgcagcctatgaagcgcatgaagagaagggcgatgtgccggtgatgatcaccaagcactgcctgcgctttgcgtttaacctgtgtcctaagcaggcaaaagggaatattaaaagctggaaggcaacccccatgcagctggtaaacggcgatgaagttctgactctcaagttcgactgccgtccctgcgaaatgcatgtgattggcaagatgaaaaaccacatcttcaaaatgccgcagcccggcagtattgtggcgtccgtcagtccggacgatctgatgaaaaccctgccaaaacgcaagggcagc

SEQ ID NO: 20206 - DNA, 1980 bp, Enterobacter cloacae
atgaaagctgttgtatttgcctatcacgatatggggtgcacgggcacgctggccctgctggaagcgggctatgacattgcggcaatctttacccatccggacacgaccggagagaataacttttttggctccgtggcgcgtatcgccgccgagcgcgggatcccggtttatgcaccggacgatgtcaaccatccgctgtgggtggaacgcatccgcgcgctcgcgcctgacgtaatcttctcgttctactatcgcagcctgctttccgacgagatcttaggtctggccgcaaaaggcgcctttaatcttcatggttctctgctgcccgcctaccgcggccgcgcgccgctgaactgggtgctggtgaatggtgaaacggaaacgggcgtaacgctgcaccgcatggtgcgccgtgcggacgcgggcgctatcgtggcacagcagaaggtcgctattgatgcggacgaaacggcgctgcagctgcatcaaaagctgaatgcgacggcgcagacgctgctgcgtgatgcacttccaggcatcctcaacggcatcttcagcgagaccgcgcaggatgagagcaaggcaagctgctttggccgccgcgcgccggaagatggtcgtctggactggaataagcctgcccgccagctgcacaacctggtgcgcgccgtgaccgacccgtggccgggcgcgtacagctttgcgggcgtaagcaaatttatcgtctggaaatcccgcgtgcgtgacgatattccggctgccaaaccgggcaccgtcgtctctgtctctccgctgattgtgagctgcggcgagcaggcgctggagatcgtcaccggacaaaccgacaacggcctgtacgttcagggcacgcagctggcgcagtctctgggtctggtggccggggcgctgattactagcgcgccggtggttgccatcaagcgacgtacccgcgtgctgatcctcggcgtgaacggctttatcggtaaccacctgaccgaacgtctgcttaaagacgacaactacgagatttacggtctggatatcggtgcggatgccatcagccgtttcctcgacaacccgcgtttccacttcgtggaaggggacatcagcatccattccgagtggattgaataccacattaaaaaatgcgacgtggtgctgccgctggtcgccattgccacgccaatcgagtacacccgtaacccgctgcgcgtgttcgagctggacttcgaagagaacctgaagatcatccgcgactgcgtgaaatacgacaagcgcatcatcttcccgtccacgtctgaagtgtacggcatgtgtaccgataagaacttcgatgaagacacctccaacctggtggtcgggccgatcaacaaacagcgctggatttactccgtctccaaacagctgctggaccgcgtgatttgggcctacggtgagaaagaaggcctgcgctttaccctgttccgtccgttcaactggatgggcccgcgtctggataacctcaacgcggcgcgtatcggcagctcccgtgcgatcacccagctgatcctcaacctggtggaaggctcgcccattaagcttatcgaaggcgggaaacagaaacgctgctttacggacatcagcgacggtattgaagcgctgttccgcatcatcgaaaacaaagataaccgctgcaacggcgaaatcatcaacatcggtaacccggacaacgaagcgagcattcgcgagctggccgagatgctgctggccagctttgagcgccatccgctgcgcgacaagttcccgccgtttgccggcttccgcgaagtggaaagcagcagctactatggtaagggctaccaggacgttgagcaccgtaagccaagcattcgcaacgcgaagcgctgcctcaactggacgccgacggtgaagatggagcagaccattgacgaaacgctcgatttcttcctgcgcaccgtggagctttcggaacaggcctca

SEQ ID NO: 20207 - DNA, 420 bp, Enterobacter cloacae
gtgagggaagagcgggacgataacccgttcagctggtaccgctggcagtacgacagcgccgggcgcctgctcgttcaggacggcacgctgcccggccaggagcagtggcgctgggacgctgccggtaacccgctggaaggggctgctgagaaggtcacgcacaaccgcctgacgcagctgaacggcattcgctggcgctatgacatccacggccgcaccgtggaaaaagataacggccagacccgctggcactaccgctacgacggtgaacaccgcctgacggaagtcatcagccagccgcgggacggcaacaagccgcagacgcaggtcagcttccgctacgatccgctcgggcgacgcatcagcaaaacgcgacgccagatactgggcggacagccaaccggcaagccggtcacaacc

SEQ ID NO: 20208 - DNA, 462 bp, Enterobacter cloacae
atgaataaagtattagctctggttgttgccgctgctatgggtctgtcttctgctgcatttgctgctgacactaccgcaactgcagcaccggctgccgcgcctgctgcaaccaccaccgctgcgccagcaaaagcggttcatcataagaaacatcacaaagctgcagcgaaaaaagaagccgctgcaccagcaaccgcagcaccaaccgagcagggagctcaggctgccaaaaagcaccacaaaaaagccgctaaaccggctgtagagcagaaagcgcaggctgctaaaaagcaccacaaaaaagcaaccaaaccggctgtagaacagaaagctcaggctgctaaaaagcaccacaaaaaagcgaccaaaccagctgtagaacagaaagctcaggctgctaaaaagcatcacaaaaaagcagtaaaacacgaagctgctaaaccagctgcacagccagctgcg

SEQ ID NO: 20209 - DNA, 2235 bp, Enterobacter cloacae
gattcgctgacgatactgtgggttctggaagggcaagccgaactgcaaaccgccgcaggacgcgagacggtgtcaaataacggtcttgcggtgataaaccgctatcagcgctggcggttcagtagccagagcgcgaacgtgacgcttcgtgtcgttctctccgggcggtgggtaatcaagctgtacaatgacttttttgcccatgactacgcggttcagacagagtccggtggaaactggccgcagtgtgacgaacttcggcacctgctgcgtcagcttctggtggtgacgctggtgaacgatccgcaccgcttcaggctggaggcaaatcgctggctgagcgagatcctgctgctgctgattggccgctttcagcagcctgcccgtcagaaaccccgggaccagcacgccgacgtcagcaagcgcattgcccgcgtgctggagcggatcaacgccagctatacccggcgcattacgttggccgaaattgcagcgagtgagttcgtctccgaagcgtggctctcccgcctctttcgaaaagagatgggtgtcagttttatgcagtacatcaccgccctgcgggctggaaaaagcggctgatgccctgcgcctcaccagccgtcctttgcatcagattgcgctggagcacgggtttgccagcacgcgtatgatgaccgatcggttccggcgctatcacaatatgtctccgggcgagtttcgtaaggccaggcggcatcgctccgatgcgtctccgctgcgggcaggcacgggcgagcagcgctttcctatcgcggtggataggctgtttagcttgcttagaggcgctgagaaccgcggctgggaacccgctccgctaacccactctccgcgtcaggagcgaatagttgatctgcagcagctttatccgctctcgtccgcgtgcgccgcgcgaggctggtcgtcaccctgcgcgagctcgacgatttactgcgggaggatgttcgccagcatctggaggcgcttcacgaggcgatcccaattgaggggattgatatcgctgaaccttttctcagcagccgtctgttcgccacgggatgggacgatccccatatggcgggttacgcctgctggtacaatctgcagcagctgtttacctgggtagcaaaaaaaggctggacgatcctgctgcacacgggggtcaccaaccgatgcgatcttctgaagcgctttttgcagctgtcggttaaccgatttttacccgatattaccgcaggctggcacgtcgtgatgcactggtctcctcaggcaagcgcggaaacccaggagcacgcctggcaggctcagcgggcgacggtcggggcctaccttccacaggcaaagtttggggtgtggcatcgcttctctcccgtgggtactgaactcggcgacgacgcgctgttccattctggcattctggaccaggccgatttcctcgcctgtcaggcggatgccaacgagctgctcgatctggcgcggctggatcctgcacatctctcctcggctgaaaactatcccgtgctgaagatccgccaaatactcgccgcccttcgccagcggcagcgcacgctgccggtatggttactctcgtggaatacccttaccgggaatacgcgggcaaccaacggctggttttttcgcggcgcgctgcttatgcaaaatttactcggactttcagaacaggtctggctggcgggattctggctgaattccggtttgcagggggaagccaggacgaacaacaccctcgatacatcgagccttgcgcttcagtataatcacggccttccgcggcccatctactgggtgctctggctgtggcaacgcctgcggggtgaggtgctcgtcaacgacaagagcgtgctgctgctccgccatcagggaggctatcagctgctgctgcgtaacgtggtggtgttcaatccgctgctctccagcgaggaagcttttatccaacgttttcaacagcaatatcacctgcagctacaggggatgcgcggcgagtggcgcatcaggcgccatctgttcgatcggcacaatggtgcgctctacccgttgctggaaggggtacgcagcgacagcgggcctgatgaagagatgtggcgctggattgcgcacaaagcgcgtccaacgctttccttacgcgatgaacggcttaatgacggctggcaaatgacagaatcactggaaagtaacgcgctcgtgctctatgagttcatg

SEQ ID NO: 20210 - DNA, 898 bp, Enterobacter cloacae
atgttcgcagccatcatcatcggtattttcattatcagcgttatttatgcgcattcacgcggcaaagaaaaacagacgctttctcgtcagctctttgaccattcgacgttgatggcgcccatcaatatgtttatgacggcgttttcttccctgccagccaggcagccattctttgaaacagaacgcttcccggaattaaataagctgacggaaaactggctggttattcgcgaagaggccctgcgtttgcagcatcatattaaggcggcgcaaaataataacgatgctggctttaacactttttttaaacgcggctggaaacgtttttatctgaaatggtatgccgatgcccacccctctgcgcagtctttatgcccggtgacgacccggctggtaagtgaaatcccctcggtgaaggcggccatgtttgccgagctgccggcgggtgcaaagcttggcaagcaccgggatccgtatgcgggctcggttcgttaccatctgggcttattcacaccgaatgacgaccgctgctttattgaagtcgacgggcagcgccacagctggcgggatggtgaagccgttatttttgatgagacctacgtccactgggcagagaataaatcggatcaaacgcgcattattcttttctgtgatattgaacgtccgatgaaatggcgctgggcgcaggcggttaaccattggggtgggaaccacactgatgtccgcagccagctcaccgaatgacgagaatgacagcaccggcggcattaaccgcatttttaaatacgttcatgcggcccgcgaacgaggacagcgtctgaaaaaaaggaaccgtaaagcctattacgccctcaagtatctgtgcatcgtcgcaatttttgccgccatcattgttccg

SEQ ID NO: 20211 - DNA, 249 bp, Enterobacter cloacae
atgactgaacaagaaaccatttatcaggaagtctgcggcctgctgaccaggctctttgaaatcgacccgcaggacattacgcccgaagcccgtctttacgaagacctggagctggacagcattgacgcggtggacatgattgttcatctgcagaagaaaacgggcaagaaaatcaagccggaaaccttcaagtcggttcgtaccgttcaggatgtggtagacgccgtcgaacagcttctgcgcgaagag

SEQ ID NO: 20212 - DNA, 132 bp, Enterobacter cloacae
atggaaaacctgaatatggatctgctgtacatggctgccgctgtgatgatgggtctggcggctatcggtgctgcgatcggtatcggcatcctcgggggcaaattcctggaaggcgcaggcgtcaacctgatc

SEQ ID NO: 20213 - DNA, 933 bp, Escherichia coli
atggttaaagtttatgccccggcttccagtgccaatatgagcgtcgggtttgatgtgctcggggcggcggtgacacctgttgatggtgcattgctcggagatgtagtcacggttgaggcggcagagacattcagtctcaacaacctcggacgctttgccgataagctgccgtcagaaccacgggaaaatatcgtttatcagtgctgggagcgtttttgccaggaactgggtaagcaaattccagtggcgatgaccctggaaaagaatatgccgatcggttcgggcttaggctccagtgcctgttcggtggtcgcggcgctgatggcgatgaatgaacactgcggcaagccgcttaatgacactcgtttgctggctttgatgggcgagctggaaggccgtatctccggcagcattcattacgacaacgtggcaccgtgttttctcggtggtatgcagttgatgatcgaagaaaacgacatcatcagccagcaagtgccagggtttgatgagtggctgtgggtgctggcgtatccggggattaaagtctcgacggcagaagccagggctattttaccggcgcagtatcgccgccaggattgcattgcgcacgggcgacatctggcaggcttcattcacgcctgctattcccgtcagcctgagcttgccgcgaagctgatgaaagatgttatcgctgaaccctaccgtgaacggttactgccaggcttccggcaggcgcggcaggcggtcgcggaaatcggcgcggtagcgagcggtatctccggctccggcccgaccttgttcgctctgtgtgacaagccggaaaccgcccagcgcgttgccgactggttgggtaagaactacctgcaaaatcaggaaggttttgttcatatttgccggctggatacggcgggcgcacgagtactggaaaactaa

SEQ ID NO: 20214 - DNA, 1917 bp, Escherichia coli
atgggtaaaataattggtatcgacctgggtactaccaactcttgtgtagcgattatggatggcaccactcctcgcgtgctggagaacgccgaaggcgatcgcaccacgccttctatcattgcctatacccaggatggtgaaactctagttggtcagccggctaaacgtcaggcagtgacgaacccgcaaaacactctgtttgcgattaaacgcctgattggtcgccgcttccaggacgaagaagtacagcgtgatgtttccatcatgccgttcaaaattattgctgctgataacggcgacgcatgggtcgaagttaaaggccagaaaatggcaccgccgcagatttctgctgaagtgctgaaaaaaatgaagaaaaccgctgaagattacctgggtgaaccggtaactgaagctgttatcaccgtaccggcatactttaacgatgctcagcgtcaggcaaccaaagacgcaggccgtatcgctggtctggaagtaaaacgtatcatcaacgaaccgaccgcagctgcgctggcttacggtctggacaaaggcactggcaaccgtactatcgcggtttatgacctgggtggtggtactttcgatatttctattatcgaaatcgacgaagttgacggcgaaaaaaccttcgaagttctggcaaccaacggtgatacccacctggggggtgaagacttcgacagccgtctgatcaactatctggttgaagaattcaagaaagatcagggcattgacctgcgcaacgatccgctggcaatgcagcgcctgaaagaagcggcagaaaaagcgaaaatcgaactgtcttccgctcagcagaccgacgttaacctgccatacatcactgcagacgcgaccggtccgaaacacatgaacatcaaagtgactcgtgcgaaactggaaagcctggttgaagatctggtaaaccgttccattgagccgctgaaagttgcactgcaggacgctggcctgtccgtatctgatatcgacgacgttatcctcgttggtggtcagactcgtatgccaatggttcagaagaaagttgctgagttctttggtaaagagccgcgtaaagacgttaacccggacgaagctgtagcaatcggtgctgctgttcagggtggtgttctgactggtgacgtaaaagacgtactgctgctggacgttaccccgctgtctctgggtatcgaaaccatgggcggtgtgatgacgacgctgatcgcgaaaaacaccactatcccgaccaagcacagccaggtgttctctaccgctgaagacaaccagtctgcggtaaccatccatgtgctgcagggtgaacgtaaacgtgcggctgataacaaatctctgggtcagttcaacctagatggtatcaacccggcaccgcgcggcatgccgcagatcgaagttaccttcgatatcgatgctgacggtatcctgcacgtttccgcgaaagataaaaacagcggtaaagagcagaagatcaccatcaaggcttcttctggtctgaacgaagatgaaatccagaaaatggtacgcgacgcagaagctaacgccgaagctgaccgtaagtttgaagagctggtacagactcgcaaccagggcgaccatctgctgcacagcacccgtaagcaggttgaagaagcaggcgacaaactgccggctgacgacaaaactgctatcgagtctgcgctgactgcactggaaactgctctgaaaggtgaagacaaagccgctatcgaagcgaaaatgcaggaactggcacaggtttcccagaaactgatggaaatcgcccagcagcaacatgcccagcagcagactgccggtgctgatgcttctgcaaacaacgcgaaagatgacgatgttgtcgacgctgaatttgaagaagtcaaagacaaaaaataa

SEQ ID NO: 20215 - DNA, 1113 bp, Escherichia coli; identical to SEQ ID NO: 7203

SEQ ID NO: 20216 - DNA, 276 bp, Escherichia coli; identical to SEQ ID NO: 6817

SEQ ID NO: 20217 - DNA, 822 bp, Escherichia coli
atgcatgatgcaaacatccgcgttgccatcgcgggagccggggggcgtatgggccgccagttgattcaggcggcgctggcattagagggcgtgcagttgggcgctgcgctggagcgtgaaggatcttctttactgggcagcgacgccggtgagctggccggagccgggaaaacaggcgttaccgtgcaaagcagcctcgatgcggtaaaagatgattttgatgtgtttatcgattttacccgtccggaaggtacgctgaaccatctcgctttttgtcgccagcatggcaaagggatggtgatcggcactacggggtttgacgaagccggtaaacaagcaattcgtgacgccgctgccgatattgcgattgtctttgctgccaattttagcgttggcgttaacgtcatgcttaagctgctggagaaagcagccaaagtgatgggtgactacaccgatatcgaaattattgaagcacatcatagacataaagttgatgcgccgtcaggcaccgcactggcaatgggagaggcgatcgcccacgcccttgataaagatctgaaagattgcgcggtctacagtcgtgaaggccacaccggtgaacgtgtgcctggcaccattggttttgccaccgtgcgtgcaggtgacatcgttggtgaacataccgcgatgtttgccgatattggcgagcgtctggagatcacccataaggcgtccagccgtatgacatttgctaacggcgcggtaagatcggctttgtggttgagtggtaaggaaagcggtctttttgatatgcgagatgtacttgatctcaataatttgtaa

SEQ ID NO: 20218 - DNA, 480 bp, Escherichia coli
atgatcagtctgattgcggcgttagcggtagatcgcgttatcggcatggaaaacgccatgccgtggaacctgcctgccgatctcgcctggtttaaacgcaacaccttaaataaacccgtgattatgggccgccatacctgggaatcaatcggtcgtccgttgccaggacgcaaaaatattatcctcagcagtcaaccgggtacggacgatcgcgtaacgtgggtgaagtcggtggatgaagccatcgcggcgtgtggtgacgtaccagaaatcatggtgattggcggcggtcgcgtttatgaacagttcttgccaaaagcgcaaaaactgtatctgacgcatatcgacgcagaagtggaaggcgacacccatttcccggattacgagccggatgactgggaatcggtattcagcgaattccacgatgctgatgcgcagaactctcacagctattgctttgagattctggagcggcggtaa

SEQ ID NO: 20219 - DNA, 822 bp, Escherichia coli
atgaataatcgagtccaccagggccacttagcccgtaaacgcttcgggcaaaactttctcaacgatcagttcgtgatcgacagtattgtgtctgccattaacccgcaaaagggccaggcgatggtcgaaatcggccccggtctggcggcattgaccgaaccggtcggcgaacgtctggaccagctgacggtcatcgaacttgaccgcgatctggcggcacgtctgcaaacgcatccattcttaggcccgaaactgacgatttatcagcaggatgcgatgacctttaactttggtgaactggccgagaaaatgggtcagccgctgcgtgttttcggcaacctgccttataacatctccacgccgttgatgttccatctgtttagctatactgatgccattgccgacatgcactttatgttgcaaaaagaggtggtgaatcgtctggttgcaggaccgaacagcaaagcgtatggtcgattaagcgtcatggcgcaatactattgcaatgtgatcccggtactggaagtaccgccgtcagcctttacaccaccacccaaagtggattccgccgtcgtgcgcctggttcctcatgcaacgatgcctcacccggttaaagatgttcgtgtgttgagccgcatcaccaccgaagcctttaaccagcgtcgtaaaaccattcgtaacagcctcggcaacctgtttagcgtcgaggtgttaacgggaatggggatcgacccggcgatgcgagcggaaaatatctctgtcgcgcaatattgccagatggcgaactatctggcggagaacgcgcctttgcaggagagttaa

SEQ ID NO: 20220 - DNA, 879 bp, Escherichia coli
atggctgaagcgcaaaatgatcccctgctgccgggatactcgtttaacgcccatctggtggcgggtttaacgccgattgaggccaacggttatctcgatttttttatcgaccgaccgctgggaatgaaaggttatattctcaatctcaccattcgcggtcagggggtggtgaaaaatcagggacgagaatttgtctgccgaccgggtgatattttgctgttcccgccaggagagattcatcactacggtcgtcatccggaggctcgcgaatggtatcaccagtgggtttactttcgtccgcgcgcctactggcatgaatggcttaactggccgtcaatatttgccaatacgggtttctttcgcccggatgaagcgcaccagccgcatttcagcgacctgtttgggcaaatcattaacgccgggcaaggggaagggcgctattcggagctgctggcgataaatctgcttgagcaattgttactgcggcgcatggaagcgattaacgagtcgctccatccaccgatggataatcgggtacgcgaggcttgtcagtacatcagcgatcacctggcagacagcaattttgatatcgccagcgtcgcacagcatgtttgcttgtcgccgtcgcgtctgtcacatcttttccgccagcagttagggattagcgtcttaagctggcgcgaggaccaacgcattagtcaggcgaagctgcttttgagcactacccggatgcctatcgccaccgtcggtcgcaatgttggttttgacgatcaactctatttctcgcgagtatttaaaaaatgcaccggggccagcccgagcgagtttcgtgccggttgtgaagaaaaagtgaatgatgtagccgtcaagttgtcataa

SEQ ID NO: 20221 - DNA, 1401 bp, Escherichia coli
atggctaagacgttatacgaaaaattgttcgacgctcacgttgtgtacgaagccgaaaacgaaaccccactgttatatatcgaccgccacctggtgcatgaagtgacctcaccgcaggcgttcgatggtctgcgcgcccacggtcgcccggtacgtcagccgggcaaaaccttcgctaccatggatcacaacgtctctacccagaccaaagacattaatgcctgcggtgaaatggcgcgtatccagatgcaggaactgatcaaaaactgcaaagaatttggcgtcgaactgtatgacctgaatcacccgtatcaggggatcgtccacgtaatggggccggaacagggcgtcaccttgccggggatgaccattgtctgcggcgactcgcataccgccacccacggcgcgtttggcgcactggcctttggtatcggcacttccgaagttgaacacgtactggcaacgcaaaccctgaaacagggccgcgcaaaaaccatgaaaattgaagtccagggcaaagccgcgccgggcattaccgcaaaagatatcgtgctggcaattatcggtaaaaccggtagcgcaggcggcaccgggcatgtggtggagttttgcggcgaagcaatccgtgatttaagcatggaaggtcgtatgaccctgtgcaatatggcaatcgaaatgggcgcaaaagccggtctggttgcaccggacgaaaccacctttaactatgtcaaaggccgtctgcatgcgccgaaaggcaaagatttcgacgacgccgttgcctactggaaaaccctgcaaaccgacgaaggcgcaactttcgataccgttgtcactctgcaagcagaagaaatttcaccgcaggtcacctggggcaccaatcccggccaggtgatttccgtgaacgacaatattcccgatccggcttcgtttgccgatccggttgaacgcgcgtcggcagaaaaagcgctggcctatatggggctgaaaccgggtattccgctgaccgaagtggctatcgacaaagtgtttatcggttcctgtaccaactcgcgcattgaagatttacgcgcggcagcggagatcgccaaagggcgaaaagtcgcgccaggcgtgcaggcactggtggttcccggctctggcccggtaaaagcccaggcggaagcggaaggtctggataaaatctttattgaagccggttttgaatggcgcttgcctggctgctcaatgtgtctggcgatgaacaacgaccgtctgaatccgggcgaacgttgtgcctccaccagcaaccgtaactttgaaggccgccaggggcgcggcgggcgcacgcatctggtcagcccggcaatggctgccgctgctgctgtgaccggacatttcgccgacattcgcaacattaaataa

SEQ ID NO: 20222 - DNA, 1815 bp, Escherichia coli
gtgtttatgtctctggctgccaattgcttaagcaagatcggacggttaatgtgttttacacattttttccgtcaaacagtgaggcaggccatggagatgttgtctggagccgagatggtcgtccgatcgcttatcgatcagggcgttaaacaagtattcggttatcccggaggcgcagtccttgatatttatgatgcattgcataccgtgggtggtattgatcatgtattagttcgtcatgagcaggcggcggtgcatatggccgatggcctggcgcgcgcgaccggggaagtcggcgtcgtgctggtaacgtcgggtccaggggcgaccaatgcgattactggcatcgccaccgcttatatggattccattccattagttgtcctttccgggcaggtagcgacctcgttgataggttacgatgcctttcaggagtgcgacatggtggggatttcgcgaccggtggttaaacacagttttctggttaagcaaacggaagacattccgcaggtgctgaaaaaggctttctggctggcggcaagtggtcgcccaggaccagtagtcgttgatttaccgaaagatattcttaatccggcgaacaaattaccctatgtctggccggagtcggtcagtatgcgttcttacaatcccactactaccggacataaagggcaaattaagcgtgctctgcaaacgctggtagcggcaaaaaaaccggttgtctacgtaggcggtggggcaatcacggcgggctgccatcagcagttgaaagaaacggtggaggcgttgaatctgcccgttgtttgctcattgatggggctgggggcgtttccggcaacgcatcgtcaggcactgggcatgctgggaatgcacggtacctacgaagccaatatgacgatgcataacgcggatgtgattttcgccgtcggggtacgatttgatgaccgaacgacgaacaatctggcaaagtactgcccaaatgccactgttctgcatatcgatattgatcctacttccatttctaaaaccgtgactgcggatatcccgattgtgggggatgctcgccaggtcctcgaacaaatgcttgaactcttgtcgcaagaatccgcccatcaaccactggatgagatccgcgactggtggcagcaaattgaacagtggcgcgctcgtcagtgcctgaaatatgacactcacagtgaaaagattaaaccgcaggcggtgatcgagactctttggcggttgacgaagggagacgcttacgtgacgtccgatgtcgggcagcaccagatgtttgctgcactttattatccattcgacaaaccgcgtcgctggatcaattccggtggcctcggcacgatgggttttggtttacctgcggcactgggcgtcaaaatggcgttgccagaagaaaccgtggtttgcgtcactggcgacggcagtattcagatgaacatccaggaactgtctaccgcgttgcaatacgagttgcccgtactggtggtgaatctcaataaccgctatctggggatggtgaagcagtggcaggacatgatctattccggccgtcattcacaatcttatatgcaatcgctacccgatttcgtccgtctggcggaagcctatgggcatgtcgggatccagatttctcatccgcatgagctggaaagcaaacttagcgaggcgctggaacaggtgcgcaataatcgcctggtgtttgttgatgttaccgtcgatggcagcgagcacgtctacccgatgcagattcgcgggggcggaatggatgaaatgtggttaagcaaaacggagagaacctga

SEQ ID NO: 20223 - DNA, 492 bp, Escherichia coli
atgcgccggatattatcagtcttactcgaaaatgaatcaggcgcgttatcccgcgtgattggccttttttcccagcgtggctacaacattgaaagcctgaccgttgcgccaaccgacgatccgacattatcgcgtatgaccatccagaccgtgggcgatgaaaaagtacttgagcagatcgaaaagcaattacacaaactggtcgatgtcttgcgcgtgagtgagttggggcagggcgcgcatgttgagcgggaaatcatgctggtgaaaattcaggccagcggttacgggcgtgacgaagtgaaacgtaatacggaaatattccgtgggcaaattatcgatgtcacaccctcgctttataccgttcaattagcaggcaccagcggtaagcttgatgcatttttagcatcgattcgcgatgtggcgaaaattgtggaggttgctcgctctggtgtggtcggactttcgcgcggcgataaaataatgcgttga

SEQ ID NO: 20224 - DNA, 942 bp, Escherichia coli
atgatggaaaactataaacatactacggtgctgctggatgaagccgttaatggcctcaatatccgtcctgatggcatctacattgatgggacttttggtcgcggtggtcactcacgtctgatcctctcgcagcttggcgaagaggggcgtttgctggcgatcgatcgcgacccgcaggctatcgccgttgcgaagactattgatgatccgcgcttctccatcatccacggacctttctccgcgctgggcgaatacgttgccgagcgcgatcttatcggcaagatcgacggcattctcctcgatcttggcgtctcttcaccgcaacttgatgatgctgaacgtggcttttcctttatgcgcgatggtccgctggacatgcgtatggacccaacccgtgggcagtcagccgctgaatggctacaaaccgcagaagaagccgatatcgcctgggtattgaaaacctatggtgaagagcgttttgccaaacgcattgcccgcgccattgtcgagcgtaaccgcgaacagccgatgacccgcaccaaagaactggcggaagtcgtggctgctgcaacgccggtgaaagataagtttaaacatcccgcgacccgtaccttccaggcggtgcgcatttgggtaaacagtgaactggaggagatagagcaggcgctaaaaagctcgctcaacgtgctggccccgggtgggcggctttcgatcatcagcttccactcgctggaagaccgtattgtgaaacgttttatgcgtgaaaacagccgcggtccgcaagttccggcagggttaccgatgactgaagagcagctcaaaaaactgggtggccgtcagctgcgagcactaggcaagttaatgccgggcgaagaagaggtggctgagaaccctcgtgcccgtagttcagttctgcgtattgcagagaggacgaatgcatga

SEQ ID NO: 20225 - DNA, 1767 bp, Escherichia coli
atgaaagcagcggcgaaaacgcagaaaccaaaacgtcaggaagaacatgccaactttatcagttggcgttttgcgttgttatgcggctgtattctcctggcgctggcttttctgctcggacgcgtagcgtggttacaagttatctccccggatatgctggtgaaagagggcgacatgcgttctcttcgcgttcagcaagtttccacctcccgcggcatgattactgaccgttctggtcgcccgttagcggtgagcgtgccggtaaaagcgatttgggctgacccgaaagaagtgcatgacgctggcggtatcagcgtcggtgaccgctggaaggcgctggctaacgcgctcaatattccgctggatcagctttcagcccgcattaacgccaacccgaaagggcgctttatttatctggcgcgtcaggtgaaccctgacatggcggactacatcaaaaaactgaaactgccggggattcatctgcgtgaagagtctcgccgttactatccgtccggcgaagtgactgctcacctcatcggctttactaacgtcgatagtcaagggattgagggcgttgagaagagtttcgataaatggcttaccgggcagccgggtgagcgcattgtgcgtaaagaccgctatggtcgcgtaattgaagatatttcttctactgacagccaggcagcgcacaacctggcgctgagtattgatgaacgcctgcaggcgctggtttatcgcgaactgaacaacgcggtggcctttaacaaggctgaatctggtagcgccgtgctggtggatgtcaacaccggtgaagtgctggcgatggctaacagcccgtcatacaaccctaacaatctgagcggcacgccgaaagaggcgatgcgtaaccgtaccatcaccgacgtgtttgaaccgggctcaacggttaaaccgatggtggtaatgaccgcgttgcaacgtggcgtggtgcgggaaaactcggtactcaataccattccttatcgaattaacggccacgaaatcaaagacgtggcacgctacagcgaattaaccctgaccggggtattacagaagtcgagtaacgtcggtgtttccaagctggcgttagcgatgccgtcctcagcgttagtagatacttactcacgttttggactgggaaaagcgaccaatttggggttggtcggagaacgcagtggcttatatcctcaaaaacaacggtggtctgacatagagagggccaccttctctttcggctacgggctaatggtaacaccattacagttagcgcgagtctacgcaactatcggcagctacggcatttatcgcccactgtcgattaccaaagttgaccccccggttcccggtgaacgtgtcttcccggaatccattgtccgcactgtggtgcatatgatggaaagcgtggcgctaccaggcggcggcggcgtgaaggcggcgattaaaggctatcgtatcgccattaaaaccggtaccgcgaaaaaggtcgggccggacggtcgctacatcaataaatatattgcttataccgcaggcgttgcgcctgcgagtcagccgcgcttcgcgctggttgttgttatcaacgatccgcaggcgggtaaatactacggcggcgccgtttccgcgccggtctttggtgccatcatgggcggcgtattgcgtaccatgaacatcgagccggatgcgctgacaacgggcgataaaaatgaatttgtgattaatcaaggcgaggggacaggtggcagatcgtaa

SEQ ID NO: 20226 - DNA, 1488 bp, Escherichia coli
gtggcagatcgtaatttgcgcgaccttcttgctccgtgggtgccagacgcaccttcgcgagcactgcgagagatgacactcgacagccgtgtggctgcggcgggcgatctctttgtagctgtagtaggtcatcaggcggacgggcgtcgatatatcccgcaggcgatagcgcaaggtgtggctgccattattgcagaggcgaaagatgaggcgaccgatggtgaaatccgtgaaatgcacggcgtaccggtcatctatctcagccagctcaacgagcgtttatctgcactggcgggccgcttttaccatgaaccctctgacaatttacgtctcgtgggcgtaacgggcaccaacggcaaaaccacgactacccagctgttggcgcagtggagccaactgcttggcgaaatcagcgcggtaatgggcaccgttggtaacggcctgctggggaaagtgatcccgacagaaaatacaaccggttcggcagtcgatgttcagcatgagctggcggggctggtggatcagggcgcgacgttttgcgcaatggaagtttcctcccacgggctggtacagcaccgtgtggcggcattgaaatttgcggcgtcggtctttaccaacttaagccgcgatcaccttgattatcatggtgatatggaacactacgaagccgcgaaatggctgctttattctgagcatcattgcggtcaggcgattattaacgccgacgatgaagtgggccgccgctggctggcaaaactgccggacgcggttgcggtatcaatggaagatcatattaatccgaactgtcacggacgctggttgaaagcgaccgaagtgaactatcacgacagcggtgcgacgattcgctttagctcaagttggggcgatggcgaaattgaaagccatctgatgggcgcttttaacgtcagcaacctgctgctcgcgctggcgacactgttggcactcggctatccactggctgatctgctgaaaaccgccgcgcgtctgcaaccggtttgcggacgtatggaagtgttcactgcgccaggcaaaccgacggtggtggtggattacgcgcatacgccggatgcactggaaaaagccttacaggcggcgcgtctgcactgtgcgggcaagctgtggtgtgtctttggctgtggtggcgatcgcgataaaggtaagcgtccactgatgggcgcaattgccgaagagtttgctgacgtggcggtggtgacggacgataacccgcgtaccgaagaaccgcgtgccatcatcaacgatattctggcgggaatgttagatgccggacatgccaaagtgatggaaggccgtgctgaagcggtgacttgcgccgttatgcaggctaaagagaatgatgtggtactggtcgcgggcaaaggccatgaagattaccagattgttggcaatcagcgtctggactactccgatcgcgtcacggtggcgcgtctgctgggggtgattgcatga

SEQ ID NO: 20227 - DNA, 1359 bp, Escherichia coli
atgattagcgtaacccttagccaacttaccgacattctcaacggtgaactgcaaggtgcagatatcacccttgatgctgtaaccactgatacccgaaaactgacgccgggctgcctgtttgttgccctgaaaggcgaacgttttgatgcccacgattttgccgaccaggcgaaagctggcggcgcaggcgcactactggttagccgtccgctggacatcgacctgccgcagttaatcgtcaaggatacgcgtctggcgtttggtgaactggctgcatgggttcgccagcaagttccggcgcgcgtggttgctctgacggggtcctccggcaaaacctccgttaaagagatgacggcggcgattttaagccagtgcggcaacacgctttatacggcaggcaatctcaacaacgacatcggtgtaccgatgacgctgttgcgcttaacgccggaatacgattacgcagttattgaacttggcgcgaaccatcagggcgaaatagcctggactgtgagtctgactcgcccggaagctgcgctggtcaacaacctggcagcggcgcatctggaaggttttggctcgcttgcgggtgtcgcgaaagcgaaaggtgaaatctttagcggcctgccggaaaacggtatcgccattatgaacgccgacaacaacgactggctgaactggcagagcgtaattggctcacgcaaagtgtggcgtttctcacccaatgccgccaacagcgatttcaccgccaccaatatccatgtgacctcgcacggtacggaatttaccctacaaaccccaaccggtagcgtcgatgttctgctgccgttgccggggcgtcacaatattgcgaatgcgctggcagccgctgcgctctccatgtccgtgggcgcaacgcttgatgctatcaaagcggggctggcaaatctgaaagctgttccaggccgtctgttccccatccaactggcagaaaaccagttgctgctcgacgactcctacaacgccaatgtcggttcaatgactgcagcagtccaggtactggctgaaatgccgggctaccgcgtgctggtggtgggcgatatggcggaactgggcgctgaaagcgaagcctgccatgtacaggtgggcgaggcggcaaaagctgctggtattgaccgcgtgttaagcgtgggtaaacaaagccatgctatcagcaccgccagcggcgttggcgaacattttgctgataaaactgcgttaattacgcgtcttaaattactgattgctgagcaacaggtaattacgattttagttaagggttcacgtagtgccgccatggaagaggtagtacgcgctttacaggagaatgggacatgttag

SEQ ID NO: 20228 - DNA, 1083 bp, Escherichia coli
atgttagtttggctggccgaacatttggtcaaatattattccggctttaacgtcttttcctatctgacgtttcgcgccatcgtcagcctgctgaccgcgctgttcatctcattgtggatgggcccgcgtatgattgctcatttgcaaaaactttcctttggtcaggtggtgcgtaacgacggtcctgaatcacacttcagcaagcgcggtacgccgaccatgggcgggattatgatcctgacggcgattgtgatctccgtactgctgtgggcttacccgtccaatccgtacgtctggtgcgtgttggtggtgctggtaggttacggtgttattggctttgttgatgattatcgcaaagtggtgcgtaaagacaccaaagggttgatcgctcgttggaagtatttctggatgtcggtcattgcgctgggtgtcgccttcgccctgtaccttgccggcaaagacacgcccgcaacgcagctggtggtcccattctttaaagatgtgatgccgcagctggggctgttctacattctgctggcttacttcgtcattgtgggtactggcaacgcggtaaacctgaccgatggtctcgacggcctggcaattatgccgaccgtatttgtcgccggtggttttgcgctggtggcgtgggcgaccggcaatatgaactttgccagctacttgcatataccgtatctgcgacacgccggggaactggttattgtctgtaccgcgatagtcggggcaggactgggcttcctgtggtttaacacctatccggcgcaggtctttatgggcgatgtaggttcgctggcgttaggtggtgcgttaggcattatcgccgtactgctacgtcaggaattcctgctggtgattatggggggcgtgttcgtggtagaaacgctttctgtcatcctgcaggtcggctcctttaaactgcgcggacaacgtattttccgcatggcaccgattcatcaccactatgaactgaaaggctggccggaaccgcgcgtcattgtgcgtttctggattatttcgctgatgctggttctgattggtctggcaacgctgaaggtacgttaa

SEQ ID NO: 20229 - DNA, 1317 bp, Escherichia coli
atggctgattatcagggtaaaaatgtcgtcattatcggcctgggcctcaccgggctttcctgcgtggactttttcctcgctcgcggtgtgacgccgcgcgttatggatacgcgtatgacaccgcctggcctggataaattacccgaagccgtagaacgccacacgggcagtctgaatgatgaatggctgatggcggcagatctgattgtcgccagtcccggtattgcactggcgcatccatccttaagcgctgccgctgatgccggaatcgaaatcgttggcgatatcgagctgttctgtcgcgaagcacaagcaccgattgtggcgattaccggttctaacggcaaaagcacggtcaccacgctagtgggtgaaatggcgaaagcggcgggggttaacgttggtgtgggtggcaatattggcctgcctgcgttgatgctactggatgatgagtgtgaactgtacgtgctggaactgtcgagcttccagctggaaaccacctccagcttacaggcggtagcagcgaccattctgaacgtgactgaagatcatatggatcgctatccgtttggtttacaacagtatcgtgcagcaaaactgcgcatttacgaaaacgcgaaagtttgcgtggttaatgctgatgatgccttaacaatgccgattcgcggtgcggatgaacgctgcgtcagctttggcgtcaacatgggtgactatcacctgaatcatcagcagggcgaaacctggctgcgggttaaaggcgagaaagtgctgaatgtgaaagagatgaaactttccgggcagcataactacaccaatgcgctggcggcgctggcgctggcagatgctgcagggttaccgcgtgccagcagcctgaaagcgttaaccacattcactggtctgccgcatcgctttgaagttgtgctggagcataacggcgtacgttggattaacgattcgaaagcgaccaacgtcggcagtacggaagcggcgctgaatggcctgcacgtagacggcacactgcatttgttgctgggtggcgatggtaaatcggcggactttagcccactggcgcgttacctgaatggcgataacgtacgtctgtattgtttcggtcgtgacggcgcgcagctggcggcgctacgcccggaagtggcagaacaaaccgaaactatggaacaggcgatgcgcttgctggctccgcgtgttcagccgggcgatatggttctgctctccccagcctgtgccagccttgatcagttcaagaactttgaacaacgaggcaatgagtttgcccgtctggcgaaggagttaggttga

SEQ ID NO: 20230 - DNA, 1245 bp, Escherichia coli
atgcgtttatctctccctcgcctgaaaatgccgcgcctgccaggattcagtatcctggtctggatctccacggcgctaaagggctgggtgatgggctcgcgggaaaaagataccgacagcctgatcatgtacgatcgcaccttactgtggctgaccttcggcctcgcggcgattggctttatcatggtgacctcggcgtcaatgcccatagggcaacgcttaaccaacgatccgttcttcttcgcgaagcgtgatggtgtctatctgattttggcgtttattctggcgatcattacgctgcgtctgccgatggagttctggcaacgctacagtgccacgatgctgctcggatctatcatcctgctgatgatcgtcctggtagtgggtagctcggttaaaggggcatcgcgttggatcgatctcggtttgctgcgtatccagcctgcggagctgacaaaactgtcgctgttttgctatatcgccaactatctggtgcgtaaaggcgacgaagtacgtaataacctgcgcggcttcctgaaaccgatgggcgtgattctggtgttggcagtgttactgctggcacagccagaccttggtacggtggtggtgttgtttgtgactacgctggcgatgttgttcctggcgggagcgaaattgtggcagttcattgccattatcggtatgggcatttcagcggttgtgttgctgatactcgccgaaccgtaccgtatccgccgtgttaccgcattctggaacccgtgggaagatccctttggcagcggctatcagttaacgcaatcgctgatggcgtttggtcgcggcgaactttgggggcaaggtttaggtaactcggtacaaaaactggagtatctgccggaagcgcacactgactttattttcgccattatcggcgaagaactggggtatgtcggtgtggtgctggcacttttaatggtattcttcgtcgcttttcgcgcgatgtcgattggccgtaaagcattagaaattgaccaccgtttttccggttttctcgcctgttctattggcatctggtttagcttccaggcgctggttaacgtaggcgcggcggcggggatgttaccgaccaaaggtctgacattgccgctgatcagttacggtggttcgagcttactgattatgtcgacagccatcatgatgctgttgcgtattgattatgaaacgcgtctggagaaagcgcaggcgtttgtacgaggttcacgatga

SEQ ID NO: 20231 - DNA, 1068 bp, Escherichia coli
atgagtggtcaaggaaagcgattaatggtgatggcaggcggaaccggtggacatgtattcccgggactggcggttgcgcaccatctaatggctcagggttggcaagttcgctggctggggactgccgaccgtatggaagcggacttagtgccaaaacatggcatcgaaattgatttcattcgtatctctggtctgcgtggaaaaggtataaaagcactgatagctgccccgctgcgtatcttcaacgcctggcgtcaggcgcgggcgattatgaaagcgtacaaacctgacgtggtgctcggtatgggaggctacgtgtcaggtccaggtggtctggccgcgtggtcgttaggcattccggttgtacttcatgaacaaaacggtattgcgggcttaaccaataaatggctggcgaagattgccaccaaagtgatgcaggcgtttccaggtgctttccctaatgcggaagtagtgggtaacccggtgcgtaccgatgtgttggcgctgccgttgccgcagcaacgtttggctggacgtgaaggtccggttcgtgtgctggtagtgggtggttctcagggcgcacgcattcttaaccagacaatgccgcaggttgctgcgaaactgggtgattcagtcactatctggcatcagagcggcaaaggttcgcaacaatccgttgaacaggcgtatgccgaagcggggcaaccgcagcataaagtgacggaatttattgatgatatggcggcggcgtatgcgtgggcggatgtcgtcgtttgccgctccggtgcgttaacggtgagtgaaatcgccgcggcaggactaccggcgttgtttgtgccgtttcaacataaagaccgccagcaatactggaatgcgctaccgctggaaaaagcgggcgcagccaaaattatcgagcagccacagcttagcgtggatgctgtcgccaacaccctggccgggtggtcgcgagaaaccttattaaccatggcagaacgcgcccgcgctgcatccattccggatgccaccgagcgagtggcaaatgaagtgagccgggttgcccgggcgtaa

SEQ ID NO: 20232 - DNA, 1476 bp, Escherichia coli
atgaatacacaacaattggcaaaactgcgttccatcgtgcccgaaatgcgtcgcgttcggcacatacattttgtcggcattggtggtgccggtatgggcggtattgccgaagttctggccaatgaaggttatcagatcagtggttccgatttagcgccaaatccggtcacgcagcagttaatgaatctgggtgcgacgatttatttcaaccatcgcccggaaaacgtacgtgatgccagcgtggtcgttgtttccagcgcgatttctgccgataacccggaaattgtcgccgctcatgaagcgcgtattccggtgatccgtcgtgccgaaatgctggctgagttaatgcgttttcgtcatggcatcgccattgccggaacgcacggcaaaacgacaaccaccgcgatggtttccagcatctacgcagaagcggggctcgacccaaccttcgttaacggcgggctggtaaaagcggcgggggttcatgcgcgtttggggcatggtcggtacctgattgccgaagcagatgagagtgatgcatcgttcctgcatctgcaaccgatggtggcgattgtcaccaatatcgaagccgaccacatggatacctaccagggcgactttgagaatttaaaacagacttttattaattttctgcacaacctgccgttttacggtcgtgcggtgatgtgtgttgatgatccggtgatccgcgaattgttaccgcgagtggggcgtcagaccacgacttacggcttcagcgaagatgccgacgtgcgtgtagaagattatcagcagattggcccgcaggggcactttacgctgctgcgccaggacaaagagccgatgcgcgtcaccctgaatgcgccaggtcgtcataacgcgctgaacgccgcagctgcggttgcggttgctacggaagagggcattgacgacgaggctattttgcgggcgcttgaaagcttccaggggactggtcgccgttttgatttcctcggtgaattcccgctggagccagtgaatggtaaaagcggtacggcaatgctggtcgatgactacggccaccacccgacggaagtggacgccaccattaaagcggcgcgcgcaggctggccggataaaaacctggtaatgctgtttcagccgcaccgttttacccgtacgcgcgacctgtatgatgatttcgccaatgtgctgacgcaggttgataccctgttgatgctggaagtgtatccggctggcgaagcgccaattccgggagcggacagccgttcgctgtgtcgcacaattcgtggacgtgggaaaattgatcccattctggtgccggatccggcgcgggtagccgagatgctggcaccggtattaaccggtaacgacctgattctcgttcagggggctggtaatattggaaaaattgcccgttctttagctgaaatcaaactgaagccgcaaactccggaggaagaacaacatgactga

SEQ ID NO: 20233 - DNA, 2706 bp, Escherichia coli
atgctaatcaaattgttaactaaagttttcggtagtcgtaacgatcgcaccctgcgccggatgcgcaaagtggtcaacatcatcaatgccatggaaccggagatggaaaaactctccgacgaagaactgaaagggaaaaccgcagagtttcgtgcacgtctggaaaaaggcgaagtgctggaaaatctgatcccggaagctttcgccgtggtacgtgaggcaagtaagcgcgtctttggtatgcgtcacttcgacgttcagttactcggcggtatggttcttaacgaacgctgcatcgccgaaatgcgtaccggtgaaggaaaaaccctgaccgcaacgctgcctgcttacctgaacgcactaaccggtaaaggcgtgcacgtagttaccgtcaacgactacctggcgcaacgtgacgccgaaaacaaccgtccgctgtttgaattccttggcctgactgtcggtatcaacctgccgggcatgccagcaccggcaaagcgcgaagcttacgcagctgacatcacttacggtacgaacaacgaatacggctttgactacctgcgcgacaacatggcgttcagccctgaagaacgtgtacagcgtaaactgcactatgcgctggtggacgaagtggactccatcctgatcgatgaagcgcgtacaccgctgatcatttccggcccggcagaagacagctcggaaatgtataaacgcgtgaataaaattattccgcacctgatccgtcaggaaaaagaagactccgaaaccttccagggcgaaggccacttctcggtggacgaaaaatctcgccaggtgaacctgaccgaacgtggtctggtgctgattgaagaactgctggtgaaagagggcatcatggatgaaggggagtctctgtactctccggccaacatcatgctgatgcaccacgtaacggcggcgctgcgcgctcatgcgctgtttacccgtgacgtcgactacatcgttaaagatggtgaagttatcatcgttgacgaacacaccggtcgtaccatgcagggccgtcgctggtccgatggtctgcaccaggctgtggaagcgaaagaaggtgtgcagatccagaacgaaaaccaaacgctggcttcgatcaccttccagaactacttccgtctgtatgaaaaactggcggggatgaccggtactgctgataccgaagctttcgaatttagctcaatctacaagctggataccgtcgttgttccgaccaaccgtccaatgattcgtaaagatctgccggacctggtctacatgactgaagcggaaaaaattcaggcgatcattgaagatatcaaagaacgtactgcgaaaggccagccggtgctggtgggtactatctccatcgaaaaatcggagctggtgtcaaacgaactgaccaaagccggtattaagcacaacgtcctgaacgccaaattccacgccaacgaagcggcgattgttgctcaggcaggttatccggctgcggtgactatcgcgaccaatatggcgggtcgtggtacagatattgtgctcggtggtagctggcaggcagaagttgccgcgctggaaaatccgaccgcagagcaaattgaaaaaattaaagccgactggcaggtacgtcacgatgcggtactggaagcaggtggcctgcatatcatcggtaccgagcgtcacgaatcccgtcgtatcgataaccagttgcgcggtcgttctggtcgtcagggggatgctggttcttcccgtttctacctgtcgatggaagatgcgctgatgcgtatttttgcttccgaccgagtatccggcatgatgcgtaaactgggtatgaagccaggcgaagccattgaacacccgtgggtgactaaagcgattgccaacgcccagcgtaaagttgaaagccgtaacttcgacattcgtaagcaactgctggaatatgatgacgtggctaacgatcagcgtcgcgccatttactcccagcgtaacgaactgttggatgtcagcgatgtgagcgaaaccattaacagcattcgtgaagatgtgttcaaagcgaccattgatgcctacattccaccacagtcgctggaagaaatgtgggatattccggggctgcaggaacgtctgaagaacgatttcgacctcgatttgccaattgccgagtggctggataaagaaccagaactgcatgaagagacgctgcgtgagcgcattctggcgcagtccatcgaagtgtatcagcgtaaagaagaagtggttggtgctgagatgatgcgtcacttcgagaaaggcgtcatgctgcaaacgcttgactccctgtggaaagagcacctggcagcgatggactatctgcgtcagggtatccacctgcgtggctacgcacagaaagatccgaagcaggaatacaaacgtgaatcgttctccatgtttgcagcgatgctggagtcgttgaaatatgaagttatcagtacgctgagcaaagttcaggtacgtatgcctgaagaggttgaggagctggaacaacagcgtcgtatggaagccgagcgtttagcgcaaatgcagcagcttagccatcaggatgacgactctgcagccgcagctgcactggcggcgcaaaccggagagcgcaaagtaggacgtaacgatccttgcccgtgcggttctggtaaaaaatacaagcagtgccatggccgcctgcaataa

SEQ ID NO: 20234 - DNA, 795 bp, Escherichia coli
atgaaaccgaccaccatctccttactgcagaagtacaaacaggaaaaaaaacgtttcgcgaccatcaccgcttatgactatagcttcgccaaactctttgctgatgaagggcttaacgtcatgctggtgggcgattcgctgggcatgacggttcaggggcacgactccaccctgccagttaccgttgccgatatcgcctaccacactgccgccgtacgtcgcggcgcaccaaactgcctgctgctggctgacctgccgtttatggcgtatgccacgccggaacaagccttcgaaaacgccgcaacggttatgcgtgccggtgctaacatggtcaaaattgaaggcggtgagtggctggtagaaaccgtacaaatgctgaccgaacgtgccgttcctgtatgtggtcacttaggtttaacaccacagtcagtgaatattttcggtggctacaaagttcaggggcgcggcgatgaagcgggcgatcaactgctcagcgatgcattagccttagaagctgctggggcacagctgctggtgctggaatgcgtgccggttgaactggcaaaacgtattaccgaagcactggcgatcccggttattggcattggcgcaggcaacgtcactgacgggcagatcctcgtgatgcacgacgcctttggtattaccggcggtcacattcctaaattcgctaaaaatttcctcgccgaaacgggcgacatccgcgcggctgtgcggcagtatatggctgaagtggagtccggcgtttatccgggcgaagaacacagtttccattaa

SEQ ID NO: 20235 - DNA, 1365 bp, Escherichia coli
gtgctaagccgcgaggaaagcgaggctgaacaggcagtcgcccgtccacaggtgacggtgatcccgcgtgagcagcatgctatttcccgcaaagatatcagtgaaaatgccctgaaggtaatgtacaggctcaataaagcgggatacgaagcctggctggttggcggcggcgtgcgcgacctgttacttggcaaaaagccgaaagattttgacgtaaccactaacgccacgcctgagcaggtgcgcaaactgttccgtaactgccgcctggtgggtcgccgtttccgtctggctcatgtaatgtttggcccggagattatcgaagttgcgaccttccgtggacaccacgaaggtaacgtcagcgaccgcacgacctcccaacgcgggcaaaacggcatgttgctgcgcgacaacattttcggctccatcgaagaagacgcccagcgccgcgatttcactatcaacagcctgtattacagcgtagcggattttaccgtccgtgattacgttggcggcatgaaggatctgaaggacggcgttatccgtctgattggtaacccggaaacgcgctaccgtgaagatccggtacgtatgctgcgcgcggtacgttttgccgccaaattgggtatgcgcatcagcccggaaaccgcagaaccgatccctcgcctcgctaccctgctgaacgatatcccaccggcacgcctgtttgaagaatcgcttaaactgctacaagcgggctacggttacgaaacctataagctgttgtgtgaatatcatctgttccagccgctgttcccgaccattacccgctacttcacggaaaatggcgacagcccgatggagcggatcattgaacaggtgctgaagaataccgatacgcgtatccataacgatatgcgcgtgaacccggcgttcctgtttgccgccatgttctggtacccactgctggagacggcacagaagatcgcccaggaaagcggcctgacctatcacgacgctttcgcgctggcgatgaacgacgtgctggacgaagcctgccgttcactggcaatcccgaaacgtctgacgacattaacccgcgatatctggcagttgcagttgcgtatgtcccgtcgtcagggtaaacgcgcatggaaactgctggagcatcctaagttccgtgcggcttatgacctgttggccttgcgagctgaagttgagcgtaacgctgaactgcagcgtctggtgaaatggtggggtgagttccaggtttccgcgccaccagaccaaaaagggatgctcaacgagctggatgaagaaccgtcaccgcgtcgtcgtactcgtcgtccacgcaaacgcgcaccacgtcgtgagggtaccgcatga

SEQ ID NO: 20236 - DNA, 2535 bp, Escherichia coli
atggccgggaatgaccgcgagccaattggacgcaaagggaaaccgacgcgtccggtcaaacaaaaggtaagccgtcgtcgttacgaagatgacgatgattacgacgattatgatgactatgaggatgaagaaccgatgccgcgcaaaggtaagggcaaaggcaaagggcgtaagcctcgtggcaaacgcggctggctatggctactgctaaaactggctatcgtttttgccgtgctgatcgccatttacggcgtttatctcgatcaaaaaattcgtagccgtattgatggcaaggtctggcaactgcctgcggcagtttatggccgaatggtcaatcttgagccagacatgaccatcagcaagaacgagatggtgaagctgctggaggcgacccagtatcgtcaggtgtcgaaaatgacccgtcctggcgaatttaccgtgcaggccaacagcattgagatgattcgccgtccgtttgatttcccggacagtaaagaaggacaggtgcgcgcgcgtctgacctttgatggcgatcatctggcgacgatcgtcaatatggagaacaaccgtcagttcggtttcttccgtcttgatccgcgtctgatcaccatgatctcttcgccaaacggtgagcagcgtctgtttgtgccgcgcagtggtttcccggatttgctggtggatactttgctggcgacagaagaccgtcatttttacgagcatgatggaatcagtctctactcaatcggacgtgcggtgctggcaaacctgaccgccggacgcacggtacagggtgcgagtacgctgacgcaacagctggtgaaaaacctgttcctctccagcgagcgttcttactggcgtaaagcgaacgaagcttacatggcgctgatcatggacgcgcgttacagcaaagaccgtattcttgagctgtatatgaacgaggtgtatctcggtcagagcggcgacaacgaaatccgcggcttcccgctggcaagcttgtattactttggtcgcccggtagaagagctaagcctcgaccagcaggcgctgttagtcggtatggtgaaaggggcgtccatctacaacccgtggcgtaacccaaaactggcgctggagcgacgtaatctggtgctgcgtctgctgcaacagcaacagattattgatcaagaactctatgacatgttgagtgcccgtccgctgggggttcagccgcgcggtggggtgatctctcctcagccagcctttatgcaactggtgcgtcaggagctgcaggcaaaactgggcgataaggtaaaagatctctccggcgtgaagatcttcactacctttgactcggtggcccaggacgcggcagaaaaagccgccgtggaaggcattccggcactgaagaaacagcgtaagttgagcgatcttgaaactgcgattgtggtcgtcgaccgctttagtggtgaagttcgtgcgatggtcggaggttctgagccgcagtttgcgggctacaaccgtgcgatgcaggcgcgtcgttcgattggttcccttgcaaaaccagcgacttatctgacggccttaagccagccgaaaatctatcgtctgaatacgtggattgcggatgcgccaattgcgctgcgtcagccgaatggccaggtctggtcaccgcagaatgatgaccgtcgttatagcgaaagcggcagagtgatgctggtggatgcgttgacccgttcgatgaacgtgccgacggtaaatctggggatggcgctggggctgcctgcggttacggagacctggattaaactgggcgtaccgaaagatcagttgcatccggttccggcaatgctgctgggggcgttgaacttaacgccaatcgaagtggcgcaggcattccagaccatcgccagcggtggtaaccgtgcaccgctttctgcgctgcgttcggtaatcgcggaagatggcaaagtgctgtatcagagcttcccgcaggcggaacgcgctgttccggcgcaggcggcgtatctgacactatggaccatgcagcaggtggtacaacgcggtacgggtcgtcagcttggggcgaaatacccgaacctgcatctggcagggaaaacagggactaccaacaataacgtagatacctggtttgcgggcattgacggcagcacggtgaccatcacctgggtcggccgtgataacaaccagccgaccaaactgtatggtgccagcggggcaatgtcgatttatcagcgttatctggctaaccagacgccaacgccgctgaatcttgttccgccagaagatattgcagatatgggcgtggactacgacggcaactttgtttgcagcggtggcatgcgtatcttgccggtctggaccagcgatccgcaatcgctgtgccagcagagcgagatgcagcagcagccgtcaggcaatccgtttgatcagtcttctcagccgcagcaacagccgcaacagcaacctgctcagcaagagcagaaagacagcgacggtgtagccggttggatcaaggatatgtttggtagtaattaa

SEQ ID NO: 20237 - DNA, 699 bp, Escherichia coli
atgaaaatcggcatcattggtgcaatggaagaagaagttacgctgctgcgtgacaaaatcgaaaaccgtcaaactatcagtctcggcggttgcgaaatctataccggccaactgaatggaaccgaggttgcgcttctgaaatcgggcatcggtaaagtcgctgcggcgctgggtgccactttgctgttggaacactgcaagccagatgtgattattaacaccggttctgccggtggcctggcaccaacgttgaaagtgggcgatatcgttgtctcggacgaagcacgttatcacgacgcggatgtcacggcatttggttatgaatacggtcagttaccaggctgtccggcaggctttaaagctgacgataaactgatcgctgccgctgaggcctgcattgccgaactgaatcttaacgctgtacgtggcctgattgttagcggcgacgctttcatcaacggttctgttggtctggcgaaaatccgccacaacttcccacaggccattgctgtagagatggaagcgacggcaatcgcccatgtctgccacaatttcaacgtcccgtttgttgtcgtacgcgccatctccgacgtggccgatcaacagtctcatcttagcttcgatgagttcctggctgttgccgctaaacagtccagcctgatggttgagtcactggtgcagaaacttgcacatggctaa

SEQ ID NO: 20238 - DNA, 1176 bp, Escherichia coli
gtgcataacggaggacttatggctggctggcatcttgataccaaaatggcgcaggatatcgtggcacgtaccatgcgcatcatcgataccaatatcaacgtaatggatgcccgtgggcgaattatcggcagcggcgatcgtgagcgtattggtgaattgcacgaaggtgcattgctggtactttcacagggacgagtcgtcgatatcgatgacgcggtagcacgtcatctgcacggtgtgcggcaggggattaatctaccgttacggctggaaggtgaaattgtcggcgtaattggcctgacaggtgaaccagagaatctgcgtaaatatggcgaactggtctgcatgacggctgaaatgatgctggaacagtcgcggttgatgcacttgttggcgcaggatagccgtttgcgggaagaactggtgatgaacctgattcaggcagaggagaatactcccgcacttactgaatgggcgcaacggctggggatcgatctcaatcaaccgcgagtggtggctattgttgaggtcgacagcggtcagcttggcgtggacagcgcaatggcggagttacaacaactgcaaaacgcgctgactacgcccgagcgtaataatctggtggcgattgtctcgctaaccgaaatggtggtgttgaaaccggcgttgaactcttttgggcgctgggatgcagaagatcatcgtaagcgagttgaacaactgattacccgcatgaaagagtacggccagctgcgttttcgcgtttcactgggcaactattttaccggtcctggcagtattgcccgatcctatcgtacggcgaaaacgacgatggtggtgggtaaacagcggatgccagaaagtcgctgctatttttatcaggatctgatgttacctgtgttactcgacagtttgcgtggcgactggcaggccaacgaactggcgcgaccgctggcgcggctgaaaacgatggacaataacggcttgctgcgacgaacgctggcggcgtggtttcgccacaatgtgcaaccgctggcaacgtcaaaggcgttgtttattcatcgtaataccctggagtatcggcttaatcgtatatcggaactgaccgggcttgatttgggcaattttgatgacaggttgctgctgtatgtggcgttacaactggatgaagagcggtag

SEQ ID NO: 20239 - DNA, 825 bp, Escherichia coli
atgcagcagttacagaacattattgaaaccgcttttgaacgccgtgccgagatcacgccagccaatgcagacaccgttacccgcgaagcggtaaatcaggtgatcgccctgctggattccggcgcactgcgtgtagcggaaaaaattgacggtcagtgggtgacgcatcagtggttgaaaaaagcggtgctgctctctttccgtattaatgataatcaggtgatcgaaggggcagaaagccgctacttcgacaaagtgccgatgaaattcgccgactacgacgaagcacgtttccagaaagaaggcttccgcgttgtgccaccagcggcggtacgtcagggtgcgtttattgcccgtaacaccgtgctgatgccgtcttacgtcaacatcggcgcatatgttgatgaaggcaccatggttgatacctgggcgaccgtcggttcttgtgcgcagattggtaaaaacgtccacctttccggtggcgtgggcatcggcggcgtgctggaaccgctgcaggctaacccaaccatcattgaagataattgcttcatcggcgcgcgctctgaagtggttgaaggggtgattgtcgaagaaggttccgtcatttccatgggcgtatacattggtcagagcacccgtatttacgaccgtgaaaccggcgaaatccactacggtcgcgttccggcggggtctgtggttgtttcaggtaatctgccgtcaaaagatggcaaatacagcctctactgtgcggttatcgttaagaaagttgacgcgaaaactcgcggcaaagtcggcattaacgaactgctgcgtaccatcgactaa

SEQ ID NO: 20240 - DNA, 558 bp, Escherichia coli
gtgattagcgatatcagaaaagatgctgaagtacgcatggacaaatgcgtagaagcgttcaaaacccaaatcagcaaaatacgcacgggtcgtgcttctcccagcctgctggatggcattgtcgtggaatattacggcacgccgacgccgctgcgtcagctggcaagcgtaacggtagaagattcccgtacactgaaaatcaacgtgtttgatcgttcaatgtctccggccgttgaaaaagcgattatggcgtccgatcttggcctgaacccgaactctgcgggtagcgacatccgtgttccgctgccgccgctgacggaagaacgtcgtaaagatctgaccaaaatcgttcgtggtgaagcagaacaagcgcgtgttgcagtacgtaacgtgcgtcgtgacgcgaacgacaaagtgaaagcactgttgaaagataaagagatcagcgaagacgacgatcgccgttctcaggacgatgtacagaaactgactgatgctgcaatcaagaaaattgaagcggcgctggcagacaaagaagcagaactgatgcagttctga

SEQ ID NO: 20241 - DNA, 762 bp, Escherichia coli
gtgatgttgtctgctactcaaccacttagcgaaaaattgccagcgcatggctgccgtcatgttgcgatcattatggacggcaatggccgctgggcaaaaaagcaagggaagattcgtgcctttgggcataaagccggggcaaaatccgtccgccgggctgtctcttttgcggccaacaacggtattgaggcgttaacgctgtatgcctttagtagtgaaaactggaaccgaccagcgcaggaagtcagtgcgttaatggaactgtttgtgtgggcgctcgatagcgaagtaaaaagtctgcaccgacataacgtgcgtctgcgtattattggcgataccagtcgctttaactcgcgtttgcaagaacgtattcgtaaatctgaagcgctaacagccgggaataccggtctgacgctgaatattgcggcgaactacggtggacgttgggatatagtccagggagtcaggcaactggctgaaaaggtgcagcaaggaaacctgcaaccagatcagatagatgaagagatgctaaaccagcatgtctgtatgcatgaactggcccctgtagatttagtaattaggactgggggggagcatcgcattagtaactttttgctttggcaaattgcctatgccgaactttactttacagatgttctctggcccgatttcgatgaacaagactttgaaggggcgttaaatgcctttgctaatcgagagcgtcgtttcggcggcaccgagcccggtgatgaaacagcctga

SEQ ID NO: 20242 - DNA, 750 bp, Escherichia coli
atgctggcagcgtgggaatggggacagcttagcggttttaccactcgttcgcagcgagtatggttggcggtgttatgcgggttattgttggcgctgatgctttttctgttgccggaatatcaccgaaatattcatcaaccgctggttgaaatctcactttgggcttcgctgggttggtggattgtcgcgctattgctggtgctgttttacccaggttccgcagcaatctggcgtaactctaaaacattgcgccttatttttggcgtgctaaccattgttcccttcttctggggcatgctggcgttacgggcctggcactatgacgagaatcattacagtggcgcaatatggctgctctatgtcatgatcctggtatggggcgctgactccggcgcatatatgtttggcaaattgtttggtaaacataagctggcaccgaaggtttctccgggtaaaacctggcaaggctttatcggtggactcgctactgcagcggtaatctcatggggttatggcatgtgggcgaatctcgacgtcgctcccgtcaccttactcatttgctctattgtcgcagcgttagcctcagtgctcggcgatctgaccgagagtatgtttaagcgtgaagcaggaattaaggacagcggtcatttaattccaggacacggtggtattttagatcgtattgatagcctgacggctgcggtaccggtctttgcttgcttgttgttactggtattcaggacgctttaa

SEQ ID NO: 20243 - DNA, 1149 bp, Escherichia coli
atgactgaacagcgtccattaacgattgccctggtcgccggagaaacctccggcgatatcctgggggccggtttaatccgcgctctgaaagaacatgtgcccaacgcccgctttgttggtgttgccgggccacgaatgcaggctgaaggctgcgaagcctggtacgaaatggaagaactggcggtgatgggcattgttgaagtgctcggtcgtctgcgtcgcttactgcatattcgtgccgatctgacaaagcgttttggcgaactgaagccagatgtttttgttggtattgatgcgcctgacttcaatattactcttgaaggtaacctcaaaaagcagggtatcaaaaccattcattacgtcagtccgtcagtctgggcgtggcgacagaaacgtgttttcaaaataggcagagccaccgatctggtgctcgcatttctgcctttcgaaaaagcgttttatgacaaatacaacgtaccgtgccgctttatcggtcataccatggctgatgccatgccattagatccagataaaaatgccgcccgtgatgtgctggggatccctcacgatgcccactgcctggcgttgctaccggggagccgtggtgcagaagttgaaatgcttagtgccgatttcctgaaaacggcccagcttttgcgccagacatatccggatctcgaaatcgtggtgccactggtgaatgccaaacgccgcgagcagtttgaacgcatcaaagctgaagtcgcgccagacctttcagttcatttgctggatgggatgggccgtgaggcgatggtcgccagcgatgcggcgctactggcgtcgggtacggcagccctggagtgtatgctggcgaaatgcccgatggtggtgggatatcgcatgaagccttttaccttctggttggcgaagcggctggtgaaaactgattatgtctcgctgccaaatctgctggcgggcagagagttagtcaaagaattattgcaggaagagtgtgagccgcaaaaactggctgcggcgctgttaccgctgttggcgaacgggaaaaccagccacgcgatgcacgataccttccgtgaactgcatcagcagatccgctgcaatgccgatgagcaggcggcacaagccgttctggagttagcacaatga

SEQ ID NO: 20244 - DNA, 417 bp, Escherichia coli
gtgctgttaacaaataaaggagacgttatgctgggtttaaaacaggttcaccatattgcgattattgcgacggattatgcggtgagcaaagctttctactgcgatattcttggtttcacgctgcaaagcgaagtctatcgcgaagcgcgcgactcatggaaaggggatttggcgcttaatgggcaatatgtgattgagcttttctcatttccgttcccgccggaacgacccagccgaccggaagcttgcggtctgcgtcatctggcttttagcgttgatgacatcgatgcggcagtggcgcaccttgaaagccataacgtgaagtgtgaaaccatccgtgtcgatccatacacgcaaaaacgcttcaccttctttaacgatccggacgggctgccgttggaactgtatgagcagtaa

SEQ ID NO: 20245 - DNA, 1299 bp, Escherichia coli
atgacactcacgctcaatagacaacttctcacctcacgccagattctggtggcctttagcggcgggcttgactccaccgttctgctgcatcagttggtgcagtggcggacggaaaatccgggtgtcgctctgcgcgctattcatgtgcatcacggtttaagtgccaatgccgatgcctgggttacgcattgcgaaaacgtctgccaacagtggcaggtgccgctggtggtcgaacgcgtacaacttgcgcaagaaggactgggcattgaggcccaggcgcggcaggcacgttatcaggcatttgcccgcaccttgttgcccggtgaagtgctggtcaccgcgcaacatctcgacgatcaatgtgaaacctttctgctggcgctaaaacgcggcagtggccctgccgggctttcggctatggcggaagtctcggagtttgccggaacgcggcttattcgcccgttgctcgcccgcacgcggggggaactggtgcagtgggcgcgtcagtatgatttacgctggattgaagacgaaagtaatcaggacgactcatacgatcgtaactttctgcgcctgcgcgtagtgccgttattgcagcagcgttggccgcattttgccgaagcaacggcccgcagcgccgcactttgtgctgaacaagagagcctgctggatgaactgctggcagatgatttagcacactgtcaatcgccgcaggggacgctgcagattgtgccaatgctggcgatgagtgatgcccgccgcgcggcgattatccgccgctggctggcagggcagaatgcaccgatgccttcccgcgacgcgttggtgaggatctggcaggaagtggcgctggcgcgggaagatgcctcaccctgtttacgtttgggcgcgtttgaaatccgacgctatcagtcgcaactgtggtggattaaatccgtcaccgggcaaagcgaaaacattgtgccgtggcagacgtggcttcaaccgctggaattaccggcggggctgggaagtgtacagcttaatgcgggaggcgatattcgccctccgcgtgcagacgaagcggtcagcgtgcgtttcaaagcgccaggattgctgcatattgtcgggcgtaacggcggacgtaagctaaagaaaatctggcaagagctgggcgtgccgccgtggctacgtgacaccacgccactgctgttttatggcgaaacgctgattgcggcggcaggggtatttgtgacgcaagaaggtgtggctgaaggtgagaatggcgtaagttttgtctggcagaaaacgcttagttaa

SEQ ID NO: 20246 - DNA, 1017 bp, Escherichia coli; identical to SEQ ID NO: 6870

SEQ ID NO: 20247 - DNA, 1428 bp, Escherichia coli
atgtccatacgtttagaaggttatatgcaaacaacacaacaaaatgcgccactgaagcgcacaatgaaaacgcgtcacctgattatgctttccttgggcggcgtgattggcacaggattattcttcaataccgggtacatcatttccaccactggagcggcgggaacgctgctggcctatctgattggtgcgctggtggtctggctggttatgcagtgtctgggcgagctgtcggtcgcgatgccggagaccggagcgtttcacgtttatgccgcgcgctatcttggtccggctaccgggtataccgtggcctggctttactggctgacctggaccgtggcgctgggttcgagctttaccgccgctggattctgtatgcagtactggtttccacaggtgccggtatgggtctggtgcgtggtgttctgcgcgattatttttggtctgaatgttatctccacgcgcttttttgccgaaggggagttctggttctcgctggtcaaagtggtcactatcatcgcctttatcatcctcggtggggcggcgattttcggctttattccgatgcaggatggctcgcccgcgccggggctgagtaatatcacggcagaaggctggttcccgcacggtggcttaccgattttgatgactatggtggcagtgaactttgctttttcgggtaccgagcttatcggcattgccgccggtgaaacggaaaacccgcgcaaagttatcccggtagcgattcgtactaccatcgcgcgactgattattttctttatcggcaccgtgtttgtgctggcagcgctgatcccgatgcagcaggtgggcgtggagaaaagcccgtttgtgctggtatttgagaaagtagggatcccgtacgccgctgatatttttaacttcgtgatcctgacggctattctttctgcagcgaactccgggttatatgcctccgggcgcatgctgtggtcgttgtcgaatgaacgtacgctaccggcctgttttgcgcgagtaacgaaaaacggcgtgccactgacggcgctgtcggtcagtatgctcggtggtgtgctggcgctgttttccagcgtggtggccccggacacggtatttgttgcgctgtcggcaatctccgggtttgcggtggtagcggtgtggctgagtatctgcgcctcgcattttgtttttcgtcgccgtcatctgcaacaaggtaaggcattgagtgaattacattatcgcgcgccgtggtatccgctggtgccagtattaggttttgtgctgtgcctggtggcctgtgttgggctggcattcgatccagcgcagagaattgcgttgtggtgcgggttaccgtttgttgcgttgtgctatggtgcttatttccttactcaaccccgaaacgcaaaacaggagccagaacatgtcgcagaataa

SEQ ID NO: 20248 - DNA, 930 bp, Escherichia coli
atgattcagcaaggagatctcatgccgcagtccgcgttgttcacgggaatcattccccctgtctccaccatttttaccgccgacggccagctcgataagccgggcaccgccgcgctgatcgacgatctgatcaaagcaggcgttgacggcctgttcttcctgggcagcggtggcgagttctcccagctcggcgccgaagagcgtaaagccattgcccgctttgctatcgatcatgtcgatcgtcgcgtgccggtgctgatcggcaccggcggcaccaacgcccgggaaaccatcgaactcagccagcacgcgcagcaggcgggcgcggacggcatcgtggtgatcaacccctactactggaaagtgtcggaagcgaacctgatccgctatttcgagcaggtggccgacagcgtcacgctgccggtgatgctctataacttcccggcgctgaccgggcaggatctgactccggcgctggtgaaaaccctcgccgactcgcgcagcaatattatcggcatcaaagacaccatcgactccgtcgcccacctgcgcagcatgatccataccgtcaaaggtgcccatccgcacttcaccgtgctctgcggctacgacgatcatctgttcaataccctgctgctcggcggcgacggggcgatatcggcgagcggcaactttgccccgcaggtgtcggtgaatcttctgaaagcctggcgcgacggggacgtggcgaaagcggccgggtatcatcagaccttgctgcaaattccgcagatgtatcagctggatacgccgtttgtgaacgtgattaaagaggcgatcgtgctctgcggtcgtcctgtctccacgcacgtgctgccgcccgcctcgccgctggacgagccgcgcaaggcgcagctgaaaaccctgctgcaacagctcaagctttgctga

SEQ ID NO: 20249 - DNA, 504 bp, Escherichia coli; identical to SEQ ID NO: 6546

SEQ ID NO: 20250 - DNA, 276 bp, Escherichia coli; identical to SEQ ID NO: 6816

SEQ ID NO: 20251 - DNA, 264 bp, Escherichia coli
atgaagcccaatatccatcctgagtatcgtactgtggtgttccacgacaccagtgttgatgagtactttaaaatcggctcgactatcaaaacagaccgtgagattgagctggatggcgtaacgtatccatacgtgacaattgatgtctcttctaaatcgcacccgttctatacagggaagctgagaacagtggcatcagaaggaaatgttgcacgattcacccaacgttttggtcgttttgttagcacgaaaaagggggcgtga

SEQ ID NO: 20252 - DNA, 888 bp, Escherichia coli
atgtcacattataaaacaggtcataaacaaccacgatttcgttattcagttctggcccgctgcgtggcgtgggcaaatatctctgttcaggttctttttccactcgctgtcacctttaccccagtaatggcggcacgtgcgcagcatgcggttcagccacggttgagcatgggaaatactacggtaactgctgataataacgtggagaaaaatgtcgcgtcgtttgccgcaaatgccgggacatttttaagcagtcagccagatagcgatgcgacacgtaactttattaccggaatggccacagctaaagctaaccaggaaatacaggagtggctcgggaaatatggtactgcgcgcgtcaaactgaatgtcgataaagatttctcgctgaaggattcttcgctggaaatgctttatccgatttatgatacgccgacaaatatgttgttcactcagggggcaatacatcgtacagacgatcgtactcagtcaaatattggttttggctggcgtcatttttcaggaaatgactggatggcgggggtgaatacttttatcgatcatgatttatcccgtagtcatacccgcattggtgttggtgcggaatactggcgcgattatctgaaactgagcgccaatggttatattcgggcttctggctggaaaaaatcgccggatattgaggattatcaggaacgcccggcgaatggctgggatattcgtgctgagggctatttacccgcctggccgcagcttggcgcaagcctgatgtatgaacagtattatggcgatgaagtcgggctgtttggtaaagataagcgccagaaagacccgcatgctatttctgccgaggtgacctatacgccagtgcctcttacccagcaatag

SEQ ID NO: 20253 - DNA, 1671 bp, Escherichia coli
ttgcaatttgactacatcattattggtgccggctcagccggcaacgttctcgctacccgtctgactgaagatccgaatacctccgtgctgctgcttgaagcgggcggcccggactatcgctttgacttccgcacccagatgcccgctgccctggcattcccgctacagggtaaacgctacaactgggcctatgaaacggaacctgaaccgtttatgaataaccgccgcatggagtgcggacgcggtaaaggtctgggtggatcgtcgctgatcaacggcatgtgctacatccgtggcaatgcgctggatctcgataactgggcgcaagaacccggtctggagaactggagctacctcgactgcctgccctactaccgcaaggccgagactcgcgatatgggtgaaaacgactatcacggcggtgatggcccggtgagcgtcactacctccaaacccggcgtcaatccgctgtttgaagcgatgattgaagcgggcgtgcaggcgggctacccgcgcacggacgatctcaacggttatcagcaggaaggttttggtccgatggatcgcaccgtcacgccgcagggccgtcgcgccagcaccgcgcgtggctatctcgatcaggccaaatcgcgtcctaacctgaccattcgtactcacgctatgaccgatcacatcatttttgacggcaaacgcgcggtgggcgtcgaatggctggaaggcgacagcaccatcccaacccgcgcaacggccaacaaagaagtgctgttatgtgcaggcgcgattgcctcaccgcagatcctgcaacgctccggcgtcggcaacgctgaactgctggcggagtttgatattccgctggtgcatgaattacccggcgtcggcgaaaatcttcaggatcatctggagatgtatctgcaatatgagtgcaaagaaccggtttccctctaccctgccctgcagtggtggaaccagccgaaaatcggtgcggagtggctgtttggcggcactggcgttggtgccagcaaccactttgaagcaggtggatttattcgcagccgtgaggaatttgcgtggccgaatattcagtaccatttcctgccagtagcgattaactataacggctcgaatgcagtgaaagagcacggtttccagtgccacgtcggctcaatgcgctcgccaagccgtgggcatgtgcggattaaatcccgcgacccgcaccagcatccggcgattctgtttaactacatgtcgcacgagcaggactggcaggagttccgcgacgcaattcgcatcacccgcgagatcatgcatcaacccgcgctggatcagtatcgtggccgcgaaatcagccccggtgtcgaatgccagacggatgaacagctcgatgagttcgtgcgtaaccacgccgaaaccgccttccatccgtgcggtacctgcaaaatgggttacgacgagatgtccgtggttgacggcgaaggccgcgtacacgggttagaaggcctgcgtgtggtggatgcgtcgattatgccgcagattatcaccgggaatttgaacgccacgacaattatgattggcgagaaaatagcggatatgattcgtggacaggaagcgctgccgaggagcacggcgggatattttgtggcaaatgggatgccggtgagagcgaaaaaatga

SEQ ID NO: 20254 - DNA, 1473 bp, Escherichia coli
atgtcccgaatggcagaacagcagctttatatacatggtggttatacctccgccaccagcggtcgcaccttcgagaccattaacccggccaacggtaacgtgctggcgaccgtgcaggccgccgggcgcgaggatgtcgatcgcgccgtgaaaagcgcccagcaggggcaaaaaatctgggcgtcgatgaccgccatggagcgctcgcgtattctgcgtcgggccgttgatattctgcgtgaacgcaatgacgaactcgcaaaactggaaaccctcgacaccggaaaagcatattcggaaacctcaaccgtcgatatcgttaccggtgcggacgtgctggagtactacgccgggctgatcccggcgctggaaggcagccagatcccgttgcgtgaaacgtcctttgtgtatacccgccgcgaaccgctgggcgtagtggcagggattggcgcatggaactacccgatccagattgccctgtggaaatccgccccggcgctggcggcaggcaacgcaatgattttcaaaccgagcgaagttaccccgcttaccgcgttaaagctggctgaaatttacagcgaagcgggcctgccggacggcgtatttaacgtgttgccgggcgtgggcgcggagaccgggcaatatctgaccgagcatccgggcattgccaaagtgtcatttaccggcggtgtcgccagcggcaaaaaagtgatggctaactcggcggcctcttccctgaaagaagtgaccatggaactgggcggtaaatcaccgctgatcgttttcgatgatgcggatctcgatctcgccgccgatatcgccatgatggcaaacttcttcagctccggtcaggtgtgtaccaatggcacccgcgtcttcgttccggcgaaatgcaaagccgcatttgagcagaaaattctggcgcgcgttgagcgcattcgcgcgggcgacgttttcgatccgcaaactaacttcggcccgctggtcagcttcccgcatcgcgataacgtgctgcgctatatcgccaaaggcaaagaggaaggcgcgcgcgtactgtgcggcggcgatgtactgaaaggcgatggcttcgataacggcgcatgggttgcaccgacagtgttcaccgattgcagcgacgatatgaccatcgtgcgtgaagagatcttcgggccagtgatgtccattctgacctacgagtcggaagacgaagtcattcgccgcgctaacgataccgactacggcctggcggcgggcatcgtgacagcggacctgaaccgcgcgcatcgcgtcattcatcagctggaagcgggtatttgctggatcaacacctggggcgaatccccggcagagatgcccgttggcggctacaaacactccggcattggtcgcgagaacggcgtgatgacgctccagagttacacccaggtgaagtccatccaggttgagatggctaaattccagtccatattctaa

SEQ ID NO: 20255 - DNA, 1170 bp, Escherichia coli
atgagcgacacaacgatcctgcaaaacagtacccatgtcattaaaccgaaaaaatctgtggcactttctggcgttccggcgggcaatacggcgctctgcaccgtgggtaaaagtggcaatgacctgcattaccgcggctacgatattcttgatctggcgaaacattgcgaatttgaagaagtggcgcatctgctgatccacggcaaactgccgacccgtgacgaactcgccgcttacaaaacgaaactgaaagccctgcgcggtttaccggctaacgtgcgtaccgtgctggaagccttaccggcggcgtcgcacccgatggatgttatgcgcaccggtgtttccgcgctcggctgcacgctgccagaaaaagaggggcataccgtctctggcgcgcgggatattgccgacaaactgctggcgtcgcttagctcgattctcctttattggtatcactacagccacaacggcgaacgcatccaaccggaaaccgatgacgactccatcggcggtcacttcctgcatctgctgcacggcgaaaagccatcgcaaagctgggaaaaggcgatgcatatctcgctggtgctgtacgccgaacacgagtttaacgcctccacctttaccagtcgggtgattgcgggcaccggctctgatatgtattccgcgattattggcgcgattggcgcactgcgcgggccaaaacacggcggggcgaatgaagtgtcgctggagatccagcaacgctacgaaacgccggacgaagccgaagcagatatccgcaagcgcgtggaaaacaaagaagtggtcattggttttggtcatccggtttacaccatcgctgacccgcgccaccaggtgattaaacgtgtggcgaagcagctctcgcaggaaggcggctcgctgaagatgtacaacatcgccgatcgcctggaaacggtgatgtgggagagcaaaaagatgttccccaatctcgactggttctctgctgtttcctacaacatgatgggcgttcccaccgagatgttcacaccactgtttgttatcgcccgcgtcaccggctgggcggcgcacattatcgaacaacgtcaggacaacaaaattatccgtccttccgccaattatgttggaccggaagaccgcccgtttgtcgcgctggataagcgccagtaa

SEQ ID NO: 20256 - DNA, 612 bp, Escherichia coli
ttgaacatgccaatgaccgaaagaataagagcaggcaagctatttaccgatatgtgcgaaggcttaccggaaaaaagacttcgtgggaaaacgttaatgtatgagtttaatcactcgcatccatcagaagttgaaaaaagagaaagcctgattaaagaaatgtttgccacggtaggggaaaacgcctgggtagaaccgcctgtctatttctcttacggttccaacatccatataggccgcaatttttatgcaaatttcaatttaaccattgtcgatgactacacggtaacaatcggtgataacgtactgattgcacccaacgttactctttccgttacgggacaccctgtacaccatgaattgagaaaaaacggcgagatgtactcttttccgataacgattggcaataacgtctggatcggaagtcatgtggttattaatccaggcgtcaccatcggggataattctgttattggcgcgggtagtatcgtcacaaaagacattccaccaaacgtcgtggcggctggcgttccttgtcgggttattcgcgaaataaacgaccgggataagcactattatttcaaagattataaagttgaatcgtcagtttaa

SEQ ID NO: 20257 - DNA, 1095 bp, Escherichia coli
atggaaaaactgcgggtaggaatcgtttttggtggtaaatcagcggaacatgaagtgtctctgcaatcggcaaaaaacattgtcgatgccattgataaaagtcgcttcgacgttgtgctgctgggcattgataaacaagggcaatggcacgtcagcgatgccagcaattatctgctaaatgcagacgatcctgcccatattgcgttgcgcccttcggcgaccagccttgcgcaggtgccaggtaaacatgagcatcagcttatcgacgcgcaaaacggtcagccgttgccgacggtggatgtcattttcccgattgtccacggtacgctgggcgaagatggttccttgcagggaatgctgcgggtcgccaatttaccgtttgtaggttctgatgttctggcttcagcagcctgtatggacaaagatgtcaccaaacgtctgctacgcgatgccgggctgaacattgcgccatttattaccctgacgcgcgccaatcgtcacaacattagttttgccgaagtggagtctaaactggggttaccactgtttgtaaaaccggctaatcagggctcttctgttggtgtcagcaaagtaaccagtgaagaacagtacgcaattgccgtcgatctggcgttcgagttcgatcataaagtgatcgttgagcaagggatcaaaggtcgtgagatcgaatgcgcagttctgggcaacgacaatccgcaagccagcacctgtggagagatcgtactcaccagcgatttctatgcctacgacaccaagtacattgacgaagatggcgcgaaagtggtagttccggcagccattgcgccagaaatcaacgataagatccgggcgattgccgttcaggcttatcaaacgttgggatgcgcaggcatggcgcgtgtagacgtgtttttaaccccagagaacgaagtggtgatcaacgagatcaacaccctgcctggcttcactaatatcagtatgtatccgaagctgtggcaagccagcggtctgggttacaccgatctgatcacacgtttgattgaactggcgctggagcgtcacgctgcggataacgcattgaaaaccacaatgtaa

SEQ ID NO: 20258 - DNA, 1485 bp, Escherichia coli
ttgtcacggccgagacttatagtcgctttgtttttattttttaatgtatttgtacatggagaaaataaagtgaaacaaagcactattgcactggcactcttaccgttactgtttacccctgtgacaaaagcccggacaccagaaatgcctgttctggaaaaccgggctgctcagggcgatattactgcacccggcggtgctcgccgtttaacgggtgatcagactgccgctctgcgtgattctcttagcgataaacctgcaaaaaatattattttgctgattggcgatgggatgggggactcggaaattactgccgcacgtaattatgccgaaggtgcgggcggcttttttaaaggtatagatgccttaccgcttaccgggcaatacactcactatgcgctgaataaaaaaaccggcaaaccggactacgtcaccgactcggctgcatcagcaaccgcctggtcaaccggtgtcaaaacctataacggcgcgctgggcgtcgatattcacgaaaaagatcacccaacgattctggaaatggcaaaagccgcaggtctggcgaccggtaacgtttctaccgcagagttgcaggatgccacgcccgctgcgctggtggcacatgtgacctcgcgcaaatgctacggtccgagcgcgaccagtgaaaaatgtccgggtaacgctctggaaaaaggcggaaaaggatcgattaccgaacagctgcttaacgctcgtgccgacgttacgcttggcggcggcgcaaaaacctttgctgaaacggcaaccgctggtgaatggcagggaaaaacgctgcgtgaacaggcacaggcgcgtggttatcagttggtgagcgatgctgcctcactgaattcggtgacggaagcgaatcagcaaaaacccctgcttggcctgtttgctgacggcaatatgccagtgcgctggctaggaccgaaagcaacgtaccatggcaatatcgataagcccgcagtcacctgtacgccaaatccgcaacgtaatgacagtgtaccaaccctggcgcagatgaccgacaaagccattgaattgttgagtaaaaatgagaaaggctttttcctgcaagttgaaggtgcgtcaatcgataaacaggatcatgctgcgaatccttgtgggcaaattggcgagacggtcgatctcgatgaagccgtacaacgggcgctggaattcgctaaaaaggagggtaacacgctggtcatagtcaccgctgatcacgcccacgccagccagattgttgcgccggataccaaagctccgggcctcacccaggcgctaaataccaaagatggcgcagtgatggtgatgagttacgggaactccgaagaggattcacaagaacataccggcagtcagttgcgtattgcggcgtatggcccgcatgccgccaatgttgttggactgaccgaccagaccgatctcttctacaccatgaaagccgctctggggctgaaataa

SEQ ID NO: 20259 - DNA, 282 bp, Escherichia coli
ttgctgcaaagtcgcaatgatcatttacgccaaacggcattgcgcaacgcacataccccggcgttgttgttaacgacattgactgagcctcaggatcggtcgctggctattaataatccacagctggctgccgatgtgaaaacggcgtggttaaaagaggatccatcattactcttatttgtcgaacaacccgatctttcgctgttacgtgatttagtgaaaaccggggcaacgcggaaaattcgcagtgaagcgcgtcaccggcttgaggaaaaacaatga

SEQ ID NO: 20260 - DNA, 3147 bp, Escherichia coli
atgaaaattctcagcctgcgcctgaaaaacctgaactcattaaaaggcgaatggaagattgatttcacccgcgagccgttcgccagcaacgggctgtttgctattaccggcccaacaggtgcggggaaaaccaccctgctggacgccatttgtctggcgctgtatcacgaaactccgcgtctctctaacgtttcacaatcgcaaaatgatctcatgacccgcgataccgccgaatgtctggcggaggtggagtttgaagtgaaaggtgaagcgtaccgtgcattctggagccagaatcgggcgcgtaaccaacccgacggtaatttgcaggtgccacgcgtagagctggcgcgctgcgccgacggcaaaattctcgccgacaaagtgaaagataagctggaactgacagcgacgttaaccgggctggattacgggcgcttcacccgttcgatgctgctttcgcaggggcaatttgctgccttcctgaatgccaaacccaaagaacgcgcggaattgctcgaggagttaaccggcactgaaatctacgggcaaatctcggcgatggtttttgagcagcacaaatcggcccgcacagagctggagaagctgcaagcgcaggccagcggcgtcacgttgctcacgccggaacaagtgcaatcgctgacagcgagtttgcaggtacttactgacgaagaaaaacagttaattaccgcgcagcagcaagaacaacaatcgctaaactggttaacgcgtcaggacgaattgcagcaagaagccagccgccgtcagcaggccttgcaacaggcgttagccgaagaagaaaaagcgcaacctcaactggcggcgcttagtctggcacaaccggcacgaaatcttcgtccacactgggaacgcatcgcagaacacagcgcggcgctggcgcatattcgccagcagattgaagaagtaaatactcgcttacagagcacaatggcgcttcgcgcgagcattcgccaccacgcggcgaagcagtcagcagaattacagcagcagcaacaaagcctgaatacctggttacaggaacacgaccgcttccgtcagtggaacaacgaaccggcgggttggcgtgcgcagttctcccaacaaaccagcgatcgcgagcatctgcggcaatggcagcaacagttaacccatgctgagcaaaaacttaatgcgcttgcggcgatcacgttgacgttaaccgccgatgaagttgctaccgccctggcgcaacatgctgagcaacgcccactgcgtcagcacctggtcgcgctgcatggacagattgttccccaacaaaaacgtctggcgcagttacaggtcgctatccagaatgtcacgcaagaacagacgcaacgtaacgccgcacttaacgaaatgcgccagcgttataaagaaaagacgcagcaacttgccgatgtgaaaaccatttgcgagcaggaagcgcgcatcaaaacgctggaagctcaacgtgcacagttacaggcgggtcagccttgcccactttgtggttccaccagccacccggcggtcgaggcgtatcaggcgctggagcctggcgttaatcagtctcgattactggcgctggaaaacgaagttaaaaagctcggtgaagaaggtgcgacgctacgtgggcaactggacgccataacaaagcagcttcagcgtgatgaaaacgaagcgcaaagcctccgacaagatgagcaagcacttactcaacaatggcaagccgtcacggccagcctcaatatcaccttgcagccactggacgatattcaaccgtggctggatgcacaagatgagcacgaacgccagctgcggttactcagccaacggcatgaattacaagggcagattgccgcgcataatcagcaaattatccagtatcaacagcaaattgaacaacgccagcaactacttttaacgacattgacgggttatgcactgacattgccacaggaagatgaagaagagagctggttggcgacacgtcagcaagaagcgcagagctggcagcaacgccagaacgaattaaccgcgctgcaaaaccgtattcagcagctgacgccgattctggaaacgttgccgcaaagtgatgaactcccgcactgcgaagaaactgtggtattggaaaactggcggcaggtacatgaacaatgtctcgcattacacagccagcagcagacgttacagcaacaggatgttctggcggcgcaaagtctgcaaaaagcccaggcgcagtttgacaccgcgctacaggccagcgtctttgacgatcagcaggcgttccttgcggcgctaatggatgaacaaacactaacgcagctggaacagctcaagcagaatctggaaaaccagcgccgtcaggcgcaaactctggtcactcagacagcagaaacgctggcacagcatcaacaacaccgacctgacgacgggttggctctcactgtgacggtggagcagattcagcaagagttagcgcaaactcaccaaaagttgcgtgaaaacaccacgagtcaaggcgagattcgccagcagctgaagcaggatgcagataaccgtcagcaacaacaaaccttaatgcagcaaattgctcaaatgacgcagcaggttgaggactggggatatctgaattcgctaataggttccaaagagggcgataaattccgcaagtttgcccaggggctgacgctggataatttagtccatctcgctaatcagcaacttacccggctgcacgggcgctatctgttacagcgcaaagccagcgaggcgctggaagtcgaggttgttgatacctggcaggcagatgcggtacgcgatacccgtaccctttccggcggcgaaagtttcctcgttagtctggcgctggcgctggcgctttcggatctggtcagccataaaacacgtattgactcgctgttccttgatgaaggttttggcacgctggatagcgaaacgctggataccgcccttgatgcgctggatgccctgaacgccagtggcaaaaccatcggtgtgattagccacgtagaagcgatgaaagagcgtattccggtgcagatcaaagtgaaaaagatcaacggcctgggctacagcaaactggaaagtacgtttgcagtgaaataa

SEQ ID NO: 20261 - DNA, 1296 bp, Escherichia coli
gtgctggaacggctgtcgtggaaaaggctggtgctggagctgctactttgctgcctcccggctttcatcctgggtgcattttttggttacctgccctggtttttgctggcatcggtaacaggactgcttatctggcatttctggaatttattgcgcctttcatggtggctgtgggtggatcgcagtatgaccccgccaccggggcgtggtagctgggaaccgctactatacggcttacaccagatgcagctgcgaaataaaaaacgccgccgtgaactgggcaatctgattaaacgctttcgtagcggcgcggagtcgctgcccgacgcggtggtgctgaccacggaagagggcggtattttctggtgtaacggtctggcgcaacaaattcttggtttgcgctggccggaagataacgggcagaacatccttaacctactgcgttacccggagtttacgcaatatctgaaaacgcgtgatttttctcgcccgctcaatctggtgctcaacaccgggcggcatctggaaattcgcgtcatgccttatacccacaaacagttgctgatggtggcgcgtgatgtcacgcaaatgcatcaactggaaggggcgcggcgtaacttttttgccaacgtgagccatgagttacgtacgccattgaccgtgttacagggttacctggagatgatgaatgagcagccgctggaaggcgcggtacgcgaaaaagcgttgcacaccatgcgcgagcagacccagcggatggaaggactggtgaagcaattgctgacgctgtcgaaaatagaagccgcaccgacgcatttgctcaatgaaaaggttgatgtgccgatgatgctgcgcgttgttgagcgcgaggctcagactctgagtcagaaaaaacagacatttacctttgagatagataacggcctcaaggtgtctggcaacgaagatcagctacgcagtgcgatttcgaacctggtctataacgccgtgaatcatacgccggaaggcacgcatatcaccgtacgctggcagcgagtgccgcacggtgccgaatttagcgttgaagataacggaccgggcattgcaccggagcatattccgcgcctgaccgagcgtttttatcgcgttgataaagcgcgttcccggcaaaccggcggtagcggattagggttagcgatcgtgaaacatgctgtgaatcatcacgaaagtcgcctgaatattgagagtacagtaggaaaaggaacacgtttcagttttgttatcccggaacgtttaattgccaaaaacagcgattaa

SEQ ID NO: 20262 - DNA, 1320 bp, Escherichia coli
atgacccatcaattaagatcgcgcgatatcatcgctctgggctttatgacatttgcgttgttcgtcggcgcaggtaacattattttccctccaatggtcggcttacaggcaggcgaacacgtctggactgcggcattcggcttcctcattactgccgttggcctgccggtattaacggtagtggcgctggcaaaagttggcggcggtgttgacagcctcagcacgccaatcggtaaagtcgctggcgtactgctggcaacggtttgttacctggcggtggggccgcttttcgctacgccgcgtacagctaccgtttcctttgaagtggggattgcgccgctgacgggtgattccgcgctgccgctgtttatctacagcctggtctatttcgctatcgttattctggtttcgctctatccgggcaagctgctggataccgtgggcaacttccttgcgccgctgaaaattatcgcgctggtcatcctgtctgttgccgctattgtctggccggcgggttctatcagcacggcgactgaggcttatcaaaacgctgcgttttctaacggcttcgttaacggctatctgaccatggatacgctgggcgcaatggtgtttggtatcgttattgttaacgcggcgcgttctcgtggcgttaccgaagcgcgtctgctgacccgttataccgtctgggctggcctgatggcgggtgttggtctgactctgctgtacctggcgctgttccgtctggggtcagacagcgcgtcgctggtcgatcagtctgcaaacggcgctgctattctgcatgcttacgttcagcacacctttggcggcggcggtagcttcctgctggcggcgttaatcttcatcgcctgcctggtaacggcagttggcctgacctgtgcttgtgcagaattctttgcccagtacgtaccgctctcttatcgtacgctggtgtttatcctcggcggcttctcgatggtggtttctaacctcggcttaagccagctgatccagatctccgtaccggtgctgaccgctatttatccgccgtgtatcgcactggttgtattaagttttacacgctcatggtggcataattcgtcccgcgtgattgctccgccgatgtttatcagcctgctttttggtattctcgacgggatcaaagcatctgcattcagcgatatcttaccgtcctgggcgcagcgtttaccgctggccgaacaaggtctggcgtggttaatgccaacagtggtgatggtggttctggccattatctgggatcgcgcggcaggtcgtcaggtgacctccagcgctcactaa

SEQ ID NO: 20263 - DNA, 1071 bp, Escherichia coli
atgcgcgttaccgatttctcctttgaattgcccgaatccctgattgcccactatcccatgcctgaacgcagtagctgtcgtttactgtcgctggacgggccgacgggcgcgctgacgcacggtactttcaccgatttacttgataagctcaaccccggcgatcttctggtttttaataatacccgcgtgatcccggcgcgcctgtttgggcgtaaagccagcggcggcaagattgaagtgctggttgaacggatgctcgacgacaaacgcattcttgcgcatattcgcgcctcgaaagcgccaaaacctggcgcagaactgctgctgggcgatgacgaaagtattaacgcaacaatgaccgcgcgccacggcgcactgtttgaagtcgaatttaatgatgaacgctcggtgctggatattctcaacagcatcggccatatgccgctgccgccgtatatcgaccgtccggacgaagacgctgaccgcgaactttatcaaaccgtttatagcgaaaaaccgggcgcggttgcagccccgaccgcaggtctgcattttgacgagcctttgctggaaaaattgcgcgccaaaggcgtggagatggcgtttgtgacgttgcacgttggtgcgggcaccttccagccggtgcgcgtcgacaccattgaagatcacatcatgcactcggaatacgctgaagtaccgcaggatgtggtagacgcggtactggcggcgaaagcgcgcggtaaccgggtgattgcggttggcaccacttcagtacgttcgctggaaagcgcggctcaggcagcgaaaaacgatctcattgaaccgttcttcgacgatacccaaatctttatctatccgggcttccagtacaaagtggtcgatgcgctggtgacgaacttccacttgccagagtcgacgctgattatgctggtttcggcctttgccggttatcaacacaccatgaacgcctataaagcagcggtagaagagaaatatcgcttttttagttacggtgatgcgatgtttatcacgtacaatccgcaggcaattaatgagcgcgtcggggagtaa

SEQ ID NO: 20264 - DNA, 1128 bp, Escherichia coli
atgaaatttgaactggacaccaccgacggtcgcgcacgccgtggccgcctggtctttgatcgtggcgtagtggaaacgccttgttttatgcctgttggcacctacggcaccgtaaaagggatgacgccggaagaagttgaagccactggcgcgcaaattatcctcggcaacaccttccacctgtggctgcgcccgggccaggaaatcatgaaactgcacggcgatctgcacgattttatgcagtggaaggggccgatcctcaccgactccggcggcttccaggtcttcagccttggcgatattcgtaaaatcaccgaacagggcgtgcacttccgtaacccgatcaacggcgatccgattttcctcgatcctgaaaaatcaatggagattcagtacgatcttggttcggatatcgtcatgatctttgatgagtgtacgccgtatcctgctgactgggattacgcaaaacgctccatggagatgtctctgcgttgggcgaagcgtagccgtgagcgttttgacagtctcggaaacaaaaatgcgctgtttggtatcatccagggcagcgtttacgaagatttacgtgatatttctgttaaaggtctggtagatatcggttttgatggctacgctgtcggcggtctggctgtgggtgagccgaaagcagatatgcaccgcattctggagcatgtatgcccgcaaattccggcagacaaaccgcgttacctgatgggcgttggtaaaccagaagacctggttgaaggcgtacgtcgtggtatcgatatgtttgactgcgtaatgccaacccgcaacgcccgaaatggtcatttgttcgtgaccgatggcgtggtgaaaatccgcaatgcgaagtataagagcgatactggcccactcgatcctgagtgtgattgctacacctgtcgcaattattcacgcgcttacttgcatcatcttgaccgttgcaacgaaatattaggcgcgcgactcaacaccattcataaccttcgttactaccagcgtttgatggcgggtttacgcaaggctattgaagagggtaaattagagagcttcgtaactgatttttaccagcgtcaggggcgagaagtaccacctttgaacgttgattaa

SEQ ID NO: 20265 - DNA, 1104 bp, Escherichia coli
gtgcaggacgagtattacatggcgcgggcgctaaagctggcgcaacgaggacgttttaccacgcatcccaacccgaatgtcgggtgcgtcattgtcaaagatggcgaaattgtcggtgaaggttaccaccaacgtgcgggtgaaccacatgccgaagtacacgcgttgcgtatggcgggtgaaaaagccaaaggtgcgaccgcctatgtcacactcgaaccctgtagccatcatggtcgtacgccaccgtgctgtgacgcactcatcgccgctggcgtagcgcgcgtggttgcctcgatgcaagatcctaacccgcaggtcgctgggcgtggactttaccgtctgcaacaggctggcattgacgtcagccacggcctgatgatgagtgaagccgagcaattgaataaaggctttctcaagcggatgcgcaccggctttccttatattcagttaaaacttggcgcatcgcttgatggtcgcacggcgatggcgagcggcgaaagccagtggatcacttcgccccaggcgcggcgtgatgtacaactactgcgcgcgcaaagtcatgccattttaaccagcagcgccacggtgctggcggatgatcctgccttaacggtgcgttggtctgaactggatgaacaaactcaggcgctctatccgcaacaaaatctccgtcagccgatacgtattgtgattgatagccaaaatcgcgtgacgccggtacatcgcattgtgcagcagcccggcgaaacctggttcgcgcgtacgcaggaagattctcgtgagtggccggaaacggtgcgtaccttgctgattccagagcataaaggtcatctggatctggttgtactgatgatgcaactgggtaaacagcaaattaacagcatctgggtggaagcggggccaacgctcgctggcgcattgctgcaggcgggtttagtcgatgagctgattgtctatatcgcacctaaactattaggcagcgacgcccgcggattatgcacgctgccagggcttgagaaattagccgacgccccccaatttaaattcaaagagatacgtcatgtaggcccggatgtttgcctgcatttagtgggtgcatga

SEQ ID NO: 20266 - DNA, 1863 bp, Escherichia coli
atgagttttgatattgccaaatacccgaccctggcactggtcgactccacccaggagttacgactgttgccgaaagagagtttaccgaaactctgcgacgaactgcgccgctatttactcgacagcgtgagccgttccagcgggcacttcgcctccgggctgggcacggtcgaactgaccgtggcgctgcactatgtctacaacaccccgtttgaccaattgatttgggatgtggggcatcaggcttatccgcataaaattttgaccggacgccgcgacaaaatcggcaccatccgtcagaaaggcggtctgcacccgttcccgtggcgcggcgaaagcgaatatgacgtattaagcgtcgggcattcatcaacctccatcagtgccggaattggtattgcggttgctgccgaaaaagaaggcaaaaatcgccgcaccgtctgtgtcattggcgatggcgcgattaccgcaggcatggcgtttgaagcgatgaatcacgcgggcgatatccgtcctgatatgctggtgattctcaacgacaatgaaatgtcgatttccgaaaatgtcggcgcgctcaacaaccatctggcacagctgctttccggtaagctttactcttcactgcgcgaaggcgggaaaaaagttttctctggcgtgccgccaattaaagagctgctcaaacgcaccgaagaacatattaaaggcatggtagtgcctggcacgttgtttgaagagctgggctttaactacatcggcccggtggacggtcacgatgtgctggggcttatcaccacgctaaagaacatgcgcgacctgaaaggcccgcagttcctgcatatcatgaccaaaaaaggtcgtggttatgaaccggcagaaaaagacccgatcactttccacgccgtgcctaaatttgatccctccagcggttgtttgccgaaaagtagcggcggtttgccgagctattcaaaaatctttggcgactggttgtgcgaaacggcagcgaaagacaacaagctgatggcgattactccggcgatgcgtgaaggttccggcatggtcgagttttcacgtaaattcccggatcgctacttcgacgtggcaattgccgagcaacacgcggtgacctttgctgcgggtctggcgattggtgggtacaaacccattgtcgcgatttactccactttcctgcaacgcgcctatgatcaggtgctgcatgacgtggcgattcaaaagcttccggtcctgttcgccatcgaccgcgcgggcattgttggtgctgacggtcaaacccatcagggtgcttttgatctctcttacctgcgctgcataccggaaatggtcattatgaccccgagcgatgaaaacgaatgtcgccagatgctctataccggctatcactataacgatggcccgtcagcggtgcgctacccgcgtggcaacgcggtcggcgtggaactgacgccgctggaaaaactaccaattggcaaaggcattgtgaagcgtcgtggcgagaaactggcgatccttaactttggtacgctgatgccagaagcggcgaaagtcgccgaatcgctgaacgccacgctggtcgatatgcgttttgtgaaaccgcttgatgaagcgttaattctggaaatggccgccagccatgaagcgctggtcaccgtagaagaaaacgccattatgggcggcgcaggcagcggcgtgaacgaagtgctgatggcccatcgtaaaccagtacccgtgctgaacattggcctgccggacttctttattccgcaaggaactcaggaagaaatgcgcgccgaactcggcctcgatgccgctggtatggaagccaaaatcaaggcctggctggcataa

SEQ ID NO: 20267 - DNA, 900 bp, Escherichia coli
atggactttccgcagcaactcgaagcctgcgttaagcaggccaaccaggcgctgagccgttttatcgccccactgccctttcagaacactcccgtggtcgaaaccatgcagtatggcgcattattaggtggtaagcgcctgcgacctttcctggtttatgccaccggtcatatgttcggcgttagcacaaacacgctggacgcacccgctgccgccgttgagtgtatccacgcttactcattaattcatgatgatttaccggcaatggatgatgacgatctgcgtcgcggtttgccaacctgccatgtgaagtttggcgaagcaaacgcgattctcgctggcgacgctttacaaacgctggcgttctcgattttaagcgatgccgatatgccggaagtgtcggaccgcgacagaatttcgatgatttctgaactggcgagcgccagtggtattgccggaatgtgcggtggtcaggcattagatttagacgcggaaggcaaacacgtacctctggacgcgcttgagcgtattcatcgtcataaaaccggcgcattgattcgcgccgccgttcgccttggtgcattaagcgccggagataaaggacgtcgtgctctgccggtactcgacaagtatgcagagagcatcggccttgccttccaggttcaggatgacatcctggatgtggtgggagatactgcaacgttgggaaaacgccagggtgccgaccagcaacttggtaaaagtacctaccctgcacttctgggtcttgagcaagcccggaagaaagcccgggatctgatcgacgatgcccgtcagtcgctgaaacaactggctgaacagtcactcgatacctcggcactggaagcgctagcggactacatcatccagcgtaataaataa

SEQ ID NO: 20268 - DNA, 1992 bp, Escherichia coli
atgttcggaaaattatcacttgatgcagtcccgttccatgaacctatcgtcatggttacgatcgctggcattattttgggaggtctggcgctcgttggcctgatcacttacttcggtaagtggacctacctgtggaaagagtggctgacctccgtcgaccataaacgcctcggtatcatgtatatcatcgtggcgattgtgatgttgctgcgtggttttgctgacgccattatgatgcgtagccagcaggctcttgcctcggcgggcgaagcgggcttcctgccacctcaccactacgatcagatctttaccgcgcacggcgtgattatgatcttcttcgtggcgatgcctttcgttatcggtctgatgaacctggtggttccgctgcagatcggcgcgcgtgacgttgcgttcccgttcctcaacaacttaagcttctggtttaccgttgttggtgtgattctggttaacgtttctctcggcgtgggcgaatttgcgcagaccggctggctggcctatccaccgctatcgggaatagagtacagtccgggagtcggtgtcgattactggatatggagtctccagctatccggtataggtacgacgcttaccggtatcaacttcttcgttaccattctgaagatgcgcgcaccgggcatgaccatgttcaagatgccagtatttacctgggcatcactgtgcgcgaacgtactgattattgcttccttcccaattctgacggttaccgtcgcgttgttgaccctggatcgctatctgggcacccatttctttaccaacgatatgggtggcaacatgatgatgtacatcaacctgatttgggcctggggccacccggaagtttacatcctgatcctgcctgttttcggtgtgttctccgaaattgcggcaaccttctcgcgtaaacgtctgtttggttatacctcgctggtatgggcaaccgtctgtatcaccgtgctgtcgttcatcgtttggctgcaccacttctttacgatgggtgcgggcgcgaacgtaaacgccttctttggtatcaccacaatgattatcgccatcccgaccggggtgaagatcttcaactggctgttcaccatgtatcagggccgcatcgtgttccattctgcgatgctgtggaccatcggttttatcgtcaccttctcggtgggcgggatgactggcgtgctgctggccgtaccgggcgcggacttcgttctgcataacagcctgttcctgattgcgcacttccataacgtgatcatcggcggcgtggtcttcggctgcttcgcagggatgacctactggtggcctaaagcgttcggtttcaaactgaacgaaacctggggtaaacgcgcgttctggttctggatcatcggcttcttcgttgcctttatgccactgtatgcgctgggcttcatgggcatgacccgtcgtttgagccagcagattgacccgcagttccacaccatgctgatgattgcagccagcggtgcagtactgattgcgctgggtattctctgcctcgttattcagatgtacgtttctattcgcgaccgcgaccagaaccgtgacctgactggcgacccgtggggtggccgtacgctggagtgggcaacctcttccccgcctccgttctataactttgccgtagtgccgcacgttcacgaacgtgatgcattctgggaaatgaaagagaaaggcgaagcgtataaaaagcctgaccactatgaagaaattcatatgccgaaaaacagcggtgcaggtatcgtcattgcagctttctccaccatcttcggtttcgccatgatctggcatatctggtggctggcgattgttggcttcgcaggcatgatcatcacctggatcgtgaaaagcttcgacgaggacgtggattactacgtgccggtggcagaaatcgaaaaactggaaaaccagcatttcgatgagattactaaggcagggctgaaaaatggcaactga

SEQ ID NO: 20269 - DNA, 273 bp, Escherichia coli
gtgaataaatctcaattgatcgacaagattgctgcaggggctgatatctctaaagctgcggctggccgtgcgttagatgctattattgcttccgtaactgaatctctgaaagaaggggatgatgtagcactggtaggttttggtacttttgccgttaaagagcgtgctgcccgtactggccgcaacccgcagaccggtaaagagatcaccatcgctgctgctaaagtaccgagcttccgtgcaggtaaagcactgaaagacgcggtaaactaa

SEQ ID NO: 20270 - DNA, 1932 bp, Escherichia coli
atgagttatcaggtcttagcccgaaaatggcgcccacaaacctttgctgacgtcgtcggccaggaacatgtgctgaccgcactggcgaacggcttgtcgttagggcgtattcatcatgcttatcttttttccggcacccgtggcgtcggaaaaacctctatcgcccgactgctggcgaaggggctaaactgcgaaaccggcattaccgcgacgccgtgcggcgtgtgcgataactgtcgtgaaatcgagcaggggcgctttgtcgatctgattgaaatcgacgccgcctcgcgcaccaaagttgaagatacccgcgacctgctggataacgtccagtacgctccggcgcgtggtcgtttcaaagtttatctgatcgacgaagtgcatatgctgtcgcgccacagctttaacgcactgttaaaaacccttgaagagccgccggagcacgttaagtttctgctggcgacgaccgatccacagaaattgccggtgacgattttgtcacgctgtctgcaatttcatctcaaggcgctggatgtcgagcaaattcgccatcagcttgagcacatcctcaacgaagaacatatcgctcacgagccgcgggcgctgcaattgctggcacgcgccgctgaaggcagcctgcgagatgccttaagtctgaccgaccaggcgattgccagcggtgacggccaggtttcaacccaggcggtcagtgcgatgctgggtacgcttgacgacgatcaggcgctgtcgctggttgaagcgatggtcgaggccaacggcgagcgcgtaatggcgctgattaatgaagccgctgcccgtggtatcgagtgggaagcgttgctggtggaaatgctcggcctgttgcatcgtattgcgatggtacaactttcgcctgctgcacttggcaacgacatggccgccatcgagctgcggatgcgtgaactggcgcgcaccataccgccgacggatattcagctttactatcagacgctgttgattggtcgcaaagaattaccgtatgcgccggaccgtcgcatgggcgttgagatgacgctgctgcgcgcgctggcattccatccgcgtatgccgctgcctgagccagaagtgccacgacagtcctttgcacccgtcgcgccaacggcagtaatgacgccaacccaggtgccgccgcaaccgcaatcagcgccgcagcaggcaccgactgtaccgctcccggaaaccaccagccaggtgctggcggcgcgccagcagttgcagcgcgtgcagggagcaaccaaagcaaaaaagagtgaaccggcagccgctacccgcgcgcggccggtgaataacgctgcgctggaaagactggcttcggtcaccgatcgcgttcaggcgcgtccggtgccatcggcgctggaaaaagcgccagccaaaaaagaagcgtatcgctggaaggcgaccactccggtgatgcagcaaaaagaagtggtcgccacgccgaaggcgctgaaaaaagcgctggaacatgaaaaaacgccggaactggcggcgaagctagcggcagaagccattgagcgcgacccgtgggcggcacaggtgagccaactttcgctaccaaaactggtcgaacaggtggcgttaaatgcctggaaagaggagagcgacaacgcagtatgtctgcatttgcgctcctctcagcggcatttgaacaaccgcggtgcacagcaaaaactggctgaagcgttgagcatgttaaaaggttcaacggttgaactgactatcgttgaagatgataatcccgcggtgcgtacgccgctggagtggcgtcaggcgatatacgaagaaaaacttgcgcaggcgcgcgagtccattattgcggataataatattcagaccctgcgtcggttcttcgatgcggagctggatgaagaaagtatccgccccatttga

SEQ ID NO: 20271 - DNA, 330 bp, Escherichia coli
atgtttggtaaaggcggtctgggtaacctgatgaagcaagcccagcagatgcaagaaaaaatgcagaaaatgcaggaagagatcgcgcagctggaagtcaccggcgaatctggcgcaggtctggtaaaagtgaccatcaacggtgcacacaactgccgtcgcgtagagatcgacccgagcctgctggaagacgacaaagagatgctggaagacctggtggctgcagcattcaacgacgcagcacgtcgtattgaagaaacgcagaaagaaaaaatggcctctgtatcctccggaatgcagctgccgcctggctttaagatgccgttctga

SEQ ID NO: 20272 - DNA, 606 bp, Escherichia coli
atgcaaaccagcccgctgttaacacagcttatggaagcactgcgctgtctgccgggcgttggcccgaagtcggcgcagcgtatggcgttcacgctgcttcagcgcgatcgtagcggcgggatgcgtctggcgcaggcgctcacccgggcgatgtcggaaatcggccactgcgccgattgccgcactttcaccgaacaggaagtctgtaacatctgttcgaatccgcgtcgtcaggaaaacggtcaaatctgcgtggtggagagtccggcggacatctacgccattgagcagacggggcagttttcaggtcgttattttgtgttgatggggcatctgtcaccgctggacggcatcggtccggatgatatcgggcttgatcgtctggaacagcgtctggcagaggaaaaaatcactgaagtgatcctcgccaccaaccccacggttgaaggtgaagctaccgctaactacattgccgagctttgcgcgcaatatgacgtggaagccagccgaatcgctcatggcgttccggttggcggcgagctggaaatggtcgacggcaccacgttgtcacactcccttgccgggcgtcataagattcgtttttaa

SEQ ID NO: 20273 - DNA, 1653 bp, Escherichia coli
atgaaattattgcagcggggcgtggcgttagcgctgttaaccacatttacactggcgagtgaaactgctctggcgtatgagcaggataaaacctacaaaattacagttctgcataccaatgatcatcatgggcatttttggcgcaatgaatatggcgaatatggtctggcggcgcaaaaaacgctggtggatggtatccgcaaagaggttgcggctgaaggcggtagcgtgctgctactttccggtggcgacattaacactggcgtgcccgagtctgacttacaggatgccgaacctgattttcgcggtatgaatctggtgggctatgacgcgatggcgatcggtaatcatgaatttgataatccgctcaccgtattacgccagcaggaaaagtgggccaagttcccgttgctttccgcgaatatctaccagaaaagtactggcgagcgcctgtttaaaccgtgggcgctgtttaagcgtcaggatctgaaaattgccgttattgggctgacaaccgatgacacagcaaaaattggtaacccggaatacttcactgatatcgaatttcgtaagcccgccgatgaagcgaagctggtgattcaggagctgcaacagacagaaaagccagacattattatcgcggcgacccatatggggcattacgataatggtgagcacggctctaacgcaccgggcgatgtggagatggcacgcgcgctgcctgccggatcgctggcgatgatcgtcggtggtcactcgcaagatccggtctgcatggcggcagaaaacaaaaaacaggtcgattacgtgccgggtacgccatgcaaaccagatcaacaaaacggcatctggattgtgcaggcgcatgagtggggcaaatacgtgggacgggctgattttgagtttcgtaatggcgaaatgaaaatggttaactaccagctgattccggtgaacctgaagaagaaagtgacctgggaagacgggaaaagcgagcgcgtgctttacactcctgaaatcgctgaaaaccagcaaatgatctcgctgttatcaccgttccagaacaaaggcaaagcgcagctggaagtgaaaataggcgaaaccaatggtcgtctggaaggcgatcgtgacaaagtgcgttttgtacagaccaatatggggcggttgattctggcagcccaaatggatcgcactggtgccgactttgcggtgatgagcggaggcggaattcgtgattctatcgaagcaggcgatatcagctataaaaacgtgctgaaagtgcagccattcggcaatgtggtggtgtatgccgacatgaccggtaaagaggtgattgattacctgaccgccgtcgcgcagatgaagccagattcaggtgcctacccgcaatttgccaacgttagctttgtggcgaaagacggcaaactgaacgaccttaaaatcaaaggcgaaccggtcgatccggcgaaaacttaccgtatggcgacattaaacttcaatgccaccggcggtgatggatatccgcgccttgataacaaaccgggctatgtgaataccggctttattgatgccgaagtgctgaaagcgtatatccagaaaagctcgccgctggatgtgagtgtttatgaaccgaaaggtgaggtgagctggcagtaa

SEQ ID NO: 20274 - DNA, 687 bp, Escherichia coli
atgccagcggaaaacattgttgaagttcatcatcttaagaagtccgtcggtcagggggagcatgaactctccatcctcaccggagttgagctggttgtcaaacgtggcgagaccatcgcactggtgggcgagtcgggatcgggtaagtcaaccttgctggcgatcctcgccgggcttgatgacggcagcagtggcgaagtgagtctggtgggacaaccgctacataatatggacgaagaagcgcgggcaaagttgcgcgcgaagcacgtcggctttgtttttcagtcatttatgttaattcctacccttaacgcgctggaaaacgtcgagcttccggctctgctgcgcggtgagagtagcgcggaaagtcgtaacggggcgaaagcgttgctcgaacagttagggctgggtaaacgtctggatcatcttccggcacagctttccggcggtgaacagcaacgagtggcgctggcacgagcctttaatggtcgacctgatgtgctgtttgccgacgaacccaccggcaaccttgaccgccagacgggcgataaaattgccgacctgctgttttccctcaaccgtgaacatggcaccacgttgattatggtgacccacgacctgcaactggcggcacgctgcgaccgctgcttacggctggtgaacgggcagttgcaggaggaagcatga

SEQ ID NO: 20275 - DNA, 1362 bp, Escherichia coli
atgtcttttgatttaatcattaaaaacggcaccgttattttagaaaacgaagctcgcgttgtagatatcgccgttaaaggcggaaaaattgctgctatcggtcaggatctgggcgatgcaaaagaagttatggatgcgtctggtctggtggtttcgccgggcatggttgatgcgcacacccatatttctgaaccgggtcgtagccactgggaaggttatgaaaccggtactcgcgcagcggcaaaaggtggtatcaccaccatgatcgaaatgccgctcaaccagctgcctgcaacggttgaccgcgcttcaattgaactgaagttcgatgccgctaaaggcaagctgactattgatgcggcacaactcggtggcctggtgtcttacaacatcgaccgtctgcatgagctggatgaagtgggcgttgtcggcttcaaatgcttcgttgcgacctgtggcgatcgcggtatcgacaacgacttccgtgatgtaaacgactggcagttcttcaaaggtgcgcagaagctgggcgaactgggtcagccggtgctggtgcactgcgaaaacgcgctgatttgtgacgaactgggcgaagaagcgaagcgtgaaggtcgcgtaaccgctcatgactatgtggcttcgcgtccggtatttaccgaagtggaagcaattcgccgcgtactgtatctggcgaaagttgctggttgccgtctgcacgtttgccacgtcagcagcccggaaggtgttgaggaagtgactcgtgcacgtcaggaaggtcaggacgttacttgtgaatcctgcccgcattactttgtactggataccgatcagttcgaagaaatcggtactctggcgaagtgttcaccgccgatccgcgatctggaaaaccagaaaggcatgtgggaaaaactgtttaacggtgaaatcgactgcctggtttccgaccactctccatgcccgccggaaatgaaagccggtaacatcatgaaagcatggggcggtatcgccggtctgcaaagctgcatggacgtgatgttcgatgaagcggtacagaaacgcggtatgtctctgccaatgttcggcaaattaatggcgactaacgcagcagatattttcggtctgcagcaaaaaggccgtatcgccccaggaaaagatgccgacttcgtcttcattcagccgaatagcagctatgttcttaccaatgacgatctggaatatcgccacaaagtcagcccgtatgttggccgtaccattggcgcgcgtatcacgaaaaccatcttacgtggtgatgtgatttacgacattgaacagggcttccctgttgcgccgaaaggtcaatttatccttaaacatcagcagtaa

SEQ ID NO: 20276 - DNA, 1386 bp, Escherichia coli
atgctaaaaatcttcaatactctgacacgccaaaaagaggaatttaagcctattcacgccggggaagtcggcatgtacgtgtgtggaatcaccgtttacgatctctgtcatatcggtcacgggcgtacctttgttgcttttgacgtggttgcgcgctatctgcgtttcctcggctataaactgaagtatgtgcgcaacattaccgatatcgacgacaaaatcatcaaacgcgccaatgaaaatggcgaaagctttgtggcgatggtggatcgcatgatcgccgaaatgcacaaagattttgatgctttgaacattctgcgcccggatatggagccgcgcgcgacgcaccatatcgcagaaattattgaactcactgaacaactgatcgccaaaggtcacgcttatgtggcggacaacggcgacgtgatgttcgacgtcccgaccgatccaacttatggcgtgctgtcgcgtcaggatctcgaccagctgcaggcaggcgcgcgcgttgacgtggtcgacgacaaacgcaacccaatggacttcgttctgtggaagatgtcgaaagagggcgaaccgagctggccgtctccgtggggcgcgggtcgtcctggctggcacattgaatgttcggcaatgaactgcaagcagctgggtaaccactttgatatccacggcggcggttcagacctgatgttcccgcaccacgaaaacgaaatcgcgcagtccacctgtgcccatgatggtcagtatgtgaactactggatgcactcggggatggtgatggttgaccgcgagaagatgtccaaatcgctgggtaacttctttaccgtgcgcgatgtgctgaaatactacgacgcggaaaccgtgcgttacttcctgatgtcgggccactatcgcagccagttgaactacagcgaagagaacctgaagcaggcgcgtgcggcgctggagcgtctctacactgcgctgcgcggcacagataaaaccgttgcgcctgccggtggcgaagcgtttgaagcgcgctttattgaagcgatggacgacgatttcaacaccccggaagcctattccgtactgtttgatatggcgcgtgaagtaaaccgtctgaaagcagaagatatggcagcggcgaatgcaatggcatctcacctgcgtaaactttccgctgtattgggcctgctggagcaagaaccggaagcgttcctgcaaagcggcgcgcaggcagacgacagcgaagtggctgagattgaagcgttaattcaacagcgtctggatgcccgtaaagcgaaagactgggcggcggcggatgcggcgcgtgatcgtcttaacgagatggggatcgtgctggaagatggcccgcaagggaccacctggcgtcgtaagtaa

SEQ ID NO: 20277 - DNA, 1017 bp, Escherichia coli; identical to SEQ ID NO: 6870

SEQ ID NO: 20278 - DNA, 462 bp, Escherichia coli
gtgagcagagtaaccgcgattatatccgctctgattatctgcatcatcgtcagcctgtcatgggcggtcaatcattaccgtgataacgcaatcgcctacaaagtccagcgcgacaaaaatgccagagaactgaagctagcgaacgcggcaattactgacatgcagatgcgtcagcgtgatgttgctgcgctcgatgcaaaatacacgaaggagttagctgatgcgaaagctgaaaatgatgctctgcgtgatgatgttgccgctggtcgtcgtcggttgcacatcaaagcagtctgtcagtcagtgcgtgaagccaccacggcctccggcgtggataatgcagcctccccccgactggcagacaccgctgaacgggattatttcaccctcagagagaggctgatcactatgcaaaaacaactggaaggaacccagaagtatattaatgagcagtgcagatag

SEQ ID NO: 20279 - DNA, 453 bp, Escherichia coli
atgcaaactacgcgccctcgtatcacatggaaggttttaccaatggctcaggttgccatttttaaagaaatattcgatcaagtgcgaaaagatttaaactgtgaattgttttattctgaactaaaacgtcacaatgtctcacattatatttactatctagccacagataatattcacattgtgttagaaaacgataacaccgtgttaataaaaggacttaaaaaggttgtaaatgttaaattctcaagaaatacgcatcttatagaaacgtcctatgataggttgaaatcaagagaaatcacatttcagcaatacagggaaaatcttgctaaagcaggagttttccgatggattacaaatatccacgaacataaaagatattactatacctttgataattcattactatttactgagagcattcagaacactacacaaatctttccacgctaa

SEQ ID NO: 20280 - DNA, 1119 bp, Escherichia coli
atgccattacccgattttcatgtttctgaaccttttaccctcggtattgaactggaaatgcaggtggttaatccgccgggctatgacttaagccaggactcttcaatgctgattgacgcggttaaaaataagatcacggccggagaggtaaagcacgatatcaccgaaagtatgctggagctggcgacggatgtttgccgtgatatcaaccaggctgccgggcagttttcagcgatgcagaaagtcgtattgcaggcagccacagaccatcatctggaaatttgcggcggtggcacgcacccgtttcagaaatggcagcgtcaggaggtatgcgataacgaacgctatcaacgcacgctggaaaactttggttatctcattcagcaggcgaccgtttttggtcagcatgtccatgttggctgcgccagtggcgatgacgccatttatttgctgcacggcttgtcacgatttgtgccgcactttatcgccctttccgccgcgtcgccatatatgcagggaacggatacgcgttttgcctcctcacgaccgaatattttttccgcctttcctgataatggcccgatgccgtgggtcagtaactggcaacaatttgaagccctgtttcgctgtctgagttacaccacgatgatcgacagcattaaagatctgcactgggatattcgccccagtcctcattttggcacggtggaggttcgggtgatggataccccgttaacccttagccacgcagtaaatatggcgggattaattcaggctaccgcccactggttactgacggaacgcccgtttaaacatcaggaaaaagattacctgctgtataaattcaaccgtttccaggcctgtcgctatgggcttgaaggcgtcatcaccgatccgcacactggagatcgtcgaccgctaacggaagataccttgcgattgctggaaaaaatcgccccttccgcacataaaattggtgcatcgagcgcgattgaggccctgcatcgccaggtcgtcagcggtctgaatgaagcgcagctaatgcgcgatttcgtcgccgatggcggctcgctgattgggctggtgaaaaagcattgtgagatctgggccggtgactaa

SEQ ID NO: 20281 - DNA, 3882 bp, Escherichia coli
atgagccagcatttacctttggtcgccgcacagcccggcatctggatggcagaaaaactgtcagaattaccctccgcctggagcgtggcgcattacgttgagttaaccggagaggttgattcgccattactggcccgcgcggtggttgccggactagcgcaagcagatacgctgcggatgcgttttacggaagataacggcgaagtctggcagtgggtcgatgatgcgctgacgttcgaactgccagaaattatcgacctacgaaccaacattgatccgcacggtactgcgcaggcattaatgcaggcggatttgcaacaagatctgcgcgtcgatagcggtaaaccactggtctttcatcagctgatacaggtggcggataaccgctggtactggtatcagcgttatcaccatttgctggtcgatggctttagtttcccggccattacccgccagatcgccaatatttactgcacatggctgcgtggcgaaccaacgcctgcttcgccatttacgcctttcgctgatgtagtggaagagtaccagcaataccgcgaaagcgaagcctggcagcgtgatgcggcattctgggcagaacagcgtcgtcaactgccgccgcccgcgtcactttctccggcacctttaccggggcgcagcgcctcggcagatattctgcgcctgaaactggaatttaccgacggggaattccgccagctggctacgcaactttcaggtgtgcagcgtaccgatttagcccttgcgctggcagccttgtggctggggcgattgtgcaatcgtatggactacgccgccggatttatctttatgcgtcgactgggctcggcggcgctgacggctaccggacccgtgctcaacgttttgccgttgggtattcacattgcggcgcaagaaacgctgccggaactggcaacccgactggcagcacaactgaaaaaaatgcgtcgtcatcaacgttacgatgccgaacaaattgtccgtgacagcgggcgagcggcaggtgatgaaccgctgtttggtccggtactcaatatcaaggtatttgattaccaactggatattcctgatgttcaggcgcaaacccataccctggcaaccggtccggttaatgaccttgaactggccctgttcccggatgtacacggtgatttgagtattgagatcctcgccaataaacagcgttacgatgagccaacgttaatccagcatgctgaacgcctgaaaatgctgattgcccagttcgccgcggatccggcgctgttgtgcggcgatgtcgatattatgctgccaggtgagtatgcgcagctggcgcagctcaacgccactcaggttgagattccagaaaccacgcttagcgcgctggtggcagaacaagcggcaaaaacaccggatgctccggcgctggcagatgcgcgttacctgttcagctatcgggaaatgcgcgagcaggtggtggcgctggcgaatctgctgcgtgagcgcggcgttaaaccaggggacagcgtggcggtggcactaccgcgctcggtctttttgaccctggcactccatgcgatagttgaagctggagcggcctggctaccgctggataccggctatccggacgatcgcctgaaaatgatgctggaagatgcgcgtccgtcgctgttaattaccaccgacgatcaactgccgcgctttagcgatgttcccaatttaacaagcctttgctataacgccccgcttacaccgcagggcagtgcgccgctgcaactttcacaaccgcatcacacggcttatatcatctttacctctggctccaccggcaggccgaaaggggtaatggtcgggcagacggctatcgtcaaccgcctgctttggatgcaaaatcattatccgcttacaggcgaagatgtcgttgcccaaaaaacgccgtgcagttttgatgtctcggtgtgggagtttttctggccgtttatcgcaggggcaaaactggtgatggctgaaccggaagcgcaccgcgacccgctcgctatgcagcaattctttgccgaatatggcgtaacgaccacgcactttgtgccgtcgatgctggcggcatttgttgcctcgctgacgccgcaaaccgctcgccagagttgcgcgacgttgaaacaggttttctgtagtggtgaggccttaccggctgatttatgccgcgaatggcaacagttaactggcgcgccgttgcataatctatatggcccgacggaagcggcggtagatgtcagctggtatccggcttttggcgaggaactggcacaggtgcgcggcagcagtgtgccgattggttatccggtatggaatacgggtctgcgtattcttgatgcgatgatgcatccggtgccgccgggtgtggcgggtgatctctatctcactggcattcaactggcgcagggctatctcggacgccccgatctgaccgccagccgctttattgccgatccttttgccccaggtgaacggatgtaccgtaccggagacgttgcccgctggctggataacggcgcggtggagtacctcgggcgcagtgatgatcagctaaaaattcgcgggcagcgtatcgaactgggcgaaatcgatcgcgtgatgcaggcgctgccggatgtcgaacaagccgttacccacgcctgtgtgattaaccaggcggctgccaccggtggtgatgcgcgtcaattggtgggctatctggtgtcgcaatcgggcctgccgttggataccagcgcattgcaggcgcagcttcgtgaaacattgccaccacatatggtaccggtggttctgctgcaacttccacagttaccacttagcgccaacggcaagctggatcgcaaagccttaccgttgcctgaactgaaggcacaagcgccagggcgtgcgccgaaagcgggcagtgaaacgattatcgccgcggcattctcgtcgttgctggggtgtgacgtgcaggatgccgatgctgatttcttcgcgcttggcggtcattcgctactggcaatgaaactggcagcgcagttaagtcggcaggttgcccgccaggtgacgccggggcaagtgatggtcgcgtcaactgtcgccaaactggcaacgattattgatgctgaagaagacagcacccggcgtatgggattcgaaaccattctgccgttgcgtgaaggtaatggcccgacgctgttttgtttccatcctgcgtccggttttgcctggcagttcagcgtgctctcgcgttatctcgatccacaatggtcgattatcggcattcagtcaccgcgccccaatggccccatgcagacggcggcaaacctggatgaagtctgcgaagcgcatctggcaacgttacttgaacaacaaccgcatggcccttattacctgctggggtattcccttggcggtacgctggcgcagggtattgcggcgcgactgcgtgcccgtggcgaacaggtggcatttcttggcttgctggatacctggccgccagaaacgcaaaactggcaggaaaaagaagctaatggtctggacccggaagtgctggcggagattaaccgcgaacgcgaggccttcctggcagcacagcagggaagtacttcaacggagttgtttaccaccattgaaggcaactacgctgatgctgtgcgcctgctgacgactgctcatagcgtaccgtttgacggtaaagcgacgctgtttgttgctgaacgcacacttcaggaaggtatgagtcccgaacgcgcctggtcgccgtggatagcggagctggatatctatcgtcaggattgtgcgcatgtggatattatctctccagggacgtttgaaaaaattgggccgattattcgcgcaacgctaaacaggtaa

SEQ ID NO: 20282 - DNA, 816 bp, Escherichia coli
atgaccgaatcagtagcccgtttgcgcggcgaacagttaaccctgggatatggcaaatataccgttgcggaaaatctgactgtagaaatacctgatggtcacttcacggcaattatcgggccaaatggctgcggtaaatccacgttactgcgtaccttaagccgcctgatgacgcctgctcatgggcatgtctggctggatggcgagcacattcaacattacgccagtaaagaggttgcacgccggattggtctgttggcgcaaaatgctaccacgccgggcgatatcaccgtgcaggagctggtggcgcgtggacgttatccgcatcaaccgctgtttacccgctggcgcaaagaggatgaagaagcggtaacgaaagcaatgcaggccacgggaataactcatctggcagatcaaagcgtggataccctttctggcggacaacgccagcgagcgtggatcgcgatggtgctggcccaggaaacggcaattatgctgctcgacgaacccacgacctggctggatatcagtcatcagattgatttgctggagttgttaagcgaactgaaccgcgaaaaaggctataccctggcggcggtgctgcacgatcttaatcaggcctgtcgttacgccagccatttgattgcattgcgggaagggaaaattgttgctcagggagcgccgaaggagattgtcactgctgaactgattgagcgcatttatggtctgcgctgcatgatcattgacgatccagttgccggaacgccgcttgtggtgccgctcggacgaacggcaccttcaaccgcaaatagttaa

SEQ ID NO: 20283 - DNA, 564 bp, Escherichia coli
atgtccttgattaacaccaaaattaaaccttttaaaaaccaggcattcaaaaacggcgaattcatcgaaatcaccgaaaaagataccgaaggccgctggagcgtcttcttcttctacccggctgactttactttcgtatgcccgaccgaactgggtgacgttgctgaccactacgaagaactgcagaaactgggcgtagacgtatacgcagtatctaccgatactcacttcacccacaaagcatggcacagcagctctgaaaccatcgctaaaatcaaatatgcgatgatcggcgacccgactggcgccctgacccgtaacttcgacaacatgcgtgaagatgaaggtctggctgaccgtgcgaccttcgttgttgacccgcagggtatcatccaggcaatcgaagttaccgctgaaggcattggccgtgacgcgtctgacctgctgcgtaaaatcaaagcagcacagtacgtagcttctcacccaggtgaagtttgcccggctaaatggaaagaaggtgaagcaactctggctccgtctctggacctggttggtaaaatctaa

SEQ ID NO: 20284 - DNA, 1533 bp, Escherichia coli
atgacgcagaaaattgaacaatctcaacgacaagaacgggtagcggcctggaatcgtcgcgctgaatgcgatcttgccgctttccagaactcgccaaagcaaacctaccaggctgaaaaagcgcgcgatcgcaaactgtgcgccaacctggaagaagcgattcgtcgctctggtttacaggacggcatgacggtttccttccatcacgctttccgtggcggtgacctgaccgtcaatatggtgatggacgtcatcgcgaagatgggctttaaaaacctgaccctggcgtccagctccctgagtgattgccatgcgccgctggtagaacacattcgccagggcgtggttacccgcatttatacctccggcctgcgtggtccactggcggaagagatctcccgtggtctgctggcagaaccggtgcagatccactctcacggcggtcgtgtgcatctggtacagagcggcgaactgaatatcgacgtggctttcctcggcgtcccgtcctgtgatgaattcggtaatgccaacggctacaccggtaaagcctgctgcggctccctcggctatgcaatagttgatgccgacaacgcaaaacaggtcgtgatgcttaccgaagaactgctgccttatccgcataatccggcaagcattgagcaagatcaggttgatttgatcgtcaaagttgaccgcgttggcgatgctgcaaaaatcggcgctggcgcgacccgtatgaccactaacccgcgcgaactgcttattgcccgtagcgctgcggatgtgattgtcaactctggctacttcaaagaaggtttctccatgcaaaccggcaccggcggcgcatcgctggcggtaacccgtttcctggaagacaaaatgcgtagccgcgatattcgcgccgacttcgcccttggcggtattaccgcgacgatggttgacctgcacgaaaaaggtctgatccgcaaactgctggatgtgcagagctttgacagccatgctgcgcaatcgctggcccgtaaccccaatcacatcgaaatcagcgccaaccagtacgctaactggggttcgaaaggcgcatcggttgatcgtctcgacgtggtggtactgagcgcgctggaaattgacacccagttcaacgttaacgtgctgaccggctctgacggcgtactgcgtggtgcttccggtggtcactgcgataccgcgattgcctctgcgctttccatcatcgtcgcgccgctggtacgcggtcgtattccgactctggtggataacgtactgacctgcatcaccccaggctccagtgtcgatattctggtcacagaccacggtatcgcagttaacccggcacgtccggaactggcagaacgtctgcaggaagcgggcattaaagtggtttccattgagtggctgcgcgaacgtgcgcgtctgctgaccggtgaaccacagccgattgaattcacagaccgcgtcgttgccgttgtgcgttaccgcgatggctcggtgatcgatgttgtgcatcaggtgaaggaataa

SEQ ID NO: 20285 - DNA, 924 bp, Escherichia coli
atgggaggattgccaatgatttccgcttcgctgcaacaacgtaaaactcgcacccgccgcagcatgttgtttgtgcctggtgccaatgccgcgatggtcagcaactccttcatctacccggctgatgccctgatgtttgacctcgaagactccgtagcattgcgtgaaaaagacaccgcccgccgcatggtttaccacgcgctgcaacatccgctgtatcgcgatattgaaaccattgtgcgtgtcaacgcgctggattccgaatggggtgttaacgacctggaagccgtcgttcgcggtggtgcggacgttgtgcgtctgccgaaaaccgataccgctcaggatgttctggatattgaaaaagagatcctgcgtatcgaaaaagcctgtggtcgtgaacccggcagcaccggcctgctggcggcgattgaatctccgctggggattacccgcgcagtggaaatcgctcacgcttccgagcgtttgatcggtatcgccctcggtgcagaagactatgtgcgcaacctgcgtacagaacgctccccggaaggaactgaactgctgttcgcacgctgttccattttgcaggccgcgcgctctgcgggtattcaggcgttcgataccgtctattccgacgctaacaacgaagccggatttctgcaagaagccgcccacatcaaacagctgggctttgacggcaaatcgctgatcaacccgcgtcagattgatctgctgcacaacctctacgcaccgacccagaaagaagtggatcacgcccgccgcgtcgtagaagccgctgaagccgccgctcgcgaaggcctcggcgtggtttccctgaacggcaagatggtggacggtccggttatcgatcgcgcccgtctggtgctctcccgtgcagaactttccggcatccgcgaagaataa

SEQ ID NO: 20286 - DNA, 966 bp, Escherichia coli
atgagtaaacccattgtgatggaacgcggtgttaaataccgcgatgccgataagatggcccttatcccggttaaaaacgtggcaacagagcgcgaagccctgctgcgcaagccggaatggatgaaaatcaagcttccagcggactctacacgtatccagggcatcaaagccgcaatgcgcaaaaatggcctgcattctgtctgcgaggaagcctcctgccctaacctggcggaatgcttcaaccacggcacagcaacgtttatgatcctcggcgctatttgtacccgccgttgtccgttctgtgatgttgcccacggtcgcccggtagctcctgatgccaatgaaccagtgaaactggcgcagaccattgccgatatggcgctgcgttatgtggttatcacctccgttgaccgtgatgacctgcgcgatggcggtgcccagcactttgcggattgcattactgccattcgggaaaaaagcccgcaaatcaaaattgaaactctggtgccggatttccgcggtcgtatggatcgtgctctggatattctgactgcaacgccaccagatgtgttcaaccataacctggaaaacgtaccgcgtatttaccgtcaggtacggcctggtgcagattacaactggtcgctgaagctgctggaacgctttaaagaagcgcatccggaaatcccgaccaagtctggtctgatggtgggactgggtgaaaccaatgaagaaattattgaggtaatgcgcgacctgcgccgtcatggtgtgacgatgttaacgctggggcaatatttgcagccaagccgccatcacctgccggttcaacgttacgttagcccggatgagttcgacgaaatgaaagccgaagcgctggcgatgggctttacccatgctgcatgcggtccgtttgtccgctcttcttaccacgccgatttgcaggcgaaagggatggaagttaagtaa

SEQ ID NO: 20287 - DNA, 468 bp, Escherichia coli
gtgaagctgcaacttgtcgccgtgggaacgaaaatgccggactgggtacaaaccggttttaccgagtacctgcgtcgttttccgaaagatatgcccttcgagctgattgaaattccggccggaaaacgcggcaagaatgcggacatcaagcgcatactcgacaaagagggtgagcagatgttggcggccgcaggcaaaaaccgcattgtcaccctcgatattccaggcaagccctgggatacgccgcagttagccgctgagctggaacgctggaagctggatggtcgcgacgtcagtctactgattggcgggcctgaagggttgtcgcctgcctgtaaagcggcggctgagcagagctggtcgctgtcggcgcttaccctcccccatccgctggttcgcgtgctggtcgcagagagtctgtaccgggcgtggagcatcaccaccaaccatccttatcaccgtgagtga

SEQ ID NO: 20288 - DNA, 612 bp, Escherichia coli
atgcgactgtggttaattcgtcatggtgaaacgcaagcgaatatcgatggtctttacagcggtcatgcgcccacccccctgaccgcgcgcggtattgagcaagcgcaaaatctgcatacgctgctacatggtgtttcctttgatctggttttatgcagtgaactggaacgggcacagcataccgcgcgactggttctcagtgaccgccagctccccgtgcaaatcatacctgaactcaacgaaatgttttttggcgactgggagatgcgacatcatcgcgacctcatgcaagaagatgccgaaaactatagcgcgtggtgcaatgactggcagcatgcaatccccacgaacggtgaaggatttcaggcattttcgcaacgtgtggaacgctttatcgcaaggcttagtgaatttcagcactatcagaatattttagtcgtcagccatcagggtgtactgagtctgttaatcgcccgtttaattggcatgcctgccgaagctatgtggcattttcgcgttgaccaggggtgttggagcgccattgatatcaaccaaaaattcgcgacgctacgcgtcctcaatagccgtgccatcggggtcgagaatgcatga

SEQ ID NO: 20289 - DNA, 936 bp, Escherichia coli
atggcactgccaattctgttagattgcgacccaggtcatgacgacgctatcgcaatagttctcgccctcgcctcaccagagcttgatgtcaaagcaattacgtcttccgccggaaaccagacaccagaaaaaaccttacgcaatgttctgcgtatgctgaccttgcttaatcgcaccgatattccggtagcaggcggcgcggtaaaaccgttaatgcgtgagttgattatcgcggacaatgtgcacggcgaaagcggtctcgacggcccggcattaccggaaccgacattcgcaccgcaaaactgtacggcggtagagctgatggcgaaaacgctgcgtgaaagtgcggaacctgtcaccattgtgtctaccggaccgcaaactaacgttgccttgctgctcaatagccatccggaactgcatagcaaaattgcccgtatcgtgattatgggtggcgctatggggctgggtaactggacgcctgcggctgaatttaatatttacgttgacccggaagcggcagaaattgtcttccagtcagggatcccggtggtgatggccggtctggatgttactcataaagcacaaatccacgttgaagacaccgagcgtttccgcgcgattggtaaccctgtttcaaccattgttgccgaactgctggatttcttcctcgaatatcataaagacgaaaaatggggctttgtcggcgcaccactgcatgacccatgcaccatcgcctggctgttgaaaccggagttatttacctctgttgagcgctgggttggcgtggaaacacaggggaaatatacccagggtatgacggttgttgattattattatctgacaggcaataaaccgaatgccaccgtaatggtcgatgttgatcgtcagggctttgttgatttactggctgatcgtctgaaattttacgcttaa

SEQ ID NO: 20290 - DNA, 1017 bp, Escherichia coli; identical to SEQ ID NO: 6870

SEQ ID NO: 20291 - DNA, 1665 bp, Escherichia coli
atgtgttcaatttttggcgtattcgatatcaaaacagacgcagttgagctgcgtaagaaagccctcgagctgtcacgcctgatgcgtcatcgtggcccggactggtccggtatttatgccagcgataacgccattctcgcccacgaacgtctgtcaattgttgacgttaacgcgggggcgcaacctctctacaaccaacaaaaaacccacgtactggcggtaaacggtgaaatctacaaccaccaggcattgcgcgccgaatatggcgatcgttaccagttccagaccgggtctgactgtgaagtgatcctcgcgctgtatcaggaaaaagggccggaatttctcgacgacttgcagggcatgtttgcctttgcactgtacgacagcgaaaaagatgcctacctgattggtcgcgaccatctggggatcatcccactgtatatggggtatgacgaacacggtcagctgtatgtggcctcagaaatgaaagcgctggtgccagtttgccgcacgattaaagagttcccggcggggagctatttgtggagccaggacggcgaaatccgttcttactatcatcgcgactggttcgactacgatgcggtgaaagataacgtgaccgacaaaaacgagctgcgtcaggcactggaagattcagttaaaagccatctgatgtctgatgtgccttacggtgtgctgctttctggtggtctggattcctcaattatttccgctatcaccaagaaatacgcagcccgtcgcgtggaagatcaggaacgctctgaagcctggtggccgcagttacactcctttgctgtaggtctgccgggttcaccggatctgaaagcagcccaggaagtggcaaaccatctgggcacggtgcatcacgaaattcacttcactgtacaggaaggtctggatgccatccgcgacgtgatttaccacatcgaaacttatgatgtgaccactattcgcgcttcaacaccgatgtatttaatgtcgcgtaagatcaaggcgatgggcattaaaatggtgctgtccggtgaaggttctgatgaagtgttcggcggttatctttacttccacaaagcaccgaatgccaaagaactgcatgaagagacggtgcgtaaactgctggccctgcatatgtatgactgcgcgcgtgccaacaaagcgatgtcagcctggggcgtggaagcacgcgttccgttcctcgacaaaaaattccttgatgtggcgatgcgtattaacccacaggataaaatgtgcggtaacggcaaaatggaaaaacacatcctgcgtgaatgttttgaagcgtatctgcctgcaagcgtggcctggcggcagaaagagcagttctccgatggcgtcggttacagttggatcgacaccctgaaagaagtggctgcgcagcaggtttctgatcagcaactggaaactgcccgcttccgcttcccgtacaacacgccaacctctaaagaagcgtacttgtatcgggagatctttgaagaactattcccgcttccgagcgccgctgagtgcgtgccgggcggtccttccgtcgcttgttcttccgctaaagcgatcgaatgggatgaagcgttcaagaaaatggacgatccgtctggtcgcgcggttggtgttcaccagtcggcgtataagtaa

SEQ ID NO: 20292 - DNA, 1149 bp, Escherichia coli
atgtatgcattaacccagggccggatctttaccggccacgaatttcttgatgaccacgcggttgttatcgctgatggcctgattaaaagcgtctgtccggtagcggaactgccgccagagatcgaacaacgttcactgaacggggccattctctcccccggttttatcgatgtgcagttaaacggctgcggcggcgtacagtttaacgacaccgctgaagcggtcagcgtggaaacgctggaaatcatgcagaaagccaatgagaaatcaggctgtactaactatctgccgacgcttatcaccaccagcgatgagctgatgaaacagggcgtgcgcgttatgcgcgagtacctggcaaaacatccgaatcaggcgttaggtctgcatctggaaggtccgtggctgaatctggtaaaaaaaggcacccataatccgaattttgtgcgtaagcctgatgccgcgctggtcgatttcctgtgtgaaaacgccgacgtcattaccaaagtgaccctggcaccggaaatggttcctgcggaagtcatcagcaaactggcaaatgccgggattgtggtttctgccggtcactccaacgcgacgttgaaagaagcaaaagccggtttccgcgcggggattacctttgccacccatctgtacaacgcgatgccgtatattaccggtcgtgaacctggcctggcgggcgcgatcctcgacgaagctgacatttattgcggtattattgctgatggcctgcatgttgattacgccaacattcgcaacgctaaacgtctgaaaggcgacaaactgtgtctggttactgacgccaccgcgccagcaggtgccaacattgaacagttcatttttgcgggtaaaacaatatactaccgtaacggactttgtgtggatgagaacggtacgttaagcggttcatccttaaccatgattgaaggcgtgcgtaatctggtcgaacattgcggtatcgcactggatgaagtgctacgtatggcgacgctctatccggcgcgtgcgattggcgttgagaaacgtctcggcacactcgccgcaggtaaagtagccaacctgactgcattcacacctgattttaaaatcaccaagaccatcgttaacggtaacgaggtcgtaactcaataa

SEQ ID NO: 20293 - DNA, 2685 bp, Escherichia coli
atgaataacgaacccttacgtcccgaccccgatcgtctgctggaacaaactgccgcgccgcatcgggggaagctgaaagttttcttcggtgcctgtgcaggcgtcgggaagacctgggcgatgctggcagaagcccagcgactgcgggcgcaagggctggatattgtggttggcgtggtagaaacccacgggcgaaaagataccgccgccatgctggaagggctggctgttctgccgttaaaacgccaggcgtaccgtgggcggcatatcagcgagtttgatctcgatgccgccctcgcccgccgcccggcgctgatcttaatggacgaactggcgcacagtaatgcgccaggttcccgtcatcccaaacgctggcaggatatcgaagaactgctggaagctggcattgatgttttcactaccgtcaacgttcagcatctggaaagtctgaatgatgtggtcagcggcgtcaccggaattcaggtacgggaaaccgtgcccgatccttttttcgatgccgccgacgacgtggtgctggtggacttgcccccggacgatctgcgccagcggctgaaagaaggcaaagtctatattgccgggcaggcggagcgcgccattgaacattttttccgcaaaggtaatctgatcgccctgcgcgaactggcactgcgccgtactgccgatcgcgttgatgagcaaatgcgcgcctggcgggggcatcctggcgaagagaaagtgtggcacacgcgcgacgcgatccttttatgcatcggccataacaccggcagcgaaaaactggtccgcgcagcggcgcggctggcgtcacggctgggtagcgtctggcacgcggtgtatgttgaaacccctgccctgcaccgcttaccggaaaaaaaacgtcgggcaattctcagcgccttacgtctggcgcaggaactgggcgcggagacggcaacactttctgatccagcggaagagaaagcggtagtgcgttatgcccgtgaacataatctcggcaagattattctcggtcgcccggcctcgcgccgctggtggcgtcgggaaacgtttgctgaccgactggcgcgcatcgcccccgatctcgatcaggtgctggtcgcgcttgatgaaccacccgcccgcacgattaacaacgcgccggataaccgctcttttaaagacaagtggcgtgtacaaattcagggatgcgtggttgccgccgcgttatgcgccgttatcaccttaattgccatgcagtggctgatggcgtttgatgccgccaacctggtgatgctgtatctgcttggcgtggtggtggtggcgctattttatggacgctggccttcagtggttgccaccgtcattaatgtagtgagtttcgatctcttttttatcgccccacgcggcacgctcgccgtctctgatgtgcaatatctgctgaccttcgcggtgatgttaaccgtcgggctggtgatcgggaaccttactgctggcgtgcgttatcaggcgcgggtagcccgttaccgcgagcaacgcacacggcacttatatgaaatgtcgaaagctctggcggtgggccgcagtccgcaggatatcgctgccaccagcgaacaatttattgcctccacgtttcatgcccgcagtcaggtgttgttgcccgatgacaacggtaaattgcagccgttaacacatccgcaaggaatgacgccgtgggacgatgccatcgcgcagtggagttttgataaaggcctgcctgcgggcgcgggcaccgacacgttacccggtgtaccgtaccagattttgccgctaaaaagcggcgagaaaacctacgggctggtggtggtggagccggggaatctgcgccagttgatgatcccggaacagcagcgcctgctggagacgtttacgctgttagtcgccaatgcccttgagcggctgacgctaaccgccagcgaagaacaggcgcggatggcaagcgaacgtgaacagatccgcaacgccctgctggcggcgctttcgcatgatttacgcacgccgcttacggtgctgtttggtcaggcagaaatcttaacgctcgatctggcaagcgaaggatcaccccacgcccgccaggccagcgagatccgtcagcatgtgctgaacactacccgactggtgaataatctactggatatggcgcgaattcagtccggcggctttaatttgaagaaagagtggttaacgctggaagaagtagtcggcagcgcgctgcaaatgctggaaccgggtttatcgtcgcccatcaatctttctctgccagaaccgctgaccttaatccacgttgacgggccactctttgaacgggtgctgattaatctgctggagaacgcggtgaaatatgcgggtgcgcaggccgaaattggtatcgatgcccacgttgagggcgaaaatctacaactggatgtctgggataacggccccggtcttccgccaggccaggagcagacgatatttgataagtttgctcgcgggaataaagagtcggcagtaccgggggtagggcttggactggcaatttgtcgggcgatagtggatgtacacgggggcactattaccgcgttcaaccgaccggaaggtggtgcctgttttcgtgttacacttccccagcaaactgcccctgaacttgaagaatttcatgaggatatgtga

SEQ ID NO: 20294 - DNA, 573 bp, Escherichia coli
atgagtggattacgtccggcattatcaacatttatctttctgttattgattactggcggcgtttacccgctgctgaccaccgtactggggcaatggtggtttccctggcaggccaatggttcgttgattcgtgaaggtgatacggtgcgcggttcggcattaatcgggcagaattttaccggcaacggctattttcatggtcgcccgtcggcaacggcagaaatgccctataatccacaggcttctggcgggagcaatctggcggtcagtaaccctgagctggataaactaatagccgcacgcgttgctgcattacgggccgctaacccggatgccagcgcgagcgttccggttgaactggtgacggcatcggcaagcgggctggacaataatatcaccccgcaagcggcggcctggcaaatcccacgcgtggcgaaagcgcgtaatctcagcgttgaacagctcacgcaactgatcgcaaaatacagccaacaaccgctggtgaaatatatcggccagccggttgtcaacattgttgaactcaatctggcgctggataaacttgatgaataa

SEQ ID NO: 20295 - DNA, 2049 bp, Escherichia coli
atgagtcgtaaacaactggcgctattcgaaccaacacttgtcgttcaggcgctgaaagaagcggtgaaaaaattaaacccgcaggcgcaatggcgcaatccggtgatgtttatcgtctggatcggcagtctgctgaccacctgtattagcatcgcgatggcaagcggtgcgatgcccggcaatgcgctgtttagcgcggccattagcggttggctgtggatcaccgtactgttcgctaatttcgccgaggcgctggcagaaggccgcagtaaagcgcaggccaacagtctgaaaggggtgaaaaaaactgcctttgcccgcaagctgcgtgagccgaaatatggcgctgcggcggacaaagttcctgccgaccaacttcgtaaaggcgatatcgtactggtagaagctggcgatattatcccctgcgatggtgaagttattgaagggggtgcatcggtcgatgaaagcgccatcaccggggaatcggcaccggtgatccgtgaatccggcggcgattttgcctccgtcaccggcggcacgcgtattctttctgactggctggtgattgagtgtagcgttaaccccggcgagacatttctggatcggatgatcgcgatggtggaaggcgcacagcgacgcaaaacgccgaacgaaattgccctgaccattctgctgattgccctgactatcgtctttttactggcaaccgccacgctgtggccgttttccgcgtggggcggtaatgcagtcagcgtaacggtactggtggcgctgctggtctgtctgatcccaaccactattggcggcctgttgtcagcgatcggcgtcgccgggatgagccggatgctaggcgcgaatgtgattgccaccagcggacgtgcagttgaagcggcaggtgacgttgacgttctgctactggataaaaccggcaccatcacactcggtaaccgtcaggcgtcggagtttatccccgcgcagggcgtggatgaaaaaacgctggctgacgccgcacaactggcttcgctggctgatgaaacgccggaaggccgcagtattgtgatcctcgccaagcagcgttttaacctgcgcgagcgcgatgtgcagtcgctccatgccacctttgtaccgtttactgcgcaaagccggatgagcgggatcaacatcgacaaccgcatgatccgtaaaggttctgtcgatgccattcgtcgccatgttgaggctaacggtggtcacttccctaccgatgttgatcaaaaagtcgatcaggttgcgcgtcagggagccacgccgctggtggtggtggaaggttctcgtgtgctgggcgttattgcgctgaaagatatcgtcaaaggcggtattaaagagcgcttcgcccagctgcgcaaaatgggcattaaaacggtgatgattaccggcgataaccgtctgactgccgccgcgattgctgcggaagcgggtgtcgatgattttctcgccgaagcgacaccggaggccaagctggcattgatccgtcagtatcaggcggaaggtcgtttggtagcgatgaccggcgacggcaccaacgatgctccggcgctggcgcaggcagatgtcgcggtggcgatgaactccggcacccaggcggcgaaagaggcgggcaatatggtcgatctcgactctaacccgaccaagttgatcgaggtggtgcacattggcaaacagatgctgatgacccgtggctcgctgaccaccttcagcattgccaacgatgtggcgaaatacttcgccattattccggcggcattcgcggcaacgtatccgcagttaaatgcgctgaacatcatgtgcctgcattcgcccgactccgcaatcctcagtgcggtgattttcaacgccttgattatcgtctttttgattcccctggcgttaaaaggcgtgagttataaaccgcttaccgcttctgccatgttgcgccgtaacttatggatttacggtctgggtgggctgctggtgccgtttatcggtatcaaagtcattgatttactgctgaccgtttgcggtctggtgtga

SEQ ID NO: 20296 - DNA, 1434 bp, Escherichia coli
atgtggccggataaccgtatcgcccgtgacgcgcactatctttaccggtatgaccgtcacggcaggctgacggagaaaaccgacctcatcccggaaggggttatccgcacggatgatgagcgcacccaccggtaccattacgacagtcagcaccggctggtgcactacacgcggacacaatatgcagagccgctggtcgaaagccgctatctttacgacccgctgggccgcagggtggcaaaacgggtgtggcgacgtgaacgggacctgacgggctggatgtcgctgtcacggaaaccgcaagtgacctggtacggctgggacggcgaccgcctgaccacgatacagaacgacagaacccgcatccagacgatttatcagccggggagcttcacgccactcatcagggttgaaaccgccaccggtgagctggcgaaaacgcagcgccgcagcctggcggatacccttcagcagtccggcggcgaagacggtggcagtgtggtgttcccgccggtgctggtgcagatgctcgaccggctggaaagtgaaatcctggctgaccgggtgagtgaggaaagccgccgctggctggcatcgtgcggcctgacggtggagcagatgcaaaaccagatggacccggtgtacacgccggcgcgaaaaatccacctgtaccactgcgaccatcgcggcctgccgctggcgcttgtcagcacggaaggggcaacagaatggtgcgcagaatacgatgaatggggcaacctgctgaatgaagagaacccgcatcagctgcagcagcttatccgcctgccggggcagcagtatgatgaggagtccggcctgtattacaaccgccaccgctattatgacccgctgcaggggaggtatatcactcaggatccgattgggctgaaggggggatggaatttttatcagtatccgctgaatccggttcagtatatagattcaatgggactggcatcaaaatatggacacttaaataatggcggatatggagcgagacccaacaaaccgcctacgcccgatccaagtaaattgccggacatagcgaaacaattaagactgccatatcctattgaccaggccagtagtgcgcctaatgttttcaaaacattcttcagagcattaagcccttacgactacacactgtattgcaggaagtgggtaaaaccaaatctgacttgtacgccacaggatgattcccagtatccagggatggatacaaagacagcaagtgattacctgccacagacaaattggccaacaactcaattaccaccaggatatacttgtgcagaaccctatttattcccagacattaataaacccgatgggccagcaacagcagggatagatgatttgggtgaaattttagctaagatgaaacagagaacatcgagaggaataagaaaatga

SEQ ID NO: 20297 - DNA, 735 bp, Escherichia coli
atgaaaattgacctgaacgccgatctgggcgaaggctgcgccagcgacgcagagctattaacgctggtttcctctgccaatattgcctgtggatttcatgcaggcgatgcgcaaatcatgcaggcttgcgtgcgtgaagcaataaaaaatggtgtcgcgattggcgctcacccgagttttcccgacagggaaaattttggtcgcagcgccatgcagctgccgccagaaaccgtttacgcccagacgctgtatcaaattggcgcgctggcaacgattgcccgtgcgcaaggcggcgtaatgcgtcatgtcaaaccgcacggcatgttgtacaaccaggcggcgaaagaagcacaactggcagacgccatcgccagagcggtatacgcttgcgatccagcattgattctcgtcgggctggcgggaagcgagctgattcgtgcaggcaagcaatatggtctgacaacgcgcgaggaagtgtttgccgatcgcggttatcaggctgacggctcgctggtgccgcgaagccagtcaggcgcgttgattgaaaacgaagaacaggcgctggcgcaaacgctggagatggtgcaacacggcagagtcaaaagtatcaccggcgaatgggcaacggtcgcggcgcaaacggtctgcctgcatggcgacggcgagcacgcactggcgttcgcccgccgactacgctctgcatttgccgaaaaggggattgttgtcgcagcataa

SEQ ID NO: 20298 - DNA, 2802 bp, Escherichia coli
atgcagaacagcgctttgaaagcctggttggactcttcttacctctctggcgcaaaccagagctggatagaacagctctatgaagacttcttaaccgatcctgactcggttgacgctaactggcgttcgacgttccagcagttacctggtacgggagtcaaaccggatcaattccactctcaaacgcgtgaatatttccgccgcctggcgaaagacgcttcacgttactcttcaacgatctccgaccctgacaccaatgtgaagcaggttaaagtcctgcagctcattaacgcataccgcttccgtggtcaccagcatgcgaatctcgatccgctgggactgtggcagcaagataaagtggccgatctggatccgtctttccacgatctgaccgaagcagacttccaggagaccttcaacgtcggttcatttgccagcggcaaagaaaccatgaaactcggcgagctgctggaagccctcaagcaaacctactgcggcccgattggtgccgagtatatgcacattaccagcaccgaagaaaaacgctggatccaacagcgtatcgagtctggtcgcgcgactttcaatagcgaagagaaaaaacgcttcttaagcgaactgaccgccgctgaaggtcttgaacgttacctcggcgcaaaattccctggcgcaaaacgcttctcgctggaaggcggtgacgcgttaatcccgatgcttaaagagatgatccgccacgctggcaacagcggcacccgcgaagtggttctcgggatggcgcaccgtggtcgtctgaacgtgctggtgaacgtgctgggtaaaaaaccgcaagacttgttcgacgagttcgccggtaaacataaagaacacctcggcacgggtgacgtgaaataccacatgggcttctcgtctgacttccagaccgatggcggcctggtgcacctggcgctggcgtttaacccgtctcaccttgagattgtaagcccggtagttatcggttctgttcgtgcccgtctggacagacttgatgagccgagcagcaacaaagtgctgccaatcaccatccacggtgacgccgcagtgaccgggcagggcgtggttcaggaaaccctgaacatgtcgaaagcgcgtggttatgaagttggcggtacggtacgtatcgttatcaacaaccaggttggtttcaccacctctaatccgctggatgcccgttctacgccgtactgtactgatatcggtaagatggttcaggccccgattttccacgttaacgcggacgatccggaagccgttgcctttgtgacccgtctggcgctcgatttccgtaacacctttaaacgtgatgtcttcatcgacctggtgtgctaccgccgtcacggccacaacgaagccgacgagccgagcgcaacccagccgctgatgtatcagaaaatcaaaaaacatccgacaccgcgcaaaatctacgctgacaagctggagcaggaaaaagtggcgacgctggaagatgccaccgagatggttaacctgtaccgcgatgcgctggatgctggcgattgcgtagtggcagagtggcgtccgatgaacatgcactctttcacctggtcgccgtacctcaaccacgaatgggacgaagagtacccgaacaaagttgagatgaagcgcctgcaggagctggcgaaacgcatcagcacggtgccggaagcagttgaaatgcagtctcgcgttgccaagatttatggcgatcgccaggcgatggctgccggtgagaaactgttcgactggggcggtgcggaaaacctcgcttacgccacgctggttgatgaaggcattccggttcgcctgtcgggtgaagactccggtcgcggtaccttcttccaccgccacgcggtgatccacaaccagtctaacggttccacttacacgccgctgcaacatatccataacgggcagggcgcgttccgtgtctgggactccgtactgtctgaagaagcagtgctggcgtttgaatatggttatgccaccgcagaaccacgcactctgaccatctgggaagcgcagttcggtgacttcgccaacggtgcgcaggtggttatcgaccagttcatctcctctggcgaacagaaatggggccggatgtgtggtctggtgatgttgctgccgcacggttacgaagggcaggggccggagcactcctccgcgcgtctggaacgttatctgcaactttgtgctgagcaaaacatgcaggtttgcgtaccgtctaccccggcacaggtttaccacatgctgcgtcgtcaggcgctgcgcgggatgcgtcgtccgctggtcgtgatgtcgccgaaatccctgctgcgtcatccgctggcggtttccagcctcgaagaactggcgaacggcaccttcctgccagccatcggtgaaatcgacgagcttgatccgaagggcgtgaagcgcgtagtgatgtgttctggtaaggtttattacgacctgctggaacagcgtcgtaagaacaatcaacacgatgtcgccattgtgcgtatcgagcaactctacccgttcccgcataaagcgatgcaggaagtgttgcagcagtttgctcacgtcaaggattttgtctggtgccaggaagagccgctcaaccagggcgcatggtactgcagccagcatcatttccgtgaagtgattccgtttggggcttctctgcgttatgcaggccgcccggcctccgcctctccggcggtagggtatatgtccgttcaccagaaacagcaacaagatctggttaatgacgcgctgaacgtcgaataa

SEQ ID NO: 20299 - DNA, 1266 bp, Escherichia coli
gtgtcaaaggcaaccgaacaaaacgacaagctcaagcgggcgataattatttcagcagtgctgcatgtcatcttatttgcggcgctgatctggagttcgttcgatgagaatatagaagcttcagccggaggcggcggtggttcgtccatcgacgctgtcatggttgattcaggtgcggtagttgagcagtacaaacgcatgcaaagccaggaatcaagcgcgaagcgttctgatgaacagcgcaagatgaaggaacagcaggctgctgaagaactgcgtgagaaacaagcggctgaacaggaacgcctgaagcaacttgagaaagagcggttagcggctcaggagcagaaaaagcaggctgaagaagccgcaaaacaggccgagttaaagcagaagcaagctgaagaggcggcagcgaaagcggcggcagatgctaaagcgaaggccgaagcagatgctaaagctgcggaagaagcagcgaagaaagcggctgcagacgcaaagaaaaaagcagaagcagaagccgccaaagccgcagccgaagcgcagaaaaaagccgaggcagccgctgcggcactgaagaagaaagcggaagcggcagaagcagctgcagctgaagcaagaaagaaagcggcaactgaagctgctgaaaaagccaaagcagaagctgagaagaaagcggctgctgaaaaggctgcagctgataagaaagcggcagcagagaaagctgcagccgacaaaaaagcagcagaaaaagcggctgctgaaaaggcagcagctgataagaaagcagcggcagaaaaagccgccgcagacaaaaaagcggcagcggcaaaagctgcagctgaaaaagccgctgcagcaaaagcggccgcagaggcagatgatattttcggtgagctaagctctggtaagaatgcaccgaaaacggggggaggggcgaaagggaacaatgcttcgcctgccgggagtggtaatactaaaaacaatggcgcatcaggggccgatatcaataactatgccgggcagattaaatctgctatcgaaagtaagttctatgacgcatcgtcctatgcaggcaaaacctgtacgctgcgcataaaactggcacccgatggtatgttactggatatcaaacctgaaggtggcgatcccgcactttgtcaggctgcgttggcagcagctaaacttgcgaagatcccgaaaccaccaagccaggcagtatatgaagtgttcaaaaacgcgccattggacttcaaaccgtaa

SEQ ID NO: 20300 - DNA, 774 bp, Escherichia coli
atggctcgtaaatggttgaacttgtttgccggggcggcactctctttcgctgttgctggcaatgcactggcagatgaagggaaaatcacggtgttcgccgccgcatcactgactaacgcaatgcaggacattgctacgcagtttaaaaaagagaaaggcgtggatgtggtttcttctttcgcttcgtcatctactctcgcccgtcagattgaagcgggtgcgcctgcggatctgtttatttctgccgatcagaaatggatggattatgcggttgataaaaaagcgatcgatacagctacgcgtcagacactgctcggcaatagcctggtcgttgtagcaccgaaagccagcgtgcagaaagatttcaccatcgacagcaaaaccaactggacttcactgctgaatggcggtcgcctggcggttggcgatccggaacatgttcccgctggcatttatgcaaaagaagcactgcaaaaactgggcgcatgggatacgctctctccgaaactggccccagcggaagatgttcgtggggcgctggcgctggtcgaacgtaacgaagcgcctctgggcattgtctacggttctgacgcagttgccagcaaaggggtaaaagtggttgccaccttcccggaagattcacataaaaaagtggaatatccggttgctgttgtggaagggcataacaatgcgacagtgaaagcattttatgattatctgaagggaccgcaggcagcggaaatctttaaacgttacggatttacaatcaagtaa

SEQ ID NO: 20301 - DNA, 1290 bp, Escherichia coli
atgacaacggacgatcttgcctttgaccaacgccatatctggcacccatacacatccatgacctcccctctgccggtttatccggtggtgagcgccgaaggttgcgagctgattttgtctgacggcagacgcctggttgacggtatgtcgtcctggtgggcggcgatccacggctacaatcacccgcagcttaatgcggcgatgaagtcgcaaattgatgccatgtcgcatgtgatgtttggcggtatcacccatgcgccagccattgagctgtgccgcaaactggtggcgatgacgccgcaaccgctggagtgcgtttttctcgcggactccggttccgtagcggtggaagtggcgatgaaaatggcgttgcagtactggcaagccaaaggcgaagcgcgccagcgttttctgaccttccgcaatggttatcatggcgatacctttggcgcgatgtcggtgtgcgatccggataactcaatgcacagtctgtggaaaggctacctgccagaaaacctgtttgctcccgccccgcaaagccgcatggatggcgaatgggatgagcgcgatatggtgggctttgcccgcctgatggcggcgcatcgtcatgaaatcgcggcggtgatcattgagccgattgtccagggcgcaggcgggatgcgcatgtaccatccggaatggttaaaacgaatccgcaaaatatgcgatcgcgaaggtatcttgctgattgccgacgagatcgccactggatttggtcgtaccgggaaactgtttgcctgtgaacatgcagaaatcgcgccggacattttgtgcctcggtaaagccttaaccggcggcacaatgaccctttccgccacactcaccacgcgcgaggttgcagaaaccatcagtaacggtgaagccggttgctttatgcatgggccaacttttatgggcaatccgctggcctgcgcggcagcaaacgccagcctggcgattctcgaatctggcgactggcagcaacaggtggcggatattgaagtacagctgcgcgagcaacttgcccccgcccgtgatgccgaaatggttgccgatgtgcgcgtactgggggccattggcgtggtcgaaaccactcatccggtgaatatggcggcgctgcaaaaattctttgtcgaacagggtgtctggatccggccttttggcaaactgatttacctgatgccgccctatattattctcccgcaacagttgcagcgtctgaccgcagcggttaaccgcgcggtacaggatgaaacatttttttgccaataa

SEQ ID NO: 20302 - DNA, 1041 bp, Escherichia coli
atggctcaccgcccacgctggacattgtcgcaagtcacagaattatttgaaaaaccgttgctggatctgctgtttgaagcgcagcaggtgcatcgccagcatttcgatcctcgtcaggtgcaggtcagcacgttgctgtcgattaagaccggagcttgtccggaagattgcaaatactgcccgcaaagctcgcgctacaaaaccgggctggaagccgagcggttgatggaagttgaacaggtgctggagtcggcgcgcaaagcgaaagcggcaggatcgacgcgcttctgtatgggcgcggcgtggaagaatccccacgaacgcgatatgccgtacctggaacaaatggtgcagggggtaaaagcgatggggctggaggcgtgtatgacgctgggcacgttgagtgaatctcaggcgcagcgcctcgcgaacgccgggctggattactacaaccacaacctggacacctcgccggagttttacggcaatatcatcaccacacgcacttatcaggaacgcctcgatacgctggaaaaagtgcgcgatgccgggatcaaagtctgttctggcggcattgtgggcttaggcgaaacggtaaaagatcgcgccggattattgctgcaactggcaaacctgccgacgccgccggaaagcgtgccaatcaacatgctggtgaaggtgaaaggcacgccgcttgccgataacgatgatgtcgatgcctttgattttattcgcaccattgcggtcgcgcggatcatgatgccaacctcttacgtgcgcctttctgccggacgcgagcagatgaacgaacagactcaggcgatgtgctttatggcaggcgcaaactcgattttctacggttgcaaactgctgaccacgccgaatccggaagaagataaagacctgcaactgttccgcaaactggggctaaatccgcagcaaactgccgtgctggcaggggataacgaacaacagcaacgtcttgaacaggcgctgatgaccccggacaccgacgaatattacaacgcggcagcattatga

SEQ ID NO: 20303 - DNA, 909 bp, Escherichia coli
atgcgcaatcgtacgctggctgatcttgatcgtgtcgttgctctcggcggagggcatggactgggacgcgttctctcatcactttcgtctttgggttctcgtttaacgggtatcgtcaccaccaccgataatggtggctcgacggggcgtattcgccgttcagaaggcggcattgcctggggcgatatgcgcaactgcctcaaccagctgataacggaaccgagcgtcgcctccgcgatgtttgaataccgttttggtggcaatggcgaactttccggtcataatctcggaaacttgatgttaaaggcgctggatcaccttagcgtgcggcctctggaagccatcaatttaattcgtaatctgctgaaagtggatacgcatttgattccaatgtcagagcatcctgttgatctgatggcgattgacgatcaggggcatgaagtttacggcgaggtcaatatcgaccagttaactacgccgattcaagagttattgttaacgcctaatgtacccgcaacgcgtgaggcggttcacgctatcaatgaagcggatctcatcattattgggcctggcagtttttataccagcctgatgccaattctgctgctgaaggaaatcgcccaggcattacgccgcacgccagcgccgatggtttatatcggcaatctggggcgtgagttgagtttacctgcggctaatttgaagctggaaagcaagctggcaattatggagcagtatgttggtaaaaaggtcattgatgcggtcatcgtcgggccaaaagtggatgtctcggcggtgaaagagcggattgtgatccaggaggtactggaggccagcgatattccgtatcgtcatgaccgccagttgttacataacgcgctggaaaaggcgttacaggctttaggttaa

SEQ ID NO: 20304 - DNA, 513 bp, Escherichia coli
atgagtcaggtaagcactgaatttatcccgacccgtattgctattcttacggtttctaatcgtcgcggtgaagaagacgatacctccggtcactatctgcgcgattcggcgcaagaagcgggccatcacgttgtcgataaagccattgtgaaagaaaaccgctacgctattcgcgctcaggtatctgcgtggatcgccagcgacgatgtacaagtggtattgattacgggtggtactggcctgacggaaggtgatcaggctcccgaagcattgctgccgttgttcgaccgtgaagttgaaggttttggtgaagtgttccggatgttgtcgtttgaagagattggcacttccacgttgcaatctcgtgcggtagcgggcgtcgccaacaaaacgctgattttcgccatgccgggttcgaccaaagcgtgccgtaccgcatgggaaaatatcatcgcgccgcagctggatgcccgtacgcgtccgtgtaatttccatccacatttgaagaaataa

SEQ ID NO: 20305 - DNA, 1752 bp, Escherichia coli
gtgacgaggcaggacatgaatgatgccgttatcacgctgaacggcctggaaaaacgctttccgggcatggacaagcccgccgtcgcgccgctcgattgtaccattcacgccggttatgtgacggggttggtggggccggacggtgcaggtaaaaccacgctgatgcggatgttggcgggattactgaaacccgacagcggcagtgccacggtgattggctttgatccgatcaaaaacgacggcgcgctgcacgccgtgctcggttatatgccgcagaaatttggtctgtatgaagatctcacggtgatggagaacctcaatctgtacgcggatttgcgcagcgtcaccggcgaggcacgtaagcaaacttttgctcgcctgctggagtttacgtctcttgggccgtttaccggacgcctggcgggcaagctctccggtgggatgaaacaaaaactcggtctggcctgtaccctggtgggcgaaccgaaagtgttgctgctcgatgaacccggcgtcggcgttgaccctatctcacggcgcgaactgtggcagatggtgcatgagctggcgggcgaagggatgttaatcctctggagtacctcgtatctcgacgaagccgagcagtgccgtgacgtgttactgatgaacgaaggcgagttgctgtatcagggagaaccaaaagccctgacacaaaccatggccggacgcagctttctgatgaccagtccacacgagggcaaccgcaaactgttgcaacgcgccttgaaactgccgcaggtcagcgacggcatgattcaggggaaatcggtacgtctgatcctcaaaaaagaggccacaccagacgatattcgccatgccgacgggatgccggaaatcaacatcaacgaaactacgccgcgttttgaagatgcgtttattgatttgctgggcggtgccggaacctcggaatcgccgctgggcgcaatattacatacggtagaaggcacacccggcgagacggtgatcgaagcgaaagaactgaccaagaaatttggggattttgccgccaccgatcacgtcaactttgccgttaaacgtggggagatttttggtttgctggggccaaacggcgcgggtaaatcgaccacctttaagatgatgtgcggtttgctggtgccgacttccggccaggcgctggtgctggggatggatctgaaagagagttccggtaaagcgcgccagcatctcggctatatggcgcaaaaattttcgctctacggtaacctgacggtcgaacagaatttacgctttttctctggtgtgtatggcttacgcggtcgggcgcagaacgaaaaaatctcccgcatgagcgaggcgttcggcctgaaaagtatcgcctcccacgccaccgatgaactgccattaggttttaaacagcggctggcgctggcctgttcgctgatgcatgaaccggacattctgtttctcgacgaaccgacttccggcgttgaccccctcacccgccgtgaattttggctgcacatcaacagcatggtagagaaaggcgtcacggtgatggtcaccacccactttatggatgaagcggaatattgcgaccgcatcggcctggtgtaccgcgggaaattaatcgccagcggcacgccggacgatttgaaagcacagtcggctaacgatgagcaacccgatcccaccatggagcaagcctttattcagttgatccacgactgggataaggagcatagcaatgagtaa

SEQ ID NO: 20306 - DNA, 504 bp, Escherichia coli
atgagtaccgctaaattagttaaatcaaaagcgaccaatctgctttatacccgcaacgatgtctccgacagcgagaaaaaagcaacagtagagttgctgaatcgccaggttatccagtttattgatctttctttgattaccaaacaagcgcactggaacatgcgcggcgctaacttcattgccgtacatgaaatgctggatggcttccgcaccgcactgatcgatcatctggataccatggcagaacgtgcagtgcagctgggcggtgtagctctggggaccactcaagttatcaacagcaaaaccccgctgaaaagttacccgctggacatccacaacgttcaggatcacctgaaagaactggctgaccgttacgcaatcgtcgctaatgacgtacgcaaagcgattggcgaagcgaaagatgacgacaccgcagatatcctgaccgccgcgtctcgcgacctggataaattcctgtggtttatcgagtctaacatcgaataa

SEQ ID NO: 20307 - DNA, 888 bp, Escherichia coli
atgcctggttcattacgtaaaatgccggtctggttaccaatagtcatattgctcgttgccatggcgtctattcagggtggagcctcgttagctaagtcactttttcctctggtgggcgcaccgggtgtcactgcgctgcgtctggcattaggaacgctgatcctcatcgcgttctttaagccatggcgactgcgctttgccaaagagcaacggttaccgctgttgttttacggcgtttcgctgggtgggatgaattatcttttttatctttctattcagacagtaccgctgggtattgcggtggcgctggagttcaccggaccactggcggtggcgctgttctcttctcgtcgcccggtagatttcgtctgggttgtgctggcggttcttggtctgtggttcctgctaccgctggggcaagacgtttcccatgtcgatttaaccggctgtgcgctggcactgggggccggggcttgttgggctatttacattttaagtgggcaacgcgcaggagcggaacatggccctgcgacggtggcaattggttcgttgattgcagcgttaattttcgtgccaattggagcgcttcaggctggtgaagcactctggcactggtcggttattccattgggtctggctgtcgctattctctcgaccgctctgccttattcgctggaaatgattgccctcacccgtttgccaacacggacatttggtacgctgatgagcatggaaccggcgctggctgccgtttccgggatgattttcctcggagaaacactgacacccatacagctactggcgctcggcgctatcatcgccgcttcaatggggtctacgctgacagtacgcaaagagagcaaaataaaagaattagacattaattaa

SEQ ID NO: 20308 - DNA, 1593 bp, Escherichia coli
gtgttagtttccagtaacgtcaccatgcagttcggcagtaagccgttgtttgaaaacatttccgtcaaatttggcggcggcaaccgttacggcctgattggcgcgaacggtagtggtaaatccacctttatgaagatcctcggcggcgaccttgagccgacgctgggtaacgtttccctcgatcccaacgagcgcattggtaaactgcgtcaggatcagtttgcctttgaagagttcactgtgctggatacggtgatcatggggcataaagagttgtgggaagtgaagcaggagcgcgaccgcatctatgctttgccggaaatgagtgaagaagacggctataaagtggccgatctggaagttaaatacggcgaaatggacggttactctgcggaagctcgcgccggtgaactgttgcttggcgtgggaattccagtggaacagcactacggcccgatgagtgaagttgctcctggctggaagctgcgtgtgcttctggcgcaggcgctgtttgctgatccggatattctcctgctcgacgaaccgaccaacaacctcgacatcgacaccattcgctggctggaacaggtgctgaacgagcgtgacagcaccatgatcatcatctcgcacgaccgtcacttccttaacatggtctgtacccacatggcggatctggattacggcgagctgcgcgtttatccgggtaactacgatgagtacatgacggcggcgacccaggcgcgtgaacgtctgctggccgataacgccaagaagaaagcgcagattgctgagttgcaatctttcgttagccgctttagcgccaacgcctcgaaatctcgccaggcaacttcgcgcgcgcgccagattgataaaatcaaactggaagaggtgaaagcctccagccgtcagaacccgttcatccgttttgaacaggataagaaactgttccgtaacgcgctggaagtggaaggtctgaccaaagggtttgataacggtccgctgtttaaaaatctcaacctgctgctggaagtgggtgaaaaactggcggtactgggtaccaacggcgtcggtaaatcaacgctgctgaaaacgctggtgggcgatctgcaaccggacagcggcaccgtaaaatggtctgagaacgcgcgcattggttactatgctcaggaccacgaatatgagtttgaaaatgatctgaccgtgttcgaatggatgagccagtggaagcaggaaggcgatgacgagcaggcggtacgcagtattctcggtcgtttgctgttcagccaggacgacatcaaaaagccagctaaagtgctttccggtggggaaaaagggcggatgctgtttggtaagttaatgatgcagaagccgaacattctgatcatggacgaaccgaccaaccacctggatatggaatccattgagtcgctgaacatggcactggaactgtatcagggcacgctgatctttgtttcacacgaccgtgagttcgtaagctccctggcgacccgcattctggaaatcaccccggaacgcgtgatcgactttagcggtaattacgaagattacctgcgtagtaaagggatcgagtaa

SEQ ID NO: 20309 - DNA, 1236 bp, Escherichia coli
atggaatttaccaccggattgatgtcgctcgacaccgcgcttaatgagatgctttctcgcgtcaccccactgaccgcccaggaaacgctgccactggtacagtgttttggtcgtattctggcgagcgatgtcgtttcgccgcttgatgttccggggtttgataactccgcaatggacggctacgcggtgcgtttagccgatattgcctccgggcaaccgctgcccgttgccggtaaatcctttgccggtcagccataccatggtgaatggcctgcgggtacctgcattcgtattatgaccggtgcgccggtgccggaaggctgcgaagcggtggtgatgcaggagcagactgaacaaatggacaatggcgtgcgttttactgctgaagtgcgtagcgggcaaaatattcgccgtcgcggtgaagatatctctgcaggtgcggttgttttcccggcgggaactcgcctgactaccgcagagctgccagtaattgcttcactggggattgccgaagttccggtgattcgtaaagtgcgtgtagcgcttttttctaccggtgatgaactccagttgcccggtcagccgctgggcgacggccaaatctacgataccaaccgtctcgccgtacacctgatgttagaacagttgggatgcgaggtaattaacttagggattatccgcgacgatccccatgccctgcgcgccgcatttattgaagccgacagccaggcggatgtggtgatcagttccggcggtgtttcagtgggtgaggcggattacaccaaaacgattcttgaagagctgggggagatcgccttctggaagctggcgattaaaccaggtaaaccgttcgcgttcggtaaactcagcaatagctggttctgcggcctgccgggcaacccggtttcagcgacgctgaccttctatcaactggtacagcctttgctggcaaaactaagcggtaacaccgccagcggcctgcccgcgcgccagcgcgtacgcacagcgtcccgcctgaaaaaaacgccaggacgtcttgatttccagcgcggcgtgctgcaacgcaacgccgatggcgaactggaagtgacgaccaccggacatcagggttcacatatatttagctcctttagcctcggcaactgctttatcgtgctggaacgcgatcgcggcaatgtggaagtgggcgaatgggtggaagtagaaccgtttaacgcgttgttcggaggcctgtaa

SEQ ID NO: 20310 - DNA, 1839 bp, Escherichia coli
gtgctggcggttgaaaatctgaatattgcctttatgcaggaccagcagaaaatagctgcggtccgcaatctctcttttagtctgcaacgcggtgagacgctggcaattgttggcgaatccggctccggtaagtcagtgactgcgttggcattgatgcgcctgttggaacaggcgggcggtttagtacagtgcgataaaatgctgttgcagcggcgcagtcgcgaagtgattgaacttagcgagcagaacgctgcacaaatgcgccatgttcgcggtgcggatatggcgatgatatttcaggagccgatgacatcgctgaacccggtatttactgtgggtgaacagattgccgaatcaattcgtctgcatcagaacgccagtcgtgaagaagcgatggtcgaggcgaagcggatgctggatcaggtacgcattcctgaggcacaaaccattctttcacgttatccgcatcaactctctggcgggatgcgccagcgagtgatgattgcgatggcgctgtcatgccgcccggcggtgctgattgccgatgagccaaccaccgcgctggatgtcactattcaggcgcagatcctgcaattaatcaaagtattgcaaaaagagatgtcgatgggcgttatctttatcactcacgatatgggcgtggtggcagagattgccgatcgggtactggtgatgtatcagggcgaggcggtggaaacgggtaccgtcgaacagatttttcatgcaccgcaacatccttacacccgtgcgctgttagctgctgttccgcaacttggtgcgatgaaagggttagattatccccgacgtttcccgttgatatcgcttgaacatccagcgaaacaggccccccccatcgagcagaaaacggtggtggatggcgaacctgttttacgagtgcgtaatcttgtcacccgtttccctttgcgcagcggtttgttgaatcgcgtaacgcgggaagtgcatgccgttgagaaagtcagttttgatctctggcctggcgaaacgctatcgctggtgggcgagtctggcagcggtaaatccactaccgggcgggcgttgctgcgcctggtcgaatcgcagggcggcgaaattatctttaacggtcagcgaatcgataccttgtcacccggcaaacttcaggcattacgccgggatattcagtttatttttcaggacccttacgcttcgctggacccacgtcagaccatcggtgattcgattatcgaaccgctgcgtgtacacggtttattgccaggtaaagacgcggctgcacgcgttgcgtggttgctggagcgcgtgggcctgttacctgaacatgcctggcgttacccgcatgagttttccggcggtcagcgccagcgcatctgcattgctcgcgcgttggcattgaatccaaaagtgatcattgccgacgaagccgtttcggcgctggatgtttctattcgcgggcagattatcaacttgttgctcgatctccagcgtgatttcggcattgcgtatctgtttatctcccacgatatggcggtggtagagcggattagtcatcgtgtggcggtgatgtatctcgggcaaattgttgaaattggtccacggcgcgcggtcttcgaaaacccgcagcatccttatacgcgtaaattactggcggcagttccggtcgctgaaccgtcccgacaacgaccgcagcgtgtactgctgtcggacgatcttcccagcaatattcatctgcgtggcgaagaggtggcagccgtctcgttgcaatgcgtcgggccggggcattacgtcgcacaaccacaatcagaatacgcattcatgcgtagataa

SEQ ID NO: 20311 - DNA, 597 bp, Escherichia coli
atgctggaaaatttgaatctctctctattctctcttattaacgcgacgccagactcggctccgtggatgatctcgttggcgatttttattgctaaagatttgattaccgtggtgccgttgctggccgtggtactttggttgtgggggcttacagcacaacggcaactggtgataaaaatcgctatcgcgctggcggtcagcctgtttgtgtcctggacgatgggacatctttttccgcacgaccgaccctttgtcgaaaatatcggctataacttcctgcatcatgcggcggatgactcattcccaagcgatcacggtacggtgattttcacctttgcactggcatttttatgctggcatcgcctgtggtccggctcacttttaatggtgctggccgtcgtcattgcctggtcgcgcgtttatcttggcgtccactggccgctggatatgctcggtggattgctggcaggtatgattggctgccttagtgcccagattatctggcaagcgatggggcataaactctatcaacgtctgcaatcgtggtatcgcgtctgttttgcattaccgatccgcaaaggctgggtgcgtgactga

SEQ ID NO: 20312 - DNA, 846 bp, Escherichia coli
atgaataatttaccggtagttcgttcgccctggcggattgtgattttgctgctgggctttacctttctctacgcgccaatgctgatgctggttatctattcgtttaacagctcgaagctggtgacggtgtgggccggctggtcaacgcgctggtatggtgagttattgcgcgatgacgcgatgatgagtgcggttggtttaagtctgacaattgcggcctgtgcggcgacggcggcggcgatcctcggaactattgcggcggtggtgctggtgcgctttggcaggtttcgcggatcaaatggctttgcctttatgatcaccgcgccgctggtaatgccagatgtcatcacgggcttgtcgctgttgttattattcgtcgcgcttgctcatgccattggctggcctgcggaccgcggtatgctcaccatctggctggcgcatgtcactttttgtacggcttatgtggcggtcgttatttcttcaagattgcgggaactggatcgctcgatagaagaagcagcgatggatctcggtgcgacgccgctgaaagtgtttttcgtcattacgctaccgatgatcatgcccgcgatcatttctggctggttactggcttttactttgtcgcttgatgatctggtgatcgccagctttgtttccgggccgggagccaccacgttaccgatgctggtcttttccagcgtgcggatgggggtgaatccggaaatcaacgccctggcaacattgatcctcggcgcggtcggaattgtcggatttatcgcctggtatctgatggctcgcgcagaaaaacagcggatacgcgacatccagcgtgcaagacgtggctga

SEQ ID NO: 20313 - DNA, 1719 bp, Escherichia coli
atgaaacaaacggttgcagcttatatcgccaaaacactcgaatcggcaggggtgaaacgcatctggggagtcacaggcgactctctgaacggtcttagtgacagtcttaatcgcatgggcaccatcgagtggatgtccacccgccacgaagaagtggcggcctttgccgctggcgctgaagcacaacttagcggagaactggcggtctgcgccggatcgtgcggccccggcaacctgcacttaatcaacggcctgttcgattgccaccgcaatcacgttccggtactggcgattgccgctcatattccctccagcgaaattggcagcggctatttccaggaaacccacccacaagagctattccgcgaatgtagtcactattgcgagctggtttccagcccggagcagatcccacaagtactggcgattgccatgcgcaaagcggtgcttaaccgtggcgtttcggttgtcgtgttaccaggcgacgtggcgttaaaacctgcgccagaaggggcaaccatgcactggtatcatgcgccacaaccagtcgtgacgccggaagaagaagagttacgcaaactggcgcaactgctgcgttattccagcaatatcgccctgatgtgtggcagcggctgcgcgggggcgcataaagagttagttgagtttgccgggaaaattaaagcgcctattgttcatgccctgcgcggtaaagaacatgtcgaatacgataatccgtatgatgttggaatgaccgggttaatcggcttctcgtcaggtttccataccatgatgaacgccgacacgttagtgctactcggcacgcaatttccctaccgcgccttctacccgaccgatgccaaaatcattcagattgatatcaacccagccagcatcggcgctcacagcaaggtggatatggcactggtcggcgatatcaagtcgactctgcgtgcattgcttccattggtggaagaaaaagccgatcgcaagtttctggataaagcgctggaagattaccgcgacgcccgcaaagggctggacgatttagctaaaccgagcgagaaagccattcacccgcaatatctggcgcagcaaattagtcattttgccgccgatgacgctattttcacctgtgacgttggtacgccaacggtgtgggcggcacgttatctaaaaatgaacggcaagcgtcgcctgttaggttcgtttaaccacggttcgatggctaacgccatgccgcaggcgctgggtgcgcaggcgacagagccagaacgtcaggtggtcgccatgtgcggcgatggcggttttagcatgttgatgggcgatttcctctcagtagtgcagatgaaactgccagtgaaaattgtcgtctttaacaacagcgtgctgggctttgtggcgatggagatgaaagctggtggctatttgactgacggcaccgaactacacgacacaaactttgcccgcattgccgaagcgtgcggcattacgggtatccgtgtagaaaaagcgtctgaagttgatgaagccctgcaacgcgccttctccatcgacggtccggtgttggtggatgtggtggtcgccaaagaagagttagccattccaccgcagatcaaactcgaacaggccaaaggtttcagcctgtatatgctgcgcgcaatcatcagcggacgcggtgatgaagtgatcgaactggcgaaaacaaactggctaaggtaa

SEQ ID NO: 20314 - DNA, 219 bp, Escherichia coli
atggccaaagaagacaatattgaaatgcaaggtaccgttcttgaaacgttgcctaataccatgttccgcgtagagttagaaaacggtcacgtggttactgcacacatctccggtaaaatgcgcaaaaactacatccgcatcctgacgggcgacaaagtgactgttgaactgaccccgtacgacctgagcaaaggccgcattgtcttccgtagtcgctga

SEQ ID NO: 20315 - DNA, 3990 bp, Escherichia coli
ttgagccaggaatacattgaagacaaagaagtcacattgacaaagttaagtagcggccgccgccttctggaggcgttgctgatccttattgtcctgtttgccgtctggttgatggctgccttactaagctttaacccttcggaccccagctggtcgcaaacggcctggcatgaacctatccataatttaggtgggatgcccggtgcgtggttggcagatacgctgttctttatttttggcgtgatggcttacaccattcccgtcattattgtcggcggttgttggtttgcctggcgtcatcagtccagcgacgaatacattgattattttgccgtttcgctacgcatcattggcgttttggcgctcatccttacctcctgtggtctggcggcaatcaacgctgacgatatctggtattttgcctccggtggcgtcattggcagcttactaagcactacgctacaaccactgctacacagtagcgggggaactattgcgctgctctgcgtttgggcagcgggcctgacgttgttcaccggttggtcatgggtgaccattgctgaaaaactcggcggctggattttaaacattctcaccttcgccagtaatcgtacccgtcgcgatgatacctgggtcgatgaagatgagtatgaagacgacgaagagtatgaagatgaaaatcacggcaaacagcatgaatcacgccgtgcccgtattcttcgcggcgcgctagcgcgtcgtaaacggttggcggaaaaattcattaatccgatggggcggcaaacagacgctgcgttgttctccggtaagcggatggatgatgacgaagagattacctacactgcacgcggtgtggctgccgacccggacgacgtcctattttcgggcaatcgtgcaacgcagccagaatatgacgaatacgatccattattaaacggtgcgccaattaccgaacctgtcgctgtagcagctgctgctaccacggcgacacaaagctgggctgcgccggttgaacctgtgactcagacgccgcctgttgcctctgttgatgttccacctgcgcaacctacagtagcctggcagcctgtaccgggtccacaaacgggagagccggttattgctcctgcaccggaaggttacccacagcagtcacaatatgcgcagcctgcagtgcaatataatgagccgctgcaacaaccagtacagccgcagcagccgtattatgcacctgcagctgaacaacctgcgcaacagccgtattatgcccctgcgccagaacaaccggtggcaggtaacgcctggcaagccgaagagcagcaatccacttttgctccacagtctacataccagactgagcaaacttatcagcagccagccgctcaggagccgttgtaccaacagccgcaacccgttgaacagcagcctgttgtggagcctgaacccgttgtagaagagacaaaacccgcgcgtccgccgctttactactttgaagaagttgaagagaagcgagcccgtgaacgtgaacaacttgcggcctggtatcaaccgattccagaaccggttaaagaaccagaaccgatcaaatcttcgctgaaagcaccttctgttgcagcagtacctccagtagaagccgctgccgctgtttccccgctggcatctggcgtgaaaaaagcgacactggcgacgggggctgccgcaaccgttgccgcgccagtcttcagtctggcaaatagcggtggaccgcgtcctcaggtcaaagaggggattggtccgcagttgccacgaccgaaacgtatccgcgtgccaactcgtcgtgaactggcgtcttacggtattaagctgccctcacagcgtgcggcggaagaaaaagcccgtgaagcccagcgcaatcagtacgattctggcgatcagtacaacgatgatgaaatcgatgcgatgcagcaggatgaactggcacgtcagttcgcccagacacagcagcaacgctatggcgaacagtatcaacatgatgtgcccgtaaacgcagaagatgcagatgctgcggcagaggctgaactggctcgtcagtttgcgcaaactcaacaacaacgttattccggcgaacaaccggctggggcgaatccgttctcgctggatgattttgaattttcgccaatgaaagcgttgctggatgatggtccacacgaaccgttgtttacgccaattgttgaacctgtacagcagccgcaacaaccggttgcaccgcagcagcaatatcagcagccgcaacaaccagttccgccgcagccgcagtatcagcagccacaacagccggttgcgccgcagccacaatatcagcagccgcaacaaccggttgcgccacagcagcaatatcagcagccgcaacaaccggttgcgccgcagcagcagtatcagcagccacaacagccagttgcgccacaaccgcaggataccctgcttcatccgctgttgatgcgtaatggcgacagccgtccgttgcataaaccgacgacgccgctgccttctctggatttgctgacaccgccgccgagcgaagtggagccggtagatacctttgcgcttgaacaaatggctcgcctggtggaagcgcgtctggctgatttccgtattaaagccgatgtcgtcaattactctccggggccggttatcactcgctttgaattgaacctggcaccgggcgtaaaagcggcgcgcatttctaacttgtcacgggaccttgcccgttcactttcgacggtggcggtgcgtgtcgttgaagttattcctggcaaaccctatgtaggtctggagttaccgaataaaaaacgacaaaccgtttatctgcgcgaagttttggataacgccaaattccgcgataatccgtcgccattaaccgtggtgctgggtaaagatatcgccggtgagccggtggttgccgatctggcgaaaatgccgcacttgttggttgcggggactaccggttccggtaaatctgtcggtgtgaacgcgatgatcctgagcatgctttataaagcacagccagaagatgtgcgtttcatcatgatcgacccgaaaatgctggagctttcggtttatgaaggcattccgcatctgttaacggaagtcgttactgatatgaaagatgccgccaacgcgctgcgctggtgtgttaacgagatggagcgtcggtataaactgatgtctgcgctgggtgtgcgtaatctggcgggttataacgaaaaaattgctgaagccgatcgcatgatgcgtccgattccagacccgtactggaagccgggtgacagtatggatgcccagcatccggtgctgaaaaaagaaccatacattgtggtgttggttgacgaatttgccgacctgatgatgacggtaggtaaaaaagtggaagagctgatagcacgtctggcgcaaaaagcccgtgccgcgggtatccacctcgtactggcaactcagcgtccatcggttgatgttattactggtctgattaaagcgaatattccgacccgtatcgcctttaccgtatccagtaagattgactcacgtaccattcttgatcaggctggcgcggaatcactgctgggtatgggggatatgctctactctgggccgaactccacgttgccggtacgtgtccatggtgcttttgttcgcgatcaggaagttcatgccgtggtgcaggactggaaagcgcgtggtcgcccacagtatgttgatggcatcacctccgacagcgaaagcgaaggtggtgcgggtggtttcgatggcgctgaagaactggatccgttgttcgatcaggcggtgcagtttgtcactgaaaaacgcaaagcgtcaatttctggcgtacagcgtcagttccgcattggttataaccgtgcagcgcgtattatcgaacagatggaagcgcaggggattgtcagcgaacaggggcacaacggtaatcgtgaagtgctggccccaccgccgtttgactaa

SEQ ID NO: 20316 - DNA, 858 bp, Escherichia coli
gtgaaagctgacaacccttttgatcttttacttcctgctgcaatggccaaagtggccgaagaggcgggtgtctataaagcaacgaaacatccgcttaagactttctatctggcgattaccgccggtgttttcatctcaatcgcattcgtcttctatatcacagcaaccactggcacaggcacaatgcccttcggcatggcaaaactggttggcggcatttgcttctctctggggctgattctttgtgttgtctgcggagccgatctctttacttccaccgtgttgattgttgttgctaaggcgagtgggcgcatcacctggggtcagttggcgaaaaactggctaaatgtctattttggcaacctggtcggcgcactgctgtttgtacttttaatgtggctttccggcgagtatatgaccgcaaatggtcaatggggactaaacgtcctacaaaccgccgaccacaaagtgcaccatacttttattgaggccgtctgtcttggtatcctggcaaacctgatggtatgtctggcagtatggatgagttattctggccgcagcctgatggacaaagcgttcattatggtgctgccggtcgcgatgtttgttgccagcggttttgagcacagtatcgcaaacatgtttatgatcccgatgggtattgtaatccgcgacttcgcatccccggaattttggaccgcagtcggttctgcaccggaaaatttttctcacctgaccgtgatgaatttcatcactgataacctgattccggttacgatcggcaacattatcggtggtggtttgttggttgggttgacatactgggtcatttacctgcgtgaaaacgaccaccattaa

SEQ ID NO: 20317 - DNA, 1089 bp, Escherichia coli
atggctcaaatcttcaattttagttctggtccggcaatgctaccggcagaggtgcttaaacaggctcaacaggaactgcgcgactggaacggtcttggtacgtcggtgatggaagtgagtcaccgtggcaaagagttcattcaggttgcagaggaagccgagaaggattttcgcgatcttcttaatgtcccctccaactacaaggtattattctgccatggcggtggtcgcggtcagtttgctgcggtaccgctgaatattctcggtgataaaaccaccgcagattatgttgatgccggttactgggcggcaagtgccattaaagaagcgaaaaaatactgcacgcctaatgtctttgacgccaaagtgactgttgatggtctgcgcgcggttaagccaatgcgtgaatggcaactctctgataatgctgcttatatgcattattgcccgaatgaaaccatcgatggtatcgccatcgacgaaacgccagacttcggcgcagatgtggtggtcgccgctgacttctcttcaaccattctttcccgtccgattgacgtcagccgttatggtgtaatttacgctggcgcgcagaaaaatatcggcccggctggcctgacaatcgtcatcgttcgtgaagatttgctgggcaaagcgaatatcgcgtgtccgtcgattctggattattccatcctcaacgataacggctccatgtttaacacgccgccgacatttgcctggtatctatctggtctggtctttaaatggctgaaagcgaacggcggtgtagctgaaatggataaaatcaatcagcaaaaagcagaactgctatatggggtgattgataacagcgatttctaccgcaatgacgtggcgaaagctaaccgttcgcggatgaacgtgccgttccagttggcggacagtgcgcttgacaaattgttccttgaagagtcttttgctgctggccttcatgcactgaaaggtcaccgtgtggtcggcggaatgcgcgcttctatttataacgccatgccgctggaaggcgttaaagcgctgacagacttcatggttgagttcgaacgccgtcacggttaa

SEQ ID NO: 20318 - DNA, 1749 bp, Escherichia coli
atgcataacgacaaagatctctctacgtggcagacattccgccgactgtggccaaccattgcgcctttcaaagcgggtctgatcgtggcgggcgtagcgttaatcctcaacgcagccagcgataccttcatgttatcgctccttaagccacttcttgatgatggctttggtaaaacagatcgctccgtgctggtgtggatgccgctggtggtgatcgggctgatgattttacgtggtatcaccagctatgtctccagctactgtatctcctgggtatcaggaaaggtggtaatgaccatgcgtcgccgcctgtttggtcacatgatgggaatgccagtttcattctttgacaaacagtcaacgggtacgctgttgtcacgtattacctacgattccgaacaggttgcttcttcttcttccggcgcactgattactgttgtgcgtgaaggtgcgtcgatcatcggcctgttcatcatgatgttctattacagttggcaactgtcgatcattttgattgtgctggcaccgattgtttcgattgcgattcgcgttgtatcgaagcgttttcgcaacatcagtaaaaacatgcagaacaccatggggcaggtgaccaccagcgcagaacaaatgctgaagggccacaaagaagtattgattttcggtggtcaggaagtggaaacgaaacgctttgataaagtcagcaaccgaatgcgtcttcaggggatgaaaatggtttcagcctcttccatctctgatccgatcattcagctgatcgcctctttggcgctggcgtttgttctgtatgcggcgagcttcccaagtgtcatggatagcctgactgccggtacgattaccgttgttttctcttcaatgattgcactgatgcgtccgctgaaatcgctgaccaacgttaacgcccagttccagcgcggtatggcggcttgtcagacgctgtttaccattctggacagtgagcaggagaaagatgaaggtaagcgcgtgatcgagcgtgcgactggcgacgtggaattccgcaatgtcacctttacttatccgggacgtgacgtacctgcattgcgtaacatcaacctgaaaattccggcagggaagacggttgctctggttggacgctctggttcgggtaaatcaaccatcgccagcctgatcacgcgtttttacgatattgatgaaggcgaaatcctgatggatggtcacgatctgcgcgagtataccctggcgtcgttacgtaaccaggttgctctggtgtcgcagaatgtccatctgtttaacgatacggttgctaacaacattgcttacgcacggactgaacagtacagccgtgagcaaattgaagaagcggcgcgtatggcctacgccatggacttcatcaataagatggataacggtctcgatacagtgattggtgaaaacggcgtgctgctctctggcggtcagcgtcagcgtattgctatcgctcgagccttgttgcgtgatagcccgattctgattctggacgaagctacctcggctctggataccgaatccgaacgtgcgattcaggcggcactggatgagttgcagaaaaaccgtacctctctggtgattgcccaccgcttgtctaccattgaaaaggcagacgaaatcgtggtcgtcgaggatggtgtcattgtggaacgcggtacgcataacgatttgcttgagcaccgcggcgtttacgcgcaacttcacaaaatgcagtttggccaatga

SEQ ID NO: 20319 - DNA, 1002 bp, Escherichia coli
atgttcaggttcctgaccttctgtctctgcgaggtaatgcccatgcgtaacatcattaaactggcgctggcgggattgcttagcgtctctacttttgcggttgctgcagaatcctcgcctgaagcgttacgtataggctatcagaaaggcagtattggtatggtgctggcaaaaagccaccagttactggaaaaacgctatccggaatcaaaaatctcctgggtggagttccccgcgggtccgcaaatgttggaagcgttaaacgttggcagtattgatctcggcagtaccggggatattccgccaatctttgcccaggctgccggggctgatttggtgtacgtgggcgtcgagccaccgaagcccaaagccgaagtgattctggtggcagaaaacagcccgatcaaaaccgtagccgatcttaaaggtcacaaagttgcctttcagaaaggttccagttcacacaaccttttactgcgtgcactgcgtcaggccggacttaagtttaccgatatccaacccacttacctgacgcccgctgatgcccgcgccgcgttccagcaaggtaacgttgacgcctgggctatctgggatccctactactctgctgcattattacagggcggcgtgcgggtgctgaaagacggcaccgatctcaatcaaactggatcgttttatctggcagctcgtccctatgcagaaaaaaacggcgcttttattcagggcgtactggcaacctttagtgaggccgatgcgttaacccgcagccagcgcgagcaaagcatcgctttactggcaaaaacgatgggcttaccggcaccggtgattgcctcttacttagatcatcgccctcctaccaccatcaaaccggttaacgccgaggttgccgccttacagcagcaaacggcagatctgttttatgaaaatcgtctggtgccgaaaaaagtcgatattcgccagcgcatctggcagcccactcaactggaaggaaaacaattatga

SEQ ID NO: 20320 - DNA, 564 bp, Escherichia coli
atgcgacggcggttctctattttgatctggtttaccagtgaaggagtgatgttgaaacggataatctggattctgttcttattgggattaacgtggggctgtgagctatttgcccatgatggcacggtcaacattagcggatcgtttcgccgtaatacatgcgtgctggcacaggatagcaagcaaatcaatgtgcagttaggcgatgtctcgctgacacgtttttctcatgggaattatggcccggagaaatctttcatcattaatttgcaggattgcggaacagatgtcagcacggttgacgtcaccttttcaggaacccccgacggagtgcagagcgaaatgttgtccattgaaagtggtacggatgcagccagcgggctggcaattgcgattctggatgatgcgaagatattgattccgcttaaccaggcgagtaaagactacagcctacatagcggtaaggtgccattaactttttatgcgcaattgcgacctgtcaatagcgatgtgcagtcgggtaaagtgaatgccagcgcgacatttgtacttcattatgactaa

SEQ ID NO: 20321 - DNA, 1908 bp, Escherichia coli
atgtcattaatcagtatgcatggcgcatggctgtcgttcagcgacgcgccgcttctcgataacgcagaactgcatatcgaagataacgaacgtgtttgtctggtgggccgcaacggcgcaggcaaatcgacgttaatgaaaatcctcaaccgtgaacaagggctggatgacggtcgcattatttacgagcaagatttgattgtagcgcgtctgcaacaggatccgccgcgtaacgttgagggtagcgtttatgatttcgttgccgaaggcattgaagaacaagcggaatatctgaaacgctatcacgatatttcgcgcctggtgatgaacgacccgagcgagaaaaatctcaacgaactggcgaaggttcaggaacagctggatcaccacaacctgtggcagctggaaaaccgcatcaacgaagtgctggcgcaactggggttagatcctaacgttgcgctgtcgtcgctttccggcggctggttgcgtaaagcggcattaggacgcgcgctggtgagtaatccgcgcgtgctgttgcttgatgaaccgacaaaccacctggatattgaaaccatcgactggctggaagggtttttgaaaactttcaacgggacgattattttcatctcccacgaccgttcgtttatccgcaatatggcgacgcgcattgttgatctcgatcgcggcaagctggtgacctatccagggaattacgaccagtacctgctggaaaaagaagaagccctgcgcgtggaagaattacaaaatgccgagttcgatcgcaaactggcgcaggaagaggtgtggatccgccaggggatcaaagcacgccgtacccgtaatgaaggccgcgtacgcgccctgaaagcgatgcgtcgcgaacgtggtgaacgtcgcgaagtgatgggtaccgcaaagatgcaggtggaagaggccagccgctccggtaaaatcgttttcgaaatggaagacgtttgctaccaggttaacggtaagcaactggtgaaagatttttctgcccaggttctacgtggcgacaaaattgccctgattggtccgaatgggtgcggcaaaaccacgctgctaaaactgatgctcggtcagcttcaagcggacagcgggcgtattcacgttggcaccaaactggaagtggcttatttcgatcagcaccgcgcggaactggatcccgataaaacggtgatggataaccttgccgaaggtaagcaagaggtgatggttaacggcaagccacgccacgtattgggctatttgcaggactttctgttccatccgaaacgggcgatgacgccggtacgtgcgctttctggcggtgagcggaaccgcttgctgctggcgcgtttgttcctcaaaccaagcaacttattgattcttgacgaaccgaccaacgatcttgatgtcgaaacgctggaactgctggaagaactgatcgacagctatcagggcacggtattgctggttagccacgatcgtcagtttgtcgataacaccgttacagaatgttggatcttcgaaggcggcggtaaaattggtcgttatgtcggcggttatcatgatgcccgtggtcagcaagagcagtatgtggcgctcaaacagcctgcggtgaaaaaaaccgaagaagccgccgcggcaaaagcagaaactgtaaaacgcagcagtagcaaactaagctataaattgcagcgcgaactggagcagctaccgcaattgctcgaagatctggaggcgaagctggaagccctacagacgcaagtggcggatgcttccttcttcagtcagccgcatgagcagacgcaaaaagtgcttgctgatatggctgctgcagagcaggagctggagcaagcctttgaacgctgggagtatcttgaagcgttaaaaaatggtggctga

SEQ ID NO: 20322 - DNA, 1761 bp, Escherichia coli
ttgaccattacgaaacttgcatggcgtgacctggttcctgataccgatagctatcaggaaatatttgctcagccacatttgattgacgaaaacgatcctttattcagtgatactcaaccgcggctgcaatttgcgctggagcagttgctgcatacgcgagcatcctcctcttttatgctggcgaaggccccggaagagtctgagtatctgaatcttattgccaatgccgcgcgtacgctacaaagcgatgcaggccaactggtgggcggtcactatgaggtttccggccactccatccgcttacgtcacgcagtgagtgcagatgataattttgcgactttaacgcaagttgtcgctgccgactgggtagaagcggagcaactctttggctgcctgcgccagtttaatggcgacattaccctgcagcctggtctggtgcatcaggcaaatggcggtattctcattatctctttgcgtacactgctggcgcaacctctgctgtggatgcggctgaaaaatatcgttaaccgcgagcgttttgactgggttgcgtttgatgagtcgcgccctctccccgtctctgtgccttcgatgccattgaagctgaaagtcattctggtaggcgaacgcgaatcattggctgatttccaggagatggagccagagctttcagagcaggctatttatagcgaatttgaagatactctgcagattgtcgatgcggagtcagtaacccagtggtgtcgctgggtgacatttaccgccagacataatcacttacctgcaccgggagcggatgcctggccgatacttatccgcgaagcagcacgctacaccggtgaacaagaaacacttccgcttagcccgcagtggatcctccgccagtgtaaagaggtcgcctccctgtgtgatggcgacaccttctccggcgagcagctaaacttaatgctgcagcagcgtgaatggcgcgaaggtttcctcgctgaacgtatgcaggatgagatccttcaggagcaaatcctgattgaaaccgaaggcgaacgcatcgggcaaattaacgccctttcggtcattgaatttccgggtcatccacgcgcttttggcgaaccttctcgcattagctgcgttgtgcatattggcgatggtgaattcaccgacatcgaacgcaaagcggagcttggcggcaatatccatgcgaaagggatgatgatcatgcaagcgttcctgatgtcggaactacagcttgagcaacagatccccttctcagcatcgctgacatttgagcagtcatacagtgaagttgatggagatagtgcctcgatggctgaactctgcgccctgataagcgccctcgccgatgtgccggtgaatcagagtatcgctatcacaggttcagtcgatcagttcggtcgcgcccagccggtcggtggtttaaatgagaaaatcgaaggcttctttgctatttgccagcaacgtgagttaaccgggaaacaaggtgtcattatccccacagctaacgttcgccatttaagtcttcacagtgaactggtgaaagcggtagaagaaggcaaattcaccatctgggcagtagacgatgtgactgacgcactgccgttattattaaatctggtgtgggatggcgaaggccaaacgacgctgatgcaaaccatccaggaacgtatcgcgcaagcatcgcaacaggaaggacgtcaccgttttccatggccattacgttggctgaactggtttattccgaactga

SEQ ID NO: 20323 - DNA, 1104 bp, Escherichia coli
atggaaggtaaagccagcctcggtgaaaccatcgatattgttgatcatcagggaaaatggttagcacgcggcgcttattcgccagcttcgcaaatccgggcgcgcgtctggacgtttgacccgtctgagtctatcgacattgcttttttttcccgccgtttgcaacaagcacaaaaatggcgtgactggctggcgcaaaaagatggcctcgacagctatcgtttaatcgccggagaatctgatggcctgccgggtattactatcgatcgtttcggtaattttctggtgctgcaactgctgagtgctggggcagaatatcagcgcgcggcattaattagtgccctgcaaacgctgtacccggaatgttcgatttacgatcgcagcgacgtcgcggtacgtaaaaaagaaggaatggagctgacccagggccccgtcaccggcgagttgccacctgccctgctgccgattgaagaacacggaatgaaactgctggtggatattcagcacggacacaaaacgggctactacctggaccagcgtgatagccgcctggctacccgccgctacgttgaaaataaacgtgtgctgaactgtttctcctataccggtggtttcgccgtatcggcactgatgggcggttgcagccaggttgtcagcgttgatacctcccaggaagcgctggatattgcacggcagaacgttgagctgaacaaactggatctgagcaaggctgagtttgtccgtgatgatgtctttaaattgctgcgtacttatcgcgatcgcggtgaaaaatttgacgttatcgtgatggacccgccgaagtttgttgagaataaaagccagttgatgggcgcgtgtcgtggttataaagacatcaacatgctggcgattcagctgctgaatgaaggcggtattctcctgactttctcctgttccggtctgatgaccagcgatttatttcagaaaatcatcgcggatgccgcaattgatgccggtcgtgatgtacaatttatagagcagttccgtcaggcagccgatcatccggtgatcgctacctatccggaagggctatatctgaaagggtttgcctgtcgcgtcatgtaa

SEQ ID NO: 20324 - DNA, 2181 bp, Escherichia coli
atgacaactaaaaatatgaatacgccaccaggcagcactcaggaaaatgagatcgatctgcttcgtctggtcggcgagttatgggatcaccgtaagtttattatcagcgtgaccgcgttattcacgctgatcgctgtcgcttactcgctgttaagcacaccaatttatcaggcagatactctggtccaggttgagcaaaaacagggcaacgccattctcagcggcctgagcgatatgatccctaactcatcgcccgagtctgcaccggagatccaactgctgcaatcgcgcatgattctcggtaaaaccattgctgaactgaatctgcgcgacatagttgagcagaagtattttccgattgtgggtcgcggctgggcgagattaaccaaagaaaaaccaggtgagctggcgatcagctggatgcatattccacaactgaatggtcaggatcagcaactgacactcacggttggggaaaacggccactatacactggaaggtgaagagttcaccgtcaatggtatggtcggccagcgtctggaaaaagatggcgttgcgctgactatcgcggacattaaggccaaaccaggaacacagtttgtcctgagccagcgtaccgaactggaagcgattaacgcattgcaggaaacctttaccgttagcgaacgcagtaaagaaagcgggatgctggaacttaccatgactggtgatgatccccagttgattactcgtattctgaacagcatcgctaacaactatttgcaacagaatatcgctcgccaggcggcgcaggattcacaaagccttgaattcttacagcgccagttacctgaagtgcgcagcgagctggaccaagcggaagaaaaactcaacgtttatcgccagcagcgcgattcggttgaccttaacctggaagccaaagccgttcttgagcagattgtgaacgttgataatcaactcaatgagctgaccttccgcgaggcagagatctcccagctgtataagaaagatcacccaacttatcgtgcgctgctggaaaaacgccagacgctggagcaagaacgcaaacgcctgaataagcgggtatcggcaatgccttccacccaacaggaagtgttgcgtttaagtcgtgacgtagaagcgggccgtgcggtatatctgcaattacttaaccgccagcaggagttgagtatttcgaaatccagtgccattggtaacgtgcggattatcgacccggcagtcactcagccgcagccagtgaaaccgaaaaaagcgttgaacgtggtgcttggttttattcttggcctgtttatttctgtgggtgccgtgctggcgcgtgcgatgttgcgtcgtggtgtagaagccccggaacaactggaagagcacggcatcagcgtttatgccactatcccaatgtccgagtggctggataaacgcacccgtctgcgtaagaaaaatttattttctaatcagcagcgccatcgtactaaaaatatccccttcctggcggtggataacccggcggattctgctgtggaagccgtacgtgcgctacgaaccagtctgcatttcgctatgatggagacggagaataacattctaatgatcaccggtgcgacgccagacagtggtaaaacgtttgtcagttcaactctggcagcggtgatcgcccagtccgatcaaaaagtgttatttattgatgccgacttacgccgtggttattcgcataacctgtttaccgtgagtaatgaacatggcttgtcggaatatctggcaggtaaagatgagctcaacaaagtgatccagcattttggcaaaggaggctttgatgtgattactcgcggtcaggtgccacctaacccgtctgaactgctgatgcgcgatcggatgcgtcaattactggaatgggcgaacgaccattacgatctggtgattgtcgatacgccgccgatgctggcggtgagtgatgccgcggtcgtggggcgttctgttggcaccagcctgctggttgcgcgttttggcttgaacaccgccaaagaggtgagtttgtcaatgcagcgtctggaacaggcaggcgtcaatattaaaggcgctatcctcaatggtgtgattaaacgcgccagcaccgcttacagttacggctataactattacggttatagttactccgagaaagagtaa

SEQ ID NO: 20325 - DNA, 735 bp, Escherichia coli
atgccgcgcccatctacctgcgctgactcaggaggtggcatgatgacgaccttaaccgctcgaccggaagccattaccttcgatccgcagcaaagtgcgctgatcgtggtggatatgcaaaacgcttatgccacgccaggcggctacttagatctcgccgggtttgatgtctcaaccactcgcccggtcattgccaacattcaaaccgccgtgaccgcagcgcgagcggcagggatgctgatcatctggtttcaaaatggctgggatgaacagtatgtcgaggctggcggacccggctcaccgaattttcataaatcgaacgccctgaaaaccatgcgtaagcagccgcagctgcaggggaaattgctggcgaaaggctcctgggattatcaactggtggatgaactggtgccgcagcctggcgatattgtgctgccgaagccgcgctacagcggtttcttcaatacgccgctggacagcattttgcgcagccgcggaatacgccatctggttttcaccggcatcgctaccaacgtctgcgtcgaatcgacgctacgcgacggcttttttctggagtatttcggcgtggtgcttgaagacgcaactcaccaggcggggccgaaatttgcgcagaaagccgcgttgttcaatatcgaaaccttttttggctgggtcagcgacgtcgaaacattctgcgacgcgctttctcccacgtcctttgctcatatcgcttaa

SEQ ID NO: 20326 - DNA, 732 bp, Escherichia coli
atggattgtgtgatgtggattggcgtgttgcttgccgctgcgttgtgcctgggcttgggtatcttcattaacgaaaccaccggcgaatttccgcaaaaagaacaggaactgtttgaaggtatcgtggcggtgatcgccgtggtgatccttacctggatggttttctggatgcgcaaagtgtcgcgcaacgtcaaagtgcaactggaacaggcagtcgatagcgcattgcagcgtggaaatcatcatggctgggcgctggtgatgatggtcttttttgccgttgcaagggaagggctggagtcggtctttttcctgctggcggcatttcaacaagatgtcgggatctggccgccgctgggtgcaatgctcggtcttgctactgccgtggtgctaggcttcctgctctactggggcggtattcgcctcaatcttggtgcattttttaaatggaccagcctgtttattctcttcgtcgccgcagggctggcagctggtgccattcgcgcatttcatgaagccggattgtggaaccactttcaggaaatcgccttcgatatgagtgcggtgctctcaactcactcgctgtttggcacgctgatggaagggatttttggctatcaggaagcgccgagcgtcagcgaagtcgccgtctggtttatttatctcatcccggcgctggtggcatttgctctgccaccacgcgcaggggcgacagcgtctcgctccgcgtaa

SEQ ID NO: 20327 - DNA, 1272 bp, Escherichia coli
atgcagtataaagatgaaaacggcgtgaatgaaccgtcacgccgacgtttactgaaagtgataggtgcactggcgctggcgggaagttgtccggtcgctcatgcacaaaaaacgcaaagtgcgccgggtacgctttcaccggatgctcgcaatgagaaacagccgttttatggtgagcatcaggcagggatcctgacgccacaacaggccgcaatgatgctggtggcgtttgatgtgcttgccagcgataaagccgatcttgagcggttgtttcgcttgttgactcagcgttttgcttttctgactcagggcggagcagcaccagaaacgccaaatccgcgcctgccaccactcgattccggcattcttggcggctacattgcgcccgataatctcaccatcacgttatcggtgggtcactcattgtttgatgagcgctttggccttgcgccacagatgccaaaaaagctgcagaagatgacgcgtttccccaacgactcgctggatgcggcgttatgtcatggtgatgtgttgctacagatttgcgccaacacccaggacacggttatccatgcgctgcgcgatatcatcaaacacacgccggatttgctcagtgtgcgctggaagcgggaagggtttatttccgatcacgcggcgcgtagtaaaggcaaagagacgccgattaatttgctgggtttcaaagacggcactgccaatcccgatagccagaatgataagttgatgcaaaaagtggtgtgggtaacggcagatcagcaggagcctgcgtggacaatcggtggcagctatcaggcagtacgcttgattcagtttcgagtggaattttgggacagaacgccgctgaaagaacagcagacgatttttggccgtgataagcaaaccggtgcgccgctgggaatgcagcatgagcatgatgtgcctgattacgccagcgacccggaagggaaggtgatcgcgctggacagccatatccggctggcgaatccccgcacggcggagagtgagtccagcctgatgctgcgtcgtggctacagttattcactgggcgtcaccaactccgggcaactggatatggggttgctgtttgtctgctaccaacacgatctggaaaaaggcttcctgacagtacaaaaaaggctcaatggcgaagcgctggaggaatacgttaaacctatcggcggcggttatttttttgcgctgccgggggtgaaggacgcgaacgattatttcggaagcgcgttattgcgggtttaa

SEQ ID NO: 20328 - DNA, 1359 bp, Escherichia coli
atggaaaaagactatttgagaattagtagtactgtattagtgagcttattgtttgggcttgctttggttttggtgaatagttggtttaatcagccaggcgttgaggaagttgttccacgatcaacctatctgatggtaatgattgctttattttttatcgatactgttgcatttatttttatgcagttgtatttcatttatgaccgtaggcaattttcaaactgtgtacttagtttggcttttctgagttgtttgatttactttgttataaccgtcattatcattcagcaaattattgaggagcgtttgacaagcagtgttgtccaaaatgacattgcaatctattatttgtttcgtcagatgagtttgtgcatattaatatttctggcattggtgaataaagttagtgaaaacacaaaacagcgcaatttattttccaaaaaaatgactttgtgcataagtttgttttttgtttttggggggccgatagttgctcacatactttctagtcattatgagagctacaatttacacattgccgagttaaccaatgaaaatggtcaggtggtttggaaagcctcatatgttaccataatgattttcatgtggttaaccttgctttcggttaatctatactttaatggtttacgctatgatatctggaatggagtgacggtgattgctttttgtgccgtactgtacaatatctctctgttatttatgagcaggtatagcgtgtccacttggtatattagtcgcactattgaagtagtcagtaagttaaccgttatggtaatatttatgtgccatatattcagtgcgctacgagtaacaaagaacattgcacatcgcgatcccttaaccaatatatttaacagaaattatttttttaatgaactgacagttcaatcagcatcagcccaaaaaacgccttattgcgtcatgattatggatatcgaccacttcaaaaaagtcaacgacacctgggggcatccggttggcgatcaggtgataaaaacagtggtgaatatcattgggaaaagcatacgaccagatgaccttttagcgcgcgtcggcggcgaagagtttggcgtcttgctgacggacatcgatactgaacgtgcgaaagctttagcggaaaggattcgggaaaatgttgagcgtttaactggcgataatcctgaatacgctataccacaaaaagtgacgattagtattggcgctgttgtgactcaggaaaatgcgttaaacccaaatgagatctatcgactggctgataacgcactttacgaggcgaaagagaccgggcgtaataaggtggttgtgagggatgtggtgaatttttgtgagtcaccataa

SEQ ID NO: 20329 - DNA, 534 bp, Escherichia coli
atgaaaacgcgtattcatgttgtgcagggtgatattaccaaactggccgttgatgtgattgtgaatgcggctaatccgtcattaatgggaggcggcggcgtcgatggggccattcatcgcgcagcgggtccggccctgctggatgcttgtttaaaagtcaggcaacagcagggcgattgccctacggggcatgccgttattacgcttgcaggcgatcttcccgctaaagccgtagtgcacaccgtcgggccagtctggcgtggtggtgaacaaaacgaagaccagcttttgcaggatgcctatctcaatagcctacgactggtggcggcaaacagctatacgtcagtggcttttcctgcaatcagtactggggtttatggttaccctcgtgcggcagcggctgaaatcgcagtaaaaaccgtttcagaatttattacccgtcacgctttacccgaacaggtatactttgtctgttatgatgaagaaaacgcccacctctacgaaagactccttacccaacaaggagatgaatga

SEQ ID NO: 20330 - DNA, 2544 bp, Escherichia coli
atgaataagacaactgagtacattgacgcaatgcccatcgccgcaagcgagaaagcggcattgccgaagactgatatccgcgccgttcatcaggcgctggatgccgaacaccgcacctgggcgcgggaggatgattccccgcaaggctcggtaaaggcgcgtctggaacaagcctggccagattcacttgctgatggacagttaattaaagacgacgaagggcgcgatcagctgaaggcgatgccagaagcaaaacgctcctcgatgtttcccgacccgtggcgtaccaacccggtaggccgtttctgggatcgcctgcgtggacgcgatgtcacgccgcgctatctggctcgtttgaccaaagaagagcaggagagcgagcaaaagtggcgtaccgtcggtaccatccgccgttacattctgttgatcctgacgctcgcgcaaactgtcgtcgcgacctggtatatgaagaccattcttccttatcagggttgggcgctgattaatcctatggatatggttggtcaggatttgtgggtttcctttatgcagcttctgccttatatgctgcaaaccggtatcctgatcctctttgcggtactgttctgttgggtgtccgccggattctggacggcgttaatgggcttcctgcaactgcttattggtcgcgataaatacagtatatctgcgtcaacagttggcgatgaaccattaaacccggagcatcgcacggcgttgatcatgcctatctgtaacgaagacgtgaaccgtgtttttgctggcctgcgtgcaacgtgggaatcagtaaaagccaccgggaatgccaaacactttgatgtctacattcttagtgacagttataacccggatatctgcgtcgcagagcaaaaagcctggatggagcttatcgctgaagtcggtggcgaaggtcagattttctatcgccgccgccgtcgccgcgtgaagcgtaaaagcggtaatatcgatgacttctgccgtcgctggggcagccagtacagctacatggtggtgctggatgctgactcggtaatgaccggtgattgtttgtgcgggctggtgcgcctgatggaagccaacccgaacgccgggatcattcagtcgtcgccgaaagcgtccggtatggatacgctgtatgcgcgctgtcagcagttcgcgacccgcgtgtatgggccactgtttacagccggtttgcacttctggcaacttggcgagtcgcactactggggacataacgcgattatccgcgtgaaaccgtttatcgagcactgcgcactggctccgctgccgggcgaaggttcctttgccggttcaatcctgtcacatgacttcgtggaagcggcgttgatgcgccgtgcaggttggggggtctggattgcttacgatctcccgggttcttatgaagaattgccgcctaacttgcttgatgagctaaaacgtgaccgccgatggtgccacggtaacctgatgaacttccgtctgttcctggtgaagggtatgcacccggttcaccgtgcggtgttcctgacgggcgtgatgtcttatctctccgctccgctgtggtttatgttcctcgcgctctctactgcattgcaggtagtgcatgcgttgaccgaaccgcaatacttcctgcaaccacggcagttgttcccagtgtggccgcagtggcgtcctgagctggcgattgcactttttgcttcgaccatggtgctgttgttcctgccgaagttattgagcattttgcttatctggtgcaaaggaacgaaagaatacggcggcttctggcgcgttacattatcgttgctgctggaagtgcttttttccgtgctgctggctccggtacgcatgctgttccatacggtcttcgttgtcagcgcgttccttggctgggaagtggtgtggaattcaccgcagcgtgatgatgactccacttcctggggtgaagcgttcaaacgccacggctcacagctgctgttagggttagtgtgggctgttgggatggcgtggctggatctgcgtttcctgttctggctggcaccgattgtcttctcgttgatcctgtcaccgtttgtttcggtgatttccagccgtgccaccgttggtctgcgcaccaaacgctggaaactgttcctgatcccggaagagtattcgccgccgcaggtgctggttgataccgatcggttccttgagatgaatcgtcaacgctcccttgatgatggctttatgcacgcagtgtttaacccgtcatttaacgctctggcaaccgcaatggcgaccgcgcgtcaccgcgccagtaaggtgctggaaatcgcccgtgaccgccacgttgaacaggcgctgaacgagacgccagagaagctgaatcgcgatcgtcgcctggtgctgctaagcgatccggtgacgatggcccgtctgcatttccgtgtctggaattccccggagagatattcttcatgggtgagttattacgaagggataaagctcaatccactggcattgcgtaaaccggatgcggcttcgcaataa

SEQ ID NO: 20331 - DNA, 1053 bp, Escherichia coli
atgccagtgttacacaaccgcatttccaacgacgcgctaaaagccaaaatgttggctgagagcgaaccgcgaaccaccatttcgttttacaagtatttccacatcgccgatcctaaggcgacccgtgacgctttatatcagctgtttaccgcgctgaatgtttttgggcgagtgtatctggcgcatgagggcattaacgcgcaaatcagcgtacctgcgagcaatgttgaaacatttcgcgcgcagctctatgccttcgacccggctttagagggtttacgcctgaatatcgcgttggatgatgacgggaaatccttctgggtactgcgcatgaaggtacgcgatcgcattgttgccgacggtattgacgatcctcactttgatgccagcaatgttggtgagtatctgcaagcggcggaagtgaacgccatgcttgacgatcccgatgcactatttatcgacatgcgtaaccactatgagtatgaagtggggcactttgaaaacgcgctcgaaattccggcagataccttccgtgagcagctgccaaaagcagtcgagatgatgcaggcacataaagataaaaaaatcgtcatgtactgcaccggcggcattcgttgtgaaaaggccagtgcctggatgaaacataacggattcaacaaagtctggcatatcgagggcggaattattgaatacgcccgtaaggcgcgcgagcagggcttgccggtgcgttttattggcaaaaattttgtttttgacgagcggatgggcgaacgtatatcggatgagattatcgcgcattgccaccagtgcggcgcgccgtgcgacagccataccaactgtaaaaatgatggctgccacctgctgtttattcagtgtccagtatgcgcggaaaaatacaaaggttgttgtagtgagatttgctgcgaagaaagcgcgttaccgccagaagaacagcgacgccgtcgggcaggacgtgaaaatggcaataagatctttaataagtctcgtggacgtctgaatacaacactgtgcattcctgatccaacagaataa

SEQ ID NO: 20332 - DNA, 576 bp, Escherichia coli
atgaaaaaaagcctgcttggtttaaccttcgcgtccctgatgttctctgccggttcagcggttgccgccgattacaaaattgacaaagaaggtcagcacgcctttgttaatttccgcatccagcaccttggctatagctggttatacggcacctttaaagatttcgacggtacttttacctttgacgaaaaaaatccggctgccgataaagtgaatgtgacaattaacaccaccagcgtcgatactaatcacgccgaacgcgataaacatcttcgcagtgcagatttcctcaataccgcaaaatatccacaggcaacattcacctccaccagcgtgaagaaagacggtgacgaactggatattaccggcgatctgacgctgaatggcgtaaccaaacccgtcacgctggaagcgaaattaattggtcagggcgacgacccatggggtggtaaacgtgcaggcttcgaggccgaaggcaaaattaagctcaaggacttcaatatcaagacagatttaggtccagcttctcaggaagtggatctgattatttcagtggaaggcgtacagcagaagtaa

SEQ ID NO: 20333 - DNA, 1536 bp, Escherichia coli
atgaatttattaaaatcgctggccgccgtcagctcgatgaccatgttttcgcgtgtgcttggcttcgcacgagacgcaattgtcgccagaatctttggcgcagggatggcaaccgacgcctttttcgtcgcttttaaacttcctaacttgttacgccgtatctttgccgaaggggcattttcccaggcatttgtaccgattctggcggaatataaaagtaagcagggtgaagacgccacgcgggtctttgtctcttatgtttctggcctgctgacacttgcgctggcggttgtgacggtcgctggcatgctcgccgcaccgtgggtgatcatggtgaccgcgccaggcttcgctgacacagctgacaaatttgccctgaccagccagctactaaagattacctttccctatatcttgctgatctccctggcgtcgctggtgggagcgattctgaatacgtggaaccgcttctcgattccggcgtttgctccaacactgcttaacatcagcatgattggtttcgcgctgtttgccgcaccgtactttaacccaccggtgctggcgctggcgtgggctgttacggtcggcggcgtcctgcagctggtgtatcagctaccgcacctgaagaagatcggcatgctggtcctgccgcgcattaacttccacgatgccggagcaatgcgcgtggtgaaacagatgggaccggcgatccttggcgtctctgtgagccagatctccttaatcatcaacaccatttttgcctcgtttcttgcttccggttcggtgtcttggatgtattacgccgaccgcttaatggagtttccgtccggtgtgctgggcgtggcgcttggcaccattttgctgccgtcgctgtcgaaaagttttgccagtggcaatcatgatgaatacaaccgtttgatggactgggggttgcgtctttgtttcctgttggcgctgccgagtgcggttgcgttgggcattctttccggtccgttgaccgtttcgctgttccagtacggtaaatttaccgcgtttgatgcgctgatgacccagcgggcgttaattgcctactcggtgggtttgattggcctgattgtagtgaaagtgttggctcctggcttttattcccgccaggacattaaaacgccagtgaaaattgccatcgttacgctgattttaacgcaattgatgaacctggcgtttattggtccgttgaaacatgccgggctgtcactttctattggtctggcggcgtgtctgaatgcttcgctgctttactggcagttgcgtaagcagaaaatctttaccccgcaacccggctggatggcgtttctgttgcgtctggtggtggcggtactggtgatgtctggcgtgcttttaggtatgttacatatcatgccggagtggtcattgggtaccatgccctggcgtttactgcgtttaatggcggtcgtgctggcggggattgccgcgtacttcgctgcactggcggtactgggcttcaaagttaaagaatttgcccgccggacggtgtaa

SEQ ID NO: 20334 - DNA, 954 bp, Escherichia coli
atgtatacgaagattattggtactggcagctatctgcccgaacaagtgcggacaaacgccgatttggaaaaaatggtggacacctctgacgagtggattgtcactcgtaccggtatccgcgaacgccacattgccgcgccaaacgaaaccgtttcaaccatgggctttgaagcggcgacacgcgcaattgagatggcgggcattgagaaagaccagattggcctgatcgttgtggcaacgacttctgctacgcacgctttcccgagcgcagcttgtcagattcaaagcatgttgggcattaaaggttgcccggcatttgacgttgcagcagcctgcgcaggtttcacctatgcattaagcgtagccgatcaatacgtgaaatctggggcggtgaagtatgctctggtcgtcggttccgatgtactggcgcgcacctgcgatccaaccgatcgtgggactattattatttttggcgatggcgcgggcgctgcggtgctggctgcctctgaagagccgggaatcatttccacccatctgcatgccgacggtagttatggtgaattgctgacgctgccaaacgccgaccgcgtgaatccagagaattcaattcatctgacgatggcgggcaacgaagtcttcaaggttgcggtaacggaactggcgcacatcgttgatgagacgctggcggcgaataatcttgaccgttctcaactggactggctggttccgcatcaggctaacctgcgtattatcagtgcaacggcgaaaaaactcggtatgtctatggataatgtcgtggtgacgctggatcgccacggtaatacctctgcggcctctgtcccgtgcgcgctggatgaagctgtacgcgacgggcgcattaagccggggcagttggttctgcttgaagcctttggcggtggattcacctggggctccgcgctggttcgtttctag

SEQ ID NO: 20335 - DNA, 930 bp, Escherichia coli
atgacgcaatttgcatttgtgttccctggacagggttctcaaaccgttggaatgctggctgatatggcggcgagctatccaattgtcgaagaaacgtttgctgaagcttctgcggcgctgggctacgacctgtgggcgctgacccagcaggggccagctgaagaactgaataaaacctggcaaactcagcctgcgctgttgactgcatctgttgcgctgtatcgcgtatggcagcagcagggcggtaaagcaccggcaatgatggccggtcacagcctgggggaatactccgcgctggtttgcgctggtgtgattgatttcgctgatgcggtgcgtctggttgagatgcgcggcaagttcatgcaagaagccgtaccggaaggcacgggcgctatggcggcaatcatcggtctggatgatgcgtctattgcgaaagcgtgtgaagaagctgcagaaggtcaggtcgtttctccggtaaactttaactctccgggacaggtggttattgccggtcataaagaagcggttgagcgtgctggcgctgcctgtaaagcggcgggcgcaaaacgcgcgctgccgttaccagtgagcgtaccgtctcactgtgcgctgatgaaaccagcagccgacaaactggcagtagaattagcgaaaatcacctttaacgcaccaacagttcctgttgtgaataacgttgatgtgaaatgcgaaaccaatggtgatgccatccgtgacgcactggtacgtcagttgtataacccggttcagtggacgaagtctgttgagtacatggcagcgcaaggcgtagaacatctctatgaagtcggcccgggcaaagtgcttactggcctgacgaaacgcattgtcgacaccctgaccgcctcggcgctgaacgaaccttcagcgatggcagcggcgctcgagctttaa

SEQ ID NO: 20336 - DNA, 642 bp, Escherichia coli
atgcgcagtaagtatatcgtcattgaggggctggaaggcgcaggcaaaactaccgcgcgtaatgtggtggttgagacgctcgagcaactgggtatccgcgacatggttttcactcgggaacctggcggtacgcaacttgccgaaaagttaagaagcctggtgctggatatcaaatcggtaggcgatgaagtcattaccgataaagccgaagttctgatgttttatgccgcgcgcgttcaactggtagaaacggtcatcaaaccagctctggctaacggcacctgggtgattggcgatcgccacgatctctccactcaggcgtatcagggcggcggacgtggtattgaccaacatatgctggcaacactgcgtgatgctgttctcggggattttcgccccgacttaacgctctatctcgatgttaccccggaagttggcttaaaacgcgcgcgtgcgcgcggcgagctggatcgtattgagcaagaatctttcgatttctttaatcgcacccgcgcccgctatctggaactggcagcacaagataaaagcattcataccattgatgccacccagccgctggaggccgtgatggatgcaatccgcactaccgtgacccactgggtgaaggagttggacgcatga

SEQ ID NO: 20337 - DNA, 798 bp, Escherichia coli
atgtttttagtcgactcacactgccatctcgatggtctggattatgaatctttgcataaggacgtggatgacgttctggcgaaagccgccgcacgcgatgtgaaattttgtctggcagtcgccacaacattaccgggttatttacatatgcgggatctggtaggcgaacgtgacaacgtcgtattttcttgtggcgtgcatccactcaaccagaatgatccctacgatgtagaagatttacgccgtctggcggcagaagagggtgttgtagcgctgggtgaaaccgggctggattattattacacgccggaaactaaagtacgtcagcaagagtccttcatccatcatatccagattggtcgtgaactgaacaagccggttatcgtccatacccgtgacgcccgtgccgatacgctggcaattctgcgcgaagaaaaagtgacggattgcggtggcgtactacactgttttacagaggacagagaaacggcgggtaaattactggatctcggattttacatctccttttccggcattgtgaccttccgtaatgcggagcaactgcgcgatgctgcgcgttatgtccccctggatcggttactggtggaaactgactcaccttaccttgcgccggtaccgcatcgaggaaaagagaatcaacctgcgatggttcgtgacgttgcagaatacatggctgtgttgaaaggtgttgccgttgaagaactggcgcaggtaaccaccgataacttcgcccgtctgtttcacatcgacgcttcccgccttcaatccatccgttga

SEQ ID NO: 20338 - DNA, 2190 bp, Escherichia coli
atgctttcaacacaatttaacagggataatcaatatcaagccatcaccaaaccgtcactacttgccggttgcatagcactggcactattaccttctgccgcttttgctgcaccagccactgaagaaacggtgattgttgagggttcagccacagctccagatgatggcgaaaatgattacagcgtaacgtctacctctgcgggtaccaaaatgcagatgactcaacgtgatattcctcagtcggtcactattgttagccagcagcggatggaagatcagcagttacaaacgctgggcgaagtgatggaaaacacgctggggatcagcaaaagtcaggcggattccgatcgtgctctttattattcccgcggattccagatcgataactatatggttgatggtatccccacctattttgaatcgcgctggaatctgggcgacgcactttctgatatggcactctttgaacgcgtagaagtagtgcgtggcgcgacaggactcatgaccgggacgggtaatccatctgcggcaattaatatggttcgaaaacacgcgaccagtcgtgaatttaaaggcgatgtctcggcggaatacggtagctggaacaaagaacggtatgtggcggatttacaaagcccactcaccgaagacggtaaaatccgcgcgcgaattgtcggcggctaccagaataacgactcatggctggaccgctacaacagtgaaaagaccttcttctcgggcattgtcgatgctgatttaggcgatcttacgacgctttcagccggttacgaatatcagcgcattgatgttaatagccctacctggggcggtttaccgcgctggaatactgatggcagcagcaacagttacgatcgcgcacgcagtaccgcacctgactgggcgtacaacgataaagagatcaacaaggtctttatgaccctgaagcagcagtttgctgatacctggcaagcgacactgaatgccacccactctgaagtcgaatttgacagcaaaatgatgtatgtcgatgcctatgtaaacaaagcggatggtatgctggttgggccatacagtaattatggacctggctttgattatgtcggcggcaccggttggaacagtggcaaacgtaaagttgatgcgctggatttgttcgctgacggtagttatgaattgtttggtcgtcagcacaatctaatgtttggtggcagttacagcaaacaaaacaatcgttacttcagttcatgggccaacatcttcccggatgaaattggcagtttctacaactttaatggcaatttcccacaaaccgactggtcaccacagagcctggcgcaggacgataccacacatatgaaatcgttatatgctgccactcgtgtcacccttgccgatccgctgcatctgatcctcggcgcacgttataccaactggcgggttgatacgctgacttacagcatggagaaaaaccacaccacgccttacgctggtctggtgtttgacatcaatgacaactggtcgacctacgccagctatacctctattttccagccgcaaaatgatcgtgacagttcaggcaaatatctggctccaatcaccggtaacaactacgagctgggtctgaaatcggactggatgaatagccgtctgaccaccacgttagccatcttccgtattgagcaggataatgtcgctcagtccaccggtacacctatccccggcagcaacggcgaaaccgcctataaagcggtggatgggacagtcagtaaaggggtggaatttgaactcaacggcgcaattaccgacaactggcagctgacatttggcgcaacgcgctatattgcagaggataacgaaggaaacgccgttaatcctaatctgccacgcaccacggttaaaatgttcaccagctatcggttgcctgtcatgccagagttgacggtcggcggtggtgttaactggcaaaatcgcgtgtataccgacaccgtgacgccgtatggcaccttccgcgccgagcaaggtagctacgcgctggtggatctcttcacccgctaccaggtgacgaaaaacttctcgttacaggggaacgtcaataacctgttcgacaaaacctacgataccaacgtggaaggttctatcgtctacggcacaccgcgtaatttcagcattaccggcacgtatcaattctga

SEQ ID NO: 20339 - DNA, 1026 bp, Escherichia coli
gtgggtccagtaatgttggatgtcgaaggttacgaactggacgcggaagagcgtgaaatactggcgcatccgctggtgggagggctgattctctttacgcgtaactatcatgatcctgcccagttacgtgaactggtgcgccagatccgcgcagcttcgcgcaatcgtctggtggtggcggttgatcaggaaggtggacgcgtgcagcgttttcgtgaaggttttacccgcttgccagcggcgcaatcattcgctgcgctgtcaggaatggaagagggtggcaaactggcgcaggaggcaggttggttgatggccagcgaaatgatcgctatggatattgatatcagctttgcgcctgtgctggatgtcgggcatatcagcgcggcgattggcgagcgttcttatcatgccgatccacaaaaagccctggcaattgccagccggtttattgatggtatgcatgaagccggaatgaaaacgaccgggaaacacttcccaggacacggtgcagtaacggcagactcacacaaagaaacaccgtgcgatccacgtccacaagcggagattcgcgctaaagatatgtcggtcttcagttccttaatccgcgaaaataaactcgacgccattatgcctgcgcatgtgatctacagtgatgttgatccgcgtccggcgagcggttctccctactggctgaaaaccgttttgcgtcaggaactgggttttgacggcgtgattttctctgacgatttatcgatggaaggtgccgcgattatgggcagttatgccgaacgcgggcaggcttcactggatgcgggttgcgatatgatcctggtctgcaataatcgtaaaggggccgtcagcgtgttagataatctgtcaccgatcaaggcagaacgtgttacacgtttgtatcataaaggttcattttcgcgacaggaactgatggactcggctcgctggaaagcgatcagcacccgtctgaatcagttacatgaacgctggcaggaagagaaagcaggtcactaa

SEQ ID NO: 20340 - DNA, 1305 bp, Escherichia coli
ttgactacgccattgaaaaagattgtgattgtcggcggcggtgctggtgggctggaaatggcaacacagctggggcataagctgggacgcaagaaaaaagccaaaattacgctggtcgatcgtaaccacagccacctgtggaaaccgctgctgcacgaagtggcgactggctcgcttgatgaaggcgtcgatgcgttgagctatctggcccatgcgcgcaatcatggtttccagttccagctgggttccgtcattgatattgatcgtgaagcgaaaacaatcactattgcagaactgcgcgacgagaaaggtgaactgctggttccggaacgtaaaatcgcctatgacaccctggtaatggcgctgggtagcacctctaacgatttcaatacgccaggtgtcaaagagaactgcattttcctcgataacccgcaccaggcgcgtcgcttccaccaggagatgctgaatttgttcctgaaatactccgccaacctgggcgcgaatggcaaagtgaacattgcgattgtcggcggcggcgcgacgggtgtagaactctccgctgaattgcacaacgcggtcaagcaactgcacagctacggttacaaaggcctgaccaacgaagccctgaacgtaacgctggtagaagcgggagaacgtattttgcctgcgttaccgccacgtatctctgctgcggcccacaacgagctaacgaaacttggcgttcgcgtgctgacgcaaaccatggtcaccagtgctgatgaaggcggcctgcacactaaagatggcgaatatattgaggctgatctgatggtatgggcagccgggatcaaagcgccagacttcctgaaagatatcggtggtcttgaaactaaccgtatcaaccagctggtggtggaaccgacgctgcaaaccacccgcgatccagacatttacgctattggcgactgcgcgtcatgcccgcgtccggaagggggctttgttccgccgcgtgctcaggctgcacaccagatggcgacttgcgcaatgaacaacattctggcgcagatgaacggtaagccgctgaaaaattatcagtataaagatcatggttcgctggtatcgctgtcgaacttctccaccgtcggtagcctgatgggtaacctgacgcgcggctcaatgatgattgaaggacgaattgcgcgctttgtatatatctcgctataccgaatgcatcagattgcgctgcatggttactttaaaaccggattaatgatgctggtggggagtattaaccgcgttatccgtccgcgtttgaagttgcattaa

SEQ ID NO: 20341 - DNA, 3447 bp, Escherichia coli
atgcctgaacaatatcgttatacgctgcccgtcaaagcgggtgagcagcgtctgctgggcgagttaaccggcgcagcctgtgcaacgctggtagcggaaattgccgaacgtcacgccggtccggtggtactcattgcaccagatatgcaaaatgctctgcgtttgcatgatgaaatcagccagtttaccgatcaaatggtgatgaatctggcggactgggaaactcttccctacgacagtttttcgcctcatcaggacattatctcctcgcgcctttccaccctttaccagctaccgacgatgcagcgtggcgtactgattgttccggtgaatacgcttatgcagcgcgtttgcccacacagttttctccacggtcatgcgctggtgatgaaaaaaggtcagcgcctgtcacgagatgcattacgaacccaactggacagcgccggttatcgccatgttgaccaggtgatggagcacggcgaatacgccacgcgcggcgcgttgctggatctcttcccgatggggagtgagctgccttatcgtcttgatttctttgatgatgaaatcgacagcctgcgggtgtttgacgtcgacagccagcgcacgctggaggaagtagaagcgatcaatctgctgcccgcgcacgaatttccgaccgataaagcggcaattgaactgttccgcagccagtggcgcgataccttcgaagtgaagcgcgatccagaacatatttaccagcaagtgagtaaaggcacattacctgccgggatcgagtactggcagccattgttcttcagcgaaccactgccgccgctgttcagttatttccctgccaataccttgctcgtgaatactggcgatctggaaaccagtgccgaacgtttccaggctgacacgctggcgcgttttgagaatcgcggcgtcgatccgatgcgcccgctgttgccaccacaatcgctctggctgcgggtggacgagctcttctcagagctgaaaaactggccccgggtgcagctaaaaactgaacatttaccgacaaaagccgcgaatgccaatttaggtttccagaaactgccagacctggccgttcaggcacaacaaaaagcgccgctggatgcgctgcgtaagttcctcgagactttcgacggtccggtggtgttctcggtagaaagtgaaggtcgccgtgaagcgctgggtgaactgctcgcacgaattaaaattgctccgcaacgcattatgcgtcttgatgaagccagcgaccgtgggcgttatctgatgattggcgctgccgaacatggttttgtcgatacggtgcgtaatctggcgctgatttgcgaaagcgatctgctcggtgaacgcgttgcccgtcgtcgtcaggattctcgccgcaccatcaaccccgatacactgatccgtaaccttgcggaactgcatattggtcagccggtggtccatctggagcacggcgtcggtcgttatgccggaatgaccacgctggaagcgggtggcattactggcgagtatctgatgctcacctatgccaacgacgccaaactgtatgttccggtgtcgtcactgcatctgattagccgttacgcaggtggcgcggaagaaaacgccccgctgcataaacttggcggcgatgcgtggtcacgcgcgcggcagaaagcggcggaaaaagtgcgtgatgtggcggcggaattgctggatatctacgcgcaacgcgccgccaaagagggcttcgcgtttaaacacgatcgtgagcagtatcagttgttctgcgacagcttcccgtttgaaaccacgccggatcaggcgcaggccattaatgcggtacttagcgacatgtgtcagccgctggcaatggatcgtctggtgtgcggcgatgttggctttggtaaaacagaagtggcgatgcgcgcagctttcctggcagtagataaccacaagcaggtggcggtgctggtgcctaccacccttctcgcgcagcagcattacgacaacttccgcgaccgtttcgccaactggccggtacgtatcgaaatgatctcccgtttccgcagcgccaaagagcagacgcaaatccttgcggaagtggcggaagggaaaatcgatattctgatcggtacgcacaaactgctgcaaagtgacgtcaagtttaaagatttaggcctgctgattgtcgatgaagaacaccgcttcggggtgcgtcataaagagcgcattaaagcgatgcgcgcgaacgtggatattctgacgcttactgcaacgccgatcccacgtacgctgaatatggcaatgagcggaatgcgtgacctgtcgattatcgccacgccgcccgcccgtcgtctggcagttaaaacctttgtccgtgagtatgacagcatggtggtccgggaggcgatcctgcgtgaaattttgcgcggaggacaggtttattatctctacaatgatgtggaaaacattcagaaagccgccgaacggctggcagaactggtgccagaagcgcggatcgccatcggtcacgggcagatgcgcgagcgcgaactggaacgggtgatgaatgatttccatcatcaacgtttcaacgtgctggtttgtacaaccattatcgaaaccgggatcgacatcccgacagccaacactattatcattgaacgcgcggatcacttcggtctggcgcagctgcaccagttacgcggtcgcgtcggacgttcgcatcatcaggcatatgcatggttgctgacaccgcatccaaaagcgatgactaccgatgcacaaaaacgtcttgaagcaattgcctcgctggaagatctcggggcaggttttgcgctggcaacgcacgatctggagattcgcggcgcgggtgaactgcttggcgaagaacaaagcggctcaatggaaaccatcggtttctcgctgtatatggagttgctggaaaacgccgtcgatgcactgaaagccggacgcgagccgtcgctggaagatctcaccagccagcaaacagaagtcgagctgcggatgccgtcgctattgccagatgatttcatccctgacgtgaacacgcgtctgtcgttctacaaacgtattgccagcgccaaaacggaaaacgaactggaagagatcaaagtcgagcttatcgatcgcttcggcctgctgccagatccggcgcgtaccctgctggatattgcccgtctgcgccagcaagcgcagaaactggggatcaggaagctggaaggtaatgagaaaggcggggtgatcgaatttgccgagaagaatcacgttaatccggcctggttgattggtttgctgcaaaaacagccgcagcattaccgccttgatggtccgacgcgcctgaaatttattcaggatttgagtgagcggaaaacgcgtatcgaatgggtacgccagtttatgcgtgaactggaagagaacgcgatcgcttaa

SEQ ID NO: 20342 - DNA, 1227 bp, Escherichia coli
atggataaactacttgagcgatttttgaactacgtgtctctggatacccaatcaaaagcaggggtgagacaggttcccagcacggaaggccaatggaagttattgcatctgctgaaagagcagctcgaagagatggggcttatcaatgtgaccttaagtgagaagggcactttgatggcgacgttaccggctaacgtccctggcgatatcccggcgattggctttatttctcatgtggatacctcaccggattgcagcggcaaaaatgtgaatccgcaaattgttgaaaactatcgcggtggcgatattgcgctgggtatcggcgatgaagttttatcaccggttatgttcccggtgctgcatcagctactgggtcagacgctgattaccaccgatggtaaaaccttgttaggtgccgatgacaaagcaggtattgcagaaatcatgaccgcgctggcggtattgcaacagaaaaaaattccgcatggtgatattcgcgtcgcctttaccccggatgaagaagtgggcaaaggggcgaaacattttgatgttgacgccttcgatgcccgctgggcttacactgttgatggtggtggcgtaggcgaactggagtttgaaaacttcaacgccgcgtcggtcaatatcaaaattgtcggtaacaatgttcatccgggcacggcgaaaggagtgatggtaaatgcgctgtcgctggcggcacgtattcatgcggaagttccggcggatgaaagcccggaaatgacagaaggctatgaaggtttctatcatctggcgagcatgaaaggcaccgttgaacgggccgatatgcactacatcatccgtgatttcgaccgtaaacagtttgaagcgcgtaaacgtaaaatgatggagatcgccaaaaaagtgggcaaagggttacatcctgattgctacattgaactggtgattgaagacagttactacaatatgcgcgagaaagtggttgagcatccgcatattctcgatatcgcccagcaggcgatgcgcgattgcgatattgaaccggaactgaaaccgatccgcggtggtaccgacggcgcgcagttgtcgtttatgggattaccgtgcccgaacctgttcactggcggttacaactatcatggtaagcatgagtttgtgactctggaaggtatggaaaaagcggtgcaggtgatcgtccgtattgccgagttaacggcgcaacggaagtaa

SEQ ID NO: 20343 - DNA, 1152 bp, Escherichia coli
gtgatagaatacgccgccttgaagttcaatgtcgtgagtgatccaatgtctgaaaccgcaaaaaaagtaatcgtcggcatgtccggcggtgtcgattcctccgtttctgcctggctgttgcaacaacagggatatcaggtcgaaggcctgtttatgaagaactgggaagaagacgacggtgaggaatattgcacagcggcagcggatctggctgatgcccaggctgtctgcgacaagctcggcattgaactgcacaccgttaactttgctgccgagtactgggacaacgtcttcgaactgttccttgccgaatataaagccggtcgcacgccgaatccggatattctgtgcaacaaagagatcaaatttaaagccttcctcgaatttgccgccgaagatttaggtgccgattatatcgctaccggtcattacgtacgtcgggccgatgtcgatggcaagagccgcctgctgcgtggtctggacagcaataaagaccagagctacttcctttatacgctcagccatgagcagattgcgcaaagcctgttcccggtcggcgaactggaaaaaccgcaggtgcgtaagattgctgaagatcttggtctggtcaccgcgaagaaaaaagactctaccggcatttgcttcattggcgaacgtaaattccgcgagttcctgggccgttatctcccggcgcaaccgggcaaaatcattaccgtcgatggcgatgaaattggtgagcaccaggggctgatgtatcacactctcggtcagcgtaaaggtctgggtatcggtggcaccaaagaaggtaccgaagaaccgtggtatgtggtggacaaagacgtcgaaaacaacattctggttgtcgctcagggccatgaacacccgcggctgatgtctgtcgggttgattgcccagcagttgcactgggtcgatcgcgaaccattcaccggcactatgcgttgcacggtaaaaacccgctatcgccagaccgatatcccttgcaccgtcaaggcgctggacgatgatcgcattgaagtgattttcgatgaaccggttgccgccgtgacgccgggccagtctgccgtcttctataacggtgaagtgtgcctcggtggcggtattattgagcagcgtctgccgctgccggtctga

SEQ ID NO: 20344 - DNA, 1251 bp, Escherichia coli
atggaaagtaaagtagttgttccggcacaaggcaagaagatcaccctgcaaaacggcaaactcaacgttcctgaaaatccgattatcccttacattgaaggtgatggaatcggtgtagatgtaaccccagccatgctgaaagtggtcgacgctgcagtcgagaaagcctataaaggcgagcgtaaaatctcctggatggaaatttacaccggtgaaaaatccacacaggtttatggtcaggacgtctggctgcctgctgaaactcttgatctgattcgtgaatatcgcgttgccattaaaggtccgctgaccactccggttggtggcggtattcgctctctgaacgttgccctgcgccaggaactggatctctacatctgcctgcgtccggtacgttactatcagggcactccaagcccggttaaacaccctgaactgaccgatatggttatcttccgtgaaaactcggaagacatttatgcgggtatcgaatggaaagcagactctgccgacgccgagaaagtgattaaattcctgcgtgaagagatgggggtgaagaaaattcgcttcccggaacattgtggtatcggtattaagccgtgttcggaagaaggcaccaaacgtctggttcgtgcagcgatcgaatacgcaattgctaacgatcgtgactctgtgactctggtgcacaaaggcaacatcatgaagttcaccgaaggagcgtttaaagactggggctaccagctggcgcgtgaagagtttggcggtgaactgatcgacggtggcccgtggctgaaagttaaaaacccgaacactggcaaagagatcgtcattaaagacgtgattgctgatgcattcctgcaacagatcctgctgcgtccggctgaatatgatgttatcgcctgtatgaacctgaacggtgactacatttctgacgccctggcagcgcaggttggcggtatcggtatcgcccctggtgcaaacatcggtgacgaatgcgccctgtttgaagccacccacggtactgcgccgaaatatgccggtcaggacaaagtaaatcctggctctattattctctccgctgagatgatgctgcgccacatgggttggaccgaagcggctgacttaattgttaaaggtatggaaggcgcaatcaacgcgaaaaccgtaacctatgacttcgagcgtctgatggatggcgctaaactgctgaaatgttcagagtttggtgacgcgatcatcgaaaacatgtaa

SEQ ID NO: 20345 - DNA, 603 bp, Escherichia coli
atgcataaagcaatattaaatagtgaccttattgcaacaaaggcaggggatgttaccgtttataactacgatggtgaaacacgggaatatatttccacttcaaatgaatatcttgccgttggtgtcggcattccggcatgttcctgtttagatgcccctggtacacataaggctggttatgcaatctgccgttctgcagattttaactcatgggaatatgtgccagaccatcgcggtgaaacggtctatagcaccaaaactggagaatcaaaagaaatcaaagctccgggtgattaccctgaaaatacaaccactatcgcccctttatctccatacgataaatgggatggtgagaaatgggtgaccgatactgaagcacagcatagcgccgcagtagacgcggcagaagcacagcgccagtcactgattgatgctgcaatggcttccattagtctgattcaactgaaattgcaggccggacgtaaactgacgcaggcagaaacaaccagacttaacgctgtgctggattacattgacgcggtgacggcaacagataccagcaccgcgccggatgtcatctggcctgaactgccggaggcgtag

SEQ ID NO: 20346 - DNA, 1092 bp, Escherichia coli
atgggattcaaatgcggtatcgtcggtttgcccaacgtcgggaaatctaccctgttcaacgcgctgaccaaagccggtattgaagcggccaactttccattctgcaccattgagccgaacacaggcgtcgtaccaatgcctgatcctcgcctggatcaactggctgaaatcgtaaaaccgcagcgtacgcttcccacgaccatggaatttgtcgatatcgccggtctggtaaaaggcgcatcgaaaggcgaaggtctgggtaaccagttcctgaccaacatccgtgaaaccgaagcgatcggtcacgttgttcgctgctttgaaaatgacaacatcattcacgtttccggcaaagttaacccggctgacgatattgaagttatcaacaccgaactggcgctggcagacctcgacacctgcgaacgtgcgattcatcgcgtacagaagaaagccaaaggtggcgataaagacgcgaaagctgagctggcggtcctggaaaaatgcctgccccagttggaaaatgcaggtatgctgcgcgcgctggatttaagcgctgaagagaaagcggctattcgttacctgagcttcctgacgctgaaaccaacaatgtacatcgccaacgtcaacgaagacggttttgaaaacaacccatatcttgaccaggtgcgtgaaatcgcggcgaaagaaggttctgttgtggttccggtttgtgctgctgttgaagcagacattgccgaactggacgacgaagaacgtgacgagtttatgcaggagcttgggctggaagagccgggcctgaaccgtgtgatccgtgccggttataaactgctgaacctgcaaacttacttcaccgctggggtgaaagaagtgcgtgcatggaccattccggttggagcaaccgcgccgcaggcagcgggcaaaatccatactgattttgaaaaaggctttatccgtgcacaaaccatctcgtttgaagatttcatcacttacaaaggtgaacaaggcgcgaaagaagcaggcaaaatgcgtgcagaaggtaaagattacatcgtgaaagatggcgatgtgatgaacttccttttcaacgtctaa

SEQ ID NO: 20347 - DNA, 618 bp, Escherichia coli
atggcacagctatatttctactattccgcaatgaatgcgggtaagtctacagcattgttgcaatcttcatacaattaccaggaacgcggcatgcgcactgtcgtatatacggcagaaattgatgatcgctttggtgccgggaaagtcagttcgcgtataggtttgtcatcgcctgcaaaattatttaaccaaaattcatcattatttgatgagattcgtgcggaacatgaacagcaggcaattcattgcgtactggttgatgaatgccagtttttaaccagacaacaagtatatgaattatcggaggttgtcgatcaactcgatatacccgtactttgttatggtttacgtaccgattttcgaggtgaattatttattggcagccaatacttactggcatggtccgacaaactggttgaattaaaaaccatctgtttttgtggccgtaaagcaagcatggtgctgcgtcttgatcaagcaggcagaccttataacgaaggtgagcaggtggtaattggtggtaatgaacgatacgtttctgtatgccgtaaacactataaagaggcgttacaagtcgactcattaacggctattcaggaaaggcatcgccacgattaa

SEQ ID NO: 20348 - DNA, 591 bp, Escherichia coli
atggctcttccgccagaccgcacagacaggggcgcggaacgttacctgaaggatgactggcacggcctgcaactttttgccattgatggcgcacagttcaggacacctgataaacccgagctgcgtgaatattatgggtctgccaacacatccactaagcggcagaacgcctacccggttatgcgtctggtggccttaatgaacctgggaagtcacattctgctgaatgccgtgaccgcaccttaccggcagagcgaaactgtgctggcccactccatgctcgccaccatcccggataactctattacgttgtttgataaacttttttacagcgaagacctgctgctgacgctgaaccagaagggttgtaaccgccactggctactgcctgcgtggaagaatatcgcatcagaaatgatagagctgggaaacacggcgtcaccagggaccatcccgaaacgactggagcatcttcggggtgctctggaagtggtgttcataacaaaacgcccccgaccatcaaggccgaggtcggttaagatatcaaaaacccgttatcctgtgaaacatagtgccgctcctcttaagtga

SEQ ID NO: 20349 - DNA, 2676 bp, Escherichia coli
atggctgttactaatgtcgctgaacttaacgcactcgtagagcgtgtaaaaaaagcccagcgtgaatatgccagtttcactcaagagcaagtagacaaaatcttccgcgccgccgctctggctgctgcagatgctcgaatcccactcgcgaaaatggccgttgccgaatccggcatgggtatcgtcgaagataaagtgatcaaaaaccactttgcttctgaatatatctacaacgcctataaagatgaaaaaacctgtggtgttctgtctgaagacgacacttttggtaccatcactatcgctgaaccaatcggtattatttgcggtatcgttccgaccactaacccgacttcaactgctatcttcaaatcgctgatcagtctgaagacccgtaacgccattatcttctccccgcacccgcgtgcaaaagatgccaccaacaaagcggctgatatcgttctgcaggctgctatcgctgccggtgctccgaaagatctgatcggctggatcgatcaaccttctgttgaactgtctaacgcactgatgcaccacccagacatcaacctgatcctcgcgactggtggtccgggcatggttaaagccgcatacagctccggtaaaccagctatcggtgtaggcgcgggcaacactccagttgttatcgatgaaactgctgatatcaaacgtgcagttgcatctgtactgatgtccaaaaccttcgacaacggcgtaatctgtgcttctgaacagtctgttgttgttgttgactctgtttatgacgctgtacgtgaacgttttgcaacccacggcggctatctgttgcagggtaaagagctgaaagctgttcaggatgttatcctgaaaaacggtgcgctgaacgcggctatcgttggtcagccagcctataaaattgctgaactggcaggcttctctgtaccagaaaacaccaagattctgatcggtgaagtgaccgttgttgatgaaagcgaaccgttcgcacatgaaaaactgtccccgactctggcaatgtaccgcgctaaagatttcgaagacgcggtagaaaaagcagagaaactggttgctatgggcggtatcggtcatacctcttgcctgtacactgaccaggataaccaaccggctcgcgtttcttacttcggtcagaaaatgaaaacggcgcgtatcctgattaacaccccagcgtctcagggtggtatcggtgacctgtataacttcaaactcgcaccttccctgactctgggttgtggttcttggggtggtaactccatctctgaaaacgttggtccgaaacacctgatcaacaagaaaaccgttgctaagcgagctgaaaacatgttgtggcacaaacttccgaaatctatctacttccgccgtggctccctgccaatcgcgctggatgaagtgattactgatggccacaaacgtgcgctcatcgtgactgaccgcttcctgttcaacaatggttatgctgatcagatcacttccgtactgaaagcagcaggcgttgaaactgaagtcttcttcgaagtagaagcggacccgaccctgagcatcgttcgtaaaggtgcagaactggcaaactccttcaaaccagacgtgattatcgcgctgggtggtggttccccgatggacgccgcgaagatcatgtgggttatgtacgaacatccggaaactcacttcgaagagctggcgctgcgctttatggatatccgtaaacgtatctacaagttcccgaaaatgggcgtgaaagcgaaaatgatcgctgtcaccaccacttctggtacaggttctgaagtcactccgtttgcggttgtaactgacgacgctactggtcagaaatatccgctggcagactatgcgctgactccggatatggcgattgtcgacgccaacctggttatggacatgccgaagtccctgtgtgctttcggtggtctggacgcagtaactcacgccatggaagcttatgtttctgtactggcatctgagttctctgatggtcaggctctgcaggcactgaaactgctgaaagaatatctgccagcgtcctaccacgaagggtctaaaaatccggtagcgcgtgaacgtgttcacagtgcagcgactatcgcgggtatcgcgtttgcgaacgccttcctgggtgtatgtcactcaatggcgcacaaactgggttcccagttccatattccgcacggtctggcaaacgccctgctgatttgtaacgttattcgctacaatgcgaacgacaacccgaccaagcagactgcattcagccagtatgaccgtccgcaggctcgccgtcgttatgctgaaattgccgaccacttgggtctgagcgcaccgggcgaccgtactgctgctaagatcgagaaactgctggcatggctggaaacgctgaaagctgaactgggtattccgaaatctatccgtgaagctggcgttcaggaagcagacttcctggcgaacgtggataaactgtctgaagatgcattcgatgaccagtgcaccggcgctaacccgcgttacccgctgatctccgagctgaaacagattctgctggatacctactacggtcgtgattatgtagaaggtgaaactgcagcgaagaaagaagctgctccggctaaagctgagaaaaaagcgaaaaaatccgcttaa

SEQ ID NO: 20350 - DNA, 1014 bp, Escherichia coli
atgaacgtaattgaaactgcaactgtgccgctcgcacaacaacaggctgacgcactgctgaacgtgaaagatttgcgtgtcacctttagtaccccggacggcgacgtcacggcggtcaatgatttgaatttttccctacgtgccggagaaacgctgggtattgtaggtgagtctggttcgggtaaatcgcaaactgcatttgcgttgatgggcctgttggctgccaacggacgtattggcggatcggcaaccttcaatgggcgtgaaatcctcaatttgccagagcatgaactcaataaactgcgcgctgaacaaatctcaatgatttttcaggacccaatgacttcgttgaatccctatatgcgcgtcggtgagcagttgatggaagtgctgatgctgcataagaacatgagcaaagctgaggcgtttgaagagtcggtgcggatgctcgatgcggtaaaaatgccggaagcgcgtaaacgcatgaaaatgtacccgcacgaattttctggcggcatgcgtcagcgagtcatgattgcgatggccttgttatgtcgacctaagctgctgattgcggatgaaccaacaactgcgctggacgtcaccgtacaggcgcagatcatgacgctattaaatgaactgaagcgggaatttaataccgccatcattatgatcacccacgatcttgtcgtggtggcggggatctgcgacaaagtgctggtaatgtacgccgggcgcacgatggaatatggcaacgcgcgcgatgtcttttatcaacccgttcatccttattctatcggtttgctcaacgcggtgccgcgtctcgatgcggaaggtgaaacaatgttgaccatcccgggtaatccgccaaacctgctgcgattaccgaaaggttgcccgttccagccacgttgtccgcatgcgatggaaatttgtagtagcgcaccgccgctggaagagtttacgcctggccgtctgcgtgcttgctttaaaccggtggaggaactgttatga

SEQ ID NO: 20351 - DNA, 720 bp, Escherichia coli
atgacccttgatttacctcgccgcttcccctggccgacgttactttcggtctgcattcatggtgctgttgtggcgggtctgctctatacctcggtacatcaggttattgaactacctgcgcctgcgcagccgatttctgtcacgatggttacgcctgctgatctcgaaccgccacaagccgttcagccgccaccggagccggtggtagagccagaaccggaacctgagccgatccccgaaccgccaaaagaagcaccggtggtcattgaaaagccgaagccgaaacctaagccaaaaccgaagccggtgaaaaaggtacaggagcagccaaaacgcgatgtcaaacccgtagagtcgcgtccggcatcaccgtttgaaaatacggcaccggcacgcctgacatcaagtacagcaacggctgcaaccagcaagccggttaccagtgtggcttcaggaccacgcgcattaagccgtaatcagccgcagtatccggcacgagcacaggcattgcgcattgaagggcaggttaaagttaaatttgacgttacgccggatggtcgcgtggataacgtacaaatcctctcagccaagcctgcgaacatgtttgagcgtgaggtgaaaaatgcgatgcgcagatggcgttatgagccgggtaagccaggcagtgggattgtggtgaatatcctgtttaaaattaacggcaccaccgaaattcagtaa

SEQ ID NO: 20352 - DNA, 1596 bp, Escherichia coli
atggctgacattctgctgctcgataatatcgactcttttacgtacaacctggcagatcagttgcgcagcaatgggcataacgtggtgatttaccgcaaccatattccggcgcaaaccttaattgaacgcctggcgaccatgagcaatccggtgctgatgctttctcctggccccggtgtgccgagcgaagccggttgtatgccggaactcctcacccgcttgcgtggcaagctgcccattattggcatttgcctcggacatcaggcgattgtcgaagcttacgggggctatgtcggtcaggcgggcgaaattctccacggtaaagcctccagcattgaacatgacggtcaggcgatgtttgccggattaacaaacccgctgccggtggcgcgttatcactcgctggttggcagtaacattccggccggtttaaccatcaacgcccattttaatggcatggtgatggcagtacgtcacgatgcggatcgcgtttgtggattccagttccatccggaatccattctcaccacccagggcgctcgcctgctggaacaaacgctggcctgggcgcagcagaaactagagccagccaacacgctgcaaccgattctggaaaaactgtatcaggcgcagacgcttagccaacaagaaagccaccagctgttttcagcggtggtgcgtggcgagctgaagccggaacaactggcggcggcgctggtgagcatgaaaattcgcggtgagcacccgaacgagatcgccggggcagcaaccgcgctactggaaaacgcagcgccgttcccgcgcccggattatctgtttgctgatatcgtcggtactggcggtgacggcagcaacagtatcaatatttctaccgccagtgcgtttgtcgccgcggcctgtgggctgaaagtggcgaaacacggcaaccgtagcgtctccagtaaatctggttcgtccgatctgctggcggcgttcggtattaatcttgatatgaacgccgataaatcgcgccaggcgctggatgagttaggtgtatgtttcctctttgcgccgaagtatcacaccggattccgccacgcgatgccggttcgccagcaactgaaaacccgcaccctgttcaatgtgctggggccattgattaacccggcgcatccgccgctggcgttaattggtgtttatagtccggaactggtgctgccgattgccgaaaccttgcgcgtgctggggtatcaacgcgcggcggtggtgcacagcggcgggatggatgaagtttcattacacgcgccgacaatcgttgccgaactgcatgacggcgaaattaaaagctatcagctcaccgcagaagactttggcctgacaccctaccaccaggagcaactggcaggcggaacaccggaagaaaaccgtgacattttaacacgtttgttacaaggtaaaggcgacgccgcccatgaagcagccgtcgctgcgaacgtcgccatgttaatgcgcctgcatggccatgaagatctgcaagccaatgcgcaaaccgttcttgaggtactgcgcagtggttccgcttacgacagagtcaccgcactggcggcacgagggtaa

SEQ ID NO: 20353 - DNA, 882 bp, Escherichia coli
ttgagcgacacgaattatgcagtgatttacgacctgcacagccataccacagcttccgatggctgcctgacgccagaagcattggtgcaccgtgcagtcgagatgcgcgtcggcaccctggcgatcaccgaccatgacaccacagctgcaatcgcgccagcaagagaggaaatttcacgttcgggactggcgttgaatcttattcccggcgtggaaatttccacggtctgggaaaatcatgaaattcatattgtcgggctgaatattgatattactcatccgctaatgtgtgagttcctcgcgcagcagacagaacggcgcaatcagcgggcgcagctgattgccgaaagacttgaaaaagcgcaaatacctggggcgctggaaggcgcacaacgactggcgcagggcggcgcagtgacgcgcggtcattttgcgcgtttccttgttgagtgcggcaaagccagttcaatggcggatgtctttaaaaagtatctggcgcgcgggaaaaccggatacgttccgccacagtggtgtacaatagaacaagctattgatgtcattcatcattctggcggtaaggcggtgctagctcatcctgggcggtacaatcttagtgctaaatggctgaaaagattggttgcgcattttgccgaacaccacggtgacgcgatggaagtcgcgcagtgccagcaatcgcccaatgaacgtacccagctggcggcccttgcgcgtcagcatcatttatgggcatcacaaggatctgattttcatcagccatgcccgtggatcgaactgggtcgtaaactctggctgcccgcaggcgttgaaggcgtctggcagctatgggaacagccgcagaacaccacagagagggaattatga

SEQ ID NO: 20354 - DNA, 759 bp, Escherichia coli
atgcattaccagccaaaacaagatttactcaatgatcgcattatcctggtgacgggagccagcgatggtattggtcgtgaagccgcgatgacgtatgcacgctatggtgcgacagtgattctgttgggccgtaatgaagaaaaattacgtcaggtagccagccacataaacgaagaaactgggcgtcagccacagtggtttattctcgatttgctgacctgcacgtccgaaaattgccaacaactggcacagcgcattgccgttaattatccgcgtctggatggtgttttgcataatgccggattgctcggcgatgtttgcccaatgagcgaacaaaatccgcaggtctggcaggacgtcatgcaggtcaacgttaatgccacctttatgctcacccaggcactgcttcctttattactcaaatcggacgccggttcactggtctttacttcatcaagcgttggacgtcagggacgagccaactggggtgcatatgcagcgtcgaaatttgccaccgaagggatgatgcaggtactggccgatgaatatcagcagcgcctgcgtgtcaactgcattaacccaggcggtacgcgcaccgcaatgcgtgccagcgccttcccgaccgaagatccacagaaacttaaaacacccgctgatatcatgccgctctacctctggctgatgggcgatgacagccgccgtaaaaccggcatgacctttgacgcccaaccgggccgtaaaccaggaatttcccaatga

SEQ ID NO: 20355 - DNA, 2598 bp, Escherichia coli
atgggtaaagctcttgtcatcgttgagtccccggcaaaagccaaaacgatcaacaagtatctgggtagtgactacgtggtgaaatccagcgtcggtcacatccgcgatttgccgaccagtggctcagctgccaaaaagagtgccgactctacctccaccaagacggctaaaaagcctaaaaaggatgaacgtggcgctctcgtcaaccgtatgggggttgacccgtggcacaattgggaggcgcactatgaagtgttgcctggtaaagagaaggtcgtctctgaactgaaacaactggctgaaaaagccgaccacatctatctcgcaaccgaccttgaccgcgaaggggaagccattgcatggcacctgcgggaagtgattgggggtgatgatgcgcgctatagccgagtggtgtttaacgaaattactaaaaacgcgatccgccaggcatttaacaaaccgggtgagctgaatattgatcgtgttaatgcccagcaggcgcgtcgctttatggaccgcgtggtggggtatatggtttcgccgctgctatggaaaaagatcgctcgtggcctgtctgccggtcgtgtgcagtcggtggcggttcgcctggtggtcgagcgtgagcgtgaaattaaagcgttcgtgccggaagagttctgggaagtcgatgccagcacgaccacgccatctggtgaagcgttggcgttacaggtgactcatcagaacgacaaaccgttccgtccggtcaacaaagaacaaactcaggctgcggtaagtctgctggaaaaagcgcgctacagcgtgctggaacgtgaagacaaaccgacaaccagtaaacctggcgctccttttattacctctacgctgcaacaagctgccagcacccgtcttggatttggcgtgaaaaaaaccatgatgatggcgcagcgtttgtatgaagcaggctatatcacttacatgcgtaccgactccactaacctgagtcaggacgcggtaaatatggttcgcggttatatcagcgataattttggtaagaaatatctgccggaaagtccgaatcagtacgccagcaaagaaaactcacaggaagcgcacgaagcgattcgtccttctgacgtcaatgtgatggcggaatcgctgaaggatatggaagcagatgcgcagaaactgtaccagttaatctggcgtcagttcgttgcctgccagatgaccccagcgaaatatgactccacgacgctgaccgttggtgcgggcgatttccgcctgaaagcacgcggtcgtattttgcgttttgatggctggacaaaagtgatgcctgcgttgcgtaaaggcgatgaagatcgcatcttaccagcagttaataaaggcgatgctctgacgctcgttgaacttacaccagcccagcactttaccaagccgccagcccgtttcagtgaagcatcgctggttaaagagctggaaaaacgcggtatcggtcgtccgtctacctatgcgtcgatcatttcgaccattcaggatcgtggctacgtgcgagtagaaaatcgtcgtttctatgcggaaaaaatgggcgaaatcgtcaccgatcgccttgaagaaaatttccgcgagttaatgaactacgactttaccgcgcagatggaaaacagcctcgaccaggtggcaaatcacgaagcagagtggaaagctgtactggatcacttcttctcggatttcacccagcagttagataaagctgaaaaagatccggaagagggtggtatgcgcccgaaccagatggttctgaccagcattgactgcccgacttgtggtcgcaaaatggggattcgcacagcgagcaccggggtattccttggctgttctggctatgcgctgccgccgaaagagcgttgcaaaaccaccattaacctggtgccggaaaacgaagtgctgaacgtgctggaaggcgaagatgctgaaaccaacgcgctgcgcgcaaaacgtcgttgcccgaaatgcggcacggcgatggacagctatctcatcgatccgaaacgtaagttgcatgtctgtggtaataacccaacctgcgacggttacgagatcgaagagggcgaattccgcattaaaggttatgacggcccgatcgttgagtgtgaaaaatgtggctctgaaatgcacctgaaaatggggcgtttcggtaaatacatggcctgcaccaacgaagagtgtaaaaacacacgtaagattttacgtaacggcgaagtggcaccaccgaaagaagatccggtgccattacctgagctgccgtgcgaaaaatcagatgcttatttcgtgctgcgtgacggtgctgccggtgtgttcctggctgccaacactttcccgaaatcgcgtgaaacgcgtgcgccactggtggaagagctttatcgcttccgcgaccgtctgccggaaaaactgcgttatctggccgatgcgccacagcaggatccggaaggtaataagaccatggttcgctttagccgtaaaaccaaacagcaatatgtctcttcggaaaaagacggaaaggcgactggctggtcagcattttatgttgatggcaaatgggttgaaggaaaaaaataa

SEQ ID NO: 20356 - DNA, 765 bp, Escherichia coli
atgcgttcgattgccagacgtaccgcagtgggagctgcactattgcttgtcatgccagtagccgtatggatttctggctggcgttggcaacctggagaacaaagttggctactaaaagcggctttttgggttactgaaactgtcacccagccctggggcgtcattacacatttgattttattcggctggtttctctggtgtctgcgttttcgcattaaggctgcctttgtattatttgccattctggcggccgcaatccttgtgggacaaggcgttaaatcctggatcaaagacaaagtccaggaaccacgaccttttgttatctggctggaaaaaacacatcatattccggttgatgagttctacactttaaagcgagcagaacgcggaaatctagtgaaagaacagttggctgaagagaaaaatatcccacaatatttgcgttcacactggcagaaagagacggggtttgcctttccttccggtcacacgatgtttgctgccagttgggcactgctggccgttggtttgctgtggccgcgtcggcgaacgttaaccattgctatcttgctggtctgggcaacgggagtcatgggaagccgcctgctgctcgggatgcattggccacgcgatctggtagtagctacgttgatttcgtgggcgctggtggcggtggcaacgtggcttgcgcaacgaatttgtgggccattaacaccacctgcggaagaaaatcgcgaaatagcgcaacgagaacaagaaagttaa

SEQ ID NO: 20357 - DNA, 1056 bp, Escherichia coli
gtgaaaagtgcaatgacaagctctccgctgcgggtcgcgataataggcgcaggccaggtggcggataaggttcatgcttcgtactactgcacccgcaacgatctggaactggtggctgtctgtgacagccgcctttcccaggcgcaggcgctggcagaaaaatacgggaatgcatccgtgtgggacgatccgcaggccatgctgctggcggtgaaacctgatgtggttagcgtctgctcacctaaccgttttcattacgaacataccctgatggcactggaagcgggctgccatgtgatgtgcgaaaaaccgcccgccatgacgccagaacaggcgcgggaaatgtgcgataccgcgcgcaaactgggcaaggtgctggcctacgactttcaccatcgttttgcgctcgatacgcaacagctgcgtgaacaggtgaccaacggcgttttgggagagatttacgttaccaccgcccgcgccctgcgtcgctgcggcgttcccggctggggtgtctttaccaataaagaactgcagggtggtggcccgctgatcgacatcggcattcatatgctggatgctgcgatgtatgtgctgggctttccggcggtgaaaagcgtgaatgcgcatagctttcaaaagatcggcacgcaaaagagctgtggtcaatttggtgagtgggatccggcaacttacagcgtcgaagattcgctgtttggcaccattgaatttcataacggcggcattctgtggctggaaacgtcatttgcactcaacatccgcgaacagtcgattatgaacgtcagcttttgtggtgataaagctggtgcgacgctgtttccagcacatatctacaccgataacaacggtgaattaatgacgctgatgcaacgggaaatagcagacgacaaccgccatttgcgcagcatggaagcctttatcaatcacgtacagggcaagcccgtgatgatagccgacgccgagcaggggtacatcatccagcaactggtggcggcgttgtatcaatccgcagaaacagggacgcgtgtggaattatga

SEQ ID NO: 20358 - DNA, 999 bp, Escherichia coli
atgtcccctactatttatgatattgccagggttgcaggcgtatcaaaatccaccgtatcacgcgtgctgaataagcaaactaatatctccccggaagcgcgcgaaaaagtgttacgggccattgaagaattacagtatcagccaaacaagctggcccgcgcgctgacctcttcgggttttgatgccattatggtgatttctacccgttcgaccaaaactacggcgggtaatccgtttttctctgaagttttgcatgccatcaccgccaaagctgaagaagaaggtttcgacgtgatattacaaacgtcgcacaatccggcagaagatctgcaaaaatgcgaaagcaaaattaagcagaaaatgattaaaggcattattatgctcagttcgccagcggatgagtcattttttgcccaactcgataaatatgatattccggtggtggtgattggcaaagttgaaggtcaatatgcccatgtttattctgtcgataccgataattttggcgacagcattgcgttgaccgatgcattaattgaaagtgggcatcaaaatattgcctgcctgcatgctccgcttgatgtccatgtttcggttgatcgcgttaatggttataagcagagcctggctgcgcataatattgcagtgcgtgatgaatggattgttgatggcggttatacccatgaaactgcattaaaagcagcacggcaattattaagccagtcaccgttgcctgaggcggtgtttgccactgacagcctgaaattaatgagcatttatcgtgcggcagcagagaaaaatattgctattccgcagcagttagcggtggtgggttatagcaatgaaacgctgtcatttattttaacgcctgcaccgggcggcatcgatgttccgacgcaggagttaggtcaacaaagctgcgagttattattccgcttaatttctggaaaaccgtcaccacagaatattaccgttgccacgcatatgacgctgaaataa

SEQ ID NO: 20359 - DNA, 1017 bp, Escherichia coli; identical to SEQ ID NO: 6870

SEQ ID NO: 20360 - DNA, 516 bp, Escherichia coli
atgctgagattacttgaagaaaaaattgccacgccactgggtccactgtgggtgatttgcgatgagcaatttcgcctgcgggcggttgaatgggaagagtacagcgaacgcatggtgcagctgctggacatccattatcgcaaagaaggctatgagcgcatttctgccaccaatccaggcggtttaagcgacaagcttcgtgaatattttgccggtaatcttagcattattgatacgcttcccactgctacgggggggacgccatttcagcgcgaagtctggaaaacactacgcactatcccctgcgggcaggtaatgcattacggccaactggctgagcaattgggccgtcctggcgcggcgcgtgccgttggtgcggcaaacggatcgaatcccatcagcatcgtcgtaccttgccatcgggttattggccgaaacggcaccatgaccggatatgcaggcggagttcagcgaaaagagtggttattgcgccatgaaggttatcttttgctgtaa

SEQ ID NO: 20361 - DNA, 1407 bp, Escherichia coli
atgaaaaaataccagcagcttgcagaacaattacgcgagcagattgcgtcgggtatctggcaacccggcgatcgtttgccttcgttgcgtgaccaggtggcgctttcaggcatgagctttatgactgtcagccatgcctatcagttgctcgaaagtcagggatatattatcgcacgaccgcagtcgggttattacgttgcgccacaggcaataaaaatgccgaaagcgccagtcattccagtcactcgagatgaagcagtcgatatcaacacttatatttttgatatgttgcaggccagtcgcgatccgtcggtcgttccgtttgcctcggcctttcccgacccgcgacttttccccctccaacaactaaaccgctcgctggcgcaggtaagcaaaaccgccacagcgatgagcgtgattgaaaacttaccgccaggaaacgcagaactgcgtcaggctattgctcgtcgctatgccttacagggcatcaccatttctcctgatgaaattgtcattactgccggggcgttagaggcattaaacctcagtttgcaagcggtaactgaaccgggcgattgggtgatagtagagaatccttgtttctacggtgcgttgcaggcgctggagcggctacggctgaaggcgttatcggtggcgacggatgttaaagaagggatagatcttcaggcgctggaactggcgttgcaggagtatccggtgaaagcgtgctggctgatgactaatagccagaatccactcggatttaccttaacgccgcaaaaaaaagcacaactggtggcgttgctcaatcagtacaacgtaacgctgattgaagatgacgtttacagcgaactttattttggacgggaaaaaccgctgcctgcgaaagcgtgggatcgccacgatggcgttttgcattgctcttcgttttcgaaatgtctggtgcctggttttcgtattggttgggtcgccgccggaaaacatgcacgtaaaattcaacgcttgcagttgatgagtacgctttccaccagctcaccgatgcaacttgcgctggtggattacctttccacgcgccgatacgacgcccatcttcgtcgcctgcgtcgccagcttgcggaacgtaaacaacgtgcctggcaggcactgctgcgttatctgcctgcggaagtgaaaattcatcataatgacagtggttactttctctggttggagctccccgagccgttagatgccggcgaattaagcctggcggcactgacgcatcatatcagtattgcgccgggtaaaatgttttctaccggtgaaaactggtcacgttttttccgttttaataccgcgtggcagtggggagagcgtgaagaacaggcggtaaaacaattaggcaaacttattcaagaacggctgtaa

SEQ ID NO: 20362 - DNA, 1131 bp, Escherichia coli
gtgttgcagaggggatgtgacggctgcaaacaaaaccaatcccgtgagcctgctactattgatggattcatgccaaaagcacaggagagcattatggggcaacaaaagcagcgtaatcgacgttgggttctggcctcgcgtccacatggcgcacctgttccggagaatttccgtcttgaagaagatgatgtcgccacaccgggtgaaggacaggtgttactgcgcacagtttatttgtccctggacccgtatatgcgtggacgtatgagcgatgagccatcttattcaccgcctgttgatattggcggcgtgatggtcggcggtacggtgagccgtgtcgtggagtcgaatcatcctgattatcagtctggcgactgggtgctgggctacagtggatggcaagactatgacatatccagtggtgatgatctggtgaaacttggcgatcatccgcaaaatccatcgtggtcgctgggtgtgctagggatgccaggctttaccgcttatatgggcctactggatatcggtcagcctaaagagggcgaaacgttggtggtagctgcggcgacaggaccagtgggggcgacggtggggcaaatcggcaaacttaaaggttgcagagtggtgggggtagccggtggcgcggaaaaatgccgccatgctaccgaggtgttaggcttcgatgtttgtcttgatcaccacgcggatgattttgccgaacaactggcgaaagcgtgcccaaaaggtattgatatctattatgaaaacgtgggcggtaaggtattcgatgcggtgctaccgttacttaatacatctgcgcgcattcccgtctgcggattagtgagcagctataacgctacagagctaccacccggtccggatcgtttacctctgttgatggctacagtgctgaaaaaacgtattcgcttgcaaggttttattatcgctcaggattatggtcaccgcatccatgagtttcagagggagatggggcaatgggtgaaagaggataaaatccactaccgcgaagaaattactgacggtttagagaatgcgccacagacgtttatcggcctgctgaagggtaaaaacttcggcaaagtggtgatccgcgtggcgggtgatgattaa

SEQ ID NO: 20363 - DNA, 2049 bp, Escherichia coli
atgtcgactcgcttaaccaccctcagccataccagtgaaggccaccgcgtgtcggtccactacggctatgacgataaaggccgcctgaccggcgaacgccagacggtggagaacccggagacgggggaactgctgtggcaccatgagaccggacatgcgtacaacgaacaggggctggcaaaccgcgtcacgccggacagtctgccgccggtggagtggctgacctacggcagcggctatcttgcgggcatgaagctgggcgggacgccgctgctggagttcacgcgcgaccgcctgcaccgtgagacggtgcgcagcttcggcagcatggcaggcagtaatgccgcatataaactgaccagcacatacacccccgcaggccagttacagagccagcacctgaacagcctggtgtatgaccgtgactacgggtggaatgacaacggcgacctggtgcgcatcagcggcccgcgacagacgcgggaatacggctacagcgccacgggcaggctggagagtgtgcgcaccctcgcaccagacctggacatccgcatcccgtatgccacggacccggcgggcaaccggctgccggacccggagctgcacccggacagtacactcacagtgtggccggataaccgcatcgcggaggatgcgcactatgtctaccgccacgatgaatacggcaggctgacggagaagacggaccgcatcccggcgggtgtgatacggacggacgacgagcggacccaccactaccactacgacagccagcaccgcctggtgttctacacgcggatacagcatggcgagccactggtcgagagccgctacctctacgacccgctgggacggcgaatggcaaaacgggtctggcggcgggagcgtgacctgacggggtggatgtcgctgtcgcgtaaaccggaggtgacgtggtatggctgggacggagacaggctgacgacggtgcagactgacaccacacgtatccagacggtatacgagccgggaagcttcacgccgctcatccgggtcgagacagagaacggcgagcgggaaaaagcgcagcggcgcagcctggcagagacgctccagcaggaagggagtgagaacggccacggcgtggtgttcccggctgaactggtgcggctgctggacaggctggaggaagaaatccgggcagaccgcgtgagcagtgaaagccgggcgtggcttgcgcagtgcgggctgacggtggagcaactggccagacaggtggagccggaatacacaccggcgcgaaaagttcatttttaccactgcgaccaccggggcctgccgctggcgctcatcagcgaagacggcaatacggcgtggcgcggggagtatgatgaatggggcaaccagcttaatgaggagaacccgcatcacctgcaccagccgtaccgtctgccagggcagcagcatgatgaggagtcggggctgtactataaccgtcaccggcactacgatccgttgcaggggcggtatatcaccccggacccgattgggttgagaggtggatggaatatgtatcagtatccgttgaatcccatacaagtgatagacccaatggggttagatgcgattgagaatatgacatcaggtggactaatttatgccgtatctggtgtacctggattgattgctgcaaacagcattactaacagtgcttaccagttcggttatgatatggatgctattgttggcggagctcataatggggccgccgatgcaatgagacattgttacttgatgtgtcgaatgactaagacatttggatcaacaatagctgacgtgataggtaaaaatcatgaggcggcaggggatagacaaggtcagccagctaaagaaagaatcatggatcttaaaaataacactgtcggtattgcttgtggcgatttttctgccaaatgtagcgatgcatgtattgaaaaatataacactgggcaactcttcgggttagatggtataaaagcagataatccaataaaagcaaagcaagggagttcagatgcttcaaattattag

SEQ ID NO: 20364 - DNA, 1041 bp, Escherichia coli
atgcagaacatcatccgaaaaggaggaactatgaaggctgcagttgttacgaaggatcatcatgttgacgttacgtataaaacactgcgctcactgaaacatggcgaagccctgctgaaaatggagtgttgtggtgtatgtcataccgatcttcatgttaagaatggcgattttggtgacaaaaccggcgtaattctgggccatgaaggcatcggtgtggtggcagaagtgggtccaggtgtcacctcattaaaaccaggcgatcgtgccagcgtggcgtggttctacgaaggatgcggtcattgcgaatactgtaacagtggtaacgaaacgctctgccgttcagttaaaaatgccggatacagcgttgatggcgggatggcggaagagtgcatcgtggtcgccgattacgcggtaaaagtgccagatggtctggactcggcggcggccagcagcattacctgtgcgggagtcaccacctacaaagccgttaagctgtcaaaaattcgtccagggcagtggattgctatctacggtcttggcggtctgggtaacctcgccctgcaatacgcgaagaatgtctttaacgccaaagtgatcgccattgatgtcaatgatgagcagttaaaactggcaaccgaaatgggcgcagatttagcgattaactcacacaccgaagacgccgccaaaattgtgcaggagaaaactggtggcgctcacgctgcggtggtaacagcggtagctaaagctgcgtttaactcggcagttgatgctgtccgtgcaggcggtcgtgttgtggctgtcggtctaccgccggagtctatgagcctggatatcccacgtcttgtgctggatggtattgaagtggtcggttcgctggtcggcacgcgccaggatttaactgaagccttccagtttgccgccgaaggtaaagtggtgccgaaagtcgccctgcgtccgttagcggacatcaacaccatctttactgagatggaagaaggcaaaatccgtggccgcatggtgattgatttccgtcactaa

SEQ ID NO: 20365 - DNA, 2796 bp, Escherichia coli
atggagataattatgagaaacctctgtttcttactgacgttagtggcaactctgttgctccccgggcggctgattgccgccgccttaccgcaggatgaaaagttaattaccgggcaactggacaatggcttgcgatatatgatttatccgcatgctcatccaaaggatcaggtaaatttatggctgcaaattcataccggttcattgcaggaagaagacaatgagctcggcgtggctcattttgtagaacatatgatgtttaacggcacaaaaacatggccgggtaataaagtcatcgaaacatttgagtcaatgggcctgcgttttggtcgcgatgttaatgcctataccagctatgacgaaacggtgtatcaggtgagtttgccgactacgcagaaacaaaatctgcaacaagtgatggcaatcttcagtgaatggagtaatgccgcaacctttgaaaaactcgaagtagacgctgaacgtggcgtaattactgaggaatggcgtgcccatcaggatgcgaaatggcgcacctctcaggcgcgccgccctttcctgctggcaaatacccgtaatttagaccgtgaacctatcggcctgatggatactgtcgccacggtcacaccggcacaattgcgccaattttatcaacgctggtatcaaccaaataatatgacctttatcgtggtcggcgatatcgacagtaaagaagcgctggcgctgataaaggataatttaagtaagcttccggctaacaaagcagctgaaaatcgcgtctggccgacaaaagccgaaaaccacctgcgctttaatatcattaatgataaagaaaaccgggtgaacggcatcgcactctattatcgcctgccaatggtacaagtgaacgatgagcaaagctttatcgaacaagctgaatggagcatgttagttcagctgttcaatcaacgtctgcaggaacgcatacagtcgggcgagttgaagactatttctggcggcactgcgcgcagcgttaaaattgcacccgattatcagtcgctgtttttccgtgtaaatgcacgagacgataatatgcaggatgctgcgaatgcattaatggcagagttggcaaccattgatcagcatggtttttctgctgaagaactcgatgatgtcaaatctacccgcctcacctggctgaaaaatgcggttgatcagcaagctgaacgtgatttacgtatgctgaccagtcgcctggcatccagctcattaaataatacgccgttcttgtcgccggaagagacatatcaactttcgaaacgtctgtggcagcaaattaccgtgcaaagtctggcggaaaaatggcagcagttaagaaagaaccaggacgcattttgggagcaaatggtaaacaatgaggttgccgccaaaaaagcattgtctcctgcggctatcctggcgctggaaaaggagtacgccaacaaaaagctggcggcttacgtcttcccaggcagaaatttatcgttaacagtagacgcagacccacaggcggaaattagcagcaaagaaacgctggcggagaatctgacatcattaacactttccaatggtgccagggttattctggcaaaatccgcgggtgaagagcaaaagctacaaattattgccgtatcgaataaaggcgatttaagtttccctgcgcagcaaaaatcacttatcgcgctggcaaataaagcagttagcggaagcggcgttggcgaactctcctcttccagcctgaaacgctggagtgcggaaaattcggtaaccatgagcagtaaagtcagtggcatgaatacgttgctctccgttagcgcgcggactaataaccctgaacctggttttcagttgattaaccagcgaatcacccacagcacgattaacgataatatttgggcatcgctacaaaatgctcaaattcaggcgttgaaaacgctcgaccagcgtccagcggagaaattcgcccagcagatgtatgagacgcgctatgctgatgaccgcacgaaattactgcaagaaaatcagattgcacagtttactgccgcagatgcgctggctgccgatcgccaattgttttcatctccagcggatatcacgtttgtcattgtcggtaatgtcgcagaagacaaactcgtggcgttaattacgcgttacttaggatcaatcaaacactctgattcgccattagccgcaggtaaaccattaactcgcgcgacggacaacgcatcggttactgtaaaagaacaaaatgaacctgtggcacaggtttcacagtggaagcgttatgattcccggacacctgttaatctgccgacgcgtatggcgctcgatgcttttaacgtcgcactggcaaaagatctacgtgttaatattcgtgaacaggcatctggagcatacagcgtttcttctcgcctctcggttgatcctcaggccaaagatatcagtcatttgctggcttttacttgtcaaccagaacgacatgatgaactgttaacgttagcgaatgaagtgatggttaagcgtctggctaaagggatcagtgagcaagaactgaatgaataccagcaaaacgttcagcgcagcctcgatatccaacagcgtagcgttcaacaattagcgaacactattgtaaatagtcttattcaatatgacgatcctgcagcatggactgagcaggagcaattgttgaaacaaatgacggtagagaatgttaacactgccgttaaacaatatctttctcatccggtaaatacttataccggagtattattgccaaaataa

SEQ ID NO: 20366 - DNA, 1716 bp, Escherichia coli
ttggaattaagtacaataagaagaggaacatttatgaagtctgcattaaagaaaagtgtcgtaagtacctcgatatctttgatactggcatctggtatggctgcatttgctgctcatgcggcagatgatgtaaagctgaaagcaaccaaaacaaacgttgctttctcagactttacgccgacagaatacagtaccaaaggaaagccaaatattatcgtactgaccatggatgatcttggttatggacaacttccttttgataagggatcttttgacccaaaaacaatggaaaatcgtgaagttgtcgatacctacaaaatagggatagataaagccattgaagctgcacaaaaatcaacgccgacgctcctttcattaatggatgaaggcgtacgttttactaacggctatgtggcacacggtgtttccggcccctcccgcgccgcaataatgaccggtcgagctcccgcccgctttggtgtctattccaataccgatgctcaggatggtattccgctaacagaaactttcttgcctgaattattccagaatcatggttattacactgcagcagtaggtaaatggcacttgtcaaaaatcagtaatgtgccggtaccggaagataaacaaacgcgtgactatcatgacaacttcaccacattttctgcggaagaatggcaacctcaaaaccgtggctttgattactttatgggattccacgctgcaggaacggcatattacaactccccttcactgttcaaaaatcgtgaacgtgtccccgcaaaaggttatatcagcgatcagttaaccgatgaggcaattggcgttgttgatcgtgccaaaacacttgaccagccttttatgctttacctggcttataatgctccgcacctgccaaatgataatcctgcaccggatcaatatcagaagcaatttaataccggtagtcaaacagcagataactactacgcttccgtttattctgttgatcagggtgtaaaacgcattctcgaacaactgaagaaaaacggacagtatgacaatacaattattctctttacctccgataatggtgcggttatcgatggtcctctgccgctgaacggggcgcaaaaaggctataagagtcagacctatcctggcggtactcacaccccaatgtttatgtggtggaaaggaaaacttcaacccggtaattatgacaagctgatttccgcaatggatttctacccgacagctcttgatgcagccgatatcagcattccaaaagaccttaagctggatggcgtttccttgctgccctggttgcaagataagaaacaaggcgagccacataaaaatctgacctggataacctcttattctcactggtttgacgaggaaaatattccattctgggataattaccacaaatttgttcgccatcagtcagacgattacccgcataaccccaacactgaggacttaagccaattctcttatacggtgagaaataacgattattcgcttgtctatacagtagaaaacaatcagttaggtctctacaaactgacggatctacagcaaaaagataaccttgccgccgccaatccgcaggtcgttaaagagatgcaaggcgtggtaagagagtttatcgacagcagccagccaccgcttagcgaggtaaatcaggagaagtttaacaatatcaagaaagcactaagcgaagcgaaataa

SEQ ID NO: 20367 - DNA, 762 bp, Escherichia coli
atgtcgctcgtttgttctgttatatttattcatcatgccttcaacgctaacattttagataaagattacgccttctctgacggcgagatcctgatggtagataacgctgttcgtacgcattttgaaccttatgagcggcattttaaagagatcggatttactgaaaataccattaaaaaatatctacaatgcactaacatccagacagtgacggtgcctgttcctgcgaagtttttacgtgcttcaaatgtaccgactggattgcttaatgaaatgattgcttatctcaactcggaagaacgcaatcatcataatttttcagaacttttgcttttttcttgcctgtctatttttgccgcatgcaaaggtttcattacactattaactaacggtgtgctatccgtttctgggaaagtgagaaatattgtcaacatgaagccggcgcacccatggaagctgaaagatatttgtgactgcctgtacatcagtgaaagcctgttgaagaaaaaacttaagcaagagcaaacgacattctcacagattcttttagatgcaagaatgcagcacgcaaaaaatttgatacgcgtagaaggttcagtcaataaaattgccgaacaatgtggttatgccagtacatcttattttatttatgcgttccgcaaacatttcggcaacagtccgaagagagtttctaaggagtaccgttgtcaaagtcacacgggtatgaatacgggcaacacgatgaatgctttagctatttga

SEQ ID NO: 20368 - DNA, 954 bp, Escherichia coli
atgacaatcaacgattcggcaatttcagaacagggaatgtgtgaagaagaacaggtcgcgcggatcgcgtggttttactatcacgacgggctgacccagagcgagatcagcgatcgtctcggcctgacacgtttgaaagtgtcgcgattgctggagaaagggcatcagtccggcattattcgcgtacagattaattctcgctttgaaggctgtctggaatatgaaactcaattacgtcgtcagttttcgctgcaacatgtccgggtgatccctgggcttgcggatgctgatgtcggtgggcgactggggataggcgcggcgcatatgttgatgagtttacttcaaccacaacagatgctggcgattggttttggcgaggcaaccatgaatacgctgcaacgcttaagtggttttatttcgtcacagcaaattcgcctggtcacgctctccggtggcgtcggttcttatatgacgggaatcgggcagcttaacgcggcgtgcagtgtgaatattattccggctccgttgcgggcatcctccgctgacattgcccgtacgctaaaaaatgaaaattgcgtcaaagatgttctgttagccgcgcaagcagcggatgtggcgattgtcggcattggtgctgtgagtcaacaggacgatgcgacaatcattcgctccggttatatcagccagggcgaacagttaatgattggccgaaaaggggcggttggcgacattttaggctacttttttgatgcaaaaggtgacgttgtcacgaatatcaaaatacataacgaactgattggcttacctttaagcgcgctgaagaccatacccgtccgggttggcgtggcagggggagaaaataaagccgaagcaattgccgctgcaatgaaaggcggttatatcaacgcactggttaccgatcaggacacagcagcggcgattttacgtagttaa

SEQ ID NO: 20369 - DNA, 966 bp, Escherichia coli
gtgatcgtaatcacgtttaatagggcgacttttccacgcctgaagataaccatgattgttcgtccacaacaacactggctgcgccgtatttttgtctggcacggctcagtattatccaagatatcctcgcgcttactactcaattttctcttttctatcgctgttattttcatgctgccctggtacacgcatctgggcatcaaattcaccctcgcaccgttcagcattctcggtgtcgccatcgccatttttcttggttttcgtaataatgccgggtacgcccgttacgttgaagcgcgaaaactttgggggcagttgatgattgcctcacggtcgttactgcgcgaggtaaaaacgacattgccggattcggcaagtgtaagggagtttgcccggctgcaaatcgctttcgcccactgtttacgcatgacattacgcaaacagccacaggcggaagtgctggctcattatctcaagactgaagatcttcagcgtgtactggcttcgaactctccagctaaccgtatcttgttaataatgggagaatggttggcggttcagcgccgcaatggacagctttcagatatcctgtttattagcctcaacgatcggcttaatgatatttcagcggtcctggcaggatgcgagcgcattgcctatacgccaattccctttgcctacaccctgattttgcatcgtaccgtttatctgttttgtatcatgctgccgttcgcgctggtcgtggacctgcattacatgacgccttttatctctgtgctgatttcctacacttttatttcgctggattgtctggcggaagaactggaagatccgttcggtactgaaaacaatgatttaccactggatgccatctgcaacgctattgaaattgacctgttacagatgaacgatgaagccgaaattccagcaaaaattcttcccgatcgtcattaccagctgacgtga

SEQ ID NO: 20370 - DNA, 687 bp, Escherichia coli
atgaccgtcgaaacgcaacttaatcccacacagcctgtcaatcagcagatttatcgtattcttcgtcgcgacattgtccattgcctgattgctccaggcacaccgttgtcggaaaaagaagtttctgttcgtttcaatgtgtcacgccagccggttcgtgaagcctttattaaactggcggaaaacggcctgattcaaattcgtccgcaacgtggcagctacgtcaacaaaatttccatggcccaggtgcgcaacggcagttttatccgtcaggccattgagtgcgcggtggcgcgtcgggcggcgagcatgattaccgaaagccagtgctatcaactggaacaaaatcttcaccagcaacgcattgccattgagcgcaagcaactggatgatttttttgaacttgatgacaacttccatcaactcctgacgcagattgccgactgtcaactggcgtgggataccattgagaacctgaaagcgaccgttgatcgcgtgcgctatatgagtttcgaccacgtttctccaccagaaatgctgttacgccagcatcttgatattttctctgccctgcaaaaacgtgatggcgatgcggtagaacgtgcaatgacgcaacatttgcaggaaatcagcgaatccgtgcgccagatccgccaggaaaacagcgactggtttagcgaagagtaa

SEQ ID NO: 20371 - DNA, 963 bp, Escherichia coli
gtgaatataaccgcgctgacagacaatacgcagggggcagcaggtcttgagttatacgaggtgtataacaacggatatccaacagcgtatggaaatatcattcacctgaaagggatgacagccgttggcgaaggtgagttactcatcggctggagtggtacaagcggtgctcatgctccggcatttattcgttcacgacgggatacgaccgacgcaaactggtcgccgtgggcgcagctttacacctcggctcatcctcctgcagagttttatccagtcggtgcaccaatcccgtggccatcagataccgttccgtctggttatgccctgatgcaggggcagacttttgacaaatctgcatacccgaaacttgcagttgcttatccgtcaggcgtgatccctgatatgcgtggctggacgattaagggcaagcccgccagtggtcgggccgtattatctcaggaacaggacggcattaaatcgcacacccacagcgccagcgcatccagtacggatttggggacggaaaccacatcgtcgtttgattacggaaccaaatccacgaataacaccggggcgcatacccatagtattagcgggaccgcaaatagtgccggtgcgcaccaacacaagagttccggtgcatttggtggcacgaacacgagcattttccctaatggttataccgcgatttcaaatctaagcgcggggattatgagcacaacaagcggtagtggccagactcgtaatgcagggaagacatcatcagatggtgctcatacccactcgctgtccggcactgctgcaagcgcaggcgcgcatgcacatactgtcggtattggtgctcatacgcactccgttgcgattggttcacatggacacaccatcaccgttaacgctgctggtaacgcggaaaacaccgtcaaaaacatcgcatttaactatattgtgaggcttgcataa

SEQ ID NO: 20372 - DNA, 426 bp, Escherichia coli
atggaaggtttatctatggatcaggtagtcatttttaaacaaatatttgataaagttcgaaacgatttaaactatcaatggttttattctgagctaaaacgtcacaatgtctcacattacatttactatttagccacagagaatgttcatattgtattaaaaaatgataatacagtgttattaaagggcctaaaaaacattgtgtctgtcaaattttcaaaggataggcatcttatagaaacgacctctaataagctgaaatccagagagatcacatttcaggaatacagaagaaaccttgctaaagcaggagtttttcggtgggttacaaatatccacgaacaaaaaagatattactatacctttgataattcattactatttactgaaagcatccagaaaactacacagatcttaccacgctaa

SEQ ID NO: 20373 - DNA, 747 bp, Escherichia coli
atgattgagaatcatctctactctctggtgactgttgtgaaatacaaattactaccatgcttactcgcgatattcctcacaggatgtgaccgcacagaggtaacactttcatttacccctgagatggccagtttctctaatgaattcgattttgatccgctgcgtggtccggtaaaagatttcactcagacattaatggatgagcaaggtgaagtgacgaaacgtgtttctgggactttgtcggaagaaggctgttttgattcactcgaattactggatctggaaaataataccgtggtcgctctggtactggacgccaattattaccgtgatgccgagacgctggagaagagagtacgtttacagggaaaatgccagctagcagaattaccttctgccggggtgagttgggaaaccgatgataatggcttcgtgattaaagccagcagcaaacaaatgcagatggaatatcgctatgatgatcagggttatccgctgggtaaaaccacgaaaagtaacgacaaaacattatctgtcagcgccacgccatcaacggatccgatcaaaaaattagattacacagcggttactttactgaataatcaacgggttggtaatgtaaaacagagctgtgaatatgacagtcacgctaatccggtggactgtcagctaatcattgttgatgaaggagtaaaacccgccgtcgaacgggtttacaccatcaaaaatacgatcgattattattaa

SEQ ID NO: 20374 - DNA, 1254 bp, Escherichia coli
gtgagccgtactacaactgttgatggcgctccggcaagcgacactgacaagcaaagcatttctcagccaaatcaatttattaaacgcggtacgccgcaatttatgcgcgtcaccctggcgctgttctctgccggactggcaacatttgcacttctctattgtgtgcagcctatccttccggtgctttcgcaggagtttggcttaacccccgcgaacagtagtatttcactgtccatttccacggcgatgttggctattggtttgctgtttactggcccgctatccgatgccattggtcgcaaaccagtgatggtcacggcgctactgttggcctccatttgtacgttactttcgacaatgatgaccagctggcacggcattttgattatgcgcgccttgattgggctttcgttaagtggcgtggcagctgttggcatgacttatcttagcgaggaaatccatcccagtttcgtggccttttcaatggggttgtatatcagcggcaactcaattggcggcatgagcggacgcttaattagcggtgtcttcacggactttttcaactggcgaattgctctggcggcaatcggttgtttcgcgctggcctcggcgttgatgttctggaaaatcctccctgaatcacgccattttcgcccgacttcgctgcgccctaagacgttgtttatcaactttcgtctgcactggcgtgaccggggattaccgttattgttcgcagaaggctttttgctgatggggtcgttcgtcacgctgtttaattacatcggctatcggttgatgctctccccctggcatgtcagtcaggccgtggttggcttattatcgctggcttatttgaccggtacatggagctcacccaaagccggaaccatgaccacccgctatgggcgtggtccagtgatgttgttttcgacgggggttatgctgtttggtttactgatgaccttattcagctcgctgtggctgatctttgccggaatgttactcttctcagcaggattcttcgcagcccactcagtagccagcagctggatcggcccccgcgcaaaacgcgctaaaggccaggcctcctcgctgtatctgttcagttactatctggggtcgagtattgccgggacgctgggtggtgttttctggcataactatggctggaacggcgtcggcgcatttattgctctgatgctggtcattgctctgctggtcgggacgcgtttgcatcgtcgtctgcacgcctga

SEQ ID NO: 20375 - DNA, 1533 bp, Escherichia coli
atgcgaattggcataccaagagaacggttaaccaatgaaacccgtgttgcagcaacgccaaaaacagtggaacagctgctgaaactgggttttaccgtcgcggtagagagcggcgcgggtcaactggcaagttttgacgataaagcgtttgtgcaagcgggcgctgaaattgtagaagggaatagcgtctggcagtcagagatcattctgaaggtcaatgcgccgttagatgatgaaattgcgttactgaatcctgggacaacgctggtgagttttatctggcctgcgcagaatccggaattaatgcaaaaacttgcggaacgtaacgtgaccgtgatggcgatggactctgtgccgcgtatctcacgcgcacaatcgctggacgcactaagctcgatggcgaacatcgccggttatcgcgccattgttgaagcggcacatgaatttgggcgcttctttaccgggcaaattactgcggccgggaaagtgccaccggcaaaagtgatggtgattggtgcgggtgttgcaggtctggccgccattggcgcagcaaacagtctcggcgcgattgtgcgtgcattcgacacccgcccggaagtgaaagaacaagttcaaagtatgggcgcggaattcctcgagctggattttaaagaggaagctggcagcggcgatggctatgccaaagtgatgtcggacgcgttcatcaaagcggaaatggaactctttgccgcccaggcaaaagaggtcgatatcattgtcaccaccgcgcttattccaggcaaaccagcgccgaagctaattacccgtgaaatggttgactccatgaaggcgggcagtgtgattgtcgacctggcagcccaaaacggcggcaactgtgaatacaccgtgccgggtgaaatcttcactacggaaaatggtgtcaaagtgattggttataccgatcttccgggccgtctgccgacgcaatcctcacagctttacggcacaaacctcgttaatctgctgaaactgttgtgcaaagagaaagacggcaatatcactgttgattttgatgatgtggtgattcgcggcgtgaccgtgatccgtgcgggcgaaattacctggccggcaccgccgattcaggtatcagctcagccgcaggcggcacaaaaagcggcaccggaagtgaaaactgaggaaaaatgtacctgctcaccgtggcgtaaatacgcgttgatggcgctggcaatcattctttttggctggatggcaagcgttgcgccgaaagaattccttgggcacttcaccgttttcgcgctggcctgcgttgtcggttattacgtggtgtggaatgtatcgcacgcgctgcatacaccgttgatgtcggtcaccaacgcgatttcagggattattgttgtcggagcactgttgcagattggccagggcggctgggttagcttccttagttttatcgcggtgcttatagccagcattaatattttcggtggcttcaccgtgactcagcgcatgctgaaaatgttccgcaaaaattaa

SEQ ID NO: 20376 - DNA, 1275 bp, Escherichia coli
atggcaagcagtaacttgattaaacaattgcaagagcgggggctggtagcccaggtgacggacgaggaagcgttagcagagcgactggcgcaaggcccgatcgcgctctattgcggcttcgatcctaccgctgacagcttgcatttggggcatcttgttccattgttatgcctgaaacgcttccagcaggcgggccacaagccggttgcgctggtaggcggcgcgacgggtctgattggcgacccgagcttcaaagctgccgagcgtaagctgaacaccgaagaaactgttcaggagtgggtggacaaaatccgtaagcaggttgccccgttcctcgatttcgactgtggagaaaactctgctatcgcggcgaacaactatgactggttcggcaatatgaatgtgctgaccttcctgcgcgatattggcaaacacttctccgttaaccagatgatcaacaaagaagcggttaagcagcgtctcaaccgtgaagatcaggggatttcgttcactgagttttcctacaacctgttgcagggttatgacttcgcctgtctgaacaaacagtacggtgtggtgctgcaaattggtggttctgaccagtggggtaacatcacttctggtatcgacctgacccgtcgtctgcatcagaatcaggtgtttggcctgaccgttccgctgatcactaaagcagatggcaccaaatttggtaaaactgaaggcggcgcagtctggttggatccgaagaaaaccagcccgtacaaattctaccagttctggatcaacactgcggatgccgacgtttaccgcttcctgaagttcttcacctttatgagcattgaagagatcaacgccctggaagaagaagataaaaacagcggtaaagcaccgcgcgcccagtatgtactggcggagcaggtgactcgtctggttcacggtgaagaaggtttacaggcggcaaaacgtattaccgaatgcctgttcagcggttctttgagtgcgctgagtgaagcggacttcgaacagctggcgcaggacggcgtaccgatggttgagatggaaaagggcgcagacctgatgcaggcactggtcgattctgaactgcaaccttcccgtggtcaggcacgtaaaactatcgcctccaatgccatcaccattaacggtgaaaaacagtccgatcctgaatacttctttaaagaagaagatcgtctgtttggtcgttttaccttactgcgtcgcggtaaaaagaattactgtctgatttgctggaaataa

SEQ ID NO: 20377 - DNA, 600 bp, Escherichia coli
atgaacaaacacaccgaacatgatactcgcgaacatctcctggcgacgggcgagcaactttgcctgcaacgtggattcaccgggatggggctaagcgaattactaaaaaccgctgaagtgccgaaagggtccttctatcactactttcgctctaaagaagcgtttggcgttgccatgcttgagcgtcattacgccgcatatcaccagcgactgactgagttgctgcaatccggcgaaggtaactaccgcgaccgcatactggcttattaccagcaaacactgaaccagttttgccaacatggaaccatcagtggttgcctgacagtaaaactctctgccgaagtgtgcgatctgtcagaagatatgcgcagcgcgatggataaaggtgctcgcggcgtgatcgccctgctctctcaggcgctggaaaatggccgtgagaaccattgtttaaccttttgtggcgaaccgctgcaacaggcacaagtgctttacgcactgtggcttggcgcgaatctgcaggccaaaatttcgcgcagtttcgagccactggaaaacgcgctggcccatgtaaaaaacattattgcgacgcctgccgtttag

SEQ ID NO: 20378 - DNA, 642 bp, Escherichia coli
atgtttacggggattgtacagggcaccgcaaaactggtgtcgattgacgagaaaccaaattttcgtacgcatgtggtggagttacccgaccacatgctggacggcctggaaaccggtgcttccgtggcgcataacggttgctgcctgaccgtgacggaaattaacggcaaccatgtcagttttgacctgatgaaagaaacgttacgcattaccaatcttggcgatttaaaagtgggggattgggtaaacgttgagcgtgcggcgaaattcagtgatgaaattggcggacacttaatgtcaggtcatattatgaccactgctgaagtggcgaaaatattaacctcagaaaataatcgccagatctggtttaaagtccaggatagtcagttgatgaaatatattctgtacaaaggatttattggcatcgacggtattagcctgaccgtcggcgaagtcacgccaacgcgtttttgcgtccatttaattccggaaacactggaacgcacgactcttgggaagaaaaaacttggcgcacgcgtcaacattgaaatcgatccacaaactcaggcagtggtagatacggtagaacgtgtgctggcggcacgagaaaatgccatgaatcaaccaggcacagaagcctga

SEQ ID NO: 20379 - DNA, 1413 bp, Escherichia coli
atgaaaaagaccaaaattgtttgcaccatcggaccgaaaaccgaatctgaagagatgttagctaaaatgctggacgctggcatgaacgttatgcgtctgaacttctctcatggtgactatgcagaacacggtcagcgcattcagaatctgcgcaacgtgatgagcaaaactggtaaaaccgccgctatcctgcttgataccaaaggtccggaaatccgcaccatgaaactggaaggcggtaacgacgtttctctgaaagctggtcagacctttactttcaccactgataaatctgttatcggcaacagcgaaatggttgcggtaacgtatgaaggtttcactactgacctgtctgttggcaacaccgtactggttgacgatggtctgatcggtatggaagttaccgccattgaaggtaacaaagttatctgtaaagtgctgaacaacggtgacctgggcgaaaacaaaggtgtgaacctgcctggcgtttccattgctctgccagcactggctgaaaaagacaaacaggacctgatctttggttgcgaacaaggcgtagactttgttgctgcttcctttattcgtaagcgttctgacgttatcgaaatccgtgagcacctgaaagcgcacggcggcgaaaacatccacatcatctccaaaatcgaaaaccaggaaggcctcaacaacttcgacgaaatcctcgaagcctctgacggcatcatggttgcgcgtggcgacctgggtgtagaaatcccggtagaagaagttatcttcgcccagaagatgatgatcgaaaaatgtatccgtgcacgtaaagtcgttatcactgcgacccagatgctggattccatgatcaaaaacccacgcccgactcgcgcagaagccggtgacgttgcaaacgccatcctcgacggtactgacgcagtgatgctgtctggtgaatccgcaaaaggtaaatacccgctggaagcggtttctatcatggcgaccatctgcgaacgtaccgaccgcgtgatgaacagccgtctcgagttcaacaatgacaaccgtaaactgcgcattaccgaagcggtatgccgtggtgccgttgaaactgctgaaaaactggatgctccgctgatcgtggttgctactcagggcggtaaatctgctcgcgcagtacgtaaatacttcccggatgccaccatcctggcactgaccaccaacgaaaaaacggctcatcagttggtactgagcaaaggcgttgtgccgcagcttgttaaagagatcacttctactgatgatttctaccgtctgggtaaagaactggctctgcagagcggtctggcacacaaaggtgacgttgtagttatggtttctggtgcactggtaccgagcggcactactaacaccgcatctgttcacgtcctgtaa

SEQ ID NO: 20380 - DNA, 747 bp, Escherichia coli
atgttaagtattaaagatttacacgtcagcgtggaagataaagctatcctgcgcggattaagcctcgacgttcatcccggcgaagttcacgccattatggggccaaacggttcgggcaaaagtaccttatcggcaacgcttgccgggcgagaagattatgaagtgacgggcggcacggttgagttcaaaggcaaagatttgcttgcgctgtcgccggaagatcgcgcgggcgaaggcatctttatggccttccagtatccggtggagattccaggtgtcagtaaccagtttttcctgcaaacggcacttaatgcggtgcgcagctatcgcggccaggaaacgctcgaccgctttgattttcaggatttgatggaagagaaaatcgctctcctgaagatgccggaagatttattaacccgttcggtaaacgttggtttttccggcggcgagaaaaagcgcaacgatattttgcaaatggcggtgctggaaccggagttatgcattcttgatgagtcggactccgggctggatattgacgcattaaaagtggtcgccgatggcgtgaactcgctgcgtgatggcaagcgctcattcatcattgttacgcactaccaacgcattctcgactacatcaagcctgattacgttcatgtgctatatcagggacgaattgtgaaatccggcgatttcacgttggtcaaacaactggaggagcagggttatggctggcttaccgaacagcagtaa

SEQ ID NO: 20381 - DNA, 867 bp, Escherichia coli
atggatgttaccgcaaaatacgaattgattgggttgatggcctatcctatccgccacagtttatcgcccgaaatgcagaataaagccttagaaaaagcgggattgccatttacctatatggccttcgaagtggataacgatagctttcctggagcaattgaaggattaaaagccctcaaaatgcgcggaactggtgtatcgatgccgaacaaacaactggcgtgtgaatatgttgatgaattaacaccagctgccaaactggtgggggccatcaacaccatcgttaatgatgatggctatctgcgtggctataacaccgacggcacgggccatattcgcgccattaaagagagcggttttgatatcaaaggcaaaacgatggtgctgttaggggccggtggtgcctcaacggcaattggcgcgcagggggcaattgaaggtttaaaagaaattaaactctttaaccgtcgggatgagttcttcgataaagccctcgccttcgcgcagcgggttaatgaaaacaccgattgtgtcgtcacggtcaccgatctcgccgatcagcaagcctttgctgaagccctggcttccgccgacattttaaccaatggcacaaaagtgggtatgaaaccccttgagaatgaatcattggttaatgatatcagtctgttacatccgggacttctggtcactgaatgcgtgtataacccgcatatgacgaagttattgcagcaggcgcaacaagctggttgcaaaacgattgatggatacggcatgttgttgtggcaaggggctgaacagttcacattatggactggcaaagatttccctctggaatatgttaaacaggtcatggggttcggtgcctga

SEQ ID NO: 20382 - DNA, 759 bp, Escherichia coli
atgaaaaccgtaactgtaaaagatctcgtcattggtacgggcgcacctaaaatcatcgtctcgctgatggcgaaagatatcgccagcgtgaaatccgaagctctcgcctatcgtgaagcggactttgatattctggaatggcgtgtggaccactatgccgacctctccaatgtggagtctgtcatggcggcagcaaaaattctccgtgagaccatgccagaaaaaccgctgctgtttaccttccgcagtgccaaagaaggcggcgagcaggcgatttccaccgaggcttatattgcactcaatcgtgcagccatcgacagcggcctggttgatatgatcgatctggagttatttaccggtgatgatcaggttaaagaaaccgtcgcctacgcccacgcgcatgatgtgaaagtagtcatgtccaaccatgacttccataaaacgccggaagccgaagaaatcattgcccgtctgcgcaaaatgcaatccttcgacgccgatattcctaagattgcgctgatgccgcaaagtaccagcgatgtgctgacgttgcttgccgcgaccctggagatgcaggagcagtatgccgatcgtccaattatcacgatgtcgatggcaaaaactggcgtaatttctcgtctggctggtgaagtatttggctcggcggcaacttttggtgcggtaaaaaaagcgtctgcgccagggcaaatctcggtaaatgatttgcgcacggtattaactattttacaccaggcataa

SEQ ID NO: 20383 - DNA, 1290 bp, Escherichia coli
atgtcggatgacaaatttgatgccattgtggtcggtgcgggcgttgctggtagcgttgccgcactggtcatggcacgagccgggctggatgtcctggtgatagaacgcggcgacagtgccggatgtaaaaacatgaccggcgggcgtctttatgcccacacacttgaagcaatcattccaggctttgcagtatcagcgccggtagaacgcaaggtcacacgcgagaaaatctccttcttaaccgaagaaagcgccgttaccctcgattttcaccgcgagcagccagatgttccgcaacacgcatcttataccgtattgcgtaatcgtctggacccgtggttgatggaacaagccgagcaggcgggcgcgcagtttatcccaggcgttcgcgtcgacgcgctggttcgtgaaggaaacaaggtcactggcgtgcaggctggggatgatattctcgaagcgaatgtggtgattctggctgatggcgttaactcgatgcttggccgctcgctgggaatggttcccgcttccgatccgcatcattacgctgttggtgttaaagaggttattggcctcacaccagaacagatcaacgatcgctttaatattacgggcgaggaaggtgccgcctggctgtttgccggttccccttctgacggcctgatgggcgggggatttctctataccaacaaggattccatatccttggggctggtttgtggattgggtgatatcgcccatgcgcaaaaaagcgtgccgcaaatgctggaagattttaaacaacaccccgccattcgcccgctgattagcggcggcaaactgcttgaatattccgcgcatatggtgccggaaggcggtctggcaatggtgccgcaactggttaacgagggcgtgatgatcgttggtgacgccgcaggcttctgcctgaatttgggttttacggtccgcggcatggatttagccattgcatcggctcaggctgccgccacaacggtgatcgccgccaaagaacgcgcggatttctccgccagcagtctggcgcaatacaaacgtgagctggaacaaagctgcgtcatgcgtgatatgcagcattttcgcaagatcccggcgctgatggaaaacccgcgcctgtttagccaatacccacgaatggtagccgacatcatgaacgagatgttcaccatcgacggcaaaccaaaccagccggtacgaaaaatgatcatgggacatgcgaagaaaattgggctgatcaacttgctgaaagatggcattaagggagcaaccgcgctatga

SEQ ID NO: 20384 - DNA, 2388 bp, Escherichia coli
atgaaattcagtgaactgtggttacgcgaatgggtgaacccggcgattgatagcgatgcgctggcaaatcaaatcactatggcgggcctggaagttgacggtgtagaaccggttgccggcagcttccacggcgtggtcgttggtgaagtggttgagtgtgcgcagcatccgaacgctgacaaactgcgtgtgacaaaagtgaatgtcggcggcgatcgcctgctggacatcgtctgcggtgcgccaaactgccgtcagggcctgcgtgtagcggtagcgaccattggtgctgttctgccgggtgatttcaaaattaaagcggcgaaactgcgtggcgaaccgtctgaagggatgctgtgctccttctctgaactgggcatttctgacgatcacagcggcattatcgaactgcctgcggatgcgccgattggcaccgatatccgtgaatacctgaaacttgatgacaacaccatcgaaatcagcgtgacgccaaaccgtgccgactgcttaggcatcattggtgttgcgcgtgacgttgccgtgctgaaccagctgccgctggttcaaccggaaatcgttccggttggtgcgaccatcgacgacacgctgccgattacagtcgaagcgccggaagcctgcccgcgttatcttggccgtgtggtaaaaggcattaacgttaaagcgccaactccgctgtggatgaaagaaaaactgcgtcgttgcgggatccgttctatcgatgcagttgttgacgtcaccaactatgtgctgctcgaactgggccagccgatgcacgctttcgataaagatcgcattgaaggcggcattgtggtgcggatggcgaaagagggcgaaacgctggtgctgctcgacggtactgaagcgaagctgaatgctgacactctggtcatcgccgaccacaacaaggcgctggcgatgggcggcatcttcggtggcgaacactctggcgtgaatgacgaaacacaaaacgtgctgctggaatgcgcgttctttagcccgctgtctatcaccggtcgtgctcgtcgtcatggcctgcataccgatgcgtctcaccgttatgagcgtggcgttgatccggcactgcagcacaaagcgatggaacgtgcgacccgtctgctgatcgacatctgcggtggtgaggctggcccggtaattgatatcaccaacgaagcaacgctgccgaagcgtgcaaccatcactctacgtcgtagcaaactggatcgcctgatcggccatcatattgcggatgagcaggtaactgacattctgcgtcgtctcggctgcgaagtgaccgaaggcaaagacgaatggcaggcagttgcgccgagctggcgtttcgatatggagattgaagaagatctggttgaagaagtcgcgcgtgtttacggctacaacaacatcccggatgagccggtacaggcaagcctgattatgggtactcaccgtgaagctgacctgtcgctcaagcgcgtgaaaacgctgctcaacgacaaaggctatcaggaagtgatcacctacagcttcgttgatccgaaagtgcagcagatgatccatccaggcgttgaagccttactgctgccaagcccgatctctgttgaaatgtcagcaatgcgtctttctctgtggactggcctgctggcaaccgtggtgtacaaccagaaccgtcagcagaaccgtgtgcgcattttcgaaagcggtctgcgtttcgtaccagatactcaggcaccgttgggcattcgtcaggatctgatgttagccggtgtgatttgcggtaaccgttacgaagagcactggaacctggcaaaagagaccgttgatttctatgatttgaaaggcgatcttgaatccgttctcgacctgaccggtaaactgaatgaggttgagttccgtgcagaagcgaatccggcactgcatccggggcaatccgcagcgatttatctgaaaggtgaacgtattggttttgttggggttgttcatcctgaactggaacgtaaactggatcttaacggtcgcactctggtgttcgaactggagtggaacaagctcgcagaccgcgtggtgcctcaggcgcgcgagatttctcgcttcccggcgaaccgtcgtgacatcgcggtggtggtcgcagaaaacgttcccgcagcggatattttatccgaatgtaagaaagttggcgtaaatcaggtagttggcgtaaacttatttgacgtgtaccgcggtaagggtgttgcggaggggtataagagcctcgccataagcctgatcctgcaagataccagccgtacactcgaagaagaggagattgccgctaccgtcgccaaatgtgtagaggcattaaaagagcgattccaggcatcattgagggattga

SEQ ID NO: 20385 - DNA, 984 bp, Escherichia coli
atgtcacatctcgcagaactggttgccagtgcgaaggcggccattagccaggcgtcagatgttgccgcgttagataatgtgcgcgtcgaatatttgggtaaaaaagggcacttaacccttcagatgacgaccctgcgtgagctgccgccagaagagcgtccggcagctggtgcggttatcaacgaagcgaaagagcaggttcagcaggcgctgaatgcgcgtaaagcggaactggaaagcgctgcactgaatgcgcgtctggcggcggaaacgattgatgtctctctgccaggtcgtcgcattgaaaacggcggtctgcatccggttacccgtaccatcgaccgtatcgaaagtttcttcggtgagcttggctttaccgtggcaaccgggccggaaatcgaagacgattatcataacttcgatgctctgaacattcctggtcaccacccggcgcgcgctgaccacgacactttctggtttgacactacccgcctgctgcgtacccagacctctggcgtacagatccgcaccatgaaagcccagcagccaccgattcgtatcatcgcgcctggccgtgtttatcgtaacgactacgaccagactcacacgccgatgttccatcagatggaaggtctgattgttgataccaacatcagctttaccaacctgaaaggcacgctgcacgacttcctgcgtaacttctttgaggaagatttgcagattcgcttccgtccttcctacttcccgtttaccgaaccttctgcagaagtggacgtcatgggtaaaaacggtaaatggctggaagtgctgggctgcgggatggtgcatccgaacgtgttgcgtaacgttggcatcgacccggaagtttactctggtttcgccttcgggatggggatggagcgtctgactatgttgcgttacggcgtcaccgacctgcgttcattcttcgaaaacgatctgcgtttcctcaaacagtttaaataa

SEQ ID NO: 20386 - DNA, 930 bp, Escherichia coli
atggtacgtatctatacgttgacacttgcgccctctctcgatagcgcaacaattaccccgcaaatttatcccgaaggaaaactgcgctgtaccgcaccggtgttcgaacccgggggcggcggcatcaacgtcgcccgcgccattgcccatcttggaggcagtgccacagcgatcttcccggcgggtggcgcgaccggcgaacacctggtttcactgttggcggatgaaaatgtccccgtcgctactgtagaagccaaagactggacccggcagaatttacacgtacatgtggaagcaagcggtgagcagtatcgttttgttatgccaggcgcggcattaaatgaagatgagtttcgccagcttgaagagcaagttctggaaattgaatccggggccatcctggtcataagcggaagcctgccgccaggtgtgaagctggaaaaattaacccaactgatttccgctgcgcaaaaacaagggatccgctgcatcgtcgacagttctggcgaagcgttaagtgcagcactggcaattggtaacatcgagttggttaagcctaaccaaaaagaactcagtgcgctggtgaatcgcgaactcacccagccggacgatgtccgcaaagccgcgcaggaaatcgttaatagcggcaaggccaaacgggttgtcgtttccctgggtccacaaggagcgctgggtgttgatagtgaaaactgtattcaggtggtgccaccaccggtgaaaagccagagtaccgttggcgctggtgacagcatggtcggcgcgatgacactgaaactggcagaaaatgcctctcttgaagagatggttcgttttggcgtagctgcggggagtgcagccacactcaatcagggaacacgtctgtgctcccatgacgatacgcaaaaaatttacgcttacctttcccgctaa

SEQ ID NO: 20387 - DNA, 351 bp, Escherichia coli
atgatggatctcgataacattcccgatacgcaaacggaagctgaagagctggaagaagtggtgatggggctgatcatcaactccggacaagcgcgcagcctggcgtatgcggcactgaaacaggcgaagcagggcgattttgccgcagcaaaagccatgatggatcagtcacggatggcattgaatgaagcgcatctggtacagacgaaactgattgaaggcgatgcgggcgaaggtaagatgaaagtgagtctggtgctggtccacgctcaggatcatttaatgacgtccatgcttgcgcgtgaactgattactgaattaattgagcttcatgaaaaactgaaggcataa

SEQ ID NO: 20388 - DNA, 1359 bp, Escherichia coli
atgagtaatgttattgcatcgcttgaaaaggtactcctcccttttgcagttaaaataggaaagcagccacacgttaatgcaatcaaaaatggctttattcgcttaatgccgttaacccttgcgggggccatgtttgtattaattaacaacgtttttctaagctttggggaggggtcgtttttttattccttaggtattcgcctcgacgcctcaaccattgaaacacttaatggtctgaaaggtattggcggcaacgtatataacggaacattaggaataatgtctttaatggcaccgttctttattggcatggcgctggcagaagagcgtaaagtcgatgcgctggcggctgggttgttatccgttgcagcatttatgaccgtcaccccatatagtgtcggtgaggcctatgcggttggtgcaaactggttaggtggggcgaatatcatctccgggattattattggcctggtggtggcagaaatgtttacctttattgtccgccgcaattgggtcattaaactgcccgacagcgtacctgcttcagtatcgcgttccttctcggcattaattcccggctttattattctttccgtgatggggattattgcctgggcgttgaatacctggggcaccaacttccatcagatcattatggataccatctcaaccccactggcatcgttgggtagcgtggtgggctgggcctatgtgatctttgttccactgctctggttcttcggtattcatggcgcgctggcgctgaccgcactggacaacggcattatgacgccgtgggcactggaaaatatcgcgacctatcagcaatatggttccgtcgaagcggcgctggcagccggtaagaccttccatatctgggccaagccgatgctggactcctttattttccttgggggcagtggtgcgactttaggcctgatcctggctatctttatcgcctctcgccgtgctgattatcgtcaggtggcaaaactggcgctgccgtccggcatcttccagattaacgaaccgattctgtttggtctgccaattatcatgaacccggtgatgtttatcccgtttgtactggtacaaccgattctggcggcaatcaccctcgcagcgtactacatgggcattattcctccggtgaccaatattgcaccgtggaccatgccaaccggtctgggagccttctttaacaccaacggtagcgtcgccgcattgctggtcgcactcttcaaccttggcatcgcaacgttaatttatctgccctttgttgtggtggctaacaaagcacaaaatgcgattgataaagaagagagcgaagaagatatcgctaacgccctgaaattttaa

SEQ ID NO: 20389 - DNA, 828 bp, Escherichia coli
atgacattgcaacaacaaataataaaggcgctgggcgcaaaaccgcagattaatgctgaagaggaaattcgtcgtagtgtcgattttctgaaaagctacctgcaaacttatccgttcattaaatcactggtgctcgggatcagcggcggtcaggactccacgcttgccggaaagctgtgccagatggcgattaatgagctgcgcctggaaaccggcaacgaatcactgcaatttattgccgtacgcctgccctatggtgttcaggccgacgaacaagattgccaggatgccattgcctttattcaaccggatcgcgtattaaccgttaatatcaagggcgcggtattggccagcgaacaggcattgcgggaagcaggcattgaactgagcgattttgtccgtggcaatgaaaaagcgcgtgagcggatgaaagcacaatatagcattgcgggtatgaccagcggtgtcgtggtgggcaccgatcatgcagcagaagccattaccggattcttcactaaatatggtgacggcggtacggacattaatccgctgtatcgtctcaacaaacgtcagggtaaacagttactggcggcattagcttgcccggaacacctttataagaaagcgccaacggccgatctggaagatgatcgcccttctctgccagatgaagtggcactcggcgtgacctatgacaatatcgacgactatctggaagggaaaaacgtacctcaacaggtcgccagaacaatagagaactggtatctgaaaaccgaacataaacgccgtccgccaattaccgttttcgatgatttctggaaaaagtaa

SEQ ID NO: 20390 - DNA, 1221 bp, Escherichia coli
atgtctcagccaattacgcgtgaaaactttgatgaatggatgatacctgtttacgctccggcaccctttataccggtacgtggcgaaggttcgcgcttgtgggatcagcaggggaaagagtatatcgacttcgcgggtggcattgcggtgaacgcgctgggccatgcgcatccggaactgcgtgaagcgctgaacgaacaggcgagtaagttctggcataccggcaacggttacaccaacgagccggtactgcgactggcgaaaaaattgatcgacgccacgtttgccgatcgcgtcttcttttgtaactccggtgcggaagccaacgaagcggcgctaaaactggcgcgtaaattcgctcacgaccgctacggcagccataagagcggcatcgtggcgttcaaaaatgcgtttcatggtcgcacgctgtttactgtcagtgcgggtgggcagccagcctattcacaggattttgcgccactgccggcggatattcgtcatgctgcatataacgatattaactctgccagcgcgctgattgacgactctacctgtgcggtgattgtcgaacccatccagggggaaggcggtgtggtgccagccagcaacgcgtttttacaaggtctgcgtgaattgtgtaaccgccacaatgcgctgttgatttttgatgaagtacaaaccggcgtcgggcgcaccggggaactgtatgcctatatgcactacggcgtgacgcctgatctgttaactaccgccaaagcgctgggcggcggtttcccggtcggtgcgttgttggcaaccgaagagtgcgcccgcgtgatgaccgttggcactcatggcaccacctatggcggtaatccgctggcctcggcggtggcaggcaaagtgctggagctcatcaacacaccagagatgcttaatggcgttaaacagcgtcacgactggtttgttgagcgtcttaatactattaatcaccgctatggtttgttcagtgaagttcgcggcttaggtttgctgattggctgtgtactgaatgccgattacgccgggcaagcgaaacagatctctcaggaagcggcgaaagcaggcgtgatggtactgattgcgggtggcaacgtggtgcgttttgcgcctgcgctcaatgtcagcgaagaagaggtgacgaccggactggatcgctttgcagctgcttgcgaacactttgttagccgaggttcatcatga

SEQ ID NO: 20391 - DNA, 1962 bp, Escherichia coli
atgcggttgtttattgccgaaaaaccgagtctggcgcgcgccattgctgatgtcctgcccaaaccgcaccggaaaggcgatggctttatcgagtgcggtaatggtcaggtggtgacctggtgtatcggtcacctgcttgagcaggcgcagccagacgcctacgacagccgctatgcgcgctggaatcttgcggatttgccgattgtcccggaaaagtggcaattacagccccgaccctccgtgaccaaacaacttaacgtcatcaaacggttcctgcatgaagccagcgaaatcgttcacgccggggacccggatcgtgaagggcaattgctggtggatgaagtgctggactatctgcaactggcaccggaaaagcgccagcaggtacagcgttgcttgataaacgacctgaacccgcaggcggttgagcgggcgatcgaccgtcttcgttccaacagtgagtttgtaccgctgtgcgtttctgcgctggcgcgagcgcgtgccgactggctgtacggcatcaatatgacccgtgcgtataccattctcggtcgcaatgccggttatcagggcgtactttccgtgggacgcgtgcagacgcccgtgcttgggctggtggtgcgccgcgatgaagagattgaaaacttcgtggcgaaagacttctttgaagtcaaagcacatatcgtgacacctgccgatgagcggtttaccgctatctggcaaccgagcgaagcgtgtgaaccgtaccaggatgaagaagggcgcttgttacatcgtccactggcggagcatgtggttaaccgcattagtggtcaaccggctattgtcaccagctataacgataaacgggaatcagaatccgcgccgctgcctttttcgctttcagcgttgcagattgaagcggcaaaacgttttggtctgagtgcgcagaacgtgcttgatatctgccagaaactgtacgaaacgcacaagctaatcacttatccgcgttctgattgtcgctatttgccagaagaacattttgccggacgccacgcggtgatgaatgccatcagtgttcatgcaccggatctgttgccgcagccagtggtagatccagatatacgcaaccgctgttgggatgacaaaaaggtcgatgcgcaccacgccatcattccgaccgcacggagttctgcgatcaacctgacggagaacgaagcgaaggtctataacctgattgcccgtcagtatctgatgcaattctgcccggatgcggtgttccgcaagtgtgttatcgaactggacattgccaaaggcaaatttgtcgctaaagcgcgttttcttgctgaagcaggctggcgcacgctgttaggcagcaaagagcgcgatgaagaaaacgacggcacgccactgcctgtggtggcgaaaggcgatgagttgctgtgtgaaaaaggtgaagtggtagagcggcaaacccagccgccgcgccattttaccgatgcaacactgctttcggcgatgaccgggatcgcgcgctttgtgcaggataaagatctgaaaaagatcctccgtgcgaccgatggtctggggacagaggcaacgcgtgccgggattattgaactgttgttcaagcgtggtttcctgaccaaaaaagggcgctatatccactccaccgacgccggaaaagcgctattccattcgctgccggagatggcgacgcgaccggacatgaccgcgcactgggaatcggtgctgacgcaaatcagcgaaaagcagtgtcgctatcaggactttatgcagccgctggtggggacgctatatcagcttattgatcaagccaaacgtacgccggtgcggcagtttcgcggcattgtggctccgggcagtggtggcagtgctgataagaaaaaggctgcaccgcgtaaacgtagtgcgaaaaaaagtccgccagcagatgaagtcggaagcggggcgatagcgtaa

SEQ ID NO: 20392 - DNA, 552 bp, Escherichia coli
atggatgcactcgaactattgatcaatcgccgtagcgcctcccgcttggctgaacccgcgccaacgggtgaacaactgcaaaacatcctgcgtgcgggtatgcgtgcgccggaccataagtccatgcaaccgtggcatttttttgtgattgaaggggaagggcgcgagcgtttcagcgccgtactggaacagggggcgattgctgccggtagtgatgacaaagctatcgacaaagcccgtaatgcgccgttccgcgcaccgctcatcatcacggtggtggcgaaatgcgaagagaatcataaagtcccgcgctgggaacaggaaatgtctgccggatgcgcggtcatggcgatgcaaatggcagcagttgcccaggggtttggcggcatctggcgcagtggcgcattaactgaaagtccggtagtgcgtgaagcattcggttgccgtgagcaggataaaattgtcggttttctctacctcggtacgccgcagctgaaagcatctacgtcgattaacgtcccggacccgacgccgtttgtaacttatttctga

SEQ ID NO: 20393 - DNA, 1077 bp, Escherichia coli
atgaaagcactggctcggtttggcaaggcctttggcggctacaagatgattgatgtcccacaacccatgtgtggcccggaagatgtagtgattgaaattaaagccgcggcaatctgcggcgcagacatgaagcactacaatgtcgatagcggttctgatgagtttaactctatccgcggccatgagttcgcaggttgtattgcgcaggttggtgaaaaagtcaaagactggaaagtggggcaacgcgtcgtatcggataacagcggtcacgtttgcggtgtttgtccggcctgtgaacaaggtgattttctgtgttgtacagaaaaagtaaaccttggtctggataataatacctggggcggtggtttttccaaatattgtctggttcctggtgaaattctcaaaattcatcgtcatgcgttgtgggaaatccctgatggtgttgattatgaggacgcagccgtacttgaccctatctgtaatgcctacaaatccatcgcgcagcaatcgaaattccttcctggtcaggatgtggtcgtcatcggcactggcccactcgggctgttctccgtacaaatggcgcgaattatgggggcggtaaatatcgtcgtcgttggtctgcaagaagatgtggcggtccgcttcccggttgcaaaagaactgggtgcgacggcagtagtaaatggttctaccgaagatgtggtggcgcgctgccagcaaatttgtggcaaagacaatctgggactggtgattgaatgctccggtgccaatatcgcactgaaacaagccatcgaaatgctccgcccgaacggggaagtggtacgcgttggaatgggcttcaaacctcttgatttctcgattaatgacattaccgcctggaacaaaagcatcattgggcatatggcctatgactccacctcatggcgtaacgctatcaggctattagccagcggcgctatcaaagtcaaaccgatgatcacgcatcgtatcggcctgtcgcaatggcgcgaagggtttgatgcgatggtcgataaaaccgcaatcaaagtgatcatgacttacgactttgatgaataa

SEQ ID NO: 20394 - DNA, 996 bp, Escherichia coli
atgactatcaaagtaggtatcaacggttttggccgtatcggtcgcattgttttccgtgctgctcagaaacgttctgacatcgagatcgttgcaatcaacgacctgttagacgctgattacatggcatacatgctgaaatatgactccactcacggccgtttcgacggtaccgttgaagtgaaagacggtcatctgatcgttaacggtaaaaaaatccgtgttaccgctgaacgtgatccggctaacctgaaatgggacgaagttggtgttgacgttgtcgctgaagcaactggtctgttcctgactgacgaaactgctcgtaaacacatcaccgctggtgcgaagaaagtggttatgactggtccgtctaaagacaacactccgatgttcgttaaaggcgctaacttcgacaaatatgctggccaggacatcgtttccaacgcttcctgcaccaccaactgcctggctccgctggctaaagttatcaacgataacttcggcatcatcgaaggtctgatgaccaccgttcacgctactaccgctactcagaaaaccgttgatggcccgtctcacaaagactggcgcggcggccgcggcgcttcccagaacatcatcccgtcctctaccggtgctgctaaagctgtaggtaaagtactgccagaactgaatggcaaactgactggtatggcgttccgcgttccgaccccgaacgtatctgtagttgacctgaccgttcgtctggaaaaagctgcaacttacgagcagatcaaagctgccgttaaagctgctgctgaaggcgaaatgaaaggcgttctgggctacaccgaagatgacgtagtatctaccgatttcaacggcgaagtttgcacttccgtgttcgatgctaaagctggtatcgctctgaacgacaacttcgtgaaactggtatcctggtacgacaacgaaaccggttactccaacaaagttctggacctgatcgctcacatctccaaataa

SEQ ID NO: 20395 - DNA, 1476 bp, Escherichia coli
atggcggtaacgcaaacagcccaggcctgtgacctggtcattttcggcgcgaaaggcgaccttgcgcgtcgtaaattgctgccttccctgtatcaactggaaaaagccggtcagctcaacccggacacccggattatcggcgtagggcgtgctgactgggataaagcggcatataccaaagttgtccgcgaggcgctcgaaactttcatgaaagaaaccattgatgaaggtttatgggacaccctgagtgcacgtctggatttttgtaatctcgatgtcaatgacactgctgcattcagccgtctcggcgcgatgctggatcaaaaaaatcgtatcaccattaactactttgccatgccgcccagcacttttggcgcaatttgcaaagggcttggcgaggcaaaactgaatgctaaaccggcacgcgtagtcatggagaaaccgctggggacgtcgctggcgacctcgcaggaaatcaatgatcaggttggcgaatacttcgaggagtgccaggtttaccgtatcgaccactatcttggtaaagaaacggtgctgaacctgttggcgctgcgttttgctaactccctgtttgtgaataactgggacaatcgcaccattgatcatgttgagattaccgtggcagaagaagtggggatcgaagggcgctggggctattttgataaagccggtcagatgcgcgacatgatccagaaccacctgctgcaaattctttgcatgattgcgatgtctccgccgtctgacctgagcgcagacagcatccgcgatgaaaaagtgaaagtactgaagtctctgcgccgcatcgaccgctccaacgtacgcgaaaaaaccgtacgcgggcaatatactgcgggcttcgcccagggcaaaaaagtgccgggatatctggaagaagagggcgcgaacaagagcagcaatacagaaactttcgtggcgatccgcgtcgacattgataactggcgctgggccggtgtgccattctacctgcgtactggtaaacgtctgccgaccaaatgttctgaagtcgtggtctatttcaaaacacctgaactgaatctgtttaaagaatcgtggcaggatctgccgcagaataaactgactatccgtctgcaacctgatgaaggcgtggatatccaggtactgaataaagttcctggccttgaccacaaacataacctgcaaatcaccaagctggatctgagctattcagaaacctttaatcagacgcatctggcggatgcctatgaacgtttgctgctggaaaccatgcgtggtattcaggcactgtttgtacgtcgcgacgaagtggaagaagcctggaaatgggtagactccattactgaggcgtgggcgatggacaatgatgcgccgaaaccgtatcaggccggaacctggggacccgttgcctcggtggcgatgattacccgtgatggtcgttcctggaatgagtttgagtaa

SEQ ID NO: 20396 - DNA, 1260 bp, Escherichia coli
atgttggggtcgctcaccgttcttactctggccgtcgctgtctggcggccttatgtttatcaccgtgatgccacgccaattgtcaaaaccattgagctggaacagaacgaaattcgttcgctcttacctgaagccagtgagccgattgatcaagctgcacaagaagatgaagccattccccaggacgaactggatgacaaaatcgccggtgaagcgggcgtgcatgaatatgttgtttccactggcgatacgctaagcagcattctcaatcagtatggtattgatatgggtgatatcacccaactggctgcggccgacaaagaattgcgtaacctgaaaatcggtcaacaactctcctggacattaaccgcggacggcgaactgcagcgcctcacctgggaagtgtctcgtcgtgaaacccgaacctatgaccgtactgccgctaacggttttaaaatgaccagcgaaatgcagcaaggagagtgggttaacaatctgctgaaaggtaccgtcgggggaagctttgttgccagcgccagaaacgccggtttaaccagcgccgaagtgagcgcagtgattaaagccatgcagtggcaaatggatttccgcaaactgaaaaaaggcgatgaatttgcggtgttaatgtctcgagaaatgcttgatggtaaacgtgagcaaagccagctgctgggcgtacgtttgcgttcagaaggtaaagattattacgctatccgcgctgaagatggcaaattctacgatcgtaacggtactggtctggcgaaaggattcttgcgattcccgacggcgaaacagttccgtatctcgtctaattttaacccgcgtcgtactaatccggtgaccggtcgcgttgcaccacacagaggtgttgatttcgccatgccgcagggtacgccagtgctttcagtgggtgacggtgaagtggtggttgccaaacgcagtggcgcagcaggttattatgtggctattcgtcatggtcgcagctacaccacgcgttatatgcacttgcgcaagattctggtgaaaccgggacagaaggtgaaacgtggcgaccgtatcgcgctttccggtaataccggacgttcaaccgggccgcatctgcactatgaagtatggataaaccagcaggccgtaaacccgctgacggcaaaactgccgcgtaccgaagggctgaccggctccgatcgtcgcgaattcctggcgcaggccaaagagattgtgccgcagctacggtttgattaa

SEQ ID NO: 20397 - DNA, 600 bp, Escherichia coli
gtgaggcacgattttgttttttcaggagtcattatgcttgaacttaatgctaaaaccactgcgctggtggtgatcgatttacaagaaggcatcttaccttttgccggtggtccacatactgccgatgaggtagttaatcgcgccgggaagctggcggcgaaatttcgcgccagcggtcagcccgtgtttctggtgcgcgttggctggtctgccgattacgctgaagcattaaaacagccggtcgatgcgccctcaccggctaaagtgttgcccgaaaattggtggcaacatcctgctgcattaggtgcaaccgacagcgatatcgaaatcatcaaacgtcaatggggtgcgttttacggtacggatctggagttgcaattacgccgccgaggtatcgatacaatagtgttatgtgggatctcgaccaatatcggtgttgaatccaccgcccgcaatgcctgggaacttggctttaatctggtgattgccgaagacgcctgtagtgccgccagcgccgagcagcacaataacagtatcaaccatatctacccgcgcatcgcccgtgtgcgtagcgtggaagagatcctcaacgcgttatga

SEQ ID NO: 20398 - DNA, 549 bp, Escherichia coli
atgcaatttaatatccctacgttgcttacactgttccgtgtcatccttatcccattctttgtattggtcttttatctgcctgtcacctggtcgccgtttgccgccgcgctcattttctgcgtcgcggcggtgactgactggttcgatggttttctggcacgccgctggaaccagagtacccggtttggtgctttccttgaccctgtggcagataaagttctcgtggctatcgccatggtgctggtaaccgagcattatcacagctggtgggtgacattaccggcggcaacgatgatcgcccgtgaaattattatttctgcgctacgcgaatggatggcggagttgggtaaacgcagtagcgtggccgtctcctggattgggaaagtgaaaaccactgcccagatggtggcgttggcatggctgctgtggcgtccgaacatttgggttgagtacgccggtattgcacttttctttgtggctgcggtactgactctgtggtcaatgttgcaatatttgagcgctgcgcgtgcagatttgcttgatcagtga

SEQ ID NO: 20399 - DNA, 723 bp, Escherichia coli
atgcaggataaggattttttcagctggcgtcgcacgatgctgttgcgttttcagaggatggagaccgcagaagaggtctaccatgaaattgagcttcaggctcagcagctggagtacgattactattcgttatgtgtccgccacccggtaccattcactcgacctaaagtggctttttacaccaattaccctgaggcgtgggttagttattatcaggcaaaaaactttctcgcaattgatccggtgctgaaccctgaaaactttagtcagggccatttaatgtggaatgatgacttattcagcgaagcacagccgttatgggaagccgcgcgcgcacatggtttacgccgcggtgtcactcagtatttaatgctgccaaaccgggcgctgggctttttgtccttttcccgttgcagcgcgcgcgaaatacccattcttagtgatgaactgcaattaaaaatgcagttactggtgcgcgaaagtctgatggctctgatgcgtttaaatgatgaaatagtgatgacgccagagatgaatttcagcaagcgcgaaaaagaaattctgaggtggacggcggaagggaaaacatcagcagagatagcgatgattttgtcaatctctgagaatacggtcaatttccaccagaaaaacatgcagaaaaaaattaatgcaccaaataagacccaggttgcctgttacgcggccgctactggcttaatttga

SEQ ID NO: 20400 - DNA, 996 bp, Escherichia coli
atgagtaacctgacaggcaccgataaaagcgtcatcctgctgatgaccattggcgaagaccgggcggcagaggtgttcaagcacctctcccagcgtgaagtacaaaccctgagcgctgcaatggcgaacgtcacgcagatctccaacaagcagctaaccgatgtgctggcggagtttgagcaagaagctgaacagtttgccgcactgaatatcaacgccaacgattatctgcgctcggtattggtcaaagctctgggtgaagaacgtgccgccagcctgctggaagatattctcgaaactcgcgataccgccagcggtattgaaacgctcaactttatggagccacagagcgccgccgatctgattcgcgatgagcatccgcaaattatcgccaccattctggtgcatctgaagcgcgcccaagccgccgatattctggcgttgttcgatgaacgtctgcgccacgacgtgatgttgcgtatcgccacctttggcggcgtgcagccagccgcgctggcggagctgaccgaagtactgaatggcttgctcgacggtcagaatctcaagcgcagcaaaatgggcggcgtgagaacggcagccgaaattatcaacctgatgaaaactcagcaggaagaagccgttattaccgccgtgcgtgaattcgacggcgagctggcgcagaaaatcatcgacgagatgttcctgttcgagaatctggtggatgtcgacgatcgcagcattcagcgtctgttgcaggaagtggattccgaatcgctgttgatcgcgctgaaaggagccgagcagccactgcgcgagaaattcttgcgcaatatgtcgcagcgtgccgccgatattctgcgcgacgatctcgccaaccgtggtccggtgcgtctgtcgcaggtggaaaacgaacagaaagcgattctgctgattgtgcgccgccttgccgaaactggcgagatggtaattggcagcggcgaggatacctatgtctga

SEQ ID NO: 20401 - DNA, 852 bp, Escherichia coli
atgactgttcaaacaagtaaaaatccgcaggtcgatattgctgaagataatgcattcttcccttcagaatattcgcttagccaatataccagtcctgtctctgatcttgatggcgtggactatccaaaaccttatcgcggtaaacataaaattctggtgatcgccgcggacgaacgttatttgccgaccgataacggaaaactgttctcgaccggtaaccatccgattgaaacgttgctgccgttgtatcatctccatgctgcaggtttcgaattcgaagtggcgaccatttccggtctgatgaccaagtttgaatactgggctatgccgcacaaagatgaaaaagtaatgccattctttgagcagcataaatcgttgttccgcaatccgaagaaactcgcggatgttgttgccagcctcaacgctgatagcgaatatgcagcaatctttgttcctggtggtcatggcgcacttattggtttacctgaaagccaggacgtggctgccgctttacagtgggcaatcaaaaatgaccgttttgttatctccctttgccacggcccggcggcttttctggcgcttcgccacggcgataacccactgaatggttattccatttgcgcattcccagacgccgcagacaaacaaacgccagagattggctatatgccgggtcatctcacctggtacttcggcgaagaactgaagaaaatgggcatgaatatcattaatgacgacatcaccgggcgagtacataaggaccgtaaacttctcaccggcgacagtccttttgcagcgaatgcgttgggtaaactggcggcgcaggaaatgctggcagcttacgcgggttaa

SEQ ID NO: 20402 - DNA, 636 bp, Escherichia coli
atgcgtctgacagcaaaacaggtgacatggctgaaagtttgcctgcatcttgccggattgttgccgtttctctggctggtctgggcgatcaatcacggtggactgggtgccgatccggtgaaagatattcagcattttactggtcgcactgcactgaaatttttgctggcgaccttgttaatcacccctctggcacgctacgcaaaacagccgttattgatacgcactcgccgcctgttaggattatggtgctttgcctgggcgacactgcatttaacaagttacgcattgctggagctgggcgtgaataatctggcgttattaggtaaggagttaattacccggccttatttaacgttaggtattatcagctgggtaattttgcttgctttagcgttcacttcaacccaggcgatgcagcgaaaactcggcaagcactggcaacagttgcataatttcgtctatcttgtcgcgattctggccccaatacattatctgtggtccgtgaagattatttcaccgcagccgctcatctacgctgggctggctgtactgcttttagccttacggtataagaagttgcgttccctttttaaccggttacgcaagcaggttcacaacaaattatctgtataa

SEQ ID NO: 20403 - DNA, 1428 bp, Escherichia coli
atgatgaatgacggtaagcaacaatctacctttttgtttcacgattacgaaacctttggcacgcaccccgcgttagatcgccctgcacagttcgcagccattcgcaccgatagcgaattcaatgtcatcggcgaacccgaagtcttttactgcaagcccgctgatgactatttaccccagccaggagccgtattaattaccggtattaccccgcaggaagcacgggcgaaaggagaaaacgaagccgcgtttgccgcccgtattcactcgctttttaccgtaccgaagacctgtattctgggctacaacaatgtgcgtttcgacgacgaagtcacacgcaacattttttatcgtaatttctacgatccttacgcctggagctggcagcatgataactcgcgctgggatttactggatgttatgcgtgcctgttatgccctgcgcccggaaggaataaactggcctgaaaatgatgacggtctaccgagctttcgccttgagcatttaaccaaagcgaatggtattgaacatagcaacgcccacgatgcgatggctgatgtgtacgccactattgcgatggcaaagctggtaaaaacgcgtcagccacgcctgtttgattatctctttacccatcgtaataaacacaaactgatggcgttgattgatgttccgcagatgaaacccctggtgcacgtttccggaatgtttggagcatggcgcggcaataccagctgggtggcaccgctggcgtggcatcctgaaaatcgcaatgccgtaattatggtggatttggcaggagacatttcgccattactggaactggatagcgacacattgcgcgagcgtttatataccgcaaaaaccgatcttggcgataacgccgccgttccggttaagctggtgcatatcaataaatgtccggtgctggcccaggcgaatacgctacgcccggaagatgccgaccgactgggaattaatcgtcagcattgcctcgataacctgaaaattctgcgtgaaaatccgcaagtgcgcgaaaaagtggtggcgatattcgcggaagccgaaccgtttacgccttcagataacgtggatgcacagctttataacggctttttcagtgacgcagatcgtgcagcaatgaaaattgtgctggaaaccgagccgcgtaatttaccggcactggatatcacttttgttgataaacggattgaaaagctgttgttcaattatcgggcacgcaacttcccggggacgctggattatgccgagcagcaacgctggctggagcaccgtcgccaggtcttcacgccagagtttttgcagggttatgctgatgaattgcagatgctggtacaacaatatgccgatgacaaagagaaagtggcgctgttaaaagcactttggcagtacgcggaagagattgtctaa

SEQ ID NO: 20404 - DNA, 1017 bp, Escherichia coli
atgcggacttggaaatttccgtcagttagggtaatgatgagagtagaaaataataatgtttctgggcaaaaccatgacccggaacagattgatttgattgatttactagtgcagttgtggcgtggcaagatgacaatcatcatttccgtcattgtggctattgccctggctattggatatttggcagtagcgaaggagaaatggacgtcaacagcaattatcactcagcccgacgtggggcaaattgctggctataacaatgccatgaatgttatctatggtcaggctgcaccgaaagtatcggatttgcaggagacgttaattggtcgcttcagttctgccttctctgcattagcagaaacgctggataatcaggaagaacgagaaaaacttaccatcgaaccttctgttaagaaccagcaattaccattgactgtttcttatgttgggcaaactgcagagggcgcacaaatgaagttggcccaatacattcagcaagttgacgataaagtgaatcaagagctagaaaaggatctcaaagacaacattgctctgggacggaaaaacttgcaggactctttaagaacgcaggaagtagtcgcgcaggagcagaaagatctgcgtatccgtcagattcaggaagcgttgcagtatgcgaatcaggcgcaggtgacaaaaccgcagattcaacagactggcgaagatatcacacaagatacgttgttccttttggggagcgaagcgctggagtcgatgattaagcatgaggcgacccgtccgttggtgttctcgccaaactactatcagactcgtcaaaacctgctggatatcgaaagcttaaaagttgatgatcttgatattcatgcttaccgttatgtgatgaaaccgatgttacctattcgtcgtgatagcccgaaaaaggcaattaccttgattctggcggtgctgctgggtggcatggttggcgcggggattgtgctggggcgtaatgctctacgcaattacaacgcgaagtaa

SEQ ID NO: 20405 - DNA, 1407 bp, Escherichia coli
atgtccaagcaacagatcggcgtagtcggtatggcagtgatgggacgcaaccttgcgctcaacatcgaaagccgtggttataccgtctctattttcaaccgttcccgtgagaagacggaagaagtgattgccgaaaatccaggcaagaaactggttccttactatacggtgaaagagtttgtcgaatctctggaaacgcctcgtcgcatcctgttaatggtgaaagcaggtgcaggcacggatgctgctattgattccctcaaaccatatctcgataaaggagacatcatcattgatggtggtaacaccttcttccaggacactattcgtcgtaatcgtgagctttcagcagagggctttaacttcatcggtaccggtgtttctggcggtgaagagggggcgctgaaaggtccttctattatgcctggtggccagaaagaagcctatgaattggtagcaccgatcctgaccaaaatcgccgccgtagctgaagacggtgaaccatgcgttacctatattggtgccgatggcgcaggtcactatgtgaagatggttcacaacggtattgaatacggcgatatgcagctgattgctgaagcctattctctgcttaaaggtggcctgaacctcaccaacgaagaactggcgcagacctttaccgagtggaataacggtgaactgagcagttacctgatcgacatcaccaaagatatcttcaccaaaaaagatgaagacggtaactacctggttgatgtgatcctggatgaagcggctaacaaaggtaccggtaaatggaccagccagagcgcgctggatctcggcgaaccgctgtcgctgattaccgagtctgtgtttgcacgttatatctcttctctgaaagatcagcgtgttgccgcatctaaagttctctctggtccgcaagcacagccagcaggcgacaaggctgagttcatcgaaaaagttcgtcgtgcgctgtatctgggcaaaatcgtttcttacgcccagggcttctctcagctgcgtgctgcgtctgaagagtacaactgggatctgaactacggcgaaatcgcgaagattttccgtgctggctgcatcatccgtgcgcagttcctgcagaaaatcaccgatgcttatgccgaaaatccacagatcgctaacctgttgctggctccgtacttcaagcaaattgccgatgactaccagcaggcgctgcgtgatgtcgttgcttatgcagtacagaacggtattccggttccgaccttctccgcagcggttgcctattacgacagctaccgtgctgctgttctgcctgcgaacctgatccaggcacagcgtgactattttggtgcgcatacttataagcgtattgataaagaaggtgtgttccataccgaatggctggattaa

SEQ ID NO: 20406 - DNA, 1479 bp, Escherichia coli
atgagcttacgtgaaaaaaccatcagcggcgcgaagtggtcggcgattgccacggtgatcatcatcggcctcgggctggtgcagatgaccgtgctggcgcggattatcgacaaccaccagttcggcctgcttaccgtgtcgctggtgattatcgcgctggcagatacgctttctgacttcggtatcgctaactcgattattcagcgaaaagaaatcagtcaccttgaactcaccacgttgtactggctgaacgtcgggctggggatcgtggtgtgcgtggcggtgtttttgttgagtgatctcatcggcgacgtgctgaataacccggacctggcaccgttgattaaaacattatcgctggcgtttgtggtaatcccccacgggcaacagttccgcgcgttgatgcaaaaagagctggagttcaacaaaatcggcatgatcgaaaccagcgcggtgctggcgggcttcacttgtacggtggttagcgcccatttctggccgctggcgatgaccgcgatcctcggttatctggtcaatagtgcggtgagaacgctgctgtttggctactttggccgcaaaatttatcgccccggtctgcatttctcgctggcgtcggtggcaccgaacttacgctttggtgcctggctgacggcggacagcatcatcaactatctcaataccaacctttcaacgctcgtgctggcgcgtattctcggcgcgggcgtggcagggggatacaacctggcgtacaacgtggccgttgtgccaccgatgaagctgaacccaatcatcacccgcgtgttgtttccggcattcgccaaaattcaggacgataccgaaaagctgcgtgttaacttctacaagctgctgtcggtagtggggattatcaactttccggcgctgctcgggctaatggtggtgtcgaataactttgtaccgctggtctttggtgagaagtggaacagcattattccggtgctgcaattgctgtgtgtggtgggtctgctgcgctccgtaggtaacccgattggttcgctgctgatggcgaaagcgcgggtcgatatcagctttaaattcaacgtattcaaaacatttctgtttattccggcgattgttataggtgggcagatggcgggcgcgatcggcgtcacgcttggcttcctgctggtgcaaattatcaacaccattctgagttacttcgtgatgattaaaccggttcttggttccagttatcgccagtacatcctgagtttatggctgccgttttatctctcgctgccgacgctggtggtcagttatgcgctgggcattgtgctgaaagggcaactggcgctggggatgctgctggcggtgcaaatagccacgggggtgctggcgtttgtggtgatgattgtgctgtcgcgccatccgctggtggtggaagtgaagcgtcagttttgtcgcagcgaaaaaatgaaaatgcttttacgggcggggtga

SEQ ID NO: 20407 - DNA, 1224 bp, Escherichia coli
atgaaaatactggtctacggcattaactactcgccggagttaaccggcatcggcaaatacaccggcgagatggtggaatggctggcggcacaaggtcatgaggtgcgggtcattaccgcaccgccttactacccgcaatggcaggtgggcgagaactattccgcctggcgctacaaacgagaagagggggccgccacggtgtggcgctgcccgctgtatgtgccaaaacagccgagcaccctgaaacgcctgttgcatctgggcagttttgccgtcagcagtttctttccgctgatggcgcaacgtcgctggaagccggatcgcattattggcgtggtgccaacgctgttttgcgcgccgggaatgcgcctgctggcgaaactctctggtgcgcgtaccgtgctgcatattcaggattacgaagtggacgccatgctggggctgggccttgccggaaaaggcaaaggcggcaaagtggcacagctggcaacggcgttcgaacgtagcggactgcataacgtcgataacgtctccacgatttcgcgttcgatgatgaataaagccatcgaaaaaggcgtggcggcggaaaacgtcatcttcttccccaactggtcggaaattgcccgttttcagcatgttgcagatgccgatgttgatgcccttcgtaaccagcttgacctgccggataacaaaaaaatcattctttactccggcaatattggtgaaaagcaggggctggaaaacgttattgaagctgccgatcgtctgcgcgatgaaccgctgatttttgccattgtcgggcagggcggcggcaaagcgcggctggaaaaaatggcgcagcagcgtggactgcgcaacatgcaatttttcccgctgcaatcgtatgacgctttacccgcactgctgaagatgggcgattgccatctggtggtgcaaaaacgcggcgcggcagatgccgtattgccgtcgaaactgaccaatattctggcagtaggcggtaacgcggtgattactgctgaagcctacacagaactggggcagctttgcgaaacctttccgggcattgcggtttgcgttgaaccggaatcggtcgaggcgctggtggcggggatccgtcaggcgctcctgctgcccaaacacaacacggtggcacgtgaatatgccgaacgcacgctcgataaagagaacgtgttacgtcaatttataaatgatattcggggataa

SEQ ID NO: 20408 - DNA, 2199 bp, Escherichia coli
gtgggcgcaggcattgaacgcagagcaggtataagaatgacagaaaaagtaaaacaacatgccgctccggtaacgggcagtgatgaaatcgatattggtcgcctggtcggcaccgtcattgaagcgcgctggtgggtgattggcatcaccaccgtattcgccctctgtgccgtggtttacaccttcttcgccacgccgatttatagtgccgacgcactggtacaaatcgagcaaaacagcggcaattcgttagtgcaggacattggttcggcattagccaacaaaccgcctgcatcggacgccgagatccagttgattcgttcgcgtctggtgcttggtaaaacggtggacgatctcgacctcgatattgcagtgagcaaaaacacgttcccgattttcggtgcgggctgggatcgcctgatgggacgtcagaacgagacggtgaaagtgaccacctttaaccgcccgaaagagatggcggatcaggtgtttacgcttaatgtgctggacaacaaaaactacaccctgagcagcgacggcggctttagcgcccgggggcaagcgggccagatgctgaaaaaagaaggcgtcacgctgatggttgaagccattcacgccagcccgggcagtgagtttaccgtcaccaaatactccacgctggggatgatcaaccaactgcaaaacagcctgacggtaacggagaacggcaaagacgctggcgttttgagcctgacttataccggtgaagatcgtgaacagatccgcgacattcttaacagcatcgcccgtaactatcaggaacaaaatattgagcgcaaatcggcggaagcgtcgaaaagcctcgccttcctcgcgcaacagttaccggaagtacgtagccgcttggatgttgccgaaaacaaactgaatgccttccgtcaggataaagattctgttgatctgccgctggaagcaaaagcggtgctcgattcgatggtgaacatcgatgcgcagttgaacgaactgacctttaaagaggcggaaatctccaagctgtacaccaaagttcacccggcgtaccgcacgctgctggagaaacgtcaggcgctggaagacgaaaaagccaaacttaacggtcgcgtaacggcgatgccgaaaacccagcaggagattgtccgtctgacccgcgatgtcgagtctggtcagcaggtctatatgcaactgctgaataaagagcaggagctgaaaatcaccgaggccagcaccgtcggcgatgtgcgcattgttgacccggcaatcactcagcctggcgtgctgaaaccgaagaaagggctgattatcctcggcgcgattatccttggcctgatgctttctatcgtgggtgtgctgctgcgctcgttgtttaatcgcggcattgaaagcccgcaagtactggaagaacacggtattagcgtctatgccagcatcccgctgtcggaatggcagaaagcgcgtgatagcgtcaaaaccatcaaagggattaaacgctataaacagagccagctactggcggtggggaatccaaccgatctggcgattgaagccatccgtagtctgcgtaccagtttgcacttcgcgatgatgcaggcacagaacaatgtgttgatgatgaccggggttagcccgtcaattggtaaaacctttgtctgcgccaacctggcggcggtgatcagccagaccaataaacgcgtgttgttgatcgactgcgatatgcgcaaaggctacacccacgagctgttgggcactaataacgttaatggcctgtcggaaattctgattggtcagggcgatattactaccgctgctaaaccgacctctattgccaaatttgacctgatcccgcgcggtcaggtgccgccaaatccttctgaactgttgatgagcgaacgctttgccgaactggtgaactgggcgagtaaaaactatgacctggtgttgattgatacgccgccgattctggcagtgaccgatgcggcaattgttggtcgtcatgtcggaaccacgttaatggtggcgcgttatgcggtcaacacattgaaagaagtggaaaccagtctgagccgctttgagcaaaacggtattccggtgaaaggggtgattctgaactccatcttccgccgcgccagcgcgtatcaggattatggctattacgaatacgaatataagtcggatgcgaaataa

SEQ ID NO: 20409 - DNA, 1416 bp, Escherichia coli
ttgtcgcgacggcaacatttcgctaaagtcacgccccttcttcaccggcatggggattatttcgtgtttattggttttgattacggtacagcaaactgttcagtggcggtcatgcgtgacggtaaaccgcatttgctaaaaatggaaaacgacagcacgctgctgccttcaatgctttgcgcgccaacgcgtgaagcggtaagcgaatggctgtaccgccatcatgatgttccggcagacgacgatgaaacgcaggcgctgttacgtcgggcgattcgttataaccgcgaagaagatatcgatgttacggcgaaaagcgtgcagttcggtctttcctcactggcacagtacattgatgatccagaagaagtgtggtttgtgaaatcaccaaaatcgttcctcggtgccagcggcttaaaaccgcagcaggtagcgctgtttgaggatctggtctgcgcaatgatgttgcacattcgccagcaggcgcaggcacagctgccagaagcgattactcaggcggtgattggtcgtccgatcaacttccaggggctgggcggtgatgaagcaaacacccaggcgcaagggattctggaacgcgcggcgaagcgtgccggattcagggacgtggtattccagtacgagccggtcgcggctgggctggattacgaagccaccttgcaggaagaaaaacgggtgctggtggtggatatcggcggtggtacgactgactgttcattgctgctgatggggccgcagtggcgttcgcgtctcgatcgtgaagccagcctgctgggtcacagtggttgccgtattggcggtaacgatctggatatcgcgctggcgtttaaaaacctgatgccactgctgggtatgggtggcgaaaccgaaaaaggcatcgccctgccgatcctgccgtggtggaatgcggttgccatcaacgacgtacctgcgcagagtgatttctacagtagtgccaacggtcgtctgcttaacgatctggtacgcgatgcccgcgaaccggaaaaagtggccctgttacagaaagtctggcgtcagcgtttaagctatcgcctggtgcgtagcgcagaagagtgcaaaattgctctttcaagcgtagcggaaacccgcgcctcactgccgtttatcagcaatgaactggctacgctgattagccagcgagggctggaaagcgccctcagccagccactgacgcggattctggaacaggtgcaactggccctggataacgcccaggaaaaaccggacgttatctacctgaccggcggtagcgcccgttctccgctgattaaaaaagcgctggcagaacagttgccgggcattccgattgcaggcggcgatgactttggctccgtcaccgccgggctggcacgctgggcggaagtggtgtttcgttaa

SEQ ID NO: 20410 - DNA, 3123 bp, Escherichia coli
atgcaggtgttacccccgagcagcacaggcggcccgtcgcgcctgtttattatgcgtcctgtggccaccacgctgctgatggtggcgatcttactcgccgggattatcggttatcgcgccctgcccgtttcggcgctgccggaagtggactatccgaccattcaggtggtcacgctctacccaggtgccagcccggatgtcatgacctctgccgttaccgcgccgctagaacgccagttcgggcagatgtctggcctgaaacagatgtcgtcgcaaagttccggcggtgcgtcagttatcactttgcagttccagctaacattaccgctcgatgtcgccgagcaggaagtgcaggccgcgattaacgctgcgaccaacttgttgccgagcgatctgcctaacccgccggtttacagcaaagtgaacccggcagatccgccgatcatgacgctcgccgtcacctcaaccgccatgccgatgacgcaagtggaagatatggtggaaacccgcgtcgcgcagaaaatctcgcagatttccggcgtcggcctggtgacgctttccggcggtcagcgtccggctgttcgcgtcaaacttaacgctcaggcgattgccgccctcggcctgaccagcgaaaccgtgcgcaccgccattaccggcgctaacgttaactcggcaaaaggtagcctcgacggcccttcccgtgcggtcacgctttccgcgaacgaccagatgcaatccgccgaagagtatcgccagctaatcatcgcctaccagaacggcgcgccaattcgtctgggcgatgtcgcaactgtagagcaaggtgcagaaaacagctggctcggcgcgtgggcgaacaaagaacaggccattgtgatgaatgttcagcgccagcccggtgctaacattatctccaccgccgacagcattcggcagatgctgccacagctcactgagagtctgccgaaatcggtgaaggtgacagtgctttccgatcgcaccaccaatatccgcgcatccgtcgatgatactcagtttgaattgatgatggctatcgcgctggtagtcatgattatctacctgtttttgcgcaatattccggcgaccatcattcccggtgttgctgtaccgctgtcgttaatcggcactttcgcggttatggtgtttctcgatttttcaatcaataacctgacactgatggcgttaactatcgccaccggattcgtggtcgatgacgccatcgtggtgatcgaaaacatttcccgctatatcgaaaaaggcgaaaaaccgttggcggcggcgctcaagggcgcaggtgaaatcggctttaccattatctcgctgaccttctcactgattgcggtgttgatcccactgctgtttatgggcgatatcgtcgggcgactgttccgcgaatttgctattaccctggcggtagcgattttgatctcagcggtggtgtcgctgaccctgacaccgatgatgtgcgcgcggatgctcagccaggagtcgttgcgtaaacagaaccgcttctcccgtgcctcggaaaaaatgttcgacaggataatcgccgcctatggtcgtggactggcgaaagtgctgaatcatccgtggctgaccttaagcgtggcactcagcacgctgctgcttagcgtgctgctgtgggtgttcattccgaaaggtttcttcccggtacaggacaatggcattattcagggcactttgcaggcaccgcaatccagctcctttgccaatatggcccagcgacaacgccaggtcgcggacgtgattttgcaggatccggcagtgcaaagcctgacctcatttgttggcgttgatggcactaacccgtcgctgaacagtgcacgtttacaaatcaacctcaaaccgttggatgaacgtgatgatcgggtgcaaaaagtcatcgcccgtctgcaaacggcggtagataaagtgccgggcgtcgatctcttcctgcaaccaacgcaggatctgactattgatactcaggtcagccgcacccagtaccagtttaccttgcaggccacgtcactggatgcgctcagtacctgggtgccacagttgatggaaaaactccagcaactgccacagctttctgatgtctccagcgactggcaggacaaagggctggtggcgtatgtcaatgttgatcgcgacagcgccagccgtctggggatcagcatggcggatgtcgataacgccctgtacaacgcgtttggtcagcggctgatttccactatttatactcaggccaaccagtatcgcgtggtgctggagcacaacaccgaaaataccccaggcctcgcggcgctggataccattcgcctgaccagcagcgacggcggcgtggtgccgctaagctcaattgccaaaattgagcagcgttttgcgccgctctccatcaaccatctggatcagttcccggtaacgaccatctcctttaacgtgccggataactattcgctgggcgatgcggtgcaggcgattatggacaccgaaaagacgctgaatctgccggtggatatcaccacgcagttccagggcagcaccctcgccttccagtcggcgctgggcagcactgtctggctgattgtcgcggcggtggtggcgatgtatatcgtgctcggcattctgtacgagagctttattcacccgatcaccattctctcgacgctacccaccgcaggggttggcgcactgctggcgttgctgattgctggtagcgaactggatgtgattgcgattatcggcattattttgctgatcggtatcgtgaagaagaacgccatcatgatgatcgacttcgcgctggctgctgagcgcgagcaaggcatgtcgccgcgcgaggcaatctaccaggcttgtctgttgcgttttcgtccgatcctgatgaccactctggcggctctgcttggcgcgctgccgctgatgttgagtaccggggtcggcgcggaactgcgtcgtccgttaggtatcggcatggtcggcggtctgattgtcagccaggtgctgacgctgtttaccacgccggtgatttatttgctgttcgaccgcctggcattgtggaccaaaagccgctttgcccgtcatgaagaggaggcgtaa

SEQ ID NO: 20411 - DNA, 900 bp, Escherichia coli
atggcagaatttcccgccagcttactgattcttaatggcaaaagtactgacaatctacccttgcgcgaagcaattatgctgttgcgtgaggaaggaatgacgatccatgtgcgggtcacctgggagaaaggcgatgccgcacgatatgtagaggaggcccggaagtttggcgtcgcaacggtgattgccggtggtggcgatggcaccattaatgaagtttctacggcgttgattcagtgtgagggggatgacatacccgcgctgggaattttgccattaggaaccgccaatgattttgccaccagtgtagggattcctgaggcactggataaggcgctgaaactggcaattgccggtgacgccattgcgatagatatggcgcaggtcaacaaacaaacctgttttattaatatggcgacaggcggatttgggacgcgtattaccacagaaacgccggaaaaattaaaagccgcgctgggtagcgtctcttacatcattcatggcttaatgcgtatggatactctgcaaccggaccgttgtgaaatccgcggtgaaaactttcactggcaaggtgacgccctggtcattggtattggtaacgggcgtcaggccggtggcggtcagcaattgtgtccgaacgcgttaattaacgatggcttgctgcaactgcgcatttttaccggcgatgaaatacttccggctctcgtatcaaccttaaaatctgacgaagataacccgaatattatcgaaggcgcttcgtcgtggtttgatattcaggcaccacacgacatcacctttaatcttgatggcgaaccgttgagtgggcaaaattttcatattgaaatacttccggcagcgttgcgttgtcgattaccaccagattgtccactgttgcgttaa

SEQ ID NO: 20412 - DNA, 1041 bp, Escherichia coli
atgaaatcagtggtgaatgatactgatggtatcgtgcgcgttgcagaaagcgtcattcctgaaattaaacatcaggatgaggtgcgggtaaaaattgccagctcgggcttatgtggttccgatttacccaggatatttaaaaatggtgcacattattatccaataacgttaggccatgaatttagcggctatattgatgcggtgggatccggtgttgatgatttacaccctggcgatgcggttgcctgtgtgccgttattaccctgttttacttgtccagagtgtctgaaagggttttattcccagtgcgcaaaatatgattttattggctcgcggcgtgatggtggatttgctgaatatattgtcgttaagcgaaaaaatgtctttgctctacccacggatatgcctattgaggatggggcttttattgagccgattaccgttggtctgcatgcttttcatttagcgcaaggttgtgagaataaaaacgttattattattggtgccggaaccattggcctgctggccattcagtgcgctgtcgcgctgggagcaaagagtgtgacggcgatcgacattagttcagaaaaactggcactggcaaaatctttcggtgcgatgcaaacatttaacagtagcgaaatgagcgcgccgcaaatgcagagcgttttacgcgaactgcgctttaatcagcttatcctcgagacggctggcgtaccgcaaactgtcgaactggcggtagagattgccggtcctcatgcccaactggcgctggtgggcacgttgcatcaggatctgcatttaacatcggcaacgtttggcaaaatattgcgtaaagagctgacggttatcggcagttggatgaactactccagcccttggccggggcaggagtgggaaacggcgagccggttgctgacagaacgtaagttaagcctggagccattaatcgctcaccgtggaagctttgaaagcttcgcccaggcggtgcgtgacatcgctcgtaatgctatgccgggcaaagtgttgctcattccctga

SEQ ID NO: 20413 - DNA, 861 bp, Escherichia coli
atgaaaatgtacgtggtatcgacaaagcagatgctgaacaacgcacagcgcggcggttatgcggttccggcattcaatattcacaatctcgaaacgatgcaagtggtggtagaaaccgctgccaacctgcatgcgccggtcatcatcgccggaacgcctggcacatttactcatgctggtacagaaaatctgttggcgctggtcagcgcgatggcgaagcaatatcaccatccactggcaattcatctcgaccatcacacgaaatttgacgatatcgctcagaaggttcgttctggcgtgcgctcagtcatgattgacgcctcgcatttgccttttgcgcaaaatatttcacgggtcaaagaggtggtggatttttgccatcgctttgatgtcagcgtcgaggcggagctggggcaacttggcggccaggaagatgatgtgcaagtcaatgaagccgatgcgttgtacaccaaccccgctcaggcgcgtgaatttgccgaggcaaccggaattgattccctggcggtcgccatcggcacggctcatgggatgtatgccagcgcaccggcgcttgatttttctagactggagaacattcgccagtgggtgaacttaccgctggtgctgcatggcgcgtcagggttatcgactaaggatattcagcaaaccatcaaactggggatatgcaaaatcaacgttgcaacggagctgaaaaatgccttctcgcaggcgttaaaaaattacctgaccgagcaccctgaagcgaccgatccccgggattatttgcagtcggctaaatccgcaatgcgcgatgtggtgagcaaagtgattgccgattgtggctgcgagggcagggcataa

SEQ ID NO: 20414 - DNA, 789 bp, Escherichia coli
atgcaagtcgacctgctgggttcagcgcaatctgcgcacgcgttacacctttttcaccaacattcccctcttgtgcactgcatgaccaatgatgtggtgcaaacctttaccgccaataccttgctggcgctcggtgcatcgccagcgatggttatcgaaaccgaagaggccagtcagtttgcggctatcgccagtgccttgttgattaacgttggcacactgacgcagccacgcgctcaggcgatgcgtgctgccgttgagcaagcaaaaagctctcaaacaccctggacgcttgatccagtagcggtgggtgcgctcgattatcgccgccatttttgtcatgaacttttatcttttaaaccggcagcgatacgtggtaatgcttcggaaatcatggcattagctggcattgctaatggcggacggggagtggataccactgacgccgcagctaacgcgatacccgctgcacaaacactggcacgggaaactggcgcaatcgtcgtggtcactggcgagatggattatgttaccgatggacatcgtatcattggtattcacggtggtgatccgttaatgaccaaagtggtaggaactggctgtgcattatcggcggttgtcgctgcctgctgtgcgttaccaggcgatacgctggaaaatgtcgcatctgcctgtcactggatgaaacaagccggagaacgcgcagtcgccagaagcgaggggccaggcagttttgttccacatttccttgatgcgctctggcaattgacgcaggaggtgcaggcatga

SEQ ID NO: 20415 - DNA, 273 bp, Escherichia coli
atgtctcatacaatccgtgataaacagaaactgaaagcgcgtgccagtaagattcagggccaggtcgtggcgctcaagaaaatgctcgacgagccgcacgaatgcgctgcagttttacaacagattgctgctatccgtggcgcggtaaacggtctgatgcgggaagtgattaaaggtcatctgacggaacacatcgttcaccagggggatgagctaaaacgtgaagaagatctggatgtcgttctgaaggtgctggattcatatatcaaataa

SEQ ID NO: 20416 - DNA, 2034 bp, Escherichia coli
atgactcaagtcgcgaagaaaattctggtgacgtgcgcactgccgtacgctaacggctcaatccacctcggccatatgctggagcacatccaggctgatgtctgggtccgttaccagcgaatgcgcggccacgaggtcaacttcatctgcgccgacgatgcccacggtacaccgatcatgctgaaagctcagcagcttggtatcaccccggagcagatgattggcgaaatgagtcaggagcatcagactgatttcgcaggctttaacatcagctatgacaactatcactcgacgcacagcgaagagaaccgccagttgtcagaacttatctactctcgcctgaaagaaaacggttttattaaaaaccgcaccatctctcagctgtacgatccggaaaaaggcatgttcctgccggaccgttttgtgaaaggcacctgcccgaaatgtaaatccccggatcaatacggcgataactgcgaagtctgcggcgcgacctacagcccgactgaactgatcgagccgaaatcggtggtttctggcgctacgccggtaatgcgtgattctgaacacttcttctttgatctgccctctttcagcgaaatgttgcaggcatggacccgcagcggtgcgttgcaggagcaggtggcaaataaaatgcaggagtggtttgaatctggcctgcaacagtgggatatctcccgcgacgccccttacttcggttttgaaattccgaacgcgccgggcaaatatttctacgtctggctggacgcaccgattggctacatgggttctttcaagaatctgtgcgacaagcgcggcgacagcgtaagcttcgatgaatactggaagaaagactccaccgccgagctgtaccacttcatcggtaaagatattgtttacttccacagcctgttctggcctgccatgctggaaggcagcaacttccgcaagccgtccaacctgtttgttcatggctatgtgacggtgaacggcgcaaagatgtccaagtctcgcggcacctttattaaagccagcacctggctgaatcattttgacgcagacagcctgcgttactactacactgcgaaactctcttcgcgcattgatgatatcgatctcaacctggaagatttcgttcagcgtgtgaatgccgatatcgttaacaaagtggttaacctggcctcccgtaatgcgggctttatcaacaagcgttttgacggcgtgctggcaagcgaactggctgacccgcagttgtacaaaaccttcactgatgccgctgaagtgattggtgaagcgtgggaaagccgtgaatttggtaaagccgtgcgcgaaatcatggcgctggctgatctggctaaccgctatgtcgatgaacaggctccgtgggtggtggcgaaacaggaaggccgcgatgccgacctgcaggcaatttgctcaatgggcatcaacctgttccgcgtgctgatgacttacctgaagccggtactgccgaaactgaccgagcgtgcagaagcattcctcaatacggaactgacctgggatggtatccagcaaccgctgctgggccacaaagtgaatccgttcaaggcgctgtataaccgcatcgatatgaggcaggttgaagcactggtggaagcctctaaagaagaagtaaaagccgctgccgcgccggtaactggcccgctggcagatgatccgattcaggaaaccatcacctttgacgacttcgctaaagttgacctgcgcgtggcgctgattgaaaacgcagagtttgttgaaggttctgacaaactgctgcgcctgacgctggatctcggcggtgaaaaacgcaatgtcttctccggtattcgttctgcttacccggatccgcaggcactgattggtcgtcacaccattatggtggctaacctggcaccacgtaaaatgcgcttcggtatctctgaaggcatggtgatggctgccggtcctggcgggaaagatattttcctgctaagcccggatgccggtgctaaaccgggtcatcaggtgaaataa

SEQ ID NO: 20417 - DNA, 3633 bp, Escherichia coli
atggacaaggaattaccgtggctggcggataacgcccaactggaactgaaatataaaaaaggcaaaacgccgctcagtcatcgtcgctggccgggcgaaccagtgtccgttatcactggaagtctcatccagacattgggtgatgaattgctacaaaaagctgagaagaaaaaaaacattgtctggcgttatgagaatttttcactggagtggcagtccgccatcacgcaggccatcaacttgatcggcgaacacaaaccctcaatcccggcccggacaatggcggcgctagcctgtatcgcgcaaaatgacagccaacagttgctcgacgaaatcgtccaacaagaggggctggaatatgcgactgaggtggtgattgcacgccagtttattgcgcggtgttatgagagtgatcctctggtagtgacattgcagtatcaggacgaggattatggctatggttatcgctcagaaacctataacgaattcgatctccgactgcgtaagcatctctctctggcagaggaaagctgctggcagcgttgcgccgacaaactcattgccgcactaccaggaataaacaaagttcgccgcccttttattgcgctgatcctcccggaaaaaccagaaatagccaatgagttggtaggccttgaatgcccgcgaactcattttcattctaaggagtggttaaaagttgttgctaatgaccccacagcggtgagaaaactcgaacactactggagccaggatatatttagcgatcgagaagccagctacatgtcgcatgaaaaccacttcggctacgcggcctgcgccgcccttttgcgcgaacaaggactggcagccattccgcgcctcgcgatgtatgcccataaagaagattgcggcagtctgctggtacaaattaaccatccgcaagtcatccgcaccttgctactggtggctgataaaaacaaacccagcctgcaacgtgtagctaaataccataaaaacttcccccatgcgacgctcgccgcactggcagaactgctggcgttaacagaaccaccagcccgccctggttatccaatcatcgaagacaaaaagctgcctgcacagcaaaaagcacgcgatgaatactggcgtacgctgttacaaacgctgatggcatcgcagccacaactggcagcagaagtgatgccgtggttaagtactcaaccccagtcagtgctgaagagttatttatcggcaccgcccaaaccggttattgatggcaccgataacagcaatctgccagaaatcctcgtttcaccaccgtggcgtagtaagaaaaaaatgacagctccacgtcttgatttggcaccgctcgaattaactccgcaagtttactggcaaccaggcgaacaagagaggcttgccgccactgagcctgcccgttatttcagcacggaatctcttgcgcaacgcatggaacaaaaaagtggacgagttgtattacaggaactgggttttggggatgatgtatggctgtttctgaattatatactccccggaaaactggatgctgcacgcaattcactctttgttcagtggcattactaccaggggcgggttgaagagatcctgaatggctggaactccccggaagcacaattagcagaacaggcgctccgcagcggtcacatagaagcgttaattaacatatgggaaaatgacaactactcacattatcgtccggaaaagagtgtctggaacctgtatttattggcacagttgccgcgtgagatggctttgaccttctggctgcgtatcaatgagaaaaagcatctgttcgcgggtgaggactattttctcagtatcctcggattggatgcgctaccaggtctgctgttggctttttcacatcgtccaaaagaaacatttccgttaattttaaattttggcgcaacagaactggcgctgcctgttgcccacgtctggcgacgtttcgcggcgcagcgtgatctggctcgccagtggattttacaatggccggaacatacggctagtgcacttatccctcttgtctttaccaaacccagcgataatagcgaagccgcattacttgccctgcgtttactgtacgaacagggacatggcgaattgctacaaaccgtggcaaaccgctggcagcgtacagatgtatggtctgccctggagcagttgcttaaacagggtccaatggacatttacccggcacgcattccaaaagcccctgatttctggcatccgcaaatgtggtccaggccgcgccttatcactaataatcaaactgttaccaatgacgctctggaaattatcggcgaaatgctgcgctttacccaggggggacgtttttatagcgggctggaacaactgaaaacgttctgccagccacaaacgctggcagcttttgcctgggatctcttcactgcgtggcaacaagctggtgcccccgcaaaagacaactgggcatttctggcgttaagtctctttggtgacgaaagcacggcacgggatctgacgacacagatcctcgcctggccacaagaaggcaaatctgcccgtgctgtcagcggcctgaacatccttaccctgatgaataatgatatggcgctgatacagctgcatcatatatcgcaacgggctaaatcccgccccttacgtgataacgcggcggaatttcttcaggtggtcgcagaaaatcgcgggctaagccaggaagagctagcggacagattagtcccaaccctgggccttgatgatccgcaggcgttgagttttgattttggtccccggcagtttaccgttcgcttcgatgaaaatctcaacccggttatctttgatcagcaaaacgttcgccagaaaagcgttccccgtttgcgcgccgatgacgatcaactgaaagcgcccgaggcactggcccgactaaaagggctaaaaaaagatgctactcaggtgagcaaaaacctgctcccgcgtcttgaaacggccctacgtaccacccgacgctggtcgctggcagattttcattctctgtttgttaatcatccctttacccgtctggttacccagcgattaatatggggggtttatccggcaaatgaaccgcgttgtttactcaaagcctttcgtgtggccgcagagggggagttctgcaatgcgcaagatgagccaattgacctgcctgcggacgctctgattggcattgcccacccgttagaaatgacagcagaaatgcgcagtgaatttgcacagctttttgccgattacgaaattatgccgccttttcgccagttgtcgcgccgcacggtgctgctcacacctgacgagtcaaccagtaacagcctgactcgctgggaaggtaaatccgctaccgttgggcaacttatgggaatgcgatacaaaggctgggagtcaggctatgaggacgcatttgtctataacctgggtgagtaccggctggtccttaagttttcacccggttttaaccactacaatgttgatagcaaagcgctaatgagcttccgttctcttcgagtgtaccgtgacaataaatccgtcacttttgccgaacttgatgtgtttgatttgagtgaggcgttaagcgcacctgacgtcattttccattaa

SEQ ID NO: 20418 - DNA, 1686 bp, Escherichia coli
atgtacgattttaatctggtgttgctgctgcttcagcagatgtgcgtttttttagtcattgcatggttaatgagtaaaacgccattattcataccgttaatgcaggtcacggttcgtctgccgcataaatttctctgctacatcgtcttttccatcttctgcatcatgggcacctggtttgggttgcacattgacgattctattgccaatacccgtgcgataggcgcggtaatgggcggcttactcggcggtccggtcgtcggtgggctggttgggctgaccggcggcttacatcgatattcgatggggggcatgaccgcgttaagttgcatgatctcgaccatcgttgaaggattactcggtggcctggtacacagcatcctgatccgccgcgggcgcactgataaagtctttaaccccattaccgccggtgccgtcacgttcgtcgctgaaatggtgcaaatgctgatcatccttgcgatcgcccgaccttatgaagatgcggtgcgtctggtgagtaatattgctgcgccaatgatggtcaccaataccgtcggcgcggcgctgtttatgcgtatattgctcgataaacgcgcgatgtttgaaaaatacacttcggctttttctgccactgcgctgaaagtggcagcctcgacggaaggcattttgcgccaggggtttaacgaagtgaacagcatgaaagtggctcaggtgctgtatcaggaactggatattggtgcagtcgcgattaccgatcgagagaaattgctggcctttaccggaattggtgacgaccaccatttacccggcaaaccgatttcttcaacttatactttaaaagcgattgaaaccggtgaagtggtctacgctgatggcaacgaagtaccttaccgttgctctttgcatccgcaatgcaaactggggtcgacgctggtaattccgttgcgtggtgaaaatcagcgggtgatgggcaccatcaaattgtatgaagccaaaaaccgtttattcagttcaatcaaccgcacgttgggtgaggggattgcgcaattgctttcggcgcagatccttgccgggcaatatgagcggcaaaaagcgatgctcacccagtcagagatcaaactgcttcacgcccaggtgaatccccattttttgtttaatgcgcttaacaccattaaagcggtgatccgccgcgacagcgaacaggccagccagctggtgcagtatctttccacttttttccgcaaaaacttaaagcggccttcggagtttgttactctcgccgacgaaattgaacatgtgaatgcttatctgcaaattgaaaaggcgcgcttccagtcgcggttgcaggtcaacattgctattccgcaagaattatcccagcagcaattgcccgcgtttaccctgcaaccgatagtggaaaacgccattaaacatgggacatcacaactgctggatacagggcgagtggcaatcagcgcccgacgtgaggggcaacatttgatgctggagatcgaagacaatgccggtttgtatcaaccggtaaccaatgccagtgggctggggatgaatctggtggataagcgtttacgtgaacggtttggcgatgactatggaataagcgtcgcctgtgagcctgatagttacacccgaataacgttacgactaccatggagggacgaggcatga

SEQ ID NO: 20419 - DNA, 927 bp, Escherichia coli
atgattgaatttagccatgtcagcaaactgttcggcgcacaaaaagccgttaacgatctcaatctcaattttcaggaagggagtttttcggtgctgattggcacatctggctccggcaaatccaccaccctgaaaatgattaaccgcctggtggagcatgacagcggagagatccgctttgccggagaagaaattcgctcgctgccagtactggagttgcgccgccggatgggctatgccattcaatctattggcctgttcccccactggagcgtggcgcaaaacatcgctaccgtgccgcaattacaaaaatggtcgcgggcgcggattgacgatcgtatcgacgaattaatggcgctactggggctggagtcaaatttgcgtgagcgttatccgcatcagctttccggtggtcagcagcaacgtgtgggagtggcgcgtgcactggctgccgatccgcaagtcttactaatggatgaaccttttggcgcactggacccggtaacgcgcggcgcgttgcaacaagagatgacgcgcattcaccgtttgctggggcgtaccattgtgctggtcactcatgatattgatgaggcgctacggctggcagaacatctggtattgatggatcacggtgaagtagtgcagcagggcaatccgctgacgatgctgactcgtccggcgaatgattttgtccgccagttttttggacgtagtgaactgggtgtgcgcctgctttcgttacgtagtgtggcggattacgtgcgtcgcgaagaacgagcagatggtgaggcactggcagaagagatgacgctacgcgatgcgctctctctgtttgttgcgcggggatgcgaggtgctgccggtggtgaacatgcagggccagccttgcggcacgctgcattttcaggatctgctggtggaggcgtaa

SEQ ID NO: 20420 - DNA, 948 bp, Escherichia coli
atgcgtgtgttactggcaccgatggagggagtgcttgactctctggtgcgtgaattgctgaccgaagttaacgactacgatctgtgcatcaccgagtttgtccgcgtggtggatcaactgctgccggtaaaagtctttcatcgcatttgccctgagctacaaaacgccagccggacaccatctggtacgctggtgcgcgtgcagttgttaggtcagttcccacaatggctggcagagaacgccgcccgtgcggtggagttaggttcctggggcgtggatctcaattgcggctgcccgtcgaaaacggttaacggtagcggcggcggggcgacgttactcaaagatcctgaactcatctaccagggtgcaaaagcgatgcgtgaagctgtaccggcgcatttgcccgtcagcgtgaaagtgcgtctgggctgggacagcggtgagaagaaatttgaaatcgccgatgcggttcaacaggctggcgctacggagctggtggtgcatgggcggacgaaagagcagggttaccgcgcggagcatattgactggcaggcgattggcgatattcgccagcggctgaatattccggtgattgccaacggtgaaatctgggactggcagagcgcgcaacaatgcatggcgatcagcggctgcgacgcagtgatgattggtcgcggggcgctcaatattcccaacctgagccgggtggtaaaatataacgaaccgcgaatgccgtggccggaggtggttgctttgctgcaaaaatatacccgtctggaaaagcagggcgataccgggttatatcacgttgcgcggattaaacagtggttgagttatttgcgtaaagaatacgatgaagcaacggaattatttcagcatgttcgggtgttgaataattcccctgatattgcaagggctattcaggcaattgatatcgagaaactctaa

SEQ ID NO: 20421 - DNA, 1521 bp, Escherichia coli
atggtcagctcaacgactccgtcctccggggaatacttgttggaaatgagcggtatcaacaagtcctttcctggtgttaaggcacttgataacgttaatttaaaagtccggccacattctatccatgcattaatgggggaaaacggtgcaggaaaatcgacattattaaaatgcctgtttggtatttatcaaaaagactccggcaccattttattccagggtaaagagatcgatttccattctgcaaaagaagccctggaaaatggtatttcgatggtacaccaggagttaaacctggtattacaacgttcggtgatggataacatgtggctggggcgatatcccaccaaaggcatgtttgtcgatcaggacaaaatgtaccgcgaaaccaaagcgatttttgacgaactggatattgatatcgatccgcgtgcgcgcgtcggcacattatccgtttcgcaaatgcagatgatcgaaatcgccaaagcgttttcctataacgcgaaaattgtgattatggatgaaccgacttcttcgttaaccgaaaaagaggtcaatcatctgttcactattattcgtaaattaaaagagcgcggctgcggtattgtttatatctcgcataaaatggaagaaatcttccagttatgtgatgaagttaccgtattgcgcgacggtcagtggatcgccaccgaaccgctggcaggactgacgatggacaagatcatcgccatgatggttgggcgttctcttaaccagcgtttccctgacaaagaaaacaaaccgggcgaagtcatcctcgaggtacgtaacctgacgtcactgcgccagccgtcgattcgcgatgtctcgtttgatctgcataaaggggagatcctcggtattgccggtctggtgggggcgaaacgtaccgatattgttgagacgttatttggtattcgcgagaaatcggctggcaccataacgttgcacggcaaacagatcaataaccataatgccaacgaagccataaaccatggatttgcactggtaactgaggagcgccgctcaacgggaatttatgcctatctggatattggttttaactcgttaatttccaatattcgcaactacaaaaataaagttggtttactggataactcgcggatgaaaagcgatacccagtgggtgattgattcgatgcgggtaaaaacgccgggtcatcggacgcaaattggttcgctctccggtggtaatcagcaaaaggtgattattggtcgctggctactaacgcaaccagaaatattaatgctcgatgaaccgacgcgcggtattgatgtcggggcgaagtttgaaatttatcagttaattgccgaactggcgaagaaaggcaaggggattattattatctcctctgaaatgcctgagttgttagggataacagaccgtattctggtcatgagcaatggtctcgtttccggaattgtcgatacaaaaacaacaacgcaaaacgaaattctgcgtcttgcgtctttgcacctttaa

SEQ ID NO: 20422 - DNA, 858 bp, Escherichia coli
atgaaatacattggagcgcacgttagtgctgctggcggtctggcaaatgccgcaattcgcgccgccgaaatcgacgcaaccgcgtttgccttgttcaccaaaaaccaacgtcagtggcgtgccgcaccgctcacgacgcaaaccatcgatgaattcaaagccgcctgtgaaaaatatcactacacatcggcgcaaattcttccccacgacagttatctgattaacctcggacatccggtcactgaagctctggaaaaatcgcgcgatgcctttatagatgaaatgcagcgttgcgaacagctggggctttctttgctcaacttccaccctggcagccatctgatgcagatttcagaagaggattgccttgcgcgtattgccgaatccatcaacattgcgctggataaaactcaaggtgtgacagcggtgatagaaaacaccgccggtcagggcagtaacttagggtttaaattcgaacatctcgcggcgattatcgacggcgtggaagataaatcccgcgtcggcgtctgcattgatacctgccatgctttcgctgccgggtatgatttgcgtactccagccgaatgcgagaaaacattcgcggattttgcccgtactgtcggctttaagtatctgcgcgggatgcaccttaacgatgcgaaaagcacctttggcagccgcgttgaccgccatcatagcctcggtgaaggcaatatcggtcatgatgcgttccgctggatcatgcaggacgaccgtttcgacggcattccgctgatcctcgaaaccatcaacccggatatctgggcagaagagatcgcctggctgaaagcgcaacaaactgaaaaagcggtagcctga

SEQ ID NO: 20423 - DNA, 939 bp, Escherichia coli
atgtctgaattaaaaatttcccctgaattattacaaatttccccggaagtgcaggacgctttaaaaaacaaaaaaccggttgtggcgctggaatcgaccattatttctcacgggatgccgttcccacaaaatgcccagaccgcaattgaagttgaagaaactattcgtaaacagggcgctgtacctgccacgatcgccattattggcggcgtgatgaaagtggggttaagcaaagaagaaattgaattactgggtcgtgaagggcataacgtgaccaaagttagtcgtcgcgatttaccttttgttgttgccgccggaaaaaatggcgcaaccactgtggcttcaacgatgattattgcggcgcttgccggaattaaagtatttgccaccgggggaattggtggtgtgcatcgcggggcggaacataccttcgatatttctgccgatttgcaagaactggcaaatactaatgtcaccgttgtttgtgccggggcgaaatctattctcgatttaggattaaccactgagtatttagaaaccttcggtgtgccgttaattggctatcagactaaagcgctgcctgcgtttttctgccgcaccagcccgtttgacgtcagcattcgtctcgacagcgccagcgaaattgcccgtgcaatggtggtgaaatggcaaagcggtctgaacggtggcctcgtggtagcgaacccgatcccggaacagtttgctatgccggaacacactatcaatgcggcgatcgatcaggcggtagctgaagctgaagctcagggagtcattggtaaagaaagtacgccattcctgctggcgcgcgttgctgaactgaccggcggtgacagcctgaaatccaacatccagctggtgttcaacaacgccattctggcgagcgaaattgccaaagaatatcagcgtctcgcgggttaa

SEQ ID NO: 20424 - DNA, 1692 bp, Escherichia coli
atgaaaacgctgctgattattgacgctaatctcggtcaggcacgcgcctatatggcgaagaccctgctgggcgcggcggcgcgaaaagcaaaactggaaatcatcgacaatccgaacgacgctgaaatggcgattgttctcggtgattccatcccgaacgacagcgcgctgaacggtaaaaatgtctggctgggcgatatttcccgggcagttgcgcaccctgagctgttcctgagtgaagccaaaggccatgcgaaaccttacactgcgccggtcgctgcgacagcaccagttgccgccagcggtccgaaacgcgtagttgcggtgactgcttgcccgactggcgtagcacacacctttatggcggctgaagccattgaaaccgaagcgaaaaaacgtggctggtgggtgaaagttgaaacccgtggttctgttggcgcgggtaatgcaatcactcccgaagaagtcgcagcagcggatctggtgattgtggcggcagatatcgaagtggatctggcgaaatttgctggtaaaccgatgtatcgtacctctaccggtctggcgctgaagaaaaccgcgcaggaactggataaagcggttgctgaagcaacgccgtatgaaccggcgggcaaagctcaaacggcgaccactgaaagtaagaaagagagtgcaggcgcataccgtcacttgctgacgggcgtttcttacatgctgccgatggtcgttgcaggtggtctgtgtatcgcgctttcttttgcttttggtatcgaagcgtttaaagagccgggtacgttggctgcggcgctgatgcagattggtggtggttcagcctttgcgctgatggtgccggtactggcaggttatattgccttttccattgccgatcgtccgggcctcactccgggtctgattggcggtatgctggcggtcagcaccggttctggcttcattggtggtattattgcgggcttcctggctggttacattgcgaagttaatcagtacgcaattgaaactgccacagagtatggaggcgctgaaaccgatcctgatcattccgctaatttccagtctggtggtcggtctggcgatgatctacctgatcggtaaaccagttgctggcattctcgaagggctgactcactggctgcagaccatggggactgcgaatgcggttctgctgggggcgatcctcggtggcatgatgtgtactgacatgggcggtccggtaaacaaagcagcgtacgcattcggtgtgggtctgctgagtactcaaacctatggcccgatggcggcgattatggcggcaggtatggtgccaccgctggcaatgggtctggcaacaatggtggcgcgtcgcaaattcgacaaagcgcagcaggaaggtggcaaagccgctctggtattgggactgtgcttcatttcggaaggtgcaattccgtttgctgctcgtgatccgatgcgtgtgctgccgtgctgtatcgtgggtggggcgctgactggcgcaatctcaatggcgattggtgcgaaactgatggcaccgcacggtggtctgtttgttctgctgatccctggcgctattacgccggtattgggttacctggtagcaattattgccggtacgctggtggcgggtttggcctatgccttcctgaaacgtccggaagtggacgcagtagcgaaagcagcgtaa

SEQ ID NO: 20425 - DNA, 939 bp, Escherichia coli
atgagcagacgtgttgctactatcacccttaatccggcttatgaccttgttggtttctgcccggaaattgaacgcggcgaagtgaacctggtgaaaaccaccggtctgcatgcggcgggtaaaggcatcaacgtggccaaagtattaaaagacctgggaattgatgtcaccgttggcggcttcctgggtaaagacaatcaggatggttttcagcaactgttcagcgagctgggcattgccaaccgtttccaggttgtacaggggcgcacccgaattaacgttaagctgacggaaaaagacggcgaagtgaccgacttcaacttctcgggttttgaagtcacccccgccgactgggaacgctttgtgactgattctctgagctggctcggtcagttcgatatggtctgtgtcagcggaagcttaccgtcaggcgtcagcccggaagcgttcaccgactggatgactcgcctgcgtagtcagtgtccttgcattatctttgatagtagccgtgaagcgttagtagcaggtttgaaagcggcaccgtggctggtgaaacctaaccgccgcgagctggaaatctgggcaggccgtaaactgcctgaaatgaaagatgtgattgaagctgcacatgcgctacgtgaacaaggcatcgcgcatgttgttatttcactgggtgccgaaggcgcgctttgggttaatgcctccggcgaatggatcgccaaaccaccgtcagtcgatgtcgtaagcaccgttggcgcaggggattctatggttggtggcctgatttatggcttgctgatgcgtgaatccagtgaacacacactgcgtctggcgacagctgttgcagccctggcggtaagtcaaagcaatgtgggtattaccgatcgtccgcagttggccgcaatgatggcgcgcgtcgacttacaaccttttaactga

SEQ ID NO: 20426 - DNA, 1131 bp, Escherichia coli
atgttccagttatccgtacaggacatccatccgggcgaaaaggccggagacaaagaagaggcgattcgccaggtcgctgcggcgctggtgcaggccggtaatgtagcagaaggctacgtcaatggcatgctggcgcgcgaacagcaaacctcaacgttcctcggcaatggtattgctattccacacggcactaccgacacccgcgatcaggtgctgaaaaccggcgttcaggtatttcagttcccggaaggcgtcacctggggtgacggtcaggtagcgtacgtggcaatcggtattgctgccagctcggatgaacatctgggcctgctacgccagctgacccacgtactgagcgatgattccgttgctgaacaactgaagtcagcaacaacagcagaagaacttcgcgcattactgatgggcgaaaagcagagtgagcagctgaagctcgacaacgaaatgctgacactggatatcgtcgccagcgatctgctgactcttcaggcgctgaacgctgcgcgtctgaaagaggcgggggcagttgacgccactttcgtcaccaaagccatcaatgaacaaccgctgaatctcggacagggtatctggctgagcgatagcgccgaaggcaatctgcgtagcgcgattgcggtaagccgtgcggcaaatgcttttgatgtggacggcgaaacggcagccatgctggtgagtgtggcgatgaatgacgatcagcccatcgcggttcttaagcgtctcgctgatttattgctcgacaataaagctgaccgcttgctgaaagcggatgcggcaacgttgctggcgctgctgaccagcgatgatgcgccgaccgacgacgtgttaagcgcggagtttgtggtgcgcaatgaacacggcctgcatgctcgtccaggtaccatgctggtcaataccattaaacaatttaacagtgatattaccgtgacaaaccttgatggtaccggcaaaccggcaaacggacgtagtctgatgaaagttgtggcacttggcgttaagaaaggtcatcgcctacgctttaccgcccagggtgcagatgctgaacaggcgctgaaagcaatcggcgacgctatcgctgctggtcttggggagggcgcataa

SEQ ID NO: 20427 - DNA, 696 bp, Escherichia coli
atgcgacttgataaatttatcgcacagcaactcggcgttagccgtgctattgccgggcgtgaaatccgcggcaatcgtgtcaccgtcgatggcgaaatcgtccgtaatgcagcgttcaaactgcttcctgaacatgatgtcgcttacgatggcaacccgctggcgcagcaacacggtccacgttacttcatgctcaataagcctcagggctatgtttgctccacggacgaccctgatcacccaacggtgctctattttcttgatgaaccggtagcgtggaaactgcatgcggcggggcggttggatattgataccaccggtctggtgctgatgactgatgatggtcagtggtcgcaccgcattacttctccgcgccatcattgcgagaagacctatctggtgacactggaatcacctgtagctgacgatacggcagagcaatttgctaaaggcgtgcagctgcataacgaaaaagatctcactaagcctgcggtgctggaagtgattaccccaacgcaggttcgtctgaccatcagcgaagggcgttatcatcaggtgaaacgcatgttcgccgccgtgggtaaccacgtggttgagctgcatcgtgaacgtattggcggtattacgctggatgctgatttagcccccggtgaatatcgtccgttaactgaagaagaaattgccagcgtcgtctaa

SEQ ID NO: 20428 - DNA, 1761 bp, Escherichia coli
atgatttttacacttcgcccatatcagcaagaagccgtggatgccacgctcaaccattttcgtcgtcataaaacccctgccgttatcgtgctgcccaccggcgcaggtaaaagcctggtgatagcggaactggcacggctggctcgtggtcgcgtgctggtgctggcacacgttaaagaactggtggcgcaaaaccatgcaaagtatcaggcgctggggctggaagccgatatttttgccgccgggctaaagcgcaaagagagccacggtaaagtggtatttggcagcgtgcagtctgtcgcccgtaatcttgatgcctttcagggtgaattttcgctgttgattgtcgatgaatgtcaccgtattggtgacgatgaagagagccagtatcagcaaatcctcactcacctgacaaaagtgaatccccacttacgcctgctggggctgactgccacgccttttcgattgggcaaaggctggatctaccagtttcattatcacggcatggtacgcggcgatgagaaagcccttttccgtgactgcatttatgagctgccgctgcgttatatgattaaacacggctatctgacgccgccagaacgactggatatgccagtagtgcaatacgatttcagccgcttgcaggcacagagtaacgggctgttcagcgaagccgatctcaaccgtgagctgaaaaaacaacaacgtattaccccgcacatcatcagccagattatggagtttgctgcaacgcgcaaaggggtgatgatttttgccgcgacggttgaacacgcaaaagagattgtgggattactgcctgccgaagatgcagcactgattactggcgacacccccggcgctgagcgcgatgtgttaattgaaaattttaaagcccagcgttttcgctatctggtcaacgtcgcggtactgaccaccggatttgacgccccgcacgtcgatcttatcgccattctgcgccctaccgaatcagtgagtctttaccaacaaattgtcgggcgcggtctgcgtctcgctccgggcaagactgattgcttaattcttgattatgcgggtaatcctcacgatctctacgcgccggaagttggtacaccaaaaggcaaaagtgacaacgttccggtacaggttttctgccctgcctgcggttttgccaacaccttttgggggaaaacgaccgccgacgggacattgattgaacactttggtcgtcgctgtcagggatggtttgaagatgacgacggtcatcgcgaacaatgtgacttccgtttccgttttaaaaattgcccgcaatgtaacgcggaaaacgatattgccgcccgccgctgccgcgaatgtgacaccgtactggttgatccggacgatatgttaaaagcggcgctacgactgaaagacgcgctggtattacgctgtagcggcatgtctttgcaacatgggcacgacgagaaaggcgaatggttgaaaatcacctattacgatgaagacggcgcggatgtgagtgagcgtttccgtctgcaaacacctgcccagcgtaccgccttcgagcagctttttatccgcccgcatacgcgcacaccgggcatcccgctgcgctggatcaccgccgccgatatcctcgcccagcaagccttattgcgacacccggattttgtcgtcgcccgcatgaaaggccagtactggcaggtgcgtgaaaaagtgttcgattacgaaggtcgttttcgtctggcgcacgaattacgcggttaa

SEQ ID NO: 20429 - DNA, 2511 bp, Escherichia coli
ttggcatcaactgttgagtatggtgagacagttgatggtgttgtcctggaaaaagatatccagctggtttatgggaccgccaataatacgaaaatcaatcctggcggagaacagcatataaaagaatttggtgtaagtaataatactgaaattaacggagggtatcagtacattgaaatgaatggcgccgcagaatactcagtattaaatgacggttatcaaattgttcaaatgggtggcgcggcaaaccagactacgctcaataatggtgtgctacaggtttatggcgcagcgaatgataccacgattaaaggcgggcgcttaatcgttgaaaaagatgggggggccgtctttgtcgctatcgaaaagggaggactactggaggttaaagaggggggatttgcatttgcggtagatcagaaagcaggcggtgctattaaaacaaccacgcgggccatggaggtattcggaacaaaccgtctcggtcagttcgatatcaagaatggtattgctaataatatgttgttggaaaacggcggaagtttgcgagttgaagaaaatgacttcgcttataataccactgtagatagtggcggcttactggaggttatggatggcgggactgtaactggcgttgataaaaaagcaggcggaaaattaattgtctcaacgaatgcgctggaagtgagtggtccaaacagtaaaggccaatttagtataaaagatggtgtgtcaaaaaattatgaactggatgatggttccgggctcattgttatggaggacacgcaggccattgatactatccttgataagcatgccactatgcaatcgctgggaaaggatactggtacgaaagtgcaggcaaatgcggtatatgatctcggtcgatcatatcagaatggaagtatcacgtattcctcaaaagccatctctgaaaatatggttatcaacaatggccgcgctaacgtctgggctggcacaatggttaacgtttcagtcagagggaatgatggcattcttgaggtcatgaagccgcaaataaattatgcacccgcaatgttggtgggtaaggtagtggtttctgagggcgcttcttttagaacgcatggtgccgtggataccagcaaagcggacgtttcgctcgaaaatagcgtatggaccatcattgccgatatcactacgacgaaccaaaacaccctcctcaacttagccaaccttgcgatgtctgacgcaaatgtgattatgatggatgagccagtgactcgttcatcagtgacggcaagtgcggaaaatttcattacgttgaccaccaataccctgtcgggaaacggcaatttttatatgcgtaccgatatggctaatcatcagagcgatcagctcaacgtcaccggtcaggcaacaggtgatttcaaaatattcgtgacggacaccggtgccagcccggcagcaggagatagccttacactggtaacaacgggcggcggtgatgctgcatttacgttgggcaatgccggaggcgttgttgatatcggtacgtatgaatataccttgctggataatggcaaccatagctggagtctggcagagaatcgcgcgcaaattaccccttcaaccactgatgtgctgaatatggcggccgcacaaccgctggtatttgatgcagaactggacaccgtgcgtgagcgtcttggtagcgtaaaaggcgttagttacgatacggcgatgtggagttcggcaattaacacccgcaacaacgtgaccactgatgcgggagctggttttgagcaaacattgacgggcctgacgctcggtatcgatagccgtttctcccgtgaagaaagcagtacaattcgcggcttgatctttggttactctcattctgatattggttttgatcgcggcggcaaaggtaatatcgatagctataccctgggggcttatgccggttgggagcatcagaacggtgcctatgttgatggggtggtgaaagttgaccgttttgccaacaccatccatggcaagatgagtaatggggcaacagcgtttggcgattacaatagtaacggcgcgggtgctcatgttgagagcgggttccgttgggttgacggattgtggagtgttagaccctatctggcctttaccggctttaccacagatggtcaggactacacgttatcaaacggcatgcgcgcggatgtgggaaatacccggatattacgcgctgaagcgggaacggcggtaagctatcacatggacctgcaaaacggtacgacgctggaaccctggctgaaagcggccgtgcgtcaggaatacgccgattctaaccaggtgaaagttaatgacgatggcaaatttaataatgatgtggctggaaccagtggcgtttatcaggctggtataaggtcatcgtttaccccgacgttaagcggtcatttgtcagtcagctatggcaatggcgcaggggtagaatcgccgtggaatactcaggcgggtgtggtctggacgttctga

SEQ ID NO: 20430 - DNA, 1017 bp, Escherichia coli
atgtttgtcatctggagccatagaacagggttcatcatgagtcatcaacttaccttcgccgacagtgaattcagcagtaagcgccgtcagaccagaaaagagattttcttgtcccgcatggagcagattctgccatggcaaaacatggtggaagtcatcgagccgttttaccccaaggctggtaatggccggcgaccttatccgctggaaaccatgctacgcattcactgcatgcagcattggtacaacctgagcgatggcgcgatggaagatgctctgtacgaaatcgcctccatgcgtctgtttgcccggttatccctggatagcgccttgccggaccgcaccaccatcatgaatttccgccacctgctggagcagcatcaactggcccgccaattgttcaagaccatcaatcgctggctggccgaagcaggcgtcatgatgactcaaggcaccttggtcgatgccaccatcattgaggcacccagctcgaccaagaacaaagagcagcaacgcgatccggagatgcatcagaccaagaaaggcaatcagtggcactttggcatgaaggcccacattggtgtcgatgccaagagtggcctgacccacagcttggtcaccaccgcggccaacgagcatgacctcaatcagctgggtaatctgctgcatggagaggagcaatttgtctcagccgatgccggctaccaaggggcgccacagcgcgaggagctggccgaggtggatgtggactggctgatcgccgagcgccccggcaaggtaagaaccttgaaacagcatccacgcaagaacaaaacggccatcaacatcgaatacatgaaagccagcatccgggccagggtggagcacccatttcgcatcatcaagcgacagttcggcttcgtgaaagccagatacaaggggttgctgaaaaacgataaccaactggcgatgttattcacgctggccaacctgtttcgggcggaccaaatgatacgtcagtgggagagatctcactaa

SEQ ID NO: 20431 - DNA, 489 bp, Escherichia coli
atgaagaccattctacctgcagtattgtttgccgctttcgctaccacttccgcctgggcggcagaaagcgtccagccactggaaaaaatcgcgccttatccacaagctgaaaaagggatgaagcgtcaggtgattcagttaaccccgcaagaagatgaatctaccctgaaagtagaactgttaatcggtcagacgctggaagtcgattgcaatttgcatcgtctcggcgggaagctggaaaacaaaacgctggaaggctggggctatgattattatgtctttgataaagtcagttccccggtttcaacgatgatggcctgcccggatggcaagaaagagaagaaatttgtcaccgcgtatctgggcgatgctggaatgctgcgttacaacagcaagctgccgatcgtggtgtatacgccagacaatgtagatgtgaagtaccgcgtctggaaggcggaagagaaaattgacaacgcggtagttcgctaa

SEQ ID NO: 20432 - DNA, 1647 bp, Escherichia coli
atgaaaaaagtgactgccatgctcttctcgatggccgtggggcttaatgccgtttcgatggcggcaaaagcgaaagcgtccgaggagcaggaaactgatgtactgttgattggcggcggcattatgagcgccacgttggggacctatttacgcgagctggagcctgaatggtcgatgaccatggtggagcgcctggagggtgtcgcgcaggagagttcgaacggctggaataacgccggaaccgggcattctgcactgatggaactgaactacaccccgcaaaacgccgatggcagcatcagtattgaaaaagcagtcgccattaacgaagcatttcagatttcccgccagttctgggcgcaccaggttgagcgcggcgtgctgcgtactccgcgttcatttatcaataccgttccgcatatgagctttgtctggggcgaggataacgtcaatttcctgcgcgcccgttacgccgcgttgcaacaaagctcgctgtttcgcggtatgcgttactctgaagatcacgcgcagatcaaagagtgggcaccgttagtgatggaagggcgcgatccgcaacagaaagtggcagccacgcgtacggaaattggtaccgatgtgaactacggcgagatcacccgccagttaattgcttccttgcagaagaaatctaacttctcgctgcaactcagcagcgaagtccgcgccctaaagcgtaatgacgataacacctggaccgttaccgttgccgatctgaaaaatggcactgcacagaacattcgtgccaaatttgtctttatcggcgcgggcggtgcggcgctgaagctgttacaggaatcggggattccggaagcgaaagactacgccggtttcccggtgggcggacagttccttgtttcggaaaacccggacgtggttaatcaccatctggcgaaggtttacggtaaagcatccgttggcgcaccaccgatgtcggttccgcatatcgatacccgcgttctggacggtaaacgcgtagtgctgtttgggccatttgccaccttctcaaccaaattcctcaaaaacggttcattgtgggatctaatgagttccaccaccacctctaacgtgatgccgatgatgcacgtcgggctggataatttcgatctggtgaaatatctggtgagtcaggtgatgttgagtgaagaggatcgttttgaagcgttgaaagagtactatccgcaggcgaaaaaagaggactggcgtttgtggcaagcggggcagcgcgtgcagattatcaagcgtgatgccgagaaaggtggcgtactgcgtctgggtactgaagtcgtcagtgaccagcaaggaaccattgccgcgctcctgggggcatcgccaggggcgtcaaccgccgcgccgattatgttgaatctgctggaaaaagtatttggcgatcgtgtttccagcccgcaatggcaggctacgttgaaagcgatcgttccgtcttatggacgcaagctgaacggtgatgtagcggcaacagaacgcgagttgcagtacaccagcgaagtgctggggttgaactacgacaagccgcaggcagcagatagtacgccgaaaccgcagttgaaaccgcaacccgttcaaaaagaagtggcggatattgcgttgtaa

SEQ ID NO: 20433 - DNA, 2628 bp, Escherichia coli
atgagcgaccttgcgagagaaattacaccggtcaacattgaggaagagctgaagagctcctatctggattatgcgatgtcggtcattgttggccgtgcgctgccagatgtccgagatggcctgaagccggtacaccgtcgcgtactttacgccatgaacgtactaggcaatgactggaacaaagcctataaaaaatctgcccgtgtcgttggtgacgtaatcggtaaataccatccccatggtgactcggcggtctatgacacgatcgtccgcatggcgcagccattctcgctgcgttatatgctggtagacggtcagggtaacttcggttctatcgacggcgactctgcggcggcaatgcgttatacggaaatccgtctggcgaaaattgcccatgaactgatggccgatctcgaaaaagagacggtcgatttcgttgataactatgacggcacggaaaaaattccggacgtcatgccaaccaaaattcctaacctgctggtgaacggttcttccggtatcgccgtaggtatggcaaccaacatcccgccgcacaacctgacggaagtcatcaacggttgtctggcgtatattgatgatgaagacatcagcattgaagggctgatggaacacatcccggggccggacttcccgacggcggcaatcattaacggtcgtcgcggtattgaagaagcttaccgtaccggtcgcggcaaggtgtatatccgcgctcgcgcagaagtggaagttgacgccaaaaccggtcgtgaaaccattatcgtccacgaaattccgtatcaggtaaacaaagcgcgcctgatcgagaagattgcggaactggtaaaagaaaaacgcgtggaaggcatcagcgcgctgcgtgacgagtctgacaaagacggtatgcgcatcgtgattgaagtgaaacgcgatgcggtcggtgaagttgtgctcaacaacctctactcccagacccagttgcaggtttctttcggtatcaacatggtggcattgcaccatggtcagccgaagatcatgaacctgaaagacatcatcgcggcgtttgttcgtcaccgccgtgaagtggtgacccgtcgtactattttcgaactgcgtaaagctcgcgatcgtgctcatatccttgaagcattagccgtggcgctggcgaacatcgacccgatcatcgaactgatccgtcatgcgccgacgcctgcagaagcgaaaactgcgctggttgctaatccgtggcagctgggcaacgttgccgcgatgctcgaacgtgctggcgacgatgctgcgcgtccggaatggctggagccagagttcggcgtgcgtgatggtctgtactacctgaccgaacagcaagctcaggcgattctggatctgcgtttgcagaaactgaccggtcttgagcacgaaaaactgctcgacgaatacaaagagctgctggatcagatcgcggaactgttgcgtattcttggtagcgccgatcgtctgatggaagtgatccgtgaagagctggagctggttcgtgaacagttcggtgacaaacgtcgtactgaaatcaccgccaacagcgcagacatcaacctggaagatctgatcacccaggaagatgtggtcgtgacgctctctcaccagggctacgttaagtatcagccgctttctgaatacgaagcgcagcgtcgtggcgggaaaggtaaatctgccgcacgtattaaagaagaagactttatcgaccgactgctggtggcgaacactcacgaccatattctgtgcttctccagccgtggtcgcgtctattcgatgaaagtttatcagttgccggaagccactcgtggcgcgcgcggtcgtccgatcgtcaacctgctgccgctggagcaggacgaacgtatcactgcgatcctgccagtgaccgagtttgaagaaggcgtgaaagtcttcatggcgaccgctaacggtaccgtgaagaaaactgtcctcaccgagttcaaccgtctgcgtaccgccggtaaagtggcgatcaaactggttgacggcgatgagctgatcggcgttgacctgaccagcggcgaagacgaagtaatgctgttctccgctgaaggtaaagtggtgcgctttaaagagtcttctgtccgtgcgatgggctgcaacaccaccggtgttcgcggtattcgcttaggtgaaggcgataaagtcgtctctctgatcgtgcctcgtggcgatggcgcaatcctcaccgcaacgcaaaacggttacggtaaacgtaccgcagtggcggaatacccaaccaagtcgcgtgcgacgaaaggggttatctccatcaaggttaccgaacgtaacggtttagttgttggcgcggtacaggtagatgactgcgaccagatcatgatgatcaccgatgccggtacgctggtacgtactcgcgtttcggaaatcagcatcgtgggccgtaacacccagggcgtgatcctcatccgtactgcggaagatgaaaacgtagtgggtctgcaacgtgttgctgaaccggttgacgaggaagatctggataccatcgacggcagtgccgcggaaggggacgatgaaatcgctccggaagtggacgttgacgacgagccagaagaagaataa

SEQ ID NO: 20434 - DNA, 1842 bp, Escherichia coli
atgaacatgcttgccttaaccattattttgccattgattggcttcgtcctgctggcattctcccgtgggcgctggtctgaaaacgtctcggcgatcgtcggcgtaggctctgtgggcctggcggcgctggtaaccgcctttatcggcgttgatttcttcgctaacggcgagcagacatacagccagccgctgtggacgtggatgtcggtaggcgactttaacatcggttttaacctggtgctggacggcctgtcgctgaccatgctctcggtggtcactggtgtgggtttccttattcacatgtacgcctcctggtatatgcgcggtgaagagggctactctcgcttcttcgcttacaccaacctgttcatcgccagcatggtggttctggtgcttgccgacaacctgctgctgatgtacctcggctgggaaggcgtgggcctgtgctcctatctgctgatcgggttctattacaccgatccgaagaatggcgcagcggcaatgaaagcgttcgtcgtgacccgtgtgggtgacgtgttcctcgctttcgcactgttcattctttacaacgaactgggcaccctgaacttccgcgaaatggtggaactggcaccagcgcactttgctgacggcaataacatgctgatgtgggcgacgctgatgctgctgggcggtgcggtcggtaaatctgcgcagttgccgttgcagacatggcttgccgacgcgatggcgggcccgacgcctgtctccgcgctgatccacgccgcaaccatggtaaccgcgggtgtctacctgatcgcccgtacccacggcctgttcctgatgacgccggaagttctgcatctggtgggtattgtcggggcggttacgctgctgctggccggttttgccgcgctggtacagaccgacatcaaacgtgttctcgcttactctaccatgagccagattggctacatgttcctcgcgcttggcgtgcaggcatgggatgcggcgattttccacttgatgacccacgcgttctttaaagcgctgctgttcctggcatccggttccgtcattctggcctgccatcacgaacagaacatcttcaagatgggcggtctgcgtaaatctattccgctggtttatctctgcttcctggtgggcggcgcagcactgtcggcactaccgctggtcactgcgggcttcttcagtaaggatgagatcctcgcgggtgcgatggcgaatggtcatatcaatctgatggtggcaggtctggtcggtgcgtttatgacctcgctctacaccttccgtatgattttcatcgtcttccacggaaaagaacaaattcacgctcacgccgtgaaaggggtaactcacagcctgccgctgattgtgctgctgatcctttccaccttcgttggcgcactgattgtaccgccgctgcagggcgtgcttccgcaaacgacggaactggcgcacggcagcatgttgaccctggaaattacctctggcgtggtcgcggtggtcggcattctgctggcagcctggctgtggctgggtaaacgtactctggtgacctccatcgccaacagtgcgccgggccgtctgctgggcacctggtggtacaacgcctggggatttgactggctgtatgacaaagtgttcgtcaagccgttcctgggtattgcctggttgctgaaacgcgatccgctgaactcaatgatgaacatcccggctgtcctttcccgctttgcaggtaaaggtctgctgttaagtgagaacggctatctgcgctggtatgtggcatccatgagcatcggtgcggtcgtggtgctggcactgttgatggtactgcgttga

SEQ ID NO: 20435 - DNA, 1338 bp, Escherichia coli
atgaaaaacattatccgtactcccgaaacgcatccgctgacctggcgtctgcgcgatgacaaacagccagtgtggctggacgaataccgcagcaaaaacggttacgaaggcgcgcgtaaggcgctgaccgggctgtctccggacgaaatcgttaatcaggtaaaagacgctggtctgaaagggcgcggcggcgcgggcttctcgactggcctgaaatggagcctgatgccgaaagacgaatccatgaacatccgttacctgctgtgtaatgccgatgaaatggagccgggcacctataaagaccgcctgttgatggagcaactgccgcacctgctggtggaaggtatgctcatctccgcgtttgcgctgaaagcttaccgtggctacatcttcctgcgtggcgaatatatcgaagcggcagttaatctgcgccgtgccattgccgaagccaccgaagcgggtctgcttggcaaaaacattatgggaacaggtttcgatttcgaactgttcgtccataccggggcagggcgctacatctgcggggaagaaacagcgttaatcaactccctggaaggacgtcgtgctaacccacgctcgaagccacccttcccggcaacctccggcgcatggggtaaaccgacctgtgtcaacaacgtcgaaaccctgtgtaacgttccggcgatcctcgctaacggcgtggagtggtatcagaacatctcgaaaagtaaagatgctggcaccaagctgatgggcttctccggtcgggtgaaaaatccgggactgtgggaactgccgttcggcaccaccgcacgcgagatcctcgaagattacgccggtggtatgcgtgatggtctgaaatttaaagcctggcagccaggcggcgcggggactgacttcctgaccgaagcgcaccttgatctgccgatggaattcgaaagtatcggtaaagcgggcagccgtctgggtacggcgctggcgatggcggttgaccatgagatcaacatggtgtcgctggtgcgtaacctggaagagtttttcgcccgtgagtcctgcggctggtgtacgccgtgccgcgacggtctgccgtggagcgtgaaaattctgcgtgcgctggagcgtggtgaaggtcagccgggcgatatcgaaacacttgagcaactgtgtcgattcttaggcccgggtaaaactttctgtgcccacgcacctggtgcagtggagccgttacagagcgccatcaaatatttccgcgaagaatttgaggcgggaatcaaacagccgttcagcaatacccatttgattaatgggattcagccgaacctgctgaaagagcgctggtaa

SEQ ID NO: 20436 - DNA, 501 bp, Escherichia coli
atgcacgagaatcaacaaccacaaaccgaggcttttgagctgagtgcggcagagcgtgaagcgatcgagcacgagatgcaccactacgaagacccgcgtgcggcgtccattgaagcgctgaaaatcgttcagaagcagcgtggctgggtgccggatggtgcgatccacgcgatcgccgatgtgctgggtattccggcaagcgacgtcgaaggtgtggcaacgttctacagtcagatcttccgccagccggttggtcgccatgtgatccgttattgtgacagcgtggtctgtcatatcaacggttatcagggtattcaggcggcgctcgagaaaaagctgaacatcaaaccagggcaaacgacatttgatggccgctttacgctgctgccaacttgctgcctggggaactgtgataaagggccaaacatgatgatcgatgaggacactcacgcgcatctgaccccggaagcgatccctgaactgctggagcggtataaatga

SEQ ID NO: 20437 - DNA, 1542 bp, Escherichia coli
gtgcaagggaatatttgcgctatgtccgcaatcactgaatccaaaccaacaagaagatgggcaatgcccgatacgttggtgattatcttttttgttgctattttaaccagccttgccacctgggtagttccggtggggatgtttgacagtcaggaagtgcagtatcaggttgatggtcaaacaaaaacacgcaaagtcgtagatccacactcatttcgcattctgactaacgaagcaggcgaacctgagtatcaccgcgtacagctgttcacgacgggcgatgaacgcccgggcctgatgaacttcccgtttgaaggattaacctcaggatcgaaatacgggacagccgttggcatcatcatgtttatgctggtgattggcggcgcgtttggcattgtgatgcgtacaggaaccattgataacggtatcctggcgcttattcgccatacccgcgggaatgaaattctctttattcctgcgctgtttattctgttttcacttggcggcgcggtatttggtatgggagaagaggccgtcgcctttgccattatcatcgcaccgctaatggtccggctgggctatgacagtattaccaccgtcctggtgacctatattgccacgcaaatcggttttgccagttcgtggatgaacccgttttgtgtggtcgttgctcaggggattgccggcgttccggtgctttctggctccgggttgcgcatcgtggtgtgggttatcgccactctgattggcctgatctttaccatggtgtacgcctcacgagtgaaaaagaatcctcttctgtcacgcgtgcatgagtccgaccgcttctttcgtgaaaagcaggctgatgttgaacaacgtccgtttacctttggtgactggctggtattgattgtcctgaccgccgtaatggtctgggtgatttggggcgtgatcgttaatgcctggtttattccagaaattgccagccagttcttcaccatgggtctggtgattggcatcatcggcgttgttttccgccttaacggcatgacggttaataccatggcttcatcctttaccgaaggggcgcgaatgatgatcgcccctgccctgctggtgggtttcgccaaagggattttgctgctggtcggtaatggtgaagcgggtgatgccagcgtgttaaataccatcctcaacagcattgccaatgccattagcggtctggacaacgcggtcgcggcctggtttatgttgctcttccaggcggtatttaatttcttcgtgacgtccggttctggtcaggcggcgttaaccatgccgttactggcaccgcttggcgatctggtcggtgttaaccgtcaggttaccgtgctggcgttccagtttggtgatggcttcagtcacatcatttacccaacctcagcgtcgttaatggcaacgctcggtgtgtgcagggtggacttccgtaactggctgaaggtgggcgcgaccctacttggactgctgtttattatgtccagcgtcgtagtgatcggcgctcagttgatgggctaccactaa

SEQ ID NO: 20438 - DNA, 894 bp, Escherichia coli
atgaacatagtgatcaccggagggacaggattaattggtcgccatttgattccgcgtttgctggagctgggccatcaaattacggtagtgacgcgtaacccgcagaaagccagttccgttctcggccctcgggtgacactatggcaagggcttgccgatcaaagcaacctcaacggcgttgatgcggtaatcaacctggccggagaaccgattgctgataaacgctggactcacgagcaaaaagagcgtctctgccaaagccgctggaatatcacgcaaaaactggtcgatttgattaatgccagcgacacgccaccgtcggtactcatttccggctcggcaacgggctattatggtgacttaggtgaagtggtggttaccgaagaggaaccgccgcataacgaatttacccataaactctgcgctcgctgggaagaaattgcctgccgggcgcaaagtgacaaaacgcgagtgtgcctgctgcgtaccggtgtagtgctggcaccggatggcggtattctcggtaaaatgctgccgccgtttcgtcttggcctgggcgggccgattggctctggtcggcagtatctggcctggattcatattgatgatatggtcaacggtattctctggctgctggataacgagctgcgcgggccatttaatatggtttcgccctacccggtacgcaatgaacaatttgcccatgcgctcggtcatgcgctgcatcgcccggccattttgcgcgtccccgcgaccgccattcgactgttaatgggcgaatcttcagtactggtattaggtggacaacgcgcgctgcctaaacggctggaagaagcgggttttgcgtttcgctggtacgatttagaagaggcgctggcggatgtcgttcgctga

SEQ ID NO: 20439 - DNA, 1086 bp, Escherichia coli
atggctggaaacacaattggacaactctttcgcgtaaccaccttcggcgaatcgcacgggctggcgctcggctgcatcgtcgatggtgttccgccaggcattccgctgacggaagcggacctgcaacatgacctcgaccgtcgtcgccctgggacatcgcgctataccacccagcgccgcgagccggatcaggtcaaaattctctccggtgtttttgaaggcgttactaccggcaccagcattggcttgttgatcgaaaacactgaccagcgctctcaggattacagtgcgattaaggacgttttccgtccaggccatgccgattacacctacgaacaaaaatacggtctgcgcgattatcgcggcggtggacgttcttccgcccgcgaaaccgccatgcgcgtggcggcaggagctattgccaaaaaatatctcgccgagaaatttggtattgaaatccgtggctgcctgacccagatgggcgacattccgctggatatcaaagactggtcgcaggtcgagcaaaatccgtttttttgcccggaccccgacaaaatcgacgcgttagacgagttgatgcgtgcgctgaaaaaagagggcgactccatcggcgctaaagtcaccgttgttgccagtggcgttcctgccggacttggcgagccggtctttgaccgcctggatgctgacatcgcccatgcgctgatgagcatcaacgcggtgaaaggcgtggaaattggcgacggctttgacgtggtggcgctgcgcggcagccagaaccgcgatgaaatcaccaaagacggtttccagagcaaccatgcgggcggcattctcggcggtatcagcagcgggcagcaaatcattgcccatatggcgctgaaaccgacctccagcattaccgtgccgggtcgtaccattaaccgctttggcgaagaagttgagatgatcaccaaaggccgtcacgatccctgtgtcgggatccgcgcagtgccgatcgcagaagcgatgctggcgatcgttttaatggatcacctgttacggcaacgggcgcaaaatgccgatgtgaagactgatattccacgctggtaa

SEQ ID NO: 20440 - DNA, 1737 bp, Escherichia coli
atgcctgaccattctctttttcgattacggattcttccgtggtgcattgcgctggcaatgtcagggagttatagcagtgtctgggctgaagacgacattcagtttgattcccgttttctggaattaaaaggcgacacaaaaattgatctgaagcgtttttccagccaggggtatgttgagcccggaaaatacaatttacaggttcaactaaataaacagccattggcggaagagtacgatatttactggtatgctggtgaagatgacgttagcaaaagctatgcttgtctgacaccggaactggtggcgcagtttggtttaaaagaagacgtggcgaaaaatctgcaatggagccacgatggtaaatgcctgaagcccggtcaactggaaggcgtggaaattaaggctgatttaagccagtccgcattagtcatttcactaccgcaggcttacctcgaatatacctggcccgactgggatccaccttctcgttgggatgatggcatctccgggatcattgcggactacagcatcactgcgcaaacacgacacgaagaaaatggcggcgatgacagtaacgagatcagcggcaacgggacggtcggggttaacctggggccatggcgtatgcgcgctgactggcagaccaactatcaacatacgcgcagtaatgatgatgacgatgaatttggcggcgatgacacacaaaaaaaatgggagtggagtcgctattatgcctggcgggcgttaccgtcattaaaagccaaactggcgctgggcgaagattacctcaattccgatattttcgacggttttaattatgttggtggcagtgtcagcactgacgatcaaatgttgcctcccaatctgcgcggctacgcgccagacatttccggcgtggcacacaccacagcaaaagtgaccgtcagccagatggggcgtgtgatttacgaaacgcaggttccggctggaccgtttcgtattcaggatcttggtgattccgtctccggtacgttgcatattcgcattgaagaacagaacggccaggtgcaggaatatgacatcagcaccgcctcgatgccatacctcactcgcccaggccaggttcgctataagatcatgatgggacgtccgcaagagtggggccaccatgtcgaggggggatttttctctggtgctgaagcctcctggggcatcgctaacggctggtcgttatatggcggtgcgctgggtgatgaaaactatcagtctgcggcgctgggcgtcggtcgcgatttgtctaccttcggcgcggtcgcgtttgatgttactcattcgcataccaaactggataaagacaccgcttatggcaaaggttcgctggacggtaactccttccgtgtgagttattccaaagactttgaccagctcaacagccgcgtcactttcgctggatatcgcttctcggaagagaactttatgaccatgagcgagtatctggatgccagtgacagcgaaatggtccgtacgggcaacgacaaagagatgtacaccgccacttataaccagaacttccgcgatgcgggtgtttcggtttatctcaactatacccgccatacctactgggatcgtgaggagcagacaaactacaacatcatgctctcccactatttcaatatgggcagcattcgtaatatgagcgtttccctgactggctaccgctacgagtatgacaaccgggcggataagggcatgtag

SEQ ID NO: 20441 - DNA, 441 bp, Escherichia coli
atgaattacatatattccgcgactacaaactctttctatcccttggagatgaaagaggattacacgcaagctggctcatggccagatgatgctgttgaagttgatgagcaagtgtatattgagttttccggattaccgccgaaaggaaaaatccgtatcgctggagaaaatggttttcctgcatggtctgaaattccaccaccaacacatgaggaacagattgctgcagccgaactgaaaaagcagcaattgattaatcaggccaacgattatatgaacagtaaacaatgggctggtaaagcggctattggtcgtctgaaaggtgaggaactggcgcaatataatttgtggctggattatctggacgcactggagctggtcgatacttccagtgcgccagatattgaatggcctactcctccggcagttcaggccagatga

SEQ ID NO: 20442 - DNA, 735 bp, Escherichia coli
gtgaaagtcatcattgttgaagacgaattcctggcacaacaggaactgagctggctaattaaagagcacagccagatggagattgtcggcacctttgacgacggtctggacgtgttgaagtttttgcagcataaccgcgtcgacgccatttttctggatatcaatattccgtcgctggatggcgtgttgctggcgcaaaacatcagccagttcgcccataaaccgtttattgtgttcatcaccgcgtggaaagaacatgcggtagaagcgtttgaactggaggcgtttgactacattctcaaaccgtatcaggagtcacgtattaccgggatgctgcaaaaactggaagcggcctggcaacaacagcagaccagcagtacgcctgccgcgacggtaacgcgtgagaatgacaccattaatctggtgaaagatgagcgaataatcgtcacgccaattaacgatatctattacgccgaagcgcacgagaaaatgacctttgtctatacgcggcgtgaatcctacgtaatgccgatgaacattaccgaattttgcagcaaactgccgccgtcgcattttttccgctgccatcgctcattttgtgtcaatctgaacaaaatacgcgaaatcgaaccgtggtttaataacacctacattctgcgactgaaagatctggattttgaagtgccggtcagccgcagcaaagtgaaagaatttcgccagttaatgcatctttaa

SEQ ID NO: 20443 - DNA, 1239 bp, Escherichia coli
atgacgaactatcgcgttgagagtagcagcggacgggcggcgcgcaagatgaggctcgcattaatgggacctgcgttcattgcggcgattggttatatcgatcccggtaactttgcgaccaatattcaggcgggtgctagcttcggctatcagctactgtgggttgtcgtttgggccaacctgatggcgatgctgattcagatcctctctgccaaactagggattgccaccggtaaaaatctggcggagcagattcgcgatcactatccgcgtcccgtagtgtggttctattgggttcaggcagaaattattgcgatggcaaccgacctggcggaatttattggtgcggcgatcggttttaaactcattcttggtgtttcgttgttgcagggcgcggtgctgacggggatcgcgactttcctgattttaatgctgcaacgtcgcgggcaaaaaccgctggagaaagtgattggcgggttactgttgtttgttgccgcggcttacattgtcgagttgattttctcccagcctaacctggcgcagctgggtaaaggaatggtgatcccgagtttacctacttcggaagcggtcttcctggcagcaggcgtgttaggggcgacgattatgccgcatgtgatttatttgcactcctcgctcactcagcatttacatggcggttcgcgtcaacaacgttattccgccaccaaatgggatgtggctatcgccatgactattgccggttttgtcaatctggcgatgatggctacagctgcggcggcgttccacttttccggtcatactggtgttgccgatcttgatgaggcttatctgacgctgcaaccgctgttaagccacgctgcggcaacggtctttggattaagcctggttgctgcggggctgtcttcaacggtggtggggacactggcggggcaggtggtgatgcagggcttcattcgctttcatatcccgctgtgggtgcgtcgtacagtcaccatgttgccgtcatttattgtcattctgatgggattagatccgacacggattctggttatgagtcaggtactgttaagttttggtatcgctctggcgctggttccactgctgattttcaccagtgacagcaagttgatgggcgatctggtgaacagcaaacgcgtaaaacagacaggctgggtgattgtggtgctggtcgtggcgctgaatatctggttgttggtggggacggcgctgggattgtag

SEQ ID NO: 20444 - DNA, 2016 bp, Escherichia coli
atggaatcaatcgaacaacaactgacagaactgcgaacgacgcttcgccatcatgaatatctttatcatgtgatggatgcgccggaaattcccgacgctgaatacgacaggctgatgcgcgaactgcgcgagctggaaaccaaacatccagaactgattacgcctgattcgcctactcaacgtgtaggcgctgcgccgctggcggctttcagccagatacgccatgaagtaccaatgctgtcactggataacgtttttgatgaagaaagctttcttgctttcaacaaacgtgtgcaggaccgtctgaaaaacaacgagaaagtcacctggtgctgtgagctgaagctggatggtcttgccgtcagtattctgtatgaaaatggcgttttagtcagtgccgcgacccgtggcgatggcaccaccggggaagatatcacgtctaatgtgcgtactattcgcgccattccgctgaagctgcacggagagaatatcccggcgcgtctggaagtgcgtggtgaagtgttcctgccgcaggcggggttcgaaaagattaacgaagatgcgcgacgcacgggcgggaaagtgtttgctaacccacgtaatgcggcagctggttcactgcgtcagcttgatccgcgtattacagcgaagcgaccgctcacttttttctgctatggcgttggtgttctggaaggtggcgagctgccggatactcatcttggccgtttactgcaatttaaaaagtgggggttgccggtcagcgatcgggtaacgctttgtgaatcggcggaagaagtgctggcgttctatcacaaagtggaagaagaccgcccgacgctgggctttgatatcgacggcgtggtgattaaggtcaactcactggcacagcaggagcagcttggctttgtcgcgcgtgccccgcgctgggcggtagcgtttaaattcccggcgcaggagcagatgacctttgtgcgtgacgtcgagtttcaggttgggcgtactggcgcgattacgcctgttgcgcgtctggaacctgtccatgttgcaggcgtgctggtgagtaacgcaaccttacacaatgcggatgaaatcgaacgtcttggtttacgcattggcgataaagtggtgattcgccgcgctggcgacgtgatcccgcaggtggttaacgtcgtgctttctgaacgcccggaagatacccgtgaggttgtattcccgacgcattgtccggtatgtggttctgacgttgagcgtgtggaaggtgaagcggttgcccgctgtaccggtggcctgatttgcggtgcgcagcgtaaagagtcgctgaaacactttgtttcccgccgtgcgatggatgttgacggaatgggcgacaaaatcatcgatcagctggttgaaaaagaatatgtccatactccggcagatctgttcaaactcaccgcaggcaaactgaccggactggagcgtatggggccaaaatcggcacaaaacgtggttaacgcgctggaaaaagcgaaagaaaccacctttgctcgcttcctctatgcacttggcatccgtgaagtcggcgaggccaccgcagcaggtctggcggcatatttcggcacgctggaagcgctggaagccgcttcgattgaagagctgcaaaaggtgcctgatgttggcattgtcgttgcatcccacgttcacaacttctttgccgaagaaagcaaccgcaatgtcatcagcgagctgttggcggaaggtgttcactggcctgcgccgatcgttatcaacgcggaagagattgacagcccgtttgctggtaaaaccgtggtgcttacgggcagcttaagccagatgtcgcgtgatgacgctaaagctcgactggtcgaactgggcgcgaaagtcgcgggcagcgtgtcgaagaaaaccgatctggtgatagcgggtgaagctgcaggatctaaactggcgaaggcgcaggaactgggcattgaagtcatcgacgaagcggaaatgctgcgtttgctgggtagctga

SEQ ID NO: 20445 - DNA, 972 bp, Escherichia coli
atgagtaagatttttgaagataactcgctgactatcggtcacacgccgctggttcgcctgaatcgcatcggtaacggacgcattctggcgaaggtggaatctcgtaaccccagcttcagcgttaagtgccgtatcggtgccaacatgatttgggatgccgaaaagcgcggcgtgctgaaaccaggcgttgaactggttgaaccgaccagcggtaataccgggattgcactggcctatgtagctgccgctcgcggttacaaactcaccctgaccatgccagaaaccatgagtattgaacgccgcaagctgctgaaagcgttaggtgcaaacctggtgctgacggaaggtgctaaaggcatgaaaggcgcaatccaaaaagcagaagaaattgtcgccagcaatccagagaaatacctgctgctgcaacaattcagcaatccggcaaaccctgaaattcacgaaaagaccaccggtccggagatatgggaagataccgacggtcaggttgatgtatttattgctggcgttgggactggcggtacgctgactggcgtcagccgctacattaaaggcaccaaaggcaagaccgatcttatctctgtcgccgttgagccaaccgattctccagttatcgcccaggcgctggcaggtgaagagattaaacctggcccgcataaaattcagggtattggcgctggttttatcccggctaacctcgatctcaagctggtcgataaagtcattggcatcaccaatgaagaagcgatttctaccgcgcgtcgtctgatggaagaagaaggtattcttgcaggtatctcttctggagcagctgttgccgcggcgttgaaactacaagaagatgaaagctttaccaacaagaatattgtggttattctaccatcatcgggtgagcgttatttaagcaccgcattgtttgccgatctcttcactgagaaagaattgcaacagtaa

SEQ ID NO: 20446 - DNA, 1728 bp, Escherichia coli
atgatttcaggcattttagcatccccgggtatcgctttcggtaaagctctgcttctgaaagaagacgaaattgtcattgaccggaaaaaaatttctgccgaccaggttgatcaggaagttgaacgttttctgagcggtcgtgccaaggcatcagcccagctggaaacgatcaaaacgaaagctggtgaaacgttcggtgaagaaaaagaagccatctttgaagggcatattatgctgctcgaagatgaggagctggagcaggaaatcatagccctgattaaagataagcacatgacagctgacgcagctgctcatgaagttatcgaaggtcaggcttctgccctggaagagctggatgatgaatacctgaaagaacgtgcggctgacgtacgtgatatcggtaagcgcctgctgcgcaacatcctgggcctgaagattatcgacctgagcgccattcaggatgaagtcattctggttgccgctgacctgacgccgtccgaaaccgcacagctgaacctgaagaaggtgctgggtttcatcaccgacgcgggtggccgtacttcccacacctctatcatggcgcgttctctggaactacctgctatcgtgggtaccggtagcgtcacctctcaggtgaaaaatgacgactatctgattctggatgccgtaaataatcaggtttacgtcaatccaaccaacgaagttattgataaaatgcgcgctgttcaggagcaagtggcttctgaaaaagcagagcttgctaaactgaaagatctgccagctattacgctggacggtcaccaggtagaagtatgcgctaacattggtacggttcgtgacgttgaaggtgcagagcgtaacggcgctgaaggcgttggtctgtatcgtactgagttcctgttcatggaccgcgacgcactgcccactgaagaagaacagtttgctgcttacaaagcagtggctgaagcgtgtggctcgcaagcggttatcgttcgtaccatggacatcggcggcgacaaagagctgccatacatgaacttcccgaaagaagagaacccgttcctcggctggcgcgctatccgtatcgcgatggatcgtagagagatcctgcgcgatcagctccgcgctatcctgcgtgcctcggctttcggtaaattgcgcattatgttcccgatgatcatctctgttgaagaagtgcgtgcactgcgcaaagagatcgaaatctacaaacaggaactgcgcgacgaaggtaaagcgtttgacgagtcaattgaaatcggcgtaatggtggaaacaccggctgccgcaacaattgcacgtcatttagccaaagaagttgatttctttagtatcggcaccaatgatttaacgcagtacactctggcagttgaccgtggtaatgatatgatttcacacctttaccagccaatgtcaccgtccgtgctgaacttgatcaagcaagttattgatgcttctcatgctgaaggcaaatggactggcatgtgtggtgagcttgctggcgatgaacgtgctacacttctgttgctggggatgggtctggacgaattctctatgagcgccatttctatcccgcgcattaagaagattatccgtaacacgaacttcgaagatgcgaaggtgttagcagagcaggctcttgctcaaccgacaacggacgagttaatgacgctggttaacaagttcattgaagaaaaaacaatctgctaa

SEQ ID NO: 20447 - DNA, 897 bp, Escherichia coli
atgcaatttgaaaagatgattactgaaggctcgaacaccgcctcggctgaaattgaccgcgtatcgacgctggaaatgtgccggattatcaacgatgaagataaaaccgtaccgcttgccgttgagcgcgtactgccggatatcgccgcggcgatcgatgttatccacgcccaggtaagcggcggcgggcgtctgatttacctcggtgcgggaacatccggtcgtctggggattctggatgccagcgaatgtccgcccacctacggcgtgaaaccgggtctggtggttggtttgattgctggcggcgaatatgccattcagcacgcggtggaaggcgcggaagatagccgggaaggcggtgttaatgatctgaaaaatattaatttaacggcacaggatgtggtggttggcattgctgccagcggtcgcacgccgtatgtgattgccggactggaatacgcacgccagctcggctgccgcacagtgggaatttcctgtaatccggggagcgccgtttcaaccaccgctgagtttgccattacaccgattgtaggtgccgaagttgttaccggttcttcgcggatgaaagcaggtacagcgcagaaactggtgctcaatatgctttccaccgggctgatgattaaatccggcaaagtgttcggcaacctgatggtcgatgtggtcgccaccaacgaaaaactgcatgtgcgacaggtcaatattgttaaaaacgccaccggatgtagcgcagagcaagcggaagcggcgttaattgcttgcgagcgcaactgtaaaacggccattgtgatggtgctgaaaaatctcgatgccgcagaagctaaaaaacgcctggatcaacacggcggctttattcgtcaggttttagacaaggaataa

SEQ ID NO: 20448 - DNA, 1425 bp, Escherichia coli
atggccaaagagatcagcagtgaacttctgaacaccattcttacccgtgtcggcggaccgggaaatatcgccagttgtggtaactgtatgacgcgcctgcgtctgggtgtacatgacagttcactggttgatcccaatatcaaaacgctggaaggcgtgaagggcgtcattttgaccagcgaccaggtgcaggtcgtttttgggcctggtaaagcgcatcgtgccgcaaaagcgatgagcgagctgctgggagaagcaccggtacaggatgccgcagaaatcgccgcccagaacaaacgtcagttaaaagccaaacaaacctccggcgtgcaacaatttctcgccaaattcgccaccatcttcacgccgctgatccccggttttattgccgccggtctgctgctggggatagcgacgttaattgccacggtgatgcacgttccggcagatgctcagggaacactacccgatgcgctgaattttatgaaggtgttcagcaaaggtttgttcactttcctggtgattctggtgggctataacgccgcccaggcatttggcggcacgggcgtaaatggcgcaattatcgccgcgctctttttgctcggttataaccccgcagcgaccaccggttactacgccggttttcacgatttctttggtctgcccatcgatccgcgcggcaatattatcggcgtgctgattgccgcgtgggcctgcgcccgcattgaaggcatggtgcgccgctttatgccggacgatctcgacatgctgctgacctcgttaatcaccctgctgatcaccgctacgcttgcgtacctgatcattatgccgctgggtggctggttattcgaaggtatgtcatggctgtttatgcacctgaacagtaatccgttcggttgtgcggttttagccgggctgttcctgatcgccgtggtatttggcgtgcatcagggctttattcctgtttacctcgcgttaatggacagccagggattcaacagcttatttcccatcctttcaatggcaggcgcgggccaggtgggcgcggcgctggcactctactggcgggcgcaaccgcacagtgcgctacgcagtcaggtacgcggggcgattattcccggcctgctgggcgttggtgaaccgctgatttacggtgtcaccctgccccgcatgaagccgtttgttaccgcctgtttaggcggcgcggcgggcggtttgtttatcggcctgatagcctggtggggtctgccgatgggcttaaacagcgcctttgggccgtctggtctggtagcgctgccgctgatgacttccgcacaaggcatccttccggccatggcggtttatgctggcgggattctggtggcatgggtttgcgggtttattttcaccacgctctttggctgccgtaacgtcaatctggactga

SEQ ID NO: 20449 - DNA, 1404 bp, Escherichia coli
gtgaaaaatgccaatcatcgattcttcctgagggaacgacttatgaaactaaagaccacattgttcggcaatgtatatcagtttaaggatgtaaaagaggtgctggctaaagccaacgaactgcgttcgggggatgtgctggcgggcgtcgcagcggcaagctcacaggagcgcgtggcggcaaagcaggtgttgtcggaaatgaccgtagcggacatccgcaataatccggtgattgcctatgaagatgactgcgtgacgcggctgattcaggacgatgttaacgaaacggcctacaaccagattaaaaactggagcatcagcgaactgcgtgagtatgtgctgagcgatgaaaccagcgtggacgacattgcctttacccgcaaagggctgacctcggaagtggtcgcggcggtagcgaagatttgctccaacgcggacctgatctacggcgcgaagaaaatgccggtaatcaaaaaggccaataccaccatcggtattccgggcacctttagcgcccgtttgcagccaaatgacacccgtgacgacgtgcaaagtatcgccgcgcaaatctacgaagggctttccttcggggtgggcgatgcggtgatcggcgttaacccggtgactgacgacgtggaaaacttaagccgcgtgttggataccatctatggcgtgatcgacaaattcaacatcccaactcagggctgtgtactggcgcacgtcaccacccagatcgaagcgatccgtcgtggcgcaccgggcgggctgattttccagagtatctgtggcagcgaaaaagggctgaaagagtttggcgtggagctggcgatgctcgacgaagcgcgcgcagtgggcgcggagttcaaccgtatcgccggggaaaactgcctctacttcgaaaccggacaaggctctgcgctatccgctggcgctaacttcggcgcagaccaggtaacgatggaagcacgtaactacgggctggcgcgtcattacgatccgtttatcgtcaacaccgtggtcggctttattgggccggagtatctctacaacgaccgccagattatccgtgctggcttagaagatcactttatgggcaagctgagcggcatctctatgggctgtgactgctgttataccaaccacgctgacgctgaccagaacctcaacgaaaacctgatgatcctgctcgccaccgcaggctgcaactacatcatggggatgccgctgggtgatgacatcatgctcaactaccagaccaccgcattccacgataccgccactgtgcgtcagttactcaacctgcgcccgtcaccggagtttgaacgctggctggaaagcatgggcattatggcaaacggtcgcctgaccaaacgggcgggcgatccgtcactgttcttctga

SEQ ID NO: 20450 - DNA, 1980 bp, Escherichia coli
atgaatcgttttattatggccaacagtcagcaatgtctgggttgtcatgcttgtgaaatcgcctgtgtcatggctcacaatgatgagcaacatgtcctgagccaacaccattttcatccccgaattacggttatcaaacatcaacagcaacgtagtgcagtgacctgtcaccattgtgaagatgcgccctgcgcccgtagctgccctaatggcgcaatcagccacgttgatgacagcattcaggtcaatcagcaaaagtgtattggctgtaaatcctgcgtggtggcctgtccttttggtacgatgcaaatcgtcctgacacccgtcgcggcaggaaaagtaaaagccacggcgcataaatgcgacctttgtgcggggcgcgaaaacggtcctgcctgtgttgagaattgcccggcggacgcgctgcaactggtcactgacgtcgcactctccggcatggcgaaatcccgccgcttgcgcaccgcgcgtcaggaacatcaaccgtggcatgccagtaccgcggcgcaagaaatgccggtaatgagtaaagtcgaacaaatgcaggcaacgcccgcgcgtggcgagccggataaactggcgattgaagcgcgcaaaaccggttttgatgaaatttatctgccatttcgcgccgaccaggcacaacgggaagcctcgcgctgccttaagtgcggcgagcacagcgtttgtgaatggacctgcccgctgcataaccatataccgcagtggattgaactggtgaaagccggaaacatcgacgccgccgtcgagctttctcaccagaccaacaccctgccggaaattaccggacgcgtttgtccgcaagaccgtttgtgtgaaggtgcctgtactattcgcgatgagcacggcgcggtaactatcggcaacattgaacgctacatttcagatcaggcgttggcgaaaggttggcgtcctgacttaagccatgtcaccaaagtggacaagcgggtggcgattatcggtgcaggtccggcagggctggcctgtgcggatgttctgacccgcaatggcgtgggggtgacggtgtacgatcgccatccagaaatcggtggcttgctcactttcggcattccttctttcaaactggataaatccctgctggcacgccgtcgggaaatcttcagcgcgatggggattcacttcgaactcaattgtgaagtgggtaaagatgtctctttggattcgcttttggaacaatacgacgcggtcttcgttggcgtaggcacttaccgttccatgaaagcgggtttacccaatgaagatgcgccgggcgtttatgacgcgctgccgttcctcattgccaacactaaacaggtgatggggctcgaagagctaccggaagagccgtttatcaataccgccggacttaacgtcgtggtactgggcggcggcgacaccgcgatggactgtgtgcgtaccgcactgcgccacggcgcgagtaacgtcacctgcgcttatcgtcgtgatgaagctaacatgccaggctcgaagaaagaagtgaagaacgcccgcgaagagggggccaacttcgaatttaacgtccagccggtggcgcttgagctgaatgaacaaggtcacgtctgcgggattcgtttcctgcgcacgcgtcttggagagccggatgcccaggggcgtcggcgtccagtgccggtggaaggcagtgaatttgtcatgccagccgacgcggtgattatggcgtttggcttcaatccgcacgggatgccgtggctggagtcgcacggtgtaacggtagacaaatggggccgcatcatcgcggatgtggaaagccagtaccgttaccagaccaccaatccgaaaatcttcgctggtggtgacgccgtgcgtggtgcggatctggtggttaccgcaatggcagaaggacgtcatgcggcacaggggattattgactggctgggggtaaaatcagtcaaatctcactga

SEQ ID NO: 20451 - DNA, 654 bp, Escherichia coli
gtggctgcccctcaaaggagaaagagtatgaagatcgtggaagtcaaacacccactcgtcaaacacaagctgggactgatgcgtgagcaagatatcagcaccaagcgctttcgcgaactcgcttccgaagtgggtagcctgctgacttacgaagcgaccgccgacctcgaaacggaaaaagtaactatcgaaggctggaacggcccggtagaaatcgaccagatcaaaggtaagaaaattaccgttgtgccaattctgcgtgcgggtcttggtatgatggacggtgtgctggaaaacgttccgagcgcgcgcatcagcgttgtcggtatgtaccgtaatgaagaaacgctggagccggtaccgtacttccagaaactggtttctaacatcgatgagcgtatggcgctgatcgttgacccaatgctggcaaccggtggttccgttatcgcgaccatcgacctgctgaaaaaagcgggctgcagcagcatcaaagttctggtgctggtagctgcgccagaaggtatcgctgcgctggaaaaagcgcacccggacgtcgaactgtataccgcatcgattgatcagggactgaacgagcacggatacattattccgggcctcggcgatgccggtgacaaaatctttggtacgaaataa

SEQ ID NO: 20452 - DNA, 1578 bp, Escherichia coli
atgacggaaaacattcataagcatcgcatcctcattctggacttcggttctcagtacactcaactggttgcgcgccgcgtgcgtgagctgggtgtttactgcgaactgtgggcgtgggatgtgacagaagcacaaattcgtgacttcaatccaagcggcattattctttccggcggcccggaaagtactactgaagaaaacagtccgcgtgcgccgcagtatgtctttgaagcaggcgtaccggtattcggcgtttgctatggcatgcagaccatggcaatgcagttgggcggtcacgttgaagcctctaacgaacgtgaatttggctacgcgcaggttgaagtcgtaaacgacagcgcactggttcgcggtatcgaagatgcgctgaccgcagacggtaaaccgctgctcgatgtctggatgagccacggcgataaagttaccgctattccgtccgacttcatcaccgtagccagcaccgaaagctgcccgtttgccattatggctaacgaagaaaaacgcttctatggcgtacagttccacccggaagtgactcatacccgccagggtatgcgcatgctggagcgttttgtgcgtgatatctgccagtgtgaagccctgtggacgccagcgaaaattatcgacgatgctgtagctcgcatccgcgagcaggtaggcgacgataaagtcatcctcggcctctctggtggtgtggattcctccgtaaccgcaatgctgctgcaccgcgctatcggtaaaaacctgacttgcgtattcgtcgacaacggcctgctgcgcctcaacgaagcagagcaggttctggatatgtttggcgatcactttggtcttaacattgttcacgtaccggcagaagatcgcttcctgtcagcgctggctggcgaaaacgatccggaagcaaaacgtaaaatcatcggtcgcgttttcgttgaagtattcgatgaagaagcgctgaaactggaagacgtgaagtggctggcgcagggcaccatctaccctgacgttatcgaatctgcggcgtctgcaaccggtaaagcacacgtcatcaaatctcaccacaacgtgggcggcctgccgaaagagatgaagatgggcctggttgaaccgctgaaagagctgttcaaagacgaagtgcgtaagattggtctggagctgggcctgccgtacgacatgctgtaccgtcacccgttcccgggaccaggccttggcgttcgtgttctgggtgaagtgaagaaagagtactgtgacctgctgcgccgtgctgacgccatcttcattgaagaactgcgtaaagcggacctgtacgacaaagtcagccaggcgttcactgtgttcctgccggtacgttccgttggcgtaatgggcgatggtcgtaagtatgactgggttgtctctctgcgtgctgtcgaaaccatcgactttatgaccgcacactgggcgcatctgccgtacgatttcctcggtcgcgtttccaaccgcattatcaatgaagtgaacggtatttcccgcgtggtgtatgacatcagcggcaagccgccagctaccattgagtgggaatga

SEQ ID NO: 20453 - DNA, 1371 bp, Escherichia coli
atgttaccttctcaatcccctgcaatttttaccgttagtcgcctgaatcaaacggttcgtctgctgcttgagcatgagatgggacaggtttggatcagcggcgaaatttctaatttcacgcaaccagcttccggtcactggtactttacactcaaagacgacaccgcccaggtacgctgcgcgatgttccgcaacagcaaccgccgggtgaccttccgcccacagcatgggcaacaagttttagttcgcgccaatattacgctctacgagccgcgcggcgactaccagataatcgttgagagtatgcagccggccggtgaagggctgctgcaacagaagtacgaacagctcaaagcgaagttgcaggctgaaggtttgttcgatcagcaatacaaaaaaccacttccctcccctgcgcattgcgttggtgtgatcacctcaaaaaccggtgctgcgctacatgatattttgcatgtgttaaaacgtcgcgatccttctctgccggtgatcatctaccctgccgccgttcagggcgatgacgcgccggggcaaattgttcgcgccattgaactggcgaatcagcgcaatgagtgcgacgtattgatcgtcgggcgcggcggcggttcgctggaagatttatggagttttaacgacgaacgcgtagcgcgggcgatttttaccagccgcattccggttgtcagcgccgtcgggcatgagacggatgtgaccattgccgattttgttgccgatctgcgtgcgccaacgccgtctgccgccgctgaagtagtgagccgtaatcagcaagagttactgcgccaggtgcaatcgacccgtcaacggctggagatggcgatggattattatctcgccaaccgcacacgtcgctttacgcaaattcatcaccgattacagcaacagcatccgcagctccggctggcacgccagcaaaccatgcttgagcgcctgcaaaagcgaatgagctttgcgctggaaaatcaacttaagcgtaccgggcaacagcagcagcggttaacacagcggctgaatcagcaaaatccacagccgaagattcatcgcgcgcaaacgcgcattcagcaactggaatatcgtttagcagaaaccctgcgcgcacagcttagcgccacgcgtgaacgtttcggtaatgcagtaacgcacctcgaagccgtaagcccactgtcaacgctggcgcgtggatacagcgttactactgctactgacggcaatgtactgaaaaaagtgaagcaagttaaagcgggtgaaatgctaaccacacgtctggaagacggctggatagaaagtgaagtaaaaaacatccagccagtaaaaaaatcgcgtaaaaaggtgcattaa

SEQ ID NO: 20454 - DNA, 1275 bp, Escherichia coli
gtggcaaaaaacattcaagccattcgcggcatgaacgattacctgcctggcgaaacggccatctggcagcgcattgaaggcacactgaaaaacgtgctcggcagctacggttacagtgaaatccgcttgccgattgtagagcagaccccgctattcaaacgtgcgattggtgaagtcaccgacgtggttgaaaaagagatgtacacctttgaggatcgcaatggcgacagcctgactctgcgccctgaagggacggcgggctgtgtacgcgccggcatcgagcatggtcttctgtacaatcaggaacagcgtctgtggtatatcgggccgatgttccgtcacgagcgtccgcagaaagggcgttatcgtcagttccatcagttgggctgcgaagttttcggtctgcaaggtccggatatcgacgctgaactgattatgctcactgcccgctggtggcgcgcgctgggtatttccgagcacgtaactcttgagctgaactctatcggttcgctggaagcacgcgccaattaccgcgatgcgctggtggcattccttgagcagcataaagaaaagctggacgaagactgcaaacgccgcatgtacactaacccgctgcgcgtgctggattcaaaaaatccggaagtgcaggcgcttctcaacgacgctccggcattaggtgactatctggacgaggaatctcgtgagcattttgccggtctgtgcaaactgctggagagcgcggggatcgcttacaccgtaaaccagcgtctggtgcgtggtctggattactacaaccgtaccgttttcgagtgggtgactaacagtctcggctcccagggcaccgtgtgtgcaggcggtcgttatgacggtcttgtggaacaactgggcggtcgtgcaacaccggctgtcggttttgctatgggcctcgaacgtcttgtattgttagtacaggccgttaatccggaatttaaagccgatcctgttgtcgatatatacctggtggcttcaggtgctgatacacaatctgcggctatggcattagctgagcgtctgcgtgatgaattaccgggcgtgaaattgatgaccaaccacggcggcggcaactttaagaaacagtttgcccgtgctgataaatggggtgcccgcgttgctgtggtgctgggtgagtctgaagtggctaacggcacagcagtagtgaaggatttgcgctctggtgagcaaacggcagttgcgcaggatagcgtagccgcgcatttgcgcacgttactgggttaa

SEQ ID NO: 20455 - DNA, 387 bp, Escherichia coli
atggcttacagcgaaaaagttatcgaccattacgagaatccgcgtaacgtgggttcctttgacaacaacgacgagaacgtcggcagcggcatggtgggggcaccggcctgtggcgacgtgatgaagttgcagattaaagtcaacgatgaaggtatcattgaagacgcgcgttttaaaacttacggctgcggttccgctatcgcttccagctccctggtcaccgaatgggtgaaagggaagtctctcgacgaagcgcaggcgatcaaaaacaccgatattgctgaagaacttgaactgccgccggtgaaaattcactgttctattctggcagaagacgcgatcaaagccgccattgcggactataaaagcaaacgtgaagcaaaataa

SEQ ID NO: 20456 - DNA, 489 bp, Escherichia coli
atgagactgacatctaaagggcgctatgccgtgaccgcaatgcttgacgttgcgctcaactctgaagcgggcccggtaccgttggctgatatttccgaacgtcagggaatttccctttcttatctggaacaactgttttcccgtctgcgtaaaaatggtctggtttccagcgtacgtggaccaggcggtggttatctgttaggcaaagatgccagcagcatcgccgttggcgaagtaattagcgccgttgacgaatctgtagatgccacccgttgtcagggtaaaggcggctgccagggcggcgataaatgcctgacccacgcgctgtggcgtgatttgagcgaccgtctcaccggttttctcaacaacattactttaggcgaactggttaataaccaggaagtgctggatgtgtctggtcgtcagcatactcacgacgcgccacgcacccgcacacaagacgcgatcgacgttaagttacgcgcttaa

SEQ ID NO: 20457 - DNA, 1254 bp, Escherichia coli
atgttaaagcgtgaaatgaacattgccgattatgatgccgaactgtggcaggctatggagcaggaaaaagtacgtcaggaagagcacatcgaactgatcgcctccgaaaactacaccagcccgcgcgtaatgcaggcgcagggttctcagctgaccaacaaatatgctgaaggttatccgggcaaacgctactacggcggttgcgagtatgttgatatcgttgaacaactggcgatcgatcgtgcgaaagaactgttcggcgctgactacgctaacgtccagccgcactccggctcccaggctaactttgcggtctacaccgcgctgctggaaccaggtgataccgttctgggtatgaacctggcgcatggcggtcacctgactcacggttctccggttaacttctccggtaaactgtacaacatcgttccttacggtatcgatgctaccggtcatatcgactacgccgatctggaaaaacaagccaaagaacacaagccgaaaatgattatcggtggtttctctgcatattccggcgtggtggactgggcgaaaatgcgtgaaatcgctgacagcatcggtgcttacctgttcgttgatatggcgcacgttgcgggcctggttgctgctggcgtctacccgaacccggttcctcatgctcacgttgttactaccaccactcacaaaaccctggcgggtccgcgcggcggcctgatcctggcgaaaggtggtagcgaagagctgtacaaaaaactgaactctgccgttttccctggtggtcagggcggtccgttgatgcacgtaatcgccggtaaagcggttgctctgaaagaagcgatggagcctgagttcaaaacttaccagcagcaggtcgctaaaaacgctaaagcgatggtagaagtgttcctcgagcgcggctacaaagtggtttccggcggcactgataaccacctgttcctggttgatctggttgataaaaacctgaccggtaaagaagcagacgccgctctgggccgtgctaacatcaccgtcaacaaaaacagcgtaccgaacgatccgaagagcccgtttgtgacctccggtattcgtgtaggtactccggcgattacccgtcgcggctttaaagaagccgaagcgaaagaactggctggctggatgtgtgacgtgctggacagcatcaatgatgaagccgttatcgagcgcatcaaaggtaaagttctcgacatctgcgcacgttacccggtttacgcataa

SEQ ID NO: 20458 - DNA, 1419 bp, Escherichia coli
gtgagcaccattcatactcccctgacttataacgaaatcaacgggaaaccttttggcctggattacgaactggcgaaacagtttgccgattacctcggcgtaaaactgaaagtgaccgtgcggcagaatatcagccagctgtttgacgaccttgataatggtaacgccgacctgctggcggcaggacttgtctataacagtgagcgggtaaaaaattatcagcctggccctacctattattccgtgtcacaacaactggtttataaagtgggtcagtatcgcccacgtacgctgggcaacctgacggcggagcaactcaccgttgcaccgggtcatgtggtggttaacgatctccagaccctgaaagaaacaaaattcccggaattaagctggaaggtagacgacaaaaaaggctctgcggaattaatggaagatgtcatcgaaggaaaactcgattacaccattgctgattctgtcgccatcagcctgtttcagcgcgttcacccggagctcgccgtagcgctcgatatcaccgatgaacaaccggtgacttggtttagcccgttagatggcgataataccctttccgccgccctgctcgacttcttcaacgaaatgaatgaagacggtacgctggcacgcattgaagagaaatacctggggcatggcgatgattttgattacgtcgatacgcgcacatttttacgcgccgtcgatgcggtactgccgcagttaaagcccctgtttgagaaatacgccgaagaaattgactggcgtttgctggccgctattgcttatcaggaatcgcactgggatgcacaggccacttcaccgacgggtgtgcgcggcatgatgatgttaaccaaaaataccgcgcaaagcctcggcattacggatcgtaccgatgccgaacagagcatcagcggtggcgtgcgttatttgcaggatatgatgagtaaagtgccggaaagtgtgccggagaacgagcggatctggtttgccctcgctgcgtacaatatgggctatgcgcatatgctggatgcccgcgccctgacggcaaaaaccaaagggaatcctgacagttgggctgacgtaaaacagcgtctgcctttacttagccagaaaccctattacagcaagctgacttacggctacgctcgtggacatgaagcctacgcttatgtcgaaaatattcgtaagtatcagattagcctggtgggttatctgcaagagaaagagaagcaggctacagaagcggcgatgcaactggcgcaggattatccggcggtatcgcctacggagttgggcaaagagaaatttccttttctctcgtttctttcccagtcgtcatcaaactatttgacccattctccctctctgctgttttccaggaaagggagtgaagagaaacaaaattaa

SEQ ID NO: 20459 - DNA, 381 bp, Escherichia coli
atggcaatattaggtttaggcacggatattgtggagatcgctcgcatcgaagcggtgatcgcccgatccggtgatcgcctggcacgccgcgtattaagcgataacgaatgggctatctggaaaacgcaccaccagccggtgcgttttctggcgaagcgttttgctgtgaaagaagccgcagcaaaagcgtttggcaccgggatccgcaatggtctggcgtttaatcaatttgaagtattcaatgatgagctcggcaaaccacggctacggctatggggcgaggcattaaaactggcggaaaagctgggcgttgcaaatatgcatgtaacgctggcagatgagcggcactatgcttgtgccacggtaattattgaaagttaa

SEQ ID NO: 20460 - DNA, 906 bp, Escherichia coli
atgagcatcgataaaagttactgcggatttattgccatcgtcggacgtccgaacgttggcaaatccacattgttgaacaaactgctggggcagaaaatctccatcacttcccgcaaggcgcagacaactcgtcaccgcattgtggggatccatactgaaggcgcgtatcaggcgatctacgtcgatacaccgggcctgcatatggaagaaaaacgcgccattaaccgcctgatgaacaaagcggcgagcagctctattggcgatgttgagctggtgatttttgtcgttgaaggcacccgctggacgccggacgacgaaatggtgctcaacaaactgcgcgaaggcaaagcgccggtaatcctcgcggtgaacaaagtggacaacgtgcaggagaaagccgatctgctgccgcacctgcagttcctggcaagccagatgaacttcctcgatatcgtgccaatctctgccgaaaccgggctgaatgttgacactattgcggcaatcgtgcgtaagcatctacctgaagcgactcatcacttcccggaagattacatcaccgatcgctcacagcgttttatggcgtctgaaatcatccgcgaaaaactgatgcgtttcctcggcgctgaactgccgtactccgtgaccgtggagatcgaacgtttcgtctctaacgaacgcggtggttatgacatcaacggtttgattctcgttgagcgtgaagggcagaagaagatggtcattggcaacaaaggggccaagatcaaaaccatcgggattgaagcgcgtaaagacatgcaggaaatgttcgaagcgcctgttcaccttgaactgtgggtaaaagtgaaatccggttgggccgacgacgaacgcgcactgcgcagtctcggttacgttgacgatctttaa

SEQ ID NO: 20461 - DNA, 975 bp, Escherichia coli
atggcgaatatgtttgccctgattctggtgattgccacactggtgacgggcattttatggtgcgtggataaattctttttcgcacctaaacggcgggaacgtcaggcagcggcgcaggcggctgccggggactcactggataaagcaacgttgaaaaaggttgcgccgaagcctggctggctggaaaccggtgcttctgtttttccggtactggctatcgtattgattgtgcgttcgtttatttatgaaccgttccagatcccgtcaggttcgatgatgccgactctgttaattggtgattttattctggtagagaagtttgcttatggcattaaagatcctatctaccagaaaacgctgatcgaaaccggtcatccgaaacgcggcgatatcgtggtctttaaatatccggaagatccaaagcttgattacatcaagcgcgcggtgggtttaccgggcgataaagtcacttacgatccggtctcaaaagagctgacgattcaaccgggatgcagttccggccaggcgtgtgaaaacgcgctgccggtcacctactcaaacgtggaaccgagcgatttcgttcagaccttctcacgccgtaatggtggggaagcgaccagcggattctttgaagtgccgaaaaacgaaaccaaagaaaatggaattcgtctttccgagcgtaaagagacactgggtgatgtgacgcaccgcattctgacagtgccgattgcgcaggatcaggtggggatgtattaccagcagccagggcaacaactggcaacctggattgttcctccgggacaatacttcatgatgggcgacaaccgcgacaacagcgcggacagccgttactggggctttgtgccggaagcgaatctggtcggtcgggcaacggctatctggatgagcttcgataagcaagaaggcgaatggccgactggtctgcgcttaagtcgcattggcggcatccattaa

SEQ ID NO: 20462 - DNA, 2574 bp, Escherichia coli
atgcgtctggatcgtcttactaataaattccagcttgctcttgccgatgcccaatcacttgcactcgggcacgacaaccaatttatcgaaccacttcatttaatgagcgccctgctgaatcaggaagggggttcggttagtcctttattaacatccgctggcataaatgctggccagttgcgcacagatatcaatcaggcattaaatcgtttaccgcaggttgaaggtactggtggtgatgtccagccatcacaggatctggtgcgcgttcttaatctttgcgacaagctggcgcaaaaacgtggtgataactttatctcgtcagaactgttcgttctggcggcacttgagtctcgcggcacgctggccgacatcctgaaagcagcaggggcgaccaccgccaacattactcaagcgattgaacaaatgcgtggaggtgaaagcgtgaacgatcaaggtgctgaagaccaacgtcaggctttgaaaaaatataccatcgaccttaccgaacgagccgaacagggcaaactcgatccggtgattggtcgtgatgaagaaattcgccgtaccattcaggtgctgcaacgtcgtactaaaaataacccggtactgattggtgaacccggcgtcggtaaaactgccatcgttgaaggtctggcgcagcgtattatcaacggcgaagtgccggaagggttgaaaggccgccgggtactggcgctggatatgggcgcgctggtggctggggcgaaatatcgcggtgagtttgaagaacgtttaaaaggcgtgcttaacgatcttgccaaacaggaaggcaacgtcatcctatttatcgacgaattacataccatggtcggcgcgggtaaagccgatggcgcaatggacgccggaaacatgctgaaaccggcgctggcgcgtggtgaattgcactgcgtaggtgccacgacgcttgacgaatatcgccagtacattgaaaaagatgctgcgctggaacgtcgtttccagaaagtgtttgttgccgagccttctgttgaagataccattgcgattctgcgtggcctgaaagaacgttacgaattgcaccaccatgtgcaaattactgacccggcaattgttgcagcggcgacgttgtctcatcgctacattgctgaccgtcagctgccggataaagccatcgacctgatcgatgaagcagcatccagcattcgtatgcagattgactcaaaaccagaagaactcgaccgactcgatcgtcgtatcatccagctcaaactggaacaacaggcgttaatgaaagagtctgatgaagccagtaaaaaacgtctggatatgctcaacgaagaactgagcgacaaagaacgtcagtactccgagttagaagaagagtggaaagcagagaaggcatcgctttctggtacgcagaccattaaagcggaactggaacaggcgaaaatcgctattgaacaggctcgccgtgtgggggacctggcgcggatgtctgaactgcaatacggcaaaatcccggaactggaaaagcaactggaagccgcaacgcagctcgaaggcaaaactatgcgtctgttgcgtaataaagtgaccgacgccgaaattgctgaagtgctggcgcgttggacggggattccggtttctcgcatgatggaaagcgagcgcgaaaaactgctgcgtatggagcaagaactgcaccatcgcgtaattggtcagaacgaagcggttgatgcggtatctaacgctattcgtcgtagccgtgcggggctggcggatccaaatcgcccgattggttcattcctgttcctcggcccaactggtgtggggaaaacagagctttgtaaggcgctggcgaactttatgtttgatagcgacgaggcgatggtccgtatcgatatgtccgagtttatggagaaacactcggtgtctcgtttggttggtgcgcctccgggatatgtcggttatgaagaaggtggctacctgaccgaagcggtgcgtcgtcgtccgtattccgtcatcctgctggatgaagtggaaaaagcgcatccggatgtcttcaacattctgttgcaggtactggatgatgggcgtctgactgacgggcaagggagaacggtcgacttccgtaatacggtcgtcattatgacctctaacctcggttccgatctgattcaggaacgcttcggtgaactggattatgcgcacatgaaagagctggtgctcggtgtggtaagccataacttccgtccggaattcattaaccgtatcgatgaagtggtggtcttccatccgctgggtgaacagcacattgcctcgattgcgcagattcagttgaaacgtctgtacaaacgtctggaagaacgtggttatgaaatccacatttctgacgaggcgctgaaactgctgagcgagaacggttacgatccggtctatggtgcacgtcctctgaaacgtgcaattcagcagcagatcgaaaacccgctggcacagcaaatactgtctggtgaattggttccgggtaaagtgattcgcctggaagttaatgaagaccggattgtcgccgtccagtaa

SEQ ID NO: 20463 - DNA, 867 bp, Escherichia coli
atgcaacggttggagcagcgttcacctgacgctatactgcttctctttcttattgctcaaactgtcgacatcactatgcccgtttttgctctgctcgcgcttgtcgcctactccgtcagtcttgcgctgattgttcccggtctgctgcaaaaaaacggcggctggcggcgcatggctattatttctgcggtcattgcgctggtctgccacgcaatcgctctggaagcccgcatcctgcccgacggtgatagcggacaaaacctcagcctgctgaacgttggttcattggtcagtttgatgatctgtacggtaatgaccattgtggcttctcgcaatcgtggctggctgctgctacccattgtctatgcctttgcgcttatcaacctggcgctggcaaccttcatgcccaatgaatacatcacccatctggaagctacgcctgggatgctggtgcacattggcttatcgctcttttcctatgccacgctaattatcgccgccctgtacgcgctgcaactggcgtggattgattaccaactgaagaacaagaagctggcgtttaaccaggaaatgccgccattgatgagtatcgagcgtaaaatgttccacatcacgcagattggcgtggtgctgctaacgctcacgctttgcactggcctgttctacatgcacaacttatttagcatggaaaatatcgacaaggctgtgctctctatcgtggcgtggtttgtctatattgtgctgctgtggggacattatcatgaaggatggcgtggacgccgcgtcgtctggtttaacgttgcgggcgcggtaattctgacactggcctacttcggcagccgaattgtccagcagttaatcagctaa

SEQ ID NO: 20464 - DNA, 483 bp, Escherichia coli
atgacgaagaaaaaagcacataaacctggttcagcgaccatcgcgcttaacaagcgcgcccgtcacgaatactttatcgaagaagagttcgaagcgggacttgccctgcaaggctgggaagttaaatccctgcgcgcaggaaaagccaatatcagcgacagctacgtccttctgcgtgacggagaggcatttctgtttggcgctaacatcacgccaatggccgtggcctccacgcatgtggtgtgcgatcctacccgtacccgcaagttacttctcaaccagcgcgaactggactcattgtacggtcgcgtcaatcgagaaggctataccgtagtggcgctctccctgtactggaaaaatgcctggtgcaaagtgaaaatcggcgtcgccaaaggtaagaaacagcacgataaacgttcagatatcaaagagcgcgaatggcaggtggataaagcacgtatcatgaaaaacgcccaccgttaa

SEQ ID NO: 20465 - DNA, 483 bp, Escherichia coli
atgatggaacagtcactcatcccacagacaccggtacttccactgaccgcacaacgcacggtaaaacgcgccttaacgctgcttgaccgacacctgcgcgaaacaggcgtggcattcacctccactcaggctgctcgtgactggctgaagctgaaaatggcggggctggagcgtgaagaatttatgatgctgtatctgaaccagcagaaccagttgattgcccacgaaaccctgtttgccggttctattagcagtaccgaggtacatccccgtgaggtggtcaaacgcgccctgtatttcaatgcagcagcagtgatactggcgcataaccacccctccggcgacactactcccagccaggcagataagactataacgcagcgtctggtgcaggcgcttcagctcgttgatatccgtgtccctgaccatctgattgttggtggcaggcaaatctattcgttcgcagaacacggtctgctttga

SEQ ID NO: 20466 - DNA, 1449 bp, Escherichia coli
atgaaacttaacgacagtaacttattccgccagcaggcgttgattaacggggaatggctggacgccaacaatggtgaagccatcgacgtcaccaatccggcgaacggcgacaagctgggtagcgtgccgaaaatgggcgcggatgaaacccgcgccgctatcgacgccgccaaccgcgccctgcccgcctggcgcgcgctcaccgccaaagaacgcgccaccattctgcgcaactggttcaatttgatgatggagcatcaggacgatttagcgcgcctgatgaccctcgaacagggtaaaccactggccgaagcgaaaggcgaaatcagctacgccgcctcctttattgagtggtttgccgaagaaggcaaacgcatttatggcgacaccattcctggtcatcaggccgataaacgcctgattgttatcaagcagccgattggcgtcaccgcggctatcacgccgtggaacttcccggcggcgatgattacccgcaaagccggtccggcgctggcagcaggctgcaccatggtgctgaagcccgccagtcagacgccgttctctgcgctggcgctggcggagctggcgatccgcgcgggcgttccggctggggtatttaacgtggtcaccggttcggcgggcgcggtcggtaacgaactgaccagtaacccgctggtgcgcaaactgtcgtttaccggttcgaccgaaattggccgccagttaatggaacagtgcgcgaaagacatcaagaaagtgtcgctggagctgggcggtaacgcgccgtttatcgtctttgacgatgccgacctcgacaaagccgtggaaggcgcgctggcctcgaaattccgcaacgccgggcaaacctgcgtctgcgccaaccgcctgtatgtgcaggacggcgtgtatgaccgttttgccgaaaaattgcagcaggcagtgagcaaactgcacatcggcgacgggctggataacggcgtcaccatcgggccgctgatcgatgaaaaagcggtagcaaaagtggaagagcatattgccgatgcgctggagaaaggcgcgcgcgtggtttgcggcggtaaagcgcacgaacgcggcggcaacttcttccagccgaccattctggtggacgttccggccaacgccaaagtgtcgaaagaagagacgttcggccccctcgccccgctgttccgctttaaagatgaagctgatgtgattgcgcaagccaatgacaccgagtttggccttgccgcctatttctacgcccgtgatttaagccgcgtcttccgcgtgggcgaagcgctggagtacggcatcgtcggcatcaataccggcattatttccaatgaagtggccccgttcggcggcatcaaagcctcgggtctgggtcgtgaaggttcgaagtatggcatcgaagattacttagaaatcaaatatatgtgcatcggtctttaa

SEQ ID NO: 20467 - DNA, 1401 bp, Escherichia coli
atggggcaatcatcgcaaccacatgagttaggcggcgggctgaagtcacgccacgtcaccatgttgtctattgccggtgttatcggcgcaagtctgtttgtcggttccagcgtcgccatcgccgaagcgggcccggcggtattactggcctatctgttcgccgggctactggtggttatgattatgcggatgttggcggaaatggcggttgccacgcccgataccggttcgttttccacctatgccgataaagccattggtcgctgggcgggctataccatcggctggttgtactggtggttttgggtactggttatcccgctggaagccaacatcgccgccatgatcctgcactcatgggttccaggcattcccatctggttattttccctcgtcattaccctcgccttaactggcagtaacttattaagcgttaaaaactacggcgaatttgagttctggctggcgctgtgcaaagtcatcgctatcctggcctttattttccttggtgcagtcgcaattagcggtttttacccgtatgccgaagtgagcgggatctcaagattgtgggatagcggcggctttatgcccaacggtttcggtgcggtattaagcgcgatgttgatcaccatgttctcgtttatgggcgcagaaattgtcaccattgccgccgcggaatccgacacgccggaaaaacatattgtccgcgccaccaactcggttatctggcgtatttctatcttctatttatgttctatttttgtcgtcgtggcattaattccgtggaatatgcccggactaaaagccgtcggttcttatcgctcggtactggaattgctcaatattccccatgcgaaattaatcatggactgcgtgatattactttccgtaaccagttgcctgaactcggcgctgtataccgcgtcaaggatgctctactccttaagtcgtcgcggtgatgctcccgcggtaatgggtaaaatcaaccgcagtaaaaccccgtacgtggcggtgttactctccaccggcgcggcattcttaacggtggtggtgaactattacgcgcctgcgaaggtatttaaatttctgatcgacagctccggcgctatcgccctgctggtttatttagtcatcgccgtttcacagttgcggatgcgcaaaattctgcgagcagaaggaagcgaaattcgcttgcgaatgtggctttatccgtggctcacctggctagtcatcggctttattacctttgtgttggtagtgatgctattccgtccggcgcaacagttagaagtgatctccaccggcttattagcgatagggattatctgtaccgtgccaattatggctcgctggaaaaagctggtattgtggcaaaaaacacccgttcataatacgcgctga

SEQ ID NO: 20468 - DNA, 2145 bp, Escherichia coli
ttggcaacgacaaccgcagaatgcctgacgcaggaaacgatggattaccacgcgctgaatgcgatgcttaacctctacgatagcgcaggtcgcattcagttcgataaagaccgccaggccgttgacgcctttattgcgacgcatgtgcgtccgaacagtgtgaccttcagtagccagcagcagcgcctgaactggctggtcaacgaaggttactatgatgaaagcgttcttaatcgctactctcgcgactttgtcattacgctgtttacccacgcacacaccagcggttttcgtttccagacattcctcggggcatggaagttttacaccagctatacgttgaagacattcgacggtaaacgttatctggaagattttgccgatcgagtaacgatggtggcgctgacgctggcacaaggcgatgagacgctggcgttgcaactgaccgatgaaatgctgtcaggacgctttcagccagccacgccaacattcctcaactgcggtaagcagcagcgcggcgaactggtttcctgttttttgctgcgtattgaagacaatatggagtcgattggtcgggcggtaaattccgcactgcagctgtcgaaacgcggcggcggcgtagcatttttgctgtcgaatctgcgagaagcgggcgcgccaattaaacgtattgaaaatcaatcttctggcgtaattccggtgatgaaaatgctggaagacgcattttcctatgccaaccaactcggcgctcgtcagggggctggtgcagtctatttacatgctcatcatcccgatattctgcgttttctcgacacgaaacgggaaaatgccgacgaaaaaatccgcattaaaacactgtcgcttggcgtggtgatcccggatatcactttccatctggcaaaagagaatgcgcagatggcgctgttttcgccttatgacgtagagcgagtttatggcaagccgtttgccgatgtggccatcagccaacactatgacgaactggttgccgatgaacgcattcgcaaaaaatacctcaacgcccgtgatttcttccagcgactggcagaaatccagtttgagtccggctatccctacatcatgtatgaagacacggtaaaccgtgctaaccctatcgccgggcgcataaatatgagtaatctctgctcagaaattttgcaggttaacagcgcctcagagtatgacgagaatctcgactatacccgcacaggccatgatatttcctgcaatttaggttcgttgaatattgcgcacaccatggattcccccgattttgcccgcacggtagagactgccgtgcgcggtttaacggcagtatcagatatgagtcatatccgcagcgtgccgtccatcgaagccggaaatgccgcctcgcacgccatcggactggggcagatgaatttacacggctatctggcgcgagaaggcatcgcttatggttcgccggaagcactggatttcaccaatctctatttctatgccatcacctggcatgcactgcgtacctcgatgttgctggcacgcgaacgcggtgaaaccttcgccgggttcaaacagtcacgctatgccagtggtgaatattttagccaatatctgcaagggaactggcagccgaaaacggcgaaagttggcgaactgtttacccgtagcggtattacgttacctacccgtgagatgtgggcgcagctgcgcgacgacgtgatgcgctacggcatatacaaccagaatcttcaggcggtgccgccaaccggttctatctcttatatcaaccatgctacgtcgagtattcatccgattgtggcgaaagtagagatacgcaaagagggcaaaacaggacgcgtttactaccctgccccgtttatgactaacgagaatctggcgctgtatcaggacgcttacgaaattggcgcagaaaagatcatcgacacctacgcggaagcgactcgccatgtcgatcaggggctgtcgctgacgctttttttccccgataccgccaccactcgcgatatcaacaaagcgcagatttacgcctggcgcaagggtatcaaaacgctctattacatccgcctgcgtcagatggcgctggaaggcactgaaattgaaggctgcgtctcctgtgcactttaa

SEQ ID NO: 20469 - DNA, 960 bp, Escherichia coli
atgaaactctcacgtatcagcgccatcaactggaacaagatatctgacgataaagatctggaggtgtggaatcgcctgaccagcaatttctggctaccagaaaaggtgccgctgtcgaacgatattcctgcctggcagacattaactgtcgtagaacaacaactgacgatgcgcgtttttactggcctgacgctgctcgacacgctgcaaaatgttatcggcgcgccttctctgatgcccgatgcactcacgcctcatgaagaagcggtattatcgaatatcagctttatggaagcggttcatgcccgctcttacagttcgattttctcgacgctatgccagaccaaagatgtcgatgccgcctacgcctggagtgaagaaaacgcaccgttgcagcgaaaagctcagattattcagcaacattatcgcggtgatgatccgctgaaaaagaaaatcgccagtgtgtttcttgaatcttttttgttctattccggtttctggctgccgatgtatttttccagccgcggaaagctgaccaataccgcggacctgatccgtctgattatccgcgatgaagcagtccacggttactacataggctataaatatcagaaaaacatggaaaagatatctctgggacaacgtgaagagttgaagagtttcgccttcgatttgttgctggaactctacgacaacgagttgcaatacaccgatgagctgtacgccgaaaccccgtgggctgacgatgtgaaagcgtttctctgttacaacgccaataaggctttgatgaatctgggctacgaaccgttatttcccgcagaaatggcggaagtgaatccggcaatcctcgccgcgctttcgccgaatgccgatgaaaatcacgatttcttttccggttcaggctcctcttatgtgatggggaaagcggttgaaacagaagatgaagactggaatttctga

SEQ ID NO: 20470 - DNA, 531 bp, Escherichia coli
atggatagttcgtttacgcccattgaacaaatgctaaaatttcgcgccagccgccacgaagattttccttatcaggagatccttctgactcgtctttgcatgcacatgcaaagcaagctgctggagaaccgcaataaaatgctgaaggctcaggggattaacgagacgttgtttatggcgttgattacgctggagtctcaggaaaaccacagtattcagccttctgaattaagttgtgctcttggatcatcccgtaccaacgcgacgcgtattgccgatgaactggaaaaacgcggttggatcgaacgtcgtgaaagcgataacgatcgccgctgcctgcatctgcaattaacggaaaaaggtcacgagtttttgcgcgaggttttaccaccgcagcataactgcctgcatcaactctggtccgcgctcagcacaacagaaaaagatcagctcgagcaaatcacccgcaaattgctctcccgtctcgaccagatggaacaagacggtgtggttctcgaagcgatgagctaa

SEQ ID NO: 20471 - DNA, 873 bp, Escherichia coli
atgtgtacaacatgcggttgcggtgaaggcaacctgtatatcgagggtgatgaacataaccctcattccgcgtttcgtagcgcgccatttgccccggcggcacgcccgaagatgaaaatcaccggcattaaagcgcctgaatttacccccagccagactgaagaaggcgacctgcattacggtcatggcgaagcgggcactcacgcaccgggcatgagccagcgtcggatgctggaagtcgaaattgacgtgctggacaaaaataaccgtctggctgaacgcaaccgcgcgcgctttgctgcccgcaagcaactggtgctcaacctggtttccagccctggttccggtaaaaccaccctgctgacggaaaccctaatgcgcctgaaagacagcgttccgtgcgcagttattgaaggcgaccagcaaaccgtgaacgatgccgcacgcattcgcgctaccggcacaccagcgattcaggtgaacaccggtaaaggctgccatcttgacgcacagatgattgccgacgccgcaccgcgtctgccactggacgataacggtattctgtttatcgaaaacgttggcaacctcgtatgcccggccagcttcgatctcggtgaaaaacacaaagtggcggtgctttccgttaccgaaggtgaagacaaaccactgaaatatccgcatatgtttgccgccgcctcgctgatgctgctcaacaaagttgacctgttgccgtatctcaactttgacgttgaaaagtgcatcgcctgcgcccgcgaagtcaatccagaaattgaaatcatccttatttccgccaccagcggcgaagggatggaccagtggctgaactggctggagacacagcgatgtgcatag

SEQ ID NO: 20472 - DNA, 2562 bp, Escherichia coli
atgagtgcaatagaaaatttcgacgcccatacgcccatgatgcagcagtatctcaggctgaaagcccagcatcccgagatcctgctgttttaccggatgggtgatttttatgaactgttttatgacgacgcaaaacgcgcgtcgcaactgctggatatttcactgaccaaacgcggtgcttcggcgggagagccgatcccgatggcggggattccctaccatgcggtggaaaactatctcgccaaactggtgaatcagggagagtccgttgccatctgcgaacaaattggcgatccggcgaccagcaaaggtccggttgagcgcaaagttgtgcgtatcgttacgccaggcaccatcagcgatgaagccctgttgcaggagcgtcaggacaacctgctggcggctatctggcaggacagcaaaggtttcggctacgcgacgctggatatcagttccgggcgttttcgcctgagcgaaccggctgaccgcgaaacgatggcggcagaactgcaacgcactaatcctgcggaactgctgtatgcagaagattttgctgaaatgtcgttaattgaaggccgtcgcggcctgcgccgtcgcccgctgtgggagtttgaaatcgacaccgcgcgccagcagttgaatctgcaatttgggacccgcgatctggtcggttttggcgtcgagaacgcgccgcgcggactttgtgctgccggttgtctgttgcagtatgcgaaagatacccaacgtacgactctgccgcatattcgttccatcaccatggaacgtgagcaggacagcatcattatggatgccgcgacgcgtcgtaatctggaaatcacccagaacctggcgggtggtgcggaaaatacgctggcttctgtgctcgactgcaccgtcacgccgatgggcagccgtatgctgaaacgctggctgcatatgccagtgcgcgatacccgcgtgttgcttgagcgccagcaaactattggcgcattgcaggatttcaccgccgggctacagccggtactgcgtcaggtcggcgacctggaacgtattctggcacgtctggctttacgaactgctcgcccacgcgatctggcccgtatgcgccacgctttccagcaactgccggagctgcgtgcgcagttagaaactgtcgatagtgcaccggtacaggcgctacgtgagaagatgggcgagtttgccgagctgcgcgatctgctggagcgagcaatcatcgacacaccgccggtgctggtacgcgacggtggtgttatcgcatcgggctataacgaagagctggatgagtggcgcgcgctggctgacggcgcgaccgattatctggagcgtctggaagtccgcgagcgtgaacgtaccggcctggacacgctgaaagttggctttaatgcggtgcacggctactacattcaaatcagccgtgggcaaagccatctggcacccatcaactacatgcgtcgccagacgctgaaaaacgccgagcgctacatcattccagagctaaaagagtacgaagataaagttctcacctcaaaaggcaaagcactggcactggaaaaacagctttatgaagagctgttcgacctgctgttgccgcatctggaagcgttgcaacagagcgcgagcgcgctggcggaactcgacgtgctggttaacctggcggaacgggcctataccctgaactacacctgcccgaccttcattgataaaccgggcattcgcattaccgaaggtcgccatccggtagttgaacaagtactgaatgagccatttatcgccaacccgctgaatctgtcgccgcagcgccgcatgttgatcatcaccggtccgaacatgggcggtaaaagtacctatatgcgccagaccgcactgattgcgctgatggcctacatcggcagctatgtaccggcacaaaaagtcgagattggacctatcgatcgcatctttacccgcgtaggcgcggcagatgacctggcgtccgggcgctcaacctttatggtggagatgactgaaaccgccaatattttacataacgccaccgaatacagtctggtgttaatggatgagatcgggcgtggaacgtccacctacgatggtctgtcgctggcgtgggcgtgcgcggaaaatctggcgaataagattaaggcattgacgttatttgctacccactatttcgagctgacccagttaccggagaaaatggaaggcgtcgctaacgtgcatctcgatgcactggagcacggcgacaccattgcctttatgcacagcgtgcaggatggcgcggcgagcaaaagctacggcctggcggttgcagctctggcaggcgtgccaaaagaggttattaagcgcgcacggcaaaagctgcgtgagctggaaagcatttcgccgaacgccgccgctacgcaagtggatggtacgcaaatgtctttgctgtcagtaccagaagaaacttcgcctgcggtcgaagctctggaaaatcttgatccggattcactcaccccgcgtcaggcgctggagtggatttatcgcttgaagagcctggtgtaa

SEQ ID NO: 20473 - DNA, 480 bp, Escherichia coli
atgcgaattggacacggttttgacgtacatgcctttggcggtgaaggcccaattatcattggtggcgtacgcattccttacgaaaaaggattgctggcgcattctgatggcgacgtggcgctccatgcgttgaccgatgcattgcttggcgcggcggcgctgggggatatcggcaagctgttcccggataccgatccggcatttaaaggtgccgatagccgcgagctgctacgcgaagcctggcgtcgtattcaggcgaagggttatacccttggcaacgtcgatgtcactatcatcgctcaggcaccgaagatgttgccgcacattccacaaatgcgcgtgtttattgccgaagatctcggctgccatatggatgatgttaacgtgaaagccactactacggaaaaactgggatttaccggacgtggggaagggattgcctgtgaagcggtggcgctactcattaaggcaacaaaatga

SEQ ID NO: 20474 - DNA, 711 bp, Escherichia coli
atggcaaccactcatttggatgtttgcgccgtggttccggcggccggatttggccgtcgaatgcaaacggaatgtcctaagcaatatctctcaatcggtaatcaaaccattcttgaacactcggtgcatgcgctgctggcgcatccccgggtgaaacgtgtcgtcattgccataagtcctggcgatagccgttttgcacaacttcctctggcgaatcatccgcaaatcaccgttgtagatggcggtgatgagcgtgccgattccgtgctggcaggtctgaaagccgctggcgacgcgcagtgggtattggtgcatgacgccgctcgtccttgtttgcatcaggatgacctcgcgcgattgttggcgttgagcgaaaccagccgcacgggggggatcctcgccgcaccagtgcgcgatactatgaaacgtgccgaaccgggcaaaaatgccattgctcataccgttgatcgcaacggcttatggcacgcgctgacgccgcaatttttccctcgtgagctgttacatgactgtctgacgcgcgctctaaatgaaggcgcgactattaccgacgaagcctcggcgctggaatattgcggattccatcctcagttggtcgaaggccgtgcggataacattaaagtcacgcgcccggaagatttggcactggccgagttttacctcacccgaaccatccatcaggagaatacataa

SEQ ID NO: 20475 - DNA, 942 bp, Escherichia coli
atgataacgaatataaaattaccgatgccgccgtcaatttatttatccagatttaatgagaaatttataatgcgctatttcatactaatgttcactttcgtatgttcctttgttgcagcccaaccaactattgtcccacaattacagcaacaagttacggatcttacgagtagcttaaactcacaagaaaagaaagaactgacgcacaagttagaatctattttcaataatacccaagtgcaaattgccgtattaattgttcccacaaccaaagacgagacaattgaacaatatgctacaagagtttttgacaattggcgtttaggagatgccaaacgtaatgatgggatactgatcgttgttgcctggtcggatcgcactgtccgcatccaggtaggttatgggctggaagaaaaggtaaccgatgctctggctggagatatcatccgtagcaacatgatacccgcatttaaacaacaaaaattagctaagggattagagctagctataaacgctttgaataaccaactcacttcacaacaccaatatccgactaatccttcagaaagtgaatcagcgtcttccagtgatcattattactttgctattttttgggtatttgcagtgatgttcttccctttctggttttttcatcaaggcagtaatttttgtcgcgcatgtaaaagtggagtctgtatttcagcaatctatcttttagatttattcctgttctccgataaaattttttccattgctgtattttccttcttttttactttcaccatatttatggtctttacctgtttatgtgtacttcagaaaagagcatctggtagaagttatcattcagacaacagcggttccgctggaggctcagatagcggcggatttagcggcgggggcggttcttctggaggtggcggcgcatccggccgctggtaa

SEQ ID NO: 20476 - DNA, 1299 bp, Escherichia coli
atgtccaaaatcgtaaaaatcatcggtcgtgaaatcatcgactcccgtggtaacccgactgttgaagccgaagtacatctggagggtggtttcgtcggtatggcagctgctccgtcaggtgcttctactggttcccgtgaagctctggaactgcgcgatggcgacaaatcccgtttcctgggtaaaggcgtaaccaaagctgttgctgcggtaaacggcccgatcgctcaggcgctgattggcaaagatgctaaagatcaggctggcattgacaagatcatgatcgacctggacggcaccgaaaacaaatccaaattcggcgcgaacgcaatcctggctgtatctctggctaacgccaaagctgctgcagctgctaaaggtatgccgctgtacgagcacatcgctgaactgaacggtactccgggcaaatactctatgccggttccgatgatgaacatcatcaacggtggtgagcacgctgacaacaacgttgatatccaggaattcatgattcagccggttggcgcgaaaactgtgaaagaagccatccgcatgggttctgaagttttccatcacctggcaaaagttctgaaagcgaaaggcatgaacactgctgttggtgacgaaggtggctatgcgccgaacctgggttccaacgctgaagctctggctgttatcgctgaagctgttaaagctgctggttatgaactgggcaaagacatcactttggcgatggactgcgcagcttctgaattctacaaagatggtaaatacgttctggctggcgaaggcaacaaagcgttcacctctgaagaattcactcacttcctggaagaactgaccaaacagtacccgatcgtttctatcgaagacggtctggacgaatctgactgggacggtttcgcataccagaccaaagttctgggcgacaaaatccagctggttggtgacgacctgttcgtaaccaacaccaagatcctgaaagaaggtatcgaaaaaggtatcgctaactccatcctgatcaaattcaaccagatcggttctctgaccgaaactctggctgcaatcaagatggcgaaagatgctggctacactgcagttatctctcaccgttctggcgaaactgaagacgctaccatcgctgacctggctgttggtactgctgcaggccagatcaaaactggttctatgagccgttctgaccgtgttgctaaatacaaccagctgattcgtatcgaagaagctctgggcgaaaaagcaccgtacaacggtcgtaaagagatcaaaggccaggcataa

SEQ ID NO: 20477 - DNA, 1638 bp, Escherichia coli
atgacaacgaactatatttttgtgaccggcggggtcgtatcctctctgggtaaaggcattgccgcagcctccctcgcagccattcttgaagcccgtggcctcaatgtgaccatcatgaaactggatccgtacatcaacgtcgatccaggtactatgagcccaatccaacacggggaagtgttcgttactgaagacggcgctgaaaccgacctggacctggggcactacgagcgtttcattcgtaccaaaatgagccgccgcaacaacttcaccacgggtcgtatctactctgacgttctgcgtaaagaacgccgcggtgactacctcggcgcaaccgtgcaggttattccgcacatcactaacgcaatcaaagagcgcgtgctggaaggtggcgaaggtcatgacgtagtactggtagaaatcggcggtacagtaggtgatatcgaatccttgccgttcctcgaagcgattcgccagatggctgttgaaattggccgtgagcacactctgtttatgcacctgacgctggtgccgtacatggcagcgtctggtgaagtcaaaaccaaaccgactcagcactctgtaaaagagctgctctccatcggtatccagcctgacatcctgatttgtcgttcagatcgcgctgttccggcgaacgaacgtgcgaagattgcattgttctgtaatgttccggaaaaagcggttatttctctgaaagacgtcgattccatctataaaattccgggcctgttgaaatctcaggggctggacgattatatttgtaaacgattcagcttaaactgcccggaagcgaatctgtccgaatgggaacaggttatcttcgaagaagcgaacccggtaagtgaagtcaccatcggtatggtcggcaagtacattgaactgccggatgcttataaatcagtgatcgaagcactgaaacacggtgggctgaagaatcgtgtcagcgtcaacatcaaactgatcgattcacaagatgttgaaacgcgcggcgttgaaatccttaaaggtctggacgcaatcctcgtacctggcggtttcggctatcgtggcgtagaaggcatgattacgaccgcgcgttttgcgcgtgagaacaatattccttatctgggcatttgcctgggtatgcaggtggcgttaattgattacgctcgccatgttgccaacatggagaacgccaactctacggaatttgtgccagactgtaagtacccggttgtggcgctgattaccgagtggcgcgatgaaaacggcaacgttgaagttcgtagcgagaagagcgatctcggcggtaccatgcgtctcggcgcacagcagtgccagttggttgacgatagcctggttcgccagctgtacaatgcgccgacaattgttgagcgtcatcgtcaccgttacgaagtcaacaacatgctgttgaaacagattgaagatgcaggtctgcgcgttgcgggccgttccggggatgatcagttggtcgagatcatcgaagttccgaatcacccgtggttcgtggcttgccagttccatccggagtttacttctactccacgtgatggtcacccgctgtttgcaggctttgtgaaagccgccagcgagttccagaaacgtcaggcgaagtaa

SEQ ID NO: 20478 - DNA, 792 bp, Escherichia coli
atgaatcaaatcgaccgtttgctcactattatgcagcgcctgcgcgatccggaaaacggctgcccgtgggataaagagcagacatttgccaccattgcgccttacacccttgaagaaacctacgaagtgctggacgccatcgcccgtgaagattttgacgatcttcgcggtgaactgggcgatctgctattccaggtggtgttttacgcgcaaatggctcaggaagaagggcgctttgactttaatgatatttgcgctgctattagcgataaattagagcgtcgccatccgcatgtttttgctgatagttctgccgaaaacagtagtgaagtgcttgcccgttgggagcaaatcaaaaccgaagagcgcgcgcagaaagcgcagcattcggcgctggacgatattcctcgtagtttaccggctttaatgcgtgcgcaaaaaatccagaaacgttgcgccaacgttggcttcgattggacgacgcttggtccggtagtcgataaagtctacgaagagatcgacgaggtgatgtacgaagcgcggcaggctgttgtcgaccaggctaaactggaggaggaaatgggggacctgctgtttgccacggttaatctggctcgccatttagggacgaaagcagaaatcgcattgcaaaaagcgaacgaaaaattcgagcgtcgttttcgcgaagtggagcgtattgttgccgcgcgtggactggaaatgacaggtgttgacctcgaaacaatggaagaagtctggcaacaggtaaaacggcaggaaattgatctctaa

SEQ ID NO: 20479 - DNA, 2235 bp, Escherichia coli
atggttgcggtaagaagtgcacatatcaataaggctggtgaatttgatccggaaaaatggatcgcaagtctgggtattaccagccagaagtcgtgtgagtgcttagccgaaacctgggcgtattgtctgcaacagacgcaggggcatccggatgccagtctgttattgtggcgtggtgttgagatggtggagatcctctcgacattaagtatggacattgacacgctgcgggcggcgctgcttttccctctggcggatgccaacgtagtcagcgaagatgtgctgcgtgagagcgtcggtaagtcggtcgttaaccttattcacggcgtgcgtgatatggcggcgatccgccagctgaaagcgacgcacactgattctgtttcctccgaacaggtcgataacgttcgccggatgttattggcgatggtcgatgattttcgctgcgtagtcatcaaactggcggagcgtattgctcatctgcgcgaagtaaaagatgcgccggaagatgaacgtgtactggcggcaaaagagtgtaccaacatctacgcaccgctggctaaccgtctcggaatcggacaactgaaatgggaactggaagattactgcttccgttacctccatccaaccgaatacaaacgaattgccaaactgctgcatgaacggcgtctcgaccgcgaacactacatcgaagagttcgttggtcatctgcgcgctgagatgaaagctgaaggcgttaaagcggaagtgtatggtcgtccgaaacacatctacagcatctggcgtaaaatgcagaaaaagaacctcgcctttgatgagctgtttgatgtgcgtgcggtacgtattgtcgccgagcgtttacaggattgctatgccgcactggggatagtgcacactcactatcgccacctgccggatgagtttgacgattacgtcgctaacccgaaaccaaacggttatcagtctattcataccgtggttctggggccgggtggaaaaaccgttgagatccaaatccgcaccaaacagatgcatgaagatgcagagttgggtgttgctgcgcactggaaatataaagagggcgcggctgctggcggcgcacgttcgggacatgaagaccggattgcctggctgcgtaaactgattgcgtggcaggaagagatggctgattccggcgaaatgctcgacgaagtacgtagtcaggtctttgacgaccgggtgtacgtctttacgccgaaaggtgatgtcgttgatttgcctgcgggatcaacgccgctggacttcgcttaccacatccacagtgatgtcggacaccgctgcatcggggcaaaaattggcgggcgcattgtgccgttcacctaccagctgcagatgggcgaccagattgaaattatcacccagaaacagccgaaccccagccgtgactggttaaacccaaacctcggttacgtcacaaccagccgtgggcgttcgaaaattcacgcctggttccgtaaacaggaccgtgacaaaaacattctggctgggcggcaaatccttgacgacgagctggaacatctggggatcagcctgaaagaagcagaaaaacatctgctgccgcgttacaacttcaatgatgtcgacgagttgctggcggcgattggtggcggggatatccgtctcaatcagatggtgaacttcctgcaatcgcaatttaataagccgagtgccgaagagcaggacgccgccgcgctgaagcaacttcagcaaaaaagctacacgccgcaaaaccgcagtaaagataacggtcgcgtggtagtcgaaggtgttggcaacctgatgcaccacatcgcgcgctgctgccagccgattcctggagatgagattgtcggcttcattacccaggggcgcggtatttcagtacaccgcgccgattgcgaacaactggcggaactgcgctcccatgcgccagaacgcattgttgacgcggtatggggtgagagctactccgccggatattcgctggtggtccgcgtggtagctaatgatcgtagtgggttgttacgtgatatcacgaccattctcgccaacgagaaggtgaacgtgcttggcgttgccagccgtagcgacaccaaacagcaactggcgaccatcgacatgaccattgagatttacaacctgcaagtgctggggcgcgtgctgggtaaactcaaccaggtgccggatgttatcgacgcgcgtcggttgcacgggagttag

SEQ ID NO: 20480 - DNA, 1344 bp, Escherichia coli
atgacagattatgcgtctttcgctaaagtttccggtcaaattagtcgtttacttgttacacagcttagatttcttttgctcgggagaggcatgtcaggatccaacactgcaatcagccgtcgtcgtttactgcaaggcgcgggtgccatgtggctattgagcgtaagtcaggtcagtctggctgcggtcagccaggtcgtggcggtgcgcgtctggcctgcgtccagctacacccgcgtgacggtggaatcaaatcgtcagctgaaatataagcagttcgcgttgagtaaccctgaacgcgtggtggtggatatcgaagatgtaaacctgaactcggtactcaaggggatggcggcacaaattcgtgcagacgacccgttcatcaagtcggcgcgcgtcgggcaatttgacccgcaaaccgtacggatggtttttgaattaaagcaaaacgtaaaaccgcagctgtttgcccttgcgccggtcgccgggtttaaagagcgtctggtgatggacctctatccggccaatgcacaggatatgcaggacccgctgctggcgctgctggaggattacaacaaaggcgacctcgaaaagcaggtgccgccagcgcaaagtggtccacaaccgggtaaagcagggcgcgatcgtccgattgtcattatgcttgaccctggccacggtggcgaagactccggtgcggtggggaaatacaaaacgcgcgaaaaagatgtggtattgcaaatagctcgccgtttgcgctctctgatcgagaaagagggcaatatgaaggtgtacatgacgcgcaatgaagacatcttcattccattgcaagtgcgcgtagcaaaagcccagaaacagcgtgctgacctgtttgtctctatccatgccgacgcctttaccagtcgtcagccgagcggttcctctgtgtttgcgctctcaaccaaaggtgcaaccagtactgcggcaaaatatctggcacaaacccagaacgcctcggacttgattggtggcgtgagcaaaagcggtgaccgctatgtcgaccacaccatgttcgatatggtacagtcgctgaccattgccgacagcctgaagtttggtaaagcggtactgaataagctcggtaaaatcaacaagctgcataaaaatcaagttgaacaggccgggtttgccgtactaaaggcaccagatattccctccattctggtcgaaacggcgtttatcagtaacgttgaggaagagcgtaaactgaaaacggcgactttccagcaggaagttgcggagtctattcttgcggggattaaagcgtattttgccgatggggcgacgctggcgagaaggggatga

SEQ ID NO: 20481 - DNA, 1827 bp, Escherichia coli
atgaaattgcaaaagcaattactggaagctgtggagcacaaacagctacgcccgctggatgtgcaatttgccctgaccgtggcgggagatgaacatcctgccgtcaccctcgcggcggcactgttaagtcatgatgccggagagggacacgtttgtttgccgctttcacgactggaaaataacgaggcgtcgcatccgctgttggcgacctgtgtcagtgaaatcggtgagctacaaaattgggaagaatgcttgctggcttctcaagcggtcagcaggggagatgaacccacgccgatgatcctctgtggcgatcgtctttatttgaatcgcatgtggtgtaacgagcgcacagtggcacgctttttcaacgaagtgaatcatgccattgaggttgatgaagctctactggcgcaaaccctggacaaactttttccagtaagcgatgaaattaactggcaaaaagttgcggcggcagtggcgctgacgcggcggatctcggtgatttccggcggccctggcaccggtaaaacgaccaccgtagcgaagttgctggcagcgttaattcaaatggccgacggcgaacgctgccgtatccgtctggctgcaccaacgggtaaagctgccgcgcgcttaaccgaatctctcggcaaggctttgcgacagttaccgctgaccgatgaacaaaagaaacgcattccggaagatgccagcactttgcaccgattgctgggcgcgcagccgggtagccagcgtttacgtcatcatgccggtaacccgctgcatcttgatgtgctggtggtagatgaagcgtcaatgatcgatctgcctatgatgtcgagactgatcgacgccttgcccgatcatgcgcgagtgatctttctcggcgatcgtgatcaactggcctcggttgaggctggggctgtgctgggcgatatctgcgcttatgccaacgcgggctttaccgccgagcgtgccaggcagctaagccgcctgacggggactcacgttccggcaggaaccggcacagaagcggcatctttgcgcgacagtctctgcctgctgcaaaaaagctatcgtttcggcagcgattctggcattggtcagttagctgcggcgatcaaccgtggtgataaaacggcagtgaaaaccgtttttcagcaggattttactgatatcgaaaaacggcttttacagagcggcgaagattatattgcgatgcttgaggaagctcttgcgggttacggacgttatctggatctgctgcaagcgcgtgccgagccggatttaatcattcaggcgttcaatgagtaccagcttttgtgcgccctgcgggaagggccgtttggcgtggctggactgaatgagcgaattgagcagtttatgcaacagaagcgcaaaattcatcgtcatccgcactctcgttggtacgaaggtcgaccggtgatgattgcccgtaatgacagcgcgcttgggttgtttaatggcgatatcggtattgcgctggatcgcgggcaggggacgcgcgtctggtttgcgatgccggacggcaatattaagtctgtgcaaccgagtcgcttgccagagcacgaaactacgtgggcgatgacggtacataaatcgcagggatcggagttcgaccatgcggcgttgattttgccgagccaacgcacgccggtagtaacgcgagagctggtttataccgcggtgacccgcgcgcgtcgccgtctgtcgctgtatgccgatgagcgcatattaagtgcggcaatcgccactcgtactgagcggcgcagtggtctggcggcgttgtttagttcacgggaataa

SEQ ID NO: 20482 - DNA, 3543 bp, Escherichia coli
atgagtgatgtcgccgagacactagatcctttgcgcttgcccttacagggtgagcgcctgattgaagcctctgccggcacaggcaaaacctttacgattgcggcgctctatttgcgcctgttacttggactaggcggttccgccgcctttccccgcccgctgaccgttgaagaactgctggtggtcacctttaccgaggctgccacggcagaattgcgcggtcgtatccgtagcaatatccacgagttgcgcatcgcctgtctgcgtgaaaccaccgacaatccactgtacgaacgcctgctggaagagatcgacgataaagcgcaagccgcgcagtggttgttgttagccgaacggcagatggatgaagcggcagtctttactattcacggcttttgccagcgcatgctcaacctgaatgcctttgaatccggcatgctgtttgagcagcagctgattgaagatgagtctctgctacgctaccaggcctgcgccgatttctggcgtcgccactgctacccgctgccgcgtgaaatagcccaggtcgtctttgaaacctggaaagggccgcaggcgttgctgcgcgatattaatcgttatctgcaaggcgaagcgccggttatcaaagcaccgccgcccgatgatgaaacgctggcttcccgtcacgcgcaaattgtggcgcgtattgatacggtaaaacagcagtggcgcgacgcagtgggtgaactggatgcgctgatcgaatcttctggtattgatcgacgcaagtttaaccgtagcaatcaggctaaatggatcgacaagatcagcgcctgggcagaagaagagacaaacagttatcagttgccggagtcgctggaaaaattctcccagcgtttcttagaagatcgcacgaaggccgggggggaaaccccgcgacatccactgtttgaggcgatcgatcaactgcttgcagaaccattgtcgatccgcgatctggtgatcacccgcgcattggctgagatccgcgaaacagtagcgcgtgaaaaacgccgccgtggcgaattgggttttgatgacatgttaagtcggctcgattccgcgctgcgtagcgaaagcggtgaggtgttggcagcggcgatccgtacgcgattcccggtggcaatgatcgatgaatttcaggataccgacccccagcagtaccgaatttttcgccgtatctggcaccatcagccggaaaccgcattgttgctaattggcgacccgaagcaggccatatatgcattccggggtgcggatatcttcacttatatgaaggcgcgtagcgaagttcacgcccactacactttagacaccaactggcgttccgcaccaggaatggtgaacagcgtgaataagcttttcagccagactgatgacgcgttcatgtttcgcgaaataccgtttattccagtgaaatcagccgggaaaaatcaggcgttacgttttgtatttaaaggtgaaacacagcctgcgatgaaaatgtggctgatggaaggcgaaagctgcggcgttggcgattatcaaagtaccatggcgcaggtatgtgctgcgcaaatccgcgactggctacaagccggacagcggggcgaagcgttgctgatgaacggcgacgacgcgcgtccggtgcgtgcttcggacatcagtgtgctggtgcgcagccgccaggaggccgcccaggtgcgcgatgccttaacgttgctggaaatcccttccgtttacctttcgaaccgcgacagtgtttttgaaactctggaagcgcaggaaatgctttggttgttgcaggcggtgatgacgcccgaacgtgagaacaccctgcgtagtgcgctggcaacgtcaatgatggggctgaacgcgctggatatcgaaacgctgaacaatgacgaacatgcgtgggatgtggtagtcgaagagttcgatggttatcggcaaatctggcgcaaacgtggcgttatgccgatgctgcgggcgctgatgtcggcgcgtaacattgctgaaaacttgctggcaacggcaggcggtgagcggcgtcttaccgatatcttgcatatcagcgaactgctacaagaagccggaacgcagctggaaagtgaacatgcgctggtacgctggttatcgcaacatatcctcgagccagacagtaatgcctccagccaacaaatgcgtctcgaaagtgataaacatctggtgcagattgtcacgatccacaaatcgaaagggctggaatatccattggtctggctgccgtttatcaccaatttccgcgtccaggagcaggcgttttatcacgatcgccactcgtttgaggcagttctggatcttaatgctgcgccagaaagcgtcgacctcgcggaggccgaacgtctggcggaagatctgcgtttgctttacgtggcgctgacacgttcggtttggcattgcagtctcggcgttgcaccgctggtgcgccgtcgtggcgataaaaaaggtgacaccgacgtccaccaaagtgcgctcgggcgtttgctgcaaaaaggggaaccgcaagatgcggcagggcttcgcacctgtattgaagcgttatgcgatgatgatattgcctggcaaacggcacaaactggtgataaccaaccctggcaggttaatgatgtttctacagcagagctgaatgcgaagacgttacaacgattgcccggcgataactggcgcgtcaccagctactctggtttgcaacagcgtggtcacggtatcgcccaggatttgatgcctcggctggatgtcgatgctgcaggcgttgccagcgtcgttgaagaaccgacgttaacaccacatcagtttccgcgcggtgcgtcaccggggacgttcttgcacagtttgtttgaagacctggattttacccagccggttgacccgaactgggtgcgggaaaaactggaactcggcggctttgaatcgcagtgggaaccggtattgaccgagtggatcacggctgtcctccaggcacctctcaatgaaaccggcgtaagcctgagtcaactttccgcccgcaataaacaggtggagatggagttttatctgccgattagtgaaccgcttatcgccagtcagcttgatacgttaatccgccagtttgacccgctatccgcaggctgcccgccgctggagttcatgcaggtacgtggcatgttaaaaggctttatcgacctggtgttccgccacgaagggcgttattacctgctcgactataaatccaactggttgggtgaagacagttcggcttacacccaacaggctatggcagcggcaatgcaggcacaccgctatgatctgcaatatcagctttataccctggcgctgcatcgttatctgcgccatcgcattgctgattacgactatgagcaccactttggcggcgttatttatctgttcctgcgtggcgttgataaagaacatccgcaacaggggatttacacaacccgacccaacgccgggttgattgccctgatggatgagatgtttgccggtatgaccctggaggaggcgtaa

SEQ ID NO: 20483 - DNA, 1185 bp, Escherichia coli
gtgatgaaagacgttgtgattgtcggggcgttacggacacctatcggctgctttcgtggtgcgttagcgggtcattccgccgtggaacttggtagtctggtcgtgaaagcgttaatagaacgtaccggcgttcctgcatatgcggtggatgaagtaattcttggtcaggtgttgactgcaggggcagggcagaatccggcaaggcaatcggctattaaaggtggtctgcctaatagcgtttctgcaatcactattaatgacgtttgcggttccgggcttaaagcactgcatctggctactcaggcgatacagtgtggcgaggctgatattgtcatcgccggtggccaggaaaacatgagccgcgcaccacatgttctgactgatagccgcaccggtgcacagcttggcaatagccagttggttgacagtcttgtgcatgatgggttgtgggatgccttcaatgattatcatattggtgtcaccgccgaaaatctggctcgcgaatatggcatcagccgtcagttgcaggatgcttacgcacttagctcgcaacaaaaagcgcgagcggcgattgacgccggacgatttaaagatgagatcgtcccggtaatgacccaaagtaacgggcagacgttggttgttgataccgatgaacagccacgcactgacgccagcgcagaaggcttagcccgtttaaatccttcatttgatagtctcggttctgtgacagcgggtaatgcatcatccataaacgatggcgcagctgcggtaatgatgatgagcgaagccaaagcacgagcgttgaatttacccgtgctggcccgcattcgcgcatttgccagcgttggtgtagatccggcattgatgggaattgcgccggtgtatgcgacccgccgttgcctggagcgtgtaggctggcagttggctgaagtcgatcttatcgaggctaatgaagcgtttgctgcacaggcgctttcggttggcaagatgcttgagtgggatgagcgtcgggtcaatgtcaatggtggcgcgatcgcactcggtcacccgataggcgcttccggttgccgaatcctggtttctctggttcatgaaatggtgaaacgtaatgcccgcaaaggactggcaacgctttgtatcggcgggggccagggtgtggcattgaccattgaacgtgacgaatag

SEQ ID NO: 20484 - DNA, 933 bp, Escherichia coli
atgagtaagaaaattgttctcgccctgggcgggaatgcgctgggcgatgacctggccgggcaaatgaaagcggtaaaaattacttctcaggcaattgttgatttaattgcccagggacatgaagttatcgtcactcatggtaacgggccgcaggtgggcatgattaaccaggcctttgaagctgccgcaaaaactgaagcgcactcgccaatgctgccgatgtctgtctgtgttgcattaagccagggttatattggttacgatctacaaaacgctttaagagaagaactgctttctcggggcattaataaacctgtagcaacgctggttactcaggtcgaagtcgacgctaacgatccggcattcctcaacccgaccaagccgatcggttcgttctttaccgagcaagaagcagagcaactgacaaaacagggttacactctgaaagaagatgctggtcgcggctatcgccgtgttgttgcctcgccaaaaccggttgatatcattgaaaaagaaacggttaaagctctggtagatgcaggtcaggtggtgatcaccgttggcggtggtggtatccctgttattcgtgaaggtaaccatctgcgtggtgccagcgcggttatcgataaagactgggccagcgcccgtttagcagaaatgattgatgccgatatgctgatcattctgactgcggtagaaaaagtggccattaacttcggtaaagagaatgaacagtggctcgatcgcctgtcattaagtgatgctgaacgctttatcgaagaaggtcattttgcgaaaggttctatgctgcctaaagtggaagctgccgcctcgtttgctcgctctcgcgcaggtcgtgaagcactgattaccgtattgagcaaagcgaaagaagggattgaaggcaaaacaggaacggtgatttgtcagtaa

SEQ ID NO: 20485 - DNA, 1935 bp, Escherichia coli
atgaaagggatgcaaatgaataagtttattgctgctgaagctgcggaatgtataggctgtcatgcttgtgaaattgcctgtgcggtggcacacaatcaagaaaactggccgctgagtcacagtgactttcgaccgcgtatccacgttgtagggaaaggccaggctgcgaatccggtggcctgccatcactgcaacaatgccccttgcgttacggcttgtccggttaatgctctgactttccagtccgatagcgtacaactggacgagcaaaaatgtattggttgtaaaagatgcgcaatcgcttgcccctttggcgtcgttgagatggtcgatacgattgcgcagaaatgcgacctttgtaaccagcgcagttccggcacgcaagcctgtattgaagtttgcccaacacaggcgttacgactgatggacgataaagggttgcagcagataaaggtggcccgccagcgcaaaacggcagcaggaaaagcgtcatcagacgctcagccatctcgcagtgcagcgttgctccccgttaactcgcgtaaaggcgcagataaaatttcagcgagtgaacggaaaacccactttggcgaaatatattgcgggctggatccacaacaagcgacttatgagagtgaccgctgtgtttattgtgccgaaaaagctaactgcaactggcattgcccgctgcataacgctattccggattacatccgtctggtacaggaaggaaagattattgaagcggcagaactttgccaccagaccagttccttaccagaaatttgcggcagggtatgtccacaggaccgtctttgtgaaggcgcatgtactttgaaagatcactcgggcgcagtctctatcggtaatctggaacgctacatcaccgataccgcgctggcgatgggctggcgtcccgatgtcagcaaagttgttccccgtagcgaaaaagtggcggtgattggcgctgggcctgcagggttagggtgtgctgatattctggcgcgcgcaggagttcaggtcgatgtctttgatcgccatccagaaattggcggtatgctgacttttggcattcctcctttcaaactcgataaaacggtattaagccagcggcgagagatattcaccgcaatgggaatcgactttcatcttaactgtgaaattggccgcgatattacctttagcgatttaacttctgaatatgatgcagttttcatcggcgtggggacttacgggatgatgcgagcagatctgccgcatgaagatgcgcccggtgtcattcaggctctaccgttcctgactgcccatacccgccagctcatgggattgccggagtctgaagagtatccgctgacggacgtggaaggtaagcgagtcgtggtattgggcggtggcgatacgacaatggattgtttgcggacttccatccgcctcaatgccgccagcgtgacctgcgcgtatcgtcgtgatgaagtcagtatgccgggctcgcgcaaagaggtggttaatgcgcgcgaggaaggtgtcgagtttcagttcaatgttcaaccgcaatatatcgcttgtgacgaagatgggcgtttaactgcggtgggcctgattcgtaccgccatgggtgagccggggccggatggtcgccgtcgtcctcgtccggtagcgggttcagagtttgaattgcccgccgatgttctgattatggcctttggtttccaggcgcatgccatgccgtggttgcagggcagcggaattaaactcgataaatggggcctgattcaaaccggtgacgtcgggtatttacctacccagacgcatctgaaaaaagtctttgctggtggtgatgcagttcatggcgcggatctggttgtcactgcaatggccgcaggaaggcaggcggcgcgcgatatgttaactctgtttgatacgaaggcatcgtga

SEQ ID NO: 20486 - DNA, 1518 bp, Escherichia coli
atgtctgaacaacacgcacagggcgctgacgcggtagtcgatcttaacaatgaactgaaaacgcgtcgtgagaagctggcgaacctgcgcgagcaggggattgccttcccgaacgatttccgtcgcgatcatacctctgaccaattgcacgcagaattcgacggcaaagagaacgaagaactggaagcgctgaacatcgaagtcgccgttgctggccgcatgatgacccgtcgtattatgggtaaagcgtctttcgttaccctgcaggacgttggcggtcgcattcagctgtacgttgcccgtgacgatctcccggaaggcgtttataacgagcagttcaaaaaatgggacctcggcgacatcctcggcgcgaaaggtaagctgttcaaaaccaaaaccggcgaactgtctatccactgcaccgagttgcgtctgctgaccaaagcactgcgtccgctgccggataaattccacggcttgcaggatcaggaagcgcgctatcgtcagcgttatctcgatctcatctccaacgatgaatcccgcaacacctttaaagtgcgctcgcagatcctctctggtattcgccagttcatggtgaaccgcggctttatggaagttgaaacgccgatgatgcaggtgatccctggcggtgccgctgcgcgtccgtttatcacccaccataacgcgctggatctcgacatgtacctgcgtatcgcgccggaactgtacctcaagcgtctggtggttggtggcttcgagcgtgtattcgaaatcaaccgtaacttccgtaacgaaggtatttccgtacgtcataacccagagttcaccatgatggaactctacatggcttacgcagattacaaagatctgatcgagctgaccgaatcgctgttccgtactctggcacaggatattctcggtaagacggaagtgacctacggcgacgtgacgctggacttcggtaaaccgttcgaaaaactgaccatgcgtgaagcgatcaagaaatatcgcccggaaaccgacatggcggatctggacaacttcgactctgcgaaagcaattgctgaatctatcggcatccacgttgagaagagctggggtctgggccgtatcgttaccgagatcttcgaagaagtggcagaagcacatctgattcagccgaccttcattactgaatatccggcagaagtttctccgctggcgcgtcgtaacgacgttaacccggaaatcacagaccgctttgagttcttcattggtggtcgtgaaatcggtaacggctttagcgagctgaatgacgcggaagatcaggcgcaacgcttcctggatcaggttgccgcgaaagacgcaggtgacgacgaagcgatgttctacgatgaagattacgtcaccgcactggaacatggcttaccgccgacagcaggtctgggaattggtatcgaccgtatggtaatgctgttcaccaacagccataccatccgcgacgttattctgttcccggcgatgcgtccggtaaaataa

SEQ ID NO: 20487 - DNA, 711 bp, Escherichia coli
atgaagaaaggttttatgttgtttactttgttagcggcgttttcaggctttgctcaggctgatgacgcggcaattcaacaaacgttagccaaaatgggcatcaaaagcagcgatattcagcccgcgcctgtagctggcatgaagacagttctgactaacagcggcgtgttgtacatcaccgatgatggtaaacatatcattcaggggccaatgtatgacgttagtggcacggctccggtcaatgtcaccaataagatgctgttaaagcagttgaatgcgcttgaaaaagagatgatcgtttataaagcgccgcaggaaaaacacgtcatcaccgtgtttactgatattacctgtggttactgccacaaactgcatgagcaaatggcagactacaacgcgctggggatcaccgtgcgttatcttgctttcccgcgccaggggctggacagcgatgcagagaaagaaatgaaagctatctggtgtgcgaaagataaaaacaaagcgtttgatgatgtgatggcaggtaaaagcgtcgcaccagccagttgcgacgtggatattgccgaccattacgcacttggcgtccagcttggcgttagcggtactccggcagttgtgctgagcaatggcacacttgttccgggttaccagccgccgaaagagatgaaagaattcctcgacgaacaccaaaaaatgaccagcggtaaataa

SEQ ID NO: 20488 - DNA, 897 bp, Escherichia coli
gtgaaacaggatctggcacgcatcgagcagtttcttgatgctctgtggctggaaaaaaatctggctgaaaatacgttgaacgcttaccgtcgcgatctgtcaatgatggtggagtggttgcatcaccgcgggttgacgctggcgacggcgcaaagtgacgatttgcaggcattactggcagaacggctggagggcgggtataaagccaccagctcagcgcgtttgctgagtgcagtgcgccgattgttccagtatctttatcgcgaaaagtttcgtgaagacgatcccagtgcgcatctcgcttcaccgaaattgccccagcgtttgccaaaagatttaagcgaagcgcaggtcgaacgtttattacaggcaccattaatcgatcagccactggagctacgcgataaagccatgcttgaagtgttgtatgctaccgggctgcgtgtctctgaactggtcggactgacaatgagtgatatcagcctgcgtcagggcgtggtacgggtcattggtaaaggcaacaaagagcgtctggtgccgttaggtgaagaggcggtttactggctggaaacctatctggaacatgggcgtccgtggctgctgaatggtgtgtcaattgacgtgttgtttcccagccagcgtgcgcagcagatgacgcgacagaccttctggcaccgtattaaacattatgctgtgctggcgggtatcgacagcgaaaagctgtcaccgcatgtgttgcgtcacgcttttgccactcatttattaaatcatggtgcggatttacgcgtggtgcagatgctactgggccacagcgatctctccaccacgcaaatttatacgcatgtcgctaccgagcgtctgcggcaacttcatcaacagcatcacccgcgggcgtga

SEQ ID NO: 20489 - DNA, 660 bp, Escherichia coli
atggttcagaagcccctcattaagcagggatattcactggcagaggaaatagccaacagcgtcagtcacggcattgggttggtgtttggtatcgttgggctggtgttgctactggttcaggcggtggatcttaatgccagcgccacagcgataaccagctacagcctctatggcggcagtatgatcctgctgttcctcgcttcgacgctctatcacgccattcctcatcaacgggcaaaaatgtggctgaagaaatttgaccattgcgctatttacctgttgattgccggaacctacacgccgtttttgctggtggggctggattctccgttagcgcgcgggttgatgattgttatctggagcctggcattgctgggtattctgtttaaactgaccatcgcgcaccgattcaaaattttatctctggtgacctatctggcgatgggctggctgtcgctggtggtaatttatgaaatggcagttaagctcgcggcgggcagcgttaccttactggcggtaggcggcgtggtttattcgctcggggtgattttctacgtctgcaaacgcattccatacaaccatgccatctggcacggcttcgtgctcggcggtagtgtgtgccactttctggcgatctatttgtatattgggcaggcgtaa

SEQ ID NO: 20490 - DNA, 1440 bp, Escherichia coli
atgatagtgaaaaaactcaccttaccgaaagatttcttatggggcggcgcagttgccgctcatcaggtcgaaggcggctggaacaaaggcggaaaagggccgagcatttgtgacgttctgaccggtggcgcacacggcgtgccgcgcgaaatcaccaaagaagtcttgccaggaaaatactatccaaaccatgaagccgttgatttttatggtcactataaggaagacatcaagctatttgccgaaatgggcttcaaatgttttcgtacatccattgcctggacgcgcatttttccaaaaggcgatgaagctcagccaaacgaagaagggctgaagttctacgatgatatgttcgatgaactgctgaaatacaacatcgaaccggtgatcaccctctcccactttgaaatgccgctgcatctggtgcagcaatacggtagctggaccaaccgtaaagtggttgatttctttgtacgtttcgcggaagtggtatttgaacgctataagcacaaagtcaaatactggatgaccttcaacgaaattaacaaccagcgtaactggcgtgcaccgctgttcggttactgctgctccggcgtggtgtataccgagcatgaaaacccggaagagacgatgtatcaggtgctgcatcaccagtttgtcgccagcgccctggcggtgaaagctgcgcgtcgcattaacccggagatgaaagtcggctgtatgctggcgatggtgccgctctatccttactcctgtaacccggacgatgtgatgttcgctcaggagtcgatgcgcgaacgctacgtctttaccgatgtgcagctacgcggctattacccgtcctatgtgttgaacgagtgggagcgtcgcggatttaacatcaaaatggaagacggcgatctggatgtgctgcgtgaaggcacctgcgattatcttggtttcagctattacatgaccaatgcagtgaaggccgaaggcggcaccggcgatgcgatctctggttttgaaggcagcgtaccaaacccgtatgttaaagcatctgactggggctggcagattgatccagtaggtctgcgctatgcactttgcgaactgtatgagcgttatcagaggccgctgtttattgtcgaaaacggttttggcgcttacgacaaagtggaagaagatggcagcatcaacgacgactaccgcattgactacctgcgcgcccatatcgaagagatgaaaaaagcggtgacttacgatggcgtggatctgatgggctacacaccgtggggctgcatcgactgcgtgtcgttcaccaccgggcagtacagcaaacgctacggctttatctatgtgaataaacatgacgacggtactggcgatatgtcgcgttcacgtaagaagagctttaactggtacaaagaggtgattgccagcaacggcgagaagctttaa

SEQ ID NO: 20491 - DNA, 1095 bp, Escherichia coli
atggcacaacagactcctttgtacgaacaacacacgctttgcggcgctcgcatggtggatttccacggctggatgatgccgctgcattacggttcgcaaatcgacgaacatcatgcggtacgtaccgatgccggaatgtttgatgtgtcacatatgaccatcgtcgatcttcgcggcagccgcacccgggagtttctgcgttatctgctggcgaacgatgtggcgaagctcaccaaaagcggcaaagccctttactcggggatgttgaatgcctctggcggtgtgatagatgacctcatcgtctactactttactgaagatttcttccgcctcgttgttaactccgccacccgcgaaaaagacctctcctggattacccaacacgctgaacctttcggcatcgaaattaccgttcgtgatgacctttccatgattgccgtgcaagggccgaatgcgcaggcaaaagctgccacactgtttaatgacgcccagcgtcaggcggtggaagggatgaaaccgttctttggcgtgcaggcgggcgatctgtttattgccaccactggttataccggtgaagcgggctatgaaattgcgctgcccaatgaaaaagcggccgatttctggcgtgcgctggtggaagcgggtgttaagccatgtggcttgggcgcgcgtgacacgctgcgtctggaagcgggcatgaatctttatggtcaggagatggacgaaaccatctctcctttagccgccaacatgggctggaccatcgcctgggaaccggcagatcgtgactttatcggtcgtgaagccctggaagtgcagcgtgagcatggtacagaaaaactggttggtctggtgatgaccgaaaaaggcgtgctgcgtaatgaactgccggtacgctttaccgatgcgcagggcaaccagcatgaaggcattatcaccagcggtactttctccccgacgctgggttacagcattgcgctggcgcgcgtgccggaaggtattggcgaaacggcgattgtgcaaattcgcaaccgtgaaatgccggttaaagtgacaaaacctgtttttgtgcgtaacggcaaagccgtcgcgtga

SEQ ID NO: 20492 - DNA, 894 bp, Escherichia coli
atgaaacgcccggactacagaacattacaggcactggatgcggtgatacgtgaacgaggatttgagcgcgcggcacaaaagctgtgcattacacaatcagccgtctcacagcgcattaagcaactggaaaatatgttcgggcagccgctgttggtgcgtaccgtaccgccgcgcccgacggaacaagggcaaaaactgctggcactgctgcgccaggtggagttgctggaagaagagtggctgggcgatgaacaaaccggttcgactccgctgctgctttcactggcggtcaacgccgacagtctggcgacgtggttgcttcctgcactggctcctgtgttggctgattcgcctatccgcctcaacttgcaggtagaagatgaaacccgcactcaggaacgtctgcgccgcggcgaagtggtcggcgcggtgagtattcaacatcaggcgctgccgagttgtcttgtcgataaacttggtgcgctcgactatctgttcgtcagctcaaaaccctttgccgaaaaatatttccctaacggcgtaacgcgttcggcattactgaaagcgccagtggtcgcgtttgaccatcttgacgatatgcaccaggcctttttgcagcaaaacttcgatctgcctccaggcagcgtgccctgccatatcgttaattcttcagaagcgttcgtacaacttgctcgccagggcaccacctgctgtatgatcccgcacctgcaaatcgagaaagagctggccagcggtgaactgattgacttaacgcctgggctatttcaacgacggatgctctactggcaccgctttgctcctgaaagccgcatgatgcgtaaagtcactgatgcgttactcgattatggtcacaaagtccttcgtcaggattaa

SEQ ID NO: 20493 - DNA, 1164 bp, Escherichia coli
atgtctgtaattaagatgaccgatctggatcttgctgggaaacgtgtatttatccgtgcggatctgaacgtaccagtaaaagacgggaaagtaaccagcgacgcgcgtatccgtgcttctctgccgaccatcgaactggccctgaaacaaggcgcaaaagtgatggtaacttcccacctgggtcgtcctaccgaaggcgagtacaacgaagaattctctctgctgccggttgttaactacctgaaagacaaactgtctaacccggttcgtctggttaaagattacctcgacggcgttgacgttgctgaaggtgaactggttgttctggaaaacgttcgcttcaacaaaggcgagaagaaagacgacgaaaccctgtccaaaaaatacgctgcactgtgtgacgtgttcgtaatggacgcattcggtactgctcaccgcgcgcaggcttctactcacggtatcggtaaattcgctgacgttgcgtgcgcaggcccgctgctggcagctgaactggacgcgctgggtaaagcactgaaagaacctgctcgcccgatggtggctatcgttggtggttctaaagtatctaccaaactgaccgttctggactccctgtctaaaatcgctgaccagctgattgttggtggtggtatcgctaacacctttatcgcggcacaaggccacgatgtgggtaaatccctgtacgaagctgacctggttgacgaagctaaacgtctgctgaccacctgcaacatcccggttccgtctgatgttcgcgtagcaaccgagttctctgaaactgcaccggctaccctgaaatctgttaacgatgtgaaagctgacgagcagatcctggatatcggtgatgcttccgctcaggaactggctgaaatcctgaagaatgcgaaaaccattctgtggaacggtccggttggcgtgttcgaattcccgaacttccgcaaaggtactgaaatcgtggctaacgctatcgcagacagcgaagcgttctccatcgctggcggcggcgacactctggcagcaatcgacctgttcggcattgctgacaaaatctcctacatctccactggcggcggcgcattcctcgaattcgtggaaggtaaagtactgcctgcagtagcgatgctcgaagagcgcgctaagaagtaa

SEQ ID NO: 20494 - DNA, 1155 bp, Escherichia coli
atggcaaaacacctttttacgtccgagtccgtctctgaagggcatcctgacaaaattgctgaccaaatttctgatgccgttttagacgcgatcctcgaacaggatccgaaagcacgcgttgcttgcgaaacctacgtaaaaaccggcatggttttagttggcggcgaaatcaccaccagcgcctgggtagacatcgaagagatcacccgtaacaccgttcgcgaaattggctatgtgcattccgacatgggctttgacgctaactcctgtgcggttctgagcgctatcggcaaacagtctcctgacatcaaccagggcgttgaccgtgccgatccgctggaacagggcgcgggtgaccagggtctgatgtttggctacgcaactaatgaaaccgacgtgctgatgccagcacctatcacctatgcacaccgtctggtacagcgtcaggctgaagtgcgtaaaaacggcactctgccgtggctgcgcccggacgcgaaaagccaggtgacttttcagtatgacgacggcaaaatcgttggtatcgatgctgtcgtgctttccactcagcactctgaagagatcgaccagaaatcgctgcaagaagcggtaatggaagagatcatcaagccaattctgcccgctgaatggctgacttctgccaccaaattcttcatcaacccgaccggtcgtttcgttatcggtggcccaatgggtgactgcggtctgactggtcgtaaaattatcgttgatacctacggcggcatggcgcgtcacggtggcggtgcattctctggtaaagatccatcaaaagtggaccgttccgcagcctacgcagcacgttatgtcgcgaaaaacatcgttgctgctggcctggccgatcgttgtgaaattcaggtttcctacgcaatcggcgtggctgaaccgacctccatcatggtagaaactttcggtactgagaaagtgccttctgaacaactgaccctgctggtacgtgagttcttcgacctgcgcccatacggtctgattcagatgctggatctgctgcacccgatctacaaagaaaccgcagcatacggtcactttggtcgtgaacatttcccgtgggaaaaaaccgacaaagcgcagctgctgcgcgatgctgccggtctgaagtaa

SEQ ID NO: 20495 - DNA, 759 bp, Escherichia coli
gtggggagacgacgcggatttttaactatgcgtatcccccgcatttatcatcctgaaccactgaccagccattctcacatcgcgctttgcgaagatgccgccaaccatatcgggcgcgtactgcgcatggggccggggcaggcgttgcaattgtttgacggtagcaaccaggtctttgacgccgaaattaccagcgccagcaaaaaaagcgtggaagtgaaggtgctggaaggccagatcgacgatcgcgaatctccgctgcatattcacctcggtcaggtgatgtcgcgtggtgaaaaaatggaatttactatccagaaatcgatcgaactcggtgtaagcctcattacgccacttttttctgagcgctgcggcgttaaactggatagtgaacgtctgaacaagaagcttcagcagtggcagaagattgcaattgctgcctgtgagcagtgtggtcgtaaccgggtgccggaaatccgtccagcgatggatctggaagcctggtgtgcagagcaggatgaaggactgaaactgaatcttcacccgcgcgccagtaacagcatcaatacgttgccgttaccggttgaacgcgtccgcctgctgattggcccggaaggcggtttatcggcagatgaaattgccatgactgcccgctatcaatttactgatatcctgttgggacctcgcgttttgcgtacagagacaactgcgctcaccgccattaccgcgctacaagtacgatttggcgatttgggctaa

SEQ ID NO: 20496 - DNA, 417 bp, Escherichia coli
atgagtggaaccttactcgccttcgacttcggcaccaaaagcattggcgtagcggtcggccaacgcattaccggcaccgctcgccctttgcctgcaattaaagcacaggacggtacgccggactggaacattatcgagcgtttactgaaagagtggcagccggacgaaatcatcgtcggtttgccgctgaatatggacggcaccgagcaaccattgactgccagagcgcgtaaatttgccaaccgtattcatggccgtttcggtgttgaagtaaagctccatgacgagcgtcttagcactgtggaagcccgttccggtctgtttgaacagggcggctatcgggcgctcaacaaaggcaaagttgactctgcctctgcggttattattctcgaaagctatttcgagcagggatattaa

SEQ ID NO: 20497 - DNA, 705 bp, Escherichia coli
atgaacgatattgcgcataacctggcacaggtccgggacaaaatctcagcggctgcaacgcgttgcggccgttctccagaagaaattacgctgcttgcagtcagtaaaacaaaacctgcgagcgccatcgcagaagccattgatgccgggcagcgtcaatttggtgaaaactacgttcaggaaggggtagataaaattcgccactttcaggaactgggcgtaacaggattagaatggcattttattggcccgttgcagtctaataaaagccgcctggtggcagagcatttcgactggtgtcataccatcgaccgtttgcgcatcgctacccgtctcaacgaccagcgcccggcagaacttccccctcttaacgttctgattcaaattaacattagtgatgaaaacagtaagtccgggattcaactggctgaactggacgagctggcagctgcggtcgctgaactaccgcgtttacgtctgcgcgggttgatggcaatccctgcgcctgagtcagaatatgtaaggcagtttgaagttgcacgccaaatggctgtagcatttgccggactgaaaacgcgctacccgcatatcgacacgctctctctgggaatgtcggacgatatggaagccgccattgcggcaggtagcacgatggttcgtatcggcactgcaatttttggtgcgcgtgattactctaaaaaataa

SEQ ID NO: 20498 - DNA, 594 bp, Escherichia coli
atgcaaaaagttgtcctcgcaaccggcaatgtcggtaaagtgcgtgagctggcgtcgctgcttagcgacttcggtcttgatatcgtggcccaaacagacctcggcgttgattccgctgaagaaaccggcctgacctttatcgaaaacgcgattctgaaagcgcgccatgcggcaaaagtgaccgctttaccggcaattgccgacgactctggtctggcggtagatgtgcttggcggcgcgccgggcatttactccgcgcgttattccggtgaagacgcgaccgatcaaaagaatctgcaaaaactgctggaaacaatgaaagacgtaccggacgaccaacgtcaggcgcgtttccactgcgtgctggtatatctgcgtcacgcggaagatcccactccgctggtatgccacggtagctggccgggcgtgattactcgtgaaccagcgggcactggtggctttggttatgatccaatcttcttcgtaccttccgaagggaaaaccgccgccgaactgacccgcgaagaaaagagcgccatttcccaccgtggtcaggcgttgaaactgctgctggacgctttacgtaatggttaa

SEQ ID NO: 20499 - DNA, 2028 bp, Escherichia coli
atgaataagaaatttaaatataagaaatcgcttttagcggctattttgagcgcaaccctgttagccggttgtgatggcggtggttccggatcttcctccgatacgccgcctgtagattctggaacagggtctttgccggaagtgaaacctgatccaacaccaaacccggagccgacgcctgagccaacgccggacccagagcctacgccagaaccgatacctgatcctgaaccaacaccagaaccggagccagaacctgttcctacgaaaacgggttatctgaccctgggcggaagccagcgggtaactggtgctacctgtaatggtgaatccagcgatggctttacatttaaacctggcgaggacgttacttgcgtggcgggtaacacgacaattgccaccttcaacactcagtcagaagctgcgcgtagcttgcgtgcggttgaaaaagtgtcgtttagccttgaggacgcgcaagaactggcgggctccgatgacaagaaaagcaatgcggtttcgctggtaacgtccagtaacagctgtccggcgaatacagaacaggtttgtctgacgttctcctcggtgatcgagagtaaacgcttcgactcgctgtataagcaaatcgatctggcaccggaagagttcaaaaagctggtcaatgaagaggtggaaaacaatgctgcgaccgataaagcgccatccactcatacttcaccggtcgtgcccgtcaccacgccgggaacaaaaccggatctgaacgcttccttcgtgtcggctaacgcggaacagttttatcagtatcaacccactgaaatcattctctctgaaggtcgactggtcgatagccagggatatggtgttgctggcgtcaactactacaccaattcaggccgtggcgtgacaggggaaaatggtgaattttcctttagctggggcgaaaccatctcctttggtatcgatacctttgaactgggttcagtgcgcggcaataagtcgaccattgcgctgactgaactgggtgatgaagttcgcggggcgaatattgatcagcttattcatcgctattcgacgaccgggcaaaataatacccgtgttgttccggacgatgtacgcaaggtctttgccgaatatcccaacgtgatcaacgagattatcaatctctcgttatccaacggtgcgacgctgggggaaggtgagcaagtcgttaatctgcctaacgaatttattgagcagtttaatacgggtcaggccaaagagatcgataccgcgatttgtgcgaaaaccgatggttgtaacgaggctcgctggttctcgctgacgacgcgcaatgttaatgacggccagattcagggcgttatcaacaagctgtggggcgtggatacgaactacaaatctgtcagcaagttccatgtattccatgactccaccaacttctatggcagcacgggtaatgcgcgcggtcaggcggtggtgaatatctccaacgcggccttcccgattctgatggcgcgtaatgataaaaactactggctggccttcggcgaaaaacgcgcctgggataaaaacgagctggcgtacattacggaagcgccttctcttgttgagccggaaaacgttacgcgcgataccgccacctttaacctgccgtttatttcgctggggcaagtcggtgagggcaaactgatggttatcggtaacccacactacaacagcattttgcgttgcccgaacggttacagctggaacgggggcgttaataaagatgggcagtgtacgctcaacagcgacccggatgacatgaagaacttcatggagaacgtgctgcgctatctgtccgacgataaatggaagccggacgcgaaagccagcatgaccgtaggcaccaacctggatactgtctattttaaacgtcatggtcaggttacaggaaacagcgctgcgttcgacttccatccggattttgcgggcatctctgttgagcatttaagtagctatggcgatctcgatccgcagaaatgccgctgctga

SEQ ID NO: 20500 - DNA, 1017 bp, Escherichia coli
atgtttgtcatctggagccatagaacagggttcatcatgagtcatcaacttaccttcgccgacagtgaattcagcagtaagcgccgtcagaccagaaaagagattttcttgtcccgcatggagcagattctgccatggcaaaacatggtggaagtcatcgagccgttttaccccaaggctggtaatggccggcgaccttatccgctggaaaccatgctacgcattcactgcatgcagcattggtacaacctgagcgatggcgcgatggaagatgctctgtacgaaatcgcctccatgcgtctgtttgcccggttatccctggatagcgccttgccggaccgcaccaccatcatgaatttccgccacctgctggagcagcatcaactggcccgccaattgttcaagaccatcaatcgctggctggccgaagcaggcgtcatgatgactcaaggcaccttggtcgatgccaccatcattgaggcacccagctcgaccaagaacaaagagcagcaacgcgatccggagatgcatcagaccaagaaaggcaatcagtggcactttggcatgaaggcccacattggtgtcgatgccaagagcggcctgacccacagcctagtcaccaccgcggccaacgagcatgacctcaatcagctgggtaatctgctgcatggagaggagcaatttgtctcagccgatgccggctaccaaggggcgccacagcgcgaggagctggccgaggtggatgtggactggctgatcgccgagcgccccggcaaggtaagaaccttgaaacagcatccacgcaagaacaaaacggccatcaacatcgaatacatgaaagccagcatccgggccagggtggagcacccatttcgcatcatcaagcgacagttcggcttcgtgaaagccagatacaaggggttgctgaaaaacgataaccaactggcgatgttattcacgctggccaacctgtttcgggcggaccaaatgatacgtcagtgggagagatctcactaa

SEQ ID NO: 20501 - DNA, 759 bp, Escherichia coli
atggatgcactacaaactcaaactgttaatagtacaaccgcgccgcagcccaactacattccggggctgattgcggtggtcgggtgtgatggcaccggtaaatccacactgaccaccgacctggtgaaatcgctgcaacaacactggcaaaccgagcggcgctatctggggctgctctccggcgaagacggcgacaaaatcaaacgattgccgttggttggcgtctggctggaacggcgactggcggccaaatcctcgaaaacccaaagcatgaaaaccaaatctccggcgctatgggcggcggtgattatgtactgcttctcgctgcgaagaatggcgaatctacgcaaggttcagcgactggcgcaaagtggcgttctggtggtcagcgatcgcttcccgcaggctgaaatttcgggcttttattatgatggaccggggattggcgtcgaacgtgcgaccgggaaaatcagcatgtttctggcgcagcgcgaacggcgtttataccaacaaatggcgcaatatcgcccggaattaattattcgcctgggcattgatattgagactgccatctcccgcaagcctgaccatgactatgccgagctgcaggacaaaatcggtgtcatgtcgaagattggctataacggcacaaaaattcttgagattgattccagagcgccctacagcgaagtgctggaacaggcacagaaggcggtttctctggttgccatcgtttctgaccgccgaagtttaacttaa

SEQ ID NO: 20502 - DNA, 714 bp, Escherichia coli
gtgaatcaacgtaatatgtcaataattaattccacgccagtgcgtgttattgccattgtaggatgtgatggttcaggtaaatcgaccctcacggcaagcctggtaaatgaactggcagcaagaatgccaacagaacacatttatctcgggcaatcgtccgggcgaattggcgaatggatttcacagctccctgttattggcgcaccttttgggcgttatctgcgaagtaaagcggcacatgtgcacgaaaagccctcaacaccgcctggcaatattactgcactggttatctatctgctttcctgctggcgggcgtacaagtttcgcaaaatgttgtgtaaaagccagcaaggctttctgctcatcaccgaccgctacccgcaggttgaagtgccggggtttcgctttgatggcccgcaattggcaaaaaccacgggcggtaacggttggataaaaatgttaaggcagcgcgagctgaagctgtaccaatggatggcatcttatttgcccgtattgttgattcgtcttggcattgatgaacaaaccgcgtttgcgcgtaaacctgaccaccaactggcagcgttacaggaaaaaatcgccgttacgccgcaactgacattcaatggcgcaaagatccttgaactggatgggcgacaccccgccgatgaaattctgcaagcgtcactacgcgcaattcacgccgcgctttcctga

SEQ ID NO: 20503 - DNA, 885 bp, Escherichia coli
atgtctcatttaaaagacccgaccacgcagtattacactggtgaatatcccaaacagaaacaaccgacgccaggcatccaggcgaagatgacaccggtaccggattgcggcgagaaaacctatgttggtagcggtcgcctgaaagatcgtaaagcactggtgacagggggcgattccggaataggtcgcgctgccgccatcgcttacgcgcgtgaaggggctgacgtggcgatcagttatcttcccgtggaagaagaagacgctcaggatgtgaaaaagatcattgaagaatgcggacgcaaagccgttctgctgccaggcgatttaagcgatgagaaatttgcccgttcgctggttcacgaagcgcacaaggcgttaggcgggctggatattatggcgctggtcgccgggaaacaggttgccattccggatattgcagacctcaccagcgaacagtttcaaaagacctttgccattaacgttttcgcgctgttctggctaacccaggaagcgatccccctgctaccgaaaggtgcaagtatcatcaccacttcgtcaatccaggcataccagccaagtccgcatttactggactatgcggctacgaaggcggcgattctgaactacagccgtggcttggcaaaacaggtcgcggagaaaggtattcgggtgaatattgtcgcgccaggcccgatctggacagcactgcaaatttccggcggacaaacgcaggataagatcccgcagtttggtcagcaaacgccgatgaaacgtgcggggcaaccggcggaactggcccctgtatatgtttatctggcaagtcaggagtcgagctacgtcaccgcagaagtgcacggcgtgtgcggcggcgagcatttaggttaa

SEQ ID NO: 20504 - DNA, 738 bp, Escherichia coli
atgctatatatctttcgtcttattattaccgtgatttacagcatcttagtctgtgtattcggctccatttactgccttttcagcccgcgtaacccgaaacatgtggccacctttgggcatatgtttggccgtcttgcgccgctgtttggcctgaaagttgagtgccgtaaacctacagacgctgaaagctacggcaatgctatctatatcgctaaccaccagaacaactatgacatggtgacagcatcgaacatcgtgcaaccgccgacggtgacggtaggtaaaaagagcttgctgtggatccccttcttcgggcagttgtactggttaaccggcaacttattgatcgacagaaacaatcgcactaaagctcacggcaccattgcggaagtagtgaatcacttcaaaaaacgccgtatttccatctggatgttcccggaaggaacccgcagccgtggtcgcggcctgctaccgttcaagactggagcatttcacgcggcaattgcggcgggcgtcccgattattcccgtgtgcgtctctacaacttcgaataagattaatcttaatcgactgcacaacggtctggtgattgtcgaaatgctgccgccaattgacgtcagtcagtatggcaaagatcaggttcgtgagctggctgcccattgtcgttcgataatggaacaaaaaatcgccgagctcgataaagaagtcgcagaacgcgaagccgccggaaaagtttaa

SEQ ID NO: 20505 - DNA, 2259 bp, Escherichia coli
atgagcgatatggcagagcgccttgcgctacatgaatttacggaaaacgcctacttaaactactccatgtacgtgatcatggaccgtgcgttgccgtttattggtgatggtctgaaacctgttcagcgccgcattgtgtatgcgatgtctgaactgggcctgaatgccagcgccaaatttaaaaaatcggcccgtaccgtcggtgacgtactgggtaaataccatccgcacggcgatagcgcctgttatgaagcgatggtcctgatggcgcaaccgttctcttaccgttatccgctggttgatggtcaggggaactggggcgcgccggacgatccgaaatcgttcgcggcaatgcgttacaccgaatcccggttgtcgaaatattccgagctgctattgagcgagctggggcaggggacggctgactgggtgccaaacttcgacggcactttgcaggagccgaaaatgctacctgcccgtctgccaaacattttgcttaacggcaccaccggtattgccgtcggcatggcgaccgatattccaccgcataacctgcgtgaagtggctcaggcggcaatcgcattaatcgaccagccgaaaaccacgctcgatcagctgctggatatcgtgcaggggccggattatccgactgaagcggaaattatcacttcgcgcgccgagatccgtaaaatctacgagaacggacgtggttcagtgcgtatgcgcgcggtgtggaagaaagaagatggcgcggtggttatcagcgcattgccgcatcaggtttcaggtgcgcgcgtactggagcaaattgctgcgcaaatgcgcaacaaaaagctgccgatggttgacgatctgcgcgatgaatctgaccacgagaacccgacccgcctggtgattgtgccgcgttccaaccgcgtggatatggatcaggtgatgaaccacctcttcgctaccaccgatctggaaaagagctatcgtattaaccttaatatgatcggtctggatggtcgtccggcggtgaaaaacctgctggaaatcctctccgaatggctggtgttccgccgcgataccgtgcgccgccgactgaactatcgtctggagaaagtcctcaagcgcctgcatatcctcgaaggtttgctggtggcgtttctcaatatcgacgaagtgattgagatcattcgtaatgaagatgaaccgaaaccggcgctgatgtcgcggtttggccttacggaaacccaggcggaagcgatcctcgaactgaaactgcgtcatcttgccaaactggaagagatgaagattcgcggtgagcagagtgaactggaaaaagagcgcgaccagttgcagggcattttggcttccgagcgtaaaatgaataacctgctgaagaaagaactgcaggcagacgcgcaagcctacggtgacgatcgtcgttcgccgttgcaggaacgcgaagaagcgaaagcgatgagcgagcacgacatgctgccgtctgaacctgtcaccattgtgctgtcgcagatgggctgggtacgcagcgctaaaggccatgatatcgacgcgccgggcctgaattataaagcgggtgatagcttcaaagcggcggtgaaaggtaagagcaaccaaccggtagtgtttgttgattccaccggtcgtagctatgccattgacccgattacgctgccgtcggcgcgtggtcagggcgagccgctcaccggcaaattaacgttgccgcctggggcgaccgttgaccatatgctgatggaaagcgacgatcagaaactgctgatggcttccgatgcgggttacggtttcgtctgcacctttaacgatctggtggcgcgtaaccgtgcaggtaaggctttgatcaccttaccggaaaatgcccatgttatgccgccggtggtgattgaagatgcttccgatatgctgctggcaatcactcaggcaggccgtatgttgatgttcccggtaagtgatctgccgcagctgtcgaagggcaaaggcaacaagattatcaacattccatcggcagaagccgcgcgtggagaagatggtctggcgcaattgtacgttctgccgccgcaaagcacgctgaccattcatgttgggaaacgcaaaattaaactgcgcccggaagagttacagaaagtcactggcgaacgtggacgccgcggtacgttgatgcgcggtttgcagcgtatcgatcgtgttgagatcgactctcctcgccgtgccagcagcggtgatagcgaagagtaa

SEQ ID NO: 20506 - DNA, 1893 bp, Escherichia coli
atgacgcaaacttataacgctgatgccattgaggtactcaccgggcttgagccggttcgccgccgtccggggatgtataccgataccactcgccctaaccatttggggcaagaagtcattgataacagtgtggatgaagcactggcgggtcacgcaaaacgcgtggacgttattttacatgctgaccagtcgttagaagttattgacgatgggcgcgggatgccggtggatattcacccggaagagggtgtaccggcggttgaactgattctttgccgtctgcatgcaggcggtaaattctctaacaaaaattaccagttctctggcggcctgcatggcgtggggatttcggtggttaacgccctgtcgaagcgcgtagaagttaacgtgcgccgcgatggtcaggtttataacatcgcctttgaaaatggcgaaaaggtgcaggatttacaggttgtcggcacttgcggtaaacgcaatactggtaccagtgtgcacttctggccggatgaaaccttctttgacagcccgcgattttctgtttcacgcctgacgcatgtgctgaaagccaaagcggtattgtgccctggcgttgagatcacttttaaagatgagatcaacaataccgaacaacgctggtgctatcaggacggtctgaatgattacctggcggaagcggtaaatggtctgccgacgctgccggaaaaaccgtttatcggtaatttcgctggtgatactgaagctgtggactgggcgctactgtggctgccggaaggcggtgaactgctgaccgaaagctacgtcaaccttatcccaacgatgcagggcggtacccatgttaatggtctgcgtcagggcctgttggacgcgatgcgtgagttctgtgaataccgcaatattctgccgcgcggtgtaaagctgtcggcggaagatatctgggatcgctgcgcctatgtgctgtcagtaaaaatgcaggatccgcagtttgccgggcagacgaaagagcgtctctcttcgcgtcaatgcgcggcattcgtttctggcgtggtgaaagatgcctttatcctgtggctgaaccagaacgttcaggcggctgaactgctggcggagatggcgatttccagcgcccagcgccgtatgcgtgcggccaaaaaagtggtgcgtaaaaagctgaccagcggcccggcgttgcctggcaaactggctgattgtaccgcgcaggaccttaaccgtaccgagctgttccttgtggaaggtgactccgcaggcggatctgccaagcaggcgcgcgatcgcgaatatcaggcgatcatgccactgaaaggtaagatccttaacacctgggaagtctcttccgacgaagtgctggcttcgcaggaagtgcacgatatttcggtagcgatcggtatcgatcctgacagcgacgatctgagccagcttcgttatggcaaaatctgtatcctcgcggatgcggactctgatggtctgcacattgccacgctgctctgcgctttgttcgtaaaacatttccgcgcgttggtgaaacacggtcacgtttacgtcgcactgccaccgctctaccgtattgatctcgggaaagaggtttattacgcgctgacggaagaagagaaagagggcgtacttgagcaattaaaacgcaagaaaggcaagccgaacgtccagcgttttaaaggtctgggggaaatgaacccgatgcaattgcgcgaaaccacgcttgatccgaacactcgccgtctggtgcagttgactatcgatgatgaagacgatcagcgtactgacgcgatgatggatatgctgctggcgaagaaacgctcggaagatcgccgcaactggttgcaagagaaaggcgacatggcggagattgaggtttaa

SEQ ID NO: 20507 - DNA, 654 bp, Escherichia coli
atgaatcagacgctactttcctcttttggtacgcctttcgaacgtgttgaaaatgcactggctgcgctgcgtgaaggacgcggtgtaatggtgcttgatgatgaagaccgtgaaaacgaaggtgatatgatcttcccggcagaaaccatgactgttgagcagatggcgctgaccattcgccacggtagcggtattgtttgcctgtgcattactgaagatcgccgtaaacaactcgatctgccaatgatggtagaaaataacaccagcgcctatggcaccggttttaccgtgaccattgaagcagctgaaggtgtgactaccggtgtttctgccgctgaccgtattacgaccgttcgcgcagcgattgccgatggcgcaaaaccgtcagatctgaatcgtcctggccacgttttcccacttcgcgctcaggcaggtggtgtactgacgcgtggcggtcatactgaagcaactattgatctgatgacgctggcaggctttaaaccggctggtgtactgtgtgagctgactaatgacgatggcacgatggcgcgtgcaccagagtgtattgagtttgccaataaacacaatatggcgctcgtgactattgaagacctggtggcataccgtcaggcacatgagcgtaaagccagctga

SEQ ID NO: 20508 - DNA, 552 bp, Escherichia coli
atgtccgcttttaaaaagtcacttcttgttgctggcgtagcaatgattctttccaataacgtgtttgctgatgaaggtcacggtattgttaaatttaaaggtgaagttatctctgctccatgttctattaaaccaggtgacgaagatttaactgtaaatctgggtgaagtagcagataccgtactgaaaagcgatcagaaatctttggctgaacctttcactattcacctgcaggactgcatgctgagtcagggtggaactacttattcaaaagcgaaggttactttcactacagcaaataccatgacgggtcagtctgatcttctgaaaaataccaaagaaactgaaatcggcggcgccactggcgttggcgtacgtattctggacagccagagcggcgaagtaactttaggtactccggtagtaattacgttcaacaataccaacagctatcaggaactgaatttcaaagctcgtatggaatccccaagcaaagatgccaccccgggcaacgtttacgctcaggctgactacaagattgcttacgagtaa

SEQ ID NO: 20509 - DNA, 1302 bp, Escherichia coli
atggctcaggaaatcgaattaaagtttattgttaatcacagtgccgttgaggcgttgcgtgaccatctcaatacgctgggcggcgagcaccatgaccccgtgcagttgctgaatatttactacgaaacgccggataactggctgcgtgggcacgatatgggcttacgtattcgtggcgaaaacggtcgctatgagatgaccatgaaagttgcaggaagagtgacaggcggcttacatcagcgcccggaatataacgtggcgttgagcgaaccgacgctcgacctggcgcagttaccgacggaagtctggccgaacggcgaattgcccgccgatctcgcctcccgcgtgcagccgctgttcagcaccgatttttatcgcgaaaaatggctggtggcggtcgatggtagccaaattgaaatcgccctcgaccagggggaagtgaaagcgggtgaatttgctgaacctatctgtgagctggaactggaactgcttagcggcgacacgcgcgcggtgctgaaactggcgaaccaactggtatcgcaaaccggattacgccagggcagcctgagcaaagcggcgcgtggctatcatctggcgcagggcaatccggcgcgtgaaatcaaaccgaccaccattttgcatgttgcggcaaaagccgatgtggaacaggggctggaagcggcgctcgagctggcgttagcgcaatggcagtatcatgaagaactgtgggtacgcggcaacgatgcggcgaaagaacaggtgctggcagccattagcctggtccgtcatacgctgatgctgttcggtggtattgtgccgcgtaaagcgagcactcacttacgtgatctgctgactcaatgcgaggcgaccattgcttctgcggtgtctgccgtgacggcggtctactctaccgaaacggcaatggcgaagctggcgttgaccgaatggttggtaagcaaagcatggcagccatttttagatgccaaagcgcagggcaaaatcagcgactccttcaaacgctttgccgatatccatctttcccgccatgccgctgaactgaaaagcgttttctgccagccgttaggcgatcgctaccgtgaccagttgccacgcctgacgcgtgatattgactcaatactgttgctggcgggttactatgatcctgtcgtcgcgcaagcctggctggagaactggcaggggctgcatcacgctattgcgaccgggcaacgcatcgaaattgaacatttccgtaatgaggcaaacaatcaggaaccgttctggttgcacagcggaaaacgttaa

SEQ ID NO: 20510 - DNA, 618 bp, Escherichia coli
atgagtgcaatcgcgcctggaatgatcctcatcgcgtacctctgcggctccatttccagtgccattctggtttgccgcttgtgtgggctgcccgatccgcgaaccagcggctccggcaatccaggcgcaaccaatgtgttacgtatcggtggcaagggagcagccgtagcagtactgattttcgacgttctgaaaggaatgttgcccgtctggggcgcgtatgaattaggtgtcagccccttctggctaggcttaattgccatcgccgcctgtcttggacacatctggcccgttttcttcggatttaaaggaggaaaaggcgttgctaccgcttttggtgccatcgcacccattggctgggatctcaccggagtaatggcgggaacctggttactgaccgtgctattgagcggatactcgtcgctgggagcgattgtcagtgcactgattgctccgttttatgtctggtggtttaagccacaattcaccttcccggtttcgatgctctcttgcctgatcctgctgcgtcatcatgacaacatccaacgtctgtggcgtcgtcaggagacaaaaatctggacgaaattcaaaagaaagcgcgaaaaggatcccgagtga

SEQ ID NO: 20511 - DNA, 1014 bp, Escherichia coli
atgcgtgtactgggtattgaaacttcctgcgatgaaaccggcatcgccatttacgacgatgaaaaaggtttgttagccaaccaattgtatagtcaggtgaaattgcacgctgactacggcggcgtcgtgcctgaactggcctcccgcgatcatgtgcgtaaaaccgtaccgttgatccaggcggcgctaaaggagtctggtttaacggcaaaagacattgatgctgtggcctataccgcaggccctggattagtcggcgcgctactggttggcgcgaccgtggggcgttctctggcgtttgcctgggacgttccggcgatccctgtacaccatatggaagggcatctgttagcgccgatgctggaagataacccgccggaatttccgtttgttgcgctgcttgtttccggcggtcatacgcagttaatcagcgtgactggcattggtcagtacgagctgctcggcgagtctatcgatgatgccgccggggaagcgtttgataaaaccgcgaagctgctggggctggattatcctggcgggccgttactgtcgaaaatggcggctcagggtactgccgggcgctttgtcttcccgcgtccgatgaccgaccgtccggggctggatttcagcttctccggcctgaaaaccttcgcggcaaataccattcgtgacaacggcaccgacgaccagacgcgtgctgatatcgcccgcgcctttgaagatgcggtggtcgatacgctgatgattaagtgcaagcgggcgctggatcagacgggctttaagcgactggtcatggcgggcggcgtgagtgctaaccgtacgttacgggcgaagctggctgaaatgatgaaaaaacgccgcggcgaagtgttctacgcgcgtccggaattttgtactgataacggcgcgatgatcgcctatgccggaatggtgcggtttaaagcaggcgcgacggcggatctcggcgttagcgtgcgtccgcgctggccgctggcggagttaccggctgcgtaa

SEQ ID NO: 20512 - DNA, 1491 bp, Escherichia coli
atgataaccgaatttgtgtttatcccgattttcgcgatcgcagccggagtggcgcaatccctgcaatacttaaatcggtatcatgtgatacgcgagcctccggagcatattttgaacaggttaccttcgagcgcatcggctttagcgtgcagcgcccacgccctgaatctcattgagaagcgaacgctggatcatgaggagatgaaagcacttaaccgagaggtgattgaatacttcaaagagcatgtcaatccggggtttttagagtatcgcaaatctgttaccgccggcggggattacggagccgtagagtggcaagcgggaagtttaaatacgcttgtcgacacccagggccaggagtttatcgactgcctgggaggttttggaattttcaacgtggggcaccgtaatccagttgtggtttccgccgtacagaatcaacttgcgaaacaaccgctgcacagccaggagctgctcgatccgttacgggcgatgttggcgaaaacccttgctgcgctaacgcccggtaaactgaaatacagcttcttctgtaatagcggcaccgagtccgttgaagcagcgctgaagctggcgaaagcttaccagtcaccgcgcggcaagtttacttttattgccaccagcggcgcgttccacggtaaatcacttggcgcgctgtcggccacggcgaaatcgaccttccgcaaaccgtttatgccgttactgccgggcttccgtcatgtgccgtttggcaatatcgaagccatgcgcacggctcttaacgagtgcaaaaaaaccggtgatgatgtggctgcggtgatcctcgaaccgattcagggtgaaggtggcgtaattctgccgccgccgggctatctcaccgccgtacgtaagctatgcgatgagttcggcgcactgatgatcctcgatgaagtacaaacgggcatggggcgcacgggcaagatgttcgcctgcgagcatgagaacgtacagccggatatcctctgccttgccaaagcgctcggcggcggcgtgatgccgattggcgcgaccatcgccactgaagaggtgttttcagttctgttcgacaacccattcctgcataccaccacctttggcggcaacccgctggcctgtgcggcggcgctggcgaccatcaatgtgttgctggagcagaacttaccggctcaggctgagcaaaaaggcgatatgttgctggacggtttccgtcaactggcgcgggaatatcccgatctggtacaggaagcgcgtggtaaagggatgttgatggcgattgagtttgttgataacgaaatcggctataactttgccagcgagatgttccgccagcgcgtactggtggccggaacgctcaataacgccaaaacgatccgcattgaaccgccactgacactgaccattgaacagtgtgaactggtgatcaaagcggcgcgtaaggcgctggcggccatgcgagtaagtgtcgaagaagcgtaa

SEQ ID NO: 20513 - DNA, 306 bp, Escherichia coli
atgtcgaaagaacacactacggaacatctgcgtgctgagttgaaatccctttccgatacgctggaagaggtgcttagctcatctggcgagaagtcgaaagaagagttgagtaagattcgtagcaaagcggagcaggcactgaaacagagccgttatcgcctgggtgaaaccggtgatgccattgccaaacaaacccgtgtcgcggcggcgcgtgccgatgagtatgtgcgcgaaaatccgtggacgggcgtgggcattggcgctgcaatcggtgtagtgctcggcgttctgctgtcgcgtcgttaa

SEQ ID NO: 20514 - DNA, 405 bp, Escherichia coli
atggcggacactcatcacgcacaagggcccggtaaaagcgttctgggcatcgggcagcgaattgtttctatcatggttgaaatggtagagacacgtctgcggctggcggtggtggagctggaagaggaaaaagcgaatctctttcaacttttactgatgctgggcctgacgatgcttttcgctgcatttggtcttatgagcctgatggtgctaattatttgggcggttgacccgcaatatcgcctgaatgcgatgattgccaccaccgtggtgttgctgctactggcactgattggcggtatctggacgctacgtaaatcgcgtaagtctacgttgctgcgccatacacgccatgagttagcaaacgatcggcagctgctcgaggaggagtcccgtgagcagtaa

SEQ ID NO: 20515 - DNA, 987 bp, Escherichia coli
atgggtcaactgattgacggcgtctggcatgacacctggtacgataccaaatctaccggcggtaaatttcaacgttcagcttccgcatttcgtaactggctcactgccgatggcgctcctggccccactggcacaggcggttttatcgcagagaaagatcgttatcatctctatgtttcactcgcctgcccgtgggcgcaccgcacgctgatcatgcgcaaactcaaaggactggaaccgtttatttccgtttccgtagtgaacccgctgatgctggaaaacggttggacctttgatgacagttttccgggagcaaccggagacacgctctatcaaaatgaatttctgtatcagctttatctccacgccgatccacactacagcggacgagttactgttcccgtgctgtgggacaaaaagaaccacaccatcgtcagcaacgaatcagcagaaatcatccgcatgttcaataccgcgtttgatgcgctgggcgcgaaagcgggtgattactaccctccagccctgcaaacaaaaattgacgaacttaacggctggatttatgacaccgttaacaacggcgtgtataaagctggttttgccaccagccaggaagcttacgacgaggcggtggcgaaagtgtttgaatcgctggcacgactggagcagattttaggccagcatcgttacctgaccggcaaccagctaaccgaagccgatattcgcctgtggactacgctggtgcgttttgatccggtgtatgtgacccacttcaagtgtgataagcaccgcatcagcgattacctgaatctgtacggttttctgcgcgatatctaccagatgccggggatcgccgaaacagtcaatttcgatcatatccgtaatcattacttccgcagccataagaccatcaaccctacggggattatttcaattggtccgtggcaggatctcgatgaaccgcatggacgagatgttcgcttcggttaa

SEQ ID NO: 20516 - DNA, 771 bp, Escherichia coli
atgaataacgatgttttcccgaataaattcaaagccgcactggctgcgaaacaggtacaaattggttgctggtcagcactctctaacccgattagcactgaagttcttggtttggctgggtttgactggctggtgctggatggcgaacatgcgccaaacgatatctccacgtttattccgcagttaatggccttgaaaggcagcgccagcgcgccagtagtgcgagtgccgaccaacgagccggtaattattaagcgtcttctggatatcggtttctataacttcctgattccttttgtagaaacaaaagaggaagcagagctggcggtggcatcaacccgttacccaccggaaggcattcgcggcgtctccgtttctcaccgcgccaatatgtttggcaccgtggcggattatttcgctcagtcgaacaagaacatcactattctggtccagatagaaagtcagcagggcgtagataacgtcgatgccattgccgctaccgaaggcgtagacggcatcttcgtcggccccagcgatctggccgcggcattaggccatctcggcaatgcatcacacccggatgtacaaaaagcaattcagcacatttttaaccgtgccagcgcgcacggcaaacccagcggtatcctcgcgccggtcgaagccgatgcgcgtcgttatctggaatggggcgcgacgtttgtggctgtcggcagcgatctcggcgtcttccgctctgccactcagaaactggctgatacctttaaaaaataa

SEQ ID NO: 20517 - DNA, 861 bp, Escherichia coli
atgaaacaacaccaatcggcggataattctcagggccagctttacattgtaccgacgccaatcggcaatctggcggatatcacccagcgtgcgttagaggtattacaggccgttgatctgattgccgccgaggatactcgtcacaccggtttattgctgcaacattttgggattaatgcccggttgtttgcgctgcacgaccataacgaacaacaaaaagctgaaacgctgctggcgaagctgcaagaggggcaaaacattgcgctggtttccgatgccggaacgccgctaattaacgatcctggctaccatctggtgcgtacctgccgtgaagcggggatccgcgtggtgccgctacccgggccgtgtgctgctatcactgcgttaagcgcagcgggtttaccctctgaccgtttctgttacgaaggctttttacctgccaaatcaaaaggccgccgtgatgcgctaaaagccattgaagcggagccgcgcacgctgattttttatgaatctacccaccgtctgttagatagcctggaagatatcgttgcggtattaggcgaatcccgctacgtggttctggcgcgtgagctgaccaaaacctgggaaaccattcacggcgcgcccgttggcgagctgctggcgtgggtaaaggaagatgaaaaccgtcgcaaaggcgaaatggtgctgattgtcgaaggtcataaagcacaggaagaagacttacccgccgatgccctgcgcacgctggcgctgctacaggcagaactgccgctgaaaaaagcggcggcgctggccgcagaaattcacggcgtgaagaaaaatgcgctgtataagtatgcgctggagcagcaggggtaa

SEQ ID NO: 20518 - DNA, 2205 bp, Escherichia coli
atgcgcagaagatcgggtattaacaccagtgccgtaaggtactgtctaagaaagagaaaggatattacattgcttaatccgatcgttcgtaaattccagtacggccaacacaccgtgactctggaaaccggcatgatggctcgtcaggctactgccgctgttatggttagcatggatgacaccgcggtattcgttaccgttgttggccagaaaaaagccaaaccaggtcaggacttcttcccactgaccgttaactatcaggagcgtacctacgctgctggtcgtatcccgggtagcttcttccgtcgtgaaggccgcccaagcgaaggcgaaaccctgatcgcgcgtctgattgaccgcccgattcgcccgctgttcccggaaggcttcgtcaacgaagttcaggttatcgccaccgtggtttctgttaacccgcaagttaacccggatatcgtcgcgatgattggtgcttccgcagcgctgtctctgtctggtattccgttcaatggcccgattggtgctgcccgcgtaggttacatcaatgaccagtacgtactgaacccgactcaggacgagctgaaagagagcaaactggatctggttgttgccggtactgaagccgctgtactgatggttgaatctgaagctcaactgctgagcgaagaccagatgctgggcgcagtagtgttcggtcatgaacaacagcaggttgttattcagaacatcaatgaactggtgaaagaagccggtaaaccgcgttgggactggcagccggagccggtaaacgaagcgctaaacgcgcgcgttgctgcactggctgaagctcgcctgagcgatgcttaccgcatcaccgacaaacaagagcgttatgcgcaggttgatgtcatcaaatctgaaaccatcgcgacgctgcttgctgaagacgaaaccctggacgaaaacgaactgggtgaaattctgcacgcgatcgagaaaaacgttgttcgtagccgcgtactggcaggcgaaccgcgtatcgacggtcgtgaaaaagatatgatccgtggtctggatgtgcgtactggcgtgctgccgcgtactcacggttctgcgctgttcacccgtggtgaaacgcaggcgctggttaccgcaacgctgggtactgctcgtgacgcgcaggttcttgatgaactgatgggcgaacgtaccgataccttcctgttccactacaacttccctccgtactccgtaggcgaaaccggcatggtcggttctccgaagcgtcgtgaaattggtcacggtcgtctggcgaagcgcggcgtgctggcagtcatgccggatatggacaaattcccgtacaccgtacgtgttgtgtctgaaatcactgaatccaacggttcctcttctatggcttccgtgtgcggcgcgtctctggcgctgatggacgcaggtgtgccgatcaaagctgccgttgcgggtatcgcaatgggtctggtgaaagaaggcgacaactacgttgtactgtctgacattttgggcgacgaagatcacctgggcgatatggacttcaaagttgcaggttcccgcgacggtatctctgcactgcagatggatatcaaaattgaaggtatcaccaaagagatcatgcaggttgcgctgaaccaggctaaaggtgcgcgtctgcatatcctgggcgtaatggaacaggcgatcaacgcgccgcgtggcgatatctctgagttcgcaccgcgtatccataccatcaagatcaacccggacaagatcaaagatgttatcggtaaaggcggttctgtaatccgtgctctgaccgaagaaactggcaccaccatcgaaatcgaagatgacggtactgtgaagattgcagcgaccgacggcgagaaagcgaaacatgctattcgtcgtatcgaagagatcactgcagaaatcgaagtgggccgcgtctacactggtaaagtgacccgtatcgttgactttggcgcatttgttgccatcggcggcggtaaagaaggtctggtccacatctctcaaatcgctgacaaacgcgttgagaaagtgaccgattacctgcagatgggtcaggaagtaccggtgaaagttctggaagttgatcgccagggccgtatccgtctgagcattaaagaagcgactgagcagtctcaacctgctgcagcaccggaagctccggctgctgaacagggcgagtaa

SEQ ID NO: 20519 - DNA, 1338 bp, Escherichia coli
atgagtaatcgtaaatatttcggtaccgatgggattcgtggtcgtgtaggggatgcgccgatcacacctgattttgtgcttaagctgggttgggccgcgggtaaagtgctggcgcgccacggctcccgtaagattattattggtaaagacacgcgtatttctggctatatgctggagtcagcactggaagcgggtctggcggcagcgggcctttccgcactcttcactggcccgatgccaacaccggccgtggcttatctgacgcgtaccttccgcgcagaggccggaattgtgatatctgcatcgcataacccgttctacgataatggcattaaattcttctctatcgacggcaccaaactgccggatgcggtagaagaggccatcgaagcggaaatggaaaaggagatcagctgcgttgattcggcagaactgggtaaagccagccgtatcgttgatgccgcgggtcgctatatcgagttttgcaaagccacgttcccgaacgaacttagcctcagtgaactgaagattgtggtggattgtgcaaacggtgcgacttatcacatcgcgccgaacgtgctgcgcgaactgggggcgaacgttatcgctatcggttgtgagccaaacggtgtaaacatcaatgccgaagtgggggctaccgacgttcgcgcgctccaggctcgtgtgctggctgaaaaagcggatctcggtattgccttcgacggcgatggcgatcgcgtgattatggttgaccatgaaggcaataaagtcgatggcgatcagatcatgtatatcatcgcgcgtgaaggtcttcgtcagggccagctgcgtggtggcgctgtgggtacattgatgagcaacatggggcttgaactggcgctgaaacagttaggaattccatttgcgcgcgcgaaagtgggtgaccgctacgtactggaaaaaatgcaggagaaaggctggcgtatcggtgcagagaattccggtcatgtgatcctgctggataaaactactaccggtgacggcatcgttgctggcttgcaggtgctggcggcgatggcacgtaaccatatgagcctgcacgacctttgcagcggcatgaaaatgttcccgcagattctggttaacgtacgttacaccgcaggtagcggcgatccacttgagcatgagtcagttaaagccgtgaccgcagaggttgaagctgcgctgggcaaccgtggacgcgtgttgctgcgtaaatccggcaccgaaccgttaattcgcgtgatggtggaaggcgaagacgaagcgcaggtgactgaatttgcacaccgcatcgccgatgcagtaaaagccgtttaa

SEQ ID NO: 20520 - DNA, 894 bp, Escherichia coli
gtgctccggggttttttcttatcaattcataccagggataacatcatgaaactctttgcccagggtacttcactggaccttagccatcctcacgtaatggggatcctcaacgtcacgcctgattccttttcggatggtggcacgcataactcgctgatagatgcggtgaaacatgcgaatctgatgatcaacgctggcgcgacgatcattgacgttggtggcgagtccacgcgcccaggggcggcggaagttagcgttgaagaagagttgcaacgtgttattcctgtggttgaggcaattgctcaacgcttcgaagtctggatctcagtcgatacatccaaaccagaagtcatccgtgagtcagcgaaagttggcgctcacattattaatgatatccgctccctttccgaacctggcgctctggaggcggctgcagaaaccggtttaccggtttgtctgatgcatatgcagggaaatccaaaaaccatgcaggaagctccgaagtatgacgatgtctttgcagaagtgaatcgctactttattgagcaaatagcacgttgcgagcaggcgggtatcgcaaaagagaaattgttgctcgaccccggattcggtttcggtaaaaatctctcccataactattcattactggcgcgcctggctgaatttcaccatttcaacctgccgctgttggtgggtatgtcacgaaaatcgatgattgggcagctgctgaacgtggggccgtccgagcgcctgagcggtagtctggcctgtgcggtcattgccgcaatgcaaggcgcgcacatcattcgtgttcatgacgtcaaagaaaccgtagaagcgatgcgggtggtggaagccactctgtctgcaaaggaaaacaaacgctatgagtaa

SEQ ID NO: 20521 - DNA, 1935 bp, Escherichia coli
atggcgaaaaacctaatactctggctggtcattgccgttgtgctgatgtcagtattccagagctttgggcccagcgagtctaatggccgtaaggtggattactctaccttcctacaagaggtcaataacgaccaggttcgtgaagcgcgtatcaacggacgtgaaatcaacgttaccaagaaagatagtaaccgttataccacttacattccggttcaggatccgaaattactggataacctgttgaccaagaacgtcaaggttgtcggtgaaccgcctgaagaaccaagcctgctggcttctatcttcatctcctggttcccgatgctgttgctgattggtgtctggatcttcttcatgcgtcaaatgcagggcggcggtggcaaaggtgccatgtcgtttggtaagagcaaagcgcgcatgctgacggaagatcagatcaaaacgacctttgctgacgttgcgggctgcgacgaagcaaaagaagaagttgctgaactggttgagtatctgcgcgagccgagccgcttccagaaactcggcggtaagatcccgaaaggcgtcttgatggtcggtcctccgggtaccggtaaaacgctgctggcgaaagcgattgcaggcgaagcgaaagttccgttctttactatctccggttctgacttcgtagaaatgttcgtcggtgtgggtgcatcccgtgttcgtgacatgttcgaacaggcgaagaaagcggcaccgtgcatcatctttatcgatgaaatcgacgccgtaggccgccagcgtggcgctggtctgggcggtggtcacgatgaacgtgaacagactctgaaccagatgctggttgagatggatggcttcgaaggtaacgaaggtatcatcgttatcgccgcgactaaccgtccggacgttctcgacccggccctgctgcgtcctggccgtttcgaccgtcaggttgtggtcggcttgccagatgttcgcggtcgtgagcagatcctgaaagttcacatgcgtcgcgtaccattggcacccgatatcgacgcggcaatcattgcccgtggtactcctggtttctccggtgctgacctggcgaacctggtgaacgaagcggcactgttcgctgctcgtggcaacaaacgcgttgtgtcgatggttgagttcgagaaagcgaaagacaaaatcatgatgggtgcggaacgtcgctccatggtgatgacggaagcgcagaaagaatcgacggcttaccacgaagcgggtcatgcgattatcggtcgcctggtgccggaacacgatccggtgcacaaagtgacgattatcccacgcggtcgtgcgctgggtgtgactttcttcttgcctgagggcgacgcaatcagcgccagccgtcagaaactggaaagccagatttctacgctgtacggtggtcgtctggcagaagagatcatctacgggccggaacatgtatctaccggtgcgtccaacgatattaaagttgcgaccaacctggcacgtaacatggtgactcagtggggcttctctgagaaattgggtccactgctgtacgcggaagaagaaggtgaagtgttcctcggccgtagcgtagcgaaagcgaaacatatgtccgatgaaactgcacgtatcatcgaccaggaagtgaaagcactgattgagcgtaactataatcgtgcgcgtcagcttctgaccgacaatatggatattctgcatgcgatgaaagatgctctcatgaaatatgagactatcgacgcaccgcagattgatgacctgatggcacgtcgcgatgtacgtccgccagcgggctgggaagaaccaggcgcttctaacaattctggcgacaatggtagtccaaaggctcctcgtccggttgatgaaccgcgtacgccgaacccgggtaacaccatgtcagagcagttaggcgacaagtaa

SEQ ID NO: 20522 - DNA, 1434 bp, Escherichia coli
atgcgattttccagatttatcatcggattgaccagctgtatagcgttcagtgttcaggccgcaaatgttgatgagtacattactcaactccccgctggtgccaaccttgccctgatggtgcaaaaagtcggcgcgtcggcccccgctattgattaccacagtcagcagatggcgctgcctgccagtacccagaaagtgattactgcgctggcggcgttgattcaactcggccccgattttcgttttaccacgacgcttgaaaccaaaggcaatgtggaaaacggcgtacttaagggtgacttagtggcgcgatttggtgccgatccgacgttaaaacgtcaggatattcgcaatatggtcgcgactttgaaaaaatctggcgtcaaccaaatcgatggcaatgtgttgatagatacctccattttcgccagccacgataaagcccccggctggccatggaatgacatgacacaatgctttagcgctccgcctgccgccgccatagttgaccgcaactgtttctccgtctcgctctacagtgccccaaagcctggtgatatggcttttatacgcgtggcatcttattaccccgttacgatgttcagccaggtacgcaccctcccccgtggttctgccgaagcgcaatactgcgaactggatgtggtgccaggcgacctgaaccgctttacgctgacgggatgcctgccacaacgttctgagccgctcccgttggcttttgccgtgcaggatggagccagctatgccggtgcaattctgaaagatgagttaaaacaggcgggtatcacctggagcggaacactgctgcgccagactcaggttaacgaacctggaacggtagttgccagtaaacagtcggccccgctgcacgatctgcttaagattatgctgaaaaagtcggacaacatgatcgccgatacggttttccgcatgataggccatgcgcgcttcaatgtgcctggaacatggcgggccgggtcggacgccgtgcgtcagatcctgcgccagcaagccggtgtcgatattggaaacaccattattgccgatggttcagggctttcgcggcataacctgattgcccccgccaccatgatgcaggtgctgcaatacattgcccaacacgacaatgaacttaactttatctccatgctgccgctggcgggctatgacggctctttgcagtaccgtgcaggtctgcatcaggcgggcgtggatggaaaagtctcagcgaaaaccggttcgttgcagggggtatataacctggcgggattcattaccacagcgagcgggcaacgaatggcgtttgtgcaatatctttctggctatgcagtagaacctgcggatcagcgtaatcgccgtattccgttagtgcgttttgaaagccgtttgtataaagatatttatcagaacaattag

SEQ ID NO: 20523 - DNA, 1173 bp, Escherichia coli
atgaagtttgttgatgaagcatcgattctggtcgttgcaggtgatggcggtaatggttgcgtgagcttccgccgcgaaaagtatattccgaaaggcggcccggatggcggcgacggcggtgatggtggtgacgtatggatggaagccgacgagaacctgaacacgcttatcgattatcgttttgaaaaatctttccgtgcagagcgcggtcagaatggcgcaagccgcgactgtaccggtaagcgcggtaaagacgtgacgattaaagtgccggtaggtacgcgtgtaatcgaccagggtactggtgaaaccatgggcgatatgaccaaacacggtcagcgtctgctggttgctaagggcggctggcacggtctgggcaatacccgtttcaaatcgtccgttaaccgtacaccgcggcagaaaaccaacggcacgccgggcgataagcgcgagctgctgctggagctgatgctgctggctgacgtcggtatgttggggatgccaaacgcgggtaaatcgacctttattcgtgcggtatcggcggctaaaccgaaagtggcggattatccgtttaccactctggtgccaagtctgggtgtggtacgaatggacaacgaaaagagcttcgttgttgccgatattccaggactgattgaaggcgctgcggaaggcgcaggtctgggcattcgcttcctgaagcacctggaacgttgccgcgtcctgttgcacctcatcgatatcgatccgattgacggcaccgatccggttgaaaacgcgcgtattattatcagcgagctggaaaaatacagccaggatctggcgacgaaaccgcgttggttagtgttcaacaagatcgatctgctggataaggtagaagccgaagagaaagcgaaagcgatcgctgaggcgctgggctgggaagataaatattatctgatctctgcggcgagtggactgggcgtgaaagatctctgctgggatgtgatgacctttatcattgaaaacccggtcgtgcaggctgaagaagcgaaacagccagagaaagtcgaattcatgtgggatgattatcatcgccagcagcttgaagagattgctgaagaggatgatgaagactgggatgacgactgggacgaagacgacgaagaaggcgttgagttcatttacaagcgttaa

SEQ ID NO: 20524 - DNA, 972 bp, Escherichia coli
atgaatttagaaaaaatcaatgagttaaccgcgcaagatatggcgggtgttaatgcggcaatccttgagcagcttaattccgacgtccaactgatcaatcagttaggctattacatcgtcagcggcggcggtaaacgtattcgtccgatgattgctgtactggctgcacgagctgttggctatgagggaaatgcgcatgtcaccattgctgccctgatcgagtttatccacacggcgactctgctacacgacgacgttgtggatgaatcagatatgcgcaggggtaaagctaccgccaacgccgcatttggcaatgccgccagcgtgctggtaggcgattttatttatacccgcgctttccagatgatgaccagcctcggttcgctcaaagtgctggaagtcatgtcagaagccgtaaacgtcatcgcagaaggtgaagttctgcaactgatgaacgttaacgatccggacatcactgaagaaaactacatgcgcgttatctatagcaaaaccgcgcgtctgtttgaggctgccgcgcagtgttccgggattctggctggctgtacgccggaggaggagaaaggcctgcaggattatgggcgctatctcggcactgctttccagttgatcgacgatttactcgattacaatgccgatggcgaacagttaggtaaaaatgtcggcgacgatctgaacgaaggtaaaccgacgctgccgctgctgcatgcgatgcatcatggcacaccagaacaggcacagatgatccgtaccgccatcgaacagggtaacggtcgccatcttctggaaccggttctggaagcaatgaacgcttgtggatctcttgaatggacgcgtcagcgtgccgaggaagaagcagacaaagccatcgcagcgttacaggtgctcccggacaccccttggcgagaagcactcatcggcctcgcgcacatcgctgttcaacgcgatcgttaa

SEQ ID NO: 20525 - DNA, 1260 bp, Escherichia coli
atggataaatttcgtgttcaggggccaacgaagctccagggcgaagtcacaatttccggcgctaaaaatgctgctctgcctatcctttttgccgcactactggcggaagaaccggtagagatccagaacgtcccgaaactgaaagacgtcgatacatcaatgaagctgctaagccagctgggtgcgaaagtagaacgtaatggttctgtgcatattgatgcccgcgacgttaatgtattctgcgcaccttacgatctggttaaaaccatgcgtgcttctatctgggcgctggggccgctggtagcgcgctttggtcaggggcaagtttcactacctggcggttgtacgatcggtgcgcgtccggttgatctacacatttctggcctcgaacaattaggcgcgaccatcaaactggaagaaggttacgttaaagcttccgtcgatggtcgtttgaaaggtgcacatatcgtgatggataaagtcagcgttggcgcaacggtgaccatcatgtgtgctgcaaccctggcggaaggcaccacgattattgaaaacgcagcgcgtgaaccggaaatcgtcgataccgcgaacttcctgattacgctgggtgcgaaaattagcggtcagggcaccgatcgtatcgtcatcgaaggtgtggaacgtttaggcggcggtgtctatcgcgttctgccggatcgtatcgaaaccggtactttcctggtggcggcggcgatttctcgcggcaaaattatctgccgtaacgcgcagccagatactctcgacgccgtgctggcgaaactgcgtgacgctggagcggacatcgaagtcggcgaagactggattagcctggatatgcatggcaaacgtccgaaggctgttaacgtacgtaccgcgccgcatccggcattcccgaccgatatgcaggcccagttcacgctgttgaacctggtggcagaagggaccgggtttatcaccgaaacggtctttgaaaaccgctttatgcatgtgccagagctgagccgtatgggcgcgcacgccgaaatcgaaagcaataccgttatttgtcacggtgttgaaaaactttctggcgcacaggttatggcaaccgatctgcgtgcatcagcaagcctggtgctggctggctgtattgcggaagggacgacggtggttgatcgtatttatcacatcgatcgtggctacgaacgcattgaagacaaactgcgcgctttaggtgcaaatattgagcgtgtgaaaggcgaataa

SEQ ID NO: 20526 - DNA, 855 bp, Escherichia coli
atggtactgatgatcgtcagcggacgttcaggttcaggtaaatctgtcgccctgcgtgcgctggaagatatgggtttttactgcgtggataaccttcccgtagtgttgttacccgatctggctcgaaccctggccgatcgcgagatttctgccgccgtcagcattgatgttcgtaatatgccggagtcaccagaaatattcgaacaggcgatgagtaacctgcctgacgctttctcaccgcaactcctgttcctggatgccgaccgtaataccttaattcgtcgttacagtgacacgcgccgactgcatccgctttccagcaaaaacctgtcgctggaaagtgctatcgacaaagaaagcgatttgctggagcctctgcgttcgcgagcggatctgattgtcgatacctcagaaatgtccgttcacgagctggctgaaatgctgcgtacccgtctgctgggtaaacgtgaacgcgaactgaccatggtctttgagtctttcggcttcaaacacggtatccctatcgatgcagattacgtctttgacgtgcgcttcttgccgaacccgcactgggatccgaaactgcgtccaatgacaggtcttgataaacctgtcgccgcgttcctcgaccgccacacagaagtacacaattttatctaccagacgcgaagctatcttgagctatggttacctatgctggaaaccaacaaccgtagctacttgacggtcgccattggttgtaccggcgggaagcaccgttcggtgtatattgcagagcaactggcagactacttccgctcgcgcggtaaaaacgtccagtcacgccatcgtacgctggaaaaacgtaaaccatga

SEQ ID NO: 20527 - DNA, 729 bp, Escherichia coli
atgagtaaaagccgcttaacggtgtttagtttcgttcgccgttttcttttgcggttaatggttgtcctcgccgttttctggggcgggggcatcgcgttgtttagcgttgcgcctgttcccttctcagcggtaatggtcgagcgacaggtcagcgcctggctgcatggcaattttcgttacgtggcacattctgactgggtcagtatggatcaaatctcgccgtggatgggactggcggtgattgccgcagaagatcagaaatttcctgagcactggggctttgatgtcgcttccattgagaaagccctggcgcacaacgagcgcaatgaaaaccgtattcgcggtgcttcaacgatttctcaacagacagccaaaaatctctttttatgggatgggcgtagctgggttcgaaaagggctggaagccggattaacgctggggatagaaacggtctggagcaaaaagcgtatcctgacggtttacctgaatatcgccgaatttggcgacggtgtgtttggcgtcgaagctgcggcacaacgttatttccacaaacccgcgagcaaacttacccggtcggaagctgcattactggcagctgtattacctaatccacttcgtttcaaagtctcctcgccatcgggctacgtgcgtagccgtcaggcgtggattttacggcagatgtatcagttaggcggtgagccgtttatgcaacaacaccagctggattaa

SEQ ID NO: 20528 - DNA, 4554 bp, Escherichia coli
atgacacgcaaaccccgtcgccacgctctttctgtgcccgtgcgcagcggttcggaagtggggttcccgcagagcctgggggaggttcacgatatgttgtacgataaatcccttgagagggataactgtggtttcggcctgatcgcccacatagaaggcgaacctagccacaaggtagtgcgtactgcaatacacgcactggcccgcatgcagcaccgtggcgcgattctcgccgatggtaaaaccggcgacggttgcggcttgctgttacaaaaaccggatcgcttttttcgcatcgttgcgcaggagcgcggctggcgtttagcaaaaaactacgctgtcgggatgctcttcctgaataaagatcctgaactcgccgctgccgcacgccgcatcgttgaagaagaactgcaacgcgaaaccttgtcgattgtgggctggcgtgatgtccccactaacgaaggcgtgctgggtgaaatcgccctctcctctctgccacgcattgagcaaatttttgtgaacgccccggcaggctggcgtccacgcgatatggagcgccgtctgtttatcgcccgccgccgcattgaaaagcgtctcgaagccgacaaagacttctacgtctgtagcctgtcgaatctggtgaacatctataaaggtctgtgtatgccgacggatctgccgcgcttttatctggatcttgcggacctgcgtctggaatcggccatttgcctgttccaccagcgcttctccactaacaccgtaccgcgctggccgctggcgcaaccgttccgctatctggcgcataacggtgaaatcaacaccatcaccggtaaccgccaatgggcgcgtgcgcgtacttataaattccagacaccgcttatccctgacctgcacgacgccgcaccgttcgtcaacgaaaccggctctgactccagttcgatggataacatgctggaactgctgctggcaggcgggatggatatcatccgcgccatgcgtctattagtaccacccgcctggcagaacaacccggatatggacccggaactgcgtgccttctttgactttaactccatgcatatggagccgtgggatggcccggcgggcatcgtgatgtccgacggtcgttttgccgcctgtaacctcgaccgtaacggtctgcgtccggcgcgctacgtcatcaccaaagataagctcatcacctgcgcctctgaagtcggtatctgggattaccagcctgacgaagtggtcgaaaaaggccgcgtcgggccaggcgaactgatggttatcgacacccgcagtgggcgtattctgcactcggcagaaaccgatgacgatctgaaaagccgccatccatataaagagtggatggagaaaaacgtccgccgactggtaccgtttgaagatctgcccgatgaagaagtgggtagccgcgaactggacgacgacacgcttgccagctaccagaaacagtttaactacagcgcggaagagctggactccgtaattcgcgtactgggcgaaaacggtcaggaagcggtcggttcgatgggcgatgataccccattcgccgtgctctccagtcagccgcgcattatttacgactacttccgccagcagtttgcccaggtgactaacccgccaatcgacccgctgcgtgaagcgcatgttatgtcgctcgccaccagtatcggtcgtgaaatgaacgtcttttgcgaagcagagggccaggcgcaccgtttaagctttaaatcgccgattctgctctactccgatttcaaacagctcacgacgatgaaagaggagcactaccgcgcagatacgctggatatcacctttgacgtcactaaaaccacgctcgaagcgacagtcaaagagctgtgcgacaaagccgaaaaaatggtacgtagcggcaccgtgctgctggtgctctccgaccggaatatcgctaaagatcgcctgccggttccagccccgatggcggttggcgcgatccagacccgtctggtcgatcaaagcctgcgttgcgatgccaacatcatcgtcgaaaccgccagcgcccgcgatccgcaccacttcgccgtgttgctgggcttcggcgcgacggctatttatccataccttgcctatgaaacgctgggccgcctggtagacacccatgcgattgccaaagattatcgtaccgtgatgctcaactaccgtaacggcatcaacaaaggcttgtacaaaatcatgtccaaaatgggcatctccaccatcgcctcttaccgctgctcgaaactgtttgaagcggtcggtctacacgatgatgtagtgggcctgtgcttccagggggcggtcagccgcattggtggagcaagctttgaagacttccagcaggatctgctgaatctgtcgaaacgtgcctggctggcgcgtaagcccatcagccagggcggtctgctgaaatacgtccacggcggcgaataccacgcctacaacccggacgtggtgcgcacgctgcaacaagcggtacaaagcggcgagtacagcgactatcaggaatacgcgaagctggttaatgagcgtccggcaaccacgctgcgcgatctgctggcaattacgccgggtgaaaacgcggtcaacattgctgatgttgaaccggcaagcgaactgtttaaacgctttgataccgccgcgatgtctatcggcgcgttaagcccggaagcccacgaggcgctggcggaagcgatgaacagcatcggcggtaattcgaactccggtgaaggcggcgaagacccggcgcgctacggcaccaacaaagtgtcgcgcatcaagcaggtggcttccggtcgctttggggttactccggcgtatctggtcaatgccgacgtcattcagattaaagtcgcccagggcgcgaagccaggcgaaggcggtcagttgccgggtgataaagtcacgccttacatcgccaaactgcgctattcggtgcccggagtgacgctgatctccccgccgccgcaccacgatatctactctatcgaggacttagcgcagctcattttcgacctcaagcaggttaacccgaaagcgatgatctccgtgaagctggtttccgaaccgggagtaggcaccatcgcgactggcgtggcaaaagcttatgcggacttgatcaccatcgcaggctatgacggcggcaccggcgcaagtccgctttcatcggtgaaatacgcaggctgtccgtgggagctggggcttgttgaaacccagcaggcgctggttgctaacggcttgcgtcacaagatccgtttgcaggtcgatggcggcctgaaaacgggtgtcgatatcatcaaggcggcgattctcggcgcagaaagcttcggcttcggcactggcccgatggtggcgctcggctgtaaatatctacgtatttgccatctgaacaactgcgcaacgggtgtagcaactcaggatgacaaactgcgtaagaaccactatcacggcctgccattcaaggtgacgaattactttgagtttatcgcccgtgaaacccgcgagctgatggcacagcttggcgtaacacgtctggtggatctgattggtcgcaccgacctgctgaaagagctggacggtttcaccgccaaacagcagaagctggcgctgtcgaagctgctggagactgccgaaccgcatccaggtaaggcactctactgcaccgaaaacaacccgccgtttgataacggcctgctgaacgcgcagttgctgcaacaggcgaaaccgtttgtcgatgagcgccagagcaaaaccttctggttcgatattcgcaacaccgaccgttctgtcggcgcgtcgctttcaggctatatcgcccagacgcacggcgatcaggggctggcagccgatcctatcaaagcgtacttcaacggcaccgcaggccagagcttcggcgtgtggaacgcgggcggcgtggaactgtacctgaccggtgatgccaacgactatgtcggtaaaggcatggcgggcggcttaatcgccattcgtcctccggttggttccgccttccgcagccatgaagcaagcattatcggcaacacctgcctgtatggcgcgaccggtggtcgtctgtatgccgcaggccgcgcgggtgaacgtttcggcgtgcgtaactccggtgctatcaccgtggtagaaggcattggcgacaacggttgtgaatatatgacgggtggtatcgtctgcattctgggtaaaaccggcgttaacttcggtgcgggcatgaccggcggtttcgcttacgttctcgatgaaagcggcgatttccgcaaacgcgttaacccggaactggtcgaggtcttaagcgttgacgctctggcgatccatgaagagcatctgcgtggtcttatcaccgagcatgtgcagcataccggctctcagcgcggtgaagagattctggcgaactggtcaaccttcgccactaaatttgcgctggttaaaccgaagtccagtgatgtaaaagcactgctgggtcaccgtagtcgtagcgcagctgagttgcgcgtgcaggcgcagtaa

SEQ ID NO: 20529 - DNA, 1017 bp, Escherichia coli; identical to SEQ ID NO: 6870

SEQ ID NO: 20530 - DNA, 1968 bp, Escherichia coli
atgggtattttctccattgctaaccaacatattcgctttgcggtaaaactggcgaccgccattgtactggcgctgtttgttggctttcacttccagctggaaacgccacgctgggcggtactgacagcggcgattgttgccgccggtacggcctttgctgcgggaggtgaaccgtattctggcgctattcgctatcgtggctttttgcgcatcatcggcacatttattggctgtattgccggactggtgatcatcattgcgatgatccgcgcaccattattgatgattctggtgtgctgtatctgggccggtttttgtacctggatatcctcgctggtacgaatagaaaactcgtatgcgtgggggctggccggttataccgcgctgatcattgtgatcaccattcagccggaaccattgcttacgccgcagtttgccgtcgaacgttgtagcgagatcgttatcggtattgtgtgtgcgattatggcggatttgctcttttctccgcgatcgatcaaacaagaagtggatcgagagctggaaagtttgctggtcgcgcaatatcaattaatgcaactctgtatcaagcatggcgatggtgaagttgtcgataaagcctggggcgacctggtgcgacgcaccacggcgctacaaggcatgcgcagcaacctgaatatggaatcttcccgctgggcgcgggccaatcgacgtttaaaagcgatcaatacgctatcgctgacgctgattacccaatcctgcgaaacttatcttattcagaatacgcgcccggaattgatcactgatactttccgcgaattttttgacacgccggtagaaaccgcgcaggacgtccacaagcagctcaaacgcctgcggagagttatcgcctggaccggggaacgggaaacgcctgtcaccatttatagctgggtcgcggcggcaacgcgttatcagcttctcaagcgcggcgttatcagtaacacaaaaatcaacgccaccgaagaagagatcctgcaaggcgaaccggaagtaaaagtagagtcagccgaacgtcatcatgcaatggttaacttctggcgaaccacactttcctgcattctgggcacgcttttctggctgtggacgggctggacttccggcagtggtgcaatggtgatgattgcggtagtgacgtcactggcaatgcgtttgccgaatccacgcatggtggcgatcgactttatctacgggacgctggccgcgctgccgttagggctgctctactttttggtgattatccctaatacccaacagagcatgttgctgctgtgcattagcctggcagtgctgggattcttcctcggtatagaagtacagaaacggcgactgggctcgatgggggcactggccagcaccataaatattatcgtgctggataacccgatgactttccatttcagtcagtttctcgacagcgcattagggcaaatcgtcggctgtgtgctcgcgttcaccgttattttgctggtgcgggataaatcgcgcgacaggaccggacgtgtactgcttaatcagtttgtttctgccgctgtttccgcgatgactaccaatgtggcacgtcgtaaagagaaccacctcccggcactttatcagcagctgtttttgctgatgaataagttcccaggggatttgccgaaatttcgcctggcgctgacgatgattatcgcgcaccagcgcctgcgtgatgcaccgatcccggttaacgaggatttatcggcgtttcaccgacaaatgcgccgcacagcagaccatgtgatatctgcccgtagcgatgataaacgtcgtcggtactttggccagttgctggaagaactggaaatctaccaggaaaagctacgcatctggcaagcgccaccgcaggtgacggaaccggtaaatcggctggcggggatgctccataagtatcaacatgcgttgaccgatagttaa

SEQ ID NO: 20531 - DNA, 1377 bp, Escherichia coli
atgaaaattatcattctgggtgccggccaggttggcggcacactggcggaaaacctggttggcgagaacaacgatattactgttgtcgataccaacggtgagcgtctgcggaccttacaggataaatttgacctgcgggtcgtgcaggggcatggctctcatccacgcgtattgcgggaggcaggtgccgacgacgccgatatgctggttgctgtaaccagttcagatgaaaccaatatggttgcctgccaggtagcctactcacttttcaacacccctaatcgcatcgctcgtatccgctcaccagactacgtgcgcgatgccgataagctatttcattcagatgctgtgccgattgatcatctgatcgcaccagagcagttggttatcgataatatttaccgactgattgagtatcccggcgcattgcaggtggtgaacttcgctgagggtaaagtcagcctggctgtggttaaagcctattatggcggcccgctgattggtaatgcactttcgaccatgcgcgaacatatgccacatatcgatactcgtgtggcagcaattttccgccacgatcgccccattcgtccgcaaggttcgaccattgttgaagctggtgatgaagtgttctttattgccgcttcacagcatatccgcgcggtgatgagtgaattacagcgactggaaaaaccgtataagcggatcatgctggttggtggcggtaatatcggtgcagggctggcgcgtcgtctggaaaaagattacagcgttaaactcatcgaacgtaatcagcagcgcgctgccgaactggcggaaaagttacagaatacgatcgtcttttttggtgatgcgtcggatcaagaactactggccgaagaacatatcgatcaagttgatctgtttattgccgtcaccaacgatgacgaggccaatatcatgtccgccatgcttgccaaacgtatgggtgcgaaaaaggtgatggtattgatccagcgtcgcgcttatgtggatctggttcaggggagcgttatcgatattgcgatttcaccacaacaagcaactatttctgcgttgcttagccatgtgcgaaaagcagatattgttggtgtttcctcattgcgccgcggcgtagcagaagctattgaagccgttgctcacggtgatgaaagcacctcacgcgttgtcggcagagtcattgacgaaatcaagctaccgccaggaacgattattggagcggtggtacgtggaaacgacgtgatgattgccaatgacaatctgcgcattgagcaaggcgatcacgtaattatgttcctcacagataaaaagtttattaccgacgtcgaaagactcttccagccaagccctttcttcttgtaa

SEQ ID NO: 20532 - DNA, 1965 bp, Escherichia coli
atggactgcgtcatgaaaggactcaataaaatcacctgctgcttgctggcagcactactcatgccttgtgcaggacacgctgagaacgaacaatacggcgcgaacttcaataacgccgatatccgccagttcgtggaaatagtgggtcagcatcttggcaaaacgatcctgatcgacccttcggtacagggaaccatttccgtacgcagtaatgatacgtttagccaacaggagtactaccagttctttttaagtattcttgatctttacggttattccgtgatcacgctggacaatggttttctgaaagtggttcgctcagctaatgtaaaaacatcgccagggatgattgctgacagttctcgtccaggcgtaggtgatgagttggtcacccgaattgtaccgcttgagaacgttcctgctcgtgacctggcccccctgctccgccagatgatggatgcgggtagcgtcggtaatgttgtgcattatgaaccctccaacgttcttattctgaccggtcgtgcctccaccattaataaactgattgaagtcataaagcgcgttgatgtcatcggcacagagaagcagcaaattattcatctggaatatgcgtcagcggaagatctcgccgagattcttaatcaattaatcagcgaaagccacggtaaaagccagatgccagccctcctctccgcgaagattgtggcggataagcgaaccaactctcttatcatcagtggaccggaaaaagcacgccagcgcatcacttcattactgaaaagccttgatgtcgaagagagcgaggaaggaaatacccgggtttattacctgaaatatgctaaagccacgaatctggtggaagtgctaaccggtgtttccgaaaagctgaaagatgaaaaagggaatgcgcgtaagccctcctcttctggcgcgatggataacgtcgccattaccgccgatgaacagactaactctctggtcattaccgctgaccagtccgtccaggaaaaactcgccacggtaattgcgcgtctggacattcgccgtgcacaggtgctggttgaggcaatcatcgttgaagttcaggatggaaatggactaaacctcggcgtgcaatgggcgaataaaaacgttggcgcacagcaatttaccaataccggattaccgatttttaacgctgcgcaaggtgtggctgattataaaaagaatggtgggatcaccagcgcgaatcctgcctgggatatgtttagcgcctacaatggcatggccgcaggcttcttcaatggcgactggggagtactgcttaccgcgctggccagtaacaataaaaatgacatcctcgccaccccaagcatcgtaacgctggataataaactcgcgtccttcaacgtggggcaggatgtgccggtgctatccgggtcacagaccacttcaggggataacgtctttaataccgtcgaacgcaaaacggtggggacaaaactcaaagttactccgcaggtcaatgaaggcgacgcggtgttgctcgaaatagagcaggaagtctccagcgttgactcttcctctaactcgacgctcggcccgacgtttaatacccgtactattcaaaacgccgtgctggtcaaaaccggtgaaacggtggtcctgggcggattgctggatgatttttctaaagagcaagtgtcaaaggttcctctgcttggcgatattcctttagtggggcaactcttccgctatacctccaccgagcgcgctaaacgcaacctgatggtatttatccgtccgacgattatccgtgacgatgatgtttatcgctcactgtcaaaagagaaatacacccgttaccgtcaggagcaacaacagcggatcgacgggaaatcaaaagcgctggttggctcggaagatttgccggtgctggatgaaaacacgttcaacagtcacgcccctgcgccatcgtcacggtga

SEQ ID NO: 20533 - DNA, 1914 bp, Escherichia coli
atgattgttttctcctcgttacaaattcgtcgcggcgtgcgcgtcctgctggataatgccaccgccaccatcaaccctgggcagaaagtcggcctggtgggtaaaaacggctgtggtaaatctaccctgctggcattgctgaaaaatgaaatcagcgccgacggcggcagctacacctttccgggaagctggcaactggcgtgggtgaatcaggaaacgccggcgttaccgcaagcggcgctggaatatgtcattgacggcgaccgtgaatatcgtcaactagaagcgcagctacacgacgccaacgaacgtaacgacgggcacgccattgcgaccattcatggcaagctggatgctattgacgcatggagtattcgctcccgtgctgccagcctgctgcacggcctcggtttcagcaatgaacaactggagcgcccggtaagtgatttttccgggggctggcgtatgcgtcttaaccttgcccaggcgctgatttgccgttcagacttgctgctgctcgacgaaccgactaaccacctcgatctcgatgccgttatctggctggaaaaatggctgaagagctatcagggcacgctgatcctgatctctcacgaccgcgacttcctcgatccgatcgtcgataaaattattcatatcgaacaacaaagcatgttcgagtacaccggcaactacagttcgtttgaagtacagcgcgccacccgtctggcgcagcaacaagcgatgtacgaaagccagcaggaacgcgtagcgcatctgcaaagttatatcgaccgtttccgtgccaaagccaccaaagcgaagcaggcccagagccgcattaagatgctcgagcgtatggagctaattgcccccgcgcacgtcgacaacccgttccgctttagcttccgcgcgccggaaagcctgccaaatccgttactgaagatggaaaaagtcagcgcgggctatggcgatcgcattattctcgactcgattaaactgaacctggtgcccggctcgcgtattggtctgttaggccgcaatggcgcgggtaaatcgacattaatcaaactgttagccggtgaacttgcgccagtcagcggtgaaattggtctggcgaaagggatcaaactcggctacttcgcccagcatcaacttgaatacctgcgcgccgacgaatcacctattcaacatctggcacgtttagcgccgcaggagctggaacaaaaactgcgtgactacctcggcggctttggtttccagggcgataaagtaaccgaagaaacgcgccgcttctccggtggggaaaaagcccgcctggtgctggcattaattgtctggcagcggccgaatctgctgctgctcgacgaaccgactaaccaccttgacctcgacatgcgtcaggcactcaccgaagcattaatcgagtttgaaggcgcgctggttgtcgtttcgcacgaccgtcatttgctgcgttccaccactgacgatctctacctggttcacgatcgtaaagtcgaaccgttcgacggcgatctggaagattatcaacagtggttgagcgacgtacaaaagcaggaaaaccagaccgacgaagcgccaaaagagaatgcgaacagcgcccaggcacgtaaagatcagaagcgtcgggaagctgagctgcgtgcgcaaacccagccactgcgtaaagagattgcccgtctggaaaaagagatggagaagctgaacgcgcaactggcgcaggcggaagagaaactcggcgacagcgaactgtatgaccagagccgtaaagcggagttgaccgcctgcctgcaacagcaagccagcgccaaatccggcctggaagagtgcgaaatggcatggctggaagcccaggagcagcttgagcagatgctgctggaaggccaaagcaactga

SEQ ID NO: 20534 - DNA, 2091 bp, Escherichia coli
atgtggcgcagactgatttatcaccccgatatcaactatgcacttcgacaaacgctggtgctatgtttgcccgtggccgttgggttaatgcttggcgaattacgattcggtctgctcttctccctcgttcctgcctgttgcaatattgcgggccttgatacgcctcataaacgttttttcaaacgcttaatcattggtgcgtcgctgtttgccacctgtagcttgctgacacagctactactggcaaaagatgttcccctgccctttttgctgaccggattaacgctggtacttggcgtcactgctgagctggggccattgcacgcaaaattgcttcctgcatcgctgctcgccgccatttttaccctcagtttggcgggatacatgccggtctgggaaccgttgctcatctatgcgttgggcactctctggtacggattgtttaactggttttggttctggatctggcgcgaacaaccgctgcgcgagtcactaagtctgctgtaccgtgaactggcagattattgtgaagccaaatacagcctgcttacccagcacaccgaccctgaaaaagcgctgccgccgctgctggtgcgccagcaaaaagcggtcgatctaattacccagtgctatcagcaaatgcatatgctttccgcgcaaaataatactgactacaagcggatgctgcgtattttccaggaggcgctggatttacaggaacatatttcggtcagtttgcatcagccggaagaggtgcaaaagctggtcgagcgtagccatgcggaagaagttatccgctggaatgcgcaaaccgtcgccgctcgcctgcgcgtgctggctgatgacattctttaccatcgcctgccaacgcgttttacgatggaaaagcaaattggcgcactggaaaaaatcgcccgccagcatccggataatccggttgggcaattctgctactggcatttcagccgcatcgcccgcgtgctgcgcacccaaaaaccgctctatgcccgtgacttactggccgataaacagcggcgaatgccattacttccggcgctgaaaagttatctgtcactaaagtctccggcgctacgcaatgccggacgactcagtgtgatgttaagcgttgccagcctgatgggcaccgcgctgcatctgccgaagtcgtactggatcctgatgacggtattgctggtgacacaaaatggctatggcgcaacccgtctgaggattgtgaatcgctccgtgggaaccgtggtcgggttaatcattgcgggcgtggcgctgcactttaaaattcccgaaggttacaccctgacgttgatgctgattaccaccctcgccagctacctgatattgcgcaaaaactacggctgggcgacggtcggttttactattaccgcagtgtataccctgcaactattgtggttgaacggcgagcaatacatccttccgcgtcttatcgataccattattggttgtttaattgctttcggcggtactgtctggctgtggccgcagtggcagagcgggttattgcgtaaaaacgcccatgatgctttagaagcctatcaggaagcgattcgcttgattcttagcgaggatccgcaacctacgccactggcctggcagcgaatgcgggtaaatcaggcacataacactctgtataactcattgaatcaggcgatgcaggaaccggcgtttaacagccattatctggcagatatgaaactgtgggtaacgcacagccagtttattgttgagcatattaatgccatgaccacgctggcgcgggaacaccgggcattgccacctgaactggcacaagagtatttacagtcttgtgaaatcgccattcagcgttgtcagcagcgactggagtatgacgaaccgggtagttctggcgatgccaatatcatggatgcgccggagatgcagccgcacgaaggcgcggcaggtacgctggagcagcatttacagcgggttattggtcatctgaacaccatgcacaccatttcgtcgatggcatggcgtcagcgaccgcatcacgggatttggctgagtcgcaagttgcgggattcgaaggcgtaa

SEQ ID NO: 20535 - DNA, 1221 bp, Escherichia coli
atggcaattgaacaaacagcaattacacgcgcgactttcgatgaagtgatcctgccgatttatgctccggcagagtttattccggtaaaaggtcagggcagccgaatctgggatcagcaaggcaaggagtatgtcgatttcgcgggtggcattgcagttacggcgttgggccattgccatcctgcgctggtgaacgcgttaaaaacccagggcgaaactctgtggcatatcagtaacgttttcaccaatgaaccggcgctgcgtcttgggcgtaaactgattgaggcaacgtttgccgaacgcgtggtgtttatgaactccggcacggaagctaacgaaaccgcctttaaactggcacgccattacgcctgtgtgcgtcatagcccgttcaaaaccaaaattattgccttccataacgcttttcatggtcgctcgctgtttaccgtttcggtgggtgggcagccaaaatattccgacggctttgggccgaaaccggcagacatcatccacgttccctttaacgatctccatgcagtgaaagcggtgatggatgatcacacctgtgcggtggtggttgagccgatccagggcgagggcggtgtgacggcagcgacgccagagtttttgcagggcttgcgcgagctgtgcgatcaacatcaggcattattggtgtttgatgaagtgcagtgcgggatggggcggaccggcgatttgtttgcttacatgcactacggcgttacgccggatattctgacctctgcgaaagcgttaggcggcggcttcccgattagcgccatgctgaccacggcggaaattgcttctgcgtttcatcctggttctcacggttccacctacggcggtaatcctctggcctgtgcagtagcgggggcggcgtttgatatcatcaatacccctgaagtgctggaaggcattcaggcgaaacgccagcgttttgttgaccatctgcagaagatcgatcagcagtacgatgtatttagcgatattcgcggtatggggctgttgattggcgcagagctgaaaccacagtacaaaggtcgggcgcgtgatttcctgtatgcgggcgcagaggctggcgtaatggtgctgaatgccggaccggatgtgatgcgttttgcaccgtcgctggtggtggaagatgcggatatcgatgaagggatgcaacgtttcgcccacgcggtggcgaaggtggttggggcgtaa

SEQ ID NO: 20536 - DNA, 2544 bp, Escherichia coli
atgagcaaagtcagactcgcaattatcggtaacggtatggtcggccatcgctttatcgaagatcttcttgataaatctgatgcggccaactttgatattaccgttttctgtgaagaaccgcgcatcgcttatgaccgcgtacacctctcgtcttacttctctcaccacaccgccgaagagctgtcgctggtgcgcgaaggcttctacgagaaacacggcatcaaagttctggtcggcgaacgcgctatcaccatcaaccgtcaggagaaggtgattcactccagcgccggacgtaccgttttttatgacaagctgatcatggcaaccggttcctacccgtggatcccgccaatcaaaggttctgatactcaggactgctttgtctatcgcactattgaagacctcaacgccattgaatcctgcgcccgtcgcagcaaacgcggtgccgttgttggtggcggcctgttaggtctggaagccgcaggcgcgctgaaaaacttaggtattgaaacccacgttatcgaatttgcccctatgctgatggcagaacagcttgatcagatgggcggcgagcagctgcgtcgcaaaatcgaaagtatgggcgtgcgcgttcacaccagcaaaaacacccttgagattgtgcaggaaggtgttgaagcgcgtaaaaccatgcgttttgccgacggcagcgaactggaagtcgactttatcgtcttctctaccggtatccgtccgcgcgataagctggcaacccagtgtggtctggacgttgctccgcgtgggggtattgtcattaatgattcctgccagacttccgatccggatatctacgccatcggtgaatgcgcaagctggaacaaccgtgtatttggtctggtagcacctggctacaaaatggcgcaggtcgccgttgaccatattctcggtagcgaaaacgcctttgaaggtgctgaccttagcgccaagctgaaactgctgggcgtagacgtaggcggtattggtgatgcgcacggtcgcacgcctggcgcacgtagctacgtttacctcgacgaaagtaaagagatctacaaacgcctgattgtcagcgaagacaacaaaaccctgctcggtgcggtactggtgggcgataccagcgactacggtaacctgctgcaactggtgctgaacgctatcgaactgccggaaaacccggattccctgatcctgccagcacactcgggtagcggcaagccgtctatcggtgttgataaactgccggacagcgcgcaaatctgctcctgcttcgacgtcaccaaaggtgatctgattgctgccatcaacaaaggctgccacacagttgcggcgctgaaagctgaaaccaaagcgggtactggctgcggtggctgtatcccgctggtcactcaggtactgaacgcggaactggcgaaacagggcatcgaagttaacaacaacctgtgcgaacactttgcttattcgcgtcaggaactgttccatttgatccgcgttgaaggcattaaaaccttcgaagaactgctggcgaaacacggcaaaggctacggttgtgaagtttgtaaaccaaccgtcggttcgctgctggcctcctgctggaacgaatacattctgaagccggaacatactccgctgcaggattctaacgacaacttcctcgctaacatccagaaagacggcacctactcggtgatcccgcgttctccgggcggtgaaatcaccccggaagggctgatggcggtaggtcgtatcgcgcgtgaatttaatctctacaccaagatcactggctcccagcgtctggcgatgtttggcgcacagaaagacgatctgccggagatctggcgtcagctgattgaagccggcttcgaaaccggtcatgcctatgcgaaagcactgcgtatggcgaaaacctgcgtgggtagcacctggtgccgctacggcgttggcgacagcgtcggcctcggcgtggaactggaaaaccgctacaaaggcatccgtacgccgcacaaaatgaagttcggtgtctccggctgtacccgtgaatgttcagaagctcagggtaaagacgtgggtattatcgccactgaaaaaggctggaacctgtatgtttgcggtaacggcggcatgaaaccgcgtcatgcggatctgctggcggcggatatcgatcgcgaaacgctgatcaaatatctcgaccgcttcatgatgttctacatccgtactgccgacaaactgacgcgtaccgcaccgtggttagaaaacctcgaaggcggcatcgattacctgaaagcagtgatcattgacgacaaactggggctgaacgcacatctggaagaagagatggcgcgcctgcgtgaagcggtactgtgtgagtggactgaaacggtcaatacgccgtctgcgcagactcgcttcaaacacttcatcaacagcgacaagcgtgacccgaacgtgcagatggtgccagagcgcgaacagcaccgtccggcaacgccgtatgaacgtatcccagtaactctggtggaggacaacgcatga

SEQ ID NO: 20537 - DNA, 327 bp, Escherichia coli
atgagccagtggaaagacatctgcaaaatcgatgacatcctgcctgaaaccggcgtctgcgcgctgttaggtgacgagcaggtcgcgattttccgcccgtatcacagcgatcaggtgtttgcgatcagcaacatcgacccgttcttcgagtccagcgtgctgtcacgcggactgattgcggaacaccagggcgagctgtgggtcgccagcccgctgaaaaaacagcgttttcgcttaagcgacggcttgtgcatggaagacgaacagttttccgtcaaacattacgaagcgcgagtgaaagacggcgtggtgcagctgcgcggttaa

SEQ ID NO: 20538 - DNA, 1374 bp, Escherichia coli
gtggatcatttgcctatattttgccaattacgcgatcgcgactgtctgattgtcggcggtggtgatgtcgcggaacgcaaagcaaggttgctgttagacgcaggcgctcgcttaacggtgaatgcattagcgtttattccacagttcaccgcatgggcagatgcaggcatgttaaccctcgtcgaagggccatttgatgaaagccttctcgacacctgctggctggcgattgcagcgacggatgatgacgcgcttaaccagcgcgtcagcgaagccgctgaagctcgtcgcatcttctgtaacgtggtcgatgcgccgaaagccgccagctttattatgccgtcgattattgaccgctcaccgctcatggtagcggtctcctctggcggcacctctccggttctggcacgcctgttgcgcgaaaaacttgaatcactgctgccgttacatctgggccaggtagcgaaatacgccgggcaattacgcgggcgagtgaaacaacagttcgccacgatgggtgagcgtcgccgtttctgggagaaattgttcgttaacgaccgcctggcgcagtcgctggcaaacaacgatcagaaagccattactgaaacgaccgaacagttaatcaacgaaccgctcgaccatcgcggtgaagtggtgctggttggtgcaggtccgggcgatgccgggctgctgacactgaaaggactgcaacaaattcagcaggcagatgtggtggtctacgaccgtctggtttctgacgatattatgaatctggtacgccgcgatgcggaccgtgttttcgtcggcaaacgcgcgggataccactgcgtaccccaggaagagattaaccagatcctgctgcgggaagcgcaaaaaggcaaacgcgtggtgcggctgaaaggtggcgatccgtttatttttggccgtggtggcgaagagctggaaacactgtgcaacgcgggtattccgttctcggtggttccgggtattaccgcagcttctggttgctctgcctattcgggtattccactcacgcatcgcgattatgcccagagcgtacgcttaattaccggacacttaaaaaccggtggcgagctggactgggaaaacctggcggcagaaaaacagacgctggtgttctatatggggttgaatcaggccgcgactattcagcaaaagctgattgaacacggaatgccaggcgaaatgccggtggcaattgtcgaaaacggtacggcagtcacgcagcgcgtgattgacggtacgctcacacagctgggagaactggcgcagcaaatgaacagtccatcgctaattattattggtcgggttgttggcctgcgcgataaactgaactggttctccaaccattaa

SEQ ID NO: 20539 - DNA, 1005 bp, Escherichia coli
atgactaagcccatcgtttttagtggcgcacagccctcaggtgaattgaccattggtaactacatgggtgcgctgcgtcagtgggtaaacatgcaggatgactaccattgcatttactgtatcgttgaccaacacgcgatcaccgtgcgccaggatgcacagaagctgcgtaaagcgacgctggatacgctggccttgtatctggcttgtggtatcgatcctgagaaaagcaccatttttgttcagtcccacgtgccggaacatgcacagttaggctgggcactgaactgctatacctacttcggcgaactgagtcgcatgacgcagtttaaagataaatctgcgcgttatgccgagaacatcaacgctggtctgtttgactatccggtgctgatggcagcggacatcctgctgtatcaaactaatctggtaccggtgggtgaagaccagaaacagcacctcgaactgagccgcgatattgcccagcgtttcaacgcgctgtatggcgagatctttaaggtgccggagccgtttattccgaaatctggcgcgcgcgtaatgtcgctgctggagccgaccaagaagatgtccaagtctgacgataatcgcaataacgttatcggcctgctggaagatccgaaatcggtagtgaagaaaatcaaacgtgcggtcactgactccgacgagccgccggtagttcgctacgatgtgcagaacaaagcgggcgtttccaacctgttggatatcctttcagcggtaacgggccagagcatcccagaactggaaaaacagttcgaaggcaagatgtatggtcatctgaaaggtgaagtggctgatgccgtttccggtatgctgactgaattgcaggaacgctatcaccgtttccgcaacgatgaagccttcctgcaacaggtgatgaaagatggcgcggaaaaagccagcgcgcacgcttcccgtacgctaaaagcggtgtacgaagcgattggttttgtggcgaagccgtaa

SEQ ID NO: 20540 - DNA, 1287 bp, Escherichia coli
atggatgaattcaaaccagaagacgagctgaaacccgatcccagcgatcgtcgtactggtcgttctcgtcaatcttctgaacgttctgagcgtactgaacgtggcgaaccgcagatcaattttgatgatattgaacttgatgacactgacgatcgccgtccgactcgtgcgcaaaaagagcgcaatgaggaaccggaaatcgaagaagaaattgacgaatccgaagatgaaaccgtggatgaagagcgcgtagagcgtcgtccgcgtaagcgcaaaaaagcagccagtaaacccgcttctcgtcagtatatgatgatgggcgtcggcattctggttctactgctgttgatcatcggtatcggttctgcgctaaaagccccctcgaccacttccagcgatcaaaccgcgtctggcgagaagagtattgatcttgctggcaatgcgaccgatcaggcgaatggcgtgcagccagcgccgggaaccacgtctgcggaaaatactcagcaggatgtttctctgccaccgatctcttctacgccgactcaagggcaaaccccggtggcaacggatggtcaacaacgtgttgaagtgcagggtgacctgaacaatgcgctgacccagccacaaaatcagcaacagctgaacaatgtggcggtcaattccacgttgccgactgaacccgcaacggttgcgcctgttcgcaatggcaatgcatcgcgtgacacggcgaaaacgcaaaccgctgaacgtccgtccactacgcgcccagctcgtcagcaggcggtgattgaaccgaaaaaaccgcaagcaaccgtgaaaacggagccgaagccggtagcacagacgccgaagcgtactgaaccagctgcccctgtggcgagcacgaaggcaccggctgcgacttctacgccagcaccaaaagagacggcgactacggctccagtacagacggcatccccggcgcaaaccacagcaacacccgctgctggggcgaagaccgcaggtaatgttggttcgttgaaatcggcaccgtccagccattacactctgcagctgagcagttcctctaactacgacaacctgaacggttgggcgaagaaagagaatctgaaaaactacgttgtctatgaaacgacgcgtaatggtcagccgtggtatgtcctggtttctggcgtgtacgcttcgaaagaagaggcgaaaaaagcggtatctacattgccagcagatgtccaggccaaaaacccgtgggcgaaaccgctgcgtcaggtacaggccgatctgaagtaa

SEQ ID NO: 20541 - DNA, 402 bp, Escherichia coli
atgaaagagaaacctgctgttgaggttcgactggataaatggctatgggctgcccgtttttataaaacccgcgcgctggcccgtgaaatgattgaaggcggtaaggtgcattacaacgggcagcgcagcaagccgagcaaaatcgtcgagctgaatgccacgctcactctgcgccagggaaatgacgaacgcacggtgattgtaaaggcgattactgaacagcgtcgccccgccagcgaggcagccttgctgtatgaagagactgcggaaagtgtagagaaacgcgaaaaaatggcgctggcacgtaaacttaatgccttaaccatgccgcacccggaccgacgcccggacaaaaaagagcgccgcgacctgttacgatttaaacacggcgacagtgaataa

SEQ ID NO: 20542 - DNA, 885 bp, Escherichia coli
atgattatgccgcaacatgaccaattacatcgctatctgtttgaaaactttgccgtgcgcggcgaactggtaaccgtttcggaaaccctgcaacagatccttgagaaccacgattatccgcagcccgttaaaaacgtgctggcagaactgctggttgcgaccagcctgttaaccgctacgctgaagtttgatggtgatatcaccgtacagctgcagggcgacggtccgatgaatctggcggttattaacggtaacaataaccagcagatgcgcggtgtggcgcgcgtgcagggcgaaattccagaaaatgccgacctgaaaacgctggtcggcaatggttacgtggtgatcaccattaccccgagcgaaggcgaacgctatcagggcgtagttggtctggaaggtgataccctggcggcctgcctggaagattactttatgcgttctgaacagctgccgacgcgcctgtttattcgcaccggcgacgtagacggcaaaccggctgcaggcggtatgttgttgcaggtaatgcctgcgcaaaatgcccagcaggacgactttgaccacctggcgacgctaaccgaaaccatcaaaaccgaagaactgctgaccttaccggcaaacgaagtgttgtggcgtttgtatcacgaagaagaggtgacggtttacgatccgcaggatgtggagttcaaatgcacctgctcgcgtgaacgttgcgccgatgcgctgaaaacgctgcctgatgaagaagttgatagcatcctggcggaagatggcgaaattgacatgcattgtgattactgcggtaaccactatctgttcaatgcgatggatattgctgaaatccgcaacaacgcgtctccggcagatccgcaagttcattaa

SEQ ID NO: 20543 - DNA, 1623 bp, Escherichia coli
atgcgcgttaacaatggtttgaccccgcaagaactcgaggcttatggtatcagtgacgtacatgatatcgtttacaacccaagctacgacctgctgtatcaggaagagctcgatccgagcctgacaggttatgagcgcggggtgttaactaatctgggtgccgttgccgtcgataccgggatcttcaccggtcgttcaccaaaagataagtatatcgtccgtgacgataccactcgcgatactttctggtgggcagacaaaggcaaaggtaagaacgacaacaaacctctctctccggaaacctggcagcatctgaaaggcctggtgaccaggcagctttccggcaaacgtctgttcgttgtcgacgctttctgtggtgcgaacccggatactcgtctttccgtccgtttcatcaccgaagtggcctggcaggcgcattttgtcaaaaacatgtttattcgcccgagcgatgaagaactggcaggtttcaaaccagactttatcgttatgaacggcgcgaagtgcactaacccgcagtggaaagaacagggtctcaactccgaaaacttcgtggcgtttaacctgaccgagcgcatgcagctgattggcggcacctggtacggcggcgaaatgaagaaagggatgttctcgatgatgaactacctgctgccgctgaaaggtatcgcttctatgcactgctccgccaacgttggtgagaaaggcgatgttgcggtgttcttcggcctttccggcaccggtaaaaccaccctttccaccgacccgaaacgtcgcctgattggcgatgacgaacacggctgggacgatgacggcgtgtttaacttcgaaggcggctgctacgcaaaaactatcaagctgtcgaaagaagcggaacctgaaatctacaacgctatccgtcgtgatgcgttgctggaaaacgtcaccgtgcgtgaagatggcactatcgactttgatgatggttcaaaaaccgagaacacccgcgtttcttatccgatctatcacatcgataacattgttaagccggtttccaaagcgggccacgcgactaaggttatcttcctgactgctgatgctttcggcgtgttgccgccggtttctcgcctgactgccgatcaaacccagtatcacttcctctctggcttcaccgccaaactggccggtactgagcgtggcatcaccgaaccgacgccaaccttctccgcttgcttcggcgcggcattcctgtcgctgcacccgactcagtacgcagaagtgctggtgaaacgtatgcaggcggcgggcgcgcaggcttatctggttaacactggctggaacggcactggcaaacgtatctcgattaaagatacccgcgccattatcgacgccatcctcaacggttcgctggataatgcagaaaccttcactctgccgatgtttaacctggcgatcccaaccgaactgccgggcgtagacacgaagattctcgatccgcgtaacacctacgcttctccggaacagtggcaggaaaaagccgaaaccctggcgaaactgtttatcgacaacttcgataaatacaccgacacccctgcgggtgccgcgctggtagcggctggtccgaaactgtaa

SEQ ID NO: 20544 - DNA, 1353 bp, Escherichia coli
atgaggcgattgcgcttctcgccacgaagttcatttgcccgtacgttattgctcatcgtcaccttgctgttcgccagcctggtgacgacttatctggtggtgctgaacttcgcgattttgccgagcctccagcagtttaataaagtcctcgcgtacgaagtgcgtatgttgatgaccgacaaactgcaactggaggacggcacgcagttggttgtgcctcccgctttccgtcgggagatctaccgtgagctggggatctctctctactccaacgaggctgccgaagaggcaggtctgcgttgggcgcaacactatgaattcttaagccatcagatggcgcagcaactgggcggcccgacggaagtgcgcgttgaggtcaacaaaagttcgcctgtcgtctggctgaaaacctggctgtcgcccaatatctgggtacgcgtgccgctgaccgaaattcatcagggcgatttctctccgctgttccgctatacgctggcgattatgctattggcgataggcggggcgtggctgtttattcgtatccagaaccgaccgttggtcgatctcgaacacgcagccttgcaggttggtaaagggattattccgccgccgctgcgtgagtatggcgcttcggaggtgcgttccgttacccgtgcctttaaccatatggcggctggtgttaagcaactggcggatgaccgcacgctgctgatggcgggggtaagtcacgacttgcgcacgccgctgacgcgtattcgcctggcgactgagatgatgagcgagcaggatggctatctggcagaatcgatcaataaagatatcgaagagtgcaacgccatcattgagcagtttatcgactacctgcgcaccgggcaggagatgccgatggaaatggcggatcttaatgcagtactcggtgaggtgattgctgccgaaagtggctatgagcgggaaattgaaaccgcgctttaccccggcagcattgaagtgaaaatgcacccgctgtcgatcaaacgcgcggtggcgaatatggtggtcaacgccgcccgttatggcaatggctggatcaaagtcagcagcggaacggagccgaatcgcgcctggttccaggtggaagatgacggtccgggaattgcgccggaacaacgtaagcacctgttccagccgtttgtccgcggcgacagtgcgcgcaccattagcggcacgggattagggctggcaattgtgcagcgtatcgtggataaccataacgggatgctggagcttggcaccagcgagcggggcgggctttccattcgcgcctggctgccagtgccggtaacgcgggcgcagggcacgacaaaagaagggtaa

SEQ ID NO: 20545 - DNA, 2223 bp, Escherichia coli
gtgccgtttatcgcacgttatcgtaaggaaatcaccggcggtctggatgacacgcagctgcgtaatctggaaacgcgtctgagctatctgcgcgagctggaagagagacgtcaggcgatcctcaagtccatttccgagcaaggcaaactcaccgatgatctggcgaaggccatcaacgccaccctaagcaaaaccgaactcgaagacctctacctgccctacaaacctaaacgccgcacccgcgggcaaatcgccattgaagcagggcttgagccgttggctgacctgctgtggagcgatccgtcacacacgccagaagtcgccgctgcacaatatgtttatgccgataaaggcgtggcagataccaaagccgcgctggatggcgcgcgctatatcctgatggaacggtttgccgaagatgccgcgctgctggcgaaagtgcgtgattatctgtggaagaacgcgcatttggtttctacggtggtgagcggtaaagaagaggaaggggcgaaattccgcgactatttcgatcatcacgaaccgttgtccacggtgccttctcaccgcgcgctggcgatgttccgtgggcgtaacgaaggcgtacttcagctttcgctgaatgccgatccacagttcgatgagccgcccaaagagagctattgcgagcaaatcatcatggatcaccttggcctgcgcctgaacaatgccccggcggatagctggcgcaaaggcgtggtgagctggacgtggcgcatcaaggtgctgatgcatctggaaaccgaactgatgggcaccgtgcgcgaacgtgcggaagatgaagcaatcaacgtctttgcccgtaacctgcacgatctgctgatggcggcccctgccggactgcgtgcaacgatgggcctcgatccgggtctgcgtactggggtaaaagtggcggtggtcgatgccactggcaaactggtggcgaccgacaccatttacccgcacaccggacaggccgcaaaagcagcgatgaccgttgctgcgctgtgtgaaaaacataacgttgaactggtagcgatcggtaacggtacagcttcccgcgaaactgagcgtttctatctcgatgtgcagaagcagttcccgaaagtgaccgcgcagaaagtaatcgtcagcgaagcaggcgcgtcggtttactcggcttccgagctggctgcacaggagttcccggatctcgacgtttcgctgcgtggcgcggtgtctatcgcccgccgtttgcaggatccgctggcggagctggtgaaaatcgatccgaaatctatcggcgtaggtcagtatcagcatgacgtcagccagacgcaactggcccgcaaactggacgcagtagtagaagactgcgtaaacgccgttggcgtcgatctcaacactgcttctgttccgctgttaacccgcgtggcgggcctgacgcgcatgatggcgcaaaacatcgttgcctggcgcgatgagaacggtcagttccagaaccgtcagcaactgttaaaagtgagccgtctggggccgaaagccttcgagcagtgcgcgggcttcttgcgcattaaccacggtgataacccgctggacgcgtctaccgttcacccggaagcctatccggtggtggaacgcattctggcagcaacacagcaggcactgaaagatctgatgggtaacagcagcgaactgcgtaacctgaaagcgtctgactttactgatgagaaattcggtgtgccgacggtaaccgacatcatcaaagagctggaaaaaccgggtcgcgatccgcgtccggaatttaaaaccgctcagtttgccgatggcgtcgagacaatgaacgacctgcaaccgggtatgatcctcgaaggcgcagtgaccaacgtcaccaactttggcgcgtttgtcgatattggcgtgcatcaggacggcctggttcacatctcttcattgtcgaacaagtttgtggaagatccgcataccgtggtgaaagcgggcgacattgtgaaggtgaaagtgctggaagtggatcttcagcgtaaacgtatcgccctgactatgcgcctggatgagcagcctggcgaaaccaacgctcgtcgcggcggcggtaatgaacgcccgcaaaacaaccgcccggcagccaaaccacgcggtcgtgaagcgcagcctgccggtaatagcgcgatgatggatgcgctggcggcggcaatgggcaaaaaacgttaa

SEQ ID NO: 20546 - DNA, 276 bp, Escherichia coli; identical to SEQ ID NO: 6817

SEQ ID NO: 20547 - DNA, 1278 bp, Escherichia coli
atgaaaccgatgcatattgcaatggcgctgctctctgccgcgatgttctttgtgctggcgggcgtctttatgggcgtgcaactggagctggatggcaccaaactggtggtcgacacggcttcggatgtccgttggcagtgggtgtttatcggcacggcggtggtctttttcttccagcttttgcgaccggctttccagaaagggttgaaaagcgtttccggaccgaagtttattctgcccgccattgatggctccacggtgaagcagaaactgttcctcgtggcgctgttggtgcttgcggtggcgtggccgtttatggtttcacgcgggacggtggatattgccaccctgaccatgatctacattatcctcggtctcgggctgaacgtggttgttggtctttctggtctgctggtgctggggtacggcggtttttacgccatcggcgcttacacttttgcgctgctcaatcactattacggcttgggcttctggacctgcctgccgattgctggattaatggcagcggcggcgggcttcctgctcggttttccggtgctgcgtttgcgcggtgactatctggcgatcgttaccctcggtttcggcgaaattgtgcgcatattgctgctcaataacaccgaaattaccggcggcccgaacggaatcagtcagatcccgaaaccgacactcttcggactcgagttcagccgtaccgctcgtgaaggcggctgggacacgttcagtaatttctttggcctgaaatacgatccctccgatcgtgtcatcttcctctacctggtggcgttgctgctggtggtgctaagcctgtttgtcattaaccgcctgctgcggatgccgctggggcgtgcgtgggaagcgttgcgtgaagatgaaatcgcctgccgttcgctgggcttaagcccgcgtcgtatcaagctgactgcctttaccataagtgccgcgtttgccggttttgccggaacgctgtttgcggcgcgtcagggctttgtcagcccggaatccttcacctttgccgaatcggcgtttgtgctggcgatagtggtgctcggcggtatgggctcgcaatttgcggtgattctggcggcaattttgctggtggtgtcgcgcgagttgatgcgtgatttcaacgaatacagcatgttaatgctcggtggtttgatggtgctgatgatgatctggcgtccgcagggcttgctgcccatgacgcgcccgcaactgaagctgaaaaacggcgcagcgaaaggagagcaggcatga

SEQ ID NO: 20548 - DNA, 1494 bp, Escherichia coli
atggcgaaagaaaaaaaacgtggctttttttcctggctgggctttggtcaaaaagagcagaccccggaaaaagagacagaagttcagaatgaacaaccggttgtagaagaaatcgttcaggcgcaagagcctgtgaaggcctctgaacaagccgttgaagagcagccgcaagcgcatactgaagccgaggcggaaacttttgctgccgacgttgtggaagtcactgaacaggttgctgaaagtgaaaaagcgcagcctgaagcggaagtcgttgcacagccggaaccggtcgtagaagaaacgccggagccagtggctatcgaacgtgaagagctgccgttgccggaagacgtcaacgccgaagcggtttcgccagaagagtggcaggctgaagcggaaaccgtagagattgtcgaagcggcggaagaagaagcggctaaagaagaaattaccgacgaagagctggaaacggcgctggctgccgaagcggcagaagaggcggtgatggtggttcctccggcagaagaagagcagccggtggaagaaatcgctcaggagcaggaaaaaccgaccaaagaaggttttttcgcgcgcctgaaacgcagcctgttaaaaaccaaagaaaatctcggttccggatttatcagcctgttccgcggtaaaaaaatcgacgatgatctgtttgaggagctggaagagcagcttttgatcgccgatgtgggtgtggaaaccacacgtaaaattatcaccaatctgacggaaggcgcatcccgcaagcagcttcgtgacgccgaggcgctctatggcctgctgaaagaagagatgggcgagattctggcgaaagtcgatgagccgctgaatgttgaaggcaaagcgccgtttgtgatcctgatggtgggcgtcaacggtgtgggtaaaaccacgacgattggtaagctggcgcgtcagtttgagcagcagggtaaatcggtgatgctggcggcgggtgatactttccgtgcagctgcggttgaacagcttcaggtctggggtcagcgcaacaatattccggtgattgcccagcataccggggcggattccgcctctgttatcttcgacgccattcaggcagctaaagcgcgtaatatcgacgtcctgattgccgatacagccggacgcctgcagaacaaatcgcacctgatggaagagttgaagaaaatcgtccgcgtgatgaagaaactcgacgttgaagcgccgcatgaagttatgctgactattgatgccagcaccgggcagaacgcggtaagccaggccaaactgttccatgaagccgttggcttaaccggcatcacgctaacgaaactggacggcacggcgaaaggcggggtaattttctcggtggctgaccagtttggtatccctatccgctacattggtgtcggcgaacgtattgaggatttgcgtccgtttaaggcggacgactttatagaggcactttttgcccgagaggattaa

SEQ ID NO: 20549 - DNA, 1203 bp, Escherichia coli
gtggaaaggtttgatgccattattataggcgctggtgcggcgggtatgttctgttctgcgctggcaggtcaggcaggacgccgggttctgctgatcgataatggtaaaaaaccagggcgcaaaatccttatgtctggcggtgggcgctgcaactttaccaacctttatgtcgaaccaggcgcttatctgagccagaatccgcatttttgtaagtctgcactcgcacgttttacccagtgggatttcattgatctggtcaataaacacggcatcgcctggcacgagaaaacgttagggcaactcttctgcgatgactccgcgcagcagattgtcgacatgctggtggatgagtgcgagaagggcaatgtgaccttcagattgcgtagcgaagtgctgagtgtggcgaaggatgaaacaggcttcacgcttgatctgaacggcatgactgtcggttgcgaaaagctggtcatcgcgactggtgggctgtcaatgccggggctgggcgcgtcgccgtttggttataagattgccgaacaatttggcctcaacgtgctgccgacccgcgcgggtctggtgccattcactctgcataaaccgttgctcgaagagttacaggtgctggcgggcgtggcggtgccttccgtgattaccgctgaaaacggcaccgttttccgtgagaacttactcttcacccaccgcggcttgtctggaccggcggtgttgcagatttcaagctactggcaaccgggggaatttgtcagcatcaatctgctaccggatgtggacctcgaaaccttcctgaatgagcagcgtaacgcacatccgaatcaaagcctgaaaaacacactggcggttcatctaccgaagcggttggttgaacgcttacagcaactcgggcaaatcccggatgtttcgctaaaacagctcaacgtgcgtgaccaacaggcactgattagcacattgaccgactggcgcgtacaacccaacggcactgaaggctatcgcactgccgaagtgacgctcggcggcgtggacaccaacgaactctcttcacggacgatggaagcgcgcaaagtgcctgggctgtacttcatcggcgaagtgatggacgtcaccggctggctggggggctataacttccagtgggcgtggtcgagtgcgtgggcttgtgcgcaggatttgattgcagcaaagtcgtcctga

SEQ ID NO: 20550 - DNA, 1500 bp, Escherichia coli
atgctacatttgtttgctggcctggatttgcataccgggctgttattattgcttgcactggcttttgtgctgttctacgaagccatcaatggtttccatgacacagccaacgccgtggcaaccgttatctatacccgcgcgatgcgttctcagctcgccgtggttatggcggcggtattcaactttttgggtgttttgctgggtggtctgagtgttgcctatgccattgtgcatatgctgccgacggatctgctgcttaatatgggatcgtctcatggccttgccatggtgttctctatgttgctggcggcgattatctggaacctgggtacctggtactttggtttacctgcatccagctctcatacgctgattggcgcgatcatcgggattggtttaaccaatgcgttgatgaccgggacgtcagtggtggatgcactcaatatcccgaaagtattaagtattttcggttctctgatcgtttcccctattgtcggcctggtgtttgctggcggtctgattttcttgctgcgtcgctactggagcggcaccaagaaacgcgcccgtatccacctgaccccagcggagcgtgaaaagaaagacggcaagaaaaagccgccgttctggacgcgtattgcgctgatcctttccgctatcggcgtggcgttttcgcacggcgcgaacgatggtcagaaaggcattggtctggttatgttggtattgattggcgtcgcgccagcaggcttcgtggtgaacatgaatgccactggctacgaaatcacccgtacccgtgatgccatcaacaacgtcgaagcttactttgagcagcatcctgcgctgctcaaacaggctaccggtgctgatcagttagtaccggctccggaagctggcgcaacgcaacctgcggagttccactgccatccgtcgaataccattaacgcgctcaaccgcctgaaaggtatgttgaccaccgatgtggaaagctacgacaagctgtcgcttgatcaacgtagccagatgcgccgcattatgctgtgcgtttctgacactatcgacaaagtggtgaagatgcctggcgtgagtgctgacgatcagcgcctgttgaagaaactgaagtccgacatgcttagcaccatcgagtatgcaccggtgtggatcatcatggcggtcgcgctggcgttaggtatcggtacgatgattggctggcgccgtgtggcaacgactatcggtgagaaaatcggtaagaaaggcatgacctacgctcaggggatgtctgcccagatgacggcggcagtgtctatcggcctggcgagttataccgggatgccggtttccactactcacgtactctcctcttctgtcgcggggacgatggtggtagatggtggcggcttacagcgtaaaaccgtgaccagcattctgatggcctgggtgtttacccttccggctgcggtactgctttccggcgggctgtactggctctccttgcagttcctgtaa

SEQ ID NO: 20551 - DNA, 1017 bp, Escherichia coli; identical to SEQ ID NO: 6870

SEQ ID NO: 20552 - DNA, 729 bp, Escherichia coli
atgactcatgtctgctcggtgatcctcattcgtcgttcattcgatatttatcatgaacagcaaaaaatatcgctgcataacgagagtattctgctgctggagaaaaatttggcagacgattttgcgttttgttcaccggatacgcgacgactggatatcgatgagctgacagtttgccattacttacaaaatattcgtcagctaccacgcaatttagggttacacagcaaagaccgtttgttaattaaccagtcaccccccatgccgctggtgacggcgatttttgatagcttcaatgaatccggggtaaattcaccgatactgagcaatatgctctacctttcctgtttatcgatgttttctcataagaaagaactgatccccttacttttcaatagcatcagcactgtttcaggaaaagttgaacgccttattagctttgatatcgccaaacgttggtatctgcgcgatatcgcggaaagaatgtataccagcgagagtctaatcaaaaaaaagttgcaggatgaaaatacctgtttcagtaaaatattactcgcctccaggatgtcgatggccagacgattactcgagttacgtcaaattcctctgcatactattgcggaaaaatgtggctatagcagtacatcgtactttataaacacatttcgacaatattatggtgtaacgccacatcagtttgcgcaacattcgccaggtaccttttcctga

SEQ ID NO: 20553 - DNA, 825 bp, Escherichia coli
atgcaatcactacatgggaattgtctaattgcgtatgcaagacataaatatattctcaccatggttaatggtgaatatcgctattttaatggcggtgacctggtttttgcggatgcaagccaaattcgagtagataagtgtgttgaaaattttgtattcgtgtcaagggacacgctttcattatttctcccgatgctcaaggaggaggcattaaatcttcatgcacataaaaaagtttcttcattactcgttcatcactgtagtagagatattcctgtttttcaggaagttgcgcaactatcgcagaataagaatcttcgctatgcagaaatgctacgtaaaagagcattaatctttgcgttgttatctgtttttcttgaggatgagcactttataccgctgcttctgaacgttttacaaccgaacatgcgaacacgagtttgtacggttatcaataataatatcgcccatgagtggacactagcccgaatcgccagcgagctgttgatgagtccaagtctgttaaagaaaaaattgcgcgaagaagagacatcatattcacagttgcttactgagtgtagaatgcaacgtgctttgcaacttattgttatacatggtttttcaattaagcgagttgcagtatcctgtggatatcacagcgtgtcgtatttcatttacgtctttcgaaattattatgggatgacgcccacagagtatcaggagcgatcggcgcagagattgtcgaaccgtgactcggcggcaagtattgttgcgcaagggaatttttacggcactgaccgttctgcggaaggaataagattatag

SEQ ID NO: 20554 - DNA, 1005 bp, Escherichia coli
atgagtacgcaagaggccaccctgcaacaaccgctgttgcaggctatcgacctgaaaaaacattatccggtgaagaaaggcatgttcgcgccggaacgtctggttaaagcgctggatggcgtttcgtttaaccttgaacgtggcaaaacgctggcagtagtgggcgaatctggctgcggtaaatcgaccctcggtcggttgctgacgatgattgaaatgcccaccggtggcgagctgtattaccaggggcaggatctgcttaagcacgatccgcaggcgcagaagctgcgtcggcagaaaatccagatcgtcttccagaacccttacggttcgctgaatccgcgtaaaaaagtcgggcaaattcttgaagagccgctgctgatcaacaccagcttaagcaaagaacagcgtcgggaaaaagccctgtcgatgatggcgaaagtcggcctgaaaaccgagcactatgaccgctatccgcatatgttctccggcggtcagcgtcagcgtatcgccatcgcccgtggtctgatgctcgacccggatgtggtgattgccgatgaaccggtttccgcgctggatgtttcagtgcgcgcgcaggtgctgaatctgatgatggatttgcagcaggagttggggctgtcttatgtctttatctcccacgacctgtcggtggtggagcacattgctgatgaagtgatggtgatgtacctgggccgctgcgtggagaagggaacgaaagaccaaatcttcaataacccgcgccatccgtacactcaggcgctactttccgcgacgccgcgcctgaacccggacgatcgccgcgagcgcatcaagctcagcggtgaactaccaagcccactgaatccaccgccgggttgcgccttcaacgcccgctgtcgtcggcgcttcggcccctgcacccagttgcagccgcagctaaaagactacggcggtcaactggtagcttgttttgctgttgatcaggatgaaaatccgcagcgttaa

SEQ ID NO: 20555 - DNA, 1455 bp, Escherichia coli
atgtatatcgggatagatcttggcacctcgggcgtaaaagttattttgctcaacgagcagggtgaggtggttgctgcgcaaacggaaaagctgaccgtttcgcgcccgcatccactctggtcggaacaagacccggaacagtggtggcaggcaactgatcgcgcaatgaaagctctgggcgatcagcattctctgcaggacgttaaagcattgggtattgccggccagatgcacggagcaaccttgctggatgctcagcaacgggtgttacgccctgccattttgtggaacgacgggcgctgtgcgcaagagtgcactttgctggaagcgcgagttccgcaatcgcgggtgattaccggcaacctgatgatgcccggatttactgcgcctaaattgctatgggttcagcggcatgagccggagatattccgtcaaatcgacaaagtattattaccgaaagattacttgcgtctgcgtatgacgggggagtttgccagcgatatgtctgacgcagctggcaccatgtggctggatgtcgcaaagcgtgactggagtgacgtcatgctgcaggcttgcgacttatctcgtgaccagatgcccgcattatacgaaggcagcgaaattactggtgctttgttacctgaagttgcgaaagcgtggggtatggcgacggtgccagttgtcgcaggcggtggcgacaatgcagctggtgcagttggtgtgggaatggttgatgctaatcaggcaatgttatcgctggggacgtcgggggtctattttgctgtcagcgaagggttcttaagcaagccagaaagcgccgtacatagcttttgccatgcgctaccgcaacgttggcatttaatgtctgtgatgctgagtgcagcgtcgtgtctggattgggccgcgaaattaaccggcctgagcaatgtcccagctttaatcgctgcagctcaacaggctgatgaaagtgccgagccagtttggtttctgccttatctttccggcgagcgtacgccacacaataatccccaggcgaagggggttttctttggtttgactcatcaacatggccccaatgaactggcgcgagcagtgctggaaggcgtgggttatgcgctggcagatggcatggatgtcgtgcatgcctgcggtattaaaccgcaaagtgttacgttgattgggggcggggcgcgtagtgagtactggcgtcagatgctggcggatatcagcggtcagcagctcgattaccgtacggggggggatgtggggccagcactgggcgcagcaaggctggcgcagatcgcggcgaatccagagaaatcgctcattgaattgttgccgcaactaccgttagaacagtcgcatctaccagatgcgcagcgttatgccgcttatcagccacgacgagaaacgttccgtcgcctctatcagcaacttctgccattaatggcgtaa

SEQ ID NO: 20556 - DNA, 702 bp, Escherichia coli
gtgcagatgctcgaccggctggaaagtgaaatcctggctgaccgggtgagtgaggaaagccgccgctggctggcatcgtgcggcctgaccgtggagcagatgaaaaaccagatggacccggtgtacacgccggcgcgaaaaatccacctgtaccactgcgaccatcgcggcctgccgctggcccttatcagcaaggaagggacaacagaatggtgcgcagaatacgatgaatggggcaacctgctgaatgaagagaacccgcatcagctgcagcagcttatccgcctgccggggcagcagtatgatgaggagtccggcctgtattacaaccgccaccgctattatgacccgctgcaggggcggtatatcactcaggatccgattgggctgaaggggggatggaatttttatcagtatccgttgaatccggtcataaatgtagatccgcaaggtttggttgatataaatttataccccgaaagtgatcttatccattctgtagctgatgagattaatatcccaggcgttttcacaatcggggggcatggtacccccacatctattgaatccgcaacgcgcagtatcatgacagctaaagatctagcatatctaattaaatttgatgggaattataaagatgggatgacagtttggttattttcttgtaatacaggtaaaggacaaaattcatttgctagctaa

SEQ ID NO: 20557 - DNA, 1149 bp, Escherichia coli
atgaaagcattacattttggcgcaggtaatatcggtcgtggctttatcggtaaactgctggcagacgcgggtatccaactgacgtttgccgatgtcaatcaggtggtacttgatgccctgaatgcccgtcatagctatcaggtacatgtggttggtgaaaccgagcaggtagataccgtttccggcgtcaatgctgtcagcagcattggtgatgatgtcgttgatctgattgctcaggttgatttagtcactaccgccgttggcccggttgtgctggaacgtattgctccggcaatcgccaaagggcaggtgaaacgtaaagaacaaggtaatgaatccccgctgaacatcatcgcctgtgaaaacatggtacgcggtaccacgcagctgaaaggccatgtgatgaacgccctgccggaagacgccaaagcgtgggtagaagaacacgttggctttgtcgattccgccgttgaccgcatcgtaccgccttcggcttcggcaactaacgatccgctggaagtgacggtagaaaccttcagcgaatggattgtcgataaaacgcagttcaaaggcgcactgccgaacatcccaggcatggagttaaccgacaacctgatggcatttgtcgaacgtaaactcttcaccctgaacacgggtcatgctataaccgcgtacctcggaaaactggccggtcatcagaccattcgtgacgcgattctcgacgagaaaatccgcgcggtggtaaaaggtgcgatggaagaaagtggtgcagtattgatcaagcgctacggctttgacgctgacaagcatgcggcgtacatccagaaaattctcggccgttttgagaacccgtatctgaaagatgatgtagagcgcgtaggccgtcagccactgcgtaaactgagtgctggcgaccgtctgatcaagccactgctcggtacgctggaatatggtctgccacataaaaacctgattgaaggtattgccgctgcaatgcacttccgcagtgaagatgatccgcaggctcaggaactggcagcactgatcgctgacaaaggtccgcaggcggcgctggcacagatttccggtcttgatgccaacagcgaggttgtatccgaggcggtaaccgcttataaagcaatgcaataa

SEQ ID NO: 20558 - DNA, 822 bp, Escherichia coli
atgtcgtgtgaagaactggaaattgtctggaacaatattaaagccgaagccagaacgctggcggactgtgagccaatgctggccagtttttaccacgcgacgctactcaagcacgaaaaccttggcagtgcactgagctacatgctggcgaacaagctgtcatcgccaattatgcctgctattgctatccgtgaagtggtggaagaagcctacgccgctgacccggaaatgatcgcctctgcggcctgtgatattcaggcggtgcgtacccgcgacccggcagtcgataaatactcaaccccgttgttatacctgaagggttttcatgccttgcaggcctatcgcatcggtcactggttgtggaatcaggggcgtcgcgcactggcaatctttctgcaaaaccaggtttctgtgacgttccaggtcgatattcacccggcagcaaaaattggtcgcggtatcatgcttgaccacgcgacaggcatcgtcgttggtgaaacggcggtgattgaaaacgacgtatcgattctgcaatctgtgacgcttggcggtacgggtaaatctggtggtgaccgtcacccgaaaattcgtgaaggtgtgatgattggcgcgggcgcgaaaatcctcggcaatattgaagttgggcgcggcgcgaagattggcgcaggttccgtggtgctgcaaccggtgccgccgcataccaccgccgctggcgttccggctcgtattgtcggtaaaccagacagcgataagccatcaatggatatggaccagcatttcaacggtattaaccatacatttgagtatggggatgggatctaa

SEQ ID NO: 20559 - DNA, 1020 bp, Escherichia coli
atgaaccaacgtaatgcttcaatgactgtgatcggtgccggctcgtacggcaccgctcttgccatcaccctggcaagaaatggccacgaggttgtcctctggggccatgaccctgaacatatcgcaacgcttgaacgcgaccgctgtaacgccgcgtttctccccgatgtgccttttcccgatacgctccatcttgaaagcgatctcgccactgcgctggcagccagccgtaatattctcgtcgtcgtacccagccatgtctttggtgaagtgctgcgccagattaaaccactgatgcgtcctgatgcgcgtctggtgtgggcgaccaaagggctggaagcggaaaccggacgtctgttacaggacgtggcgcgtgaggccttaggcgatcaaattccgctggcggttatctctggcccaacgtttgcgaaagaactggcggcaggtttaccgacagctatttcgctggcctcgaccgatcagacctttgccgatgatctccagcagctgctgcactgcggcaaaagtttccgcgtttacagcaatccggatttcattggcgtgcagcttggcggcgcggtgaaaaacgttattgccattggtgcggggatgtccgacggtatcggttttggtgcgaatgcgcgtacggcgctgatcacccgtgggctggctgaaatgtcgcgtcttggtgcggcgctgggtgccgaccctgccacctttatgggcatggcggggcttggcgatctggtgcttacctgtaccgacaaccagtcgcgtaaccgccgttttggcatgatgctcggtcagggcatggatgtacaaagcgcgcaggagaagattggtcaggtggtggaaggctaccgcaatacgaaagaagtccgcgaactggcgcatcgcttcggcgttgaaatgccaataaccgaggaaatttatcaagtattatattgcggaaaaaacgcgcgcgaggcagcattgactttactaggtcgtgcacgcaaggacgagcgcagcagccactaa

SEQ ID NO: 20560 - DNA, 1035 bp, Escherichia coli
atgatgaacagcaccaataaacttagtgttattattccgttatataatgcgggcgatgatttccgcacttgtatggaatctttaattacgcaaacctggactgctctggaaatcattattattaacgatggttcaacggataattctgttgaaatagcaaagtattacgcagaaaactatccgcacgttcgtttgttgcatcaggcgaatgctggcgcatcggtggcgcgtaatcgtgggattgaagtggcaacgggcaaatatgtcgcttttgtcgatgctgacgatgaagtctatcccaccatgtacgaaacgctgatgaccatggcgttagaggacgacctcgacgtggcgcagtgcaacgctgactggtgttttcgtgaaacgggagaaacctggcaatccatccccaccgatcgccttcgctcaaccggcgtattaaccggcccggactggctgcggatggggctttcttcgcgccgttggactcacgttgtctggatgggggtttatcgccgtgatgttattgttaaaaataacattaaatttattgccggattacatcatcaggatattgtctggacaacagaattcatgtttaacgcgctgcgtgcgcgatataccgagcaatcattatataaatattatctgcataatacgtcagtgagtcggttgcatagacaagggaataaaaaccttaattatcaacgtcactatattaagattacccgcctgctggagaaattaaatcgaaattatgccgacaaaattatgatttatccggaatttcatcagcaaataacttacgaggcattgcgtgtttgccatgcggtgcgcaaagagccggatattcttacccgccaacggatgattgccgagatatttacttccggtatgtataagcgcctgattaccaatgtgcgcagcgtgaaggtcggttaccaggcgttactgtggtctttccgcttatggcaatggcgcgacaaaacgcggtcgcaccatcgcattacgcgtagcgcctttaatttgcgctag

SEQ ID NO: 20561 - DNA, 1197 bp, Escherichia coli
atgcgtggagaattttatcagcagttaaccaacgatctggaaaccgcacgggcggaagggttgtttaaagaagagcgcattattacgtctgcgcagcaagcagatatcactgtggctgatggaagccacgtcattaacttttgtgccaacaactatctcgggctggcgaatcatcctgatctgattgcggcggcaaaggcgggaatggattctcacggtttcggcatggcttcggtgcgttttatttgcggcactcaggacagccataaagagcttgaacaaaaactggcggccttcctggggatggaagatgcgattctctactcttcctgctttgatgctaacggtggcctgtttgaaacgcttctgggtgcggaagacgccattatctccgacgcactgaaccacgcgtctattattgatggtgtgcgtctgtgcaaagctaaacgctatcgctatgccaacaacgatatgcaggagctggaagcacgtctgaaagaagcgcgtgaagccggtgcgcgtcatgtgctgatcgccaccgatggtgtgttctcaatggacggcgtgattgccaacctgaagggcgtttgcgatctggcagataaatatgatgccctggtgatggtagacgactcccacgcggtcggttttgtcggtgaaaatggtcgtggttcccatgaatactgcgatgtgatgggccgggtcgatattatcaccggtacgcttggtaaagcgctgggcggggcttctggtggttataccgcggcgcgcaaagaagtggttgagtggctgcgccagcgttctcgtccgtacctgttctccaactcgctggcaccggccattgttgccgcgtccatcaaagtactggagatggtcgaagcgggcagcgaactgcgtgaccgtctgtgggcgaacgcgcgtcagttccgtgagcaaatgtcggcggcgggctttaccctggcgggagccgatcacgccattattccggtcatgcttggtgatgcggtagtggcgcagaaatttgcccgtgagctgcaaaaagagggcatttacgttaccggtttcttctatccggtcgttccgaaaggtcaggcgcgtattcgtacccagatgtctgcggcgcatacccctgagcaaattacgcgtgcagtagaagcatttacgcgtattggtaaacaactgggcgttatcgcctga

SEQ ID NO: 20562 - DNA, 642 bp, Escherichia coli
atgaaaccatatcagcgccagtttattgaatttgcgcttagcaagcaggtgttaaagtttggcgagtttacgctgaaatccgggcgcaaaagcccctatttcttcaacgccgggctgtttaataccgggcgcgatctggcactgttaggccgtttttacgctgaagcgttggtggattccggcattgagttcgatctgctgtttggccctgcttacaaagggatcccgattgccaccacaaccgctgtggcactggcggagcatcacgacctggacctgccgtactgctttaaccgcaaagaagcaaaagaccacggtgaaggcggcaatctggttggtagcgcgttacaaggacgcgtaatgctggtagatgatgtgatcaccgccggaacggcgattcgcgagtcgatggagattattcaggccaatggcgcgacgcttgctggcgtgttgatttcgctcgatcgtcaggaacgcgggcgcggcgagatttcggcgattcaggaagttgagcgtgattacaactgcaaagtgatctctatcatcaccctgaaagacctgattgcttacctggaagagaagccggaaatggcggaacatctggcggcggttaaggcctatcgcgaagagtttggcgtttaa

SEQ ID NO: 20563 - DNA, 1506 bp, Escherichia coli
gtgatgaagacgttgttctcccgcttaattaccgttattgcctgcttttttatcttctctgccgcatggttttgcctgtggagtatcagcctgcatctggttgagcgccctgatatggcggtgctgttatttccgtttggtctgcgtctggggctaatgctgcaatgcccgcgcggatactggcccgtattgctgggcgcggagtggctgctgatttactggctaacgcaggcggtcggtttaacccattttccgttattgatgatcggtagtttactgacgttactgcccgtagcgctgatctcgcgctatcgccatcagcgtgactggcgcaccttgctgttacagggggcggcgttaacggcggcggcgttgttgcagtcgctgccctggctttggcacggcaaagagtcgtggaatgcgctgttgctgactttaactggcggcctgacgctggccccgatatgtctggtgttctggcactatctcgccaataacacctggctgccgctcggtccgtcactggtttctcagccaatcaactggcgcgggcgacatctggtctggtacttgctgctgtttgttatcagtctctggctccagttgggattgccggacgaactgtcgcgctttacgccattctgtctggcgctgccgattatcgcgctggcctggcactatggttggcaaggggcgctgattgcgacgttgatgaacgccatcgcgctgatcgccagtcaaacctggcgcgatcatccggtggatttattgctctcgctgctggtgcaaagtctgacagggttgttgcttggcgctggcatccagcggttgcgtgaacttaaccagtcgctgcaaaaggaactggcgcgcaatcagcatctggctgaacggttgctggaaaccgaagagagcgtgcgccgtgatgtggcgcgtgagctgcatgatgatatcggtcagaccatcactgctattcgtactcaggcgggcattgttcagcggctggcggcagataacgccagcgtgaagcagagcgggcagctcatcgaacaactatcgctgggcgtttacgacgcggtgcgccgtttgttgggtcggttacgtccgcgccagttggatgatctcaccctggagcaggccatccgctcactgatgcgggaaatggagctggaagggcgcggtattgtcagccatctcgaatggcgaatcgatgaatcagcgttaagcgaaaaccagcgcgtgacgctgtttcgtgtctgccaggaagggctgaacaacattgtgaaacatgctgatgccagcgcggtcaccctgcaaggctggcagcaggatgaacggttgatgctggttattgaagacgatggcagcggtttgccgccgggttccgggcaacaaggttttggcctcaccggaatgcgcgagcgcgtaacggcgctgggtggcacattacacatttcctgtctgcacggcacgcgtgtcagcgtttctctacctcaacgctatgtctaa

SEQ ID NO: 20564 - DNA, 813 bp, Escherichia coli
atggctattaaactcattgctatcgatatggatggcacccttctgctgcccgatcacaccatttcacccgccgttaaaaatgcgattgccgcagctcgcgcccgtggcgtgaatgtcgtgctaacgacgggtcgcccgtatgcaggtgtgcacaactacctgaaagagctgcatatggaacagccgggcgactactgcattacttataacggcgcgctggtacagaaggccgctgatggtagcaccgtggcgcaaactgctctcagctatgacgactatcgtttcctggaaaaactctctcgcgaagtcggttctcatttccacgccctggaccgcaccacgctgtacaccgccaaccgtgatatcagctactacacggtgcatgaatccttcgttgccaccattccgctggtgttctgcgaagcggagaaaatggaccccaatacccagttcctgaaagtgatgatgattgatgaacccgccatcctcgaccaggctatcgcgcgtattccgcaggaagtgaaagagaaatataccgtgctgaaaagtgcgccgtacttcctcgaaatcctcgataaacgcgttaacaaaggtacgggggtgaaatcactggccgacgtgttaggtattaaaccggaagaaatcatggcgattggcgatcaggaaaacgatatcgcaatgattgaatatgcaggcgtcggtgtggcgatggataacgctattccttcagtgaaagaagtggcgaactttgtcaccaaatctaaccttgaagatggcgtggcgtttgctattgagaagtatgtgctgaattaa

SEQ ID NO: 20565 - DNA, 2415 bp, Escherichia coli
atgtcgaattcttatgactcctccagtatcaaagtcctgaaagggctggatgcggtgcgtaagcgcccgggtatgtatatcggcgacacggatgacggcaccggtctgcaccacatggtattcgaggtggtagataacgctatcgacgaagcgctcgcgggtcactgtaaagaaattatcgtcaccattcacgccgataactctgtctctgtacaggatgacgggcgcggcattccgaccggtattcacccggaagagggcgtatcggcggcggaagtgatcatgaccgttctgcacgcaggcggtaaatttgacgataactcctataaagtgtccggcggtctgcacggcgttggtgtttcggtagtaaacgccctgtcgcaaaaactggagctggttatccagcgcgagggtaaaattcaccgtcagatctacgaacacggtgtaccgcaggccccgctggcggttaccggcgagactgaaaaaaccggcaccatggtgcgtttctggcccagcctcgaaaccttcaccaatgtgaccgagttcgaatatgaaattctggcgaaacgtctgcgtgagttgtcgttcctcaactccggcgtttccattcgtctgcgcgacaagcgcgacggcaaagaagaccacttccactatgaaggcggcatcaaggcgttcgttgaatatctgaacaagaacaaaacgccgatccacccgaatatcttctacttctccactgaaaaagacggtattggcgtcgaagtggcgttgcagtggaacgatggcttccaggaaaacatctactgctttaccaacaacattccgcagcgtgacggcggtactcacctggcaggcttccgtgcggcgatgacccgtaccctgaacgcctacatggacaaagaaggctacagcaaaaaagccaaagtcagcgccaccggtgacgatgcgcgtgaaggcctgattgcggtcgtttccgtgaaagtgccggacccgaaattctcctcccagaccaaagacaaactggtttcttctgaggtgaaatcggcggttgaacagcagatgaacgaactgctggcagaatacctgctggaaaacccaaccgacgcgaaaatcgtggttggcaaaattatcgatgctgcccgtgcccgtgaagcgccgcgtcgcgcgcgtgaaatgacccgccgtaaaggtgcgctcgacttagcgggcctgccgggcaaactggcagactgccaggaacgcgatccggcgctttccgaactgtacctggtggaaggggactccgcgggcggctctgcgaagcaggggcgtaaccgcaagaaccaggcgattctgccgctgaagggtaaaatcctcaacgtcgagaaagcgcgcttcgataagatgctctcttctcaggaagtggcgacgcttatcaccgcgcttggctgtggtatcggtcgtgacgagtacaacccggacaaactgcgttatcacagcatcatcatcatgaccgatgcggacgtcgacggctcgcacattcgtacgctgctgttgaccttcttctatcgtcagatgccggaaatcgttgaacgcggtcacgtctacatcgctcagccgccgctgtacaaagtgaagaaaggcaagcaggaacagtacattaaagacgacgaagcgatggatcagtaccagatctctatcgcgctggacggcgcaacgctgcacaccaacgccagtgcaccggcattggctggcgaagcgttagagaaactggtatctgagtacaacgcgacgcagaaaatgatcaatcgtatggagcgtcgttatccgaaagcaatgctgaaagagcttatctatcagccgacgttgacggaagctgacctttctgatgagcagaccgttacccgctgggtgaacgcgctggtcagcgaactgaacgacaaagaacagcacggcagccagtggaagtttgatgttcacaccaatgctgagcaaaacctgttcgagccgattgttcgcgtgcgtacccacggtgtggatactgactatccgctggatcacgagtttatcaccggtggcgaatatcgtcgtatctgcacgctgggtgagaaactgcgtggcttgctggaagaagatgcgtttatcgaacgtggcgagcgtcgtcagccggtagccagcttcgagcaggcgctggactggctggtgaaagagtcccgtcgcggcctctccatccagcgttataaaggtctgggcgagatgaacccggaacagctgtgggaaaccactatggacccggaaagtcgtcgtatgctgcgcgttaccgttaaagatgcgattgctgccgaccagttgttcaccacgctgatgggcgacgccgttgaaccgcgccgtgcgtttattgaagagaacgccctgaaagcggcgaatatcgatatttaa

SEQ ID NO: 20566 - DNA, 1101 bp, Escherichia coli
atgaaatttaccgtagaacgtgagcatttattaaaaccgctacaacaggtgagcggtccgttaggtggtcgtcctacgctaccgattctcggtaatctgctgttacaggttgctgacggtacgttgtcgctgaccggtactgatctcgagatggaaatggtggcacgtgttgcgctggttcagccacacgagccaggagcgacgaccgttccggcgcgcaaattctttgatatctgccgtggtctgcctgaaggcgcggaaattgccgtgcagctggaaggtgaacggatgctggtacgctccgggcgtagccgtttttcgctgtctaccctgccagcggcggatttcccgaacctcgatgactggcagagtgaagtcgaatttaccctgccgcaggcaacgatgaagcgtctgattgaagcgacccagttttctatggcgcatcaggacgttcgctattacttaaatggtatgctgtttgaaaccgaaggtgaagaactgcgcaccgtggcaaccgacggccaccgtctggcggtctgttcaatgccaattggtcaatctttgccaagccattcggtgatcgtaccgcgtaaaggcgtgattgaactgatgcgtatgctcgacggcggcgacaatccgctgcgcgtacagattggcagcaacaacattcgcgcccacgttggcgactttatcttcacctccaaactggtggatggtcgcttcccggattatcgccgcgttctgccgaagaacccggacaaacatctggaagctggctgcgatctgctcaagcaggcgtttgctcgcgcggcgattctctctaacgagaaattccgcggcgtacgtctttatgtcagcgaaaaccagctgaaaatcaccgccaacaacccggaacaggaagaagcggaagagatcctcgacgttacctatagcggtgcggagatggaaatcggcttcaacgtcagttatgtgctggatgttctgaacgcgctgaaatgcgaaaacgtccgcatgatgctgaccgattcggtttccagcgtgcagattgaagatgcggccagccagagcgcggcttatgttgtcatgccaatgagactgtaa

SEQ ID NO: 20567 - DNA, 1404 bp, Escherichia coli
gtgtcactttcgctttggcagcagtgtcttgcccgattgcaggatgagttaccagccacagaattcagtatgtggatacgcccattgcaggcggaactgagcgataacacgctggccctgtacgcgccaaaccgttttgtcctcgattgggtacgggacaagtaccttaataatatcaatggactgctaaccagtttctgcggagcggatgccccacagctgcgttttgaagtcggcaccaaaccggtgacgcaaacgccacaagcggcagtgacgagcaacgtcgcggcccctgcacaggtggcgcaaacgcagccgcaacgtgctgcgccttctacgcgctcaggttgggataacgtcccggccccggcagaaccgacctatcgttctaacgtaaacgtcaaacacacgtttgataacttcgttgaaggtaaatctaaccaactggcgcgcgcggcggctcgccaggtggcggataaccctggcggtgcctataacccgttgttcctttatggcggcacgggtctgggtaaaactcacctgctgcatgcggtgggtaacggcattatggcgcgcaagccgaatgccaaagtggtttatatgcactccgagcgctttgttcaggacatggttaaagccctgcaaaacaacgcgatcgaagagtttaaacgctactaccgttccgtagatgcactgctgatcgacgatattcagttttttgctaataaagaacgatctcaggaagagtttttccacaccttcaacgccctgctggaaggtaatcaacagatcattctcacctcggatcgctatccgaaagagatcaacggcgttgaggatcgtttgaaatcccgcttcggttggggactgactgtggcgatcgaaccgccagagctggaaacccgtgtggcgatcctgatgaaaaaggccgacgaaaacgacattcgtttgccgggcgaagtggcgttctttatcgccaagcgtctacgatctaacgtacgtgagctggaaggggcgctgaaccgcgtcattgccaatgccaactttaccggacgggcgatcaccatcgacttcgtgcgtgaggcgctgcgcgacttgctggcattgcaggaaaaactggtcaccatcgacaatattcagaagacggtggcggagtactacaagatcaaagtcgcggatctcctttccaagcgtcgatcccgctcggtggcgcgtccgcgccagatggcgatggcgctggcgaaagagctgactaaccacagtctgccggagattggcgatgcgtttggtggccgtgaccacacgacggtgcttcatgcctgccgtaagatcgagcagttgcgtgaagagagccacgatatcaaagaagatttttcaaatttaatcagaacattgtcatcgtaa

SEQ ID NO: 20568 - DNA, 960 bp, Escherichia coli
atggctgcaaccaagcctgcttttaacccaccgggtaaaaagggcgacataattttcagcgtgctggtaaaactggcggcgctgattgtgctattgatgttgggtggcattattgtctctctgatcatctcctcctggccgagcattcagaaatttggtctggctttcctatggaccaaagagtgggatgcaccgaacgatatctacggggcgctggtgccgatctacggtacgttggtgacttcgtttatcgcgctgctgatcgccgtcccggtgagtttcggtatcgccctgttcctgactgagcttgcgcctggctggctgaaacgcccgctgggtatcgccattgagctgctggcagccattccaagtatcgtttacggcatgtggggcctgtttatctttgcgccgctgttcgccgtttactttcaggagccggtcggcaatatcatgtcgaatatcccgattgttggcgcgctgttctctggccccgcatttggtatcggtatcctcgcggcaggcgtgatcctcgccatcatgattattccgtacattgcggcggtaatgcgtgatgtgttcgaacaaaccccggtgatgatgaaagagtcggcctacggtattggctgcaccacctgggaagttatctggcgtatcgttcttccgttcaccaaaaatggtgttatcggcggcatcatgctggggctgggccgcgcgctcggtgaaaccatggcggtgacctttatcatcggtaacacctaccagctcgacagcgcctcgctgtatatgccgggcaacagtatcacctctgcgctggcgaacgaatttgcggaagcggaatccggtctgcacgttgccgcactgatggaactgggcctgatcctgtttgtgattaccttcatcgtcctcgccgcatcgaagtttatgattatgcgcctggctaagaatgagggggcacgctaa

SEQ ID NO: 20569 - DNA, 1830 bp, Escherichia coli
atgtgtggaattgttggcgcgatcgcgcaacgtgatgtagcagaaatccttcttgaaggtttacgtcgtctggaataccgcggatatgactctgccggtctggccgttgttgatgcagaaggtcatatgacccgcctgcgtcgcctcggtaaagtccagatgctggcacaggcagcggaagaacatcctctgcatggcggcactggtattgctcacactcgctgggcgacccacggtgaaccttcagaagtgaatgcgcatccgcatgtttctgaacacattgtggtggtgcataacggcatcatcgaaaaccatgaaccgctgcgtgaagagctaaaagcgcgtggctataccttcgtttctgaaaccgacaccgaagtgattgcccatctggtgaactgggagctgaaacaaggcgggactctgcgtgaggccgttctgcgtgctatcccgcagctgcgtggtgcgtacggtacagtgatcatggactcccgtcacccggataccctgctggcggcacgttctggtagtccgctggtgattggcctggggatgggcgaaaactttatcgcttctgaccagctggcgctgttgccggtgacccgtcgctttatcttccttgaagagggcgatattgcggaaatcactcgccgttcggtaaacatcttcgataaaactggcgcggaagtaaaacgtcaggatatcgaatccaatctgcaatatgacgcgggcgataaaggcatttaccgtcactacatgcagaaagagatctacgaacagccgaacgcgatcaaaaacacccttaccggacgcatcagccacggtcaggttgatttaagcgagctgggaccgaacgccgacgaactgctgtcgaaggttgagcatattcagatcctcgcctgtggtacttcttataactccggtatggtttcccgctactggtttgaatcgctagcaggtattccgtgcgacgtcgaaatcgcctctgaattccgctatcgcaaatctgccgtgcgtcgtaacagcctgatgatcaccttgtcacagtctggcgaaaccgcggataccctggctggcctgcgtctgtcgaaagagctgggttaccttggttcactggcaatctgtaacgttccgggttcttctctggtgcgcgaatccgatctggcgctaatgaccaacgcgggtacagaaatcggcgtggcatccactaaagcattcaccactcagttaactgtgctgttgatgctggtggcgaagctgtctcgcctgaaaggtctggatgcctccattgaacatgacatcgtgcatggtctgcaggcgctgccgagccgtattgagcagatgctgtctcaggacaaacgcattgaagcgctggcagaagatttctctgacaaacatcacgcgctgttcctgggccgtggcgatcagtacccaatcgcgctggaaggcgcattgaagttgaaagagatctcttacattcacgctgaagcctacgctgctggcgaactgaaacacggtccgctggcgctaattgatgccgatatgccggttattgttgttgcaccgaacaacgaattgctggaaaaactgaaatccaacattgaagaagttcgcgcgcgtggcggtcagttgtatgtcttcgccgatcaggatgcgggttttgtaagtagcgataacatgcacatcatcgagatgccgcatgtggaagaggtgattgcaccgatcttctacaccgttccgctgcagctgctggcttaccatgtcgcgctgatcaaaggcaccgacgttgaccagccgcgtaacctggcaaaatcggttacggttgagtaa

SEQ ID NO: 20570 - DNA, 1371 bp, Escherichia coli
atgttgaataatgctatgagcgtagtgatccttgccgcaggcaaaggcacgcgcatgtattccgatcttccgaaagtgctgcatacccttgccgggaaagcgatggttcagcatgtcattgatgctgcgaatgaattaggcgcagcgcacgttcacctggtgtacggtcacggcggcgatctgctaaaacaggcgctgaaagacgacaaccttaactgggtgcttcaggcagagcagctgggtacgggtcatgcaatgcagcaggccgcacctttctttgccgatgatgaagacattttaatgctctacggcgacgtgccgctgatctctgtcgaaacactccagcgtctgcgtgatgctaaaccgcagggtggcattggtctgctgacggtgaaactggatgatccgaccggttatggacgtatcacccgtgaaaacggcaaagttaccggcattgttgagcacaaagatgccaccgacgagcagcgtcagattcaggagatcaacaccggcattctgattgccaacggcgcagatatgaaacgctggctggcgaagctgaccaacaataatgctcagggcgaatactacatcaccgacattattgcgctggcgtatcaggaagggcgtgaaatcgtcgccgttcatccgcaacgtttaagcgaagtagaaggcgtgaataaccgcctgcaactctcccgtctggagcgtgtttatcagtccgaacaggctgaaaaactgctgttagcaggcgttatgctgcgcgatccagcgcgttttgatctgcgtggtacgctaactcacgggcgcgatgttgaaattgatactaacgttatcatcgagggcaacgtgactctcggtcatcgcgtgaaaattggcaccggttgcgtgattaaaaacagcgtgattggcgatgattgcgaaatcagtccgtataccgttgtggaagatgcgaatctggcagcggcctgtaccattggcccgtttgcccgtttgcgtcctggtgctgagttgctggaaggtgctcacgtcggtaacttcgttgagatgaaaaaagcgcgtctgggtaaaggctcgaaagctggtcatctgacttacctgggcgatgcggaaattggcgataacgttaacatcggcgcgggaaccattacctgcaactacgatggtgcgaataaatttaagaccattatcggcgacgatgtgtttgttggttccgacactcagctggtggccccggtaacagtaggcaaaggcgcgaccattgctgcgggtacaactgtgacgcgtaatgtcggcgaaaatgcattagctatcagccgtgtgccgcagactcagaaagaaggctggcgtcgtccggtaaagaaaaagtga

SEQ ID NO: 20571 - DNA, 534 bp, Escherichia coli
atgtctgaatttattacggtagctcgcccctacgccaaagcagcttttgactttgccgtcgaacaccaaagtgtagaacgctggcaggacatgctggcgtttgccgccgaggtaaccaaaaacgaacaaatggcagagcttctctctggcgcgcttgcgccagaaacgctcgccgagtcgtttatcgcagtttgtggtgagcaactggacgaaaacggtcagaacctgattcgggttatggctgaaaatggtcgtcttaacgcgctcccggatgttctggagcagtttattcacctgcgtgccgtgagtgaggctaccgctgaggtagacgtcatttccgctgccgcactgagtgaacaacagctcgcgaaaatttctgctgcgatggaaaaacgtctgtcacgcaaagttaagctgaattgcaaaatcgataagtctgtaatggcaggcgttatcatccgagcgggtgatatggtcattgatggcagcgtacgcggtcgtcttgagcgccttgcagacgtcttgcagtcttaa

SEQ ID NO: 20572 - DNA, 471 bp, Escherichia coli
gtgaatcttaacgcaacaatcctcggccaggccatcgcgtttgtcctgttcgttctgttctgcatgaagtacgtatggccgccattaatggcagccatcgaaaaacgtcaaaaagaaattgctgacggccttgcttccgcagaacgagcacataaggaccttgaccttgcaaaggccagcgcgaccgaccagctgaaaaaagcgaaagcggaagcccaggtaatcatcgagcaggcgaacaaacgccgctcgcagattctggacgaagcgaaagctgaggcagaacaggaacgtactaaaatcgtggcccaggcgcaggcggaaattgaagccgagcgtaaacgtgcccgtgaagagctgcgtaagcaagttgctatcctggctgttgctggcgccgagaagatcatcgaacgttccgtggatgaagctgctaacagcgacatcgtggataaacttgtcgctgaactgtaa

SEQ ID NO: 20573 - DNA, 624 bp, Escherichia coli
gtgctcaacaaactctccttactgctgaaagacgcaggtatttcgcttaccgatcaccagaaaaaccagcttattgcctacgtgaatatgctgcataaatggaacaaagcgtacaacctgacttcggtccgcgatcctaatgagatgctggtacgccatattctcgatagcattgtggtggcaccgtatctgcaaggtgaacggtttatcgatgtcggcaccggaccaggactgccaggcattccactctctatcgtgcgtcctgaagcccatttcactctgttggatagccttggtaaacgcgtgcgtttccttcgtcaggtgcaacatgagcttaaactggagaatattgaaccagtacagagcagggtagaagagtttccttcagagccgccatttgatggcgtaattagccgcgcttttgcctctctgaacgatatggtgagctggtgccaccatcttcctggtgagcaaggccgtttctacgcgctgaaagggcaaatgccggaagatgaaatcgctttgttgcccgaagaatatcaggtcgaatcagtggttaaacttcaggttccagccctggatggcgaacgtcatctggtggtgattaaagcaaataaaatttaa

SEQ ID NO: 20574 - DNA, 1890 bp, Escherichia coli
atgttttatccggatccttttgacgtcatcatcattggcgggggtcatgcaggcaccgaggccgcgatggccgcggcgcgtatgggtcaacagactctgcttttgacacacaatatcgacactctggggcagatgagctgcaacccggcgatcggcggtattgggaagggacatctggtaaaagaagtggatgcactcggcggtctgatggcgaaagcgatcgatcaggcgggtatccagtttaggatactaaacgcaagcaaaggaccggcggttcgcgctacccgagctcaggcggatcgtgtgctctaccgtcaggcggtacgtacggcgctggagaaccaaccgaacctgatgatcttccagcaggcggttgaagatcttattgtcgaaaacgatcgcgtggtcggtgctgttacccaaatgggactgaagttccgtgccaaagccgtcgtgctcaccgttgggacgttcctcgacggtaaaattcatatcggtctggataattacagcggtggccgtgctggtgatccgccgtccattccgctttctcgccgtttgcgtgaactgccgctgcgcgttggtcgtctgaaaaccgggacaccaccgcgtattgatgctcgaaccatcgactttagcgtactggcgcaacagcatggcgataacccaatgccggtattctcgtttatgggcaatgcgtcccagcatccccagcaggtgccgtgttatatcactcataccaacgagaaaacccatgatgtgatccgcagtaacctcgatcgtagcccaatgtacgcaggggtgatcgaaggtgtcggcccacgctactgcccgtcgatcgaagacaaagtcatgcgcttcgccgacagaaatcagcatcagatcttccttgaaccggaaggactgacctctaatgaaatttatccgaacggtatctccaccagcctgccgttcgatgtgcagatgcaaatcgtccgctctatgcaggggatggaaaacgcgaagatcgtgcgtccgggttatgccattgagtatgacttcttcgatcctcgcgacctgaaaccgacgctggagagcaagtttatccaggggctgttctttgctggtcagattaacggcactaccggttacgaagaagccgctgcgcaaggtttgctggccggtcttaacgctgcccgtctgtctgctgacaaagaaggttgggctccggcacgttctcaggcgtatctcggcgtactagttgatgacctgtgcactttaggaaccaaagaaccgtatcgtatgtttacttcgcgcgcagaatatcgtctgatgctacgcgaagataatgcggatctgcgtttgactgaaatcggtcgtgaactgggcctggtggatgacgaacgttgggcgcgctttaacgagaaacttgagaatatcgagcgtgagcgtcagcgtctgaaatcgacctgggtaaccccgtcggcggaagctgcagccgaagtgaatgctcacctgactgcgccgctttcccgtgaagccagtggtgaagatctgctgcgtcgtccggaaatgacttatgaaaaattaaccacgctgacgccgtttgcccctgcgttgacagacgaacaggcggcggaacaggttgagattcaggttaaatacgaaggttatatcgcgcgccagcaagatgagatcgaaaagcagctgcgtaacgagaacaccctgctacccgcgacactggattaccgccaggtatccggtctttctaacgaagtgatcgccaaacttaacgatcacaaaccagcctctatcggccaagcttcgcgtatttctggcgtcacgcctgcggccatctccattctgctggtgtggctgaaaaaacagggtatgctgcgtcgtagcgcataa

SEQ ID NO: 20575 - DNA, 1476 bp, Escherichia coli
atggctaactacttcaatacactgaatctgcgccagcagctggcacagctgggcaaatgtcgctttatgggccgcgatgaattcgccgatggcgcgagctaccttcagggtaaaaaagtagtcatcgtcggctgtggcgcacagggtctgaaccagggcctgaacatgcgtgattctggtctcgatatctcctacgctctgcgtaaagaagcgattgccgagaagcgcgcgtcctggcgtaaagcgaccgaaaatggttttaaagtgggtacttacgaagaactgatcccacaggcggatctggtgattaacctgacgccggacaagcagcactctgatgtagtgcgcaccgtacagccactgatgaaagacggcgcggcgctgggctactcgcacggtttcaacatcgtcgaagtgggcgagcagatccgtaaagatatcaccgtagtgatggttgcgccgaaatgcccaggcaccgaagtgcgtgaagagtacaaacgtgggttcggcgtaccgacgctgattgccgttcacccggaaaacgatccgaaaggcgaaggcatggcgattgccaaagcctgggcggctgcaaccggtggtcaccgtgcgggtgtgctggaatcgtccttcgttgcggaagtgaaatctgacctgatgggcgagcaaaccatcctgtgcggtatgttgcaggctggctctctgctgtgcttcgacaagctggtggaagaaggtaccgatccagcatacgcagaaaaactgattcagttcggttgggaaaccatcaccgaagcactgaaacagggcggcatcaccctgatgatggaccgtctctctaacccggcgaaactgcgtgcttatgcgctttctgaacagctgaaagagatcatggcacccctgttccagaaacatatggacgacatcatctccggcgaattctcttccggtatgatggcggactgggccaacgatgataagaaactgctgacctggcgtgaagagaccggcaaaaccgcgtttgaaaccgcgccgcagtatgaaggcaaaatcggcgagcaggagtacttcgataaaggcgtactgatgattgcgatggtgaaagcgggcgttgaactggcgttcgaaaccatggtcgattccggcatcattgaagagtctgcatattatgaatcactgcacgagctgccgctgattgccaacaccatcgcccgtaagcgtctgtacgaaatgaacgtggttatctctgataccgctgagtacggtaactatctgttctcttacgcttgtgtgccgttgctgaaaccgtttatggcagagctgcaaccgggcgacctgggtaaagctattccggaaggcgcggtagataacgggcaactgcgtgatgtgaacgaagcgattcgcagccatgcgattgagcaggtaggtaagaaactgcgcggctatatgacagatatgaaacgtattgctgttgcgggttaa

SEQ ID NO: 20576 - DNA, 1656 bp, Escherichia coli
atggaattttcgttttcacccaaacgtcttgttgttgctgtcgccgccgctcttcctctcatggccagcgcagcagataccccgtcaactgccaccgcacgcaaaggctttgccggatacgatcacccaaaccagtatctggttaaaccggcgaccactattgccgacaatatgatgccagtaatgcagcatccggcgcaggataaagaaacccagcagaagctggcagaacttgagaaaaaaaccggtaagaaaccgaatgtggttgttttcttgctggacgatgtgggctggatggacgtcggttttaacggtggcggcgtggcggtgggtaaccctacaccagatatcgacgccgttgccagccaggggctgattttaacttcggcgtattctcaaccaagctcttccccaacccgcgccaccattctcaccggacaatactccatccaccacggcattctgatgccgccaatgtacgggcaaccgggcgggctgcaagggttaaccacgctgccgcagttgctgcacgatcagggctacgtcactcaggccatcggaaaatggcatatgggggaaaacaaagagtcgcagccgcagaacgttggctttgatgatttccgtggctttaactcggtgtctgatatgtacaccgaatggcgcgacgttcacgtcaatccggaagtggccctgagtccggaccgttctgaatacatcaagcaattaccgttcagcaaagatgacgttcatgcggtgcgcggcggcgaacaacaggccattgccgacattacgccgaaatatatggaagatctggatcaacgctggatggactatggcgttaagttcctcgacaagatggcgaagagcgataaaccattcttcctctactacggcactcgtggctgccacttcgataactacccaaatgcgaaatatgcgggtagctctccggcacgcacctcgtatggcgactgcatggtggagatgaacgatgtgttcgctaatctgtataaaacactggagaaaaacggtcagcttgataacacgctgatcgtctttacctccgataacggaccggaagccgaagtaccgccgcacggacgcaccccgttccgtggtgcgaaaggttcgacctgggaaggcggcgttcgcgtaccgactttcgtttactggaaagggatgatccaaccgcgtaaatctgacggtattgtcgatctggcagatctcttccctaccgcgctggatctggcagggcatcctggagcgaaagtggcgaatttagtgccgaaaaccacctttatcgatggtgtggaccagacatccttcttcctgggaacaaatggtcagtctaaccgtaaggccgagcactacttcctcaacggtaaactcgctgctgtgcgtatggatgagttcaagtatcacgtcctgattcagcaaccttacgcttatacccagagcggatatcagggtggattcaccggcacagtaatgcaaacggcgggatcgtcggtgtttaacctctacaccgatccgcaggaaagcgactccatcggcgtgcgccatattccgatgggtgtaccgctacagaccgaaatgcacgcgtatatggagatcctgaaaaaatatccaccacgcgcgcagattaaatctgactaa

SEQ ID NO: 20577 - DNA, 963 bp, Escherichia coli
atgataatgacggtaacaagcatgttagacaatgttttaagaattgccacacgccaaagcccacttgcactctggcaggcacactatgtcaaagacaagttgatggcgagccatccgggcctggtcgttgaactggtaccgatggtgacgcgcggcgatgtgattcttgatacgccgctggcgaaagtaggcggaaaaggcttatttgtaaaagagctggaagtcgcgctcctcgaaaatcgcgccgatatcgccgtacactcaatgaaagatgtgccggttgaattcccgcaaggtctgggactggtcactatttgtgagcgtgaagatcctcgcgatgcctttgtgtccaataactatgacagtctggatgcgttaccggcaggcagtatcgtcgggacgtccagtttacgtcgccagtgccaactggctgaacgccgtccggatctgattatccgctccctgcgcggcaacgtcggcactcgcctgagcaaactggataacggcgaatacgatgccatcattcttgccgtagccggactaaaacgtttaggtctggagtcacgtattcgcgccggcttgccacccgagatttctcttccggcggtaggacaaggtgcggtgggtattgaatgccgccttgatgattcacgcactcgcgagctgcttgccgcgctgaatcaccacgaaactgcactgcgcgttaccgcagaacgcgccatgaatacccgtctcgaaggcggatgtcaggtgccaattggtagctacgccgagcttattgatggcgaaatctggctgcgtgcgctggtcggccggccggacggttcgcagattattcgcggtgaacgccgcggtgcgccgcaagatgccgaacaaatggggatttcgctggcagaagagctactgaataacggcgcgcgcgagatcctcgctgaagtctataacggagacgccccggcatga

SEQ ID NO: 20578 - DNA, 1023 bp, Escherichia coli
atgtttcagcagcaaaaagactgggaaacaagagaaaacgcgtttgctgcttttaccatgggaccgctgactgatttctggcgtcagcgtgatgaagcagagtttactggtgtggatgacattccggtgcgctttgtccgttttcgcgcacagcaccatgaccgggtggtagtcatctgcccggggcgtattgagagctacgtaaaatatgcggaactggcctatgacctgttccatttggggtttgatgtcttaatcatcgaccatcgcgggcagggacgttccggtcgcctgttagccgatccgcatctcgggcatgttaatcgctttaatgattatgttgatgatctggcggcattctggcagcaggaggttcagcccggtccgtggcgtaaacgctatatactggcacattcgatgggcggtgcgatctccacattatttctgcaacgccatccaggtgtatgtgacgccattgcgctaactgcgccaatgtttgggatcgtgattcgtatgccgtcatttatggcacggcagatcctcaactgggccgaagcgcatccacgtttccgtgatggctatgcaataggcaccgggcgctggcgcgcgttgccgtttgctatcaacgtactgacccacagcagacagcgatatcgacgtaacttacgcttctatgctgatgacccaacgattcgcgtcggtgggccgacctaccattgggtacgcgaaagtattctggctggcgaacaggtgttagccggtgcgggtgatgacgccacgccaacgcttctcttgcaggctgaagaggaacgcgtggtggataaccgcatgcatgaccgtttttgtgaactccgcaccgccgcgggccatcctgtcgaaggaggacggccgttggtaattaaaggtgcttaccatgagatcctttttgaaaaggacgcaatggcctcagtcgcgctccacgccatcgttgattttttcaacaggcataactcacccagcggaaaccgctctacagaggtttaa

SEQ ID NO: 20579 - DNA, 516 bp, Escherichia coli
gtgtttgcgaccggtcgtcaccacgttgatgtggggcaaattcgcgataatctggagattaagtcttacatgattacctccaatggtgcgcgcgttcacgatctggatggtaatctgatttttgctcataacctggatcgcgacattgccagcgatctgtttggcgtagtcaacgacaatccggacatcattactaacgtttatcgcgacgacgaatggtttatgaatcgccatcgcccggaagagatgcgcttttttaaagaagcggtgttccaatatgcgctgtatgagcctggattactggagccggaaggcgtcagcaaagtgttcttcacctgcgattcccatgaacaactgctgccgctggagcaggcgattaacgctcgttggggcgatcgcgtcaacgtcagtttctctaccttaacctgtctggaagtgatggcgggcggcgtttcaaaggccatgcgctggaaggctggcgaactggctacagctgaaggattgattgcgttgtga

SEQ ID NO: 20580 - DNA, 756 bp, Escherichia coli
atggtggataagtcacaagaaacgacgcactttggttttcagaccgtcgcgaaggaacaaaaagcggatatggtcgcccacgttttccattccgtggcatcaaaatacgatgtcatgaatgatttgatgtcatttggtattcatcgtttgtggaagcgattcacgattgattgcagcggcgtacgccgtgggcagaccgtgctggatctggctggtggcaccggcgacctgacagcgaaattctcccgcctggtcggagaaactggcaaagtggtccttgctgatatcaatgaatccatgcccaaaatgggccgcgagaagctgcgtaatatcggtgtgattggcaacgttgagtatgttcaggcgaacgctgaggcgctgccgttcccggataacacctttgattgcatcaccatttcgtttggtctgcgtaacgtcaccgacaaagataaagcactgcgttcaatgtatcgcgtgctgaaacccggcggccgcctgctggtgcttgagttctcgaagccaattatcgagccgctgagcaaagcctatgatgcatactccttccatgtgctgccgcgtattggctcactggtcgcgaacgacgccgacagctaccgttatctggcagaatccatccgtatgcatcccgatcaggataccctgaaagccatgatgcaggatgccggattcgaaagtgtcgactactacaatctgacggcaggggttgtggcgctgcatcgtggttataagttctga

SEQ ID NO: 20581 - DNA, 1164 bp, Escherichia coli
atggaacaggttgtcattgtcgatgcaattcgcaccccgatgggccgttcgaagggcggtgcttttcgtaacgtgcgtgcagaagatctctccgctcatttaatgcgtacgctgctggcgcgtaacccggcgctggaagcggcggccctcgacgatatttactggggttgtgtgcagcagacgctggagcagggttttaatatcgcccgtaacgcggcgctgctggcagaagtaccacactctgtcccggcggttaccgttaatcgcttgtgtggttcatccatgcaggcactgcatgacgcagcacgaatgatcatgactggcgatgcgcaggcatgtctggttggcggcgtggagcatatgggccatgtgccgatgagtcacggcgtcgattttcaccccggcctgagccgcaatgtcgccaaagcggcgggcatgatgggcttaacggcagaaatgctggcgcgtatgcacggtatcagccgtgaaatgcaggatgcctttgccgcgcggtcacacgcccgcgcctgggccgccacgcagtcggccgcatttaaaaatgaaatcatcccgaccggtggtcacgatgccgacggcgtcctgaagcagtttaattacgacgaagtgattcgcccggaaaccaccgtggaagccctcgccacgctgcgtccggcgtttgatccagtaaacggtatggtaacggcgggcacatcttctgcactttccgatggcgcagctgccatgctggtgatgagtgaaagccgcgcccatgaattaggtcttaagccgcgcgctcgtgtgcgttcgatggcggtcgttggttgtgacccatcgattatgggttacggcccggttccggcctcgaaactggcgctgaaaaaagcggggctttctgccagcgatatcggcgtgtttgaaatgaacgaagcctttgccgcgcagatcctgccatgtattaaagatctgggactaattgagcagattgacgagaagatcaacctcaacggtggcgcgatcgcgctgggtcatccgctgggttgttccggtgcgcgtatcagcaccacgctgctgaatctgatggaacgcaaagacgttcagtttggtctggcgacgatgtgtatcggtctgggtcagggtattgcgacggtgtttgagcgggtttaa

SEQ ID NO: 20582 - DNA, 2190 bp, Escherichia coli
atgctttacaaaggcgacaccctgtaccttgactggctggaagatggcattgccgaactggtatttgatgccccaggttcagttaataaactcgacactgcgaccgtcgccagcctcggcgaggccatcggcgtgctggaacagcaatcagatctaaaagggctgctgctgcgttcgaacaaagcagcctttatcgtcggtgctgatatcaccgaatttttgtccctgttcctcgttcctgaagaacagttaagtcagtggctgcactttgccaatagcgtgtttaatcgcctggaagatctgccggtgccgaccattgctgccgtcaatggctatgcgctgggcggtggctgcgaatgcgtgctggcgaccgattatcgtctggcgacgccggatctgcgcatcggtctgccggaaaccaaactgggcatcatgcctggctttggcggttctgtacgtatgccacgtatgctgggcgctgacagtgcgctggaaatcattgccgccggtaaagatgtcggcgcggatcaggcgctgaaaatcggtctggtggatggcgtagtcaaagcagaaaaactggttgaaggcgcaaaggcggttttacgccaggccattaacggcgacctcgactggaaagcaaaacgtcagccgaagctggaaccactaaaactgagcaagattgaagccaccatgagcttcaccatcgctaaagggatggtcgcacaaacagcggggaaacattatccggcccccatcaccgcagtaaaaaccattgaagctgcggcccgttttggtcgtgaagaagccttaaacctggaaaacaaaagttttgtcccgctggcgcataccaacgaagcccgcgcactggtcggcattttccttaacgatcaatatgtaaaaggcaaagcgaagaaactcaccaaagacgttgaaaccccgaaacaggccgcggtgctgggtgcaggcattatgggcggcggcatcgcttaccagtctgcgtggaaaggcgtgccggttgtcatgaaagatatcaacgacaagtcgttaaccctcggcatgaccgaagccgcgaaactgctgaacaagcagcttgagcgcggcaagatcgatggtctgaaactggctggcgtgatctccacaatccacccaacgctcgactacgccggatttgaccgcgtggatattgtggtagaagcggttgttgaaaacccgaaagtgaaaaaagccgtactggcagaaaccgaacaaaaagtacgccaggataccgtgctggcgtctaacacttcaaccattcctatcagcgaactggccaacgcgctggaacgcccggaaaacttctgcgggatgcacttctttaacccggtccaccgaatgccgttggtagaaattattcgcggcgagaaaagctccgacgaaaccatcgcgaaagttgtcgcctgggcgagcaagatgggcaagacgccgattgtggttaacgactgccccggcttctttgttaaccgcgtgctgttcccgtatttcgccggtttcagccagctgctgcgcgacggcgcggatttccgcaagatcgacaaagtgatggaaaaacagtttggctggccgatgggcccggcatatctgctggacgttgtgggcattgataccgcgcatcacgctcaggctgtcatggcagcaggcttcccgcagcggatgcagaaagattaccgcgatgccatcgacgcgctgtttgatgccaaccgctttggtcagaagaacggcctcggtttctggcgttataaagaagacagcaaaggtaagccgaagaaagaagaagacgccgccgttgaagacctgctggcagaagtgagccagccgaagcgcgatttcagcgaagaagagattatcgcccgcatgatgatcccgatggtcaacgaagtggtgcgctgtctggaggaaggcattatcgccactccggcggaagcggatatggcgctggtctacggcctgggcttccctccgttccacggcggcgcgttccgctggctggacaccctcggtagcgcaaaatacctcgatatggcacagcaatatcagcacctcggcccgctgtatgaagtgccggaaggtctgcgtaataaagcgcgtcataacgaaccgtactatcctccggttgagccagcccgtccggttggcgacctgaaaacggcttaa

SEQ ID NO: 20583 - DNA, 2787 bp, Escherichia coli
atggttcagatcccccaaaatccacttatccttgtagatggttcatcttatctttatcgcgcatatcacgcgtttcccccgctgactaacagcgcaggcgagccgaccggtgcgatgtatggtgtcctcaacatgctgcgcagtctgatcatgcaatataaaccgacgcatgcagcggtggtctttgacgccaagggaaaaacctttcgtgatgaactgtttgaacattacaaatcacatcgcccgccaatgccggacgatctgcgtgcacaaatcgaacccttgcacgcgatggttaaagcgatgggactgccgctgctggcggtttctggcgtagaagcggacgacgttatcggtactctggcgcgcgaagccgaaaaagccgggcgtccggtgctgatcagcactggcgataaagatatggcgcagctggtgacgccaaatattacgcttatcaataccatgacgaataccatcctcggaccggaagaggtggtgaataagtacggcgtgccgccagaactgatcatcgatttcctggcgctgatgggtgactcctctgataacattcctggcgtaccgggcgtcggtgaaaaaaccgcgcaggcattgctgcaaggtcttggcggactggatacgctgtatgccgagccagaaaaaattgctgggttgagcttccgtggcgcgaaaacaatggcagcgaagctcgagcaaaacaaagaagttgcttatctctcataccagctggcgacgattaaaaccgacgttgaactggagctgacctgtgaacaactggaagtgcagcaaccggcagcggaagagttgttggggctgttcaaaaagtatgagttcaaacgctggactgctgatgtcgaagcgggcaaatggttacaggccaaaggggcaaaaccagccgcgaagccacaggaaaccagtgttgcagacgaagcaccagaagtgacggcaacggtgatttcttatgacaactacgtcaccatccttgatgaagaaacactgaaagcgtggattgcgaagctggaaaaagcgccggtatttgcatttgataccgaaaccgacagccttgataacatctctgctaacctggtcgggctttcttttgctatcgagccaggcgtagcggcatatattccggttgctcatgattatcttgatgcgcccgatcaaatctctcgcgagcgtgcactcgagttgctaaaaccgctgctggaagatgaaaaggcgctgaaggtcgggcaaaacctgaaatacgatcgcggtattctggcgaactacggcattgaactgcgtgggattgcgtttgataccatgctggagtcctacattctcaatagcgttgccgggcgtcacgatatggacagcctcgcggaacgttggttgaagcacaaaaccatcacttttgaagagattgctggtaaaggcaaaaatcaactgacctttaaccagattgccctcgaagaagccggacgttacgccgccgaagatgcagatgtcaccttgcagttgcatctgaaaatgtggccggatctgcaaaaacacaaagggccgttgaacgtcttcgagaatatcgaaatgccgctggtgccggtgctttcacgcattgaacgtaacggtgtgaagatcgatccgaaagtgctgcacaatcattctgaagagctcacccttcgtctggctgagctggaaaagaaagcgcatgaaattgcaggtgaggaatttaacctttcttccaccaagcagttacaaaccattctctttgaaaaacagggcattaaaccgctgaagaaaacgccgggtggcgcgccgtcaacgtcggaagaggtactggaagaactggcgctggactatccgttgccaaaagtgattctggagtatcgtggtctggcgaagctgaaatcgacctacaccgacaagctgccgctgatgatcaacccgaaaaccgggcgtgtgcatacctcttatcaccaggcagtaactgcaacgggacgtttatcgtcaaccgatcctaacctgcaaaacattccggtgcgtaacgaagaaggtcgtcgtatccgccaggcgtttattgcgccagaggattatgtgattgtctcagcggactactcgcagattgaactgcgcattatggcgcatctttcgcgtgacaaaggcttgctgaccgcattcgcggaaggaaaagatatccaccgggcaacggcggcagaagtgtttggtttgccactggaaaccgtcaccagcgagcaacgccgtagcgcgaaagcgatcaactttggtctgatttatggcatgagtgctttcggtctggcgcggcaattgaacattccacgtaaagaagcgcagaagtacatggacctttacttcgaacgctaccctggcgtgctggagtatatggaacgcacccgtgctcaggcgaaagagcagggctacgttgaaacgctggacggacgccgtctgtatctgccggatatcaaatccagcaatggtgctcgtcgtgcagcggctgaacgtgcagccattaacgcgccaatgcagggaaccgccgccgacattatcaaacgggcgatgattgccgttgatgcgtggttacaggctgagcaaccgcgtgtacgtatgatcatgcaggtacacgatgaactggtatttgaagttcataaagatgatgttgatgccgtcgcgaagcagattcatcaactgatggaaaactgtacccgtctggatgtgccgttgctggtggaagtggggagtggcgaaaactgggatcaggcgcactaa

SEQ ID NO: 20584 - DNA, 1410 bp, Escherichia coli
atgtccgctgaacacgtactgacgatgctgaacgagcacgaagtgaagtttgttgatttgcgcttcaccgatactaaaggtaaagaacagcacgtcactatccctgctcatcaggtgaatgctgaattcttcgaagaaggcaaaatgtttgacggctcctcgattggcggctggaaaggcattaacgagtccgacatggtgctgatgccagacgcatccaccgcagtgattgacccgttcttcgccgactccaccctgattatccgttgcgacatccttgaacctggcaccctgcaaggctatgaccgtgacccgcgctccattgcgaagcgcgccgaagattacctgcgttccactggcattgccgacaccgtactgttcgggccagaacctgaattcttcctgttcgatgacatccgtttcggatcatctatctccggttcccacgttgctatcgacgatatcgaaggcgcatggaactcctccacccaatacgaaggtggtaacaaaggtcaccgtccggcagtgaaaggcggttacttcccggttccaccggtagactcggctcaggatattcgttctgaaatgtgtctggtgatggaacagatgggtctggtggttgaagcccatcaccacgaagtagcgactgctggtcagaacgaagtggctacccgcttcaataccatgaccaaaaaagctgacgaaattcagatctacaaatatgttgtgcacaacgtagcgcaccgcttcggtaaaaccgcgacctttatgccaaaaccgatgttcggtgataacggctccggtatgcactgccacatgtctctgtctaaaaacggcgttaacctgttcgcaggcgacaaatacgcaggtctgtctgagcaggcgctgtactacattggcggcgtaatcaaacacgctaaagcgattaacgccctggcaaacccgaccaccaactcttataagcgtctggtcccgggctatgaagcaccggtaatgctggcttactctgcgcgtaaccgttctgcgtctatccgtattccggtggtttcttctccgaaagcacgtcgtatcgaagtacgtttcccggatccggcagctaacccgtacctgtgctttgctgccctgctgatggccggtcttgatggtatcaagaacaagatccatccgggcgaagccatggacaaaaacctgtatgacctgccgccagaagaagcgaaagagatcccacaggttgcaggctctctggaagaagcactgaacgaactggatctggaccgcgagttcctgaaagccggtggcgtgttcactgacgaagcaattgatgcgtacatcgctctgcgtcgcgaagaagatgaccgcgtgcgtatgactccgcatccggtagagtttgagctgtactacagcgtctaa

SEQ ID NO: 20585 - DNA, 879 bp, Escherichia coli
atgaataagtacaccatcaacgacattacgcgcgcatcgggcggttttgccatgctggcggtcgatcagcgcgaagccatgcgcatgatgtttgccgcggctggggcacccgctccggtagccgatagcgttttaactgatttcaaagttaacgctgcaaaggccctctcgccttatgcctcggcgattctggtagatcaacaattctgctaccgccaggtggttgagcaaaacgcgattgccaaaagttgcgccatgattgtcgccgccgatgagttcattcctggcaacggtattccggtcgatagcgtggttattgaccgcaaaatcaatccgctacagatcaaacaagacggtggcaaagccttaaaactgctggtgctgtggcgtagtgatgaagatgcgcagcaacgtctggatatggtgaaagagttcaacgaactgtgccactcacacggtctggtaagcatcattgagccagtcgtccgcccaccgcgtcgtggcgataaattcgatcgcgaacaagcgatcatcgatgccgccaaagagctgggcgacagtggcgctgacctctacaaagttgaaatgccgctttatggcaaaggtccgcaacaagagcttctctgtgcttcacaacgtctgaatgaccatatcaatatgccatgggtgatcctctcttccggtgtcgacgaaaaactgttcccgcgtgccgtacgcgtggcaatgacggcgggcgcatcgggattcctggcaggccgtgcagtctgggcatcggtcgtcggtttaccagacaacgagctgatgctgcgtgacgtttgcgcaccgaaattacaacaacttggcgatatcgtcgacgaaatgatggctaaacgccgctaa

SEQ ID NO: 20586 - DNA, 699 bp, Escherichia coli
atgaataaaatcctgttagttgatgatgaccgagagctgacttccctattaaaggagctgctcgagatggaaggcttcaacgtgattgttgcccacgatggggaacaggcgcttgatcttctggacgacagcattgatttacttttgcttgacgtaatgatgccgaagaaaaatggtatcgacacattaaaagcacttcgccagacacaccagacgcctgtcattatgttgacggcgcgcggcagtgaacttgatcgcgttctcggccttgagctgggcgcagatgactatctcccgaaaccgtttaatgatcgtgagctggtggcacgtattcgcgcgatcctgcgccgttcgcactggagcgagcaacagcaaaacaacgacaacggttcaccgacactggaagttgatgccttagtgctgaatccaggccgtcaggaagccagcttcgacgggcaaacgctggagttaaccggtactgagtttaccctgctctatttgctggcacagcatctgggtcaggtggtttcccgtgaacatttaagccaggaagtgttgggcaaacgcctgacgcctttcgaccgcgctattgatatgcacatttccaacctgcgtcgtaaactgccggatcgtaaagatggtcacccgtggtttaaaaccttgcgtggtcgcggctatctgatggtttctgcttcatga

SEQ ID NO: 20587 - DNA, 963 bp, Escherichia coli
atgattaagaaaatcggtgtgttgacaagcggcggtgatgcgccaggcatgaacgccgcaattcgcggggttgttcgttctgcgctgacagaaggtctggaagtaatgggtatttatgacggctatctgggtctgtatgaagaccgtatggtacagctagaccgttacagcgtgtctgacatgatcaaccgtggcggtacgttcctcggttctgcgcgtttcccggaattccgcgacgagaacatccgcgccgtggctatcgaaaacctgaaaaaacgtggtatcgacgcgctggtggttatcggcggtgacggttcctacatgggtgcaatgcgtctgaccgaaatgggcttcccgtgcatcggtctgccgggcactatcgacaacgacatcaaaggcactgactacactatcggtttcttcactgcgctgagcaccgttgtagaagcgatcgaccgtctgcgtgacacctcttcttctcaccagcgtatttccgtggtggaagtgatgggccgttattgtggagatctgacgttggctgcggccattgccggtggctgtgaattcgttgtggttccggaagttgaattcagccgtgaagacctggtaaacgaaatcaaagcgggtatcgcgaaaggtaaaaaacacgcgatcgtggcgattaccgaacatatgtgtgatgttgacgaactggcgcatttcatcgagaaagaaaccggtcgtgaaacccgcgcaactgtgctgggccacatccagcgcggtggttctccggtgccttacgaccgtattctggcttcccgtatgggcgcttacgctatcgatctgctgctggcaggttacggcggtcgttgtgtaggtatccagaacgaacagctggttcaccacgacatcatcgacgctatcgaaaacatgaagcgtccgttcaaaggtgactggctggactgcgcgaaaaaactgtattaa

SEQ ID NO: 20588 - DNA, 531 bp, Escherichia coli
gtgacaactatagtaagcgtacgccgtaacggccatgtggtcatcgctggtgatggtcaggccacgttgggcaataccgtaatgaaaggcaacgtgaaaaaggtccgccgtctgtacaacgacaaagtcatcgcgggctttgcgggcggtactgcggatgcttttacgctgttcgaactgtttgaacgtaaactggaaatgcatcagggccatctggtcaaagccgccgttgagctggcaaaagactggcgtaccgatcgcatgctgcgcaaacttgaagcactgctggcagtcgcggatgaaactgcatcgcttatcatcaccggtaacggtgacgtggtgcagccagaaaacgatcttattgctatcggctccggcggcccttacgcccaggctgcggcgcgcgcgctgttagaaaacactgaacttagcgcccgtgaaattgctgaaaaggcgttggatattgcaggcgacatttgcatctataccaaccatttccacaccatcgaagaattaagctacaaagcgtaa

SEQ ID NO: 20589 - DNA, 663 bp, Escherichia coli
atggaactgtatctggacaccgctaacgtcgcagaagtcgaacgtctggcacgcatattccccattgccggggtgacaactaacccgagcattatcgctgccagcaaggagtccatatgggaagtgctgccgcgtctgcaaaaagcgattggtgatgagggcattctgtttgctcagaccatgagccgcgacgcgcaggggatggtggaagaagcgaagcgcctgcgcgacgctattccgggtattgtggtgaaaatcccggtgacttccgaaggtctggcagcaattaaaatactgaaaaaagagggtattactacacttggcactgctgtatatagcgccgcacaagggttattagccgcactggcaggggcaaaatacgttgctccgtatgttaaccgcgtagatgcccagggcggagacggcattcgtacggttcaggagctgcaaacgctgttagaaatgcacgcgccagaaagcatggtgctggcagccagctttaaaacgccgcgtcaggcgctggactgtttactggcaggatgtgaatccatcaccctgcccttagatgtagcgcaacaaatgctcaacacccctgcggtagagtcagctatagagaagttcgaacacgactggaatgccgcatttggcactactcatctctaa

SEQ ID NO: 20590 - DNA, 1335 bp, Escherichia coli
atgggcctggttaagcaaggtgcgcgcgtcgcagttatcgagcgttatcaaaatgttggcggcggttgcacccactggggcaccatcccgtcgaaagctctccgtcacgccgtcagccgcattatagaattcaatcaaaacccactttacagcgaccattcccgactgctccgctcttcttttgccgatatccttaaccatgccgataacgtgattaatcaacaaacgcgcatgcgtcagggattttacgaacgtaatcactgtgaaatattgcagggaaacgctcgctttgttgacgagcatacgttggcgctggattgcccggacggcagcgttgaaacactaaccgctgaaaaatttgttattgcctgcggctctcgtccatatcatccaacagatgttgatttcacccatccacgcatttacgacagcgactcaattctcagcatgcaccacgaaccgcgccatgtacttatctatggtgctggagtgatcggctgtgaatatgcgtcgatcttccgcggtatggatgtaaaagtggatctgatcaacacccgcgatcgcctgctggcatttctcgatcaagagatgtcagattctctctcctatcacttctggaacagtggcgtagtgattcgtcacaacgaagagtacgagaagatcgaaggctgtgacgatggtgtgatcatgcatctgaagtcgggtaaaaaactgaaagctgactgcctgctctatgccaacggtcgcaccggtaataccgattcgctggcgttacagaacattgggctagaaactgacagccgcggacagctgaaggtcaacagcatgtatcagaccgcacagccacacgtttacgcggtgggcgacgtgattggttatccgagcctggcgtcggcggcctatgaccaggggcgcattgccgcgcaggcgctggtaaaaggcgaagccaccgcacatctgattgaagatatccctaccggtatttacaccatcccggaaatcagctctgtgggcaaaaccgaacagcagctgaccgcaatgaaagtgccatatgaagtgggccgcgcccagtttaaacatctggcacgcgcacaaatcgtcggcatgaacgtgggcacgctgaaaattttgttccatcgggaaacaaaagagattctgggtattcactgctttggcgagcgcgctgccgaaattattcatatcggtcaggcgattatggaacagaaaggtggcggcaacactattgagtacttcgtcaacaccacctttaactacccgacgatggcggaagcctatcgggtagctgcgttaaacggtttaaaccgcctgttttaa

SEQ ID NO: 20591 - DNA, 1029 bp, Escherichia coli
atgaaccactccttaaaaccctggaacacatttggcattgatcataatgctcagcacattgtatgtgccgaagacgaacaacaattactcaatgcctggcagtatgcaaccgcagaaggacaacccgttcttattctgggtgaaggaagtaatgtactttttctggaggactatcgcggcacggtgatcatcaaccggatcaaaggtatcgaaattcatgatgaacctgatgcgtggtatttacatgtaggagccggagaaaactggcatcgtctggtaaaatacactttgcaggaaggtatgcctggtctggaaaatctggcattaattcctggttgtgtcggctcatcacctatccagaatattggtgcttatggcgtagaattacagcgagtttgcgcttatgttgattctgttgaactggcgacaggcaagcaagtgcgcttaactgccaaagagtgccgttttggctatcgcgacagtatttttaaacatgaataccaggaccgcttcgctattgtagccgtaggtctgcgtctgccaaaagagtggcaacctgtactaacgtatggtgacttaactcgtctggatcctacaacagtaacgccacagcaagtatttaatgcggtgtgtcatatgcgcaccaccaaactccctgatccaaaagtgaatggcaatgccggtagtttcttcaaaaaccctgttgtatctgccgaaacggctaaagcattactgtcacaatttccaacagcaccaaattacccccaggcggatggttcagtaaaactggcagcaggttggcttatcgatcagtgccagctaaaagggatgcaaataggtggggctgcggtgcaccgtcaacaggcgttagttctcattaatgaagacaatgcaaaaagcgaagatgttgtacagctggcgcatcatgtaagacagaaagttggtgaaaaatttaatgtctggcttgagcctgaagtccgctttattggtgcatcaggtgaagtgagcgcagtggagacaatttcatga

SEQ ID NO: 20592 - DNA, 846 bp, Escherichia coli
gtgagcagtgggcgcaacatatcgtgcaggatggcgaccagatcctgctttttcaggttattgcagggggttgaaatgttacgtattgcggacaaaacgtttgattcacatctgtttaccggcacagggaaattcgcttcttcacaactgatggtggaggcgatccgcgcttccggcagccagctggtgacactggcgatgaaacgtgtcgacttgcgccagcacaacgacgctatcctcgaaccgcttatcgcggcgggtgtgaccctgctgccaaatacatccggggcgaaaacagcggaagaagccattttcgccgcccatctggctcgtgaagcgttaggcacaaactggttaaaattagagattcaccctgacgcccgctggctgttgcccgatcccatcgaaaccctgaaagccgccgaaacgctggtacaacagggatttgtcgtgctgccttactgcggggccgatccggtattgtgtaaacgtctggaagaagtcggctgtgcagcggtgatgccgctcggcgcgccgattggctcgaatcagggactggaaacccgcgccatgctggagattattatccagcaggccacagtgccggtggttgtcgatgctggcatcggcgttcccagccatgccgcgcaggcgctggaaatgggggccgacgcggtgttagtgaatacggcgattgccgtcgcggacgatcccgtcaacatggcgaaggcatttcgtctggcggtagaagcaggcctactggcacgtcagtccggaccgggcagccgcagttattttgctcatgccaccagcccgctgaccggatttctggaggcatcggcatga

SEQ ID NO: 20593 - DNA, 738 bp, Escherichia coli
atgcgttatagccgccaaatcctgctcgacgatatcgctctggacgggcagcaaaaactgctcgacagccaggtgctgattatcggtctgggcgggctgggtacacctgctgcgctgtacctggcgggcgctggcgtcgggacgctggtactggcagatgacgacgatgtgcatttaagcaatctgcaacgacaaatcctctttaccactgaagatatcgatcgcccgaaatcgcaggtcagccaacagcgactgacacagttgaatcccgacattcaactgacagcattacaacaacggttaacgggtgaggcgttaaaagatgcggttgcacgggccgatgtggtgctcgactgtaccgacaatatggcgactcgccaggagattaatgccgcctgcgtggcactcaacacgccgcttatcaccgccagcgcggtcggatttggcggtcagttgatggtactgacgccgccctgggagcaggggtgttaccgctgcctgtggccagataaccaggagccagaacgcaactgccgcacggcgggcgtggttggcccggtggtcggggttatgggcactttgcaggcactggaagccattaagttattaagcggtatagagacacctgcgggagaactccgactgttcgacggtaaatcgagccagtggcgcagcctggcgttgcgccgcgccagtggttgcccggtatgcggaggaagcaatgcagatcctgtttaa

SEQ ID NO: 20594 - DNA, 636 bp, Escherichia coli
atgtatcagcctgattttcctcctgtaccttttcgttcaggactgtacccggtggtggacagcgtacagtggatcgaacgtctgttggatgcaggcgtacgtactctccagctacgcatcaaagatcggcgcgatgaagaggtggaagccgatgtcgtggcggcaattgcgctgggccgccgctataacgcgcgattgtttatcaacgattactggcggctggcgatcaagcatcaggcgtatggcgtccatttggggcaggaagatttgcaagccaccgatctcaatgccatccgcgcggcaggcctgcggctgggcgtttcgacacatgacgatatggaaatcgacgtcgcgctggcagcacgcccctcttatatcgcgctgggacatgtgttcccgacgcaaaccaaacagatgccttctgcaccgcaggggctggaacagctggcacggcatgttgagcgactggcggattatcccaccgtggcgattggcggtatcagtctggcacgcgcgcctgcggtgatagcaacgggtgtcggcagtatcgccgtcgtcagcgccattactcaagccgcagactggcgtttggcaacggcacagttgctggaaattgcaggagttggcgatgaatga

SEQ ID NO: 20595 - DNA, 1305 bp, Escherichia coli
atgaaaacccgtacacaacaaattgaagaattacagaaagagtggactcaaccgcgttgggaaggcattactcgcccatacagtgcggaagatgtggtgaaattacgcggttcagtcaatcctgaatgcacgctggcgcaactgggcgcagcgaaaatgtggcgtctgctgcacggtgagtcgaaaaaaggctacatcaacagcctcggcgcactgactggcggtcaggcgctgcaacaggcgaaagcgggtattgaagcagtctatctgtcgggatggcaggtagcggcggacgctaacctggcggccagcatgtatccggatcagtcgctctatccggcaaactcggtgccagctgtggtggagcggatcaacaacaccttccgtcgtgccgatcagatccaatggtccgcgggcattgagccgggcgatccgcgctatgtcgattacttcctgccgatcgttgccgatgcggaagccggttttggcggtgtcctgaatgcctttgaactgatgaaagcgatgattgaagccggtgcagcggcagttcacttcgaagatcagctggcgtcagtgaagaaatgcggtcacatgggcggcaaagttttagtgccaactcaggaagctattcagaaactggtcgcggcgcgtctggcagctgacgtgacgggcgttccaaccctgctggttgcccgtaccgatgctgatgcggcggatctgatcacctccgattgcgacccgtatgacagcgaatttattaccggcgagcgtaccagtgaaggcttcttccgtactcatgcgggcattgagcaagcgatcagccgtggcctggcgtatgcgccatatgctgacctggtctggtgtgaaacctccacgccggatctggaactggcgcgtcgctttgcacaagctatccacgcgaaatatccgggcaaactgctggcttataactgctcgccgtcgttcaactggcagaaaaacctcgacgacaaaactattgccagcttccagcagcagctgtcggatatgggctacaagttccagttcatcaccctggcaggtatccacagcatgtggttcaacatgtttgacctggcaaacgcctatgcccagggcgagggtatgaagcactacgttgagaaagtgcagcagccggaatttgccgccgcgaaagatggctataccttcgtatctcaccagcaggaagtgggtacaggttacttcgataaagtgacgactattattcagggcggcacgtcttcagtcaccgcgctgaccggctccactgaagaatcgcagttctaa

SEQ ID NO: 20596 - DNA, 3684 bp, Escherichia coli
gtgagcagcaaagtggaacaactgcgtgcgcagttaaatgaacgtattctggtgctggacggcggtatgggcaccatgatccagagttatcgactgaacgaagccgattttcgtggtgaacgctttgccgactggccatgcgacctcaaaggcaacaacgacctgctggtactcagtaaaccggaagtgatcgccgctatccacaacgcctactttgaagcgggcgcggatatcatcgaaaccaacaccttcaactccacgaccattgcgatggcggattaccagatggaatccctgtcggcggaaatcaactttgcggcggcgaaactggcgcgagcttgtgctgacgagtggaccgcgcgcacgccagagaaaccgcgctacgttgccggtgttctcggcccgaccaaccgcacggcgtctatttctccggacgtcaacgatccggcatttcgtaatatcacttttgacgggctggtggcggcttatcgagagtccaccaaagcgctggtggaaggtggcgcggatctgatcctgattgaaaccgttttcgacacccttaacgccaaagcggcggtatttgcggtgaaaacggagtttgaagcgctgggcgttgagctgccgattatgatctccggcaccatcaccgacgcctccgggcgcacgctctccgggcagaccaccgaagcattttacaactcattgcgccacgccgaagctctgacctttggcctgaactgtgcgctggggcccgatgaactgcgccagtacgtgcaggagctgtcacggattgcggaatgctacgtcaccgcgcacccgaacgccgggctacccaacgcctttggtgagtacgatctcgacgccgacacgatggcaaaacagatacgtgaatgggcgcaagcgggttttctcaatatcgtcggcggctgctgtggcaccacgccacaacatattgcagcgatgagtcgtgcagtagaaggattagcgccgcgcaaactgccggaaattcccgtagcctgccgtttgtccggcctggagccgctgaacattggcgaagatagcctgtttgtgaacgtgggtgaacgcaccaacgtcaccggttccgctaagttcaagcgcctgatcaaagaagagaaatacagcgaggcgctggatgtcgcgcgtcaacaggtggaaaacggcgcgcagattatcgatatcaacatggatgaagggatgctcgatgccgaagcggcgatggtgcgttttctcaatctgattgccggtgaaccggatatcgctcgcgtgccgattatgatcgactcctcaaaatgggacgtcattgaaaaaggtctgaagtgtatccagggcaaaggcattgttaactctatctcgatgaaagagggcgtcgatgcctttatccatcacgcgaaattgttgcgtcgctacggtgcggcagtggtggtaatggcctttgacgaacagggacaggccgatactcgcgcacggaaaatcgagatttgccgtcgggcgtacaaaatcctcaccgaagaggttggcttcccgccagaagatatcatcttcgacccaaacatcttcgcggtcgcaactggcattgaagagcacaacaactacgcgcaggactttatcggcgcgtgtgaagacatcaaacgcgaactgccgcacgcgctgatttccggcggcgtatctaacgtttctttctcgttccgtggcaacgatccggtgcgcgaagccattcacgcagtgttcctctactacgctattcgcaatggcatggatatggggatcgtcaacgccgggcaactggcgatttacgacgacctacccgctgaactgcgcgacgcggtggaagatgtgattcttaatcgtcgcgacgatggcaccgagcgtttactggagcttgccgagaaatatcgcggcagcaaaaccgacgacaccgccaacgcccagcaggcggagtggcgctcgtgggaagtgaataaacgtctggaatactcgctggtcaaaggcattaccgagtttatcgagcaggataccgaagaagcccgccagcaggctacgcgcccgattgaagtgattgaaggcccgttgatggacggcatgaatgtggtcggcgacctgtttggcgaagggaaaatgttcctgccacaggtggtcaaatcggcgcgcgtcatgaaacaggcggtggcctacctcgaaccgtttattgaagccagcaaagagcagggcaaaaccaacggcaagatggtgatcgccaccgtgaagggcgacgtccacgacatcggtaaaaatatcgttggtgtggtgctgcaatgtaacaactacgaaattgtcgatctcggcgttatggtgcctgcggaaaaaattctccgtaccgctaaagaagtgaatgctgatctgattggcctttcggggcttatcacgccgtcgctggacgagatggttaacgtggcgaaagagatggagcgtcagggcttcactattccgttactgattggcggcgcgacgacctcaaaagcgcacacggcggtgaaaatcgagcagaactacagcggcccgacggtgtatgtgcagaatgcctcgcgtaccgttggtgtggtggcggcgctgctttccgatacccagcgtgatgattttgtcgctcgtacccgcaaggagtacgaaaccgtacgtattcagcacgggcgcaagaaaccgcgcacaccaccggtcacgctggaagcggcgcgcgataacgatttcgcttttgactggcaggcttacacgccgccggtggcgcaccgtctcggcgtgcaggaagtcgaagccagcatcgaaacgctgcgtaattacatcgactggacaccgttctttatgacctggtcgctggccgggaagtatccgcgcattctggaagatgaagtggtgggcgttgaggcgcagcggctgtttaaagacgccaacgacatgctggataaattaagcgccgagaaaacgctgaatccgcgtggcgtggtgggcctgttcccggcaaaccgtgtgggcgatgacattgaaatctaccgtgacgaaacgcgtacccatgtgatcaacgtcagccaccatctgcgtcaacagaccgaaaaaacaggcttcgctaactactgtctcgctgacttcgttgcgccgaagctttctggtaaagcagattacatcggcgcatttgccgtgactggcgggctggaagaggacgcactggctgatgcctttgaagcgcagcacgatgattacaacaaaatcatggtgaaagcgcttgccgaccgtttagccgaagcctttgcggagtatctccatgagcgtgtgcgtaaagtctactggggctatgcgccgaacgagaacctcagcaacgaagagctgatccgcgaaaactaccagggcatccgtccggcaccgggctatccggcctgcccggaacatacggaaaaagccaccatctgggagctgctggaagtggaaaaacacactggcatgaaactcacagaatctttcgccatgtggcccggtgcatcggtttcgggttggtacttcagccacccggacagcaagtactacgctgtagcacaaattcagcgcgatcaggttgaagattatgcccgccgtaaaggtatgagcgttaccgaagttgagcgctggctggcaccgaatctggggtatgacgcggactga

SEQ ID NO: 20597 - DNA, 873 bp, Escherichia coli
atgctgcccgactcatcagtccgtttaaataaatacatcagcgaaagcggaatttgctcacgccgcgaagcggatcgctatatcgagcaaggcaatgtgttccttaatggcaagcgagccaccattggcgatcaggtgaaacccggcgacgttgtgaaagtaaacggtcagttgattgaacctcgggaagccgaagatttggtacttatcgccctgaacaagcccgttggtattgtaagcaccaccgaagatggcgagcgcgataacattgtcgatttcgttaaccacagcaaacgcgtgttcccgattggccgcctggataaagactcccaggggctgattttcctcaccaatcacggcgatctggtgaataagatcctgcgtgctggcaatgatcatgagaaagagtatctggtgacggtcgataaaccgattaccgaggagtttattcgcggcatgagtgcgggggtgccaatcctcgggacagtgaccaaaaagtgcaaagttaaaaaagaagcgccgtttgtcttccgcattaccctggtgcaggggctgaaccgtcagatccggcgcatgtgcgagcatttcggctatgaagtgaaaaagctggaacgcacgcgcatcatgaacgttagcttaagcggcattccgctgggggaatggcgcgatttaaccgacgatgagttaatcgacctctttaagctcattgaaaattcctcttccgaggtaaaacctaaagcgaaggccaaaccgaaaacagcgggcatcaaacgtccagtcgttaagatggaaaaaacggcggaaaaaggcggtcgcccggcgtccaacggtaagcgttttacctcgccggggcgtaaaaagaaggggcgctga

SEQ ID NO: 20598 - DNA, 369 bp, Escherichia coli
atggccaataataccactggattcacccgaattatcaaagctgctggctattcctggaaaggtttacgcgctgcatggatcaacgaagcggcattccgtcaggaaggcgtagcggtattgttggcggtggtcatcgcctgctggctggatgtggacgcgattacccgcgtgctgcttatcagctccgtgatgctggtgatgattgtggaaatcctcaatagcgccatcgaagcagtggttgaccgaattggctctgaataccatgagctttccggacgcgcaaaagatatgggatccgctgcggtgctgattgccattatcgtcgccgtgattacctggtgcattctgttatggtcgcattttggataa

SEQ ID NO: 20599 - DNA, 210 bp, Escherichia coli
atgaataaagatgaagccggcggtaactggaaacagtttaaaggtaaagtgaaagagcaatggggcaaactgaccgatgatgatatgacgatcattgaaggtaaacgtgatcaactggtcggtaaaatccaggaacgttatggttatcagaaagatcaggcagaaaaagaggtcgtggattgggaaacccgcaatgaatatcgctggtaa

SEQ ID NO: 20600 - DNA, 984 bp, Escherichia coli
atggcaacacgaattgaatttcacaagcacggtggcccggaagtacttcaagccgtagagttcactcctgccgatccggcggagaatgaaatccaggtcgaaaataaagccatcggcatcaattttatcgacacatatatccgcagcggcctttacccgccgccatcgctacccagcggattaggcaccgaagcagcaggcatcgtgagtaaagtcggcagtggtgtaaagcatattaaggcaggcgatcgtgtagtctatgcgcagtcggcgttaggcgcttacagctctgtgcataacattattgcggataaagcggcgattctgcctgcggcaatttcttttgagcaagctgcggcatccttcctgaaaggcttaacggtttattatctgctgcgcaaaacctatgaaattaaacccgatgaacagttcctgttccacgcagcggctggcggcgttggcttaattgcctgccagtgggcaaaagccctgggcgcgaaacttatcggcaccgtaggaaccgcgcaaaaagcgcagagcgcgctaaaagcgggcgcgtggcaggttattaactatcgtgaagaggatctggtcgagcggttaaaagagatcaccggcggtaagaaagtgcgcgtggtgtacgattccgtgggcagagacacctgggaacggtcgctggattgcctgcaacgccgcggcttaatggtcagttttggcaactcatcaggtgcggttaccggtgtgaacttaggcattctcaatcaaaaaggctcgttgtatgtgacacgcccttccctgcaaggctatatcaccacgcgggaggaattaaccgaggccagtaatgaactgttctctttgattgccagcggtgtgattaaggtcgatgtcgccgagcagcagaaatatccgctgaaggatgcgcagcgtgcgcatgagattctggaaagccgggcgacgcaaggttccagcctgctgattccataa

SEQ ID NO: 20601 - DNA, 1416 bp, Escherichia coli
atggcaggaaataaacccttcaacaaacagcaggctgaaccccgcgaacgcgatccacaagttgccgggctgaaagtgcctccgcactcgatcgaagcggagcagtcggtgttgggcggtttaatgctagataacgaacgctgggatgatgtagccgagcgtgtggtagcagacgatttttacacccgcccacaccgtcatatctttactgaaatggcgcgtttgcaggaaagcggtagccctatcgatctgattactcttgcggaatcgctggaacgccaggggcaactcgatagcgtcggtggttttgcttatctggcagagctgtcaaaaaatacgccaagtgcggctaacatcagtgcctatgcggacatcgtgcgtgaacgtgccgttgtccgtgagatgatctcggttgcgaatgagattgccgaagctggttttgatccgcaggggcgtaccagcgaagatctgctggatctggctgaatcccgcgtctttaaaattgccgaaagtcgtgcgaacaaagacgaagggccgaagaacatcgccgatgtgctcgacgcaaccgtggcgcgtattgagcagttgtttcagcagccacacgatggcgttaccggggtaaacaccggttatgacgatctcaacaaaaaaaccgctggcttgcagccgtcggatttgatcatcgtcgccgcgcgtccgtcgatgggtaaaacaacatttgcgatgaacctcgtcgaaaacgcggcgatgttgcaggataaaccggtacttatcttctcgctggagatgccatcagaacagatcatgatgcgttctctggcgtcgctgtcgcgcgttgaccagactaaaatccgtaccgggcagctcgatgacgaagactgggcgcgcatttccggcaccatgggtattttgctcgaaaaacgcaatatctatatcgatgactcctccggcctgacgccaacggaagtgcgttcccgcgcacgccgtattgcccgtgaacacggcggcatcgggcttatcatgatcgactacctgcaactgatgcgcgtaccggcgctttccgataaccgtacgctggaaattgcagaaatctctcgctcgctgaaagcactggcgaaagaactgaacgtgccggtggtggcgctgtcccagttgaaccgttctctggaacaacgtgccgacaaacgcccggtcaactccgacctgcgtgaatctggctctatcgagcaggatgcggacttgatcatgtttatctatcgtgatgaggtgtatcacgaaaacagtgatttaaaaggcatcgcggaaattattatcggtaaacaacgtaacggcccaatcgggacggtacgcctgacctttaacggtcaatggtcgcgcttcgacaactatgcggggccgcagtacgacgacgaataa

SEQ ID NO: 20602 - DNA, 1080 bp, Escherichia coli
atgcaagcggcaactgttgtgattaaccgccgcgctctgcgacacaacctgcaacgtcttcgtgaactggcccctgccagtaaaatggttgcggtggtgaaagcgaacgcttatggtcacggtcttcttgagaccgcgcgaacgctccccgatgctgacgcctttggcgtagcccgtctcgaagaagctctgcgactgcgtgcggggggaatcaccaaacctgtactgttactcgaaggcttttttgatgccagagatctgccgacgatttctgcgcaacattttcataccgccgtgcataacgaagaacagctggctgcgctggaagaggctagcctggacgagccggttaccgtctggatgaaactcgataccggtatgcaccgtctgggcgtaaggccggaacaggctgaggcgttttatcatcgcctgacccagtgcaaaaacgttcgtcagccggtgaatatcgtcagccattttgcgcgcgcggatgaaccaaaatgtggcgcaaccgagaaacaactcgctatctttaataccttttgcgaaggcaaacctggtcaacgttccattgccgcgtcgggtggcattctgctgtggccacagtcgcattttgactgggtgcgcccgggcatcattctttatggcgtctcgccgctggaagatcgctccaccggtgccgattttggctgtcagccagtgatgtcactaacctccagcctgattgccgtgcgtgagcataaagccggagagcctgttggttatggtggaacctgggtaagcgaacgtgatacccgtcttggcgtagtcgcgatgggctatggcgatggttatccgcgcgccgcgccgtccggtacgccagtgctggtgaacggtcgcgaagtaccgattgtcgggcgcgtggcgatggatatgatctgcgtagacttaggtccacaggcgcaggacaaagccggggatccggtcattttatggggcgaaggtttgcccgtagaacgtatcgctgaaatgacgaaagtaagcgcttacgaacttattacgcgcctgacttcaagggtcgcgatgaaatacgtggattaa

SEQ ID NO: 20603 - DNA, 2823 bp, Escherichia coli
atggataagatcgaagttcggggcgcccgcacccataatctcaaaaacatcaacctcgttatcccccgcgacaagctcattgtcgtgaccgggctttcgggttctggcaaatcctcgctcgctttcgacaccttatatgccgaagggcagcgccgttacgttgaatccctttccgcctacgcgcggcagtttctgtcactgatggaaaagccggacgtcgatcatattgaggggctttctcctgccatctcaattgagcagaaatcgacgtctcataacccgcgttctacggtggggacaatcaccgaaatccacgactatttgcgtttgttattcgcccgcgttggcgagccgcgctgtccggaccacgacgtcccgctggcggcgcaaaccgtcagccagatggtggataacgtgctgtcgcagccggaaggcaagcgtctgatgctactcgcgccaatcattaaagagcgcaaaggcgaacacaccaaaacgctggagaacctggcaagccagggctacatccgtgctcgtattgatggcgaagtctgcgatctttccgatccgccaaaactggaactgcaaaagaaacataccattgaagtggtggttgatcgcttcaaggtgcgtgacgatcttacccaacgtcttgccgagtcatttgaaaccgcgctggagctttccggtggtaccgcggtagtggcggatatggacgacccgaaagcggaagagctgctgttctccgccaacttcgcctgcccaatttgcggctacagtatgcgtgaactggagccgcgactgttttcgtttaacaacccggcgggggcctgcccgacctgcgacggccttggcgtacagcaatatttcgatcctgatcgagtgatccagaatccggaactgtcgctggctggtggtgcgatccgtggctgggatcgccgcaacttctattatttccagatgctgaaatcgctggcagatcactataagttcgacgtcgaagcgccgtggggcagcctgagcgcgaacgtgcataaagtggtgttgtacggttctggcaaagaaaacattgaattcaaatacatgaacgatcgtggcgatacctccattcgtcgtcatccgttcgaaggcgtgctgcataatatggagcgccgctataaagagacggaatccagcgcggtacgcgaagaattagccaagtttatcagtaatcgtccgtgcgccagctgcgaagggacgcgtctgcgtcgggaagcgcgccacgtgtatgtcgagaatacgccgctgcctgctatctccgacatgagcattggtcatgcgatggaattcttcaacaatctcaaactcgcaggtcagcgggcgaagattgcagaaaaaatccttaaagagatcggcgatcgtctgaaattcctcgttaacgtcggcctgaattacctgacgctttcccgctcggcagaaacgctttctggcggtgaagcacagcgtatccgtctggcgagccagattggtgcgggcctggttggcgttatgtacgtgctggacgagccgtctatcggcctgcaccagcgtgataacgagcgcctgttgggtacgcttatccatctgcgcgatctcggtaataccgtgattgtggtggagcacgacgaagacgcaattcgcgccgctgaccatgtgatcgacattggcccgggcgcaggtgttcacggcggtgaagtggtcgcagaaggtccgctggaagcgattatggcggtgccggagtcgttgaccgggcagtacatgagcggcaaacgcaagattgaagtgccgaagaaacgcgttccggcgaatccggaaaaagtgctgaagctgacaggcgcacgcggcaacaacctgaaggacgtgacgctgacgctgccggtgggtctgtttacctgcatcaccggggtttcaggttccggtaaatcgacgctgattaacgacacactgttcccgattgcccaacgccagttgaatggggcgaccatcgccgaaccagcaccgtatcgcgatattcaggggctggagcatttcgataaagtgatcgatatcgaccaaagcccaattggtcgtactccacgttctaacccggcgacctataccggcgtgtttacgcctgtgcgcgaactgtttgcgggcgtaccggaatcccgtgcgcgcggctatacgccgggacgtttcagctttaacgttcgtggcggacgctgcgaggcctgtcagggcgatggcgtgatcaaagtggagatgcacttcctgccggatatctacgtgccgtgcgaccagtgcaaaggtaaacgctataaccgtgaaacgctggagattaagtacaaaggcaaaaccatccacgaagtgctggatatgaccatcgaagaggcgcgtgagttctttgatgccgtacctgcactggcgcgtaagctgcaaacgttgatggacgttggcctgacgtacattcgactggggcagtccgcaaccaccctttcaggcggtgaagcccagcgcgtgaagctggcgcgtgaactgtcaaaacgcggcaccgggcagacgctgtatattctcgacgagccgaccaccggtctgcacttcgccgatattcagcaactgctcgacgtactgcataaactgcgcgatcagggcaacaccattgtggtgattgagcacaatctcgacgtgatcaaaaccgctgactggattgtcgacctgggaccagaaggcggcagtggtggcggcgagatcctcgtctccggtacgccagaaaccgtcgcggagtgcgaagcatcacacacggcacgcttccttaagccgatgctgtaa

SEQ ID NO: 20604 - DNA, 1959 bp, Escherichia coli
atgagccaaattcacaaacacaccattcctgccaacatcgcagaccgttgcctgataaaccctcagcagtacgaggcgatgtatcaacaatctattaacgtacctgataccttctggggcgaacagggaaaaattcttgactggatcaaaccttaccagaaggtgaaaaacacctcctttgcccccggtaatgtgtccattaaatggtacgaggacggcacgctgaatctggcggcaaactgccttgaccgccatctgcaagaaaacggcgatcgtaccgccatcatctgggaaggcgacgacgccagccagagcaaacatatcagctataaagagctgcaccgcgacgtctgccgcttcgccaataccctgctcgagctgggcattaaaaaaggtgatgtggtggcgatttatatgccgatggtgccggaagccgcggttgcgatgctggcctgcgcccgcattggcgcggtgcattcggtgattttcggcggcttctcgccggaagccgttgccgggcgcattattgattccaactcacgactggtgatcacttccgacgaaggtgtgcgtgccgggcgcagtattccgctgaagaaaaacgttgatgacgcgctgaaaaacccgaacgtcaccagcgtagagcatgtggtggtactgaagcgtactggcgggaaaattgactggcaggaagggcgcgacctgtggtggcacgacctggttgagcaagcgagcgatcagcaccaggcggaagagatgaacgccgaagatccgctgtttattctctacacctccggttctaccggtaagccaaaaggtgtgctgcatactaccggcggttatctggtgtacgcggcgctgacctttaaatatgtctttgattatcatccgggtgatatctactggtgcaccgccgatgtgggctgggtgaccggacacagttacttgctgtacggcccgctggcctgcggtgcgaccacgctgatgtttgaaggcgtacccaactggccgacgcctgcccgtatggcgcaggtggtggacaagcatcaggtcaatattctctataccgcacccacggcgatccgcgcgctgatggcggaaggcgataaagcgatcgaaggcaccgaccgttcgtcgctgcgcattctcggttccgtgggcgagccaattaacccggaagcgtgggagtggtactggaaaaaaatcggcaacgagaaatgtccggtggtcgatacctggtggcagaccgaaaccggcggtttcatgatcaccccgctgcctggcgctaccgagctgaaagccggttcggcaacacgtccgttcttcggcgtgcaaccggcgctggtcgataacgaaggtaacccgctggagggggccaccgaaggtagcctggtaatcaccgactcctggccgggtcaggcgcgtacgctgtttggcgatcacgaacgttttgaacagacctacttctccaccttcaaaaatatgtatttcagcggcgacggcgcgcgtcgcgatgaagatggctattactggataaccgggcgtgtggacgacgtgctgaacgtctccggtcaccgtctggggacggcagagattgagtcggcgctggtggcgcatccgaagattgccgaagccgccgtagtaggtattccgcacaatattaaaggtcaggcgatctacgcctacgtcacgcttaatcacggggaggaaccgtcaccagaactgtacgcagaagtccgcaactgggtgcgtaaagagattggcccgctggcgacgccagacgtgctgcactggaccgactccctgcctaaaacccgctccggcaaaattatgcgccgtattctgcgcaaaattgcggcgggcgataccagcaacctgggcgatacctcgacgcttgccgatcctggcgtagtcgagaagctgcttgaagagaagcaggctatcgcgatgccatcgtaa

SEQ ID NO: 20605 - DNA, 1998 bp, Escherichia coli
atggagatttatatgaataactctcggttattccgtttgagcaggattgttattgcgttaactgccgccagcggcatgatggtaaataccgctaacgcgaaagaggaagcgaaagccgccactcaatatacccaacaggttaatcagaattacgccaaatcattaccgtttagcgatcgtcaggattttgacgatgcccagcgtggatttatcgccccgctgctggatgaaggtattctgcgtgatgcgaacggtaaagtttactaccgcgcggacgattacaaatttgatattaatgccgcagcgccggaaaccgtaaaccccagcctgtggcgtcagtcgcaaatcaacggtatttctggcctgttcaaagtcaccgataaaatgtatcaggtgcgcggccaggatatctctaacattacgttcgttgagggcgagaaaggcattattgttatcgacccgctggtgacgccgcctgccgcaaaagccgcacttgacctttacttccagcatcgtccgcaaaaaccgattgttgccgttatctacactcacagccacaccgaccactatggtggcgtgaaaggcattatctctgaagccgatgttaaatccggcaaagttcaggtgattgcccctgcaggctttatggacgaagccatcagcgaaaacgtgctggcgggtaacatcatgagccgccgtgcgctctactcttacggtctgttactgccgcacaacgcgcaaggcaatgtgggtaatggccttggcgtgacgctggcaacgggcgacccgagcattattgcaccgacgaaaactatcgtcagaactggcgagaagatgattatcgacggcctggagtttgacttcctgatgaccccaggtagcgaagcgccagccgaaatgcacttctatattccggccctgaaagccctgtgtaccgccgagaacgccacgcataccctgcacaacttctacactctgcgcggcgcgaaaacccgcgacaccagcaagtggaccgagtatctgaacgaaacgctggatatgtggggtaacgacgcggaagtgctgtttatgccgcacacctggccggtctggggcaataagcatatcaatgattatattggtaaataccgcgataccatcaagtacattcacgaccagaccctgcacctggcgaaccagggctacaccatgaatgaaatcggcgacatgattaagctgccgcctgcacttgccaataactgggccagccgcggctattacggttctgtcagccacaacgcccgcgcggtgtataacttctatcttggctattacgacggtaacccggctaacctgcatccgtatggtcaggtggagatgggtaaacgttacgtgcaggcgctgggcggttctgcccgtgtcatcaacctggcgcaagaagcgaacaagcaaggtgattaccgctggtcggcagaactgctgaaacaggtgattgccgccaacccgggtgaccaggtcgcgaagaatctgcaagcgaataactttgaacagctgggctatcaggccgagtccgccacatggcgcggtttctacctgaccggcgcgaaagagctgcgcgaaggggtgcataagttcagccacggcaccaccggttccccggacaccattcgcgggatgtcggtcgaaatgctgttcgactttatggccgttcgcctcgatagcgcgaaagctgcgggtaaaaatatcagcctgaacttcaatatgagcaacggcgataacctcaacctgacgctgaacgatagcgtgcttaactaccggaaaacgctgcaaccgcaagccgacgcctctttctacatcagccgtgaagatctgcacgccgtgctgaccggacaagccaaaatggcggatctggtaaaagcgaagaaagccaaaattattggcaatggcgcgaaactggaagaaattatcgcctgtctggataatttcgatttgtgggtgaatatcgtaaccccaaattaa

SEQ ID NO: 20606 - DNA, 924 bp, Escherichia coli
gtggcgtcttcaattcaaggacaagagaacgtgatgagccagtcagagtttgattcagcgcttccgaacggtatagggttagcgccttacctgcgaatgaagcaggaaggaatgacagaaaatgaaagccgcatcgtggagtggttactcaaacccggtaacctgagttgtgcacccgcaattaaagatgtcgcagaagctctggcggtatctgaagcgatgatagttaaggtatcaaagctgctggggtttagcggctttcgtaacttacgcagtgcgctggaagattatttttctcagtcagaacaggtattgccttccgagttggcttttgatgaagcgccgcaggatgtggtgaataaggtatttaacatcactttacgcaccattatggaaggtcagtcgatcgtcaacgttgatgagatccaccgtgccgcccgctttttctatcaggccagacagcgggatttgtacggtgccggaggatcaaatgctatctgtgctgatgtacagcacaagttcttgcgcattggcgtacgctgtcaggcctatcctgatgctcacatcatgatgatgtccgcttcgttgttacaggaaggagatgttgtgctggtagtgacccattccgggcgaaccagtgatgtaaaagcggccgtagaactggcaaaaaagaacggggcaaagattatttgtataacccatagctaccattcaccgatagcgaaactggccgattatattatttgctcaccagccccggaaacgccgttattaggtcgtaatgcctcggcaagaatattacaactaactttgctggacgctttttttgtctctgtcgcccagctcaacattgaacaagctaatattaatatgcaaaaaaccggcgcaattgttgatttcttctcaccaggcgcgctgaaataa

SEQ ID NO: 20607 - DNA, 450 bp, Escherichia coli
atgaaaaagattgcatttggctgtgatcatgtcggtttcattttaaaacatgaaatagtggcacatttagttgagcgtggcgttgaagtgattgataaaggaacctggtcgtcagagcgtactgattatccacattacgccagtcaagtcgcactggctgttgctggcggagaggttgatggcgggattttgatttgtggtactggcgtcggtatttcgatagcggcgaacaagtttgccggaattcgcgcggtcgtctgtagcgaaccttattccgcgcaactttcgcggcagcataacgacaccaacgtgctggcttttggttcacgagtggttggcctcgaactggcaaaaatgattgtggatgcgtggctgggcgcacagtacgaaggcggtcgtcatcaacaacgcgtggaggcgattacggcaatagagcagcggagaaattga

SEQ ID NO: 20608 - DNA, 1137 bp, Escherichia coli
atgattatcaataacgttaagctggtgctggaaaacgaggtggtaagcggttcgctggaggtgcagaacggcgaaatccgcgcctttgccgaaagccagagccgcctgccggaggcgatggacggcgaaggcggctggctgctgccggggctgattgagctgcataccgataatctggataaattcttcaccccgcgcccgaaagttgactggcctgcccactcggcgatgagcagccacgacgcgctgatggtggcgagcggcatcaccaccgtactggatgccgtggcaattggcgacgtgcgcgacggcggcgatcggctggagaatctggagaagatgatcaacgccatcgaagagacgcagaaacgcggcgtcaaccgcgccgagcaccgtctgcatctgcgctgcgaactgccgcatcacaccacgctgccgctgtttgaaaaactggtgcagcgcgagccggtgacgctggtgtcgctgatggaccactcgccgggccagcgccagttcgccaaccgcgagaagtatcgcgaatattatcagggcaaatactccctcactgatgcgcagatgcagcagtacgaagaagagcaactggcgctcgccgcacgctggtcgcagccgaatcgcgaatccatcgccgccctgtgccgcgcgcgaaaaattgcgcttgccagccacgatgacgccacccacgcccacgttgctgaatctcaccagcttggcagcgtgatcgccgaatttcccaccacgttcgaagcggcggaagcctcgcgcaagcatggcatgaacgtgctgatgggcgcgccgaatattgtgcgcggcggctcgcactccggcaacgtggcggccagtgaactggcgcagcttggcctgctggatatcctctcttccgactactaccccgccagcctgctcgatgcggcatttcgcgtcgccgatgaccagagcaaccgctttacgctgccgcaggcggtgaagctggtgactaaaaatccagcgcaggcgcttaatctccaggatcgcggggtgattggcgagggcaaacgcgccgacctggtgctggcgcatcgcaaggacaatcatattcatatcgaccacgtctggcgtcagggtaaaagggtgttctga

SEQ ID NO: 20609 - DNA, 1518 bp, Escherichia coli
atgtctgaacaagaaacacggggagccaatgaggctattgattttaacgatgaactgagaaatcgccgcgaaaaactggcggcactacgtcagcaaggtgtggcgtttcccaatgattttcgccgcgaccatacctctgaccagttgcacgaagagtttgatgcgaaggataaccaggaactggaatccttaaacattgaagtctcggttgctggccgaatgatgacccgtcgtatcatggggaaagcctcctttgtaacgttgcaggatgtcggtggccgtattcaactgtacgttgcaagagatagcctgccagaaggtgtttataacgatcagtttaaaaaatgggatctgggtgacattatcggtgcccgcggtacgctgtttaagacgcaaacgggtgagctttccattcactgtactgagctgcgcctgctgactaaagcactacgtcctttaccagataaattccatggtctgcaggatcaggaagtccgttatcgtcaacgttatctggacctcatcgctaacgataaatcccgtcaaacgtttgttgtccgttcaaaaattctggccgctatccgtcaattcatggtcgcgcgcggctttatggaagtagaaaccccgatgatgcaggtaattccaggtggggcatctgctcgcccgtttattacccatcataatgctctggatttagatatgtatctgcgtatcgcgccggagctgtatctgaaacgtctggttgtaggcggttttgaacgggtattcgaaatcaaccgtaacttccgtaatgaaggtatttctgttcgccataatcctgagttcacaatgatggaactctacatggcgtatgcggattaccacgatttgattgaactgacagagtcactgttccgcaccctggcacaagaggttctgggtaccactaaagtcacttatggcgagcatgtgtttgatttcggcaaaccgtttgaaaaactcaccatgcgcgaagcaatcaaaaaatatcgtccagaaaccgatatggccgacctggataattttgatgctgctaaagcattagctgaatctatcggtattacggtagagaaaagctgggggttgggacgtattgtcacagagatctttgatgaagtggcagaagcacatctgattcagccaacctttattacggaatatccggcagaagtgtccccgctggcacgccgtaatgatgttaacccggaaatcaccgaccgttttgaattcttcatcggtggtcgtgaaatcggtaatggttttagcgaattaaacgacgcagaagatcaggctgaacgtttccaggaacaggttaatgctaaagctgcaggtgacgacgaagccatgttctatgacgaagattacgtgactgcgctggaatatggtctgccgccaaccgctggtctgggtattggtatcgaccgaatgattatgctgtttactaacagccatactattcgcgacgttattctcttcccggcgatgcgcccacagaaataa

SEQ ID NO: 20610 - DNA, 1848 bp, Escherichia coli
atgccaattcaggtcttaccgccacaactggcgaaccagattgccgcaggtgaggtggtcgagcgacctgcgtcggtagtcaaagaactagtggaaaacagcctcgatgcaggtgcgacgcgtatcgatattgatatcgaacgcggtggggcgaaacttatccgcattcgtgataacggctgcggtatcaaaaaagatgagctggcgctggcgctggctcgtcatgccaccagtaaaatcgcctctctggacgatctcgaagccattatcagcctgggctttcgcggtgaggcgctggcgagtatcagttcggtttcccgcctgacgctcacttcacgcaccgcagaacagcaggaagcctggcaggcctatgccgaagggcgcgatatgaacgtgacggtaaaaccggcggcgcatcctgtggggacgacgctggaggtgctggatctgttctacaacaccccggcgcggcgcaaattcctgcgcaccgagaaaaccgaatttaaccacattgatgagatcatccgccgcattgcgctggcgcgtttcgacgtcacgatcaacctgtcgcataacggtaaaattgtgcgtcagtaccgcgcagtgccggaaggcgggcaaaaagaacggcgcttaggcgcgatttgcggcaccgcttttcttgaacaagcgctggcgattgaatggcaacacggcgatctcacgctacgcggctgggtggccgatccaaatcacaccacgcccgcactggcagaaattcagtattgctacgtgaacggtcgcatgatgcgcgatcgcctgatcaatcacgcgatccgccaggcctgcgaagacaaactgggggccgatcagcaaccggcatttgtgttgtatctggagatcgacccacatcaggtggacgtcaacgtgcaccccgccaaacacgaagtgcgtttccatcagtcgcgtctggtgcatgattttatctatcagggcgtgctgagcgtgctacaacagcaactggaaacgccgctaccgctggacgatgaaccccaacctgcaccgcgttccattccggaaaaccgcgtggcggcggggcgcaatcactttgcagaaccggcagctcgtgagccggtagctccgcgctacactcctgcgccagcatcaggcagtcgtccggctgccccctggccgaatgcgcagccaggctaccagaaacagcaaggtgaagtgtatcgccagcttttgcaaacgcccgcgccgatgcaaaaattaaaagcgccggaaccgcaggaacctgcacttgcggcgaacagtcagagttttggtcgggtactgactatcgtccattccgactgtgcgttgctggagcgcgacggcaacatttcacttttatccttgccagtggcagaacgttggctgcgtcaggcacaattgacgccgggtgaagcgcccgtttgcgcccagccgctgctgattccgttgcggctaaaagtttctgccgaagaaaaatcggcattagaaaaagcgcagtctgccctggcggaattgggtattgatttccagtcagatgcacagcatgtgaccatcagggcagtgcctttacccttacgccaacaaaatttacaaatcttgattcctgaactgataggctacctggcgaagcagtccgtattcgaacctggcaatattgcgcagtggattgcacgaaatctgatgagcgaacatgcgcagtggtcaatggcacaggccataaccctgctggcggacgtggaacggttatgtccgcaacttgtgaaaacgccgccgggtggtctgttacaatctgttgatttacatccggcgataaaagccctgaaagatgagtga

SEQ ID NO: 20611 - DNA, 1260 bp, Escherichia coli
atggcgtggaatcagcccggtaataacggacaagaccgcgacccgtggggaagcagcaaacctggcggcaactctgagggaaatggaaacaaaggcggtcgcgatcaagggccacctgatttagatgatatcttccgcaaactgagcaaaaagctcggtggtctgggcggcggtaaaggcaccggatctggcggtggcagttcatcgcaaggcccgcgcccgcagcttggcggtcgtgtcgttaccatcgcagcggcagcgattgtcattatctgggcggccagtggtttctataccattaaagaagccgaacgcggcgtggtaacacgctttggtaaattcagccatctggttgagccgggtctgaactggaaaccgacgtttatcgacgaagtcaaaccggtgaacgtggaagccgtgcgtgaactggccgcttctggtgtgatgctgacgtcggacgagaacgtagtgcgcgttgagatgaacgtgcagtaccgcgtcaccaatccggaaaaatatctgtatagcgtgaccagcccggatgacagcctgcgtcaggctaccgacagcgccctgcgtggagttatcggtaaatacaccatggaccgcattctgacggaaggtcgtaccgtgattcgtagcgatactcagcgcgaactggaagagacgattcgtccgtatgacatgggtatcacgctgctggacgtcaacttccaggctgctcgtccgccggaagaagtaaaagcggcgtttgacgatgcgattgccgcgcgtgaaaacgaacagcaatacattcgtgaagcagaagcgtataccaacgaagttcagccgcgtgcgaacggtcaggcgcaacgtatcctcgaagaggcgcgtgcgtacaaggcccagaccatcctggaagctcagggtgaagtggcgcgctttgctaaacttctgccggaatataaagccgcgccggaaattactcgcgagcgtctgtatatcgagacgatggaaaaagtgttgggtaacacccgcaaagtgctggttaacgataaaggtggcaacctgatggttctgccgttagaccagatgctgaaaggtggtaacgcccctgcggcgaagagcgataacggtgccagcaatctgctgcgtctgccgccagcctcttcctccacaaccagtggagcaagcaacacgtcgtccaccagtcagggcgatattatggaccaacgccgcgccaacgcgcagcgtaacgactaccagcgtcagggggaataa

SEQ ID NO: 20612 - DNA, 1299 bp, Escherichia coli
atgggtaacaacgtcgtcgtactgggcacccaatggggtgacgaaggtaaaggtaagatcgtcgatcttctgactgaacgggctaaatatgttgtacgctaccagggcggtcacaacgcaggccatactctcgtaatcaacggtgaaaaaaccgttctccatcttattccatcaggtattctccgcgagaatgtaaccagcatcatcggtaacggtgttgtgctgtctccggccgcgctgatgaaagagatgaaagaactggaagaccgtggcatccccgttcgtgagcgtctgctgctgtctgaagcatgtccgctgatccttgattatcacgttgcgctggataacgcgcgtgagaaagcgcgtggcgcgaaagcgatcggcaccaccggtcgtggtatcgggcctgcttatgaagataaagtagcacgtcgcggtctgcgtgttggcgaccttttcgacaaagaaaccttcgctgaaaaactgaaagaagtgatggaatatcacaacttccagttggttaactactacaaagctgaagcggttgattaccagaaagttctggatgatacgatggctgttgccgacatcctgacttctatggtggttgacgtttctgacctgctcgaccaggcgcgtcagcgtggcgatttcgtcatgtttgaaggtgcgcagggtacgctgctggatatcgaccacggtacttatccgtacgtaacttcttccaacaccactgctggtggcgtggcgaccggttccggcctgggcccgcgttatgttgattacgttctgggtatcctcaaagcttactccactcgtgtaggtgcaggtccgttcccgaccgaactgtttgatgaaactggcgagttcctctgcaagcagggtaacgaattcggcgcaactacggggcgtcgtcgtcgtaccggctggctggacaccgttgccgttcgtcgtgcggtacagctgaactccctgtctggcttctgcctgactaaactggacgttctggatggcctgaaagaggttaaactctgcgtggcttaccgtatgccggatggtcgcgaagtgactaccactccgctggcagctgacgactggaaaggtgtagagccgatttacgaaaccatgccgggctggtctgaatccaccttcggcgtgaaagatcgtagcggcctgccgcaggcggcgctgaactatatcaagcgtattgaagagctgactggtgtgccgatcgatatcatctctaccggtccggatcgtactgaaaccatgattctgcgcgacccgttcgacgcgtaa

SEQ ID NO: 20613 - DNA, 1455 bp, Escherichia coli
gtgcacaacattccgggtgtgtggaatacccggttacctcttcttcaggagatcgttatggagatcctctacaacatctttaccgtgttttttaaccaggtcatgaccaatgccccgttgttgctgggtattgtgacctgtctgggctacatcctactgcgcaaaagtgtcagcgttattattaaaggcacgattaaaaccataattggtttcatgttgttgcaggcagggtccggcatcctcaccagcaccttcaaaccggtggtggcgaaaatgtccgaagtctacggcattaacggcgcaatttccgatacctacgcttcaatgatggcaaccatcgaccgcatgggcgatgcctatagctgggtgggttacgccgtattgttagcgctggcgctgaacatctgttacgtgctgttgcgtcgcattaccggcattcgcacaatcatgttgaccggccacatcatgttccagcaggccgggttgattgccgttacgctgtttatcttcggctactccatgtggaccaccattatctgtaccgcgattctggtttcgctctactggggcatcacttccaacatgatgtacaagccgactcaggaagtgacggatggctgtggtttctccatcggtcaccagcagcagtttgcatcatggattgcctataaagtcgcgccgttcctcggcaaaaaagaggagagcgttgaagacctcaaattgccgggctggctgaacattttccacgacaacatcgtctccacggcgattgtgatgaccatcttctttggtgccattctgctctccttcggtatcgacaccgtgcaggcgatggcaggcaaagtgcactggacggtgtacatcctgcaaactggtttctcctttgcggtggcgatcttcatcatcacgcagggtgtgcgcatgtttgtggcggaactctctgaagcatttaacggcatttcccagcgcctgatcccaggtgcggttctggcgattgactgtgcagctatctatagcttcgcgccgaacgccgtggtctggggctttatgtggggcaccatcggtcagctgattgcggttggcatcctggtcgcctgcggctcctcgatcctgattattcctggctttatcccgatgttcttctctaacgccaccatcggcgtgttcgctaaccacttcggcggctggcgtgcggcgctgaagatttgtctggtgatggggatgatcgaaatctttggttgcgtctgggcggtgaaactcaccggtatgagtgcctggatgggcatggcggactggtcgattctggcaccgccgatgatgcaaggcttcttctccatcggtatcgcctttatggccgtcatcattgtaattgcactggcttatatgttcttcgctggccgcgcgctgcgcgcagaagaagatgcagaaaaacaactggcagaacagtctgcttaa

SEQ ID NO: 20614 - DNA, 687 bp, Escherichia coli
atgcaaaagctaaaacagcaggtatttgaagccaacatggagctgccgcgctacgggctggtgacctttacctggggcaacgtcagcgctatcgaccgcgaacgcgggctggtggtgatcaagcccagcggcgttgcctacgaaaccatgaaagcggccgatatggtggtggttgatatgagcggcaaggtggtggaaggggagtatcgcccatcttccgacactgcgacgcatctcgaactctaccgtcgttacccgtcgcttggtggcattgtccatacccactccactcatgccaccgcatgggcgcaggcggggctggcgatcccggcgttaggcaccacgcacgccgactacttctttggcgacattccgtgtacgcgcgggttaagcgaagaagaggtgcagggcgagtatgaactgaacaccggcaaagtgattatcgaaacgctgggcaacgccgagccgctgcatacgccgggaattgtggtgtatcagcacgggccgttcgcctgggggaaagatgctcacgatgcggtgcataacgcggtggtgatggaagaagtggcgaaaatggcgtggattgcccgcggcattaacccacaactcaatcacatcgacagcttcctgatgaataaacacttcatgcgtaaacacggtcctaacgcttattacgggcagaagtag

SEQ ID NO: 20615 - DNA, 795 bp, Escherichia coli
atgacattaccaacgactatttattcatttcctgcatatttatctcgtttttcgtccaccgacaaaccagtaaaattaaaatttcatcaatacgcacgcgctacattactttcaaatcgtggaagagatcataattgcgatggcagacgtactgttgagatccacaaactagatctctcagactggcaagcattcaataagttagcgacgaggtgtaatgcttacgatggaatcacaatgaatggtgataattcttttggatggaaccatgaagctacattagataatattcacgcccagaaatacaataaagcttacgcgggtgcgaggttaaccgcagaactgaaatatttattgcaagatgtcgaatccttcgaacccaacagtaaatacacaatacacgaagtggttttgggacctggttatggtactccagactataccggccaaacgataggatacgttgtaacccttcctgcccaaatgcctaattgctggtcatctgaactaccaacaatcgatctttatatcgaccaacttcgcactgttacaggcgtttctaatgccctcggattcatcattgctgcattgctaaacgcgtattctgatttaccccatgatttgaaaattggtctgcgttccttatcaagttcagccgcaatctactcgggtttgggtttcgagcgagtgccgcaggagcgagacatcagttgcgctcgtatgtatctaacgccagcaaaccatcctgacttatggacacaagagaatggtgaatggatctacttgcgaaactaa

SEQ ID NO: 20616 - DNA, 663 bp, Escherichia coli
atggcttatcgcgaccaacctttaggtgaactggcgctctctattcctcgcgcttcagctctgtttcgtaaatatgatatggattactgctgtggcggtaagcagacgctggcgcgcgcggcggcacgtaaagaactggatgttgaggtcattgaagctgaactggcaaagctcgctgaacaaccgattgagaaagactggcgtagcgccccgctggcagaaatcatcgaccatatcatcgtgcgctaccacgatcgtcaccgcgagcaactgccggagctgattctgcaagcgactaaagtcgagcgcgttcacgccgacaaaccgagcgtgccaaaagggctgacaaaatacctgaccatgctgcatgaagagctttccagccacatgatgaaagaagagcagatcctcttcccgatgatcaaacaaggcatgggcagccaggcaatggggccaatcagcgtaatggaaagcgagcacgatgaagcgggcgaactgctggaagtgattaaacacaccaccaataacgtcacaccgccgccagaagcctgcaccacctggaaagcgatgtataacggcattaatgaactgattgatgacctgatggatcacatcagtctggaaaacaatgtactgttcccacgcgcgctggcgggtgagtga

SEQ ID NO: 20617 - DNA, 1026 bp, Escherichia coli
gtgatgcctcaatctcttccggacaccactacgccaaaaaggcgctttcgctggccgacggggatgccgcagctggtagcactattgctggtgctgctggtcgatagcctggtagccccgcatttctggcaggtggtgcttcaggatgggcgtttgttcggtagccccatagacattcttaaccgtgcagctcccgttgcgttactggcgattggcatgacgctggtgatcgccaccggtgggattgatctctccgtaggggcggtgatggctatcgccggagccacaacggctgcgatgacggtcgcgggattcagcctgccgattgttttgttaagcgccctgggcaccggcatcctggcgggattgtggaacggcatactggtagcgatcctcaaaattcagccgtttgtcgccactctgatcctgatggtcgccgggcgcggcgtggcgcaactgatcaccgccgggcagatcgtcacgtttaactcgccggatctctcatggttcggcagtggatcgctgttgttcctgccaacgccggtcattatcgcggtgctgacgcttatcctgttctggctgttgacccgcaaaacggcgctggggatgtttatcgaagccgttggtatcaacattcgggcggcaaaaaatgccggggtaaacacgcgaatcatcgtcatgctcacttatgtgttgagcgggctgtgtgcggcgattgcgggcattatcgtggcggcggatattcgcggtgccgatgccaacaacgctgggttatggctggagctggacgccattctcgcggtggtgattggcggcggatcgctgatgggcgggcgctttaacctgctactttcggtggtgggggcgctgattattcaggggatgaacaccggaattttgctttcgggctttccgccagagatgaaccaggtggtgaaagcggtggtggtgctttgcgtgctgattgttcagtcgcaacgctttatcagtctgattaaaggagtacgtagccgtgataaaacgtaa

SEQ ID NO: 20618 - DNA, 552 bp, Escherichia coli
atgactaagcagcccgaagactggctcgacgacgttcccggtgatgacatcgaagacgaagacgatgaaattatctgggtcagtaaaagtgaaattaaacgtgatgccgaggagctaaaacgccttggcgcggaaattgttgatctggggaaaaacgcgctggataagatcccgttagatgcggatctgcgcgcggctattgagctcgcccagcgtattaagatggaaggtcgccgccgccagttgcagctcatcggtaagatgctgcgccagcgcgacgtagagcctattcgtcaggcgctggataagctgaaaaaccgtcacaaccagcaggtggtgctgttccataaactggaaaacctgcgcgatcgtctgatcgatcaaggtgatgacgccatcgctgaggtattaaatctgtggcccgatgccgatcgtcagcaactgcgtactctgatccgcaacgcgaagaaagagaaagaagggaataagccgccgaaatccgcacgccagattttccagtatctgcgcgagttagcggagaacgaagggtaa

SEQ ID NO: 20619 - DNA, 465 bp, Escherichia coli
atgaattatcatcagtactatcctgtcgacatcgtcaacggccccggcactcgttgcaccctgtttgtctccgggtgtgttcatgaatgccccggttgctataacaaaagcacatggcgggtaaattccggtcagccatttaccaaagcaatggaagaccagatcattaacgatctgaatgacactcgtatcaaacgccagggtatttccctctccggcggcgatccgctgcatccgcaaaacgtgccggatattctgaaactggtacaacgcatccgcgccgagtgtccgggtaaagacatctgggtgtggacaggctataaactcgacgaactcaacgctgcgcaaatgcaggttgttgatttgattaacgtgctggtcgacggcaaatttgtgcaggatttaaaagacccttccctgatctggcgcggcagcagcaatcaggtggtgcatcatttgcgatga

SEQ ID NO: 20620 - DNA, 1512 bp, Escherichia coli
atggagtttagtgtaaaaagcggtagcccggagaaacagcggagtgcctgcatcgtcgtgggcgtcttcgaaccacgtcgcctttctccgattgcagaacagctcgataaaatcagcgatgggtacatcagcgccctgctacgtcggggcgaactggaaggaaaaccggggcagacattgttgctgcaccatgttccgaatgtactttccgagcgaattctccttattggttgcggcaaagaacgtgagctggatgagcgtcagtacaagcaggttattcagaaaaccattaatacgctgaatgatactggctcaatggaagcggtctgctttctgactgagctgcacgttaaaggccgtaacaactactggaaagtgcgtcaggctgtcgagacggcaaaagagacgctctacagtttcgatcagctgaaaacgaacaagagcgaaccgcgtcgtccgctgcgtaagatggtgttcaacgtgccgacccgccgtgaactgaccagcggtgagcgcgcgatccagcacggtctggcgattgccgccgggattaaagcagcaaaagatctcggcaatatgccgccgaatatctgtaacgccgcttacctcgcttcacaagcgcgccagctggctgacagctacagcaagaatgtcatcacccgcgttatcggcgaacagcagatgaaagagctggggatgcattcctatctggcggtcggtcagggttcgcaaaacgaatcgctgatgtcggtgattgagtacaaaggcaacgcgtcggaagatgcacgcccaatcgtgctggtgggtaaaggtttaaccttcgactccggcggtatctcgatcaagccttcagaaggcatggatgagatgaagtacgatatgtgcggtgcggcagcggtttacggcgtgatgcggatggtcgcggagctacaactgccgattaacgttatcggcgtgttggcaggctgcgaaaacatgcctggcggacgagcctatcgtccgggcgatgtgttaaccaccatgtccggtcaaaccgttgaagtgctgaacaccgacgctgaaggccgcctggtactgtgcgacgtgttaacttacgttgagcgttttgagccggaagcggtgattgacgtggcgacgctgaccggtgcctgcgtgatcgcgctgggtcatcatattactggtctgatggcgaaccataatccgctggcccatgaactgattgccgcgtctgaacaatccggtgaccgcgcatggcgcttaccgctgggtgacgagtatcaggaacaactggagtccaattttgccgatatggcgaacattggcggtcgtcctggtggggcgattaccgcaggttgcttcctgtcacgctttacccgtaagtacaactgggcgcacctggatatcgccggtaccgcctggcgttctggtaaagcaaaaggcgccaccggtcgtccggtagcgttgctggcacagttcctgttaaaccgcgctgggtttaacggcgaagagtaa

SEQ ID NO: 20621 - DNA, 909 bp, Escherichia coli
gtgattatgttggcatttatccgttttctttttgcaggcctgctgctggtgatcagccacgcctttgccgccacggttcaggacgaacacggcacgtttacactcgaaaaaacgccacaacggattgtggtgctggaactctcgttcgccgatgcgctggccgccgtggacgtcatcccgatcggtattgccgacgataacgatgcaaaacgcatcctgcccgaagtgcgtgcgcacctgaaaccgtggcagtccgtcggaacgcgcgcgcagccgagcctggaagccattgccgctctgaaaccagacctgatcattgccgacagcagtcgccatgcgggggtttacatcgccttgcagcaaatcgcgccggtactgctgcttaagtcccgcaacgaaacctacgctgaaaatttgcaatctgcggctatcatcggcgaaatggtgggtaaaaagcgagagatgcaggcacgtctggaacaacataaagagaggatggcgcagtgggccagccagcttcccaaagggacacgcgtggcctttggcacatcacgcgaacagcaattcaacctgcatactcaggagacctggaccggcagcgtgctggcctctctggggctgaacgttcccgctgcgatggcgggtgcgtccatgccgtccatcggcctggagcaactgctggcggtcaatcctgcctggctgctggttgcccactatcgcgaagagagcattgttaaacgctggcaacaagatccgctctggcagatgttaaccgccgcgcagaagcagcaggttgcttcggtcgacagtaacacctgggcgcggatgcgcggtatttttgctgcagagcgtattgccgctgacacggtaaaaatcttccaccatcagccgcttaccgttgtgaaatga

SEQ ID NO: 20622 - DNA, 972 bp, Escherichia coli
atggtgtctggcgctgcattgcacattacggggtttctccgcgttaaggattcattaaggtcgctacgtatacttctcgatatcttattgatttgccttaaagggattaccgtgacaaaaagtatttcgttaagtaaacgcatctccattattgtgattctttttgccattgtggcagtgtgtactttcttcgtgcaatcttgcgcccgtaaaagcaatcatgcagcatcatttcagaattaccacgccaccattgacggcaaagaaattgcaggcataacgaataatatctcttcgctgacctggtcggcacaaagcaatactctttttagcactatcaacaaacctgccgccattgttgaaatgaccaccaatggtgattttatccgcacaattcctctggattttgttaaggatctcgagacgatcgaatacattggcgataatcagtttgtcattagcgatgagcgcgattacgccatttatgtgatttcactgaccccaaactcggaagtaaaaatcctcaaaaaaataaaaatcccgctgcaagactccccaaccaattgcggttttgaagggttggcttattctcgccaggatcacactttctggttttttaaagagaaaaatccgattgaggtctacaaagttaacgggctgttaagtagcaatgaattacacatcagcaaagacgaggcactacaacggcaatttactttagatgatgtgtccggcgcagaatttaaccagcaaaaaaatacgcttctggtgctgtctcatgaatctcgcgcactccaggaagtaaccctggttggcgaggttatcggtgaaatgtcactaaccaaaggcagtcgaggtttgtcgcataacatcaaacaggccgaaggggttgcgatggatgcctctggtaatatttatatcgttagcgaaccaaatcgtttttatcgctttacccctcaatcatcgcattaa

SEQ ID NO: 20623 - DNA, 1590 bp, Escherichia coli
atgaacaataacgatctggtcgcgaagctgtggaagctgtgcgacaacctgcgcgatggcggcgtttcctatcaaaactacgtcaatgaactcgcctcgctgctgtttttgaaaatgtgtaaagagaccggtcaggaagcggaatacctgccggaaggttaccgctgggatgacctgaaatcccgcatcggccaggagcagttgcagttctaccgaaaaatgctcgtgcatttaggcgaagatgacaaaaagctggtacaggcagtttttcataatgttagtaccaccatcaccgagccgaaacaaataaccgcactggtcagcaatatggattcgctggactggtacaacggcgcgcacggtaagtcgcgcgatgacttcggcgatatgtacgaagggctgttgcagaagaacgcgaatgaaaccaagtctggtgcaggccagtacttcaccccgcgtccgctgattaaaaccattattcatctgctgaaaccgcagccgcgtgaagtggtgcaggacccggcggcaggtacggcgggctttttgattgaagccgaccgctatgttaagtcgcaaaccaatgatctggacgaccttgatggcgacacgcaggatttccagatccaccgcgcgtttatcggcctcgaactggtgcccggcacccgtcgtctggcactgatgaactgcctgctgcacgatattgaaggcaacctcgaccacggcggcgcaatccgtctgggcaacactctgggtagcgacggtgaaaacctgccgaaggcgcatattgtcgccactaacccgccgtttggcagcgccgcaggcaccaacattacccgcacctttgttcacccgaccagcaacaaacagttgtgctttatgcagcatattatcgaaacgctgcatcccggcggtcgtgcggcggtggtggtgccggataacgtgctgtttgaaggcggcaaaggcaccgacattcgtcgtgacctgatggataagtgtcatctgcacaccattctgcgtctgccgaccggtattttttacgctcagggcgtgaagaccaacgtgctgttctttaccaaagggacggtggcgaacccgaatcaggataagaactgtaccgatgatgtgtgggtgtatgacctgcgtaccaatatgccgagtttcggcaagcgcacaccgtttaccgacgagcatttgcagccgtttgagcgcgtgtatggcgaagacccgcacggtttaagcccgcgcactgaaggtgaatggagttttaacgccgaagagacggaagttgccgacagcgaagagaacaaaaacaccgaccagcatcttgctaccagccgctggcgcaagttcagccgtgagtggatccgcaccgcaaaatccgattcgctggatatctcctggctgaaagataaagacagtattgatgccgacagcctgccggagccggatgtattagcggcagaagcgatgggcgaactggtacaggcgctgtctgaactggatgcgctgatgcgtgaactgggggcgagcgatgaggccgatttgcagcgtcagttgctggaagaagcgtttggtggggtgaaggaatga

SEQ ID NO: 20624 - DNA, 3567 bp, Escherichia coli
atgttatgggccttaaatatttggacaggcccgcacagcaatggattaataacaatgatgaataaatccaattttgaattcctgaagggcgtcaacgacttcacttatgccatcgcctgtgcggcggaaaataactacccggatgatcccaacacgacgctgattaaaatgcgtatgtttggcgaagccacagcgaaacatcttggtctgttactcaacatccccccttgtgagaatcaacacgatctcctgcgtgaactcggcaaaatcgcctttgttgatgacaacatcctctctgtatttcacaaattacgccgcattggtaaccaggcggtgcacgaatatcataacgatctcaacgatgcccagatgtgcctgcgactcgggttccgcctggctgtctggtactaccgtctggtcactaaagattatgacttcccggtgccggtgtttgtgttgccggaacgtggtgaaaacctctatcaccaggaagtgctgacgctaaaacaacagcttgaacagcaggtgcgagaaaaagcgcagactcaggcagaagtcgaagcgcaacagcagaagctggttgccctgaacggctatatcgccattctggaaggcaaacagcaggaaaccgaagcgcaaacccaggctcgccttgcggcactggaagcacagctcgccgagaagaacgcggaactggcaaaacagaccgaacaggaacgtaaggcttaccacaaagaaattaccgatcaggccatcaagcgcacactcaaccttagcgaagaagagagtcgcttcctgattgatgcgcaactgcgtaaagcaggctggcaggccgacagcaaaaccctgcgcttctccaaaggcgcacgtccggaacccggcgtcaataaagccattgccgaatggccgaccggaaaagatgaaacgggtaatcagggctttgcggattatgtgctgtttgtcggcctcaaacccatcgcggtggtagaggcgaaacgtaacaatatcgacgttcccgccaggctcaatgagtcgtatcgctacagtaaatgtttcgataatggcttcctgcgggaaaccttgcttgagcactactcaccggatgaagtgcatgaagcagtgccagagtatgaaaccagctggcaggacaccagcggcaaacaacggtttaaaatccccttctgctactcgaccaacgggcgcgaataccgcgcaacaatgaagaccaaaagcggcatctggtatcgcgacgtgcgtgatacccgcaatatgtcgaaagccttacccgagtggcaccgcccggaagagctgctggaaatgctcggcagcgaaccgcaaaaacagaatcagtggtttgccgataaccctggcatgagcgagctgggcctgcgttattatcaggaagatgccgtccgcgcggttgaaaaggcaatcgtcaaggggcaacaagagatcctgctggcgatggcgaccggtaccggtaaaacccgtacggcaatcgccatgatgttccgcctgatccagtcccagcgttttaaacgcattctcttccttgtcgaccgccgttctcttggcgaacaggcgctgggcgcgtttgaagatacgcgtattaacggcgacaccttcaacagcattttcgacattaaagggctgacggataaattcccggaagacagcaccaaaattcacgttgccaccgtacagtcgctggtgaaacgcaccctgcaatcagatgaaccgatgccggtggcccgttacgactgtatcgtcgttgacgaagcgcatcgcggctatattctcgataaagagcagaccgaaggcgaactgcagttccgcagccagctggattacgtctctgcctaccgtcgcattctcgatcacttcgatgcggtaaaaatcgctctcaccgccaccccggcgctacatactgtgcagattttcggcgagccggtttaccgttatacctaccgtaccgcggttatcgacggttttctgatcgaccaggatccgcctattcagatcatcacccgcaacgcgcaggagggggtttatctctccaaaggcgagcaggtagagcgcatcagcccgcagggagaagtgatcaatgacaccctggaagacgatcaggattttgaagtcgccgactttaaccgtggcctggtgatcccggcgtttaaccgcgccgtctgtaacgaactcaccaattatcttgacccgaccggatcgcaaaaaacgctggtcttctgcgtcaccaatgcccatgccgatatggtggtggaagagctgcgtgccgcgttcaagaaaaagtatccgcaactggagcacgacgcgatcatcaagatcaccggtgatgccgataaagacgcgcgcaaagtgcagaccatgatcacccgcttcaataaagagcggctgcccaatatcgtggtaaccgtcgacctgctgacgaccggcgtcgatattccgtcgatctgtaatatcgtgttcctgcgtaaagtacgcagccgcattctgtacgaacagatgaaaggccgcgccacgcgcttatgcccggaggtgaataaaaccagctttaagatttttgactgtgtcgatatctacagcacgctggagagcgtcgacaccatgcgtccggtggtggtgcgcccgaaggtggaactgcaaacgctggtcaatgaaattaccgattcagaaacctataaaatcaccgaagcggatggccgcagttttgccgagcacagccatgaacaactggtggcgaagctccagcgtatcatcggtctggccacgtttaaccgtgaccgcagcgaaacgatagataaacaggtgcgtcgtctggatgagctatgccaggacgcggcgggcgtgaactttaacggcttcgcctcgcgcctgcgggaaaaagggccgcactggagcgccgaagtctttaacaaactgcctggctttatcgcccgtctggaaaagctgaaaacggacatcaacaacctgaatgatgcgccgatcttcctcgatatcgacgatgaagtggtgagtgtaaaatcgctgtacggtgattacgacacgccgcaggatttcctcgaagcctttgactcgctggtgcaacgttccccgaacgcgcaaccggcattgcaggcagttattaatcgcccgcgcgatctcacccgtaaagggctggtcgagctacaggagtggtttgaccgccagcactttgaggaatcttccctgcgcaaagcatggaaagagacgcgcaatgaagatatcgccgcccggctgattggtcatattcgccgcgctgcggtgggcgatgcgctgaaaccgtttgaggaacgtgtcgatcacgcgctgacgcgcattaagggcgaaaacgactggagcagcgagcaattaagctggctcgatcgtttagcgcaggcgctgaaagagaaagtggtgctcgacgacgatgtcttcaaaaccggcaacttccaccgtcgcggcgggaaggcgatgctgcaaagaacctttgacgataatctcgataccctgctgggcaaattcagcgattatatctgggacgagctggcctga

SEQ ID NO: 20625 - DNA, 1590 bp, Escherichia coli
atgacgttgtctccttatttgcaagaggtggcgaagcgccgcacttttgccattatttctcacccggacgccggtaagactaccatcaccgagaaggtgctgctgttcggacaggccattcagaccgccggtacagtaaaaggccgtggttccaaccagcacgctaagtcggactggatggagatggaaaagcagcgtgggatctccattactacgtctgtgatgcagtttccgtatcacgattgcctggttaacctgctcgacaccccggggcacgaagacttctcggaagatacctatcgtaccctgacggcggtggactgctgcctgatggttatcgacgccgcaaaaggtgttgaagatcgtacccgtaagctgatggaagttacccgtctgcgcgacacgccgatcctcacctttatgaacaaacttgaccgtgatatccgcgacccgatggagctgctcgatgaagttgagaacgagctgaaaatcggctgtgcgccgatcacctggccgattggctgcggcaagctgtttaaaggcgtttaccacctttataaagacgaaacctatctctatcagagcggtaaaggccacaccattcaggaagtccgcattgttaaagggctgaataacccggatctcgatgctgcggttggtgaagatctggcacagcagctgcgtgacgaactggaactggtgaaaggcgcgtctaacgagttcgacaaagagctgttccttgcgggcgaaatcactccggtattcttcggtactgcgctgggtaacttcggcgtcgatcatatgttggatggcctggtggagtgggcacctgcgccgatgccgcgtcagactgatacccgtaccgtagaagcgagcgaagataaatttaccggcttcgtatttaaaattcaggccaacatggacccgaaacaccgcgaccgcgtggcgtttatgcgtgtggtgtccggtaaatatgaaaaaggcatgaaactgcgccaggtgcgcactgcgaaagatgtggtgatctccgacgcgctgacctttatggcgggtgaccgttcgcacgttgaagaagcgtatccgggcgatatcctcggcctgcacaaccacggcaccattcagatcggcgacacctttacccagggtgagatgatgaagttcaccggtattccgaacttcgcaccagaactgttccgtcgtatccgcctgaaagatccgctgaagcaaaaacagctgctcaaagggctggtacagctttccgaagagggcgcggtgcaggtgttccgtccaatctccaacaacgatctgatcgttggtgcagttggtgtgctgcagtttgatgtggtggtagcgcgcctgaagagcgaatacaacgttgaagcagtgtatgagtcagtcaacgttgccactgcccgctgggtagaatgtgcagacgcgaagaaattcgaagagttcaagcgtaagaacgaaagccaactggcgcttgatggcggcgataacctcgcttacatcgctaccagcatggtcaacctgcgcctggcacaggaacgttatccggacgttcagttccaccagacccgcgagcattaa

SEQ ID NO: 20626 - DNA, 780 bp, Escherichia coli
atgactgatctgaaagcaagcagcctgcgtgcactgaaattgatggacctgaccaccctgaatgacgacgacaccgacgagaaagtgatcgccctgtgtcatcaggccaaaactccggtcggcaataccgccgctatctgtatctatcctcgctttatcccgattgctcgcaaaactctgaaagagcagggcaccccggaaatccgtatcgctacggtaaccaacttcccacacggtaacgacgacatcgacatcgcgctggcagaaacccgtgcggcaatcgcctacggtgctgatgaagttgacgttgtgttcccgtaccgcgcgctgatggcgggtaacgagcaggttggttttgacctggtgaaagcctgtaaagaggcttgcgcggcagcgaatgtactgctgaaagtgatcatcgaaaccggcgaactgaaagacgaagcgctgatccgtaaagcgtctgaaatctccatcaaagcgggtgcggacttcatcaaaacctctaccggtaaagtggctgtgaacgcgacgccggaaagcgcgcgcatcatgatggaagtgatccgtgatatgggcgtagaaaaaaccgttggtttcaaaccggcgggcggcgtgcgtactgcggaagatgcgcagaaatatctcgccattgcagatgaactgttcggtgctgactgggcagatgcgcgtcactaccgctttggcgcttccagcctgctggcaagcctgctgaaagcgctgggtcacggcgacggtaagagcgccagcagctactaa

SEQ ID NO: 20627 - DNA, 1383 bp, Escherichia coli
gtggcaaaagctccaaaacgcgcctttgtttgtaatgaatgcggggccgattatccgcgctggcaggggcagtgcagtgcctgtcatgcctggaacaccatcaccgaggtgcgtcttgctgcgtcgccaatggtggcgcgtaacgagcgtctcagcggctatgccggtagcgccggggtggcaaaagtccagaaactctccgatatcagccttgaagagctgccgcgtttttccaccggatttaaagagttcgaccgcgtactaggcggcggcgtggtgccaggaagtgccattctgattggcggtaaccctggtgcggggaaatccacgctgctactgcaaacgctgtgcaaactggcccagcagatgaaaacgctgtatgtcaccggcgaagagtcgctgcaacaggtggcaatgcgcgctcatcgccttggcctgccgactgacaatctcaatatgttgtcggaaaccagcatcgaacagatctgcctgattgccgaagaagagcaaccgaagctgatggtaattgactcgatccaggtgatgcatatggcggatgtacagtcatcgcctggtagcgtggcgcaggtgcgtgaaacggcggcttatttgacacgcttcgccaaaacgcgcggtgtggcgattgtcatggtggggcacgtaaccaaagatggttcgctggctggcccgaaagtgctggaacactgtatcgactgttcggtgcttttggatggcgatgccgactcccgttttcgcaccttgcgcagccataaaaaccgcttcggcgcggtgaatgagctgggcgtcttcgcgatgaccgaacaggggctgcgtgaagtcagcaacccttcggcaattttcttaagtcgcggcgatgaagtgacctccggtagctcagtgatggtggtatgggaaggaacgcgtccactgctggtggagattcaggcgctggtcgatcactcgatgatggcgaacccacgccgcgtggcagtggggctggaacaaaaccgtctggcaatcctgctggctgtgttgcaccgtcacggtggtctgcaaatggccgatcaggatgtgtttgtgaacgtggtcggcggcgtgaaggtaaccgaaaccagtgccgacttagcgttactgctggcgatggtttccagcctgcgcgacagaccgctgccgcaggatctggtggtgtttggtgaagtcgggctggcaggggagatccgcccggtgcccagcggtcaggaacgaatctctgaagcggcgaaacacggttttcgccgggcgattgttccggcggctaacgtgccgaaaaaagcgccggaagggatgcagatttttggcgttaaaaaactctccgacgcgcttagcgtgttcgacgacttataa

SEQ ID NO: 20628 - DNA, 2142 bp, Escherichia coli
atgtcaaccggattacgtttcacgctggaagtggacggcctgccaccggatgcttttgcggtggtctcctttcatctgaaccagtcactctcttcgcttttttccctcgctctctctctggtcagccagcagtttctctcccttgaattccagcagatcctcgacaaaatggcctacctgacgatatggcagggcgatgacgtacagcgccgggtgaaaggtgtggtgacctggtttgaactgggggagaacgacaaaaaccagaagctgtacagcatgaaggtgtgcccgccgctgtggcgcacagggctgcgccagaacttccgtatcttccagaatgaggacatcgcaagcatcctcggcacgatattgcaggaaaacggggtgaccgagtggagcccgctgttcagcgagccacatccttcccgtgagttttgtgtccagtacggtgagactgattacgatttcctgtgccggatggcggcggaggaaggcatcttcttttatgaggagcacgcgcaaaaaagtaccgaccagagcctggtcctgtgcgataccgtgctttatctgccggagtcctttgagatcccctggaatccgaacacccgtaccgaggtaagcaccctctgcatcagccagtttcgctacagcgcacaaatccgcccttcttccgtggtgaccaaagactacacctttaaacgccccggctgggccggacgttttgaccaggaaggccagcaccaggattaccagcgcacacagtatgaagtgtatgactatcccggacgtttcaagggcgcccacgggcagaactttgcccgctggcagatggacggctggcgaaacaacgcagaagtggcgcgcggaacaagccgttcgccggagatatggccgggacggcgaattgtgctgacggggcatccgcaggcgaacctgaaccgggaatggcaggtggtggcaagtgaactgcacggtgagcagccgcaggcggtgccgggacgcaggggttcaggcaccacgctggataaccattttgcggtaataccggcagacagaacatggcgaccacagccgttgctgaaaccgctggtggacggcccgcagagcgccgtcgtgacgggaccggcaggcgaggaaatcttctgtgatgaacatggccgcgtgcgggtgaaatttaactgggaccgctataacccgtcaaaccaggacagttcatgctggatccgtgtggcacaggcgtgggcaggcaccgggtttggtaacctggcgataccgcgtgtgggtcaggaggtcattgtggacttcctcaacggcgatccggaccagccgatcattatggggcgtacctaccaccaggaaaaccgcacacccggtagcctgccggggacgaagacgcagatgaccattcgttcgaaaacctataagggcagcgggtttaatgaactgaagtttgacgatgcgacagggaaagaacaggtctacatccacgcgcagaagaacatgaacaccgaggtgctgaataaccgcaccacggatgtgataaacaaccatgccgaaaaaataggtaacaaccaggcgatcaccgttaccaataaccagatcctgaacattggcgttaatcagatacagacggttggtgtcaaccaggtggaaacggtaggcagtaaccagattatcaaagtgggatcaaaccaggttgaaaaggtggggatcattcgtgcgctgacggtgggtgtggcgtatcagacgacggtaggcggcattatgaatacctcggtggcgttgttgcagtcctcacaggtagggctgcataaatcactgatggtgggaatgggctacagcgtcaatgtagggaataacgtcaccttctcggtgggcaagacgatgaaggaaaacaccggacaaacagcagtttattctgccggtgagcatcttgaactctgctgtggtaaggcaaggctggtgctgacgaaggacggaagcatatttcttaatggtacgcacattcatctggaaggggagtcggatgtgaacggtgatgcgccggtgattaactggaactgtggtgccacacaacctgtaccggatgcgcctgtgccgaaagatttaccccccggaatgccggatatgcggcaattttga

SEQ ID NO: 20629 - DNA, 885 bp, Escherichia coli
atggagggactgacagtggaattttccgtattaagtaacaatctgaaaatgccgatgatgggatttggtgtttttcaggttaccgataaaaacgtgtgcaaacagtcagtgttgaacgctatccgcacggggtatcgactcatcgacactgcagcggtatacggtaatgaagatgccgtcggtgaagccgttcgtgaagctatatccgaaggtttatgtacccgagaagagttatttataacgtctaaattgtgggtgcaggatatgttgaatcaggatacggcagcagcaggtattgaagcatcattaaaaaaatcgggactagaatacttcgacctctatttattgcatcaggctatgcgcgattatttcagtgcgtggcgtgcactcgaagatgcctatgaagagggcaaattaaaagcgattggggtttccaatttctatcctcatgttctggcgaacttttgtgaaacggtaagagttaaaccgatggtcaaccaggtcgagttgcatccctattttgcccaaccagaggcgctggcaaccatgaagtattataacgtgcagcctgaagcatgggctccgttaggtggtggacgacataaaccctttgaaaataatctgcttcagagtattgcagatgcccatcaaaaatcgatttctcaagtcattctgcgttggaatattcaacggggagtggtcgttattccgaaatcgacacatcaacagcgtatcgaagaaaattttgctatctgggatttctcactgacagagaaagaaatggcacaaattagttcgcttgatttgggttatgttggggagtcggtaaaacattttaatcctgaatttgttcgtggttgtcttgctgtaaaaatacatgattga

SEQ ID NO: 20630 - DNA, 2163 bp, Escherichia coli
atgaaaaaaaatgcccagtccgtggaagcctggctggaggcgatgatcgccgtggcgcgctattatcggctcgatttttctcaggagaatgtgcgcgcgaccgtcaactgggagcgcgacagtaagcgggaggagttactcaccgacatggcgcggcagttagggatggggttgcggttggtggagttttccgccgattcgcttaacccctggcgtctgccgctgatcgcggtgtttgataatcagcagattggcgtgatcacccgtcgcgacaatcatgacaatatcagcgttcagttcagcggtgacgaagggctggaaactacacttaacgtcgcggatattgaagataaaatcgtcgaactggcgctgctgcgccctctcagcgccatccctgacgcgcgggtggatgactatattcgcccgtatcaggcgaactggttctggagtctttcgctaaaagactggcggcgctacggcgatattatgctggcgtcactggtggcgaacgtgctggcgctggcggcgatgattttctcgatgcaggtttacgatcgggtggttccggcgcaatcgtacccgacgctatgggtgcttttcgccggggtgatgatggcgatcctgtttgagttctgtatgcgcatggtgcgtacgcatctatctgatgtgatcggaaagcgggcagacctgcgtatttcggatcgcgtttttggtcatgcgctacggctgaaaaacaacgtgcgatcgaaatccaccggatcgtttatctcgcagatccgcgaactggaatcagtgcgggagcttattacgtccaccaccatcggcgcggtggcggacctgccattcttcctgctgtttgtctttattttgtggatgatcggcggctggctggtgctggtggttttgctggcgctgccgttgctggtgatccccggcctgctggtgcaacgcccgctggcgcggctggcgaacgaaggaatgcgcgagtcagcggtacgcaacgctacgctggtggaagccgtgcagtcgattgaagatattaaactgctgcgcgccgaacagcgttttcagaatcagtggaaccacaccaacgacgtggcctcgtccatcagcatgaagcaacgttttctcaccgggctgctgctcacctggacccaggaagtgcagtccatcgtctacgtggtggtgctgctggtgggctgctttatggtgatgaacggcgacatgaccaccggcgcgctggtcgggacgacgatcctggcttcgcgcaccattgcgccgctgtcgcagatatccggcgtgctctcgcgctggcagcaggcgaaagtagcacgtaacggccttgatgaactgatgaagcgcccggtggatcagccggaacacggcaaactggtgcataaagcggtgctgcacggtaattatcagttcagcaacgcggtgttttattacgacgaagaagagaagattgccgatgtagcgattggcaaactcaacattcaggctggtgagaaaatcgccattctcgggcgcaacggcgcgggtaaatcgacgctactgcaaatgctcgccggaatgcgtatcgcccagcaggggcaggtgttgctggataacatcagtatcgggcagcttgatccggcagatctgcggcgagacatggggctactcagccagaccgggcgactgttctttggttcgctgcgggaaaacctcaccatggggatgccggaagccagcgatgaagatatcgaacgcgcgttaaccctcagcggagcgctgccctttgtgcagaagcagaaaaacggcctcaactacatgattcaggaagggggatttggcctctctggtggtcagcggcaaacgctgctgctggcgcggctactcatctctcagccgaatatcgtcctgctcgacgaacccagcgcctcactggacgaaatggcagaagcgtatttaatcgaacaactgaaacagtggattgggcatcgcacgctgattatcgccactcaccgcacggcgatgctgcaactggtggataggataatcgtgatggatcaggggcggattgtgatggacggcgcgaaagaggccattttgcgtgaacagggcgagcccacagcgcgacgggtggtgttgcaggagaagaataaggggtctgcggcatga

SEQ ID NO: 20631 - DNA, 1902 bp, Escherichia coli
atgtcaaccggattacgtttcacactggaagtggacggcctgccaccggacgcttttgcggtggtttcctttcatctcacccagtcactctcttcgctcttttccctcgatctctccttggtcagccagcagtttctctcccttgaatttgcgcaggtgctggacaaaatggcctacctgacaatatggcagggtgatgatgtacagcgccgggtgaaaggtgtggtgacctggtttgaactgggggagaacgacaaaaaccagatgctgtacagcatgaaggtgcacccgccgctgtggcgtgccggtctgcgccagaacttccgtatcttccagaacgaggacatcaaaagcatcctcggcacgatattgcaggaaaacggggtgaccgagtggagtccgctgttcagtgaaccgcatccttcccgtgagttttgtgtccagtacggtgagactgattacgatttcctgtgccggatggcggcggaggaaggcatcttcttttatgaggagcatgcttacaaaagtaccgaccagagcctggtgctgtgcgacacggtccgccatctgcccgaatcttttgaaatcccctggaacccgaacacccgtaccgaggtgagcaccctctgcatcagccagtttcgctacagcgcacaaatccgcccttcttccgtggtgaccaaagactacacctttaaacgccccggctgggcaggacgttttgatcaggaaggccagcaccaggattaccagcgcacgcagtatgaggtgtatgactaccccggacgtttcaagggcgcccacgggcagaactttgcccgctggcagatggagggctggcgaaacaatgcagaaaccgcgcggggaatgagtcgctcgccggagatatggccgggacggcgaattgtgctgacggggcatccgcaggcgaacctgaaccgggaatggcaggtggtggcaagtgaactgcacggcgagcagccgcaggcggtgccgggaaggcggggagcagggacggcgctggagaaccattttgcggtgatcccggcagaccggacatggcgaccccagccgcggctaaaaccgctggtggacggtccgcagagcgccgtcgtgacggggccggagggtgaggaaatcttctgtgatgaacatggccgagtgcgggtgaaattcaactgggaccgttataacccggcagaccaggacagctcgtgctggatccgtgtggcacaggcgtgggcaggcaccggttttggcaacctggcgataccgcgtgtgggtcaggaggtgatagtggacttcctcaacggcgatccggaccagccgatcattatggggcgcacctaccaccaggaaaaccgcacccccggcagcctgccggggacgaagacgcagatgaccatccgttccaaaacgtatatgggcagcgggtttaatgagctgaagtttgatgatgcgacagggagagaacaggtctacatccacgcgcagaagaacatggataccgaagtgctcaacgaccgtaccaccaccgtaaaacacgatcatcgcgaaaccgtaaaaaatgaccagacggtcacgatccaggaaggtaaccgccttcttacggtggaaaaaggccacaagatcaccggagtactgaaagggtctttatctgaggatgtctttcaggacagaggcacgattgccggttcggtgcatgttgacgctgtaaacaatggtggcgaaggcaacggtatacaggcttatacggcaattaaggaaattatgctggccgtggaggaaagcaaaattgcgctgacgccggatggcattcagctacaggtcggggaatcaacggtaatcaggctgtcgaaggatggcatcaccatcgtgggcggttctgttttcatcaactga

SEQ ID NO: 20632 - DNA, 348 bp, Escherichia coli
atggtaagcaacgcctccgcattaggacgcaatggcgtacatgatttcatcctcgttcgcgctaccgctatcgtcctgacgctctacatcatttatatggtcggttttttcgccaccagtggcgagctgacatatgaagtctggatcggtttctgcgcctctgcgttcaccaaagtgttcaccctgctggcgctgttttctatcttgatccatgcctggatcggcatgtggcaggtgttgaccgactacgttaaaccgctggctttgcgcctgatgctgcaactggtgattgtcgttgcactggtggtttacgtgatttatggattcgttgtggtgtggggtgtgtga

SEQ ID NO: 20633 - DNA, 774 bp, Escherichia coli
gtgagcgaaattaattatcaggcactgcgtgaaaaggcagagaaagcaactaaaggaagctacatcgtagggcatacatctgttaaccagcacggcaatttaacaggagtttttgtttgccaaaaatggaaaggagaacccggtggcgtgattgcggaatgtcatgttaactgcctgattgaatcagatgatcaggcttatgcaaacgctgaattcatagcagaggctaacccggctaccgtgctggcactgctggatgaacaggaaagaaaccagcaatacatcaaacgccgcgaccaggagaacgaggagattgcgcttacggttgggaagctgcgtgttgagcttgaagcagcagagaacaaccttattgatagtgaatgccatgttgctgaactggaagaagctctacgcgataagcaggcgttacttgaagcctcagaaaagcgcaacgcaaaattacaaagcgagaatgcatacatccgcaaccggtacaaagaactggacctattaatcgggaaaaacattctggtcatgcaggctgccattatcgaatggcaggcaactggcgacgctaagagcggactagcatggatttataacacactgtttggccctggcgaattaccggacgaatctgagaaagatgctcaggcctactttaatcgcaaatatgcaccgattgacgaaaagcttatggcgcttcacaagtggttttgggaacaaagtgaagccgagcgcgccgctggcattcgcatcaaaagaggtgagtaa

SEQ ID NO: 20634 - DNA, 1047 bp, Escherichia coli
atgctaactccatacaaaagagctgatgtagaattcgaatggattagtgatctagaagaacagggttgtttttcaaaagtatatctggctcatgacagacacctagctcatgacttggtgattaaagaaatagaaaaaaaagaaaacactaaccacgacgactactttaatgaagcaaggcttctctataaacatgcacatccaaatattgtgcaagttcagtatgctgctcaatgtgagagcaatatctatatagccatgccattttatcataatggttcgctaaaccaattaatgaaaaaaaataatcttacaagcagggagataatacggtattccattcaatttttaagtggactttatcatatacactcaaaaggtcttatgcattttgatataaaacctaataacattatgatatcaaacagaaatgaggccatgctatctgactttggattatctcagttagtcaatgaggaatcgagagctgcgcctgagtttggatatcattttcatgtgccaccggaatatttttctttatcaacaaatgattataatttcacatatgacatatatcaggcaggattaaccatatatagaatgtgtgttggacatgataattttgaaagagaaagatctgcatttagcacgattgaacaactcagagagtcgataattaatggctgctatccattaaaagagtatcctccccatatacataaaaaattaataacaatagtgaacaaatgcattcatgtagatccaaatgaaagatatcaatccgtactagatgtactaaacgatctctcagctataagtgatggcgttcttgactggcgtctacagatgacgaaaccaactaacggcacatgcgaatggcaaaaaaagtctggggacgctatactgtctatagtttttgacgcagaaaattcgtctactactggttttcgtttatacgatgatgggcggaaaaggcgtgctacgaacttaacaatatcctcaggatgtacccctacaaaactgtataggttattaaaggataactga

SEQ ID NO: 20635 - DNA, 900 bp, Escherichia coli
gtgagcgaaattaattatcaggcactgcgtgaaaaggcagagaaagcaactaaaggaagctacatcgtagggcatacatctgttaaccagcacggcaatttaacaggagtttttgtttgccaaaaatggaaaggagaacccggtggcgtgattgcggaatgtcatgttaactgcctgattgaatcagatgatcaggcttatgcaaacgctgaattcatagcagaggctaacccggctaccgtgctggcactgctggatgaacaggaaagaaaccagcaatacatcaaacgccgcgaccaggagaacgaggagattgcgcttacggttgggaagctgagagtggagctgggagcagcacagaacaaccttattgatagtgaatgccatgttgctgaactggaagaagcgctacgcgataagcaggcgttacttgaagcatcagagaagcgcatagcagaactggaagccgaactcgtaagccaaacttacaagttgccacacacgcagtttgaacagattgctaacctctacgaaatgcaatttgatgacggtcgcacttgtgcctttcacactgatgcgcaaaaggctgagcaatggcttcaggcgtgcgacggaaacagggttcaggaatacgttaagctggaacggttgcagaatgcgctgtctggcaactctccggtaactccggatggttggataagttgtagtgagcgaatgccggataccaaaacagccgttcttgttgccgtggagtttgacaggaaaggtgactggcgaatgaagtgggcgacttacatcccggggcatcctgacgctaatgatgggtggataattcctggtgcgtcgtggaaaccgtcacactggatgccgctaccagaaccgccgcaggaggtgaactga

SEQ ID NO: 20636 - DNA, 840 bp, Escherichia coli
gtgggtggcatgtttgttccgtttctcattatgttgcgcgaaggacttgaagccgcgctgattgtcagtttgattgccagctatcttaagcgtacccagcgaggccgatggattggtgtgatgtggattggcgtgttgcttgccgctgcgttgtgcctgggcttggggatcttcattaacgaaaccaccggcgaatttccgcaaaaagagcaggaactgtttgaaggtatcgtggcggtgatcgccgtggtgatccttacctggatggttttctggatgcgcaaagtgtcgcgcaacgtcaaagtacaactggagcaggctgtcgatagcgcattgcagcgtggaaatcatcatggctgggcgctggtgatgatggtcttttttgccgttgcaagggaagggctggagtcggtctttttcctgctggcggcatttcaacaagatgtcgggatctggccgccgctgggtgcaatgctcggtcttgctactgccgtggtgctaggcttcctgctctactggggcggtattcgcctcaatcttggtgcattttttaaatggaccagcctgtttattctcttcgtcgccgcagggctggcagctggtgccattcgcgcatttcatgaagccggattgtggaaccactttcaggaaatcgccttcgatatgagtgcggtgctctcaactcactcgctgtttggcacgctgatggaagggatttttggctatcaggaagcgccgagcgtcagcgaagtcgccgtctggtttatttatctcatcccggcgctggtggcatttgctctgccaccacgcgcaggggcgacagcgtctcgctccgcgtaa

SEQ ID NO: 20637 - DNA, 561 bp, Escherichia coli
atgttttctactttcaaaaaagcagctctgctggcagctattgcattacctttttcaactatggctgcgcctacagtcacttttcagggtgaagtaaccgatcagacctgttccgtaaatatcaacggtcaaaccaattcagtagtattgatgccgaccgtagccatggctgacttcggtgcaactttagctgatggtcagagcgcaggccagacgccgtttacggtttctgtgtctaactgccaggctccaactggtgcagatcaggcaatcaacaccaccttcctgggctacgacgttgacgctagcacgggtgttatgggaaaccgtgataccagcagcgatgcggcgaaaggctttggcattcagttaatggattccagcacttctggtaacccagtaactctggctggcgcgactaacgtaccgggtctgaccctgaaagttggcgataccgaagccagctacgacttcggtgcgcgttacttcgttatcgatagcgctgctgccactgccggtaaaattaccgctgtcgcagaatacaccctgagctacctctaa

SEQ ID NO: 20638 - DNA, 303 bp, Escherichia coli
atggaactgactccaagagaaaaagacaaactattactgtttaccgctgcactgctggcagagcgtcgtctggcccgcggcctgaaacttaactatcccgaatccgtggccctgattagcgcttttataatggagggcgctcgcgacggcaaaagcgtcgctgcgctgatggaagaaggacggcatgtcctgagtcgcgagcaggtcatggaaggcataccagaaatgatccccgatatccaggtcgaagccacctttccggacggctccaagctggttaccgtccataatccgataatctga

SEQ ID NO: 20639 - DNA, 1707 bp, Escherichia coli
atgatgagtaatatttcacgccaggcctatgctgacatgttcggccctaccaccggtgataaaattcgtctggcagacactgagctgtggatcgaggtcgaagatgatttaactacctacggcgaagaggtcaaattcggcggcggtaaagtaatccgcgacggtatgggacaggggcaaatgctctccgccggctgcgctgatctggtgctgaccaatgccctgatcatcgattactgggggatcgttaaagccgatatcggcgtcaaagatggaaggatatttgctatcggcaaagccggtaatcctgatatacaacccaacgtcactatcccaatcggcgtatccacggaaattattgccgcagaaggcaggatcgttaccgcaggtggcgtcgatacgcatattcactggatctgcccacagcaggctgaagaagcgctgacatccggcattaccaccatgatcggtggcggtactggcccgacagcgggttctaacgccacaacctgtaccccaggaccatggtacatttatcaaatgctgcaggctgcagacagcctgccggtcaatatcgggttgctgggtaaaggcaattgctccaatccggatgcgcttcgtgagcaggtcgcggccggggttatcggcctcaaaattcacgaagactggggagctacacctgcggtaatcaactgcgcactgactgtagccgacgaaatggacgttcaggttgcgctacacagtgatacgcttaacgaatcaggattcgttgaggatactctgactgccatcggcgggcgcactatccataccttccatacagaaggtgcaggtggtggtcatgctccggatattatcaccgcctgcgcgcaccccaatattctgccttcctcaaccaatccgacgctaccctataccgtcaacactattgatgagcatctggacatgctgatggtttgccatcatcttgacccggatatcgccgaggacgtagcctttgccgaatcgcgcattcgccaggaaaccattgccgcggaagacgtcctgcacgaccttggcgcgttctccctcacctcgtccgattcgcaggccatgggacgcgtcggagaagtagtgttacgaacctggcaggtggcacaccggatgaaagttcagcgcggcccgttaccggaagaaagtggtgataacgacaacgtccgcgtgaagcgctatatcgctaaatacaccattaatccggcattaacccacggtattgctcatgaagtcggctcgattgaagtgggaaaactggcggatctggtgctctggtccccggcgttctttggcgtaaaaccggcgactatcgtcaaaggcggaatgatagccatggcgccgatgggtgatatcaacggctctatccccacaccgcagccggtgcactatcgcccaatgttcgctgcattgggcagtgcccgtcaccgctgtcgtgtgactttcctgtcgcaggcagcagcagcaaatggcgtcgctgaacagcttaacctgcacagcacaactgctgtggtaaaaggctgccgcacagtacaaaaagccgatatgcgccacaacagcctgttgcctgatataaccgtggattcacaaacctacgaagtgcgtatcaacggcgaactgataaccagtgaaccggcggacattctgccaatggcgcaacgttatttcctgttttaa

SEQ ID NO: 20640 - DNA, 675 bp, Escherichia coli
atgccgactccggaaaaacgtctgcggctgatgcagcttgccagtaacagcctccctgttggaggctacagctggtcccagggactggagtgggcagtggaagcaggctgggtagaagatagcgccgcctttgaacactggcagcagttgcagatggaacagagtttttttgccgtcgacctgccactgcttgcccggctataccgggcctgtgaagcgggcgatcctgacagtgccgggcgctggaccgcttatctgctggcctgcagggaaacccgtgagctacgcgatgaagaacgtaaccgcggtgcagccttcaccagacttctggtcgactggcagcccgactgcccggccgaatggcgcaaactatgccagcaaagccagttaaccggtatggcatggctcggcgtacgctggcaaatatccgtttcagacctggccctgagccttggctacagctggattgaaagcgcagtgatggcgggcgtcaggctggtaccctacggccagctggctgcccagcagttaattatgcgcctgtgtgcccgctatgcggcgaacatggacagtgcccttgcaaccccggatcacgcaattggttcagcaacgccacttgcatctatcgcttccgcgcgacatgaaacccagtattcccgattattccgttcttag

SEQ ID NO: 20641 - DNA, 618 bp, Escherichia coli
atgaacataatcaagcaaccgctgcgtgtcggcgtcggcggtccggtcggctcaggtaaaaccgcgcttctggaagccctctgcaaatccatgcgtgacacctggcaattagccgtagtcaccaacgacatctacaccagagaagatcaacgcattctcactgaggccggagcactggaagcggaacgcattgtcggtgtcgaaacggggggctgccctcatacagccattcgtgaagacgcatcaatgaatctggcagccgtggaagcactgagtgagaaatttggtaatctcgagctgatctttgtggaaagcggcggcgacaacctgagtgcgaccttcagccccgaactggcggaccttaccatatatgtcatagatgtggcagaaggagaaaagatcccgcgtaaaggcggtccggggatcaccaaatccgacttcctcgtgatcaataaaactgaccttgcaccatacgtgggcgcctccctcgaggtaatggagcgtgatactttacgtatgcgcggagaacgcccatgggggttcactaacctgaaaagtggtgaaggtctgcaaaacatcatcgcctttatcgaagagcagggcatgctgggtaagtaa

SEQ ID NO: 20642 - DNA, 882 bp, Escherichia coli
atggatctgacccaactggagatgttcaacgcggttgccgaagctggcagcattacgcaggctgcagcaatagtgcatcgcgtgccgtcgaatctcactacccgtctacgccagctggaaacagaactgggggtagatctgtttattcgcgagaatcagcgtttacgtctatctcctgccgggcataactttttacgctatagccaacaaattctcgcgttagtggatgaagcgcggagcgttgtcgctggcgatgagccgcaaggtttattttrtctgggttcgctggaaagcaccgcagcagttcgcattccggccacgctggcggaattcaaccgtcgttatcccaaaattcagttttcactttccaccggcccttccggcactatgctggaaggtgtgctggagggaaaacttaatgcggcgtttattgatggacccattaaccatactgccattgacgggataccggtataccgcgaggagctgatgatcgtcacgccacaaggtcatgcgccagtaatccgtgccagtcaggttaatggcagtaacatttatgccttccgcgccaattgttcgtatcgtcgccacttcgagagctggtttcatgctgacggtgccgctccgggaactatccatgagatggagtcttatcacggaatgttggcctgtgtggtcgcaggagcaggtattgcgcttattccgcgctctatgctggaaagtatgccggggcatcaccaggttgaagcgtggccgttagctgagcaatggtgttggctaacaacctggctggtctggcgtcgtggtgcgaaaacgcgtccgctcgaggcatttattcaactactggatgtgcctgactcgacaaaacagggttaccaatga

SEQ ID NO: 20643 - DNA, 2145 bp, Escherichia coli
atgtgcggattattattcattttcacggaggttgctatgtcaaccggattacgtttcacgctggaagtggacggcctgccaccggacgcgtttgcggtggtctcctttcatctgaaccagtcactctcttcacttttttccctcgacctttctctggtcagtcagcagtttctttcccttgaatttgcgcaggtgctggacaaaatggcctacctgacggtatggcagggcgatgacgtacagcgccgggtgaaaggtgtggtgacctggtttgaactgggggagaacgacaaaaaccagatgctgtacagcatgaaggtgtgcccaccgctgtggcgcacagggctgcgccagaacttccgtatcttccagaatgaggacatcgaaagcatactcgctacgatcctgaaagaaaacggtgtgaccgagtggagtccgctgttcagcgagccgcatccttcccgtgagttttgtgtccagtacggcgaaactgattacgatttcctgtgccggatggcggcggaggaaggcatcttcttttatgaggagcacgcgcaaaaaagtatcgaccagagcctggtcctgtgcgacaccgtgcgttatctgccggagtcctttgagatcccctggaacccgaacacccgtaccgaggtgagcaccctatgcatcagccagttccgctacagcgcacaaatccgcccttcttccgtggtgaccaaggactacacctttaaacgacccggctgggcagggcgttttgatcaggaaggccagtaccaggattaccagcgcacacagtatgaagtgtatgactaccccggacgtttcaagggtgcccacgggcagaactttgcccgctggcagatggatggctggcgcaacaacgcagaagtggcgcgcggaacaagccgttctccggaaatatggccgggacggcgaattgtgctgacggggcatccgcaggcgaacctgaaccgggaatggcaggtggtggcaagtgaactgcacggcgagcagccacaggcggtgccgggacgcaggggttcaggtaccacgctgawtaaccactttgcggtaataccggcagaccggacatggcgaccacagccgttgctgaaaccgctggtggatggcccgcagagcgccgtcgtgacgggaccggcaggcgaggaaatcttctgcgacgaacatggtcgcgtgcgggtgaaatttaactgggaccgctataacccgtcaaaccaggacagttcatgctggatccgtgtggcacaggcgtgggcaggcaccggctttggcaacctggcgataccgcgtgtgggtcagyaggtgattgtggacttcctcaacggcgatccggaccagccgattattatggggcgtacctaccaccaggaaaaccgcacacccggcagcctgccggggacgaagacgcagatgaccattcgttcgaaaaactataagggcagcgggtttaatgaactgaagtttgacgatgcgacagggaaagaacaggtctacatccacgcgcagaagaacatgaacaccgaggtgctgaataaccgcaccacggatgtgataaacaaccatgctgagaccattggcaacaatcagatgattgcggttaccaacaatcagatacagacggtgggcgttaaccagatagagacggtgggcagtaaccagatcattaacgtgggttctgttcaggtggaaacgattggacttgttcgtgcgctgaccgtgggcgtggcgtaccagacgacggtaggtggcattatgaacacttcggtggctctgatgcagtcctcgcagatcggtttgcataaatcgttgagggtcgggctgggttatgacgtcaaagtcggaaataacgttaccttcaccgttggtaaaacgaaaaaggatgataccgggcagaccgcgatttactccgccggtgagcatctggagctctgctgtggtaaggcaaggctggtgctgacgaaggacggacaaatttttctcaacggcacaaaaattcatttgcagggtaaggagcaggttaatggtgactcactgttgattaactggaactgtgcagcctcgaaatccccaccgaagacccctgatgaaaagcaggatacgccggatatgagagagtactga

SEQ ID NO: 20644 - DNA, 1002 bp, Escherichia coli
atgagtaaagttggtattaacggttttggtcgtatcggtcgactggtgttgcgtcgattacttgaagtcaaaagcaacatagacgttgtcgctattaatgatcttacttccccaaaaattctcgcctatctgctgaaacatgattcaaactatggtccgttcccctggagcgttgattttacggaagattcacttatcgttgatgggaaaagtatcgcggtttacgccgaaaaagaggctaaaaatattccgtggaaagcgaaaggtgcagaaatcattgtcgaatgtactggcttttatacctccgccgagaaatcgcaggcgcatcttgatgctggcgcgaagaaggtgttgatttccgcccctgcaggtgaaatgaaaactatcgtttataaagtcaatgacgacactctggatggcaacgacaccattgtttccgtggcatcatgcactactaactgtcttgcgccgatggccaaagccttgcatgacagtttcgggatagaagtcggcacgatgacgaccattcatgcctatactggcacccagtcactggtggatggcccgcgtggtaaagatttacgtgcttcacgcgccgcggcagaaaatatcattccccacactacgggcgcggcaaaagccattggtctggtgatcccggaactgagcggcaaactgaaaggtcatgcgcaacgcgtgccggtgaaaacaggttcggtcactgaactggtatcgattctcggaaaaaaagtgactgccgaagaggtgaataacgcacttaaacaagcaaccaccaataacgagtcatttggttataccgatgaagaaatagtctcttccgatatcattggcagccatttcggttcggtgtttgatgccacgcaaacggaaattaccgccgtgggcgatttacaactggtgaaaacggtcgcctggtacgacaacgaatatggcttcgtcacgcagcttattcgcaccctcgaaaaattcgctaaactctga

SEQ ID NO: 20645 - DNA, 1584 bp, Escherichia coli
atggcagggaagtttcgctgcattttgctgttgatagttgggctttttttctcttcgttaagttatgcgaaaaacacggagatgccttcttatgaagaagggatctcgctctttgatgttgaagccactctgcaaccggatggggtgctcgacatcaaagaaaatattcattttcaggcgcgaaatcagcagattaagcacggattttatcgtgatttaccacgactatggatgcagcctgatggggacgctgcactgctgaactatcatattgttggcgtcacccgtgatggtattcctgaaccctggcatcttgactggcatatcgggttaatgagtattgtcgtgggcgataaacaacgtttcttgcctcaaggcgactatcattatcaaattcattatcaggttaaaaatgctttcctgcgtgagggagattcagatctgttaatctggaacgtgactggtaaccactggccgtttgaaatctataagacccgattttcactcaagttccctgatatcgcgggtaatccatttagcgaaatcgatctctttactggagaagagggcgacacatatcgaaatggccgcatccttgaggacggaagaattgaatccagcgatccgttttatcgtgaagatttcacggtactctaccgttggcctcactcgttacttagcaatgccccggctccacaaacgacgaatattttcagccatcttcttttaccctccacgtcatcgttgttaatttggtttccgtgtctattcctggtttgtggatggttatatctctggaagcgcaggccgcaatttacgtcggtagatgttttacggatgcagaaattttatctgccgcgtaaaaagtcttcgttttaccggcctgatacttttttgcaatggggtggactggcaatattggcggtcattctttacggtaacctgagtcctgtaggctgggcaggaatgagtctggtgggcgatatgtttattatgatctgctggcttcttccttttttattttgttcccttgagcttttgtttgcccgcgatgatgacaagccttgcgttaatcgtgtaatcatcactttgtttttaccgctgatttgttcaggcgtggccttttattctctctatatcaatgtcggagatgtattcttttactggtatatgccagcgggttattttagcgctgttttcctgaccggttatctcactggcatggggtatatttttctgccaaagtttacccaaactgggcagcaacgttatgcccacggtgaagctatcgttaactatctcgcgcgtaaagaggcagcaacacacagtgggcgtcggcggaaaggggaaacacggaaactggattacgcgttgctaggttgggctgtctcagcaaaccttggaagagaatgggtagcacgtatcaccccatcactcacagcggctgttcgcgccccggaaattgcccgtagtggcgttttgttctcattacagatgcacctgagtctgggggccaataccagtttattggggcgaagttattccggtggtgctgcgggtggcggaggcggtggtggctggtaa

SEQ ID NO: 20646 - DNA, 1029 bp, Escherichia coli
atgactgataacaatcaaaatagccgcgagcaattttatcagcatatttccgggcaaaacctgaccccgctgtgggagtcactgcaccatctggtgccgaaaacgcccaacgctaactgtgcgccagcgtactggaattatcaggagatccgcccgctgctactggagagcggcggcctgattggtgcgaaagaggccgtgcgccgcgtgctggtgctggaaaacccggcgctgcgcgggcagtcttccattaccgcgactttatatgccggtttgcaactgatcatgccgggcgaagtggcaccgagtcatcgtcataatcagtcggcgctgcgttttattgttgaaggcaaaggggcatttaccgccgttgatggcgaacgcacgccaatgaatgaaggcgattttatcctgaccccgcagtggcgctggcacgatcacggtaaccctggcgacgaaccggttatctggctcgatgggctggatctgccattagtgaatattctgggctgcggttttgccgaagattatccggaagagcaacaaccggtaacgcgtaaagagggagattatctgccgcgttacgctgccaatatgttgccgctgcggcatcagacggggaactcctcgccgatctttaactatcgttatgaccgcagccgcgaagtgctgcacgatttaacccgactgggcgatgccgacgagtgggatggctacaaaatgcgctacgtcaacccggtcaccggcggctatccgatgccgtcgatgggcgctttcctgcaactgctgccgaaagggtttgcctcacgcgttgcgcgtaccactgacagcaccatctaccatgtggtggaaggtagcgggcaggtcatcatcggcaatgaaaccttcagctttagtgcaaaagatatcttcgtggtgccgacctggcatggcgtgtcgttccagaccacgcaagattccgttttatttagtttttcggacagaccggtacaagaagccctggggctgttccgcgaagcgcgttattaa

SEQ ID NO: 20647 - DNA, 1071 bp, Escherichia coli
atgccaaatacatctattcacttatctcgctgtaatattttacaaaataataaattgcaaccaacagaaatttacaaagaatcacaacaaaccgccaaacttgagtttttttgcgatgagtttctaaaaatatctcaaagtagatacgggttatcaacctcaacagacagcatagctaatttattggcttttttcacgaaagcctcagatgcaattgatagtatcaagacccaaaaaattgacgttcacagttatggtttcgtaccaataagacattttgtcgaacatgtcataacgtataaaaatgaatttgcagcggattatgaaccytatacccttacctttacccgaggtgaaaacaacgaaggtattttgagtgtcgaaagcaaagaagggtttatttcacaaagaacaataaacttaaatgaatatgaaactgcaattaacatcatcaatgaacatgttataaaagaaaatatccacaacacggtccagtcaccgacagaaaaatacatttcaaaaataaacagctctgataaaccttataaaaccagcagtaaggaaagtattaaaagtcaactttacagcgatcaaagaaatatacagacctgctactacattctgagaaaaaatacagaatggtacaaatacgcatcctccgaggaacgctatgataaattcaagaattcttctaaggaaattaaaaatacctacaagcaaattgtacaagcgcagaaaaaattgaaccaaatgaaatacatcaataaattaagtggtgagcttatcgatatcaccgacaaaaagttagcaccattaataaatgatagtttcagctatacacgagatttctttgcttactcaaaacaggaaaaaaatatcttcacatttgataattctaagtttgtagatccaaaggaaaaagaaggtttaatggtacaacacagcaatgggcaactggttattactggtaaatattgccctgaaggtgtgcaaacagcattcacccaagaacaatatgataaattaataagatacattaatattttctttacctttccgaaattagaataa

SEQ ID NO: 20648 - DNA, 1137 bp, Escherichia coli
atggctacttggcaacaaggaatcaactcaggcggttttcttgctggtatcggtgggcaaaactcaaatgcgccaaaggcaagtgatgtaagtgaggcgttggcctatattcgccagaacaacgaaatggagcgttcaggtcgcaataacatcggccttcaggcgttgcagggacttggtagtgtcgctcaaacatctcaagccgcaaagcaacaggaagcggatgctgcattccaaaaagaatatgcggcagccatccagtccggcgatcgacagcaggttcgagatctgatgaccaaatatcctggtcaattagagaagattcagtctggtatgaagtgggcagacgaagaccagcgcaattctatcggcaccttagcggctggcgcacgccttgcggcctcgtctccagaagcaatgcaatcatggctgcaaaacaacgccaaggaactggcgcgcgtcggtgttgaccctaacaacgttgctcagatgtatcagcagaatccttcagggtttggtgagtttgtttatcaccttgggatggctgctctcggtccgattgactacttcaatgttcaggacaagatggctggtcgtgagattgaccgaggcaggctggcagagacaatccgcagcaatcaggccggagattttgagtttaagtcaaagccgtcatatttagttctatcatttgctgaaatatcatctgtagtctttatcctaatgtctgtctatatggtggcaaaaagtcaaaatagcaatggattacagtatgatgcgctttttataccatcaatggccttttcaatattagtgttttcgtttaatggtggtattatttcaaaaataatatcaaataaagttatgatacttttaggtgatgcttctttttcattttacttggtccatactatagtaatcagtacattgagcaagttctttaatgtttctggtcttggtgctataagtgtaattaaatttatagtaatggctctgtttgcttcattatttatatcaataatgatgtatttgttttttgaaaagccaataaacaataagctaagaaaatggtggagtggatttaagaatgatgtttcaaccactcgagttgaaaaaatagaaggcaatcaattatag

SEQ ID NO: 20649 - DNA, 1014 bp, Escherichia coli
atgaatactgaagccacgcacgaccaaaatgaagcacttactaccggcgctcgcctgcgtaatgctcgcgaacaactaggacttagtcagcaggccgttgccgagcgactttgcctgaaggtttccacggtacgcgacattgaagaagataaggcacccgccgatcttgcttcaacattcctgcgcggatatatccgctcttatgcgcgtctggtacatattccagaagaagaactgctgccagggctggaaaagcaggctccactacgggctgcaaaagttgcgccgatgcagagtttttccctcggtaaacgccgcaaaaaacgcgacggctggctgatgaccttcacctggctggtgttgtttgtggttatcggcctgagcggtgcctggtggtggcaagaccacaaagctcagcaggaagagatcaccactatggccgatcaatcttcggkggaactgagcagtaatagcgagcaggggcagagtgttccgttaaatacgtdgacaactacagacccggctacaacgtccacgccgccagcgtctgtggatactaccgcaaccaacacgcaaacacctgtcgtaactgcgccagcaccagctgttgatccgcaacagaatgcggttgtttcgccttcgcaggcaaatgttgataccgccgcgaccccggcaccaacggcagcaacaacgccagatggtgctgcgccgttgccaaccgatcaggctggcgtgaccacgccggtggctgatccgaatgcgctggtgatgaactttactgccgattgctggctggaggtcactgatgctaccggtaaaaaattgtttagcggtatgcagcgtaaagacggtaatttgaacttaaccggccaggcaccgtacaaactgaaaattggtgcgccagccgcagtacagatccagtatcaagggaaacctgtcgatctgagtcgttttatcagaactaaccaggttgcgcgtctgaccctcaatgccgaacaatcaccggcgcagtaa

SEQ ID NO: 20650 - DNA, 441 bp, Escherichia coli
atgatagcggcagatagtttgcccggagtttacatgacgttacgaaataaagcgttccatcagttacgacagctttttcagcagcacacggctcgctggcagcacgagttacctgacctgaccaaaccacagtatgcggtgatgcgcgccattgctgataagcctggtatcgaacaggtggcactgatagaagcagcagtcagcaccaaagcaacgttggcagaaatgttggcaagaatggagaatcgtggcttagtcagacgtgaacatgatgccgctgacaagcggcgtcgctttgtctggctgactgccgaaggagaaaagatacttgctgcggcgataccgattggtgacagcgtggatgaggaatttttggggcgtttgagtgcagaagagcaggagctgtttgtgcagctggtgcgcaagatgatgaacacatag

SEQ ID NO: 20651 - DNA, 708 bp, Escherichia coli
atgcatccatttacctcattaacactatgggcattggcggcctgcaccacgcttatcctgcccgcgcagaccattttgccgatctatagcgcggcgacctttttttgccttattgcgctaaaggccacgcggcggcgggcaaaatatgtcgtctggctgatgttctcgctgggagccgggctgtggctggtacacggtggctggctaacagaatggctaagcggcacgccgcgttcgccggagcgttggacgcatgctattacgctctggttgcggattctggcgattgtttcaacctcacagttgtggatgcagtacgtccccgtgcaatgttttatccgcgctctgtttgcttctcgcctgccgccgggcgtcgcttatctgtttgccgggccgttattggtcgttgagcagttaaaacggcaattagcgattattcatgaagcgcagcgtgcccgcggcgtgccgctggatgagggctggtatcagcgtttacgtgcgatgcccgcgttaactattccgctaacacacaatgcgctaaacgatcttgctgtccgtggtgcggcgctggatatgcgggcatttcggatccacaaccgacgaacaacgttgtgggcaccagccgatagcaccctacaacgcgtagcgcgttacaccatgatcttgctgatgctgacagaattcggagcgtggatatggttacgttag

SEQ ID NO: 20652 - DNA, 984 bp, Escherichia coli
atgatgcgcacagggctggttactgtaattttcctcgccttactgcttgtgggatgcgtggtatatccagggattggtgcccgatttattgcaccacaaacggtgttgcaggcatttcttcattttgaaccgcaaaacttcgatcacaacgtaattgtaagactccgtttgccgcgtttagcggcagcattgcttaccggtgcttctcttggagttgctggtgctttgttgcaggctgtcattcgtaacccattgggggagccacatattttaggcttaaatgccggagccgctcttgctgtcgttgctgccagtgcgcttgggctggcctttccggttggacgcccactgctggcatctacgggcggcgcgttattgttcctgttgatattgctgctttcctccgcagggcgttcagggctaacgccaatgaaagttactttatgcggcgtggcgctatcggcgttcgtatcctcaataacggctgcaatcctgattcttgacgaacaaacactgctggcgatgcggacatggctagcaggtgatttagcggggcaggattgggcgacgctgggtacgtccgcctggttttctctggggggggttgtgttagccatttaccttgcgccctctcttaacatgttggcactgggtgatcgcatggcgcaggggctgggcgtctcggtactccgcacgcgaacattcactctgcttgcgatcgcgttgctctgtggcgcagccgtatcgattgctggccccattggttttgtcggtctgctagtaccgcagattgtcaggcgtctggtatcagcggatttgcgcgttctgctccctctttcagcttgtgtcggcgcgcttttgttattactggcagatattattgctcggacgcttttcacgccccatgagttagcgaccggtgtcatgacggcgttagttggtgcgcctgtttttgtcattatggcgacgagaatgttcaaatga

SEQ ID NO: 20653 - DNA, 756 bp, Escherichia coli
gtgcgcgccatgaaatcattaagtaagtcgtcacaaataccgctctatcaacaagtggtggagtggataagagaaagtatttataccggagatctggtggaagacgatcgcattccttcggaataccagattatggatatgctggacgtgagtcggggaaccgttaaaaaagcggtcgcccaactggtaaaagaaggcgtgttaatacaggtccagggtaagggaacatttgtcaaaaaagagaacgtggcatatccgttaggtgaaggattattgtcattcgcggaatcgctggaaagccagaaaatacattttaccactgaagttattacgtcacggattgaatcggctaatcgttatgtggcagagaaattaagaataacgcccggtcaggatattctttaccttgaacgcttacgctcaattggtgatgaaaaagcgatgctgatagagaaccgtatcaatattgagctatgccccggtattgctgaaatcgattttaatcaacacaatttatttccaacaatagaaagtttgtcgcaaagaaaaattcgttactcggaaagtcgctatgccgcgcgattaattggtaatgaacgtggtcattttttagatatcagtgaagacgcacccgttttgcatctggagcagttagtctttttctcccgaggattacccattgagtttggcaacgtctggttaaaaggaaataaatattatcttggcaccgtactgcaacggcgggaagtgagttaa

SEQ ID NO: 20654 - DNA, 1029 bp, Escherichia coli
atgaaccactacacacgctggcttgagttaaaagaacaaaatcccggaaagtacgcgcgtgacatcgcagggttaatgaatattagagaagcagaactggcatttgcacgcgtcacgcacgatgcgtggcggatgcacggcgatatccgtgaaattctggcggcgctcgaaagtgttggcgaaaccaaatgtatttgtcgtaatgaatatgcagtccatgagcaagttggtacgttcacaaaccagcatttgaacggacatgccggattgatcctcaatccgcgcgcgctggatttacgtctgtttctcaatcaatgggccagtgttttccacatcaaagaaaacacggctcgtggcgaacgccagagtattcagttctttgatcatcagggcgatgcattactaaaagtttatgccaccgacaataccgatatggcggcatggagtgagcttctggcacggtttatcaccgatgagaatacgccgcttgagttaaaagccgttgatgcgccagttgttcaaacgcgagccgatgccactgtggtcgagcaagagtggcgggcgatgaccgacgttcatcagttttttacgttgctcaagcgccacaacctgacgcgccaacaggcgttcaatctggtggcagacgatttggcctgcaaagtatccaacagtgcgttggcgcaaattcttgaatctgcacagcaggatggtaatgaaatcatggtgtttgttggcaaccgtggctgcgtacagattttcaccggmgtggtagaaaaagtggtgccaatgaaaggttggctgaatattttcaacccgacgtttactcttcatctattagaagagagcattgctgaagcctgggttacccgtaaaccgaccagcgatggctacgtaaccagtctggaattgtttgcccatgatggtacgcagatagcgcaactttatggtcaacgtacagaaggcgaacaggagcaagcgcaatggcgtaagcaaattgcttcgctgataccggaaggcgttgctgcataa

SEQ ID NO: 20655 - DNA, 1143 bp, Escherichia coli
atggttgataaaataatatttacggttactcctattttttcaattcctcctcgcggagcggctgctgttgaaacgtggatgtatcaggttgctcagcgtaccaattttccaaatcgtattgtttgtatcaaaaatccaggatactcaaattacacctttgttaatgataattgtagtattcatagggttggattcagtcgcatatataagcggttatttcaaaaatggacaagacttgatcctcttccatattcacagagaatattgaatattgcacatgattttcctataacgaaagaaagtgttattgtagttcataatagcatgaagctatacactcaaattcgtaagcgagctcctcaggcaagagtggttatacatatgcataatgcatttgaaccaaaattgcttgagcaaaatgttaaaatgatagtgcctagtttatacttgaaaaagtattaccaatcttatttagcaaatgcagatattgagattgtaccaaatggaattgatttagaaacctatcaatctaattttcagccgatcactagaagcgaacttaatatctcccctgaagagaaaattattttttatgctgggcgtatcgtccctgacaaaggcatattgctgttgatgcaatcattcgaaaaattggccgctgctcacaaaaatttaaaattagttgtgattggtgattatacagaaatgagtaaaagtgacaaaggtgcatatcaacgcaatgtcagggaaattgcaaaacgtttgaaggatcgttgcattatgttaggaagcataccgcctgaaaagatgcattgttattacccactggcagatttagtcgtcattccttcccagttccaggaaccattttgcatggtggcaattgaagctatgggtgctggtaagcctgttttagtgagtacgcgtggggggatgacggaatttgtcaaagaaaatactacgggattccatttaaaagaacctatgactgcagactccataagcagcgatattttaaaaacgttagcgaatcctgaattaacagcagttgcaaagcaaggtcaggactttgtgtttgatcactacagttgggatggcgtaactcaaagattcgaagaggttattcataattggtttgaataa

SEQ ID NO: 20656 - DNA, 1125 bp, Escherichia coli
atgcttaacgtaaataacgataccctgtctgtaacgtctggggttaataccgcctcgggtacttctggtattactcaatctgaaacgggtttatcgctggatttacaactggttaaatccatgaactcgtcagcaggctggacagaaagtagccctttaccgacgccgccggcaggtcactcattagtgacgccctctgctgctgaggatgtccttagtaaattgtttggtggtattagtggtgaggttacaagtcgcactgaggaggcagagccacagcgcacaagctatccctatctctctcaggtgaataccgttgaccctcagcaaatgatgatgatggtcactctgttatccctggatacttccgcgcagaaagtctcgagtctgaaaaactctaacgagatttatatggatgggcaaactaaagcgctggagaataaaacgcaggagtataaaaaacagctcgaagaacaacagaaagccgaagagaaatcacaaaaaagtaaaattgttggccaggtctttggttggttgggcgtcgcattaacagccgttgccgctgtttttaacccagcactctgggctgttgttgccattggtgcaacagcaatggcactgcaaacggcagtcgatgtaatgggggaaaatgcccctcagggattaaagactgcagcacaggtctttggcggaatatctatggccgcaagcattctgacagccggcgttggcggggtgtcttcactgttatctaaatttggtaatgttgctaacaaaattggctcaagcgttgtaaaagtcgttgagaaggcggcagaagcgctggttaaaaacgtttttgcaaaaatttcgacagtggctgagggcgttacgaacggtattcgttctgccgggacaactgcgttgaataatgaggctgcgcaactccaaatgttgtctcagttagctgctttcgcggtgcaaaacttaactcgacagagtgaaagcttaggtgagagtgcgaagctcgagctggataaagcggcaagcgagttacaaaatcaggcgagctatttacaaagtgtttctcaactgatgtccgattcagcacgggtaaatagtcgtattgttagtggccgaatttaa

SEQ ID NO: 20657 - DNA, 1539 bp, Escherichia coli
atgaaaaaaataagtttttttatttttacagcactattttgctgcagtgcacaagctgccccgtcctctctggaaaaaagattaggcaagagcgaatattttattattactaaaagttctccagtacgtgcaatccttaatgactttgctgctaactacagcattcctgttttcatcagtagttccgtgaatgatgatttctctggcgaaataaaaaatgaaaaacctgtaaaagtactggaaaaactgtccaaactatatcatctcacatggtattatgatgagaacatcttgtatatttataaaacaaatgaaatatcaagaagtataattacaccaacatatctggatattgactcactgctaaaatatctgagtgatacaatctcagtaaacaaaaactcttgcaatgtgagaaaaattacgacatttaactcgattgaagttcggggtgttcctgaatgtataaaatatattacatctttatcagaaagtcttgataaagaggcacagtctaaagccaaaaataaagatgttgttaaggtctttaaactgaactatgcgtcagcgacagatataacatacaaataccgtgaccaaaatgttgtcgtcccaggtgttgtctccattctgaagacaatggcaagtaatggttcacttcccagtaccggtaaaggtgccgtcgagcgaagcggtaacctgtttgataacagtgtaacgatttccgctgatccacgtcttaatgcagttgttgtaaaagaccgcgaaataacgatggatatctatcagcaattaatttctgagcttgatattgaacaaaggcaaattgaaatttctgtctcaattattgatgttgatgcaaacgatcttcagcagctcggcgtaaactggtccggtacgttaaatgcaggacaaggtacgattgcctttaatagctctaccgcacaggctaatatcagctcttctgtgataagtaatgccagtaattttatgattagggtgaatgcgttacaacagaactcgaaagctaaaatactctctcagccttcaattataaccttaaataatatgcaggcgattcttgataaaaacgtaacgttttatacaaaagtctccggagaaaaggtggcgtctctggaaagtattacaagcggaacattgctgagagtgacaccacgtatacttgatgacagctcgaatagccttaccggaaaacgtcgggaacgagttcgtttgttacttgatattcaggatggcaatcaatcgactaaccaaagcaatgctcaggatgccagcagcaccttacctgaagtacaaaattcagaaatgacaacagaagcgacattaagtgcaggagaaagtttattacttggcggatttatccaagataaagaaagttcaagtaaagatggtataccgctgttaagcgacattcctgttattggtagtttattctccagtacggtaaaacaaaaacatagtgttgttcgactctttttaattaaagcaaccccgataaaatctgcatctagcgaataa

SEQ ID NO: 20658 - DNA, 903 bp, Escherichia coli
atgaaaaaaacgctcgcaacgttatttttattaacgtgtctgggatcatcatccgcttatgcggataacgctttgattttacaaactgattttagcctgaaagatggtgccgtctcggcgatgaaaggggtcgcattcggtgttgaccataatcttaaaatatttgatttaacacacgaaattccaccgtataacatctgggaaggcgcttaccgcctgtatcagaccgccagttactggccgcaaggttcggtatttgtcagtgtggtcgatccgggcgtaggcactgaccgtaaatcgatagtgctgaaaaccaaaaacggtcaatacttcgtttcaccggataacggtacgctcactttggtggcggaatcgctgggtattgagagcgtccgggaaatcgacgaaaaagctaaccgcctgaaaggttctgaaaagtcatataccttccacggtcgtgacgtgtatgcctacaccggtgcacgtctggcttccggggcgatcacgttcgaycaggtggggcctgagcttcctgcaaaggttgtcgaactttcttatcagaaagcaaaagcaacaaaaggtgaagtgaagggcaatatcccgattctcgatattcagtacggcaacgtctggagcaatatcagcgacgagttgctgaatcaggcggggatcaaactcaacgacacgttgtgtgtgaccatttccgaaggttcccggcaaaaatacgcagggaaaatgccgtatgtcgcaagcttcggcgatgtgccggaaggacagccgatggtgtatctgaacagcttattgaatgtttccgtggcgctgaatatggataatttcgcgcagaaacatcaggttgcgtctggtgctgactggaatattgatgtgaagaaatgtgataagtaa

SEQ ID NO: 20659 - DNA, 618 bp, Escherichia coli; identical to SEQ ID NO: 20641

SEQ ID NO: 20660 - DNA, 1707 bp, Escherichia coli; identical to SEQ ID NO: 20639

SEQ ID NO: 20661 - DNA, 675 bp, Escherichia coli; identical to SEQ ID NO: 20640

SEQ ID NO: 20662 - DNA, 303 bp, Escherichia coli; identical to SEQ ID NO: 20638

SEQ ID NO: 20663 - DNA, 1143 bp, Enterococcus faecalis
ttgaaaatttcagatgtcacagtgtataaagtaaaaccaagatggatttttgttaagatctcgactgacgaaggaatcgaaggctggggagaaatgatctcaggaactaaaacagaaacggttgttgctggagcttatgagataggaaaccggctgattggacgtaatccgtttgaaatcgagcgcctcttccaagaaatgcatcgatctttcttccgaggcggtcctattaatggaaccatcgtttcgggtttagaaatggctctgtgggatatcaaaggaaaagcgtttaatgttccggtttatgaattattgggcggtgcagcacgtgataaaatcaaggtttattcttggattggtggagatcgaccaagtgaagttgcagaacaagcacaagatcggtttgatcggggctttacggccgtcaagatgaacgcgacagaagagctgcattatatcgattcctaccaaaaagttgatgaagtggtggaacgagttgcatctattcgcgaacgttttggtgatgcaatggatattggtgttgattttcatggacgggtccataaaccgatggcaaaagtgctagcaaaagctttggagccattccatccaatgtttttggaagaagtcgttttacctgaaaatgaagaacactttaaagaagtagctgattctgtggctgtaccattagctactggtgaacgcttgtacactcgttggcaattcaagaacctctttaaacaaggtactgttgatattatccaaccagatgtggctctttgtgggggaatcttggaaacccgtaaaatcgcagcgatggcggaagcttacgacatggctgttgcgcctcatgcgccatatggtcctgttgcactagcagcaactctgcaagtagactcatgtacgccaaacgtctttatccaagaacaaagcttagggatccactataacaaaggttttgatctgttagattttgtgaagaacaaagaagttttccaatataaagacggctacgtagatctaccttcaaaaccaggtctgggcttggaaatggatgaagacaaaatcaaagaaattgcacaagaaggtttgatttggaccaatccgcaatggaaaaattatgacggtacgatcgctgagtgg

SEQ ID NO: 20664 - DNA, 2082 bp, Enterococcus faecalis
atggcaaaagatttattattagaaattggcttagaagaaatgcccgcacatgttgtcacaccaagccgtatccaacttgaagaaaaagtaatcaaatttttagatgaacatcatttagactatgaaacagtgcaatcctttgccacacctcgtcgtttagccgtgaaagtaactgcgattcctgaaaaacaagcggatgttgaagaagaagtaaaaggtccagcgaaaaaaattgctttagatgctgaaggaaattggtcaaaagctgcacaaggttttgtacgcggccaaggagttacaactgaggacattgttttcaaagaattaaatggtgtcgaatatgtctatgtgacgaagtttaccaaaggccaaagtgccaaagaggtattaacaaaattaaatgacgtgattacaagtctaactttcccggtaacaatgcactgggcaaactatgatttcgaatatattcgtccaattcattggattgtggcactacttgatgatgaagtaattcctttcaacgtgttagacgtgacgacagggcaaacttctcgtggccaccgtttcttgggagacgatgtgacgttccaacacgctaatgaatatgaaacaaaattaaaagaacaatttgtagtggttcaaccgaatgaacggaaacaaatgattgttgatcaagcgaacgctctcgctgcagaaaaaaattggcagttagctttagatgaagagttattggaagaagttacgaatttagtggaatatccaactgcatttgtaggcagttttgatgaaaaatatttatctgttccagatgaagtattagtgacttctatgaaagaacaccaacgttactttgaagttcgtaacgaccaaggcttattaatgccgcattttatcgctgttcgcaatggggataatgttcaccttgaaaacgtgattaaaggaaatgaaaaagtgttaattgctcgtttagaagatgcagaattcttttacaatgaagataaaaaattaacgattgaagcatgtgttgaaaaactaaaaaatgtgactttccatgaaaagattggctcaatttatgaaaaaatgcaacgggttgctttaattgcacaaatcattggtcgaaaagttggcttatctgaggatgaattggaagatttaaaacgtgcctctgaaatttataaatttgacttagtaacaaatatggttggtgaattcccagaattacaaggaattatgggagaaaaatatgccttattacaaggcgaaaaaccagccgtagcaacggcgattcgagaacattatctaccaacttccagtgaaggtgaattgccagaaacagcaatcggggctgttttagccttagccgataagcttgacagcgtcttttcattcttctcagttggtatgattccaacaggttctaacgatccttatgcacttcgtcgtcaaacctatggcgttatccgaattattgaagataaaggctggaccttcccattagttcaattacaaacagaagttgatgaagcagtgaatcaagatgttgagaaatatggcgttttactaaacgaaggacaagcagaagtcgttgaatttgtgaaagctcgcttacgtcaattattaatgacgaaaaatgttcgccatgacattatcgatgcagtggtgtctgctgagcaagccgatttatcgaaattatttgcttcagcgaatattttaaaaagccgttttgaagatcaagattttaaaccatcaatggaagccttaacgcgtgttattaatttagcgaaaaaaggtcaagaacttttaggtgatactgaagaagggattgatccaagtctgtttgaaaataaggcagaaaaagaactgtatcaagcagttaacgatttatctgaagcatttgcgacacgcacgattgcagaaaactatgaagcactagtaaatctacgtccgttaattgatgcgtacttcaatgaaacgatggttatggttgaggatgaaaaagtcaaacaaaaccgattaaaacaattaatgcaaattgctaaaatggcgttatcaattgctagcctagatttattaattgtaaaa

SEQ ID NO: 20665 - DNA, 1176 bp, Enterococcus faecalis
atggatttaaccaatcgttttaatcgtcaagtaaataaaattgctgtttctttaattcgtcaatttgacgaacaagtctcaggaattgaaggtattttaaaattaacgctaggagagccggattttaacacacctgagcatgtcaaaaaagcagccaaagaagcaattgatgcgaatttttctcattatacagggatgtctggtttattagatgtccgtgaagcagccgcttattttatgaaagaaaagtaccatttgacttaccagcctgggacagaaattttagtaacagttggagcaacagaagcgatttcagcttcgttattagcaattttagaacaaggtgacaaagtgctattgccagcacctatttacccagggtatgaaccaattattacattggcgggggcggaaccggtatatttggatacacgaggcaacgattttgtcttgacccctgaaatgattgaagcggcaatggccgagcatggggaacaagtcaaagcaattattttaaattatcctagcaacccaactggtgtcacctataaccgccaagagttgcaagcaattgctgatgttctaaaaaaatacgacatttttgtgattagtgatgaaatttatagtgagttaacttatgatgagagtcatgtttcgattgctgaaatgttacgtgaccaaacgattttaattaacggtttgtcgaaatcacatgccatgacaggctggcggattggctttatttttgcaccagcgattttaacagcggagatcattaaagttcatcagtatttagttactgcggctgcaacagtgtctcaaaaagcggctgttcgtgccttaatcgaaggaatgcatgatgctgaaattatgaaagaagagtatcggaaacggcgcgattttgtttatgaacagatgactcaattggggtttgaggttgcgcgtccaaatggcgccttttatatttttgctaagattcctactggttatgaacaagattctatgaaattttgtattgatttagcgcaaaaagaagcagtagcgttgattccaggtatttcttttggtccagaagcagaaggatacgtccgaattagttatgcgtccgatatggataaattaacaacggccatggaacgaatcgcacattacatggcgacacaacgcgtaacgcac

SEQ ID NO: 20666 - DNA, 1170 bp, Enterococcus faecalis
atgagcgagttaaaggatatttcagagacaatcacgttagaagcaacaaaagaatatgttcaagtgacattacaagcaaatcaatatcagttagaaagactagaacagtttcaacaatttttaaaatcaagtcgtggatttttatcgggaaaaataatacaagcaacggaagaagcgttagtgattcaataccataaggatcaatatatgcaatccattttacaagcgataaaaaaaatggatcaatatgagcgattattgttagcgcaaagagttcattatttggttgatttcttaggtacgccggtccaaccctttattcatccagaaaacatctatatcttgggagaagaattattaattgctcatcgtggttttatgcaggtcattgtgccttattcagcagatgaaagagaattttttaaacaatatcgagcgctgattttagcaatcttacatccaaagtatgagtatgaacaattgattcaagggaatggcaccctgaaagatacgctatctaaacaattacaagaggcgaaaacaatcaatgaaattgagcaaatcattggtgaacaaatcattcgtcaaaaagccaagcgcgaagcagaaaccaaattagtgagtaaaaaaagttatttaacctttaaatgggccagcttagtgttattggctttaacgctactttttgcaactacaacagggatttatgtcttaaaaaaattaccagcccaagagcgagtgagtttggcagaagcgcagtatatttctaatgactatgcaagtgttacgaaaacattaaaagaagatacaccagaagaattgccgataggagctaagtatgttgctgctgttagttctgtccaactagataatttatcaaatgaacaaaaaacagcaattttaaataatttatctcaaaaatctagtgaaaataccttactttattggatttatattggcaaaggagactttgaaaaatcattagatattgcccaaaatttaggcgataaccaatatatattacatgcctatacaaaattatatgatgcaaccaaagccaataacaaaatgaacggcgagaaaaaacaagcattgttaacaaaatatgaagaagcaattgataaatacatgaaaatcttgggaggaaaaacggatgacaacgaaaatcag

SEQ ID NO: 20667 - DNA, 3141 bp, Enterococcus faecalis
atgaagtatgattttgaaatggaaacagacgagagtaccagtgttgggaaaatcgtagcacaaatcaaagaaaatagtgatgtcttggaatttggtccaggtaatgggcgaatgactagctatttgatggaagaaaaaaagtgccgggtctcaattgttgaattagacaaagaactttatgatcatgtcagtcaattttcaacagatgccttttatggcaatattgatgaaaatgattgggtcgaatactttgctggtaagacgtttgattatatcgtttttgcagatgtgttggaacatttaatgaatcctcaaagcgccttagcaaaagtcaaaccgtttttaaaaccaggcggtcaaatcttaatcactttccctaatttggcgcataattctgtcttaattgatttatttaataatcgtttaacgtggaatgaaactgggctgttggatgctacgcataaatcattctatttacaagaaggatttgaaaaagtttttgcagaagttggtttatacattgccaaagaagattttacatttaatcaagttggctacaacgaaattcctacgacgtatgaagcgttacctgtagaagtacaagcagcttttaaagcgcgtccctttggcgaagtgtatcagtacttttttgccttgactgctgaaccagtagaacagccagagcgagtgacaccagtaaattcatacaatgaaaaaaacgttcatattttaattaattgcggcgaagaaaaagagactgagttggatcaaccagttgatttacaaaaacctgaaacaaaacagttccaactgaagataccagaagacgtccaactgataaaattattcccaagtttaacgggggcaattattaaattatccatgacgatagacggcgagacagtcccagtcgcagccacgaatgcttttctggtacaagagaatatctattatttcttagatacgcaagtacctgtaatcgaagtaaccgatgcacaaatggcaggcaaagacctgacagtagacattgattatttctttgaaggcaactattcagaacgtgaaaatacctttattcatgcactgttagatgaaagaaatcaatttttagaagaaatgaataaacagacggagactgcccctatgcctactggaaaatataaacgaatcacgttaactaaatttgataaaatgattaatttaaccatcgatgatattgctcgcgatgtagaaaataacgtttctgttatcagagggtgggcgtatgacaaacaaacaaattatccgctaagattcagcattgcagaagctagtgaatcagtcacttatacggtggaaacagattaccgtcgtgatgttattgatatgtttgaattagaaggcgatcaagattatggttttgtaattacgattaaagatccagaagatttaccagcctacacgttaaacattgacaccaaatcaggccagaaggttcaatacgtggtggagcgtccaaacatggttcaactaggcacgaaatttgatcgagcatggcgttcgattcagacacgtggtttgatgggctcagtgaagtggtactttaaacgacaagaaaaagcagaagcccctgttgacgtggaggcagttttagcggaaattaaaacgttccaatttcagcctaaaatttctgtcgctgtacctgtttataatgtcgaagaaaaatggcttgcagcgtgcgtttcttctttacaaaatcagtactatgaaaattgggagttatgtttagcagatgatgcatcgccaagcgaacatattaagcccatgctagaaaaatataaagaactagatcaacgaatcaaagttatttatcgcgaagaaaacggacatatttcagaagcaactaactcagctttgtcgattgctactggcgattttgttggtttcatggataacgatgatgaattagcgccacaagcattatatgaagtggtcaaagctttaaatacagacccaacgattgattttctttatactgatgaagataaaattacagaaaatggtcgtcgcttcaacgcgttttacaaatcggactggaatccagaactgattttaaaccataattacattacacactttgttgttgtgaaacgtgatttattagaaaaagtaggcggattgaactcagcatataacggcgctcaagactatgatttcgtattacgagcaacggaacaagcaacgaaaatcaagcatatttctggtatgatgtatcattggcgtgccattgaatcatcgactgctctaaaccctgaaagcaaaggttacgcctatgtagctggtcaaaaagcggtccaagcggcaacggaacgccgtggcttaaaagcacaagtagagattgccgaattttatggttcctataaaattaattatctttatgatcatgtgccgatggtatcattgattattacgaatgatacagagaatatgagtagttacttacgtcaattattagaaaaaactgcctatacaaattatgaaattctattgcctgaacgcttcgagaatcaaataaatatccaaaatgaccgtcttcgttatgtttcaacagaaactcgtcatggcatgattcaagctgctaagggagaatatgtggctttattaaatgctggattggtaccaacgaaaaatgattggttaaaagagttaatgaacattggtcaacaagagacctctggtttagtgactggccgcgtagttgacgcacgctatcgcgtggaaacggtgggagtatcagttgatacagacaaaggtcgattactttatcctgaaaaaggcacccctggtaaaagcttaggttactattacagaattgctttaccaagaaatattcaagcagcaactgaagactgcttactattcaacaaacaactttacctaaatttagaaggaattaacgaaaacttaggaaaagagtggatgggtgtcgatttatcgttacaatttgctagcgctggtaaacgaaatgtatatgtgtcctatgcaattttgaaagcagacgaaaaaatgcaaaaccatgataaaaaaggatcttataaagaacttgcggaaaaatggaccgcggaagctttagttgatccctaccgaaatccgaaacatcta

SEQ ID NO: 20668 - DNA, 2139 bp, Enterococcus faecalis
atgaatgaagacattaaggtgatctttgatagtatctatcgcgacaaagcaacaaataatttaaccattacaggttgggcgttggatacaatcactaaagaaagcccaactttcacaattaataatgaaaaccaagtgtccgcttataacattcagcgcgttttacgtgaagatgttaatcaaatttatcaaacagagcctgcgattgaagctggctttgttgttacacttgaaggaattaaacaaaaaaaagtactcccttttcattttcaatcatcagcacatgttgtaacggtggattttcccttgaataaaaaatatccagtgattccagggacagaagataaagtgactcgtctttggataaaagccaaaaaaggatttaagtatatggctaaaaatggtatttctcataccattcaacgagcgaaaattgagaaactaagaaatcaagcttcgtatcttaactggttagctagaaatgaagtactagacatagaagcgatgacgcaagaaatcgcaacatttcattaccagcctaaaatttccattgcgatgccagtgtataatgttgaagaaaaatggcttcggttgtgcattgattctattttgaatcaagtctatactaactgggaattatgtatggccgatgacgcctcaacagatcctaatgtcaaaaagattttaacagagtaccagcaattggatgagcgaattcgggtcgtctttcgtgaacaaaatggtcatatttccgaagcaaccaactctgctttagcgattgctaccggagaatttgtcgccttactagacaacgatgatgaattagcgatcaatgctttttatgaagtggttaaagtgctgaatgaaaacccagaactggatttaatttatagtgatgaagataagattgacatggatggaaatcgttctgatccagcctttaaaccagattggtcacctgatttacttttaggaaccaattacatttcgcatttaggcgtgtatcgtcggagtattctagaagaaattggcggctttcgaaaaggttacgaaggttctcaagactacgatttagtcttaagatttactgaaaaaacgacaaaagaacgcatcacacatattccaaaagttctttactattggcggatgctgccaacctcaacagcagtggatcagggctccaaaggttatgcttttgaagcggggctaagagccgtgcaagatgcgctcgttcgtcgaggaattaatggtcatgcaacgcatggggcggcgaatggcttatacgatgtttattatgacattgaatctgaaaagttagtctcaattattattccaactaaaaatggctataaagacgtacaacgttgtgtttcatcgattattgaaaaaacaacctaccaaaattacgagattattatggctgataatggaagtacagatccaaaaatgcacgaattatatgcaaaatttgaacaacaattacctggccgctttttcgttgaatcaatcgatattccattcaatttctcaactattaacaatcgtgcagcgaaaaaagcgcacggagagtatttattatttttaaataatgataccgaagtgattacagagaattggttaaccttgatggtttcatttgctcagcaagaacggattggctgtgtaggtgcgaaattattgtatccaaataatacggtccaacacgcaggcgttattttaggattaggtggtgttgctggacatggtcattatggttatccccatggtgacttaggctattttggtcggttagctattaatgttaattattcagcagtaactgccgcatgcttacttatgaaaaaagcagattttgatgcagttggtggttttgaagaagcgtttactgtagctttcaatgatgttgatttatgcctgaaagtccaagctttaggacgtgacaacgtctggcttcatgaagcagagctttatcattttgaatctcaaactcgtggatatgatgataaaggcaaaaagaaaaaacgttttgaacaagaaaaagtgatgatggaagaaaaatggggacctttaattgaaaatgatccattttataatcctaatctgacaagggatattcccaacttttcattacgaattgac

SEQ ID NO: 20669 - DNA, 360 bp, Enterococcus faecalis
atggaaaaggatacgaatgaaaaattaagaaggaactatgcggaacagattgtcgaaaaagaacgagcgatggatcaattgtcgaaggaaaagaagcaaatccaaaccatttttggtacactagagtctgaactaaccagaaattttcgcgaacttgagcaactcaacgcagaagtgattcataaaggcggtaagtcgacgcgttgggagcaagaggagctctctggaaaacaacgctatttaaggggctttttacaacaacagacacatgaattaagtcaaagatacacaaaagcaaccgcacaatcgaatgaagaacgactacagctccaaagagaaaggagtcggttgtcatgggat

SEQ ID NO: 20670 - DNA, 1590 bp, Enterococcus faecalis
ttgggtgcagaattaaatcaaaaattatttagtgcggcagataatctccgtagcaaaatggatgcgtcagaatataaaaattatttattgggactgattttctataaatatttatccgaccgtttgttggaacaagtggttcttttagcagatgaatccttagaggaatatgatacggtaagcaaacaaacgatgttgtatcgcgaattactttcagatgaagaatcaaaagaagatctgattgcaacaatcgttgatattttggggtatgcgatttcgccagagtatcttttcaacgtcttagcggatcaagcaaaacaagcaacgttccaattgaatgatctaaacaaagcctttgtgcaattggcatctacctacaatcaatttaatgggttatttgatgatgtggatctccaatcaaaaaaactaggaacagatgagcaacaacgaaatgtgacgattaccgaagtcattaagaaattgaatgacgtggaagttttaggtcacgatggggacgtgatcggggatgcttatgaatttctgatcagtcaatttgcttcagaagcagggaagaaagccggagaattttacacgcctcatatggtttctgatatgatggcacaaatcgtgacgttggatcaaaaagaacgacgattctttagtgtttttgatccaaccatgggttcaggttcattgatgttaaatgtgcgtaactacttaactcacccagataacgttaaatatcatgggcaagaattaaatacaacgacatacaatctagcaaaaatgaacttgattttacatggggtagatgccgaagaaatgaatctccgcaatggggatacgttgaataaggattggccaacagatgaaccttacacatttgatgcagtagtaatgaacccaccttattcggctaattggtcagcagatacgaccttcttagacgattctcggtttaatcgttatggaaaattagcgccaaaatccaaagcagattttgcgtttcttcttcatggtttctatcatttgaaggaaacagggactatggccatcgtcttgccacacggagttttattccgtggcgctgcagaaggagtcattcgtcaaaaattattagaagatggcagtatttacgccgtgattggtatgcctgcgaacttgttctttggtacgtcgattccaacgacggtgattgtattgaaaaagaaccgccaaaatcgagatgtattattcattgacgctagtcgagaatttgtcaaaggaaaaaatcagaataaattatcggaagaaaacattcaaaaaatcctcgaaaactacgctgaaagaaaagatgtcgagaaatacgctcatttggcaacctttgatgaaatcaaagaaaatgactataacttaaatatcccacgctatgtagatacgtttgaagaagaagaaccaattgatatggttcatgtcggaaatgacatcaagaagatacgacaagaacagcaagtgctagaaaaagaacttttagaagctatctcttccctgcaaacaacacctgaaaatgaagcgtggttacaaggtgcgctggaggtgtttaagcatgag

SEQ ID NO: 20671 - DNA, 3147 bp, Enterococcus faecalis
atgaaaattagtcaccgtgaggaagcggaagtcgaagaacagttgattcgtgtacttggggaaggacataatcagtggacgtatcgtcccgatctaaaatcagaagaagatctttgggtcaatttacgccaaaaaattatctcaaataatcaagcagaactgaatgattctcctttgaccgataaagaatttgaaacgatcaaaacggaattattgctacggacgaaaaccccctttgatgctgcgaaatggttaaaaggtgaaaatgggatggctcggatcacgattgaacgggaagattcgcaattgggttctgtctcacttatcctttattccaatcaagacattggtggaggaatctctacgtatgaagtggttcatcaaattgcaaaacgtggaagtaacatagaagcacgggatcgacgttttgatgttaccttattaatcaatggattaccgattgtccaaatcgagttgaaacaagtaaccgcaaaagatggcgtctatcaggcgtttaaccaaatcaaaaagtatgcagaagaaggcatgtttcggaacaatatcttttcgaccttgcagttgtttgtagtttccaatgaacaaacgacccggtattttgcaaatgccttaccgaaagacttgcaccctaagtttttatttagttggcgaacgaaagacaatgaaaaagtagaaaacttatatgagttttgtaaacaagtgctaaatatcccggatgcccatcgcttgattgcggattatacgattgtcagtgaagatcaagacaacaaaaccctcatggtgttacatccttatcaagttcatgcgattcaagccttgtttattgccgcaaataaacatcaatcagggtatgtgtggcatgcgactggttcaggaaagacgttgactagttttgtatctactaagcttttagcacgaaaatcggggatcgatcgaacgatcatgttagtggaccgcaaagatttagataatcagaccaccacagagtttacgaaatttgcttcggagtttaatactgggatttcttctggtaatgccaaagcgaatagcttgatcgtgggaacaggaagtgccaaagagttaagtgaaactctgttggcagatgccaatgcaaatgttgtgattattacaacccgtcaaaaactagatgcggcgttgaaatatgcaaagaaacaagaagagaaaaaaggaaccaatcgcttccaaaaattaatgggacaacatatcgtgtttgtagtagatgagtgtcatcgagcgttaagtgctgaaaatatggaagaaatcaaaaaaatgtttccgaagtccacttggtttggctttacaggtacgctgattttccctgagaatcggaaacaagccaaagggcaattggcacgtacgacccatgatcagtatggagaggtcttgcacacctacaccatcaagaatgcattagaagatggctcggttttaggatttcaagtagagcatgaaaataccgttgagccgacttcattagagaataaaatctatcggaaattaaaagaagtagaaacatatgcagagtattcatcagaacagatcaatcgtatgatcgatcaaatggagtcaatcaaaaaagaaagttatttggaccctgctgtttttgaagtagatgagcatatccaaaaagtcatccataaaatgttccgtccagataatgcctatacaaaatttgattttcgaaatggccgtccaacgaaatctgcaatcttaaccacgagttccattgacatggccaaaaagtattatcgggccatcaaagaaatgacaaaagaacctgaatggttaacaaaagagtttcccaatcagcccattcgtgaaggacgaacgatggaggatcctgatttcccaaggatcgctattacctattcattagaagaaaacagccgagattcaagtgtccaacaagaagaaatgcaaaaaattattgaggaatataatcagtattatgatacttcctggtcattagcagacattgagcgttataacggagatatcaataatcgtttggcacgaaaaagagcggaattcaaacaatttgggaaacaaattgatttagtgatcgtagtggatcgtctgttgacaggttttgatgcgcctacgattcaaaccctatttgtggatcgtaatctagagtatgcaggactgatccaagctttttcacgtacgaatcgtacgtatcctgataagacaaaaggattgattgtgacgtttcgtaagccagcgacaatggagaagaatgtcgaggatgcgacaaaactgtattcagaagctaaagaggaatcgggcttgatttgtccaagttatcaagaatccaaaaaaagattcaagcaagcatatggtaagttaaaggaggtttcatccatggaatccattgatgaacatacgccacttgaaatccgtatcgagtacgtcaaagcatttcaagaattgaatcgtgcgtatgaatcgttagtgacttatgacgattacaatgatgacattgtgcaatcttcaactttgaacaatcaaattcaacttttggaagaacaaattggcgtgtacgagaccgtgaaaggttcattgatagaggaagaaccagaaaaagaaggagaagatttttcaacgatcgaattttatagtgaaaatactactaagttgtatgatattgattctacttatattgatcaattactaggaacttatgctgcgaacagttcagatgcacgagatgaaattgaaaaagctttggctaaattgaataaaacagaaggagtcaaagaagtttaccgacaaattttaaatgcatttgatgtggggactttagatagtaatgaagatatctttgtcattaaacgtcgctattttacacaagcgagtgatgatttgattcatgtcttttccaacgagtggtttgtttctgagaaagaattacatgcttctaatctgcaatatatgccaggtgaagatccaattcctaatatgaaagcaattatcaacagtaaggattacgaaggatataaagccaaccatccagaagcgaaaccatttaaatacccacaagaaatgaagcgagcatggcgtaaaatgttagatgatgagctgattccacttgaaaatgaattgagg

SEQ ID NO: 20672 - DNA, 1590 bp, Enterococcus faecalis
atggctttatcacaagaacaacaaacgaagatgtgggcgatgttgaatcaaacacgtggacaaattggtttgacagcatataaagattatatttttggtattttattttataaatacctatcagaaaaagccacacgttggctagatgatgtcacacgtggagaaacttgggaaaacatttatgcacagaatccctcaaaagcattagaatatatgcaaaaaaacttaggttatgcgattcaaccaaatgatttttttgatgattggaaaaaagcaatcgatgaagatcgttttaatattgggatgatgactgatacatttggtcatttcaatcagcaaattgcctttgaagcaaaaggtgattttgaagggatttttgatggtatgcgctttgatagtgccgatttaggcgcgaatgcacaagctcgtgctagtgtcatgatttcaatgattgagctgctttcttcaccagaatttgatttgtcaggtagtgatgatacagtatcagatatctatgaatatttagttgctcaatttgcaacagtcttggcttctgatatgggccaatactatacaccgaaagaaatctctaacgtaatggcacgaattttaacatctggtcgtgaagaagaggaaagtttttctatttatgatccaacggttggttcgggctcgttgttgttaacaacagctagctatatgaaaaattcacataagcgaggtatgattaaatattttgggcaagaaaaagatgccacaccgtatcgcttatcgcgaatgaacttaatgatgcatggtgtagagtacaatgatattagtattaatcatgcggatacacttgaaagtgactggccagatggcgtagtagatgggaaagataatccaagaatgtttgatgcggttatggcaaatccgccctactcagctcattggaacaataaagatcgtgaagatgatcctcgttggcgtgaatatggtattgcgccgaaaaccaaagcggattatgcgtttttactccattgtttataccatttagaagacaatggccgaatggcgattattttacctcacggcgtattatttagaggagccgcagaaggtcgtattcgaaaagcgttgattgacaaacaccaaattgaaacagtgattggattcccagataaattattcttgaatacatctattccagtttgtgtcttgattttaagaaaaaatcgtacggcttctgatattttatttgttgatgcaagtcgagaatttgaaaaattaaaaaaacaaaatcatttgcgcccagaagatgtcgataaaattgtcgatactgtggttcagcgtaaagaaatagagaaatattcacatctcgcaacgttagatgaaatcaaagaaaatgactataatttgaatatccctagatatgttgacacatacgaagaagagccacctgttgatttagtggcgctaaacaatgacattaaaaatactaacgaggaaataaaaaaagtagaagctgagttattagctatgcttgatgacctggtggtaacggaagaaacccaagcactgatagatgccacgaaagaggtgtttggagga

SEQ ID NO: 20673 - DNA, 1418 bp, Enterococcus faecalis
aaattcattagtgatgttttgtttaatgcaacttaccaagtattattaattatactgccaattataacaatgcctatacttagtcgtcggctgggaacagaaggattagggatatacagttatgtattctctatcgctcagtttttaatgatcttgatatcagttgggatgaatccccttagaattagaagaatagcacaaaataaatttaataaagatgaattaaataaagaattttggaatctttttatcatgcaagcattaattggattattttttttaactatatattttttcgcaaagggaatatttaaaattgagtatgaagacttatctcatctacaattaattggtgtaataggtacaacctttgatattgcttgggttttttcaaggtattgaacaatttgctcaggtagttattagaaatgtgatcataaaattgttatcagtattgttgattatcttgttagtgaaaaacgataaagatttacctttgtatggtttaattacatctgcatctactgtagttggaagtttaattttttggctgagtctaaaaaataaaatttctaaacctaactgttctatgcctatttttaaatctttatggaaacctagtttgattatccttttgccacaagtgtttatgcaagtttatacgactttggataaaacggtagtgggatctttaactaccaatacagagctttcttactatgatcagtctcaaaaaattgcaagaattctactaacattactctcatctttaactattgtcatgctacctaaaatgactggagctatcaaaaatggggataatgataaggtatatatgtatactaaaaaggcatttaattacacttggacttcctcatgaattatgtttactaatacttttgctaatacgaaagagtttggagtatggttttactgtacctaaatttgttcctatgaccgcaaatatgatgattgtctcatttattattatattaaatccgattggagggattttctctaatcagtttgctttggctatggaaaaagacaaagaatatggaatcccattaataattggttcaattgttagtttacttggcaattatattcttgttccaatttataatgcattaggtgcgactattgtactagtttttgtagaactcatcgtttgcatattaagaatagtattgattaaagattttattaatttacaatttttaattaccaaacagatacttattgaattgggcttaacaatagcaattacaattactgggcttctattaccttcaatttttgctaattctttttttaacattgcatataaatcaatggtcatgttattattgtttggtatcatattatttacgactaaaagtgaagttgtgttagatgtaaaaaaaatactaaaagga

SEQ ID NO: 20674 - DNA, 1167 bp, Enterococcus faecalis
atgaaatcaagcaatgaaatagaaaaggctttatatgaaagttctaattcttcaatatcaataacaaaaaaagatggtaaatattttaatgttaatcaatttaaagatattgaaaaattaaaagaaattgaagaaaaaataattcaatatgatggattagcaaaactaaaagatgctaaagtagttagcggagaacaaagaataaatagagaagatttatctgacgaatttaagaatgttgtttcactcgaagctacaaataatactaaaagaaatattttatttagtagtggagtatttacaattaaagaaggtaaaaatatagaagaaaatgataagaattcaattattgttcatgaagaatttgctaaacaaaacaatctaaaattaggtgatgaagttgatcttgaattactagatattgaaaaaagtggaaaaataaaaagtcataaatttaaaattatagggatcttttctggtaaaaaacaggaaacatatacaggattatcttctgattttagtgaaaatatggtgtttgtagattattcaacaagccaagagatattaaacaattcagaaaataatgaaattgcaaataaaattttaatgtattctggtagtgcagaatctacagacttagccttaaacaaattgaaagagcttaaaattgatgagtcaaagtattttgttgaaaaagattctaatgcgtttgaagagtctttagagtcagtgagtggaataaaatatataataaaagtaatgacttattctattatgttagttgggatggttgttctttcattaatcttgattctatggttaagggaaagaatttatgaaataggtatatttttatctattggaacatctaagatacaaattataattcaatttatattcgagttaatattcatatcgataccaagtataatatcttccttatttttaggaaatgtattactaaaagtaattgtagatggattcattaactcagaggattcaatgatttccggtggaagtttaataaataatagtagttttatgtcaaatataacaacgcttggacaaagttatttaatattaataagtattattgttttatcagttgtatttgcttcttcattaatgttaatcaagaagcctaaagaaatcttatcaaaaataagt

SEQ ID NO: 20675 - DNA, 990 bp, Enterococcus faecalis
atgaaaatgaaaacgcttaaaaaatcgggtttatcaaaagaagaattgattcaggcatatcgtcaagtactacgaggacgtcgtttagacgaacggttgtggcaattaacaaggattggtaagacctctttcaatatttctggtcaaggggcagaagttgcacaagtagcgatggcgatggcttttaatcctcaaaaagattattttttaccgtattatcgtgatatgaccgcgtgcttggtttggggcatgacctccaaagatattttaatgggttcttttggaaaagaagcggatccttcttcccatggtcgtcaaatgccgaatcattatggttcaaaagagcataatattgtttccttctcttcaacagtaagtacacaaatgccattagcaacaggtgttggttatgcagcgcaacttcaaaaagctgattttgttgcattgaccaccactggggaaggctctgccaatcaaggagaagtccaagaagctatgaactttgcaggcgtaaaaaaattaccagtcatttttgttgttgaaaataatgaatatgcgatttctgtcccaattgaagaacagtatgccaataaacgaatggccgatcgcgcgaaagcttatggctttgaaggtgtgaccgttgatggtagtgattttgctgaagtctatctagcatttaaagaagcagtaaaagcggctcgcgggaaaaaaggaccaaaattgattgaattaatggtttctcgcttgacttctcattccgctgacgatgatcaatctgtttatcgttcaaaagaagaaattgaagaaatgaaaaagaacgatgcagtgaagctttttgaaaaacaattattagaagagggctatttaacagacgaagacattgccaaaattgatgaagaaattcgtgcagaaatcaatcaagcaacggatgaagcagaagcaatgccagatcctgtaccgacatcaattttagaagaagtgtatgcaaaa

SEQ ID NO: 20676 - DNA, 606 bp, Enterococcus faecalis
atggcaaagaaaacagaccttagagtacaacgaaccagaaaaatgattattgaagctttttttaaacttgtagaaacgaaaggctacgaagcggtgacgattcaggatattgctgatgaagctatgattaatcgtgcgactttttatgctcattttaaagacaaacagcatttatatgatgcaatcttcacctttacgcttagtgcttttaccgctattcttgattcgcaacaactggttaatggcaaccgtgtccgcgtgaagcacattgaagaacttctgacgcaactctatattaatattcaagagaacaaatctttcttcttaactatcatggacaataatttcaacgaacactttcgaaaacgcttagctgaaattatcgaagaaaaatatgcgacgattttttcgcagttgcgtattaccgaaaatgatattgatgtaccgatagattttgttattgaatacatgacctctatcttcatcggtacccttcattggtggattactagcgaaacggatatgacacccaaccacttagcccaattagttatcaaattagttggtaatggtcatttaactgtcttaggcatcgaattagaaaaa

SEQ ID NO: 20677 - DNA, 3474 bp, Enterococcus faecalis
atgaattgcactagcgctttttctaaaggagagaagataatggaagggaaaataaaaaaaggtatcccttttgccttagcaattggagcaactttcttgttattactttttttcattcatttagggtttaaagatgagaacgtgactcgaagtagcaaagatcagacaacaaagatgcagtacgcattagttaatgaagataaaggcgcaagttttgaaggaaaacgttatgcattaggttctgattttgtcacattaattaacaaagatacagctaatcgatgggaaacaacgactcggaatatcgcaacatctggggttgaaaatggacaattcgatgctcaaattattattccgcaagatttttcggagaaattattgtcactacaagctgttagtccagagcaggcttctgttgaataccaagtgcgagacggacaaaatgaattgaccaatcaagcaattcaagacaaagtaaatactattttgaaagattttaaccaacgcgtaattcagatgtatttttccagtattgttggaaatttagttatcgcacaacaaaacgttaaccaaattactgatacgcagttgctgtatcaaaatcaattagaagaaacaattcagcaaccatttaaagaaattcccatgaattatacgacagtattaagtacggctagtattttagatgaggacaataaattatttacaaacgagcaagaagcgtttgtaaaatcagtacaaaccttattagaaagcaacagtcggagcttagaatcaactagtaagacaacggaagatacgaaaaaatcagtggacgagtattcgaaagaagcaaatgaaaaaataaaaaaatcaattgcacaatttaatgaacagtttgagagacaaaaacaagaattgactaatcaatgggaaagtgacacgacagtatacaaacaacaattcgatcaactaaatggaatggtaatcaatcagtttagctccttctacacaccaagtgaacaaggaagctcagggatttatgctgactttttatcagaatctaaattatttcaagaaacacaaggtaatcgcattggcgaactacaaaaagaaatcgcagaactacatatgcaagtagaacaattaactgcgttaaaaaagcaaattgcggctacatattataatgatcttgaagcaacacctgagatagcaacagacactcaaattaagcaagcgattattcagttaattacgaacgaaaaagaaaatatacctaacttagataaaaattatcaggaaagattggaagaatcactaagtgaaatttcttttgtaagtttagaaagactcgttagtgaattagaaatgaataataggatttcagttgaacaaggcaatcttttccgtgatgagttacaaattattcagcgatatgcagaacaacatgaacttgatttcaccaattcaagccgctttatgtatttggaacctaaacaacttcatgaagatactatagcgattccacaagaaaaagtaactttttcactagcgacaaatcaagagtcggttatttcattacgacaaaccaatacacaaaatggcgaattgtcatttcttttagatgattcaaaagttcaaacaattaaaacatctttgaatcagcagttagcaggtacaggttacagcattgatatttcagcaattaccccaacacagctaacaattaccaaaccagtcaaaatacaagctgagattcctgagaatgatgaagtggacgaagaaaatacgcaagaagagttggcagaagaatccgaagatgaatctgaaaaagtaactgagccagtaaatgatttgctctcacttccagaaaaactttccttaacgattgacttaccaatgtcttggcaactgacaccagaacaacaaaaaacagcatttaatcagattgattattcttggtgggtaaataatgagcttcaaaatgcacgttcgttcgctgtgtatattgcaatggaccaaccattagtaaccgatattcctgaaatcatgaagcaatttcaacttttagatactgtatcacaacaaattgtgactttatatggtacgcctaatcaaagtctatctattcaagagtatgcagcaatgttaaccgctcctgaaaatcaggataaaacaattgaagagttagcaggtgagacatccatttactggatgtacgacaatatcactgaaaacgagcaaaccatgatgattacagataaattattagacgaatataaaaaaacaggaaatcaattatatcgagaaacagatgaacaaattaatcaattaaaacaattaattggtactgagacagatcaaaatacagacggacgacctacaacactttacggaacattaaatttaatgacggtccctgaaaaattattacgagaagcggagaaattaaatacatggtttgatgaagcaacaaaacaagtcaatgcgacatatgctacttggcaagaagctggaaaagtgggagctacttctgtaattgatgaaagaaatccacatccagaagaaagtcaaaccagcactttagatgtagaaacagaaaatttagttaaaatgatgcaaacgttaatgcaaacaacgaaagaaactagtctaacaacagctgattcagcagccaaagtcaaagatgttgcccagactatcaaagaattgaaagcctcaacaaccaaagttcaagatcatgcgcaaaatatcttagcaaacttaaatgattcaattgatgagtcaaagaaaacaaccaaagaaaatgaagagtatgccaaaacatttgaaaaagtattggctaatacaagagacggcggtgctgataatccacgggtatttagtttccttgcgagcccaattcaaggagaagggatctttggcgaaacccgacaagtctctttaattccctattacgctaccttgattgttagtattttgacattcgttattgcgctaactttccaaggctttatgaagaaaagaacagttactgtagcggatgcgttggttgaaccaaccagagtttggcaaaatataccaaatctgttattactcttgattacggttattttgtttgggagtgtcttttcacttctactggtgttcaatgtatctcaaataaatcgattcgcttggtttagctatagtttcttagtatttgctagcggtgcacttttggtttgtgcttgtttacgccaatttaaaaaacttactttatatgtttatggagctatgctggggttatttttcatgttgacacctttattaggtattgcaacaaaggtaggctcattaagcaattggctctatcgtttatcgccgcttcaaaatatccaaaatggctttactgctttagtaaatggcgtacaaattagttgggttagttaccttattttaatcgttttacttgttttaggtgttgtccttaatttatttgtacgaccggaggaa

SEQ ID NO: 20678 - DNA, 1134 bp, Enterococcus faecalis
atggcaaatgataaaattgtgattcatggtgcacgcgcccataacttaaaaaatattgatgtcacgattcctcgtgacaaaatggttgttgtaactggactatctggttctggcaaaagttcattagcgtttgatacgctttacgcagaagggcaacgacgttatgtagagagtctctctgcttatgcgcgacaatttttgggacagatggataaaccagatgttgacagcatcgatggtttaagtccagctatttcaattgatcaaaagacgacaagtaaaaacccgcgctcaacggtggggacggtcacggaaatcaatgattatttacgattgttatttgctcgggtaggtcatccaatttgtcctaacgatcatattgaaattaccagtcagtctgttgaacagatggttgataaagtcttagagctaccagagcgaacaaaaattcaaattttggcgcctgttgtggtcaagaaaaaaggccaacataaaaaagtgtttgaaatgatccaacgtgaagggtatgtcagaatgcgggtggatggtgaaacctatgatgttagtgaggcaccagaacttgaaaaaaataaaaaacatgatattgcgattgtgattgaccgtatcgttgtgaaagaaggtattcgctctcgcttgtttgattcgtttgaagcggctttgcgtttagctgaaggttacgcaattgttggtgtgattggtcaagaagagatgttgtttagtgaacattatgcttgtccttattgtgggttcacagtcggtgaattggaaccgcgcttgttttcatttaatgcaccatttggcgcttgtcccgattgtgatggtttaggtgttaaattagaagtggacaaagacttagtgattccagatcccactaaaaccttgagagaaggagccattgttccgtggaaccctattagttcccaatattatccacaaatgttggagcaagcagctaccagttttgggattgatatggatacgccgtttgaagaattacctgcagaccaacaagaaattattttaaatggttctggcgagaaaaactttcattttcattatgaaaatgactttggtggtgttcgtgatgtggaagtaccatttgaaggtatttta

SEQ ID NO: 20679 - DNA, 906 bp, Enterococcus faecalis
atgaaaaacaagttaaccgtacaagaaatgattttaaccttgcaaaaattttggtcatctaatggctgtatgttaatgcaagcctatgatacagaaaagggagccggcaccatgagtccttacacgtttttacgtgccattggacctgaaccatggaatgctgcctacgtagaaccttctcgtcgtccagctgatggacgctatggtgaaaatccaaaccgtctataccaacatcatcaattccaagttgtaatgaagccttctcctgaaaatatccaagaactttatctagaaagtttgaaattattaggaattgatccattagaacatgacattcgttttgtagaagataactgggaaaatccctcaatgggttgtgctggtttaggttgggaagtttggttagatggcatggaaattacccaatttacgtatttccaacaagtcgggggcttacaatgtcatcctgtcacttctgaaattacttacgggttagaacgcttggcatcatatatccaagaagtcgaaagtgtctatgatttagaatggacacaaggcgttaaatatggtgaaatttttgttcaacctgaatatgaacattcaaaatattcctttgaaattagtaaccaagaaatgcttttagaaaactttgacaaatttgaaaaagaagctaaacgctgtattgaagaaagcttagttcatccagcctatgattatattttaaaatgtagccatacattcaatttattagatgctcgcggcgctgtctctgtaacggaacgtgcaggatatttagcccgcattcggaatatggctcgttccgtagcgaaaatttttgtggctgaacgtgaaaaattagggttcccattattaaataaagaccaacacgtatccaaggaggcagaa

SEQ ID NO: 20680 - DNA, 2690 bp, Enterococcus faecalis
ttatttttaaacctggagaaaaagatttttctacaaatggattaggacgtcttattgatgcgacacgttgcgaaatcactgaagaagctaacggaaaatatgaactagaaatggactatccagcgattagcagatttagtgattattttgaaaatggctatcagattaaagcaaagccaaatgacttagaagaataccacattttcgagatcaaacaaacgtttaaagatacgtttaccaatagtattgtcatttatgctcaatctcgtacttataaactaggaaacagacaagtgcggctagtaacagttgataatcgtaatggtgcagaagctatgagattaattgaacagaacatggacgaaccatgcgatatcaaacttcattctgatattaacacagcttctagtacggtattcgaagctagaaacgtacttaattgtattgctggtgaacaaggttctttgcttcaatattggggtggagaaatcaaacgagaaccttttaaattatctttgttaagacgtagaggacgagataacgttggaactgttcgttatggtaaagatttaaaaggattaaccattaaatttgattggcaatcaattgttactaaagttttaccatttgcagagcttcaaagtggtgcagacggaacttctcaacggatttatggagatgcggttaagagtgaatatatcaacaaatatccagatgtttacgctcaatacgttcagttcactgaagatcaaggagtaaaagatttatcaagcttaaataaagtggcaggtaaatactttactacattatatccaggaagtgataagcctaaagtttctattgaactagaaattgagaaactcacagattcagaagaagcaaaagaatttgcgaaaatgagaaactataatttattcgatacgttcactgtttatcacaagttttatgatattgacattcaaacgaaagttacagggattgtctatgatgctttagcagaaaaaacaataaagattactgctggagatatccaagttgctttttataaacagcaaagtcaagattttcaagaagcaattaaaactttaacaaaaaaagactacatgagtaattttattgattacattaccgatttaatcaatggcgtgaaaggtggtagtattcttcaatatcctaaaaataggccgcatacgctttattttatggatacagattccacagataccgcgaagaatgttatcgctattaacaatcagggcatcggattttcaactactgggtggaaaggtccatttagaaacgcttggaccattgatggtattttaaatgccgactttatcagagctggtaaaattagatctgatatttttgagacatcattcaatgcatatggagatattttgcgtttagttaacggcgctctgcaagcttggaatgggaaaacgaaaataatggaattgactaagcaaggattagaattctggaatggcaatagccacattggctcaataggaacaaaagggaatccttttccagacttgagagatgttaatggaaatcttgtagtatctgatggcaattcgttactactggtcgcagataatcctcagaaaattattggattatctaatcaatcaggagcaggtcatttaattactggtctaacacagttctttgttggaaataattttaacttctttgggccaaaaggaagtaaatcaactattacagttgatagattgattgtcggcggtaaggaagtcatccctggcgatggatcaggtggtaacgatggtgacgtaccaccagagctaacaaccgaaaaagagaaaaatgcttgggcggtttggcagttcttgaaatctaaaggctacagcgaacaagcagctgctggggttttaggaaacatggatcaagaatctggaattatgcccgacattgacgaaggtggcggaggtcctggttacggtctagttcaatggacatcaccaatcgcaggtgaaagtggccgtgcttatgtgcaacgattattggctcaagctggtatcactggtgactatcgaaacattactacacagttgaagttgcttgattggcatatgcataatggccaatacattccatcggcagcttatccatattctgtttcagagttcaaagcattaacagatattggcacggcaacgatggcatttgaagcgaactttgaacgcccagcggtcacacatccagaacgaattccgatggctcaatattggtacaacttgctgaaagacttgaaacctagcaagccaacttggatgaatcctgttcgttcaacttatacgattactcaagaatgggaccagatcggctggggaacgaacgttattcacggcggcatagatattgcttcagtgccagcaggcacgagcccccctgtttatgtggcacgtagcggcacagttgaaactgtcacttatgatggaactggtggaaactatgttgttgttaaacatgatgatggttattggacctattatggtcatttggattcagttgatttagttgttggtgaaaaagtgactactaatagtcgtgttgggataatgggttccactggacttgctaaaggtattcaccttcactttgaagtgtggaaaggtggacagtggcaacgaatcaacccacgtgatgttattaatttttag

SEQ ID NO: 20681 - DNA, 450 bp, Enterococcus faecalis
atgattaataatgtgactttagtaggaagacttacaaaagattgtgatttacgttatacgtcaagtggtgtagctgttgcggcttttacactagcagttaaccggaattttacgaatcaaaatggtgaacgtgaagcagactatattcagtgtgtgatttggcgtaaacctgcagaaactttagcaaactatacacgaaaaggaacattgattggtcttgtgggtagacttcaaacacgtaactatgagaatcaacaaggacaacgtatttatgtgacagaagtggttgtagaaagcttccaattgttagagtcaaaagaagttagtcaacaacgtggtgttaacgcttctaatcctacaccagttgggcagcaggaaagcaatacgcaacaaccctttccagatttagaaggtagttctattgagatttcagatcatgacttaccgttt

SEQ ID NO: 20682 - DNA, 855 bp, Enterococcus faecalis
atgaaaaaaattattttatcaagcttgtttagtgcagtactagtattcggtggcggaagtataacagcattcgctgacgatttaggaccaacagatccagcaactccaccaattaccgaaccaactgattctagtgaacctacgaatcctactgagccggtggatcctgcagaaccgccagtaataccaactgatccaacagaaccaagcaagccaaccgagcctacaacaccgagtgagccagaaaagccaacagaaccaacaacgccaattgatcctggaacgccggttgaaccgactgaaccaagcgagccaacagaacctagtcaaccaaccgagcctacaacaccaagcgaaccagaaaaacctgttactccagaacaaccgaaagaaccaactcaaccagtgattccagaaaaaccagcagaaccagaaacaccaaaaactcctgaacagcccactaaaccaatagacgtagtcgttacacctagtggagaaattgataaaacgaatcaatcggcaggaacacaaccaagtattcctattgaaacaagcaacttagcggaggtaacacatgtaccaagtgaaactactccaattacaacagaagctggggaagaaattgtagcagtagataaaggtgttccgttaaccaaaacaccagaaggattaaaaccaattagcagctcgtataaggttttacctagcggaaacgttgaggtaaaagcaagtgatggaaaaatgaaagtattgccacatacaggagagaaattcacactccttttctctgtattgggaagcttctttgtattaatttcaggattctttttctttaaaaagaataagaaaaaagct

SEQ ID NO: 20683 - DNA, 360 bp, Enterococcus faecalis
atggtaaaagttcctcatcaaggtgatattttattgttgaatacggctcctagatcaggacatgaacaaacaggtaagagaccgtatattgttttaagtcatgatattattgcagattacagcaatgttgttattgtagctcctatatcaagtacaaaaagaaactatcctttatatgtttctattaatccttcttacggaatgaaaacatcaggtaaagtattattagatcaattaaccaccatcgattatgaggctagacaatgcgtgtttttagaaacagcacacgaaaaattaatcgatgaattattgctaaaagttagaaccgtatttcaaaaagtaaataaaacaaataaattt

SEQ ID NO: 20684 - DNA, 2343 bp, Enterococcus faecalis
ttgaataagaaatcactggtaaaagcagtcttactatttttagtaggctgtttttttgtgtttacgcaaactacagcggttaatgccgaacctaaacctgatgaaaataaagttattgttacagagccaaccactaatgtagatttgatttacgatacttacaaagacaacgctttcgagttaatgaccaaagaaaaaaaacaagattcatggacaggtgttgaagaagccatcacaaatgcttctgcgacaataaagacttttgtctggtcaatggtaaaaggactcggagagtttaatgcagttatggtaaaaacactatttagtatggatattataactgctattaagcaaccgattatgaacctaacgtctagcatagcaactaacatgttgggcattgcgggaacgattggtattgcctttgtctttgttattttaggtgtaaaatttattggacaacaacgatacaaacggttttttggtatttttttaatgacgattcttatttttacgggtctttccgtcctaaaagatgccaacacgtccaattctttgtttgatatgatgtttagtgtagataaagaagttgagaccgcatttgtaaatattaatccggtcttaggtgatgttagtgtaccaatgacagagaaagggaaagataagaacggaaatgaagtagagcaaaaattatctgcagatcaacgagcaaaaagtgcaggaaatttaattgcttcacgtgttttttacaccaatgtgtatgaaccttacttgctcatgaactatggaacaagtgatgttaataaaatccgtaagaaaacagtgaagtataaagacaaagaatatgatcgaatcaacttattgttagacaacgatatgaatagcgaagaaaataataagttaatggaagaagttgtaaattacgaaagtaaagacttaaaaaaccgttcaattatgtattataacaactggaccaatactttttatggcttgttttatctggtagttaacttcattcaaacagtggtgtatttcctgttaagtttcttacgattaattattgctgtcattcaattgttcctattgccgttgttaccgttattgttgttcgcaggactctttttaactgaaaccaacgtctttgcgaattactttaaaacctttggcatgactatttttatgaagggaatggttggttttgcgactattttctttgcaagtttcttatcactagggtttcaattaagcaatcagacagaaaacgtgtggcagaagatattaacgatacttatttatcttcttacaccgcttggcttgtatgtcttccggaaattctttgctaatcttgtcacgggacgtgtttcactttctgatggtgtcgggtttatcggaaatccttttggcacagaagctaatatgcgtagagcggcaaaagaacaaaaacaagagaataaggagcgcaggaaacaggcacaagaagaacgtaaagcagctattaaaaaacgtcaagaagaagcaaggaaacatggtaaagcagaaactggcttaaaacaacggccattaaataaagaacaagaaaaacgtagtgcgctacgccgtgagttgaagccaaggcctcaacataaagcgccaaatgctatcgaaaaagcacaagaaggattaagacaagcgcacgaaaaaggacgtatgcaagaacagaaatctgaagaacaactcaaacggcagcaacatgaatcagctcgtcaaaaagaatatgaaaaagatcgattgaaaaaacaggaatcacttaaaaaaattaatgatcaaagcgacgaatcaaccaatttaacagctttaagaaatcaaaatcggcgtactggacagcgaagtaaaaaacgcgaaacaggtcatcaaacacttatgaaacgacaaggagaaaaagtacttcaaccaacaaataaaccaaaagatatgaaaaaacaagtggttgctcgtagtccaagacgaacaggacaaccaacgactcgtcaaaatatccaaccaaaagtagcggcccaaatggtcaaacggagtggtggaacgttgggaagtaatcctgcctatcgacgtccagaagtacgtaaaaaaatggatcaagtgaagcaagtaacgcaagttgatgtacctcaaacgcattctacaccacaacgtgtacaacccaaggtaaatgagccaatcacacgtatgaatagacataatacgccaatcattaagaaagaaaagaaaactaaacaatcaccagttgttcgcagagaacgcaagaaacctggtacacagaagataacaaacaaacctaaaggagtgagacaacctcgtgcaaggaaa

SEQ ID NO: 20685 - DNA, 456 bp, Enterococcus faecalis
ttgattaataacgttacattagttggacgattaacaaaagacccagatttaaggtatacacaaagtggaacagccgtaggtcaatttacgttggccattaatcgcaactttaccaatgctaacaatgaaagggaagcagattttatcaactgtgttatttggcggaaagctgcagagtcattagcaaattatgcaacaaaagggactctgatcggtttaactggtcgcattcaaacaagaaactatgagaatcaacaaggccagcgtatttatgtaactgaggttgtcacagaaagcttccaactattagaatcaagagaagtaaacgagcaacgaaaagaacaggctacaggtaaagctacgtttgataaacagtcaatggataaacctgatcctctggatccattttcgccagaaaatagcatagtggatatttctgataatgacctgccgttt

SEQ ID NO: 20686 - DNA, 855 bp, Enterococcus faecalis
atgaaaaaaaatctttttgctagtttatttagtgccacactactatttgggggaagtgaaatttctgcttttgcacaagaaattatccctgatgatactacgacaccgcccattgaagtaccaacagaaccaagtacaccagaaaagccaacagatccaacaccgccaattgagccacctgtagaccctgtagagccacctattacaccaacggagccaacagaaccgacagagccgacaacaccaacagaacctgaaaaaccagtagttccaacggaaccgacaacaccaacagaaccgacaactcctacagagccaagtgaaccagaacaaccaacggagccaagtaaaccagtagaacctgaaaaaccagttacaccaagcaaaccagcagaacccgaaaaacctgtgacaccaactaaaccaacagaacctgaaaaaccagtacaaccagcagaaccaagcaagccaatcgacgttgttgtaacgccaacaggggaattaaatcacgctggaaatggtacacaacagccaacagtccctattgaaacaagtaatttggcagaaatcacacacgtgccaagtgtaacaacacctattacaactacagacggagaaaacattgtagctgtagaaaaaggtgttccacttacacaaacagcagaagggttaaaacctattcaatcgagttacaaagtattgcctagcggaaatgtagaagtaaaaggtaaggacggtaaaatgaaggttttaccatacacaggtgaagaaatgaatatctttttatctgccgtaggcggtatcttgtctgtagtatctgggtttgtcatctttaaaaaacgcaaagctaaagta

SEQ ID NO: 20687 - DNA, 474 bp, Enterococcus faecalis
atgattcaattatcagctgtcgggcgtttaacaaaaggagccgaactacgtaccaccactaacggaaagagtgtcgcaaacgttacattggcttgtaagcgaaaaagaccagacactaacggaaatgtgccgaccacatttattcaatgtgttttatggggcaaacccgcccaagtctttgcaaaatacacgcaaaaaggcgcattagttggtgtaaatggggaactacaaactcgttcgtatgatgaccaacaaggcgttacgcattatgtgacagaattagttgtagaagattttgagtttttagagtccaaagaaaccgtacaaaaacgagaagaaaaacaacacgcagtcccacaaggacaatcaaccccaacggttaatgaacaaccagcaatgaatcaagcaccaacacaacaaaatgtctaccaacaaccgtccatgaacgggttgtctgaatatggctacaatcaa

SEQ ID NO: 20688 - DNA, 1146 bp, Enterococcus faecalis
atgaaaacatttatctttgcagacaagttctttttaaaaagcgatgttaaaggacctggttatttagaaatcacggatggtatctttggtaattatacaaaagatgaaccgcaaggggacgtaaaaattattcgtgaggaaggcaaatggattgccccaggtttagtcgatactcatattcatggttacatgaatcatgacgtaatggataacgatgcagaaggcattaaagtgatgtctgaaggcttattatcttgtggtgtaacttcatttttaccaacaacgttaacttcaagtaaagaacgtttaacagacgttgcacgtacgattggtcaagtctaccaagaagtacctggtgcaaaaattcaagggatttactttgaaggacctttctttactgaagaacataaaggcgcacaaaatccaagttattttggagatccagaccttgatacattccacgaatggcaagaagcttcaggcggaattattaagaaaattgcgttggcaccagaacgtaatggtgtgaaagaatttgttgaaaccgttacagatgaaggtgtcgttgttgctttaggccatagtaatgcgaccttagaagaagctgatgtggcagttgaagcaggcgctagcgtttttgttcatgcatataatgggatgcgcggcttaaatcaccgtgaaccagggatggttggtgcattgttaacgttacaacacgttttctctgaattaatttgtgatggacaccatgtacatccgcaagcggctgaagtattgatggaaaaagcgggccatgatcacgttgcgttaattacagactgcatgatggctggcggtatgccagatggcaactataatttaggtgaatttcctgttgtggtagcagaaggaacggctcgtttggatactgggaacttagcaggtagtattttaaaactaaaagaagcaattaaaaatgtagttgattggggtattgcaacacctgcacaagcaattatgatggcttcattagttcctgcgattagctgtaaaattgatgatcaatgtggcatgattgcaaatggtcgcgatgctgactttatcgtattagaaccaaccatggaattagcagccacttatttagatggcgtagaacgttatcgagca

SEQ ID NO: 20689 - DNA, 2190 bp, Enterococcus faecalis
atggcagaagcttataacgaagaagtagtagcgctacttcaaaaagaattgacaacgtatcgttcaaaacaaataacaacggttttaactttattaaatgaaggaaatacagttccttttattgcccgttaccggaaagaaatgactggaagtttagatgaagtccaaatccgtgaaatagaagaacgttatcattatttacaaaacttgaaaaagcggaaagaagaagttctccgtttaattgaagagcaaggaaaactaacaaaagaactcaaaacagatattcaaaaagcagtaaaaatgcaacaagtggaagatttgtatcgaccatataaacaaaaacgtcggaccaaagcgactatcgcgaaagaaaaagggttggaaccattagcagattggttgctctctttacctgaaaacgcggatatcttagccaaagcggctacttttattaatgaagaaaaagaagttgcaaccgccgagatagccttgcaaggtgctcatgaaattttagcagaacgtattagcgatgaaccaaaataccgaatatggttacgtgattatatggttaagcatgcgcaatacgttagcgtagttaaggatgaagaaaaagacgaaaagcggacctatgaaatgtattacgattttgcagaaccagttagcaaaatggtgccgcaccgtgtcttagcaacgaatcgtggtgaaaaagaagacattttaaaggtttcccttgtcgctgatgaaacaaaaattaatgattatttccaacgtcaactaatcggcaagcaagcaacaagtttagctgctccatacattgaggctgcttatttagatagctataaacgattcattggaccagcgattgaacgggagattcgcaatgaattaacagaaaaagctgatgaacaagcgattgcaattttcggtgaaaatttacgtaatttattattacagtcaccacttaaaggaaaagttgttctaggatttgacccggcttatcggacaggctgtaaattagcagttgtcgatgaaactggtaaagttttagcaattcaagtgatttatccacataaaccagcgactgctgcgaaacgtgaagccgctggtccagcctttaaaaagatcattgaagactatcaagtggacatggtagctattggaaacggaacggcaagtcgtgaatctgaattgtttgtggcagagcaattaaaagcggtgaagcgtgacgtcttttacgtgattgttaatgaagcaggggcttccgtttactctgcgagtgaagtggctcgtaaagagtttcctgatttacaagtcgaagaacgaagtgcggtcagcattgcacgtcgtttgcaagatccgttggcagaattagtaaaaattgatcccaaagcagtcggggtcggtcaatatcagcatgacgtatcgcaaaaacgtcttgccgagcaattggattttgttgtagaaactgcggtaaaccaagttggtgttgatgtgaatacagcgagtgctcaacttttacaacatatttctggcttaaataaaacaacggcgcaaaacttagtcacttatcgtgatgaaaatggtgtctttacagcacgaaatcaagtcaaaaaagtacctcgtttaggaccaaaagcatttgaacaagcaattggctttttacgaattcctaatggcaaaaatgtgttagataacactggcattcacccagaaagttatccagtagcacaagcaattttagaaaaagcagagattgcttctaaagaattagggacagcagaagctatcgaaaaattgaaacagttaccagtgaatcaattagctactgagttagaagtaggttcagaaacactcacggatattattgctagtttaatccaaccaggtcgtgatatgcgcgatgagatgtcagcaccacttttacgtaaagacgtgttgacgatggaagatttgaaaccaggaatggaaatgcaagggactgttcgaaacgtaattgactttggtgcgtttgtcgatattggtgtgaagcaagatggcttagtccacatttctaagttaagtactaaatttgttaagcacccaacggatgttgttgcggtgggggatgtagtcacagtttgggtagaagatgttgacttgaaaaaggggcgtattagtttaaccatgttgcctcgggctgatagaaaagag

SEQ ID NO: 20690 - DNA, 240 bp, Enterococcus faecalis
atgggctttatttgggcattaattgtcggcggggtcattggggcaatcgctggagcaattactaaaaaaggatcatcgatgggcattattgccaatatcattgcagggttagttggttcaacaattggtcaagccattttaggcacatggggaccaagcttagctgggatggctattgtgccatcgattatcggggcagtgattttagttgccatcgtttcatggattttaggacgaaaa

SEQ ID NO: 20691 - DNA, 891 bp, Enterococcus faecalis
atgacagaaccaaacttaaaagacccaagaaagttattttatagtgatggatttccgcaacaagatcaagaaactcccgcattacaggacaaaatggtccctaaaccagattgtggggaagacagctatgtcggaaatcacaaattagaaaatcgtcgggtattaattacaggcggtgattctgggattggacgagctgcggcgattgcttttgctcgtgaaggcgcagatatcgccttacattttttcccaggtgaagaaaaagacgccgaagaagtggcgcactatatacgagaagctggccgaaaagtcgttcttttgccagcagatttaagagataaacaggcacctgaagaattggttgcacaagctcatgaagcattaggcggcttggataccctcgttttaaatgcagcccaacaaatttcctgtgccgctattgaagaattaccaatggaacaagtgatagacactttccatgtcaatattattgcgatgtttggcattgtcaaagcagcagtgcctcacttgcctgccggaagtagtattgtgacaacgacttccgtccaagcctttaatcccagtgagcatttgttggattatgcagcaacgaaggcatcaattgccaactttaccgttggtttagcaaaacaactggcaccaaaaggcattcgggtaaatggcgtggctccaggaccaatctggacaccgttacagttagatcatggacaaccaattgaagagttgccagaatttgggcaacattctttactggaacgtgcgggtcagcctgctgaattagcccctgtttatgttttcttggcgtccaatgatgcaagttatgttacggctcaagtttatggcgtaactggtggagaagcaattaatctt

SEQ ID NO: 20692 - DNA, 465 bp, Enterococcus faecalis
atgaaattttgtgaaacaaaaaaaatattaaatcaattggtagccgatttaagcgtattttcagtaagaattcatcaagttcattggtatatgcgtggaggaagatttctaacgctacatccaaaaatggatgatcttatggagcaaattaatgatcagttggatgtaatttcagaacgactgattacgcttgacggatctccgtattcaactctagaagagttttttataaattctaaattaaaagaagagaaaggttcttggaataaaactattgatgaacaaattaattatttattggaaggttatagttatcttatttcgatatatgaagagggaattgaaattgcagggaaagaaggagatgactgtacagaagatatctttattggttctaaatcagagctagaaaaagagatttggatgttaaaagtagagttaggtaactcacctgagttagataaa

SEQ ID NO: 20693 - DNA, 4046 bp, Enterococcus faecalis
aatccacaggaacctataactattaattctggagacaatacttctatagtggatcctaaagagatggttgaatttgcagtaaaaaatccaaccacagaaaatattaataaagcacgtagtttggtttctaaaatgtggctttgggacaaaaacaaatataatccagttcttaatgctgctgaagaagtaaacagatatctttcaactacgttaaatggttcatcaaatgatgatggcttgatattaaataatactcatgcggcaactttcgttaaattaattgatacggataaagatgggatacttgatagatacgaagcaaacatgggaattggaaccaactacacaaatgctgattctgatggtgatggaaaaagtgacggatttgaaatttttaatgatactgatcctttggtgagtccgtacgattggtttgataaaaatggagaaaaaataaaaatagtaacaaccgatactgatacgataagtggaagaataggaaataacaactatgatactgaaaatgtctaccctagaactgttcaattaataaaggttactgataacggagaaaatctgatttctgaaattagttcttctgaagatagaaaagggacttttgaatttactggattgagtggtaaattaagcaagggagatagactcgttgttaaaattattactaatgaagtacaaagagaaattgatcgacaaagaaatgttgttcaagttggttatgataatccagaggtatctgaagaagtaattgttcagggcgcacaagtaacagtctcttttgactttaattataatcaaactgatcctgactttgaccgtcaaccagttactcaagtagtagaattagaaaaaggttcaaggcttttaaatagttattttactccagaacgaaaaggctataaatttattggatggaatactgataaacttggagtaggacaaactgtcaatgatggttctagttttaatgaagatataacggtatttgctcaatgggaaaaagaacctaacctagctggagaagtacatgctccacaaggtcctattgaagaaggtaaaagtattgttctaaataatgtagtacagtccaataaatcagggtctgtaattgtaactggagaacttccaaaagggctctttgggttatctataaatgaaacaggtaatctaattggtactccacttatcaatgactggattgatggagaaaatagtcgggaagtaaagattccagttacaattagtaatggtgacgaaaaggttatggtggaagttccattaacgatcctgcatgatactcgagcggcagacgcagtaaaagcagcagaagacgcaggcaaagctggagcagataagaaagccgaagtggaaaccgacggtttagtgactccagaggaaaaagcggcagtggatggcttgaatgacacgactaccgcgaagaaagaagacgcaagcaagttagtggatgccttgccagaaggaccagtaaaagatagcttgaaagatcgcttagataaagtgacaacctctgaagtaacagtgaatgatgcagatagcaatggcaaagcggacgatgtagatttagctgaaaaagcagcggcagacgcagtaaaagcagcagaagacgcaggtaaagctggagcagataagaaagccgaagtggaaaccgacggtttagtgactccagaggaaaaagcggcagtggatggcttgaatgacacgactaccgcgaagaaagaagacgcaagcaagttagtggatgccttgccagaaggaccagtaaaagatagcttgaaagatcgcttagataaagtgacaacctctgaagtaacagtgaatgatgcagatagcaatggcaaagcggacgatgtagatttagctgaaaaagcagcggcagacgcagtaaaagcagcagaagacgcaggtaaagctggagcagataagaaagccgaagtggaaaccgacggtttagtgactccagaggaaaaagcggcagtggatggcttgaatgacacgactaccgcgaagaaagaagacgcaagcaagttagtggatgccttgccagaaggaccagtaaaagatagcttgaaagatcgcttagataaagtgacaacctctgaagtaacagtgaatgatgcagatagcaatggcaaagcggacgatgtagatttagctgaaaaagcagcggcagacgcagtaaaagcagcagaagacgcaggtaaagctggagcagataagaaagccgaagtggaaaccgacggtttagtgactccagaggaaaaagcggcagtggatggcttgaatgacacgactaccgcgaagaaagaagacgcaagcaagttagtggatgccttgccagaaggaccagtaaaagatagcttgaaagatcgcttagataaagtgacaacctctgaagtaacagtgaatgatgcagatagcaatggcaaagcggacgatgtagatttagctgaaaaagcagcggcagacgcagtaaaagcagcagaagacgcaggcaaagctggagcagataagaaagccgaagtggaaaccgacggtttagtgactccagaggaaaaagcggcagtgatggcttgaatgacacgactaccgcgaagaaagaagacgcaagcaagttagtggatgccttgccagaaggaccagtaaaagatagcttgaaagatcgcttagataaagtgacaacctctgaagtaacagtgaatgatgcagatagcaatggcaaagcggacgatgtagatttagctgaaaaagcagcggcagacgcagtaaaagcagcagaagacgcaggcaaagctggagcagataagaaagccgaagtggaaaccgacggtttagtgactccagaggaaaaagcggcagtggatggcttgaatgacacgactaccgcgaagaaagaagacgcaagcaagttagtggatgccttgccagaaggaccagtaaaagatagcttgaaagatcgcttagataaagtgacaacctctgaagtaacagtgaatgatgcagatagcaatggcaaagcggacgatgtagatttagctgaaaaagcagcggcagacgcagtaaaagcagcagaagacgcaggtaaagctggagcagataagaaagccgaagtggaaaccgacggtttagtgactccagaggaaaaagcggcagtggatggcttgaatgacacgactaccgcgaagaaagaagacgcaagcaagttagtggatgccttgccagaaggaccagtaaaagatagcttgaaagatcgcttagataaagtgacaacctctgaagtaacagtgaatgatgcagatagcaatggcaaagcggacgatgtagatttagctgaaaaagcagcggcagacgcagtaaaagcagcagaagacgcaggcaaagctggagcagataagaaagccgaagtggaaaccgacggtttagtgactccagaggaaaaagcggcagtggatggcttgaatgacacgactaccgcgaagaaagaagacgcaagcaagttagtggatgccttgccagaaggaccagtaaaagatagcttgaaagatcgcttagataaagtgacaacctctgaagtaacagtgaatgatgcagatagcaatggcaaagcggacgatgtagatttagctgaaaaagcagcggcagacgcagtaaaagcagcagaagacgcaggcaaagctggagcagataagaaagccgaagtggaaaccgacggtttagtgactccagaggaaaaagcggcagtggatggcttgaatgacacgactaccgcgaagaaagaagacgcaagcaagttagtggatgccttgccagaaggaccagtaaaagatagcttgaaagatcgcttagataaagtgacaacctctgaagtaacagtgaatgatgcagatagcaatggcaaagcggacgatgtagatttagctgaaaaagcagcggcagacgcagtaaaagcagcagaagacgcaggtaaagctggagcagataagaaagccgaagtggaaaccgacggttta

SEQ ID NO: 20694 - DNA, 984 bp, Enterococcus faecalis
atgaaattaagtatcttagatcaattaacggttcctaaaaatcaatcagcaagcgacacattacaagaagccaaagagctcgctcaattagcggaaaaacttggttacacaagaatttggtatgccgaacatcacggctcagacgcctttgccagtgcaacgccagaaattttagttgcacatattgctagtgccaccgaaaaaattcgtgttggcgcgggtggcatcatgaccatgcattatgcgccatttaaagtcgcagaaacgtttaaaacgttagcagctttatatcctgatcgaatcgatttaggcatgggccgctcgcctggcggcagccctttaactacgttggcgttaaataatggtcagccaccacagctagaccaatttgataaattacctgaaattttactctttttaagagaggaatttcctgaagatcatttatattctaaaatttcagctgttccgcgggaagttctattaccacaaccttggttactaggtgctagcaaagaaagcgcacgttcagctggtgaatatggcattaatttttcctttgctcagtttattcatggacatttgcccaaagaagtattgtccgcatattacaagcatttccgaccagtaactgaacaacaagagccgcaagtgagcgctgcgtatttcacttttgccgccgacacgaaagaagaagcagaataccatgcggctagtttcgagcattatatctttgccaccgaacatgggcttccaaataaatttttatcgccagaagaagccctagctttcccttacagtgaaatggacaaactggttttagaacaaaataaacaacgctttgtcattggcagtagccaagaagttgcggagtttttccaccaacaagaagaactagggttgacagaagcaatgctaatcaccccaggttatgacaaacaaacgcgctttcaatcgtttgaacgcctagcaaaagaattatta

SEQ ID NO: 20695 - DNA, 3939 bp, Enterococcus faecalis
gtgaaaaagttgagctttaaaaaagtgaagtggggcatgcattttttaatggctgttgcgttgatagcgccaagtgttactagtacggcatatgcagtagaaacaacgagtcaacaaagttcagaagcagtaacaagtaccaccgattcaagtagaaaacaagaaccagtcattacacaggaaacaacagacatcaaacaagaagcaccaaatcaggctacgagtgacagtgtcaagcagtcacaagaaaccacagcaccaacagagacgacgaatttagaaacgtcaatcgctgaaaaagaagaaacgagcacgccgcaaaaaataacaattttaggtacgtcagatgttcatggtcaattatggaattggtcttatgaagatgataaagaactaccagttggtttgtcccaagtaagtacagtcgttaaccaagtccgggcacaaaacccagcaggcaccgttttaattgataatggcgacaatattcaaggcactattttaacagatgacttgtataataaagcgcctttagtgaatgaaaagacccatccaatgatcaccgccatgaatgtgatgaagtatgatgcaatggttttgggaaatcatgagtttaattttggtttaccgttaatcaaaaaaattcaacaagaagccacttttccaatcttgtctgcgaatacctacaataaggaagatggtcttcgttttgttgaagggactaccacgaaggaacttgattttaatcaagatgggcagccagatttaaaagttgggattatcggcttaacaattccgcacattcctttgtgggatggccctcgtgttacttcgcttaattttttacctttgaaagaagaagcagaaaaagcagttactgagttgaaagctaacgatcaggctgacattattgttgcctcgattcatgcgggacaacaaaatagtgatccggctgccagtgccgaccaagtaattgaaaatgtcgcggggattgatgcgtatattctgggtcatgaccacctttcttttaccaagcaaggagcagcgccgaatggaaaaactgtaccggtagggggaccgaaagatacggggacagaagttgtcaaaattgatctttcagttgctaaaaatgccgataagtgggaagtgcaagaaggtacagcaacgattgtaccaacaacgaatgttccagcagatgaagcagttaaggcagcgacaaaagaataccatgaaaaaacgcgagcgtttattcaggaggagatcggcacagcaacagctgattttttaccaaaacaagaaattaaaggaattcccgaagcacaattacaaccaacagcgatgatttctttaattaataacgttcaaaaagaagtaacgggcgcacaattaagtgcggcagcgctgtttaaatacgacagtaaattacctgcggggaagatttcctatgccacgatttttgatatctacaaatacccgaataccttagtgagtgttcccattaacggtgaaaacttactgaagtatttagaaaaacaaggggcgtactataaccaaacacagccagatgatttgaccattagttttaatccaaacattcgtgtatataactatgacatgatttctggagtggactacaagattgacatttcaaaaccagtgggtgaacgaattgtagatgcgaaaattgacggccaaccgctggatcctgccaaagaatatacgattgctatgaataattatcgttacggcggtttagctagccaagggattcaagtaggggaacctattaaaaattctgatccagaaaccttacgaggaatgattgttgattatattaagaaaaaaggaactcttgatccagaacaagaaatcgaacgaaattggtcaattattgggacaaattttgatgaaaaatggcgtgccaaagcaatcgaattagtgaatgacggcactcttcaaattccgacttctcctgatggacgtacaccaaacgccgccgctattacgaaacaagatgtccgtaatgcgggctttgatttagataatgcatataccattatgcacacaaatgacgttcatggccgactagaagcagggaaaggcgaattaggtatggcgcgtctaaaaacctttaaagaccaagaaaacccaaccttgatggtggatgcaggggatgttttccaaggattaccaatctccaatttctccaaaggcgcggatatggccaaagcaatgaatgaagttggttatgatgccatggcggtgggaaatcacgagtttgattttggtttagagattgcactaggttataaagaccaactgaattttccgattttatctagtaatacgtattacaaagatggcagtggacgggtttttgatccgtatacaatcgtagaaaaatccgggaaaaagtttgccattgtaggtgtgacgaccccagaaacagcaacgaaaacacacccgaaaaacgtagagaaggtgacatttaaagacccgattccagaagtagaagcagtgattaaggaaattaaagagaagtacgcggatattcaagctttcgtggttactgggcatttaggcgtagatgaaacgacgccgcatatctggcgtggtgatacgctagcagaaacccttagtcaaacatatcctgagttagatatcactgtgattgatggacattcgcatacagccgtcgaaagtggcaaacgttatggcaaagtgatctatgctcaaacaggtaattatttaaataatgttgggatcgtcacagcaccagagagtgaaccaactaagaaaacaacaaaattgatttcagcagcagagctgctagaattgccagaaaacccggcagttaaagccatcgttgatgaagcacgtacgaattttaacgctgaaaatgaaaaagtaattgtcgattatattccattcacattggatggacaacgagaaaatgtgcgcacacgagagaccaacttagggaatttgattggtgatgcgattatgtcatatggccaagacgcgtttagccaacctgctgattttgcagtaactaatggtggcggcattcgcgctgatattaaacaagggccaattaaagttggggatgtcattgctgtgttaccttttggcaatagcattgcgcaaattcaagtaaccggcgcccaagttaaagaaatgtttgaaatgtctgttcgttcgattccacaaaaagatgagaatggcacaattttactagatgatgctggccaaccaaaacttggcgcaaatggtggtttcctacatgtttcaagctccattcgtatccactatgattccacaaaaccaggtactcgcttggctagtgacgaaggcaatgaaacaggacaaacgattgtcggtagtcgcgtattaggaatagaaattaaaaatcggcaaacacaaaagtttgaaccattggatgagaagaaacaataccggatggctaccaatgatttcttagctgctggtggtgatggttacgatatgctaggtggtgaacgagaagaagggatttcactagattctgtcttaattgaatacttgaaaagtgcaaccagcttgcggttgtatcgtgcagcaacgacgattgatttagcacaatataaagaaccattcccaggcgaacgaattgtttctatttcggaagaagcttacaaagagttaatcggtggaggagagacgccaaaaccagatccaaaaccagacccgaaaccaacaccagaaacaccagtagcaaccaataaacaaaaccaagcgggagcaagacagagcaatccatccgtaacagagaagaaaaagtatggcggctttttacctaaaacgggtacagaaacagaaacgcttgcattatatggtttactgttcgttggactttcttcttctggctggtatatttataaacgacgtaacaaagctagt

SEQ ID NO: 20696 - DNA, 1374 bp, Enterococcus faecalis
gtggaaaatagatacgcaattattttagcagctggtaaaggaacacgcatgaaatctaaactttataaagtattgcatccagttgctggtaaaccaatggtcgaacatattttagatcaagtagaacaaacagaaccaacagaaatcgtgacaatcgttggacatggggcggaaatgattaaaagccatttaggcgaacgtagtcaatatgccttacaagctgaacaattgggaactgggcatgcagtcatgcaagcacaagagttattaggtggtaaacaaggaacaacattagttattacaggggatacgccgttattaactgcggaaaccttgaaaaatttattcgattaccatcaaggtaagaatgcaagtgcgactattttaacagcgcatgcggaagacccaacaggctatggtcgaattattcgtgatcatgtgggcattgttgaacgaatcgtggaacaaaaagatgccagtgaagaagaagcacgtgttcaagaaattaatacaggaaccttctgttttgataatgaatcattgtttgaagcgttagcgaaaacagatacaaacaatacacaaggggaatactatttaacagatatcattgaaattttgaaaaaagaaggcaaagctgtcgctgcttaccaaatggcagactttgacgaagcaatgggtgtaaatgatcgtgttgctttatccactgctaataaaattatgcatcgtcgtttaaatgaaatgcatatgcgaaatggtgttacatttattgatccagacacaacgtatattgatgaaggcgtggtaattggttcagacacagtcattgaagcgggagtcactatcaaaggaaaaacagtgattggcgaagattgcttgattggcgcacattcagaaatcgttgatagtcacatcggcaatcaagtggttgttaaacagtctgtgattgaagaaagtgtggttcacgagggggccgatgtgggtccgtatgcacatttacgtcctaaagcagatgtgggggcaaacgtacacattggtaacttcgtggaagtaaaaaatgcaacaatcgatgaaggcacaaaagtgggccatttaacatacgttggtgatgcaacattaggcaaagatattaatgtcggttgcggcgttgtttttgttaattatgatggcaaaaataaacaccaaacaatcgtgggtgatcacgcttttattggctctgcaacgaacattgttgcgccagtcacgattggtgatcatgcggtgactgctgctggttcaaccatcacagaagatgtcccttcagaagatttggcgattgcccgggcacgtcaagtgaataaagaaggctatgctaaaaagttaccttatatgaaggat

SEQ ID NO: 20697 - DNA, 201 bp, Enterococcus faecalis
gtgaaaactggaacagttaaaagttttaatcataaaagaggatatggctttattattgccgaagatggatcagagatttttgtacatcaaacaggtatttgtatgccaggctttagaaaattgcttgaaggccaagcagtggagtacgaaaccgcagaatacgaagggcgaacaaaagcggtaaatgttactgtaattgaa

SEQ ID NO: 20698 - DNA, 528 bp, Enterococcus faecalis
atgaaaaaacaattgttaatcgttgatggctataatatgattggtgcttggccagaattggtccagttgaaaaagcaagagcgtttagaggatgcgcgtgaactgcttcttagtcgtctgtccaattacgccaaatatgaagggttggaaatcattgtggtctttgatgcccaattagtcccaggtattcagcaaacgtacaaaaagtaccttttgaccgtggttttcaccaaagaagatgaaacagcagatagttatattgaacgtctagctggtgaaaaaaatgatcgtttaacgcaagtaacagtcgcaacgagtgatttggctgaacaatgggtggtcttttcacaaggtgcattgcggacttcggccaatgaactttacaaagctgtccagaaaacagaaaagacgattgccattcatgcaacggatatccatttccagcaatttcgtcgaaattctccatggaacgtggagcagttatcaaaactttctgagaagctagaagaattgtctcaaaaaaaagat

SEQ ID NO: 20699 - DNA, 1434 bp, Enterococcus faecalis
atggaagaaaggtggaaaaagggcatgattaaaatttataatacattgaccagagaaaaagaagtatttacgccaattgaggcgcgtaaagttcggatgtatgtctgcggaccaaccgtgtataactatatccatatcggtaatgcgcgcagtgcgatcgcctttgatacgattcgtcgttattttgaatatcgtgggtatgaagtgaattatgtctcgaactttacagatgtcgatgataaaattatcaaggcagctaaagaattgaaaattactgcgccggaagtggcggagcgttttatcaaagcctttgaagaagacacgcaagcattgaatgtccaaccagcaacgttacatcctcgggtgatggaccacatgcctgatatcttagctttcatcgaagttttaattgaaaaaggttttgcttatgaggtcgcaggtgatgtgtattatcgcacccgtaaattccctaattatggtaaattaagccatcaatcgattgatgaattagaagtgggggcaagtcaacgaactggcgttgaacaacaattaaaagaagacccattggattttgctctttggaaaagtgccaaagaagatgaaatttcttgggattctccttgggggaaaggacgtcccggctggcatattgaatgctctgtcatggcgacaaaacacttggaagagacgattgatattcacggtggtggacaagatttagaatttccacatcatgagaatgaaattgcacagagcgaagccaaaacaggccatacctttgccaattactggatgcataacggctatgtcacaattggtgaagacgatgaaaaaatgagtaaatccctaggtaacttcattactgttcatgaaatgattcaaaaagtggatccgcaaattttacgtttctttatgtccaccacccagtaccgtcgcccgattcgttatagcgaaagcactctaaaagaggcagcagccaattatcaaaaattgaaaaatgcgtttgaaaatttacgttttagacaagcagatgcggtcgcaagtttgccagaggatgaacactatttggctcaattaaacgaattagaacaacgttttattacggaaatggacgatgatttcaatgcagctaacgggattacggtcgtttatgaattagcgaagatgatgaatcagtacagtgaacaagcgacagtttcggaaccagttctagtggcgatggataagcttttcagtggctggttagctatttttggtttattctttaaaaacgaagaattagtggatgcacaagtcgatgcgttaattgaagaacggaaccaagcacggaaagaccgtgattttgcccgaagtgatgaaatccgcgatttattaaaagaacaaggcattgttttagaagatactccgcaaggaacgagatggagaagaagtgaa

SEQ ID NO: 20700 - DNA, 537 bp, Enterococcus faecalis
atgagttggttgaaacgtagcgtcgcagctgttaaaagaaacgatcctgcagcgcggaccacactagaagttcttttaacgtatcctggcttgcacgccctgttttggcatcgcttgtctcatttcttatataggcatcagttgtttttgttggcgaagattcatgcacaattttggcgtttcataacgggcgtagaaattcatcccggagccacaattggagcgggagtttttatcgatcacggcatgggcattgtgattggggaaaccgcggaaatagaagaagatgttgttttgtttcacggagtgacgttaggtgggaccggtcgtgatacgggtaaacgccatccaacagtgaaaaaaggagcgatgatttcggcacgagctcaaattttagggccagtggtgattggtgaacgttcaaaaattggtgcgggtgctgttgttatttcagacatcccagcagatgccacagctgtgggtgttcctgcgaaagtcgttcgtctaaatggaagaaaggtggaaaaagggcatgat

SEQ ID NO: 20701 - DNA, 696 bp, Enterococcus faecalis
atgcaagtatcggatctgtttattcgcgagatgccgagtgattgtttaccacgagaacggctcttggcgataggagaaaaagcattatcgaatcaagagttgttggcgattctgttacgtactggctcaaaagaagcagacgtgatgactgttgccgcaacgctgttaaaacagtttaagcaactttcttatttgcagcaagccacgttgaacgagttaatggctattaaaggcattggccaagtgaaagccattgaattacgtgcggccattgaattagggtgtcgaatttatcaaagtagtcaaatcaaatttggcaaagttacatccagtcaacaagtcgctcaacgattactccaagagatgaaggggctgcaacaagaacatttaatttgtatttacttgaataccaagaatgacattatccaacagaaaacgattttcaaaggatcactgaatcaaagtattgctcatccacgcgaaatttttcgggaagcggttaaatattcttctgctcgcatactattagctcataatcatccatctggcaatccgacaccgtctccacaagatatccaatttaccaaacgaatggaagaatgtggcgaaatgatggggattcaattgttggatcatattattcttggtgatagcggatacattagtttgagagaagagaatttttttgcttcagaa

SEQ ID NO: 20702 - DNA, 1146 bp, Enterococcus faecalis
atgaagaaaattaaagtaatgacggtttttggaacacggccagaagcaatcaaaatggctcccttaatcaaagttttagaagagcaaagtcaaggatttgactctgtagtagtcgtaacagcgcaacatcgccaaatgttggatcaagtgttagaagattttcaaattacaccgaatcatgatttaaatatcatgaaagatgggcaaaccttaacagatattacaagtcgtgttttgaatttattaactgaggttcttgtgacagaacagccggatattgtcttggttcatggcgatacaaccacgtcatttgcggctgcattggctgctttttatcaacagattccagtgggacatgtggaagcaggattgcggacctggcaaaaatattctccgtttccggaagaaatgaatcgtcaactggtagacgtgttaactgatatttattttgccccaaccactcaaagtaaggacaatttaatcaaagaaaatcatccagaagaacatatttatgtgactggcaatacagcaattgacgcgatggcgtacaccgttgatgcccactatcaaaatgatttattggaaaaaatccctacagaccaacgcatcgtgctaattacaatgcatcgtcgtgaaaatttaggcctgccaatggcaaatgtgtttaaagctgttcgtcgacttgtaatggaacatccagaaattgaagtcattttccctatgcacaaaaatcccaaagtccgtgaaatagtagcggaacacttaggtgaattagctcgtgtgcatttaattgaaccattggatgtcaaagattttcaaaattttgcagcgaaaagtgctttaattttaactgattctggcggtgtgcaagaagaagctccttccttaggtgtgccagttttagttttacgagatacaacggaacgtccagaaggcgtagcggcaggaacattgaaattggttggtacagacgaacaagtagtctatcaagaggcgaaaacattattgactgattctgatgcttaccacgcgatggcgcatgcacaaaatccgtatggggatggtcaagctagccgccgaatcgttgaagccattgcctatgaaatgcagaaatcagataaaaaaccagatacgtttacagcaaaa

SEQ ID NO: 20703 - DNA, 1368 bp, Enterococcus faecalis
atggcaaaaaaagcaaaagttcaatttgaatgtcaaagctgtgggtatgtgtctccaaaatatctcggccgctgtcctaattgcggacaatggaattcgatggtggaagaggttattcaagatacttctgatcgtcgtgctagagtaagtttgactggtaaaaagacacaaccacaacggctatctgaagtcatacctaaaaaagagcctcgtgtaaaaactgaattagtggagctgaatcgggttttaggtggtggcgttgttccaggttcgttagttttaatcggtggcgatcccggaataggtaagtcaacattgctcttacaagtatcgcaacaattagcagccacaggtggtacggttttatatgtttctggtgaagaaagtgctgagcaaattaaattacgagcggagcgtctaggcaccgtcaacgagacattttacttatacgcagaaacagatatgcacgaaatatcacgagccattgaaaaattagaaccagactatgtcattattgactcgattcaaacaatgacgcagccagatgttaccagcgttgctggtagtgtcagtcaagtccgagaaacaactgccgaattattgaaactggcaaaaacgaatgggattgccatttttattgtcggacacgtaacgaaggaagggtctatcgcagggccacggatgttggaacatatggtagacacggttctttattttgaaggagataagcatcacacctttagaatcttacgggctgtcaaaaatcggtttggctcaacgaatgagattggtatttttgaaatgcagacacatggattggttgaagttatgaatccttctcaggtctttttagaagaacgtttagaaggagccaccggatcttcaattgtggtagcaatggaaggttcacgccctattttggtggaaatccaagcgttagttaccccaacgatgtttggcaatgccaagcgaacgaccaccgggttggactttaatcgcgtttctttaatcatggcggttttagaaaaacgggcaggccttttgttacaaaaccaggatgcgtatctaaaagcggctggtggagtcaaaattaatgaaccagctattgatttagcgttagcaatcagtattgcttctagctataaagaaaaaggaacctcatcttcggaatgtttcattggtgagattggtttaactggtgaaatccgccgcgtgaatagtattgaacaacgagtgcgtgaagcgcaaaaactaggctttacaaaagtctatgtccctaaaaataaccttggtggctgggaagcgcctgaagggattgaaattattggcgtttcaacaattggtgaaacgttaagaaaagtttttaaa

SEQ ID NO: 20704 - DNA, 1245 bp, Enterococcus faecalis
gtgactgatttaaagcaactagggcaacaagctaaagaagcctcttatacgctaggcttgatggatactcgtcaaaaaaatactttgttaaacaaaatggccgcagccattgaagccaatgcaccccgcattttacaagcaaatgcattagatttagagcaagccgctacccacggaatttctgaaacaatgcaagaccgcttacgtttaacagaagaacggatcacagcgatggctgagggcatacgccaagtcgctactttacccgatccaattggggaagtagataaaatgtggcgcaatgaagcgggactgttaattgggcaacaacgcgtgcctttaggtgttattggaatcatttatgaatcgcggccaaacgtgacaacagatgccgctagcctttgtttcaaatcgggaaatgctgttattcttcgaggcggaaaagaagcgtttcactccaatcagatattggtgacaattttacaagaagcgctaatccaagaagccgtttctccccatctcattcaatttgttgatgatacttctagagaaacagcccaacaacttatgcgcttaaatgactacttggatgtcctcattccgcgtggcggcgccaacttaatcaaaactgttttgacaacagccactgttcctgttattgaaacgggcacgggcaattgtcatatttacgtggacaaagacgcccagttaacaatggcaactgaaattattgtcaatgctaaatgtcaacgtccttctgtctgtaacgccgccgaaacgttattaattcatcaagaggtggctgaagcctttttaccaacaattgaaaaagccttgaaggagtttcacgtggaacttcgggcagatgaacgtgcgttagcaatttttgaagaagccattccagcgactgaacaagattgggaaacggaatttctcgactttatcttagcagtgaaagtcgttgattctttggacgaagccatccagcatattaatcgctacaatacaaaacattctgaaagtattattagtgataattactttgccacacaacaatttttacaacaagtggatgcagccgctgtttatgcgaatgcttcaactcgtttcacggacggttttgaatttggatttggcgccgaaatcggcattagtacgcaaaaattacatgcccgtggacctatgggtctagcagagcttacttcgacaaaatatgttatttatggaaatgggcaagcacgttct

SEQ ID NO: 20705 - DNA, 1101 bp, Enterococcus faecalis
atgaccgatcggatttcaagacgcatgatttcattatatgcgtcccttagcacctttattgttatcttaattacattgttttcatattttcattcgattaaacaaaaccggtggttattagagcttcttcagagaaaagtcttttatttaccactaattgtgcacattgttctcatatccttactaataggcttattgacctttttactgatttcattggttcaaaaagggcaatatggacggattgaagaaaaacttcggttattggccaacggtaattatgaaagtccagtcttaaacaaaccaacgaccagtgaaaatcaagaccattatctaaccgaagtcgaacaagatatttggtcgattaaaaataaattattagagatgtctaaagaattgcaattattaaacagtcgaccgcaattaatggatgggcaaacaaaagaagaaattttagagaacgagcggcatcgtttggcgcgggagttgcatgattcagtcagtcaacaactttttgcagccatgatgatgttgtctgcattaaatgaacaagcacaacgaacagaaaccccggaaccatatcgtaaacaactagccatggtggcagaaatcattaatgcctcccaatcggaaatgcgcgcgctactattgcacttgcgtcctatcagtctagaaggaaaaagtttgcgtaaaggtattgaacaattactgaaagaactacaaacaaaaattaaaattgaattgatttgggatgttgaagatgttcatttaaatagcagcattgaggatcatcttttccgaattgtgcaggagttactttcaaataccttaagacatgccaaagcaaaggaattagaggtatacttacaccaagtcgataaaaacgtgttattgcgtattgttgatgatggtgtcggctttgatatgaaggaacaaagtaataaagccggtagttatggcttaaataatattcgagaacgtgttgtcggcatgggcggtacagttaaaattattagttttaaagggcagggaaccagcgttgaaattaaagttcctgtcataaaggaggaaactgcaagtgatcaaagtaatgttagtgga

SEQ ID NO: 20706 - DNA, 1278 bp, Enterococcus faecalis
atgaagttcaaaactctagcaacaacagtgttagcaaccgcagctattttcgcattgggggcttgtggtaacggtaatggggccaaagaatcaaacgatattgtgaaagaagtgaaggaagatacgacaatcactttctggcatgcaatgaatggggttcaagaagaagcgttaacaaaattaacgaaagacttcatgaaagaaaatccaaaaattaaagtggaattacaaaatcaatctgcttaccctgatttacaagccaaaatcaattcgactttaacttcaccaaaagatttaccaacaattacgcaagcgtacccaggctggttatggaatgctgcacaagatgaaatgttagtggacttaaaaccatatatggatgatgacacaatcggctggaaagatgcagagccaattcgtgaagtattgttagacggcgccaaaatcgacggcaaacaatacggcattccatttaataaatcgacagaaatgttattctataatgctgatttgttgaaagaatatggtgttgaagtaccgaaaacattagaggaattaaaagaagcttctaaaacaatttacgaaaaatccaacaaagaagtcgttggtgctggttttgactcgttaaataactattacgcaattggaatgaaaaacaaaggcgttgattttaataaagacttagatttaacaagcaaagattcacaagaagtcgtggactattaccgtgatggtatcgaagcaggttacttccgcacagctggttcagataaatatttatctggcccatttgcaaacaaaaaggtagcaatgtttgtcggtagtattgctggtgctggttttgttcaaaaagatgctgaagctggtggctatgaatacggtgttgcaccacgtcctgaaaaaatcaacttacaacaaggaacagatatttatatgttcgatagtgctacgccagaacaacggacagcggcatttgaattcatgaaattcttagctactcctgattcacaattgtactgggcacaacaaacaggttatatgccaattttagaatctgttttacacagtgatgagtacaaaaattctaagacaaccaaagtacctgcacaacttgaaaacgcagtaaaagatttattcgctatcccagtagaagaaaatgctgattcagcctataatgaaatgcggacaattatggaaagtatttttgcttcatcaaataaagacacgagaaaattattgaaagatgcaacatcacaatttgaacaagcatggaaccaa

SEQ ID NO: 20707 - DNA, 1008 bp, Enterococcus faecalis
atgtctgatgaaaaagatatttatgatttaacgattatcggcggcggtcctgttggattatttgccgctttttatgcgggaattcgtaaagcgaaaacgaaaatcattgatagcctgccgcaattaggtggtcagctaacaatgctgtatcccgaaaaatatatttatgatattcctggattccctgctattaaagccggtgagttaattgccaatttggaaaaacagatgcagccatttcagcacgatgtttgcttggaagaagaggtcacacaccttgcacaggaagcagatggacttttgcgcttagacacaactaaaggcacacattattctaaaacggttatctttgcgattggtaacggcgctttccaacctcgacgtttagctatcgaaaatgttgaagcctttgaaggtgagtcaatccattattatgtgactgacatgaaaaaattcgctggcaaaaaagttgcgattgctggtggcggcgattccgcaattgactgggctttaatgctagaaaacgtcgcagaagaagtatctattatccatcgtcgcccacaatttcgcggccacgaacatagcgtggaacaactggaaaaatctagtgtttctatcagaactccctatatcattagtgatattttaaaggaaaacgaaacgttcacaggcatccaattaacggagacaaaaggtgaccaaacattggatctccctctggatgatttaattatcaattatggcttcacttcttctttaacacacctcaaagaatggggattagacgtttctagaaatgctattaatgttcattccgatatgtcaactaacattcctggtgtatacgctgtaggggatatctgttcctatgagggaaaagtgaaattaatcgctacaggctttggtgaggcacctactgccgtaaataatgctttacattacttacggcccgatgctcgacgtcaaccagttcatagtacaagtttatttgaaaacggcgtacctaaa

SEQ ID NO: 20708 - DNA, 457 bp, Enterococcus faecalis
atggggtctttccgtcctgtcgcgggtaacctgcatcttcacaggtactaaaatttcaccgagtctctcgttgagacagtgcccaaatcgttacgcctttcgtgcgggtcggaacttacccgacaaggaatttcgctaccttaggaccgttatagttacggccgccgtttactggggcttcaattctgagcttcgccgaagctaacccatcctcttaaccttccagcaccgggcaggcgtcagcccctatacttcatcttacgattttgcagagacctgtgtttttgataaacagtcgcttgggcctattcactgcggctgaccgaagtcagcaccccttctcccgaagttacggggtcattttgccgagttccttaacgagagttcgctcgctcaccttaggatactctcctcgactacctgtgtcggtttacggtacgggcagttgttttctcac

SEQ ID NO: 20709 - DNA, 1221 bp, Enterococcus faecalis
gtgaaaattggtttttttactgatacgtatttcccgcaagtgagtggggtagcgacttctattaagaccttaaaagatgaattagaaaagcacggccatgaagtgtatatttttacgacaaccgatcctaacgcgactgattttgaagaagatgtcatacgaatgcctagtgtgccattcgtatcttttaaagatcgccgagtagtggttcgcggcatgtggtacgcctatttaattgccaaagaattggaattagatttaattcatacacatactgaatttggtgcgggtattttagggaaaatggttgggaaaaaaatgaaaattcctgtcatccatacgtatcatacgatgtatgaagattacttacattatattgctaaaggaaaagttgtccgtccatcacatgttaaattcttttcaagagtgtttacaaatcatacgacaggtgttgtttgtcccagtgaacgtgtaattgaaaaattacgggattatggagtaaccgcaccaatgagaattattccaacagggatcgaaattgataagtttttacgtcccgatattactgaggaaatgatcgctggaatgcgtcaacaactaggtattgaagagcaacagattatgttgttatcgttaagtcgaatttcttatgaaaaaaatattcaagcaattattcaagggttaccacaagttattgaaaaattaccacaaactcgtttagtaatagttggaaatggtccctatctagaggatttaaaagaattagcagaagaactagaagtcagtgaatacgttcaatttacgggtgaagtgccaaatgaagaagtcgccatttattataaagctgctgactattttgtcagcgcctcaacgtcggaaacacaaggcttaacttatacagaagcgatggccgctggcgttcaatgtgttgcagaagggaacgcctatttaaataatttatttgatcatgaaagcttaggcaaaacttttaagacagacagtgattttgccacaacattgattgactatatacaagcaaatattaaaatggaccaaactattttagatgaaaaattatttgaaatttcttctacaaactttggcaacaaaatgattgaattttatcaagatacattgatttactttgatcaacttcaaatggaaaaagaaaatgcggactcaataaaaaaaattaaagtaaaatttacatctttaagaaaa

SEQ ID NO: 20710 - DNA, 888 bp, Enterococcus faecalis
atgtctaaaatcggctttattggaacgggtgtcatgggaaaatcaattattcgtaacatgatgaaaaacaatttatctgtcaatgtttacaatcgaacaaaaagtaaaacagatgatttagttgctgaaggagcagtttggtatgatacgccaaaagcaattgcggaagcgagtgatatcatttttacaatggttggctttccttcagatgttgaaggcgtgtattttaatgaaacagggatttttcaagcagatcttacaggtaaaatagtagtagatttaaccacaagtacgccgaccttggctgaaaagattgccaaaaaagcagcagaagtgggtgctcatgcgttggatgcgccagtttctggtggtgacttaggtgctaaaaatggtactttaacaattatggttggtggcgatcaagaaagttatgacaccgtcttaccaattttcaaaacatttggtaaaacgtttatgctacacggctcagctggaaaagggcaacatactaagatggcgaatcagttaatgattgcaggcacaatgaccggtttgactgaaatgctcgtttatgcaaatgcgacaggattaactttagaaaaagttctggaaacagtcggtggtggtagtgctgcaaactggtcattaagtaattatggtccgcgtattttaaaagaagattatacgccaggcttttttgttaaacattttatcaaagatttaaagattgcgttagatgaagcaaaaaaacttgaccttccattgccagcgacgcaaaaagcgacagaattatatgaaagccttgcagataaagggtttgaaaatgatggcacacaggccttaattaagctttggtggacagatggcaagcaaccaacgaataaaaat

SEQ ID NO: 20711 - DNA, 954 bp, Enterococcus faecalis
atgaatcaagagttatgtgagttgcttggaatcaattatcccatttttcaaggcggtatggcttgggtagccgatgcttcattagcaagtgccgtgtcaaacgctggtggattagggattattgctggcggcaatgccccaaaagaagtcgtaaaaaaagaaattaaaaaagttaaagaattaacggagcaaccctttggtgtcaatattatgttactttcaccttttgccgatgaaattgtcgatttggtttgtgaagaacaggttcctgtcgtaacgacaggtgcaggcaatccagccaaatacatggctcgttttaaagaacataacattaaagtaatcccagtagttccttcagttgctttagcaaaaagaatggaaaaaattggtgccgatgctgtcatttttgaaggaatggaagctggtggacatattggcaagttaaccactatgagtggcttaccgcaaatcgttgacgctgtgtcaattcctgtgattgcagcaggtgggattggtgatggtcgtggtatggctgcggcctttatgttaggtgctgaagcagtccagttaggcacacgttttttaattgccaaagaatgcaacgttcatccagattataaacagaaagttttaaaggcacgtgatttagatgcagtaattacctgtcaacattttggccatccagtgcgtactttaaaaaataaattaaccgctcaatataatcaattagaaaagcaagaactccaaaaagaagtgcctgatttagaaatgtttgaaaaaattggtcagggcgctttgcgcaaagctgtcgttgacggggatatggattacggttccgtcatggcgggacaaattgccgggttaataaaaaaagaagaaacagcccaagaaatcattgattcactcatgtctgaatgcaaagcgattgtacataagatgaatcagcgttggggc

SEQ ID NO: 20712 - DNA, 927 bp, Enterococcus faecalis
atgaaaacagcgattttatttagtggacaaggagcccagtatcaagggatgggtgaagaattatatcaccaagaagcgattgttcgggaaactttcgatgaagcaagtcatatcttaggttatgagatggcagaactttgttttactgaaaatgaacgtttaaatgaaacagaatatacgcaacctgctattttaacagtcagtgtcgcattttaccgtcttttgcaacaaaaaggactaacgcctgatgtcgtagcgggtttaagcttaggggaatacagtgctttggttgccagcggggctttgcgcttttcagaagcagtggccttggtccaaaagcgcggtcagtacatgacagaagcagcaccacaaggaactggcaaaatggttgctgttatgaatgctgagcgtgaagtaattgagaaagcctgccaagaagccagtgctttcggaattgtggctccagcaaattataatacaccacaacaaatcgtgattggtggtgaggttgctgctgttgatcaagcgatgacacttctcaaagaagctggtgtgaagcgaatgattccgttaaatgtgagtggccctttccatacggcgctgttacaaccagcatcaaaaaaattggctcaggatttagcaaaattgaactttcaaacgatgcaaattcctgtcattagtaatacgactgccgaaattatgccccaagaggcaattcaagcgttattggaaaagcaagtcatgtctgcggtacgttttgaagacagtatcgaaacgatgaaggctatgaacgtaggaacgatgattgaagttggtccagggaaaacattaactggttttgttaaaaaaattgacaaaacaattgaaatgcaccgtgtggaagatgttgcaacattaacagaaacgttaacagcgcttactgggagg

SEQ ID NO: 20713 - DNA, 735 bp, Enterococcus faecalis
atggaattaacaggaaaaaacgtatttattactggaagcactcgtgggattggtaaagcagttgcgttagcttttgcgaaagagggcgccaatattgtcttaaacggtcggagtgagattacgccagaacaacgacaagaaattgaagcctttggggtaaaatgtattggcctttctggagatatttccgattttgatgcggcaggtgagatgattcaagcaacagttgaccaattaggctcgattgatattctggtgaataacgctgggattacgaatgacaaattattattacgaatgacaaaagaggattttaatgcctgtttagatattaacttggtaggaacttttaacatgacccagcaagcggttaaacgtatgatgaaacaacgaagtggtcggattattaatatggctagcgtttctggtttaatgggaaatgttggtcaagcaaactacgctgcgagtaaagccggtgtcgttggttttactaaatcggtggcacgagaagttgcgccgcgcggtattacctgcaatgcgattgcaccagggtttatccaaacagaaatgacggatgttttatcggaaaaagttaaaacacaaatgaatgcgcaaattcccttacaaacgtttgggcaagtcgaagatgtcgcagctacagcgattttcttagctaaaagtccctatattactgggcaagtcgtgaatgtcgatggcggcttagtcatgcacgga

SEQ ID NO: 20714 - DNA, 1107 bp, Enterococcus faecalis
atgacagaggcaattcattgtattggctgtggtgcgattatccaaacggaaaatcctcatgaattaggctatacaccaaaaacagctttcgaaaaaggaatggaaacaggggaagtttattgccaacgttgttttcgcttaagacattataatgacattcaagatgtccaattaacagatgatgactttttacgtttattgaatggtttaggaacagaagatgcactgattgtgaacgtagtggatatttttgactttaatggctctcttattccaggactacatcgttttatcggagataatcctgtgttattagttggcaataaagtggatattttgcctaaatcattaaaaaaacctaaaatggttcaatggatgagagaacgggcccatgaagcaggattacgccctgttgatgttttactaacaagtggcaagaaaccacaagaaatgcaagagttattagatacgatcgaaaaatatcgtgaaggccgagacgtttatgtcgtaggtgtgaccaatgttggaaaatcaacattaatcaatcaaatcattcaacaaacagtgggtgttcaagatgtgattacgacatcacaatttcctggaacaacgctagataaaattgaaattccattagacgatggccacttcttaatcgatacgcccggaattattcaccgtcatcaaatggcacattacctaggtaaaaaagacttgaaaattattgcaccgcaaaaagaaatcaaaccgaaagtttaccaattaaatgctgaacaaaccttgtttttaggtggcttggctcgctttgattatgtccaaggtgctaaaagttccttcattgcctacgtttccaatgacttaaaattacaccgaacaaaaacagcaaccgccgatgctttttatgaaaaacatgttggtggcttattgcagcctccacgtgccgatgaagtcgctgagtttcctgaattagtgcgctttgaattttccgtgaaagaaaaaacggatattgtgtttgctggtctaggttggattactgtcacagaacctggtgtagtcgctggttgggcgcctaaaggtgtcgatgttttacgtagaaaagcattaatt

SEQ ID NO: 20715 - DNA, 588 bp, Enterococcus faecalis
atgagctggataacaaattatgatgctgcacaacgtgaattattaatgcaaaaagttcaaatgcaaatgagtgaacgccgttttcgccatgtgttaggagtcgaggaaacagctgtggccttggcagcgaaatatggtgccgatgaagcgaaagccagtattgctgctttgacgcatgattacgccaaagaacgtccaaacgatgaattcgagttgattattcgccgagatggttttgatttggctttattaaactatggcaatgaaatttggcatggcttagttggggcggatattgttcaacgggaattagccattgatgacgaagaaatcttgcaggcaattcgtgtgcatacaactggggctgctaagatgagcttgctagataaaattatttatgtcgcagattacattgaaccaggacgtgattttccaggtgtgaaagaagcccgtgaaattgcccttgttgacttagatgcagcggttgcttatgaaacgaaacataccttgttacatttgattgaacaagaacataaaatttatccaaaaacgttagagacctacaatcaatgggtcgttaatcaaaaa

SEQ ID NO: 20716 - DNA, 717 bp, Enterococcus faecalis
atgggccgtaaatgggcaaatattaaagagaaaaaagctgccaaagacgcaaacaatagccgtgtttatgcaaaattcgggattgaaatttacgtagcagcgaagtcaggagaccctgatcctcatgcaaaccaaaaattacggtttgtaatcgaacgcgccaaaacatacaatgtaccaaaacatattattgatcgcgctattgaaaaagcaaaaggttcagcagatgaacaatattctgaattacgctatgaaggatttgggccaaatggttcaatggtcattgttgatgctttaacaaacaacgtgaaccgaacagcagcagatgtgcgggccgcatttggtaaaaacggcggaaacatgggtgtcagcggtgctgtttcctacatgtttgataatacaggtatcattggctttgctggtgacgatgcggatgaaattttagaatacttaatggaaaaagacattgatgttcgcgatgttgttgaagaagacggtcaaattatcgtttacacagaaccagaagatttccaccatgcacaagaagcgttaaaagaaaaaggcattgaagaattcacggttactgagttagaaatggttccacaaaacgaagtaacattagaaggcgacgatttagggaactttgaaaaaatgttagacgttttagaagatttagaagatgttcagaaagtccatcataatgtagatttacctgaa

SEQ ID NO: 20717 - DNA, 849 bp, Enterococcus faecalis
atgaacgatttatggaattttttagataatcatcctgaagagaaagaattgataaaggcaaaagcattacaaggttatacagttgatggaattttaaatgatcaacttaattttgttgctctagatactctatctattggtctggaaaaatttggaaatattcattatagtatccaaatcccagaatttaatgaattactaagtaagaagatggtagtactttttgttcctgcggatggagtgggacactctggcgccaaagaaagatattttggattgagacaatggaataccctgtctcaatctgttcgaaaaaataccatcattcttagaatagctgatgttggctttgtgtcaggatcctattacacattatttgagcaagaaattttggatttaattgaagcaaagaaaacagaatttggactgaagcatcaagatataatcttctatggaaactctagaggcggaacgggagcgttattattaggtattacaggtaattacaaaacagttagtgtagatccagtaattgatcgagagccttgggtaaacagcgcggatggtagaatagatcgccagttaatgtttgatttcgtagaaatggatttttcaaaccgaataaaagataagatggaacagtcaaactatgaattagaaaacattacggtgattgcttctgaagcaaataaaaaaatgtatgagaaaatttaccccttatctaatggttttaccttgaaaaaattagaattaatgattgattctgaaaatacaattggtatacacggccttacgataatggaaagtattcatttacaattagcgttaataaataattatttatttgat

SEQ ID NO: 20718 - DNA, 1137 bp, Enterococcus faecalis
atgaaatacaatacgaaaaattatgactatttaattgttggttcgggaccttttggggcaacgtttgcttgtgaagcagctaaacgaggaaaaaaagtattagttattgagaaacgtgctcatattggtggcaatatgtatacacataaagaaaacgggattaatgtccatgactatggtgcccatatttttcatactgacaataaagaagtatggtcttatgtcaatcaattgacggaattcaatggctacatcaatcaagtagttgctaattacaaaggggagctctacaacctaccattcaatatgaacacgttctaccaaatgtggggggtaaaaacaccagctgaagcacaagcaaaaatttcagagcagcgggaggcagctggaattaaaggcgctccaaaaaatttagaagaacaagcgattcgtttgataggaacggatatctatgaaaaattaattaaaggctatacagaaaaacagtggggacgtaaggctacggaattaccaagttttattattcgccgtttgccaactcgttttacttttgataataattactttaaccatcgctatcaaggcgtacctgtcgacggttatacagctatgtttgataaattgttagagagtgaattaattgatattcaattgaataaagactttttggcagagaaagaaacttacttatcagagtttccaaaaattgtttatacagggatgattgatgcattctttgattattcttatggcgaattagaatatcgttcagtacgttttgaaaatgaaacagtagattcaaacaatgcacaaggcaatgccgtaattaattacacagatgcggaaactccctatacacggataatggaatggcgacattttgatcaaaaggccgatgaaaacaaaacgattttgacgaaagaatacccacaagattgggatcgttcaaaagaagcctattatcctgttaatgatgagaaaaattcacttttgtttagaaaatacaaagaaaaagcaaacgctcaagaaaaagttatttttggtggacgtttagccaattatcaatactatgatatggaccaagttttcggagcagctttgaaagcagtcgctaaagaatttggtgaaatggccaac

SEQ ID NO: 20719 - DNA, 1341 bp, Enterococcus faecalis
atggaaaaagaactgaaagttagaacaaaattacttaccaaagaatacagtttagcgcaaacacgtattgacaaattgaagacactttttagtgtttttcaaaacaaagttcccacattttgggcgttaaaaggtgttagcctcgacgtatattctggagaaacaattggtattattggtttaaatggttcaggcaaatccactttatcaaatattatttcaggcatcacccctcaaacgtcaggagaacttgaaataaatggtgaagtttcaattatttcgattggtgcaggactaaataataatttaacaggacgagaaaatattcgaatgaaatgtttaatgttgggggaaaagaataaagaaattgatgccaaaatcgatgatattattgaattctcagaattaggcgtttttatcgaccagcctgttaaaacttattctagcggtatgcgtgctaagcttggtttttcaattgcggttcatcaaaatccagatattttagtgatcgatgaagcgttatctgtaggagatcaaaccttctataataaaggcttaaaaaaaatgcttgcatttaaagagcaaggcaaaactatcttttttgtctctcattctattcaacaagtagagcaaatttgtgatcgtgtcgcttggatgcattatggtgacctacgtgcatttggtgaaactaagcatattttaaaggaatatcgtgctttcttgcaccgttataatcatttcactgaaccgcaaaaagaatcgtatcagagagatggcaaggccaaacagagaaatttttctttggaacaacttcaagaaacaattcttgaaaaagccaatcaacaagtaggcagtcgccggacgactaaagaagtcattaaatttactactaaaaataaaattggagataaaatgactcttggtacgaagagcttgttaattttgctactttgtatgattttttatgtaagtcttacctttgtaaagggtatttcattaacaacagctttcattcatccagcggaaacaattcaacgtatatttgttcctgagaaagtagcagggaaggatacaaatgctgtgaaaacgactaaaactaaaccagcttcaacaaaagaatctaggcagcaggaggaagttcagcctagcccaacgaacgtaccagaaaataataatagcgaacaagctgtgtcaacgtatactgtggaagttggagattcagtcagtttgattgctgaaaatcacggactcactatagaacaacttcaaactttgaatccagaaatcattgaggtacctatttatcctggacaagtgttgaaattgaaagaggtgactgaa

SEQ ID NO: 20720 - DNA, 2133 bp, Enterococcus faecalis
atgaagaaaaactcatttatagataaaataaaaaaaacagatgccgcagcaaagagtcaacgaggtagaaagccacatattccttttcgattgaacttattattttttgtgatattcactttatttgtttcattaattgtccgtttagggtatttacagattgtagaaggagaagagtttaacaaaaaaatcactgccaattcttcactacaaatcacgacaccatcccctcgaggacaaatttatgattcacaaggaaaagtcttggtttctaacaaagccaatttagcaatcacatacacacgaggaaaaaatattgaaggaaaagatattttaccgattgcgaataaagttaacgaacttattaacgttccagttgatccaaacttaacggatcgtgacaaaaaagattattggttagcgaatcctgaaaatttaaaagcagcccaatcccgtttaaccgatcaagataaagaagatgaaaaaggcaacaaaattacggacgaaggcacattatatgccaaagcagttgaaaaagtcacccctgaagaaattgcgtttgatgaccgaaccttacaagcagtaacgatttttaaacgaatgaatgcagcatcacaaatgaacacggtcttcatcaagaatgaaggggtaacagaaggtgaaattgcgacaattggtgaacacacagcggaaatatctggtgtttcaacagggactgattggacgcgtgattattctcaaagtggcgcattacgtagcctgttgggcaccgtttcaactgaaaaacaaggattgccagccgaagaagtcgatgaatatttgaaaaaaggctatgcacgaaatgaccgtgtcgggactagctatttagaaaaacaatatgaagacgttctacaaggtaaaaaagcaaaatcagaagtcgttttagacaataacggaaagattgtttcacaaaccccaatttccaaaggggaaaaaggctccaacttaaaattaacgattgattcaaatttccaaaacaaagttgatgaaattttacaacgaaactattcacaaatagtcaaaaccattggaccatactcagaaaatgcatatgtcgttgctatgaaccctcaaacaggagctattttagcgatgtccggatttcatcatgatttagcaactggagaagtcacacctaatcctttagcacctattttgaattctgaagttcctggatcagttgtgaaagcaggtactttaacagctggttatgaaacaggcgtcattaaaggcaatgacgttttaacagatgaagctattttactagcaggtagtaatccaaaagcttcttggtggaatgcttctggcggaacaaccatgcaattaactgcggagcaagcgttagaatattcttcgaatgcttatatgatgaaattagtctttaaaatgatgggtgtgaattattatcccaatatgattttcccttatgaagtaggagatgacactgtctttaaagaattaagaaaagcttttgcagaatatggtatgggaacgaaaactggaattgatataccaggagaaacaacaggaattcaaaacaaggactttaaggattcgtcatctgcgccacaaggcggtaatcttcttgacctatcttttggacaatatgatacctatagcgccttacaattagcacagtacgtttccactgtcgcaaataatggcatccgcgtgcaaccccatgtggtagaaggaatctatggcaatgatgaaaatggagctttaggaaaaattttaaaagaaattgaaccaaaagttttgaataaggtgaatatttctgaagaccagataggaattcttcaacaaggtttctataatgtggtaaatggaactagtccttttacaactgcacgtggtttaaaatcagacaagttttcgattgctgctaaaacagggaccgccgaaacgcaagcaacagatgctaatggagtaaaccatacaacggttaatagtaacttggtggcttatgcgccgtacgaaaatcctgaaattgcaattagcgttgttttaccacacttaaatgatgaagcttccaaaccaaatcaaacgattgccaaagaagttttagaagcgtatatggaaatgtacaaaaaa

SEQ ID NO: 20721 - DNA, 729 bp, Enterococcus faecalis
atggaaaatcgaggaattttatttgataaagatggtacgtgtattcgttttgacactctttggcaagcaggtttgcaagcttgttttgaaacactaagtatgttagcccctcatcattcagcagaaataaaaaagatattagctattcaggagcaacgttttttgcaaaaacatttacttgatgaagtcctttatcaggaactttatcaggaattggcgcaatttgaggaattagtcgaacagggaatcagcagtcgatggctggagcaatttttttatgattatttacgaaaaaatctgaaaaagatcgaaccgattggtgatttaaaacagttatttcttgagctgaaacggaagaactataaaattggattagcaacttcagatactttgccagcgactatgttgattatggaatatcttggtttaacagaaatgtttgattttattgcgacaggagatcgttacttaccgaaaccagatgcggacatgctccaagccttttgtcagtcatgtcaattgaaggcgacagaagtaattatggtaggtgattcgctcgtggatgtttttatgggaacgtgtcatggcaaagcaggaattggtgttttaaccggcaactgccagtcaactgattttgaaaagtttgaagtagcctatttccgtgatatccatgaaataccttatcaagaattatgggaaaataccaagaagaaaaaaatctattatttt

SEQ ID NO: 20722 - DNA, 1044 bp, Enterococcus faecalis
atgacaatttttacaaaagaacgtaaattattattagctgtggaaagtagctgtgatgaaacaagtgtggctgtcattgaagatggcgacaaaattctttccaatatcgtagcttcgcaaattaagagccatcaacgttttggcggagtcgttccggaagttgcgagtcgtcatcatgttgaacaagtgacgatctgtattgaagaagcattaacagaagcaaaagtcacaccagaagaactcagtggcgttgctgtgacctatgggcctgggttagtcggtgctttattaataggactttctgcagcaaaagcatttgcttgggcgcaccaattaccacttattccagtcaatcatatggctgggcacatttatgctgcccgttttgtggcaccgctcgaatttccattgatggccttactcgttagtggaggacatacggaattggtctacatgaaagaagatggctctttcgaaattgttggtgaaacacgtgatgatgcagctggtgaagcgtatgataaagtcggacgtgtgttagggttgccttatcctagtggcaaagagattgatgctttggcccatgaaggcacagatacctatcaatttccacgggcgatgctaaaagaggataactatgactttagctttagtggtttgaaaagtgcgtttattaacacggttcataatgcagagcaacgtggtgaagcactgtctacaaaggatttagccgcaagttttcaggcgagtgtggtagaagtattagtgactaaaaccattcgtgcttgtcaagaatatcctgttaagcaattgctaatcgctgggggcgttgctgcgaatcaaggattacgagaagcaatgagacatgcaatcagtgaacaattaccagcagtgacattacttattccgccattaaaactttgtggggataacgcggcgatgattggcgctgccgcctttatcgaagctgaaaagaatcactttgcttcgtataacttaaatgcagaacctggcgttagttttatgacaattagtgaagaaggc

SEQ ID NO: 20723 - DNA, 1833 bp, Enterococcus faecalis
ttgaaatacagagatgatattcgtaacgtggcaattatcgcccacgttgaccatggtaaaacaaccttagtagatgaacttttaaaacaatctgacactttagatggacacacacaattacaagaacgtgcaatggattccaatgcacttgaaagtgaacgtggaattactatcttagcaaaaaatacagccgtagattataacggtacacgtatcaacattctagatacaccaggacacgcggacttcggtggtgaagtagaacgtatcatgaaaatggtagacggtgttgttttagttgtcgatgcgtatgaaggaacaatgcctcaaacacgtttcgtattgaaaaaagcattagaacaaaaagtaacaccaatcgtggttgttaacaaaattgacaaaccttctgctcgtcctgaacacgtagtagatgaagttttagagttattcatcgaattaggtgcagacgacgatcaattagatttcccagttgtttatgcttctgctttaaacggaacttcaagtgaatcagatgatccagcagatcaagagccaacaatggccccaatttttgataaaattattgaacatgtgccagctccagttgacaattcagacgaaccacttcaattccaagtctcattactagactacaacgattacgttggacgtattgggattggccgtgtgttccgtggcacaatgaaagtcggcgaccaagttgcgttgatgaaattagatggcagcgtgaaaaatttccgtgtaacgaaaattttaggtttctttggcttacaacgtgtggaaattgatgaagcaaaagcgggcgatttaattgccgtttctggaatggaagacattttcgttggggaaacagttgtagatgttcacaatcaagaagcattaccaattctacacattgatgagccaaccttacaaatgactttcttagttaacaattctccatttgcgggacgtgaaggaaaatacatcaccgctcgtaaaatcgaagaacgtttaatggctgagttacaaacagacgtatctttacgtgttgatccaattggcccagattcttggactgtatcaggtcgtggcgaattgcatttatcaattttaattgaaaacatgcgtcgtgaaggctatgaattacaagtttctcgtccagaagttattgaacgtgaaattgatggagttaaatgtgaaccatttgaacgtgttcaaattgacacacctgaagaatacatgggtagcgtgattgaatcactaagtttacgtaaaggcgaaatgcaagatatgattaatgccggtaacggacaaatgcgtttaatcttcttagcaccagctcgtggcttaattggttattcaacagaattcttatcaatgactcgtggttatggtattatgaaccacaccttcgatcaatacttaccaatgattcaaggaacgattggtggccgtcatcaaggtgcactagtttcaatcgatactggtaaagcaacgacttactcaatcatgagtattgaagaacgtggtacagttttcgttgaaccaacgacagaagtttacgaaggaatgattgttggggaaaacaaccgcgacaacgatttaactgtgaacatcacaaaagctaaacaaatgactaacgttcgttcggcaacgaaagaccaaacatcagtcattaaaaaaccgaaaaaattaacgttagaagaatcattagaattcttgaatgaagatgaatactgtgaagtaacaccagaaagcatccgtttaagaaaacaaattcttaacaaaaacgaacgcgaaaaagcaagcaagaaaaagaaaaaagctgaa

SEQ ID NO: 20724 - DNA, 540 bp, Enterococcus faecalis
atggagaaaaacaagttgagaaaagtgggcttaactgccctggaatggctaaaacaacatccagaaattaaacaacataaagaatcaagtctctatgaacagttgtttgctagtcagcaatggcaacaagcacaaacgatcggaatgattcggtcgttaccgctagaattatcaacacagccaattttcgaacgggccatgcaagagagcaagcaagtggcggtgccgcgaacatttaaaggaggcaaaatgcacttttatcaagtctttccagagacggtttatgataccagtgcatttggcgtggaagaacctccgttaacagcggcagaaataacagctacagcgattgatttattgattgtgccagggattgttttcaatcgtgctggctatcgaataggcttcggcggtggtttttatgatcgttatttggaacatttttcgggccattcatgtagtttagtttttagtgaacaactccatgagcaatggcaaccagaagcgtttgatcagccaatcgaacaattatttatacaa

SEQ ID NO: 20725 - DNA, 396 bp, Enterococcus faecalis
atgagtattttatgggtaatcaatggcattttgctagttattgtactagcgatggtattcaatgaattatatttgaaaattatggtgaaacgttcagcaaaaatgctgacggaagaagaatttaaagaaacaatgcgtaaagcacaagtgattgacgttcgtgagaaagatacatttgatgctgggcatattttaggggcgcgcagcatgccatacagcatgttaaaaacaacaattggttctcttcgtaaggatcaacctgtttatctttatgatcagaagaaagctttaagtatccgagcagctaatctattacgcaaaaatggctatactgatatttatattttaaaaggcggctatgatggctggactgggaaagtgaaaaagagaaatagt

SEQ ID NO: 20726 - DNA, 312 bp, Enterococcus faecalis
atgatgcgaggaatgggcaacatgcaaggcatgatgaaacaagtacaaaaaatgcaaaaagaaatggccaaagcgcaagaagcactaaatgaaaaagaatttatcggtgaagccaccaatcaacttgtgacagcgacatttactggtgatcgcacaatgaaagatttgatcattaaagaagacgtggttgatcctgaagacgttgatatgctacaagatttagtcattatggctgtcaacgacgcgttagtaaaaattgaaaaagaaaccgaagcaactttaggcaaatacaccaaaggaatgccaggattc

SEQ ID NO: 20727 - DNA, 534 bp, Enterococcus faecalis
atgacgaaagaaaaattttgtcgagaatcacgagttattcaaacacatcgtgtatttccctttgatttaaatccctttggtgcactatttggtgggaaattaatgtctttaattgatgacgccgcatccatttccgtttcacgacattgtcggagaggggcagttacagcatctttagataacttgaattttttaaaacctttaaaagaaaatcactcagtgtgtgttgaaacgtttgtttctggcgtgcatcataaatcgatggaagtatttgttaaagttgtaggagaagatttaacaactggagagcgttatttagcggcgacttgttttacaacttttgtagccattccgtctcatatgaatcccgaaagtgacttccaattagcggcagtcgtcccagaaactgcagaagaaaagttgatttgttccaattatgaaacgagacgacaacaacgtttagctttgcgagaagagactaaattatttagtcaacatctcacaacggatttaccgtggattgattcaccttta

SEQ ID NO: 20728 - DNA, 249 bp, Enterococcus faecalis
atgccaaatatcgaatctgcaatcaaacgcgtacgtacaagtgctaacgcgaatgcgaaaaattcatctcaaacaaacgcaatgcgtacagcaatcaagaaatttgaagaagctgtagctgctggagctgataacgtcgatgctttatacaacgaagctgttaaagctgttgatatggctgcaactaaaggtttaatccataaaaacaaagctaaccgcgataaaattcgtttaagcaaattagctaaa

SEQ ID NO: 20729 - DNA, 1011 bp, Enterococcus faecalis
gtgagtattgcattattggtaacgattactttggtaatgggtgtaatttttgttaacggttggacggatgcgccgaacgcaattgcaaccgctgtctcgactcgggtgttaaaaccgaatgtcgcaatttggatggctgttgtgatgaactttttaggtgcattagtcatgaccttttttaatgcccaagtagctgaaacgattagtaacattgttagttttgacgcaaatggaaacgcttcacaggtggctttggctgcttcgcttttttcaattgtggtttgggcagttgctgcgtggtattttggtattcccacaagtgaaagccatgcgttaattgccggcttgactggttcggcaatggcattaggtggtttgggtgcagtcaatggctcggaatggatcaaagtgcttgttggtctagttgtttctaccgttatgggctttggcggcggttatttaattgccaaacttgttgtgaaagctttctcggctgtgcctagaagaaaagccaacaaattttttacagttggacaagcctttggtgcaggagctaatgcttttttacatggtgcgcaagatgggcaaaaatttatgggcgtgttcatgttagtgcttttttataataatttagtcgaaaaaacaggtggcggttttgtgattccgttatgggttatggttctgtgttccattacaatgggcattggaacttctgtgggcggcatgagaatcattaaatcagtcgggatggatatggtaaaacttgaacgctatcaaggcttcactgcagatttaagcacggctatttgtttatttttagcatcggcttttgggattccagtttcaactactcatacaaaaacaacagcgattatgggagtaggtgcttctaagcgaatctcaagtgttgactggcgtatcgtgaaagaaatgctgatagcatggattttaactttcccaggatgtgggctgatcgcttatgtgatgtcaaaattatttattgcaattttt

SEQ ID NO: 20730 - DNA, 1107 bp, Enterococcus faecalis
atgtatggtatttcagtttttcttggtgaagagattacaaacgatacaattatttatatcaaaaagatgaaagcgcttggatttgatggtattttcacttctttacacattccagaagatgatacttccctttaccgccaacgcttgactgatttaggggcaattgctaaggcagaaaaaatgaaaattatggtagatatttcaggtgaagcgttaaaaagagcgggtttttctttcgatgaattagagcctttaatcgagttgggcgtaactggcctccggatggactacggcattacgatagaacaaatggctcatgcttcacataagattgatataggattgaatgctagtaccattacactggaagaagtggctgagttaaaggctcaccaagcggacttttctcgcttagaagcttggcataattattatccaagacctgaaaccggcattggaacaacattttttaatgaaaagaaccgctggcttaaagaattaggcttacaagtttttacttttgtaccaggagatgggcaaacaagaggcccaatttttgctggtttaccaacattagaaaaacatcgggggcaaaatcctttcgccgctgccgttggtttgatggctgatccttatgtcgatgctgtttatattggtgatcctacaattagtgagcgaaccatggctcaatttggttattatcaccaaactaatcaatttctgttagaagtagcacctagcgagagccgctatttgaagcgaatacttgggactcataccaatcgtttagatgctgcaagagatgttttgcgaagtgaattatcaagaacgagtgaaatgttcagaaaagatgaaattgcaacgattgagtcagagcagactgaagcacgtccagtgggaaccgtaacgattgataatgaaaaatatggtcgctatatgggagaaattcaagtcacacttgtggacttgccgaaagatgaaaaagtcaatacgattacacgaattattgaaaaagatcaaacgatattgccgttaatcaaggcaggcaatcaatttacgctagtcacggaaggaacgatagagaatgaatttagaaaacttaacaac

SEQ ID NO: 20731 - DNA, 870 bp, Enterococcus faecalis
atgcctaaattttcaccatgtttatggtttaacacacaagcggaagaagctgctaacttctatacaacaatctttgaaaaaggtgcgattctaagtaaaacgaactacgttaatgaggagcatcaacctcaaggaacatcattaatgaccattgaatttaccttggcgaaccaaacaatcattggtttaaatggcggaccagaattttcctttacgccagctagttcattttttgttgaatgtacaacattaccacaaacagaaacgttgtggaaaaatttaacagcagatggacagatattgatgccttttggggaatatccttttagtcctttatatggttgggtagtggacaaatttggtgtctcttggcaagtgtctttttcaggaaaagaacaaacaattgtaccaacctttatgtttgctaatgaaaaatatggcgaagcagccaaagctctatcagaatggttggcgattttcggtccaggcgaaataattgaaaaagttgaatatgaagatgggaacattgcgcaagcacttttcacattacaggagcaaccgtttcgagtaatggatgcacgagataaacatgattttgattttaccatggccttctccatttatattgattgtgaaaatcaggaggaaatagatcggctatggcaacaagtgactgctaaagggaaagaatggccgtgtggctggatggaagatcaatttggagtcagttggcaaacaggcaatcctgaactgaaacgttatttatctgactcaaatccagctagagcaaatgaagtgaccaaaaaattgtaccaaatgaaaaaaatagatttaaaccagttaaaagaagtgtatgacaaatataatcat

SEQ ID NO: 20732 - DNA, 888 bp, Enterococcus faecalis
atgaatttagaaaacttaacaactgaacgtagaaatgaaaatacaatgggcttagatgagatgagtgtcaaagaagctttacaaaaaatgaatcaagaagaccaaaaagttgcaatggcagtgggtcaagaattagcagccattgaaccagtggtagaagccatcatcaaaagcttcaatcaaggcggccgcttgatctacatgggcgctggtacgagtggtcggttaggtgtcttagatgcagccgaatgcgtaccaacttttggcgtcgagccagagatggttcaaggcctcatcgctggtggtcaaaaagcaatgactgtcgcagtagagggtgccgaagattcaaaagaactaggtcgtcaagatttagttgatctaaaattatcagcaaatgacattgttgttgggattgcagccagtggtcggacgccttatgtaattggcggtttagaatatgctacaacggtgggagcagctaccgcaactgtggcatgtaataaaaatgccgaaattagtaaatatgcgcaaatgccgattgaagtagatgcaggacctgaatttttaacaggttcgactcgcttgaaatctgggacagctcaaaaattaattttaaatatgttatcaactatttccatgattggtattgggaaagtctataataacttaatggttgatgtaaaaccaaccaatgaaaaattagtggagcgttccaaacggattattatggaagcaacgggttgtagttatgaagttgccgaactaaaatttgtagaagcagaagaaaatgtgaagttagcaattgtaatgattttaactgatagtactaaagaagaagcaacacaaaaattaattgacgggaatcaatttatcaagaatacattaaat

SEQ ID NO: 20733 - DNA, 1452 bp, Enterococcus faecalis
atggcagaagaaagaattaaacgcattgctgatgggatttataaagaagttggtggtcaagaaaacgtggacaaagtcattcattgtatgactcgtgttcgtatggatatccgcgattatgacaaagtggatattgaaggattgaaaaaaattgatggcgttatgggcgtcgtagaagatgatacgttacaagtagttgttggtccagggactgttaacaaggttgcacaagaaatggtagatcaagcaggtgtcaaattgggagaaccatttaatcatggcaccacaactgatgcttcagcaggcaaatctggaaaagatttagtagaagaaaaagccgctcaaatgaaagcacaacaaaaagcgaaacaaaataacacttcaccatttaaaaaagtgttaaaagccatttctagtatctttgttccgatgattcctgcctttgttggggctggtattattggcgggattgcagctgttatgtctaacttagttgttgctggtgatatttcagcttcatggcaacaatatattgatgtcttaaatatcattaaaaatgggatttttgcttatttagctctttacactgggattaacagtgccagcgtttttggtgcaacgccagcgttgggtggtgttattggggcagtcacaatgttaacaggaatgaatccggatgctccaatcagtaatattttcactgggggaacattatctgcaggacaaggcggaattatcggtgttatttttgccgtatggttattatcattgttagaaaaacaattgcataaaattgtcccagaatcaattgatattatcgtaacgccaaccatttcacttttagtgattggcttagcaactattttcttaatcatgcctgtagccggagctatttctaatggcttagttggtattatcaatgttgtcttagaaaaaggtggcatggttgctggctttactcttggtttaaccttcttgccaatggtaatgtttggtttacatcaaattttgacgccaatccacattgaaatgattaatcaaacagggatgactttgttattaccaattctggccatggctggtgcgggacaagtcggtgcagctttagcattatggattcgttgtaaatcagataaaaaattagttgaaatgattaaaggtgccttgccagttgggattttaggtattggtgaaccattaatctacggagttactttaccattaggacgtccattcattactgcttgtatcggcggtggtattggtggtgcggtgattggggccttcggtaatgttggtgcgattgctattggaccaagtggggtggctttaattccattaattgccaacaaccaatggcttgcatatgtattaggtttattggctgcttacgcaggtggttttgtagcaacgttattctttgggattcctaaagatatgcaaacaactaaa

SEQ ID NO: 20734 - DNA, 519 bp, Enterococcus faecalis
atgaccatagcaaaggatatgatggttaacgacggcattcgtgcacgcgagttacgtttgatcggacaagatggtgaacaattaggtgtaaaaaccaaagcagaagcattacaaatcgctgaatctgcaaacttggatttagtacttgtagcgccaggagcgaaaccaccagttgcgcgaattatggattatggaaaattccgtttcgaacaacaaaagaaagagcgtgaagctcgcaagaaacaaaaagtgatcaacgtcaaagaagttcgtttaagtccaacaattgacgtaaatgacttcaatacaaaacttcgtaatgcgcgtaagttcttagaaaaaggagacaaagtgaaagcttctatccgtttcaaaggccgtgccattacccataaagagattggtcagaaagttcttgatcgcttagctgaagaaactgcggacatcgccacagtggaacaaaaagcgaaaatggacggacgcagcatgtttctaacgctggcaccgaaaaacgacaag

SEQ ID NO: 20735 - DNA, 1068 bp, Enterococcus faecalis
atgaaggctctgaaagcttataaatacagactttatccaacctcaaaacaagaagagtttattcaaaaaacattttcttgtgttcgcttggtgtataatttaatgttacaagaccggattgatatctacaaagagatgcgaaaaaatcctcaacaaacgtttaaaatgccaacgccagctaaatataagaaacaataccctgtcctcagagaagttgatagtttagccttggcaaatgcacaagtttatttggatcgagcctttaaaaatttttatcgggaaaaagggatgggctttccaaaaaagaaaaagaaagaaacggtgcattcctacactacgaacaatcaacatggcacggtcaaaattttggataatcgttatttgaaagtacctaaattgaaatctttaattaaaatgaaggtacaccgccaaccgctgggggagataaaatctgtaactatttctatgagtgcgagtcacaattattatgtttccattttgtgtgaagcgccgattgaaacgaaaacaaagcaacaaaaaatggtgggaatttgtagcagtagggaaaaatttgcgctgctttcgaatggtgaaagcttcgaaaaaagctattgttcaaagcatttaaagcaaaaactacgtcaagaagaacgaaaattaaacaagcgtaaaatgattgctttggaaaaaggtgtcgatctttcgcaagcaaaaaattatcaaaaacaaaaaataaaagtcgcaaaaattcgcgaaaaaatagccaaccaacgaacggatattttaaacaaaattacaacggaattggtttcaagttacgatgttatttgtattgaaaaagcccatcacagtaatgagcggccgccaaaacatgatcgttctgaactggcttggtctttatttttagctaaattgttgtataaagcacaatggtatggcaaagaactcatttgtattgagtcagaggagatcgaaacagagttgtctttttctgaaagtacagaaaattcagagtatcttagaagccaaaaaatcttagaacgtggcttgtctaaacgagaaacctta

SEQ ID NO: 20736 - DNA, 954 bp, Enterococcus faecalis
atggcagaagagaaaaaagtcctattagaagtcactggtttgaaacagtatttcaatgttggtcgtaaagacgaagtaaaagccattgatgacattagttttcatatttatgaaggcgaaacctttggattagttggcgaatcaggaagtggaaaatcaacaactggtcgcagtgtcattcgtttatatgatccaactgctggtgaaattcttttcgatggaaaagacattagcaaaattaaatcaaaagcggacatgcaagcattccgtcgcgatgttcaaatgatcttccaagatccatatgcttcattgaatccaagaatgaaagtcaatgatattattgctgaaggaatcgatgtcaatggattagctaaaacaccaaaagagcgggaagaaaaagtcaatgaacttttaaaaacggtgggattaaatccaagtcacagtacgcgttatcctcatgagttttctggtgggcaacgtcaacggatcgggattgctcgtgctttagcggttaatccacgtttcattatctgtgatgagccaatttcggctttggatgtgtcgattcaagcccaagtagtaaacttattacaagatttacaaaaagaacaaggcttaacttacttgtttatcgcacatgacttatcgatggtaaaacatatcagtgaccgaattggcgtaatgcacagtgggaaattattggaaatgggcacaagtgatgatgtctataatttcggcgttcatccttatacagaaagtttgctttctgcgattccattaccagatccagactatgaacgcacacgtaaacggatcgtttaccagcctgcagcggcagatgggaaagatcgtgagctccgtgaaattctcaatggacactatgtttattgtgctgaagacgaagttgcaatgtaccgtgaaaaaattgaagagaagaaaagaaaagctggttta

SEQ ID NO: 20737 - DNA, 1722 bp, Enterococcus faecalis
atgtcttgggaacaagtttaccaacaatggttagatgaagaaaatattccagaaaatttaaaaaatgaattaaaggacttaaatacagaccctgaaaaatgtgaagatgcattttacgcaccattagaatttgggactgccgggatgcgtgggattttaggcgccggtattaatcggatgaatatctttacggttcgtcaagcaacagaaggacttgcacgttttatggatacgcaagatcctgaaacaaaacgtcgcggtgtagctattgcctatgattcacgtcatatgtctccagaatttgcaatggaagcagctaaaacattagctaaacatgatattccttcttttgtgtttgaaagcttacgaccaacaccagaattatcttttgcggtccgctactttaaagcttttgcgggaatcatgattacggcttctcacaatccagctgcctataatggctacaaagtctatggtgaagacggtggtcaaatgccgccagctgatgcagatgcattaactaaatatgttcgtagtatcgaaaatcctttgaaaattgatgtcttatcagatgaagaagttgcccacagcggtttaattaacattgttggtgaagaagtcgataacgcgtatttgaaagaaattaaaacagttacgattaatcaagaattaattaacgaaatgggtaaagaattaaaattagtttacactcccttacatggaactgggaaaatgttaggagaaaaggcattaaaacaagccggttttgaaaaatttgttttagtacctgagcaagccgttgctgatcctgactttactacagttaagtcaccaaaccctgaagaacattcagcttttgaatacgcgattcgtttaggggaaaaagaaggcgctgatttattgattgcaacagatccagatgctgatcgtttaggtgctgctgtgcggatgccaaacggagactaccaagtattaacaggaaatcaattaggttcaattatgattcattatattttagaagcccatcaacaagcaggcacgttacctcaaaatgctgcggttctaaaatcaatcgtttctagtgaacttgctacagcgattgctgagaaatgtaatacgaagatgtttaatgttttaacaggtttcaaatttattgctgaaaaaattcaacaatacgaagaagaccacagtcaaacgtttatgtttggttttgaagaaagttatggttacttagtgaaaccttttgttcgtgataaagatgcaattcaagcgttagttttattagcagaagtagcggctttctataaaaaacaaggaaaaacattatacgatggtttacaagatatctttgaagaatttggttactttgaagaaaaaactatttccgtaacaatgagcggaattgaaggcagcggtaaaatcaaagctttaatggcaaaatgtcgtgaacaagcgccaactgagtttgccgggattcaagttgctcaaacggaagattttaaagaattaacacgcacttttgcagatggtcaaacagaacaattacaaacgcctccttctgatgtgttgaaatatcatttagaagatggcagttggattgctatccgaccatcaggaacagaaccaaaaattaaattctatctagcgacaaaagcaacaagtagttcagaagcttctgaaaaaattgctgcgtttgaagcagtcgttaatgaattaacaaaa

SEQ ID NO: 20738 - DNA, 285 bp, Enterococcus faecalis
atgaaacaaatggaagaaatcaaacaagtaagtcaattatataaagtattaagtgatccaacacgtttaagaattttgctacttttaaaagaaggcgagcataacgtaacggcgattagtgaacaattgggaatggaacagtccgccgtttctcatcaactaaaattattaagagatagccgggttgtcaaggcacgtcgcgaaggaaaaacgattttttatacattggatgatcatcatgtaatagacattttaaatcagacctttgagcatattgaacatcga

SEQ ID NO: 20739 - DNA, 1071 bp, Enterococcus faecalis
atgaaaaattctacgtttttaaaggatttgtttgctattgataaagcaaatgacgaattatttcggttagttggtgtcgcaatttgtatggcaattccattattaattggttatttttccaataatttactcattgggacctttggctcgatgggcatttatacgtttatttattatcagccgcttcctttgcctcaattattgcgcagactgaatattgttggcttttttattgttctgggcaacagcttaggaatgctaagtcaccatgtaccttggttgattcccattacaattgccatcgtcgcttttcttgcacgcttactttttagattgtatggcattgagaagcctggtgctttgttagttatcatgtcaaccgcaatgggaacaagcaacaattttcctttacataagattcccatcatggccagttttgttcttttaggagtagtgaccggcattatcatgggcattgtgcttcatttcatcgacaagcgcccctacgtttttcaaaaacggatgtctcttcaagaacgactttatatcgatcccgcttctttattagatgctttgcattatgcggccattttatttttagcggcttatttaagccaatcgcttcatttagtcaacgcctattggatgacgtttacttgcgcagccattttacaaggggaaaatttacattctgtgatgcagcgaaatgtgcaacggattctaggtacgagtcttgggttgttgctttctgcaattttattaatgattccctttacacctttacaaacaatcggtatcattagtattctatatgcagcttttgaaggattcattaacagaaactatgcgattgccagcttttttattaccccgatgtccttattattatcaaatcttgcacgacagcaagtcattagtaatcttttaaactatcgattagtcgggattgtgttaggtagtttacttggttttgccggcgcttatgttttcacaactgcgctacgtttctataatcgggcctactcaattgatgaaacctttgaaaatcaacaagaagaaagaggcgtttta

SEQ ID NO: 20740 - DNA, 633 bp, Enterococcus faecalis
atgaaaataacttatcccttgccaccaaatctaccagaacaacttcctctattaacgaactgtcaattagaagatgaggcaatcttagaaaatcatttgtatcagcagattgatttaccgaatcaagaagttcgtaacttagtctttcgggatgctgttttcgatcatctttcattagcaaatggccagtttgcttcttttgattgtagtaatgtgcgttttgaagcttgcgatttttctaacgtcgaatggctgtctggcagttttcatcgagtgactttccttcgttgcaatttgacaggaacgaattttgcagatagctatttaaaagattgtctatttgaggattgcaaagccgattatgcttcttttcgttttgcaaattttaatcttgttcactttaatcagactcgtttagtcgaaagtgaatttttcgaggtcacctggaagaaactccttctagaagcttgcgatttaaccgaaagtaattggctaaatacttctttaaaaggattggatttttcccaaaacacctttgaacgcttgactttctcaccaaactatttatcaggtcttaaagtcacccctgaacaagccatttatttggcaagtgcccttggtttggtgattacc

SEQ ID NO: 20741 - DNA, 861 bp, Enterococcus faecalis
atgaaaataagagtacctgccactagtgccaacttaggacctggctttgattcatgtggcattgcattatccgcttatttaacaatcaacgttttaggtgaaagtgaattttgggaaattcaacatactctgggagaagagatttctactaatgaagagaatttattaattcaaacggcattgaaaattgcaccagaattaacaccaaaagttattcggatggtttctgacattccccttgcaagaggactaggcagtagctcaagtgtgattgtagcaggcattgaattagctaaccgactagcacatttaaatttgtcccctaaagaaaaagtccgtttggccacagagatggaaggacatccggataatgtggccccagctattttaggagatttcgtggtggctagccatgtagaaaaccaagtctaccatgtcaaacatcactttccaatgtgtgatgtcattgcatttattccagaggaaccattatttaccgaaaaaagtcgcgctgttttgcccgaaaaattggcttataaagaagcggtcgcggccagctcaattgccaatgttatgattgccgcaattttaaacggggatttacctttagcaggcaaaatgatggaacaagataaatggcatgaaacgtatcgtcgttcattggttcctcacttaaaagaaattcgtcgtttaactcagcaaaaaggtgcttatggctctttcttaagcggtgctggtccaactgtgctaatcttgtcgccagaagaacgaaccaacgaaattgttcaaagcttggagaaattatctaccaaagcgagcatccaaattttcaatattgatcaagaaggtgttcaagtcttt

SEQ ID NO: 20742 - DNA, 855 bp, Enterococcus faecalis
atgactatttctgaagaaaaaaaatgtgtgacgatttttgtcatctcagattctgctggcgagaccgcttcaaaattggcggctgcttcaatggcccagtaccccactgttgattttactttgattagacgaacattcgttaaagacgaagataaactggtgcaagcgttagaagatgccaaaaaagcagaggccatggtactgcatactatcattaatgatcatctcgtggcgattgctaatcaatttttcaatgagcatcaattgttccattttgacattttgacaccaccagttgcggaaatcgaacgattaacaggtgtcgcgcccatgcgggaaccaggtgccttacatcatctgaatgaaaattattttaaacgaattgaagcaatggaatttgctgtcaaatatgacgatggcaaggacccacgaggctttttagaagcggatgtgttacttcttggcgtttcccgaacttctaaaacaccgctaagtctctttttagccaacaagaacttaaaagttgctaatttgccactaattcctgaagcacatttaccgaaacaattattcgaaatggaccctaaaaaaattgttggcttaaccaatgatcccaatgttttaaacgggattcgtaaagaacgaatgcgcgcatatggattgcctgaaaatacttcttattcagatattgaaaaaattcggcgagaactggcttttgctaatgatctttatcaaaaattaggttgtatcgttattgatgtcgcttctctttcaattgaagaaactgcctcaatgattcttaatgctttgaacttagaagatcatagttattattccacggaaacatccgaggat

SEQ ID NO: 20743 - DNA, 432 bp, Enterococcus faecalis
atggcaccagtaaaaaccaatattgaacaagccttagaaaccatgaaagccagtggattaaaatatactaaaaaacgagaattactgatgagctatttgattaagcgaaatcggtatgtttctgcacgtgaagtgtatgaatttatgaatgaaacctttaaaggagtcagttatgatacggtttatcgtaacttgcatgactttgagcgcttagaattactggaaaaaacagaattaaatggcgagcaaaagtttcgcttccgttgttgccaagaggtggaacatcatcatcactttatttgtacggtttgtggcaaaacggaagaaattcacatgtgtccgatgaatttttttgaagaacagttaaaaggttgttcaattgaaggacatcgctttgaaatccttggtcgttgtgccgattgttgcgaaaaa

SEQ ID NO: 20744 - DNA, 1023 bp, Enterococcus faecalis
atggattcaatcattagaggtgaaaaagtaatgctttcaggaaaagcacgagcgcatacaaatattgctctgattaaatattggggaaaagccaatgaagaatacattttaccaatgaatagtagtttatcattaacattagatgccttttacacagaaacaactgtgatatttgatgcccattattcagaagatgtatttattttagatggtatcttgcaaaacgaaaaacaaacaaaaaaagtcaaagaatttttgaaccttgttcgtcaacaagccgattgtacttggtttgcaaaagtggaaagtcaaaattttgtgcctactgcagctggtttggcttcttcagcgagtggtctagctgctttagcaggggcctgtaacgtagccttaggattaaatctttcagcaaaagacttatcacgtttagcgcgacgtggttcaggttctgcttgtcgcagcatttttggtggttttgctcaatggaacaaaggccactctgatgaaacgtcgtttgctgaaaatattccagccaataattgggaaaacgaattggccatgctctttatcttaattaatgatggcgaaaaagatgtttccagccgtgatggaatgaaacgaacagtagaaacttctagcttttatcaaggttggttggacaatgtggaaaaagatttatcccaagttcatgaagcaattaaaacaaaagacttccctcgtttaggagaaatcattgaagccaatgggttaaggatgcatggaacaaccttaggtgctgtccctccatttacttactggtccccaggcagtttacaagcgatggctttagttcgccaagcacgggccaaaggaattccttgttactttacaatggatgcaggtccgaatgtcaaggtcttagtcgaaaagaaaaacttagaagcattaaaaacatttttaagtgaacatttttcaaaagagcagttagtcccagcttttgctggtcccggaattgaattgtttgaaacgaaaggaatggataaa

SEQ ID NO: 20745 - DNA, 1104 bp, Enterococcus faecalis
atgattgaagttactacgccaggaaagttatttattgcaggagaatatgccgttgttgaacctggccaccctgccattatcgttgctgtggatcaattcgtaactgtaactgtcgaagaaacaacagatgaaggcagtattcaatctgcacaatacagctctttacctattcgttggacacgccgaaatggtgagcttgtattagatattcgcgaaaatccttttcattatgttttagcggcgattcatctaactgaaaaatatgcgcaagagcaaaacaaagaattgtcattttatcatttaaaagtgacgagtgaattagatagttcaaatggacgaaaatatggtcttggttcaagcggtgcggtaaccgttggaactgtcaaagccttgaatattttttatgacttaggtttggaaaatgaggaaattttcaaattatcagcattagctcacttagccgttcaaggaaatggttcttgcggagatatcgccgccagctgttacgggggctggattgccttttcaaccttcgatcatgattgggtcaatcaaaaagtagccactgaaacattaactgatttgttagcaatggactggcctgaattaatgatttttccgttaaaagtaccgaaacaactacgtttactaattggttggacaggtagtcctgcgtccacttcagacttagttgatcgagtccatcaatcaaaagaagaaaaacaagcggcttatgagcagttcttaatgaaaagtcggctttgtgtcgaaacaatgattaatggctttaacacaggaaaaatttctgttattcaaaaacaaattactaaaaatcgccaattgctcgccgaattatcttcactgactggtgtggtaatcgaaacagaagccttgaaaaatctttgtgatttggctgaatcttatacaggagctgcgaaatcttctggcgctggcgggggcgattgtgggattgtaattttccgccaaaaatctgggattttaccattaatgactgcttgggaaaaagacggaattaccccactgccacttcacgtctatacctatggtcaaaaggagtgtaaggagaagcatgaatcgaaaaga

SEQ ID NO: 20746 - DNA, 1041 bp, Enterococcus faecalis
atgaatcgaaaagatgaacatctatcattagctaaagcgttccacaaagaaaaaagtaatgactttgatcgtgtgcgttttgttcaccaatcgtttgctgaatccgctgttaacgaagtggatatttccacttcgtttctttcttttcagcttccccaacctttttatgtcaatgcaatgacaggtggtagtcagcgtgcaaaagaaattaatcagcaattaggcattattgccaaagaaactggccttttagttgcgacaggatctgtctcggcagcgttaaaagatgctagtttagcggatacgtatcaaattatgcgaaaagaaaacccagatggactcatttttgccaatattggtgcaggcttgggtgtggaagaagcaaagcgagcgcttgatttatttcaagcgaatgccttacaaatccatgtaaatgtgccccaagaattggtcatgcctgaaggagatcgtgatttcactaattggctaaccaagattgaagctatcgtacaggccgtagaagtgcctgtcattgtcaaagaggttggctttggcatgagccaagaaaccttagaaaaacttacctctatcggcgttcaagcagcggatgtgagcggccaaggcggaacgagttttacacaaattgaaaatgcccggcggaagaaacgagaactttctttcttagatgattgggggcaatcaacggtcatctctcttctggaatcacaaaattggcaaaagaaactaactattctcggctctggcggtgtgcgtaactctcttgatattgtcaaaggactcgctttaggtgccaaaagcatgggagttgctgggactatcttagcttcccttatgagtaaaaatggtttagaaaataccttagcccttgtacagcaatggcaagaagaagtgaaaatgctttatactcttttaggaaaaaagacgacagaagaattgacgagtaccgcacttgtcctcgatccagttttagttaattggtgtcataaccgtggtatcgacagcactgttttcgcaaaacgt

SEQ ID NO: 20747 - DNA, 2601 bp, Enterococcus faecalis
atgaacatggttaaaacagtaaaaaaagaaaagacagaaacagttgatgtttcatcaatgattgatgaattagcaacaaaagcgaatgtcgctttaaaagcaatggaagattttacacaagaacaagtagatcacattgtccatcaaatggcgatggcggcgttagaccaacatatgcctttagcaaaaatggctgtcgaagaaactggccgtggaatctatgaagataaagcaatcaaaaatatgtatgcatctgaatacatttggaataatattaaacatgataaaacagtgggtgtaattaacaaagacgaacaaaccggcttaatggaaattgctgagccagttggcgtggtatgtggggtcacaccaacaacgaacccaacgtcaacaactatttttaaatcactaattgccttaaaaacaagaaatccaattgtttttgctttccatcctagcgcacaaaaatgttcggcagaagcggcacgtattgtacgggatgcggcgattgcagcaggtgcaccagaaaattgtattcaatggattgaacaaccatcgattgatgcaacatctgctttgatgaatcatccagggattgccattgttttagcaactggtggcgcaggcatggtaaaatctgcgtactcaacaggtaaaccagcactaggcgttggtcctgggaacgtaccagcttatattgaaaaaacagctaaagtaaaacgtgcggttaatgatttaattgtttcaaaatcatttgataatggaatgatttgtgcttctgagcaagcggtcattgtggataaagaaatttatgcttctgtcaaagctgagtttgaagcacacaatgtttacttcgtgaaaccgaatgaattacaaaaactagaagatgcagtgatgaatgaaggcaaatacgcagtaaatccagcgattgtcggtaactctgcagaaaaaattgctgaattagcaggaattagtgtaccaaaaggcacaaaaattttagtcgctgaattagaaggtgcaggtccagaatatccattatcaagagaaaaattatcgccagttttagcaatgatgaaatcaaacaatgcagagcatgcttttgaactatgtgaagcgatgttaaacttaggtggtttaggacatacagcagtaattcatacagaagatgaagagttacaagttgcttttggtttacgtatgaaagcttgtcgtattttagtgaatactccatcagcagaaggcggtatcggtaacatttataacgaaatgattccatccttaacacttggttgtggttcatacgggaaaaactctgtttctaaaaacgtatcagccattaacttaattaatattaaaacggtagcgaaacggagaaataatatgcaatggtttaaattacctccaaaaattttctttgaaaaaaattctttacaatatctacaaaaaatggaaaatgttgaacgtgtcatgttagtttgtgacccaggtatggttcaatttggctatgcagatatcgtacgtaaagagctacaaaaacgtaaaaatgatgtgaaaatcgaagtattttctgatgttgaaccaaacccatcaacaaatactgtttatgcaggtaccaaaatgatggttgatttccaaccagatacagtgattgccttgggtggcggttctgcaatggatgcggcgaaaggaatgtggatgttctatgaacacccagatacagagttctttggtgcaaaacaaaaattcttagatatccgcaaacggacatataaaattgccaaaccagaaaaaacacaatttgtttgtatcccaactacttcaggaactggttcagaagttacaccatttgccgttattactgatagtgaaacacacgtgaaatatccgttagcagactatgcgttaacaccagatgtagcgattgttgatccacagttcgtaatgtctgtgccagcttcagtcactgcagatacaggtatggatgttttaacacatgctattgaatcttatgtttccgtgatggcttcagattacacacgtggtttaagtttacaagcaatcaagttagttttcgatcatttagaaaattcagtgaaacgtccagatatggaatctcgcgaaaaaatgcataatgcatcaaccatggcagggatggcatttgccaatgcattcttaggtatttgtcactctattgctcataaaattggtggggaatatggcattccacatggtcgtacaaatgcgattttattaccacatattattcgttacaatgcgaaagatccatcaaaacacgcaatgttccctaaatatgattacttccgcgccgatactgattatgcagacattgcaaaattcttaggcttaaaaggaaatactaccgcagaactagtagaagctttagcaacagcagtagcagatttaggtaaatcagtcggaattgacatgaacttgaaagcccaaggtgtctcacaagaaacattagacacaacggttgatcgtatggcagaacttgcatatgaagaccaatgtacaactgcaaatccgaaagaaccattaattagtgaactaaaacaaattatcttagatgcttatgtagga

SEQ ID NO: 20748 - DNA, 1143 bp, Enterococcus faecalis
atgacggaaccagccattcgttatcgtttaatcaaaaaagataaacacacaggtgcgcgtttaggtgaattaattactcctcacggcacatttccaacaccaatgtttatgccggtaggtacacttgcgacagttaaaacaatgtcaccagaagaattaaaagaaatgggtgccggtgttattttaagtaatacttaccatttatggttacgcccaggtgaagatttagtcgaagaagcaggcggtttacacaaatttatgaactgggatcaacctattttaactgattcaggtggcttccaagtcttctcattaagtgatatgcggaaaatcgaagaagaaggtgtgcattttagaaatcatttaaatggttcaaaaatgttcctttctccagaaaaagcgatcaatattcaaaataaattaggatcagatattatgatgagctttgatgaatgtccaccatttgatgaaagctatgagtatgtcaaacgttcgattgaacggacttctcgttgggctgagcgtggcttaaaagcccatgcgaatcctgatagacagggattattcggtattgttcaaggtgcgggatttgaagatttacgtcgtcaaagtgctaaagatttagtgagtatggattttcctggctattcgattggtggcttatctgttggtgagtctaaggaagaaatgaaccgagtcttagactttacgacaccgttaattcctgaaaataaaccacgttacttaatgggtgtgggtgcccctgattcattaattgatggagtgattcgtgggattgacatgtttgattgtgtgctaccaacacgtattgcgcgcaatggtacttgtatgacttcacaaggtcgcttggttgttaaaaatgcccaatatgcaagagattttcgtccgcttgatgaaaaatgtgattgttatgtttgtcgtaattatacgcgggcctatattcgtcatttgattaaatgtgatgaaacattcggaatccgtttaacatcgtatcataatttatacttcttgttagacttaatgaaaaatgtccgtcaagcaattatggacgacaatttattagaattccgacaagcgttttttgaagaatatggctttaataaagcgaatgcaaaaagtttc

SEQ ID NO: 20749 - DNA, 399 bp, Enterococcus faecalis
atggccttaaaagatgagcaaacaggaaaaaataaacattttattaattcattagaatttgcctggcaaggaatcaaaacagtttttcgagaagaacgtaatatgcgcaaacatgtagcgtttggtgtcacggccattgtatttggtttcttgttttccttaacacttgctgaatggctgtggttgttattggccgtttttcttgtctggttggcagaaattatcaacacaatttttgaaaatgtcgtagatatgtttacggattttcactttcatccaatcggaaaaaaagttaaagacatggccgcaggagctgttttattaacagccggtttcgcagtgctagtaggactaattctatttgtaccaaaaattttacaaatcattcaaatgtggaaa

SEQ ID NO: 20750 - DNA, 900 bp, Enterococcus faecalis
atgacaactgaacataaatctggtttcgtagccattgtcggcagaccaaatgttggaaaatcaacattgttaaatcgaattgtcggccaaaaaattgcaattatgagtgacaaagcacaaacaactcgtaataagattcaaggaatttatacaattcctgaagcacaaattgtttttatcgatactccagggattcacaaacctaaacaccgcttaggcgatttcatggtggaaagtgcctacaatgcgatgcgtgaagtagatgctactttatttatggtaagtgctgatcaaaaacgcgggaaaggtgacgactttattattgaacgattgaaaaataataatagtccagtctacttgattattaataaaattgacaaagtccatccagatgatttattgagtattattgaagactattcgaaacaaatggactttaaagaaattattcccatttctgccactgaaggaaataattttgagcatttgatggatgttctcgttgagcaaatgccagaaggaccacaatatttccctgatgaccaaattacggatcatccagaatattttatcgtttctgaactaattcgtgaaaaggtgttacttttaacaagagatgagattcctcattctgtcgctgttgttgtggactcaatgaaacgggatgaaaacgataaagtccatgtccaagcaaccattattgtggaacgggacagtcaaaaaggtatcattattggcaaaggcggaaaaatgctgaaacaaattggtaccaaggcgcgtcaagatattgaatatttattagatgacaaagtgtatttggagctgtgggtaaaagtccaaaaagactggcgtgacaaaaaaatctatttacaagattttggttatcgcaaagaagaatat

SEQ ID NO: 20751 - DNA, 720 bp, Enterococcus faecalis
gtgattaacattaaaaacttacagaaaacattcggaaaaaatgaagtacttaaaggaattgacttagaaattgaagctggtgaagttgtcgtaattattggcccttctggtagtggtaaaagtacttttttacgttgcttgaacttattagaaacaccaactggtggcagcgttgaatttgaaggaaaaaatttattagataaaaataccaacattgatcaacttcgtcaaaaaatgggaatggtattccaaaatttcaatcttttcccgcataaaaatgtcttggaaaacttaacgattagtcctgttaaagtaaaaaaagaagccgcttctgaagccacagaacatgctctttctttactggaacaagttggtttatcagataaaaaagaaaattatccctctcaactttctggtgggcaacaacaacgggtagcgattgctcgtgctttagccatgcgccctgacgtgatgctgttcgatgaaccaacttctgccttagaccctgaaatggtgggcgaagtgctatccgttatgaaaaatttagctattgaagggatgacaatggtagtggttacccacgaaatgggcttcgcaaaagaagtcgcggaccgtgtcatttttatggatgcaggaatcattcaagaagaaggcacacctgaagaaatttttgatgcgccacaaaacccaagaacacaagattttctaagaaaagtttta

SEQ ID NO: 20752 - DNA, 932 bp, Enterococcus faecalis
atgcgtaaattaaaccgatggctttacggctctggcttactatttttagtaatgtttttatcaggctgtgtgaaaacaggagcagatggacaaccaactggtgaaggttttgtctataacttccttgttttaccgatgagtaatgcaattacttatcttgtcgataactttaattggaactatggttgggcgattatttttatcaccattattgtacggatcattattttaccgttaggcttacatcaatcgaaaaaaagctttatccaaacggaaaaaatgcaagcaatcaaaccccaagtggatgttgcacaagcaaaaatgaaacaagcaagtacgcgtgaagaacaaatggccgcacaagcagaactacaaaagatttataaagaaaacaatgtgagtatggttggcggaattggttgtttgcctttattaattcaaatgcctattttctcttctctgttctttgctgctcgttatacaaaaggtattgccacggcaagcttcttaggaatgaatttagggcaaccaaatatgattttagtggcattagctggtttagcctatttagctcaaggctatatttcaatgattggtattcctgaagaacaaaagaaaacaatgaaatcaatgctgattgtttcaccattaatgattgttttcatgtcctttagctcacctgcaggcgtacgctttactgggtagttggtggtattttcacatgtattcaatctgccatcacaaatatcctcttacgtccaagaattaaaaaacaagtacaagaagaattgaaaaataacccaccaaaacaagtggttactcctatcaaggatgtgacaccaaaagaaacaaacaaagtaacgcaaaaaacgaaccaaccaaaagcaaacggcaataaaggtcgtaatgctggaaaacaaaaacgtaaataa

SEQ ID NO: 20753 - DNA, 1260 bp, Enterococcus faecalis
atgaccattgctgacattgtaatgttaacagcaactatcattatttggagtctactaattgtaaatattctcttagttatttttggctatgtttattatttaaaaacagatcctgtcgcaccaccacctgtagaggacgaagacgcgccgtttgtttcaattatggtgccggcccataatgaaggaattgtcattgtgcgaacagttgaagcgttattgaattttaattatccgcaagatcgctatgaaattattgtgattaatgacaactcaagtgataatagtgctgagcttttagctaacgtccaaaaaaaggcggttaatcgaaatttgcagattattaatacagacaatataacaggtgggaaaggtaagtctaatgccttaaacattggtttcaagcaagccaagggggacgtgattgccatttatgatgcggacaatacacctgaaccgaatgcactccgttatttagttggagagttaattgctagtgaggaatacggcgcggttattggtaaatttagaacgagaaatcgcaatgcaagcctgttgacacgctttattaatatcgaaacacttgcctttcaatggatggcacaagccggtcgttttcaattatttaagttatgcacgattcctggcacaaatttcattgttcgtcgtagtattattgaagccattggcggctgggatgacaaagcgttagccgaagatacagaaatcagtttccgcatctatatgatgggctataaaattaagtttcaaccaaaagcagtgacgtgggagcaagagccacaaactttgtcagtttggttccgacaacggacgcgatgggtcaaaggcaatatttatgtcattgttaaaaatgctaaattattgtttaatcctaaagcgagtcggatccgttttgatattttatatttcttgtccatttattttctcttaatgacatcgctcgttttgtcagacatcatgttagttttatcaatgtctggttacttaacaacgaccctgcaaggatttagcaattccttgtggttgttagcgattttgttatttattttcagtacttttgtcagtattacaaccgaaaaaggcgaaatgactttagagaatatcttaattattgccttgatgtatattacatacagtcagatgtggctagtagtcgccgcttatggcatggtgatgtatattaaagaaaatgtttttcataaacaaacacaaacaaaatggtacaaaactgaacgatttaaa

SEQ ID NO: 20754 - DNA, 840 bp, Enterococcus faecalis
atgccagaattaccagaagtagaaacagtgcgaaaaggacttgaaaaacttgttgtaggaaaaaccattcaagaagtcattgttttttggccaagaattattgaatcaccagaagttgatgtatttcaaggtcaattagctggtcaaacgattgaagggattgagcgaagaggaaaatttctgatttttaaattgtctgataatgatatgatttctcacttacggatggaaggaaaatatgagtttcatcaggctgatgatgaaattgccaaacatacccatgtaatgtttacttttacagatggcacgcaattacgttatttagatgtacggaaatttgggcgtatgacattggttcctaagaatcaaggtcatcaatataaagggattttagctttgggcccagagccaacaccagacgttttccaattagctacttttcaacaaggcttgaaaaagcatcataaagcaattaagccattgctgttagatcaaaagctagtgacgggtttggggaatatttatgtagatgaagcactttggcaagcgcaaatccatccagaacaaccagcagattccttaaaacctgcggaagttgctacgttgtatcaagcaatcattgacgtcttggcacgcgctgttgaagcaggtggaaccaccatccgcacctatctaaacgcgttaggagaagcagggacttttcaagtagcgttgaatgtctacgggcaaacaggcttaccttgcaatcgttgtggtacgccaattgttaaaacaaaagtggcacaacgtggtacgcattattgtccacaatgccaacaattgaaaggtcgtcgattgaaa

SEQ ID NO: 20755 - DNA, 2646 bp, Enterococcus faecalis
atgaccaaaaaaaaattattactcgttgatggaaacagtgtagcctttcgtgcattttttgcgctacataactcattagaacgattcaaaaataagaacggcttgcatacaaatgctatttatgcatttaacaatatgtttgaaaatgtaatgcaaaaagaaatgcctactcatgttttagtcgcttttgatgcagggaaaaccacattcagaacagaattttattcagaatataaagccggacgttcaaaaacaccgggggaatttaaagaacaaatgccgtatattcgtgaacttttagaaggtttaggcgtaaaatattatgaactacctaactatgaagcagatgatattattggtacattagccaacaaagttgataaagatgaatttgatgttgtcgtgttatcaggggaccgagatttgacgcaattagcgacggacactgtcaaagtagatatcactgttaaaggagttagcgatattgaatcatatacgcctgagcatattgctgaaaaatatgatgggttaacgcctaagcaaattattgatatgaaagggttggctggcgacacgtcggataacattccaggtgtaacgaaaatcggtgagaaaaccgcgattaagctgttaaaacaatatggctcagttgaaggggtttatgagaatatcgatgaaatgaaaaaaagcaaaatgaaagaaaacttgattaatgataaagagcaagcctttctttctaaacgtttagcgacaattgaagtcaatgcaccagtcgaagtcaatgtggaagacttggcatatgaagggaaaaacttagaaaaattggttcctttttataaagaaatggactttaaacaatttttagctaagttggacattacagaagaacctgttgaaatggaagatattttatttgaagtagtcgaagatcagttaaccaatgaaatgtttacagacgatatggctctttatgttgagatgatggaagataactatcatacgtcaccgattgtcggccttgcttggggcaacaacaagaagatttataccacgaataatttagctgtttttgaaagtcagccatttattgactggttgatggatgagacacgtaaaaaaaatgtctacgatgcaaaacggacgtacgttgcactaaatcgctatgtaggaaaaatgacagggattgcctttgatgttttattggctgcttatttacttgataccaatgacaataacgctgatattgaaggtgtagcacaacattacggatatgatgcgattcaatctgatgaagccatttatggaaaaggggccaaaaaaggcttgccagaggacgaagaagttttctttggtcatttagcacgtaagattaaagcaattcaatttttaacaagcaaattagatagcgaattaacagaaaaaaatcaagctgatttattctataaaatggaattaccactttctcgtattttaggcgatatggaaataactggtatccgtgttgatgccacacgcttaaaagaaatgcaagtagaattttcagaacgcttgaaagaaatcgaagaaaaaatctatgcagaagctggcgaagaatttaatttgaattcacctaaacaattaggcgttattttatttgaaaaaatgggcttacctgtgatcaaaaagacgaaaactggctattcaacagcggtagatgttttagaacaactaaaagaacaagcaccaattgtggccgatattttaacttatcgtcaaattgccaaaattcaatcgacctatgttgaaggacttttaaaagtaattcagccagataataaaattcatactcggtatgtacaaacactgacacaaacaggacgattaagctcagtagatcccaatttacaaaacattcctatccgtttagaagaaggccgaaaaattagagaagcgttcgtaccaagagaggataattggttgattttctcttctgattactctcaaattgagttacgtgtgctcgcacatatttctaatgatgagcatttaaaagaagcatttgtggaaggacaagatatccatgccagcactgcaatgcgagttttcggtgttgaaaaagcagaagatgtcacacctaacatgcgtcgtcaagctaaagcggtgaattttggaattgtctatggtatcagtgattatggcttgtctcaaaacttaggcattactagaaagcaagcgcaacaatatattgacacctattttgaaaaatatccaggcgtgaaacagtacatggaagagattgtccgcgatgccaaagacaaaggctatgtggaaacattgtatcatcgccgtcgttatttaagtgatattaattcaagaaactttaatctacgttcgttcgctgaacgtacagcgattaatacaccgattcagggaagtgccgcagatattttaaaaattgcgatgattgaaatggcgcgtcgtttaaaagaagaaaaattacaagcgacaatgttattacaagtgcacgatgaattagtttttgaagtaccagaatcagaattagaacaattaaatcaactcgtcaaagaagtgatggagcacgcagtttccttacatgtgccacttatcaccgatagcagttggggaaaaacatggtatgaagcaaaa

SEQ ID NO: 20756 - DNA, 720 bp, Enterococcus faecalis
atggttaaacctaagtatcaacgtgtcgtattaaagttaagtggagaagcgctagccggagaagacggttttggcattaaaccaccagtcattaaagaaatcgtccaagaaattaaagaggtccatgaattaggtatcgaaatggccatcgtggttggcggcggaaacatttggcgtggacaaattggtgctcaaatgggcatggaacgtgcacaagctgattatatgggcatgttagctactgtgatgaatgccttagcattgcaagatacattagaaaatcttggtgtgcctacacgtgttcaaacatcaattgaaatgcgtcaaattgcagaaccatacattcgtcgtcgtgcagaacgtcatttagaaaaaggccgcgttgttatttttgccggaggaacaggaaatccttacttttcgacagatacaacggctgcgttacgagctgcagaagtagatgcggacgtcatcttaatggcgaagaacaatgttgatggtgtttattctgcggatccacgtgtggatgaaacagcgacaaaatttgaagaactaacacatttagatgttatttctaaagggctgcaagtaatggattcaacagcaagctcattaagtatggataacgatattcctttagttgtctttaacctaaatgaagcaggaaatatccgtcgtgccatccttggtgaaaatatcggaacaactgtaagggggaaa

SEQ ID NO: 20757 - DNA, 825 bp, Enterococcus faecalis
atgaaaaatacagcagttacatttaaagaatctaaattaagaaatgaaaaattaacaatgcttacagcttatgactattcaacagcaaaaataattgatgaagctgggataaatggaatattagtaggagattctcttggtatggtatgtctaggacatgaagatacactttcagtaacaatggaagacatgattcatcatactagagcagttacaagaggagctaagaacactttagttgttgcagatatgccatttatgtcttatcaaacttcagtatatgattcagtagttaatgcaggaagattaataaaagaaggacgagctcaggttgttaaattagaaggagggatagaagtatgcgataaaatagaggctatagtaaaggcttctatacctgttatggcgcatataggtttaacacctcaatctgttaatgcatttggaggatttaaggtacaaggaaaggacaaggaagctgctaaagaattaataagagctgctaaagctgtagaaaaagcaggagcattcgctgtagtgttagaatgtgttccaactaagcttgcagagttaatttctaaagagatatcaatacctacaattggtattggagcaggtgcagggtgtgatggacaaattcttgtatatcaagatatgttggggatgtatagtgattttacccctaaatttgtgaagaaatatgctaatttatcagaagagatgaataaagcatttacaaaatatatagaggaagtaaaagatggagtttttccaggtccagaacatgggtttaaaataagtgatgatgttttagaaaaattatat

SEQ ID NO: 20758 - DNA, 555 bp, Enterococcus faecalis
atgtctaaagaagttttagcaacagccaaagaaaaaatgacaaaagcggaagaaagcttacgccgtgaattaggtcaaattcgtgctggtcgtgcgaacgcaagtctattagaccgtattcaagtagaatattatggtgcaccaacaccagttaaccaattagcaagtatcaatatcccagaagcacgtgtattaatgattacaccgtttgacaaaaattctatcgctgacattgaaaaagctattcaaatgagtgatatcggcattagcccaaccaatgatggaaatgtcatccgtttagtgattccacaattaacggaagaacgtcggaaagaattagccaaagacgtgaaaaaagaagcggagaactcaaaagttgctgtccgtaacgttcgtcgtgatgcaatggatgagttgaaaaaagctcaaaaaaatggcgacatcactgaagatgaattacgttcatttgaaaaagatgttcaaaaattaacagacgatagcatcaaaaatatcgatgcgattactgctgaaaaagaacaagaacttttagaagta

SEQ ID NO: 20759 - DNA, 768 bp, Enterococcus faecalis
atgtctgtgttagaaatcaaaaatttacacgtatcaattgaagataaaaagattctaaaaggagtcgatttaacaattaatactggagaaatccatgcaattatgggacctaatggaactggtaaatctactttatcagcagcaattatgggaaatcctaactacgaagtcacagaaggagaaattctatttgacggcgtcaacgttttagatttagaggtagacgagcgtgctcgcttaggtttattcttagcaatgcaatacccaagtgaaattccaggaattaccaatgctgaattcatgcgtgcagcaatcaatgcaaaacgtgacgaagacaacaaaatgtcagttatgcagttcttaaaaaaattagatagcaaaatggaattattaaatatgcctgaagaaatggctgagcgttacttaaacgaaggtttttctggcggcgagaaaaaacgaaatgaaattttacaattattgatgttagagccaacgtttgccattttagatgaaattgattcaggcttagatatcgatgcgttaaaagtagtttctaaaggggttaatgaaatgcgcggcgagaactttggtgcgttaattattacccattatcaacgcttattgaactatatcacgccagatgttgttcatatcatgatggaaggccgcgttgtgaaaaccggtggggctgatttggcaaaacgtttagaaacagaaggctatgctggtatcagccaagaattaggtattgattacaaagaagaagcg

SEQ ID NO: 20760 - DNA, 465 bp, Enterococcus faecalis
atggcactttctaaattagataacttatatcgccaagtcattttggaccattctagccacccacatcaccacggaacgctagatgcgtctagccaaacaattgaactgaataatcctacttgtggagatgtgattgaactggatgtggccattgaagacggtgtgattaaagatatcgcctttcaaggaagtggctgttccatcagtacagccagtgctagtatgatgactgatgcggtcttaggaaaaacaatcgccgaagcaacggccttagcagaggatttctctcaacttgttcaaggaaatgaagtggccgaagatgaaaaattaggcgatgcagcaatgttaagcggcgtagctaaatttccagctcggattaaatgtgcaaccctggcttggaaagccttagagcaggctgttgctaataacggccaaggcgaagccggtcatttacattgtgaaaaa

SEQ ID NO: 20761 - DNA, 2004 bp, Enterococcus faecalis
gtgttacacaaagcagaggggtttgatcgtcggaaatttacgatggcagggatcttagttgccatgggcgttgtctatggagatattggaacgagccctttatatgtaatgaaagccattgtaggagataatggtggcttggcacgggtctctgaatcgtttattttaggttcggtctcattaattttttggacattgactatcttaaccacgattaaatatgtagttattgctttaaatgctgataaccatggagaaggtgggattttctctctttatacattggttcgtaaaaaaagtaagtatttgattattcccgcaatgattggcggtgccgctttactggctgatggcgttttgaccccagctgtgacagtgacgacagcgatcgaaggcttacgggggattccagcattttttgaacgttttggcaatgaccaaacgattatagtggttattacgttgacgattattttaattcttttttctgttcaacgatttggaacagaattggtcgggaaagcttttgggccgattatgttcttgtggtttacttttttaggcatcattggtttaatgaattttagccaagattggacggttattcgtgcattaaatccatattatgctttgcaattactagtcagtccagaaaataaattaggtctatttattttagggaatattttcttggctacaactggtgctgaagctttatattctgatttagggcatgtaggaaaaatgaatatccgcattagctggccgtatattaagatttgtttgattcttaattatttagggcaagctgcgtggttgttaacggtcaaagaaaaccctgaaatgcaggcattagctgaaattaacccatttttccaaatgattccacgaggtattctcgtatttggcgttgtttttgcaacaatcgccgcagtgattgcttcgcaagcgttaatatcaggttcgtatactttagtttctgaagcgattaaattgaagttattaccaagacttaaaattatttatcctgggagcaatatcggtcaaatgtatattccagcggtaaatttaattttgtggttagcttgttcagcaatcgtgctggcttttagaacatcgacacacatggaagctgcgtatggtctatcgattacgattacgatgttaatgacaaccattttattgttgttttatcttttggataaaattccagcttggtctgcgtatctaatttccttgttctttgctgccattgaagttgtctttttcttttcaagtgctgcgaagtttttccatggtggatatgttgctgtgggaatggcagtcttcttgttatgcatcatgattatttgggaacgcggcaacgagattaaggaagcgacggcggaacaagtgtcgttgaaaaaatatgtaccacaacttaaagctttgaaagaagatacatctgtacctatgtatcaaaccaacgtggtctttttaacctccgatcgagtggatggcgaaattaatcgtaatattatttattcgattttggacaaacagccaaaacgagcgaacgtttattggtttgttaatgttcaggtaacagatgaaccctttactcaagagtattctgttgacatgctaggaactgattttattgtgcaagttcagctatatttaggcttccatatttctcaagaagtgaatgtatatttaagacaaattgttcatgacttgatgaaaacaggccgcttgccaaaacagccacaacgttattcattaacgccaggaagagaagttggcgatttccaatttgtattaattcaagaagaattatctaacgtttctgaactgaaaaaatgggatcgacaaattatgcaggcaaaattagctatcaaaaacttaactacctctcctgaaagttggtttggcttggaatacagtgaagtcaaatatgaatccgttcctttaatcattggcccacaacggaaaacgcacttagtcgaacgaaagaatcgttca

SEQ ID NO: 20762 - DNA, 1038 bp, Enterococcus faecalis
gtgacggaaatgctaagtacagaagattttgattttgatttaccagaagaattaattgctcaaaccccactaaaagatcgcgctagttcacgattattagttgtaaataaagaaacaggggacatggaggataaacatttccatgatattcttgatgaattacagcctggggatgcattagtcatgaataatacacgggtactgccggcccgtttatatggagaaaaacctgaaacaggcggtcatttggaagttttacttttaacaaatacagaaggcgatacatgggaaaccttgattaaacccgcgaaacgtgcaaaagtcggcacggaaattcaatttggcgatggtcgcctaaaagcggtggttaaagaagagttggaacatggtggtcgaatcattgaatttaaatatgatggtattttcttagaaattttagaatcgttaggagaaatgccattgccgccatatatcaaagaacgtctagatgacccagatcgttatcaaacggtttatgctgaagaaaatggttcagctgcagcaccaacagcgggtttgcattttacaaaagaactattagaagagatcaaagcaaaaggtgttcatctcgtttatttaactttacatgtcggtttaggaacattccgtcccgtgagcgttgataatatagaagaacatcatatgcatagcgaattctatcgtttaactgaagaagcggctaagcaattaaatgaagtacgccaagcaggcggtcggattgttgcggttggaacaacttctattcgtacgttggaaacaattggcacaaaatttaatggtgaaattcaggctgacagtggctggaccgatatttttatcacaccagggtatcaatttaaagtcgtagaggctttttcaacgaacttccatttaccaaaatctacgttagtgatgcttgtgagtgcttttgcaggaaaagacttaacattggctgcttaccaacatgctattgaggaaaaatatcgtttctttagttttggcgatgcaatgtttattaaa

SEQ ID NO: 20763 - DNA, 1182 bp, Enterococcus faecalis
ttgatagaatttcagcatgtatcaaaattttataaaggcggaaaagtcgccgttgatgacattaatttgtctttcgataaaggtgaatttatctgcttcatcggaacaagtggtagtggaaaaacaacatcaatgcggatgcttaaccgcatgaccgacccttcaaaaggaaaaattttaattgatggccaagatattcaaaaaatcaatcctgtagagctacgtcgccaaattggctatgtcattcaaaatatcggcttgatgcctcacatgaccattcgtgaaaatatcgttttagtgcctaaattattaaaagtacctgtggaagaacgcaataagatagccgaaaaaatgattgatttggttgagttaccacgagaaatgttggaccgctatcccaatgaactttctggcggacaacaacaaagaatcggcgttgtgcgggctttagctgccaatcaagatattattctaatggatgaaccttttggtgctttagatcctatcacccgtgattcattacaagatttagtgaaagatttgcaagaacgtttaggaaaaactattgtctttgttacccatgatatggatgaagcgttgaaattagcaaataaaattgccattatgagcgaaggcaaagtaattcaatttgacacaccagataatatcttacgtcatccagccaatgaatttgtagaagaactcatcggagaagatcgcctattacaagccaaacctgatttcaccactgttgatgaagtcatgttaaattcagctattactatcacgccggaaaaatctttacaagaagcgattaaattgatgcgtgaaaaacgggttgataccttattagttgttgataattcccatgtgcttaaaggctttatcgatgttgaaacattagatcagcaacgtggcaaagcttctagtgtcggtgatatcttgaataaagatgtcttctttgttcaaaaaaccgctcttttacgtgatgctttacaaagaatcttaaaacgcggcttaaaatatgtgccagtcgttgatgaacaaaaacgagtggtgggcatcttaacacgtgcttcccttgttgacattgtttatgatgttatctggggcgatgaaacaacgattagtgaagctgtagaagcaaaacaaagcgagtccgaaactgataaagaggaggcg

SEQ ID NO: 20764 - DNA, 777 bp, Enterococcus faecalis
atgtatggagaattacatggtaaagtagccgttgtcactggtgcagctacgggtttaggattatttattactctgcgttatatcttagagggcatgaatgttgttgctgactatgtcggtgagctgcctaaagaatttgaagatgtccaagccaagcacgcagatcgcgtaaaattcgtgaaggctgatgtctctaatgaagaagatattaaagcgttagctgaaaccgctttaaaagagtttggtcatgttgacatttgggtaaataacgccggtgtggaggcttcttttccgacaattgatatgccattaaaagaatggcaacgtgtcattgatgtcaatttaaacggtgtctttttgggttctagagaggcactccgaatatttagagatcaaaaaatcaaaggttcaatcattaatatgtcctccgtacaccaaagaattccttggccaacgttcgcccactatgcggcaagtaaaggcgcaaccgaaatgttcacgaaaacaatcgctttggaatatgcggaatatggtattcgtgccaactgtattgcgcctggagcgattaacacacctattaatgctgaaaaattttccgatcccgaacagttaaaacaaacaacaagcatggttcctatgggtattattggtaaaccaaatcaagtagctgctgcggccgcttggttagcttctgatgaatcctcatacgtaaccggaacaacactctttgtagatggcgggatgtctctatatccttcgttccaacacggagctggt

SEQ ID NO: 20765 - DNA, 1332 bp, Enterococcus faecalis
gtggaacaaattcaaattattgattcaaacaaacatgttggagaaacagtaaaaattggcgcttggattgctaacaaacgctcaagcggaaaaattgcctttttacaattacgtgacgggacagcctttttccaaggtgtcgtgttcaaaccaaatttcattgaagcctttggtgaagaagctggtacagaaaaattccaagaaattaaacatttatcacaagaaacagcagtcatggttactggtgttatcaaagaagatagccgttctaaattcggctatgaaatggatatcactgatttagaagtcgttggcgcttcagaagattacccaattacgccgaaagaacacggcacagatttcttaatggatcatcgtcatttatggttacgttcaagcaaacaacatgcgatcatgttagttcgtaacgaaattattcgtgctacttacgagttctttaacgaacaaggattcattaaaattgatagcccaattttaacaggctcagcaccagaaggcacaacagaattatttgaaacagattacttcggacaaccagcattcttatcacaaacaggtcaattatatgcagaagctggtgcgatggcatttggaaaagtctttacttttggaccaactttccgtgcggaaaaatccaaaactcgtcgtcacttaacggaattctggatgattgaaccagaaatggcatacacaactcatgaagaatcactagatattcaagaagcctacgtaaaacatttaattaaatcggtattgaaaaatcaacaatatccattggatgttttagaacgtgatacagcgttactggaaaaatatgtttcggagccattcaaacgtattacttacgatgatgcgattgagttattacaaaaagaagaagcaaacaatgattatgatcacattgaatggggcgaagactttggtagcccacatgaaacctttatttcaaattactatggcgttccaacattcattttaaattatccaaaagcaattaaagccttctatatgaaaccacatccgacacgtgaagatgttgtaatttgtgccgatttaattgcaccagaaggttatggtgaaattatcggtggttcagagcgtgcaactgattatgattatttgaaagaaaaagtagctgagtttggcttatcagaagaagagtacagctggtatttagatttacgtaaatacggttctgtgccacattctggcttcggattaggtttagaacgtgctgttacgttcattactggtaatgaacacattcgtgaagcgattccattcccacgtatgttaaaccgtatttatcca

SEQ ID NO: 20766 - DNA, 2751 bp, Enterococcus faecalis
atgtgtcgtaacattcaagcttttgtttgttattctcttgtattttatgctaaagttattcaggcacaaaaaaaagcaggtgattttatgaaacatataaaaaatacatgggaactatttattttagattggaaaagaatttttaaaaacccagtagcaacatttttgattgttgccttaatgattattccatcattatatgcatggtttaacattaaagcactatgggatccgtattcaaatacaggagagttaccaatagcggtctatagtgatgaccaaacagcaacttttcaagataaatcggtcaatattggtgatgaagtcttgaaaaacttgaagaaaaacaagcaattaggttggcgttttgttgattcgaaaaaggaattagacaaaggggtccaatcaggaaaatattttgccgggatttatttacctaaagatttttccaaagatttgctaagttttacttctggtgatatcaataaacctaaaattgaatactcaattaacgaaaaaattaatgcaattgcgccgaaaattacgtcaaaaggcgcttcttccattcagtcacaaatttcggaagaattcattaaaacggcaagtagtacgttaatcaaaacattcaatgatattggctatgatattgataaaaacatggttagcattcaaaaagttaagagcatgattttagatacagatgccaacattggaaccattgatacgtacgcaaaacaagtcacagacttacatggtaagatgcctgagctaaaagaaaaattagcgaaagccaacgatgcgatgaaatatttacctgaagttgatgctttaggagagaagattgttgagctaaatggtaaaatgccaagcatcaaagaacaagctagtgttattttgacgttacaagaaaaaattccagaaattcaaaacgctggccgacaaattgctatgattgatgaagactttgcctctgtggaacaaacaatgagcgaaggaatccaagaagcaaaacaaggattagaaatcattcaacaagttcaaacggcgttaccagatattcgtaaactaggtgatcaagccaatgatttagggaatgtcacattagatggcgccactcaattggaaaaggcgttacctggaattactcaaagtgtggggacgattttaaaagcaattggaacaattagcgctggtgtaaatacagcactagaagatttaaaaaatcatcgtttaccagttgaagaaagagaagcaattaagcaacaactgtctgaaagcctaggaaaacaacatgaaaatatccaacagctgattcaactgtttacgcaaatacaagaagccacaggtaacactgatttacaagacacaataaatagattgaatacgattgatggtattgtagttagattaaaaactgatgttgataacattgatgtgaatgcggtaactgatgcagatttaaatgctattcaagcagaagctcaacaagtagaagcaaccgtcaatagtattaaccctgatgcaattgaaaacacagtaaaaacgattttagacaaattaattgctaccatccaaaacgctcaaggtcaactaaacaaagcgcaacaaattgactttgaaggtttattgagctcaacaagtcaaacggtcactaatgcgatttctttattagaaaaatatcaagccgaaatgccggcaattaaacaagaaattcatgatgcgaatacgatgttgaatggcaatatggaaaccattgtcaatggcattaatcgtggtgctgatttgtataaaaacgatttaccagtcattcaagataaagtcagcaaagcggcagcctttatgcaaaatgactatccaggtatccgaaaagatttaacgaataccttgaaaacagtcaatgagaaaatgccagatgttgaagcggccttggacaaagccaacgagctaattattaatgattggccaaatatcaaaacaggattacacaaagcagcgaatgcaatccgtaaaggtgaaaaagaagttgatttaggcgaaattcttaaattactaaaattagatgccaataaagaaagtgacttctttacacaaccagttgaagtcaaagaacatgctgtttatccgattgctaataatggttcggcaagtacgccattctatacagctttgtgtttatgggttggtgctgtattattctcaagtgttgcgacaacggatgtttatcttgaaggaaaagataaaaaacgcttctctaaacgggaacaattttcagcacggatgtttaccttcattgtcatggggattggtcaagcactgattgtaaccttaggtaattattttgcgttaggcgtagatgttcgtaatccagcgtatagcgtctggtttgcggtattgattgccattacgtttatgataatggtttatgtgcttgttgctctctttggcaatgtagggaaaggaattgcgataataatcttggtactgtccatctctggtgggggtgggaactacccaattcaagtctcaggtaaattcttccaaatgattaatccgttcttgccgtttacgcatgccgtgaacttgctaagggaatcagcaggaggcatttactggccaaatgcttggtttgccatttggattatggtggggatttcagtcgtctttagtattggcggtgcaattctttatccacatctggaacacagatcgaaaaaatttgcggctttagcacaaaagagccatttattccat

SEQ ID NO: 20767 - DNA, 747 bp, Enterococcus faecalis
atggaagaatggataaagcccgttatgcgaacaattcgccacattaagcgcgccttcttgaagcaaaagttgcctgcgacatatcagctaaaaaagcaaaaggctaacacagcaatggaatatttgcttgagcaaacagataaccatcaatcaataagaggaccgaaaagaaaaatgaccgctgaagagattaaaaaaaagcggcaagcctaccaaaagaaacaacgcgtccaagtcgttaaattttttatgccagctattcttttcgccatttttgtgttcttttttgtgttaaagacatctagctacccaattgctgggcaatccatgaagccgacacttaacgcaggggaacgagtcttagtacaacggacgaagcaagtagcaaggtacgatgtgattgcatttaaagcaccgctagctagcaaaggtacgtacgtcaagcgaatcatcggggttcctggtgatcgaatttgggtaaacgagggaaaactttatctttcagaagaacctatagcaagcgataatgaggcactgcctgagaatgccagtcgttttgacttatcagaagaagcggcagcccaacttcgcctgtttcagaagattccagctggtcattactttgtcttaggggacaatcgtacgcattcaagtgatagtcgtacgttcggctttgtcgagatacaagcgattgaaggaatcgtggtatttaaaatggcgccgtttaaggaaatagggaaagtaaaa

SEQ ID NO: 20768 - DNA, 1401 bp, Enterococcus faecalis
atgaatacgattattgacctagcaaatacaatttttaaacctttaattgatttaggtgctgctcctttaatgactattgttttaacactgattgccctttgttttaaggtaaaacccactcgcgcattagaaggtggtcttaaactaggaattgctttaactggtatcagtgctattataggaattttaactactgctttctcagatgcaatggcctctttcgtagaacgtacaggaatttctttaaatattaccgatgttggttgggcacctttggccaccatcacttggggatctccttacaccctttactttcttttaattatggtgattgtcaatgtcattatgttaattctaaataaaacaaacacattagatgtggatattttcgacatttggcatctatcgattgttggtttatttgctattttttgtggcgcaaacttaataattgcaacaatcttagttattttcataggtgttttaaaaattatcaattctgacttaatgaaaccaacgtttaacgatttacttaacgccccagataccaatcctatgactaccacacatatgaactatatgatgaacccaatcattatggtttttgataaaatttttgataagctttttccttggttagacaaatacgattttgacgctgccaaattgaatagtaaaattggcttttggggatcaaaatttgccattgggatttacttagggatttttgtgggtcttttagctggccaaacacccacgcaaattttttctctatcctttacggctgcagtctgtttggaactattctctttaattggaacttggtttatcgctgcagttgagcctttatcccaagggatcactgattttgcttcgaataaattaaaaggacgtacacttaatattggtttagattggcctttcttagctggtcgtgctgaaatctgggcagcagctaacgtattggctccaattatgctattagaagccattgtcctacctggcaataaacttttaccacttggcggaattattgcaatgggtgtaacccctgctctactagtagtaacaagaggtaaactcatccgaatgattatcattggagcaatcgaattacctttgttcttatggtctggtaccctaattgcaccgttcgttaccgaaaccgcaaaaaaagttggcgctttcccagcgggtctaaataataatactttaatttcacatactaccatggaagggccaatggaaaaattcttaggatacttagtcggcaatgcatcacaaggtcaactcgaatttattttatacgcatgtctggcgctagtcgcctatctactgattttcatttggtatgcaaaacaaatgaagaagcgaaatattatttatgctcaaaaagctcaa

SEQ ID NO: 20769 - DNA, 1113 bp, Enterococcus faecalis
atggtcgttggatggcatcgtcctacacggttacatatcgatacgcaagcaattactgaaaatgtccaaaaggaatgtcaacgtttgccagaaggaaccgctttatttgcggttgtaaaagcgaacggctatgggcatggcgccgtagaatccgccaaagcggcgaaaaaaggtggcgcgacaggtttttgtgtcgccttattggatgaagcaattgaattgagagaagcaggtgttcaggaccccattttaattttgagtgtggtagacttagcttatgtgcctttgttgattcaatatgatttgtctgtaacggtagctacacaagaatggttagaagctgctcttcaacaactaacgcctgagagtaacacgccattacgtgttcacttaaaagtcgatactggcatgggacggattggttttttaaccccggaagagactaagcaagcagtgcggtttgttcaatcccacaaagaatttttatgggaagggatttttactcatttttcaacagctgatgaaatcgatacaagctattttgaaaaacaagcagggcgttttaaggctgttctagcagttttagaagagttacctcggtatgtccatgttagcaatagtgcgacagcgttatggcatcctgatgtgccaggaaacatgattcgctatggggtagccatgtatggattgaacccttcaggtaataagctggccccaagctatgcgttaaagccggccttacggttgaccagtgaactcatccatgtaaaacgcttagcggctggtgaagggattggctatggcgaaacctacgtaactgaagctgaagaatggattgggacagtgccaatcggctatgcagatggctggttgcgtcatctccaaggatttacagtgctcgtgaatggtaagcgttgcgaaatcgtcggacgagtgtgtatggatcaatgtatgattcgtttagcagaagaagttcctgtcggctcagtcgttacattagttggaaaagatggcaatgaagaaaatacgttacaaatggtagccgaaaaattagaaaccattcattatgaagttgcatgtactttctcacaaagaatccccagagaatataac

SEQ ID NO: 20770 - DNA, 1545 bp, Enterococcus faecalis
ttgaaatttaaagaacttggtttagcgccagaattattatcagcggtagaacgcgcaggcttcgaggaagcaacccctattcaatcagaaacaattccgttagcgttagcaggaaaagacgtaatcggacaagcacaaacaggaacagggaaaaccgctgcttttggcttaccaatgcttaacaaaattgacgcagacaatcgcgttattcaaggattagtcattgcaccaacccgtgagttggctatccaaacacaagaagagttattccgtttaggccgcgataaaaagattcgcgtccaagccgtttacggtggggctgatatcggtcgccaaatccgtggactaaaagatcgtccacatatcgttgtaggtacaccaggacgtttactagatcatattaatcgtcgtaccttgaaattagaaactgttgaaacattagttttagacgaagcagatgaaatgttaaacatgggcttcttggaagacattgaaaaaatcatctcacaagtgccagaacaacgtcaaacacttctattttcagcaactatgccgccagcaatcaagaatattggcgtgaaattcatgaaacaaccagaacatgtgaagattaaagccaaagaaatgacggctgatttaattgatcaatattatgtacgttcaaaagactttgaaaaatttgacattatgacacgtttactagacgtgcaaaccccagaattgaccattgtctttggtcggacaaaacgccgtgttgatgaacttgcccgcgggttagaagcgcgtggttacaaagcagaaggcatccatggcgacctatcacaacaaaaacggatgagcgttttacgttcattcaaaaatggtaacttagatatcttagtggcaacagatgtagcagcacgtgggttagatatttcaggtgtcactcatgtctataactacgatattccacaagatccagaaagttatgttcaccgtattggtcggacaggtcgtgctggtaaaggcggtatgtctgtgacgtttgtaacaccaaacgaaatgggttacttacatgtcatcgaaaacctaacgaaaaaacggatgacaccattacgtccaccaaccgaaaaagaagcatttaaaggacaattaagtgcagctgttgaaaccatcgaaagtgatctagaagaaaatggtttagacaaatatctagaatctgctgaagcgttattagaaaaatattcagcgacagacttagctgcgttattattaaaaacagtagcgaaagatccagcagatgcggttcctgtaaaaattaccccagaacgaccattgccttcaaataaaaaaggctttaacaaaaatggccgtggtggtggcggtgggaacaaccgtaatcgcaaccgtggtggcaatggtaaaggtggcagctatcgtggcaacaaaaaccataaagatggcgaccgtaattacaaaaatagcgaccgcaaaaataaagatcaacgtggcggcaaacgtcataacgataaaaaacgtggtttcgtcattcgcgaaaacgccaaa

SEQ ID NO: 20771 - DNA, 426 bp, Enterococcus faecalis
atgcgtgtcatacttggttcagatttagatggaataaaattaaaagcagaaatgaaacaatacttattgcaagaaaaagttgaggtaatcgataaaagtgaaagtgcttcggaagactttatagaagcaacgcttgctgttgctcatgaagttttaaaggatactgaaagtttaggaatcgtttttgatggttatggggcaggtagttttatgactgctgctaaaattaaaggaatgattgtcgctgagttgtcagatgagcgttctgcatatatggcgcgagaacacaacaatgctcggatgatcacggtgggcgcaaaaattgttggaacggaactagccaaaaacataataaaagaattcttaacaggtcattatgcaggcgggcgtcatcaaatacgtgtagatatgttaaataaaatggct

SEQ ID NO: 20772 - DNA, 513 bp, Enterococcus faecalis
atgaaaattgccattggttgtgatcatattgtgacggataccaaaatagcagtttctgattttttgaaagcaaagggatatgaaattttagatgtaggcacgtatgattttactcgaactcactatcctattttcggaaaaaaagtgggagaagccgtaatgagcaatcaggctgatttgggtatatgtatttgcggaacaggcgttggaattaccaatgcggttaacaaagtgccgggtatccgttctgctttagttcgcgatatgactacagcgttgtatgcgaaagaggaattgaacgcaaatgttattggtttcggtgggaaaataacaggagaattcttgatctgtgatatcgctgctgcctttattgaagcacactatcatccaacagaagacaacgaacaactaattgaaaaaattaatcaagttgaaaaacaacatccagaacaacaagatgcgcactttttcgatgaatttttagataaatggcaacgaggagtctatcacgat

SEQ ID NO: 20773 - DNA, 1044 bp, Enterococcus faecalis
ttgaagattattttgttgtatggcggcagaagtgaagagcacgatgtgtctgttttgtctgcatattccgttttaaatgcaatctattataaatattatcaagtacagttagtctttattagtaaagacggtcaatgggtaaaaggccctcttttatctgaacgaccacaaaataaagaagttttacatttaacttgggcacaaacacctgaagaaacaggcgaattttcaggaaaacgaatcagtccttcggaaatttatgaagaagaagcgattgttttccctgttttacatgggccaaatggtgaagatggaacaattcaaggattcatggaaaccattaatatgccttatgtaggcgcgggtgtcttagctagtgctaacgcaatggacaaaatcatgacgaaatatcttttacaaactgttggcattccacaagtaccattcgtgccagttttaagaagtgactggaaaggaaatccaaaagaagtctttgaaaaatgtgaaggttctttaatttatccggtctttgttaaacctgccaatatgggttctagtgtcggaattagcaaagtggaaaatcgtgaagaattgcaagaagcattggaagaagctttccgttatgatgcccgagcaattgttgaacaagggatcgaagcacgtgaaattgaagtagccattttaggaaatgaagatgtccgtacgactttacctggtgaagtggtgaaagatgtcgctttctatgattatgatgcaaaatacatcaataacacgattgaaatgcaaatcccagcgcatgttccagaagaagtagctcatcaagcgcaagaatacgctaaaaaagcgtatattatgttagatggaagtggcttaagtcgctgtgatttcttcttaacaagcaaaaacgaattattcctgaatgaattgaacaccatgcctggttttactgactttagtatgtatcctttactgtgggaaaatatgggcttgaaatacagtgatttaattgaggaactgattcagttagctttgaatcgttttaaa

SEQ ID NO: 20774 - DNA, 1014 bp, Enterococcus faecalis
atgtataaagcaattgtcgcagcaaaaggaaaaacaacaaaaattgttgaaaaagaatcgcgtccattgaaagataatgaagcgcggttgaaaatggaagtctgtggtgtctgtcatacggatttacacgttaagaatgcagattttggcgatgttagcggttgtaccttaggtcacgaaggaattgggattgtgacggaggttggaaaagacgttactagtttaaaaattggtgatcgtgcatctgttgcatggttttatgaaggctgcgggcattgcgaatattgtacttctggtcgagaaacgctttgtcgttcagtaaaaaatgctggatatacagttgatggtgccatggccgaagaatgcatcgtcacagacggttatgcagtgaaagtgccagaaaatttagcatcagagccagcttcctctattacttgtgcaggggtaacaacctacaaagcgataaaagaatctgggattcgtccaggtcaatggctaatgatttcaggattaggtgggctaggtaatctagctttacaatatgccaagcatgtctttaatgcaaaagtagtagctgttgatgtgaatgataatcagttagcttttgcgaaagaaatgggtgctgatcttttaattaatccagttaaagatcctgattttgctgcacaacttcaaaaagaaattggcggtgtccatgcagcagtagtcactgcggtagctaaatcagcatttaatggcgcagtcgatgcagtccgtgcgggaggaacggttgtcgccgttggattgcctgttgagacaatggatttatctattccacgtcttgttcttgatggcattcacgtagtcggatcgttagttggaacccgtcaagatttaagagaagctttccaattcggtgcagaaggaaaagttgttcctgtttgtcaaacacgtcaaccagaagaaattaatgctatttttgaagaaatggaacaaggaaaaattcgcgggcgcatggtcattgattttcgcagt

SEQ ID NO: 20775 - DNA, 852 bp, Enterococcus faecalis
atgaaaaagttctccatacgaaaaattagtgctggttttttgtttctgattttagtaactttgatcgccggttttagcttgtctgcaaatgcagaagagtatatcgttcctgccgaaagtcattcacgacaaaaaagatcgttactggaccctgaggacagaagacaagaagtggcagatacaaccgaagcgccttttgcgtcaatcggaagaatcatttcccctgccagtaaaccaggctatatttctttaggaacaggctttgttgttggaaccaatacaattgtcaccaataatcatgtggctgaaagttttaagaatgccaaagtattaaatccgaatgccaaagatgatgcttggttttatccaggtcgagatggcagtgcgacaccatttggcaaattcaaagtgattgatgtagctttttccccgaatgcggatattgcggtagtgactgtcggcaaacaaaacgatcgtccagatggcccagagttgggagaaattttaacgccatttgttttgaaaaagtttgaatcttcagatacccatgtcacaatatcaggctatccaggtgagaaaaaccacacacaatggtctcatgaaaatgatttgtttacatctaactttacagacttagaaaatccattactattttatgatatcgatacaaccggcggtcaatctggttcaccaatctataatgatcaggttgaagtagttggtgttcattccaatggcggcattaagcaaacaggaaatcatggtcaaagactaaatgaagtgaattataactttattgttaatcgagtgaatgaagaagaaaataaacgtttatccgctgtgccagcagcg

SEQ ID NO: 20776 - DNA, 606 bp, Enterococcus faecalis
atgtcagtacaattagaagttaaagaaagagctatccgtccacgttcactaagaaatcagctacgtcacgaagggaaagtacctgccattgtttacggttaccaaattgaaagtacaccaatctattttgaagaaaaagacttatcaaaaattttacgcgaacatggtgctaacaccgttattaaaatgacagttgatggcaaaaacatcaacacattaatgtcgaaagcacagttagatacctttactggtcaaatgcttcatgttgaattcttatctgtaaatatgaaagaaacaacagaagtcgaagcagaagttcaattaattggtgaatctgcaggtgtgaaagctgggggtaccttagctcaaaacttgtacactgttttagtggcagccacaccagacaaattgccagaatcaattgaagtagatattacaaacttagaaattggtgatgctcttacaatcgctgatttacctgaacacaaagactatgaaattttaactgatccagaagaacaactagttgctattgttgaagcacaaactgctcctgaagaagaagaaggaacagctgctgaaacgactgaaccagaattagccgaa

SEQ ID NO: 20777 - DNA, 993 bp, Enterococcus faecalis
atgcttacgttaacagctggaaaaaaagcggcaatggatcgtttgtcaacccaagaaggaatcattagcgcattagccattgatcaacgaggtgccttgaaaaaaatgatcaaagcgctagatgtagagccaactgatgcacaaattgaaacgtttaaagaattagtctcgaaagaattgacaccttatgcgtctgccattttattggatccagaatatggattgcctgctgcaaaagcacgcgataccgaggctggattgttactcgcttatgaaaaaacgggctatgatgcaacaactccgggacgattgcctgatttactagcagattggtctgttttacgcttgaaagaagaaggcgcagatgcgattaaatttttactatactatgatgtggatgaggatccagaaatcaatcatcaaaaacatgtattcattgaacgcttaggaagtgaatgtgcagaagaagacctaccattttacttagaattagtttcttatgatgcacaaatagcagatgcgacttctttagaatatgcaaaagttaaaccgcataaagtgaatgaaatgatgaaagaattttctaaaccccaatataaagtagatgtattgaaagtggaagttccagttaatatgaattttgtagaaggttttgcgccggctgaaacagcgtatacaaaagaggaagcggcgaattatttcttagaacaaagtcaagccactgatttaccatttatctttttaagtgccggtgtctcaacagagctattccaagaaacactacgtttcgctaaagaagctggttcaacatttaatggtgttttatgtggccgtgctacgtggaaaaatggcgtgaaacctttcgttgaagcaggagaaactgcggcttgtgattggttaaaaacagaaggccgagaaaacattgaaagtttaaatgaagtcatcgcagcaaccgccagctcttggcatgcgaaagttcaagtaaacgaaggg

SEQ ID NO: 20778 - DNA, 450 bp, Enterococcus faecalis
atgccttggaatatgaatgattatcctacatcaatgaaaaatttagcacctttgattcggaaaaaagcgatagatattggcaatgcgttgcttgcggatggctaccctgatgatcgcgccattccaattgcgattagtcaagcggagaaatggtatcaagaggcaagtgcagcagacaaaaaggcatttgaacaagaagcaaatcctacgaaacaagattcgcataaacaggataaacatgcgggaaaattattaacggcggctgtcaacgttaaatataaagacggccaatggttggtgatttcagacagcgctgaaaaagcaagtaatacatttacccacaaacaagaggcgattgaacgagcccaagaaattgctcggaataagcaaacaaagctgaaaatctataagcaagatggtacgttacaagaaaccaaagagtatactgaa

SEQ ID NO: 20779 - DNA, 1017 bp, Enterococcus faecalis
atggaaaaagccaatcttgattggaataatttaggattttcttacattaaaacgccctttcgttatattagttattggcgagatggcaagtgggaagaaggcacgctaacagataacaatcagttaacgattagtgaaggttcgcctgctctacattatggccaacaatgttttgaaggattaaaagcgtatcaatgtgcagatggttctgtcaatttgtttcgtccagatgaaaatgccaaacggctacaaaaaagttgtgcgcgtctactgatgccacaagtgccagtagaaacctttgtttctgcatgccaagaagtggtgaaagccaaccttgcttatttaccgccatatggaacgggcggtacgttgtatcttcgcccttatatgattggtgtcggcgataatattggcgtagcacctgccaaagaatacattttttctattttttgcgtgccggttggttcgtattttaaaaatggtttagcaccaaccaactttatcgtttctgaatatgatcgagcagcgggtcgaggaactggggcagctaaagtggggggcaattatgcagctagtcttttaccaggtgcagaagcacatgagaaagaatttagtgattgcatttatttagatccgtatacgcatacgaaaattgaagaagttggtgcagccaatttctttggcataaccaaagatggtacttttattacgccgaaatcagcgtctattttgccaagtattactaaatattcattattgacgctagcaaaagaacgtttagggatgacggcgcttgaaggagacgtttacattgatcgattagcggacttctccgaagcgggtgcttgtggcacagcggcgattatttctcctattggtgggattcaaaacggcacagatttccatgtattttatagtgaaacggaagttggaccagtgactaagcaactatatgatgaactggttggcatacagtttggtgacaaagaagcgccagaaggctggattgtaaaagtt

SEQ ID NO: 20780 - DNA, 2217 bp, Enterococcus faecalis
atgatgaatgaaccaacaccaaaagaaatcaaggaaacacggttgtatgcagaatggggactaacagatgaagaatatcatcagattgagaccattttgcaaagagaacctaattatacagaaactggcttattctccgtgatgtggagtgaacattgctcttacaaaaattccaagcccgttttaaaaaagtttccgacggaagggccacaagtgcttcaaggccctggtgaaggagctgggattgtcgatattggtgacggattagctgttgtttttaaagcagagagccataatcatccttctgcagtagaaccttacgaaggagcagctacaggcgttggtggaattattcgcgatattttcagtatgggggcgcggccgattgctttactggattcgctaagatttggcgaactgacggatgcacgaacacgttatttgtttcaagaagttgtggcggggattagcggttatggaaattgtattggtattccaaccgttggcggcgaaattgcttttgagccatgttatcaaggaaacccacttgttaatgctatgtgtgtgggattgattcgtcatgatgagattcaaaaaggccaagcaaaaggcgtcggaaatagcattctttacgtaggtgcgaaaacaggacgagatggaattcatggtgcgacctttgcttcagaagaatttagtgaaggtgaagaacagcaacgatctgcggtacaagtaggtgatccgtttatggaaaaattattattggaagcttgtcttgatttaatcaaaaatcatcaagatattttaatcggcatccaagatatgggggcggctggcttggtttcttcaagtgctgaaatggcatcaaaagcaggttcaggcttgattctagagctagataaagttccgcagagagagacgcagatgagcccctatgaaatgctcttgtctgagtcccaagaacggatgttaatctgtgtggaaaaaggagcagaacagcaagtttgtgaattgtttcaaacgtatgacttagaagcggtagcgattggctccgtaacagatgatggacagtatcgtgtctttcacggtggcaaaatagtcgcagatgtaccagtagatgctttggcagaagaagcccctgtctaccagaaagcctatcaagaaccagagcggatgcgtgcttttaaaaaattagcgcccttcattccagaaattacgaatagtacggaattattaaaacgcctattgcaacagccaacgattgcatcgaaaaaatcagtttacgaaacctatgatagtcaagtacaaacgaatacagtggtgcaaccaggaagtgatgcagctgttttaagagtgcggggcaccaataaagccttagcgatgacgacagattgtaatagccgttatttgtatttaaatcctgaaattggtgggcaaattgcggttgcagaagcagcccgtaatattgtagcgagtggagcacaacctttggctatcactgattgcttgaattatggttccccagataaaccagaaagtttttgggaattatggacgtcggcggatggaatcgccgccgcctgccgtcagctaggaacacccgtgatttcagggaacgtctctctttacaatgaaacagatggtcaagccatttatccaacgccaatgattggcatggtgggagtgattgaagatgtttcacaaattaccacacaagcgtttaaacaagttgatgacttaatttatctcatcggtgaaacccacgcagattttaacggctcagaaattcaaaaaatacaactgggtcgaattgaagggcaattacgctcatttgatttaaaagaggaaaaagcaaaccaagaattagttttaaaagcaattcaagtaggcctagttgctagcgcgcatgattgcgctgaaggtggcgttgccgttgctttagccgagtcggcttttgctaacgaactggggttacaggtgacactgccattaaaaaaagaatatctatttgcggagacgcaatcccgttttattctttcagttagtccccagcatcaagaagcatttgaaacacttatcggaagaaaagctcaacatattgggaaagtgactgaaactggtttggtcattcatgcgttagatgatgtgatcaattgctcaacaaaagaagccaaagccttatgggaggatgcgattccatgtcttatgaagcaaaaagct

SEQ ID NO: 20781 - DNA, 1827 bp, Enterococcus faecalis
atgagtaaaattattggtattgacttaggaacaacaaactcagctgtcgcagtactagaaggcggcgaagcgaaaattattgcaaacccagaaggtaaccgcacaactccttcggtcgtttcattcaaaaacggtgaaattcaagtgggcgaagtagcaaaacgtcaagctgttacaaatcctaacacgatttcatctattaaacgtcacatgggtgaagctggctacaaagttgatgttgaaggaaaatcatatacaccacaagaagtttctgcaatgatcttacaatatttaaaaggttttgctgaagactatttaggtgaaaaagttgaaaaagcagttattacagttcctgcatatttcaacgatgcgcaacgtcaagcaacaaaagatgctggtaaaattgctggtttagaagtagaacggatcgttaacgaaccaacagcagcagctttagcttatggcttagataaaacagacaaagatgaaaaaattcttgtctttgaccttggtggtggtacattcgacgtgtcaatccttgaattaggcgatggcgttttcgatgtattatcaacagccggtgataacaacctaggtggggatgactttgataataagatcattgactacatggttgcagaatttaaaaaagaaaatggcattgacttagctaacgataaaatggcattacaacgtttgaaagatgctgctgaaaaagcgaaaaaagacttatcaggtgtaacaagcacacaaatcagcttgccatttattactgctggcgaagcaggaccattgcacttagaaatgaacttaactcgtgcaaaatttgatgaattaacaagtgatttagttgaacgtacaaaagtaccagtacgtcaagccttaaaagatgctggattaaatccttctgaaatcgacgaagttatcctagttggtggttcaacacgtattccagctgtagttgaagctgttcgcaaagaaacaaacaaagaaccaaacaaatcagttaaccctgacgaagtagtagcaatgggtgctgcaatccaaggtggtgtaatcactggtgatgttaaagacgttgtcttattagacgtaacaccgttgtcattagggattgaaacaatgggtggcgtatttacaaaattaattgatcgtaacactacgattccaacaagtaaatcacaagtattctcaactgctgctgacaatcaaccagctgttgatattcacgttttacaaggtgaacgtccaatggccgctgataataaaacattaggtcgtttccaattaacagatattcctgcagctcctcgtggtgtgccacaaattgaagtaagctttgacattgataaaaacgggattgtaaatgttcgtgcgaaagacttaggcactcaaaaagaacaaacaatcacgattaaatcttcttcaggtttatctgatgatgaaatcgaacgtatggtgaaagatgctgaagcaaacgctgaagcagataaacaacgtaaagaagaagttgacttacgtaacgatgcagatgctttattattcactgttgataaaacattgaaagaattagaaggcaaagtagatgctgaagaagtgaaaaaagcagaagatgcgcgtgatgaattaaaagcagccatcgaagcaaacgatatcgaacaaatgaaagcaaaacgtgattcattaaatgaaatcgtccaaaacttaacagtaaaactttacgaacaagctgcgcaacaacaagcacaagaaaatcctgaagctgctcaaggtggcgctgatgatgttgttgatgctgattttgaagaagtaaatggtgatgacaaa

SEQ ID NO: 20782 - DNA, 948 bp, Enterococcus faecalis
atgcaagttattcaactacatcatccctatgaacccaatcaaattcctaatgaagaagtcgtgatggtcctaggcttttttgacggtgttcacaaaggccaccaaaaagtaattgaaacaggtaaaaagattgcggaggaaaaaggcttgaagttagctgtgatgaccttcaaccaacacccatcaatcgtttttcaaaaagttttaccagaaaatatgaaatatttaactagcttggaacaaaaagaacgcctaatggccaacttgggcgttgatattttatatattgtcgaatttacttcagcgtttgctcaattaaagccgcaagattttgtcgatcagtatatcgttaatttaaatagtgcagtggcagtctctgggtttgattatacgtatggtcctaaagaaattgctggagtcaaacagttaccaacttatgcgcaaggccgttttgaagtggtgacagtaccaaaagaagaaatgactggtgccaaaattagctcaacaagaattcgcgaaaaaatggaagccggcgaaatggaggaggtcacggagttgttaggatatatttatgaaacagaaggaacagttgtccatggcgatgctcgtggccgtttattgggtttcccgaccgctaatgtcaaagtgaaaagcaccgtgcgtttaccaagaattggcgtctatgctgtgcaaatcgaagttggtggcaaatggtatgtcggcatgggctcaattggtcataatgacacctttggagaaggacgcgatttaaccgtggaagtctatattttggacttccatcaagacatctatggtgagcaagtggtggttcgttggaatcattatttacgtgaccaagtgaaattcaatggggctgaagccttgatcgaccaattaaaacaagatgaacgagatacggctgactatttccaacaatctgaggacaaa

SEQ ID NO: 20783 - DNA, 1102 bp, Enterococcus faecalis
ttggaaaacccagaaattcgtacattattagacgaaatgacacaaaaaattactagcttcaggaggtctctttgacttagaccagttagaagaagacattgccgaggcggaaaatcggatgggagaacctggtttttgggacaacacagaaacggctcaaaagctaattaatgaaaccaatagtttgaaagaaaaatatcaacaatttcatcagctctctgaggaaattgacgaattaacggtgatgtttgaattacaacaagaagaatatgatgcagagattcaagaagaattggaagaaagaattcatctcttgcaagaacgtttaacaacgtatgagctatccttactactaaatgagccatatgatcataataacgccctaattgaattacaccctggtgccggtggtactgaatcacaagattggggaagtatgcttttacgaatgtacacacgttgggcagaaagtcacggtttccaagttgaaacgttggattaccaagctggagatgaagcagggattaaaagtgtcaccttattaatcaaaggttacaatgcttatggttacctaaaatctgaaaaaggtgtccatcgtcttgtgcggatttcgccctttgattccgctaaacgccgtcatacttcgttttgttcagttgatgtaatgcctgaattagacgacacaatagaaattgcgatcaatccagatgacttaaaaattgatacctatcgagcaagtggtgccggtggtcagcatattaataaaacagaatcggctgttcgaatcacacatattccaacaggtaccgttgtcgcaagccaagcacaacgttctcaattaaaaaaccgtgagcaagcaatgagtatgttaaaagccaaattatatcaattggaaatggaaaagaaagcccaagaagcagcaagtttacgtggtgaacaaatggaaattggctggggctcacaaatccgttcttacgtgttccatccgtattcaatggtcaaagaccatcggacaaattacgaaaccggcaatgtacaagctgtgatggatggagaccttgatggtttcattgatgcctacttaaaacagcgcttaagttaa

SEQ ID NO: 20784 - DNA, 918 bp, Enterococcus faecalis
atggacggcattttaccgttatggaaggaacgtggcatgacaagtcatgactgcgtatttaaattgagaaaaattttacataccaaaaaaattggtcatggtggtacgctagatccagatgtcgaaggggtcttacccatctgcgttggcaaaggaacgaaagtgatcgaatacatggtagattctggcaaaacctatgaaggtgaaattacacttggatttgctacgacaaccgaagatgttagtggcgaaattgttgaaaaaaaactagttacagcacctctgtcaactgaacaaattgatcaagcaatggccgaaatgacaggtgaaatcacacaaatcccaccgatgttttctgcggtgaaagtcaatggtaaacgtttatatgaatatgcgcggaacggggaagaagttgaacggccccaacgaaaagctatgatttattcatttgaacgcactagtgaaccaatttttaacgaatccgctcatacacaaagttggcggtttaaagtggtctgtggcaaaggaacctatgtgcggacactatcagtggatactggcaaaaaattaggctatcctgcccatatgtcggatttaacgagaacggcaagtggcggtttgcaagctgcgcaatgcttaacgttagaagaagtagccaaacaaatggctgctgaaacaatcgatcaatgcctgttgcccattgagacagcagtagaacaattcccacgaattgatttatcagatgaattgtatcaaaaagtaaaaaatggcatgcgtttgcacaaaaaagaattaggaataaaggcaatgccagaatccttagtcgccttattttaccaaaatcaagtggttagtttatacatgccacacccaacgcatgataaattattgaaaccaagtaaagttctacggaacaat

SEQ ID NO: 20785 - DNA, 918 bp, Enterococcus faecalis
ttggaagatgtacagaaaaaattattaacaaaatcgaaaagagccaagatggagcaacgagggaaatttattagtttcctatgtattgccttaattgtagcagtggttgtttcaattttctattttgttgcaagtaaaggacttgctacattctttaaagataagattaatgtgtttgatttcttatttggaacaaactggaacccaagtgatatcggtgcagacggtaaacccatggttggggctttaccgatgattgcgggttcctttattgtaacgtttttgtcagcgattgttgcgacgccatttgcgattggagcggctgtttttatgacagaaatttcacctaaaaaaggagcaaaatttttacaaccagttattgaattacttgtagggattccctctgttgtttatggatttattggtttatctgtcattgttccttttgtccgttcaatctttggcggaactggcttcggtattttagctggtacgtttgtgctatttgtcatgattttaccaacggtcactacgatgaccgtagatgcattaaaagccgtgcctagacattatcgtgaagcgtcgttggcgcttggtgctacgcgttggcaaacgatttataaagttgtcttgcgggcagctgtgcctggtattttaactgcggttgtctttggtatggctcgtgcgtttggtgaagccttagcaatccaaatggtaatcggaaatgcagctgtgatgccaactagtttgacaacaccagcttcgacactaacaagtattttgacaatggggattgggaatacaattatgggaacagttgaaaacaacgttctttggtctttagccttgattctattgttgatgtctttactattcaacattgttatccgaattatcggtaagagaggagccttaaaa

SEQ ID NO: 20786 - DNA, 807 bp, Enterococcus faecalis
atgaaagaatacaatttaaatgatacccatttacttcaactagatagccaaaaagacccgattgcgttacacacggaagacttacatgtcttttacggggacaatgaggctatcaaaggtgttgatttgcaatttgaaaagaacaaaataaccgccttaattggaccttctggttgcggtaaatccacgtatttacgttcgctaaatcgtatgaacgatggcattgccaattcacgtgttactggaaaaatcatgtataaagatgtcgatgtcaatacgaaagaagttgacgtctacgaaatgagaaaacgcattggcatggtttttcagcggcccaatccatttagtaaatctatctatgaaaatatcacattcgcattgaaacagcatggtgaaaaggataagaaaaaattagatgaaatcgttgaaacaagtttgaagcaagccgcactttgggatcaagtgaaagataacttaaacaaaagcgccttagctctgtctggtgggcaacaacaacgtttgtgtatcgctcgggcaattgcgatgaaaccagatattttattgttagatgaaccggcaagcgcgttagatccgatttcaacaggaacggttgaagaaacgttagtgaatttaaaagatgattacacgatcatcattgtgacacataacatgcaacaagcggcgcggattagtgactatacagctttcttctatatgggtaaagtcattgaatacgaccatacaagaaaaatctttacacgaccaaaaattcaagcaacggaagactacgtttcaggacattttggt

SEQ ID NO: 20787 - DNA, 1179 bp, Enterococcus faecalis
gtgtacagaatgaaacttcaagtaactaaaaaagcagaacataaatttaaaaaaggatatcctttaattcagaaagaagatttgcaacaagtgccagcgccgttgccaacagattggcttactttgattgatagtaaaggccagcgtttagccgaaggatatttaggcgaacaaaataaaggaattggttggttgctgtcatggcatggaccaattaatcaatctttttttcaacaactctttgaaataagtcgtgagaagcggacgtcttttgaaaaggattcgctaacaaccgcgtatcgattatttaatggagaaggggatggcattggggggctaatcatcgatcgctatgcagattacgccgttttttcatggtataatgaaaccctttatcagaaaaaagccgaacttttgacggcgtttcgcacagtttaccctgacattattggtgcctacgaaaagattcgcttttccacaaaagatttaccagaatcacagtttttgtatggcgaacaagcacccgagccattacttgtcactgaaaatggcgttcaatttgctacctatttaaacgaaggattaatgacaggcatctttttagatcaaaaagaagttcgtggtcgattagtagatggttttgcagtaggtaaaacagtcttaaatatgtttagttatacaggtgctttttcagtagctgccgctatggggggtgccgtggccaccactagtgtggatttagctaaacgaagcttaccgaaaacgactgagcaatttgaagtcaatcatttaaatcttgccccgcaaaagattattgttatggatgtttttgactactttaaatatgcttcgcgtaaaggcttgagttatgacatgatcattttggatccgccgagttttgctcgcaacaaaaagaaagttttttccgttgctaaaaattatggggagctagtgaaagattctattgatattttaacggataagggaacgcttattgcctcaaccaatgcggcaaatttatccttagccaaatatcaaaaaatggtgattactgccttgcaagagaaaaatgtccgttacaagattacggacacgtatcaattaccggcagactttcaagtgaatcctaattttccagaaggtaattacttaaaagtcctgtttatcgaaattgaaaaa

SEQ ID NO: 20788 - DNA, 2106 bp, Enterococcus faecalis
ttgaaaaaattatttaaaacaaatattttgaacacgcgactggggttattctcgctaatcgccatcttactgtggctaaaaaacctctttgcgtacgccgttgatttccatttacgtttggaaaatattaacgagtacttcatactcttaattaatccaattgccacaacggtctttttattagccatcgctttgtatgttcgccgtaaaaaagcttcttatattacaatgatgattatttacttcttgatgagtttactgctcttctcaaatgtcgtgtattatcgagaatttactgacttcatcacagttaatacgatgcttggtgctggcaaagtagctagcggtcttggcgaaagtgccttacgtctctttagaccttatgacgtcatttatttcttagacttcattattattggcgtattattattaacgaaaaaaattaaaacagatgcgcgtccagtccgcgcacgtgtagcagtctctgtcacactcctttctgttgtctttttcttattcaatctatttatggctgaaacagaacgtccccaattattaggacgtcaattctctcgtgactatatcgtgaaattcttaggcttaaatgcctttaccgtgtacgatggcattacgacttaccaaacaaaccaagtccgtgccgaagccagtgctaacgatatgaaacaagttgaagattacgtgaaacaacaatatgcggcacccgatgatagtaagtttggtattgcaaaaggcaaaaatgtaatttatatccatttagaaagtttccaacaatttttagttaattacaaattaaaagatgaaaatggcgtagaacacgaagtcacaccatttatcaatagtctttacaatagtaaaagtacctttagctttgataacttcttccaccaagttggtcaaggaaaaacaagtgatgccgaaacgttacttgaaaattcactatttggtttagaccaaggttcactctttacacaagttggtggcaaaaatacgtttgaagcagcacccgatattttaaaacaaacgcaaggttacactagcgctgctttccacggaaatgccggtaacttctggaatcgaaatgaaacctataaacgtttaggctatgactatttctttgatgctagttattatgatgttaattcagataactcattccaatatgggttacacgataaaccattctttaatcaatccgttcaatatttagaacatttacaacaaccgttctattctaaatttattgctgtgtccaatcattatccttattctcaatttacaaacgatgaagcaggattcccaattgcaaaaacctctgacgaaacaattaatggttactttgcaacagcgaattatttagataaagcggtcgaagaattctttaactacttgaaatcttcaggtctctatgaaaactcagtcattgttctttatggcgatcactatggggtttctaattcaagaaaccaaaacttagcagagttagtaggtaaaaccaaagcagattggaacgattttgacaacgccaatatgcaacgtgttccttatatgattcacgttcctggtcaagaaaatggcggtgtgaaccatacgtatggcggccaagttgatgccttaccaacccttctacacttgcttggtgtcgatacgaaaaactacattcagttaggccaagatttattctctaaacaacacaatcaaatcgttgctttccgcaacggcaatgttgtaacacctaaatatactattttaggttctagcatttacgatactaaaacaggcactttaattacagagccaaccgaagaagttaagaaagaagtcgctgatttaaaagccaaagcgacgaaacaattagaaacgtctgaccaaattactaacggtgacttgcttcgtttctataccaatagcggcttaaaaccagttaacccagaagactatgattacaagaaccaattgcaacaactggaagcaattgaaaaagaaaaaggtgaaaaatcaacgagtgtttacagtaaaaacaataataaatcaaccgttgatgaatatcacactgacagttatcaaggctatcaaaaaacgggtaaa

SEQ ID NO: 20789 - DNA, 1566 bp, Enterococcus faecalis
atggcagtaaagaaaaagaaagcgactttctgggagtttttccaaggattaggtaaaacgtttatgttgccagtggctttattagcttttatggggattttgttgggattaggaagttctttttccagtgaatccatgattgaaacgatcccgtttttaggaaagcccgcagtgaaaattattttccaatttatgtcgacaattggtggttttgcgtttgcctatttacctgtcatgtttgcaatggccattccgttggggttagttcggaaagaaaaaggaattgctgcgttttcaggtttcgtaggctatacggtgatgaatttagcgattaatttctatttagtgcagacgaatcgcctcgtggatcctgagcagttgcgggaagccggccaaggaatggtttttgggattcaaacgattgaaatgggtgttcttggtggaattatcgctgggcttattgtctataagttgcataatcgattttatacggtgcaactaccagatagttttgccttcttttctggcgcacggtttgtgccaattattacttcattagtaatggcattcgtgggcttagtaattccgttagtttggccacttttcgcgctaatgattatggcgattggccaacttatccaacgttctggtatttttgggccttttctgtttggttcaggggaacgtctactgttaccgtttgggttgcatcatattttggtttccatgattcgttttactgaagcagggggttcagcggtggtggctggcaaagaagtgtttggcgcgttaaatattttctatgcagaattgcaaaataatttaccgatttcaccaagcgcaacagctttcttgtcacaagggaaaatgccgacctttatttttggcttaccagcggcgtcacttgcgatgtatcatactgcagctccggcgaatcgacataagattaaaggcttactcctttcgggtgtaattgctacggctatcactggcattacagaaccaattgaatttttattcttatttattagtccattattatggctgtttcatgtcattatgactggtctaggtttcatggtaatggctttattaggtgttgtgattgggaacactgatggcgggctactggactttgttatttttggcttgttacaaggaacttatacaaaatggtggtgggttctcattgtcggcgctatctggtttgttgtttattatttcgtctttaaaacagtcattgtaacctttgatttaaaaacacctggacgagacaaggtcttagatgagactgaatataccgatcaagaagttcaatataagaaaacgggtggctatgatgcgcctgggattttagcggctttgggtgggcaagagaatattcaagctattgataattgcattacgcgtttacgtttagtgttagcagatgctaataaagtagatgatgacaaattaaagcaattaggggctttaggcgttgtacatttagatgcgcagaatgtacaagtgattatcggaaccaaagtgacaacggtccgtaatcaattagagatgattttaggt

SEQ ID NO: 20790 - DNA, 990 bp, Enterococcus faecalis
atggtaggaattatcctagcaagtcacggtgaatttgctgaagggatcttgcaatctggtgcaatgatctttggcgaacaagaaaatgtaaaagcagttacgttaatgcctagcgaaggtcccgatgatgtaaaagcaaaaatgcaagaagccattgcatcgtttgacaatcaagacgaagtactatttttagttgacctatggggaggaacaccatttaaccaagcgaactcattgttagaagatcataaagacaaatgggcaatcgttgcaggtatgaacttaccaatggttattgaagcatatgcttctcgtttctctatggaatcagcacaagaaattgcgacacacattcttgaaacagcaaaagatggtgtcaaagttaaaccagaagagttacaaccagcagaagcaccaaaagctgctgcgacagaagatgcacagccaaaaggttcgttaccaccaggtacagttgttggcgatggcaaaattaaatttgtgctagcacgtattgattcacgtttattacatggtcaagtagcaacagcttggacaaaagcaacacaaccaaacagaattattgttgtttctgatgccgttgcaaaagatgacttacgtaagaaattaatcgaacaagcagctcctccaggagtaaaagccaatgttattccaatcagtaaaatgattgaagtagcgaaagatccacgttttggcaatacaaaagcattattattatttgaaaatcctgaagacgtcttaaaagtggttgaaggcggcgtagaaatcccagaagtaaacgttggttcaatggctcactctgttggaaaagtcgttgtaagcaaagtattatcaatgggtcaagaagacgttgatacgtttgatgaattaaaagccaaaggcatcaaatttgatgtgcgtaaagtgccaaatgattcaaaagcgaatatggacgaaattttgaaaaaagcaaaaaatgagttagcaaacgcg

SEQ ID NO: 20791 - DNA, 885 bp, Enterococcus faecalis
atgattgtttcagcaattggacaaggaatgttatgggccttgttaggactaggtatttttatgacttatcgtattttaaattttccagatatgaccacagaaggttcatttccgttagggggggcggtttgtgtaactgccattacaacaggggtttcaccatttatagcgactcttttaggggtcggagcaggaatgcttgccggtttagtgactggtttactgtttacaaaaggaaaaattccaattattttagcaggaattttagtgatgtctggtttaaattccgtgattttatttgtgatgaagtcgccaaataagtctttattaaaccaaccgaagattcaagatgtttttcaaaaaatggccttacccgattattatgatactatttttttagggattagtgttttggctgtggtaatgattttactgttatttttctttaacactagtttaggacaagcctatattgcgacaggtgacaatgaagaaatggctcgctcgattggcattcaaacggatcgcatgaaaattttaggattggttttatcgaatggcttgattggcttatctggcgctttgattgcccaaaatgatggatatgcggatgtaagtaaaggaaccggtgtcattgtgattggcttggcttcactcattattggtgaagtactgtttggagaattaacgtttggtgaacggctgatggcgattgttgtagggagtattatttatcaactattgattttattagtgattaaattaggctttgatacgacgtatttgaaaatcttctcagcagtgattttagcaatctgtttaatgatcccacaattgaaaaaagcattacgactacacggcttttctgataagggggaaacgaaa

SEQ ID NO: 20792 - DNA, 1710 bp, Enterococcus faecalis
atgtcatttgatggcgtatttactcatagcatggttcatgagttgacagaaacactcgtaagtggccggatttcaaaaatccatcaaccttatgaaaacgaagtcgttttagtcattcgtgcgaaaggtaaaaaccataaattattattatcagcacatcctagttatgcgcgcatacaactatctacaattacctatagcaatccggaaacacctcctaattttgtgatgatgttacgaaaatttctagacggtgccattttagaaacgattcaacaaatagaaaatgatcgcgtgattcacttcaccttttcaaaaagagatgaactaggtgacttacaaaatattgttttgattgttgaattaatgggacgtcacagtactatcgttttagttaaccaatcttctggaaaaatcttagatgcgataaaacacattggaatgagccaaaatagttatcgttcgttgcttcctggagcaacttatattgaaccgccaaaaccaatgggacttaatccgctcacggcctcaaaagaagaagtctttgcgcttctttctacagctcctgaattaaacggacgctatttacaacaacatttccaaggtctaggcaaagatacagcagacgaattaagtgcccgtttacttgcacaaccaaatgaaaaaatggccatctggacggaattttggtcctcagtcactgaagctgttgtaccgacattaacagttactgaaaaaaaagaatattttacgcccattccttatcaatcattagttggtgaacaaacaacgtatgcgacactcagtgaattactagatgccttttattctggtaaagcagagaaagaccgtgtcaaacaacaaggcggcgaactaattcgcaaaattgaaaatgaactaaaaagaaatcaaaagaaacttaaaaaattacagcaaaccttagccgatacagaaaacgctgaaaattaccgtcgcgacggagaactattaacaaccttcatggcacaagtcccaaaaggagccaccgaggtggaattaccaaattattatgaagaaaatgcaccgttgcgtatctcgctaaatcctgcactttcacctaatcaaaatgcacaaaaatattttcaaaaataccaaaaattgaaaaatgctgtccgagttgttaaaacacaaattcagcaaacacaacaagaaatttcttatttagagtcagttgtggcacaacttgaaattgcgacaccaatggacattgaagtgattcgtgaagaactgattgaacaaggctatttaaaacgtaaaaaaaataaaaaacaaaaacagccgaaaaaaagccaacccgatcttttttatgccacagatggcacacctattctcgttggaaaaaacaatttgcaaaatgatcaattgactttacgaaccgctaaaaaaactgattattggctccatgccaaagatattcctggatctcatgtaattattcgtgacgcacatcctagcgaagaaacccttactgaagccgcacttctagcagcttatttttcaaaatatcgactttcttcacaagtgcctgttgactatgtccaagtaaaacatgtgcataaacccaatggagcaaaaccaggttatgtgatttatgaaaaccaacgaacgttatatgtgacgccaacagaagaatcgatcaaaaaaatccagcaaaataaggcttctgcttcc

SEQ ID NO: 20793 - DNA, 1629 bp, Enterococcus faecalis
ttgattactgttaatgatgtaagtttacaatttccagatcgtaaactttttgaagaagtgaatattaaatttactcctggcaactgttacggcttaatcggcgcaaacggtgcaggaaaatcaacgtttcttaaaattttatcaggtgagattcaaccgacaactggcgtggtttcaatgggtcctaatgagcgactagcaacgctgaaacaaaatcactttgactacgaagactacactgttttagaaactgtaattatgggacataaacgtctttacgaagtaatgaaagaaaaagatgctatctatatgaaagaagatttttcagatgaagatgggattcgtgccgcagaactagaaggcgaatttgctgaacttgacggttgggaagcagaacctgaagcagctgttttactccaagggctaaacattccagaagaattacatgatcaaaaaatgagcgaattaacagctggtcaaaaagtcaaagtattattagctcaatctctttttggtaaaccagatgtcttactattagacgagccgacaaatggtttagacacccgctcaatcaattggttagaagaatttttaatcaactttgaaaataccgttatcgtggtttcccatgaccgtcatttcctaaacaaagtctgcactcacatggcagatttagactttagtaaaatcaaactttacgttggtaactatgatttctggttggaatcaagccaactagcgacaaaattgcaagcacaatctaatgccaaaaaagaagaacaaatcaaagaattacaagactttatcgctcgttttagcgccaatgcctcaaaatcaaaacaagcaacgtctcgtaaaaaaatgttagataaaattaccttagatgacattcaaccttcctctcgtcgttatccattcgttggttttacaccagaacgtgaaatcggcaatgacttattacaagttgaaaatgtctctgtaacgattgatggcaaaaaaatcttagataatatctcgttcaacttaacaaaagatgataaagtggcattcatcgctgactcagatattacaacgactacgttattcaaagtgattatgggcgaaattactcccgatacaggttctgttcgttggggcgttacaactagccaagcttatttaccaaaagacaacagcaaagactttgaagagccattaaccattttagattggttacgtcaatttgctggtaaagaagaagatgacaatacgttcttacgtagtttcttaggtcggatgttattctctggtgaagaggtactaaaaccagtcaatgttctttccggaggcgaaaaagtgcgtgtcatgctttcaaaattaatgctttccaaagccaatgtcttagttttagatgatccaacgaaccacttagacttagaatcaatcactgcattaaatgatgggttgatggctttcactggttcaattctttttgcttcacatgaccaccaatttatccaaacattagcgaaccgaattattgctgtttctgataaaggggtcattgatcgggcagaaacaacctatgatgaattcttggaaaacccagaaattcaaaaacaaatggacgttttattcagttcagattat

SEQ ID NO: 20794 - DNA, 1290 bp, Enterococcus faecalis
atgtcatcagtagtagttgttggaacgcaatggggcgatgaaggtaaaggaaaaattacagactttctaagtgaaaacgcagaagtgatcgctcgttaccaaggcggagataacgccggacataccattaaattcgacggcgtaacgtataaattacatttaattccttcagggattttctataaagaaaaaattagtgtaattggtaacggcgtagttgtgaatccaaaatctttagtaaaagaattagcttatttaaaagaaaataatgttgccactgataatttacgtatttcagatcgtgcccatgtcatcttgccgtatcatattaaattggatcaattgcaagaagatgcgaaaggtgaaaacaagattgggacaacgattaaaggaattggcccagcctacatggataaagcagcacgggtgggaatccgtatcgctgatttattggataaagaaatttttgcggaacgtttgcaaattaacttagaagaaaaaaatcgtcaattcgttaaaatgtttgatagcgaagccattgaatttgatgatatttttgaagaatactatgaatacggacaacaaattaaacaatatgttacagatacttcggttattttaaacgatgcattagatgctggaaaacgggttttatttgaaggggcacaaggtgtcatgttggatatcgatcaaggaacctatccatttgttacttcctctaatccagtagctggtggcgtaactatcggtagtggcgttggtccatcaaaaattaataaagtggttggtgtctgcaaagcgtacacttcacgtgtcggtgacggcccattcccaacagaattatttgatgaaacaggagaaaccattcgtcgtgtcggtaaagaatacggaacaacaacaggacgtccgcgtcgtgtcggttggtttgattcagtagtcatgcgtcattcaaaacgtgtatcagggattacaaacttgtcattaaactcgattgacgtgttaagtggtttagaaacggtgaaaatttgtacagcttatgaacttgatggtgaattaatttatcattatccagcaagcttgaaagaattaagccgctgtaaaccagtttatgaagaattaccaggttggtctgaagatatcactggttgcaaaactttagccgatttaccagctaatgctcgtaactatgtgcatcggatttcagaattagttggtgtgcgcatttcaacattctctgtaggtccagaccgtaaccaaacgaacgttttagaaagcgtttgggcacaaatt

SEQ ID NO: 20795 - DNA, 1365 bp, Enterococcus faecalis
atgaatgaattattgcaagatagggtaccgccacaaaatattgaagcggaacaagccgttttaggttctattttcttagatgcagatgtgctaatagaagcgatggaatatgtggaacctaaagatttctatcgtcgtagtcatcagttgattttccaaacgatgatgaccttaagcgaccgaaatgaagcgattgatgtggtaacaatcaaagatcgcctagaacaagagaatttgttagaagatgttggtggactaagttatctgtcagatttagctttagctgtgccgacagctgccaatgtcatttattatgcaaaaattgttgaacaaaaatcgttgctgcgcaacttaatccaaaccgctacagagattgtaactaaaggctttgagcaaggtgaagatgttgaatctattttggatgatgcagaacgaagcattttagaagtctccgaaaagcggaatcgtagtggctttttatcaatttcagatgttctaaatacaactattgcgaatattgaccaattataccaaaatgatgaagagattactggtttacctacaggctatcaagcattggataaaatgactgctggcttgcaagcggaagagctaattattctagcggcccgtccagcggtagggaaaaccgcttttgcattaaatattgcccaaaatgtcggcaccaagacagataaagctgtcgctatttttagtttagaaatgggggcagaatcattagtgaaccggatgctttgtgcagaaggatccattgaggccagccatttaagaacagggcaattatctgaagaagaatggcaaaacttaattattgcgatgggtagtttgtcccgtgcgaatatctatattgatgacacaccagggattaaaattaccgaaattcgtgcgaaatgtcgtaaattagcacaagaaaaaggcaacttaggtctaattttgatcgactacctacaattgattgaaggaactggaaaagagaaccgccaacaggaggtttctgatatttcacgtcaattaaaaaaattagcgaaagaattaaaagtcccggttatcgctttgtcacagctttctcgtggcgtggaacaacgtcaagataaacgtcctgtgttaagtgatattcgtgaatcaggttccattgagcaagatgccgatatcgttgcctttctttatcgtgatgattactacgatcgtggtgaaggagaagacggtgatcatgagccaccagaagttgacaatgttgtagaagtcatcattgagaaaaaccgtagtggtgcgcgtggaacggtcgaattacttttcattaaagaatataataaattttcttcgctttcgccgaggacagaattt

SEQ ID NO: 20796 - DNA, 450 bp, Enterococcus faecalis
atgaaagtcatttttttacaagacgttaaaggaaaaggaaaaaaaggggacgtaaaagaagtgccaactggttacgcccaaaactttttaattaaaaatggttatgcgaaagaagccaataaagggagcatgagtgcgttagcgggtcaaaagaaagcccaagaaaaacatgaagcagaagttttagcacaagcaaaagaaatgcaagcctttttagaagatgaaaagactgttgtagaaatcaaggcaaaagctggagaagacagccgtttatttggctcaattccttcaaaacaaattgcagaagccttaaacaaacaatacaatgtaaaattggataaacgcaaaatcgaattagccaacccaattcgttctctaggttacactaacgtaccagtcaaactacatcatgaagttacagcgaaaattaaggttcatgtcgtagcggaa

SEQ ID NO: 20797 - DNA, 1974 bp, Enterococcus faecalis
atgcaaaagaagagaattcaaaaaaacggtttcttaattgttgtgggtcttctcttagtagaatttctcctctatttcttactaacaaataaatggctgctattggcggtaattatcgcattagatatctttctcttagtggttattcggctgttgattagagatgtagaaattacgaacgtagaaaagattcaagaagcaagttccattgctgaacaatcgttggattatgttgtaaatgaagtacctgtgggaattattacgtataacggggaaacacgcgcggtagaatggcttaatccttatgctgcttctatttttaataaagacaatcagctaacgttaaccgctagccaagttacgtcttatttagaattagcagaacgaaaccaagatatttttacgattgacgaaaatacctatcgctttagcgtcaataaagaacaacatacaattacttttgaagatatcactaaagaaagtaatttgtatcaagaaaaagtcgaaatgcaaacggctattggcattgtgtctgtcgataattatgatgatgtcaccgatacaatggatgagaaagaaatttcttatttgaatagtttcattacgacgatggtttctgattggatggaccaatacaaagttttttataagcgaatcaacgcagaacgttattttttcattgcccaatgggaagatattcaaaaaatgatggacgaaaaattttctattttggatacgatccgtaaggaatcagctaaccatgaagtagccattacgttaagtatggggattgcttatgggggcccaaccttagatcaaaccgggaccacggctcaaacaaacctagatacagctttagttcgtggtggtgatcaagtggttgtaaaagaagccaaagatgaagcgaagccgttattttttggtggaaaaacggcagtaacgacgaaacgttcccaagtacgttctcgcgcaatgagcatggcaattaagggaattattgcggaatctgctgacatctatattatgggccatcgttatccagatatggatgcgttaggttcagcatttggtgttgctcgtttagcctcgtttaataatcgaaaagcgtggattgttttagatgaaaatgaaatcattcccgatgtcaaaagagtgttagaggcgattaaagagtacccagaattagaagagcgcattattagtcctaaagaggccatgaagcgcaagaaagaaagtagcttattagttatggtagattaccataaaccgtctctatcgatctcacaagagctctatgagcgttttgataaagtagtaatcattgatcaccatcgacgaggagacgaatttccagcaaaacccttgctttcttatattgaatcttctgcctcttctgcttcagaattagtcacagaattgatcgaatatcaaagtaatagcgcaaataaactgcaggcctttgaagcaaccatgatgttggcgggaattgtggttgatacgaaaagtttcaatacacgaacgacggcgcgaacatttgatgtggctagttatttacgaacttgtggagcagactcatctttagtacaatatctattaagttctgatcttacaagctatctggaaatgaacaatttaatctctaaaagcgaatatgtcacaaaagataccgtcgttgttgcagggagtgaagacaaagaatatgatagtgtcacagctgccaaaacagcggacacattactttctatggcagggattaatgcagcatttgtcattaccaagcggacggatcaacagattggcattagtgctcggagtaatggttcaattaatgtccaaattattatggaaaatttaggtggtggcggtcactttactaatgcggcagtacaattatcaaacgtaacagtagcagaagtaaaagagcaactacttgatgtaattcgtcaaaatattaatgaaatgtatgaacaggag

SEQ ID NO: 20798 - DNA, 2148 bp, Enterococcus faecalis
atgaaagaaaatcaactgattcaattagtcgaagaaatgacaattgatgagaaaattaatcaattattacaattagcagcagcgttttattcagataaagcagaagaaaagaccggccctatgtcagagctaggactaagtcaagaaacgattgatacggcggggacaacactgggtgtttccggtgcaaacgaagcaaaacgtgttcaaaaagaatatatgcaaaatcatcgattaaatattccaacacttttaatggcggatattattcatggtttcagaaccatctttccgattcctttggctttaggaagcacttgggatgaagcagcggttgaaaaaatggcggagatttcagcaaaagaagctgctgtttcaggattacatgtaaccttttcaccaatggttgatttagtgcgcgatccacgttggggacgtgtcatggagtcaacaggtgaagatccattactcaacagccgcttagctgctgcaatggttagaggttaccaaggagaaaatttaaaagaagacaattggcgagtagccgcgtgcgtgaagcactttgcggcatatggtggtgccttagctggtcgggattataatacggtagatatgtctgaacggcagctaagagaaatgtatttacctggctataaagctggattagatgcgggtgcaaaacttgtcatgacgtccttcaatacagtggatgggattcctgctacaggcaaccaatggctgtttagagacgtattacgaaatgaatttggatttgaaggggttgtgatttcagactggggagcgattaaagaattaattcctcatggcgttgccaaagatgaaaaacaagcggcagaattggctatcaaagctggtgtagatattgaaatgatgaccacgtgttatccagattatttaaaagaattacttgaagaaggccggattgctgaaacacttattgatgaagcagttatgcgaattttaaaactaaaaaatgagctaggcttatttgaaaatccctatcgtggtgcggatgaacaagcggaagcagaagtgattttaagcaaagaacatcgagaaatagctaaaaagattgctcaaaaatcaatggttcttttaaaaaatgaaaatattttgccttttacaccgcaagaaaaaatcgcgcttgtcggcccaggggcccaatcacaagatattttaggggcttggtcatggcaaggaaagaaagaagaagccatttccctcgtggctggggcccaaaaattaaccacaaatcttctagttgcccaagaaccctttgattactttgaaccgaccgcggcggccattgaagaggctttaacgttagctagtcaagcagataaagtagtagtggcactaggcgaaacagattggatgagtggggaagctgccagtcgcagtgatattcgtctacccgaaaaacaattagcggtagttgcacaaattattgagaaaaatcccaatgttgttgtcacggtctacagtggccggcccttagatttgcaagggatagatgttgcaaaaggaattgtgcaagcttggcaacctggaacagaagggggcaatgcgctagcagaaattttgtggggacagtacaatccaagtggtcgtttaagtatgtcgtttccagaaacggttggtcaagtgccaattttttacaatgtcgacaatactgggcgtccttatgagtcagcaccagaagaaaaatatgtttctaaatatttagatgtctctaattacgctaaatatccctttggatttggcttaagttatagtcatttctcttatcaaccaattcaactaagtgcattaacatttaccaaagaacaaccagtcacggtctctgttttagtaagaaataacagtccaatcgctggagaggaaaccgtgcaattttatgtacgtgatttggtgggacaagtggttcgcccaattaaagagttaaaagatttccaaaaagtttggctggaaccaaaggaagaaaaagaagttcagtttcttctttcagaggatatggtgcgctatgttcattcagacaatcaggtaaccagtgatgcaggtgaatttatcgtaatgattggtggaaatagtcgcgatgtacaaaccgcaacagtcacgttaaatgaa

SEQ ID NO: 20799 - DNA, 2499 bp, Enterococcus faecalis
atgagtgaagaaattaaagaaaacattcaagacgtcaatctgaccagcgaaatgaaagaatctttcattgactacgcaatgagtgttatcgtagcccgcgcgttacctgacgttcgtgacggtttaaaacctgttcatcgccgaatcttatatggaatgaacgaattaggggtaacccctgataaaccacacaaaaaatcagcccggattgttggggatgttatgggtaaatatcacccccatggggacagtgcgatttacgaatcaatggtgcggatggcacaaccttttagttatcgggctatgttagttgacggccacggaaacttcggttccgtcgatggtgacggcgctgccgctatgcgttataccgaagcacgtatgagtaaaattgctttagaaatgctacgagatattaacaaaaatacagtcgatttccaaggaaactatgatgattcagaacaagaaccagtagttttacctgctcgttttccaaacttactagttaacggaacaacggggattgcggtggggatggcaacaaatattccaccacacaatttaagtgaagtgattgatgcaacaagtttattgatggacaatcctgatgtaacgacgaatgaattgatggaagtgttacctggaccagattttccaacaggcggtttagtgatggggaaatcagggattcgccgagcatatgaaacagggaaaggttcgattactgttcgtgcaaaagttgaattgactgaaatgccgaatggaaaagaacgtattttagtaactgaattgccttatatggtgaataaagccaaattaatcgaacgaatttctgaattacacagagataaacgaattgaaggaattactgatttgcgggatgaatcttctcgtgaaggcatgcggattgtcatcgatgttcgtcgagatgtgagtgcctctgttgtgttaaacaacttgtacaaaatgactgccttacaaacatcttttggttttaacatgttagccatcgaaaaaggcgtaccgaaaattttaagcttgaaacgtattttagaaaactacgtcgagcaccaaaaagaagtcattactcgccggacgatttttgacaaaaacaaagcagaagcacgggcgcatattttagaaggtctacgaattgccttagatcatatcgatgaaatcattgccattatccgtgggtcacaatcagatgacgaagcaaaagcaacgttaattgaacgctttgaattttcagatcgtcaagcgcaagcgattttagatatgcgtttacgccgtttaacaggcttagaacgcgacaaaattgaaaatgaatatcaagagctattgaaattcattgcggacttagaggacattttagcccgcccagaacgcgtcattgaaatcattaaaacagagttaaatgacgttcgcacaaaatttggtgatgcacgacgcacagaattattagtaggtgaagtcctaagtcttgaagatgaagatttaatcgaagaagaagaagtcgtgattacattaaccaataacggctacattaagcggatggcaaactccgaattccgggcgcaacgccgcggcggacgtggtgtccaaggcatgggcgttcatgatgatgatttcgtgaaaaacctagtttcttgttcaacacatgacacgttattattctttacgaacactgggaaagtttaccgagcaaaaggttacgaaatccctgaatacggtagaacagcaaaaggaattccagtgattaacttactgggaattgattctgcagaaaaaattcaagcgattatttctgttgagggcaaagcggaagcaggtaaatacttgttcttcacaaccttaaaaggaaccgtcaaacggacagccgtaacagccttttctaatatccgtagtaatggattaatcgccattagcttaaaagaagatgatgagttagttaacgtagtaacgactaatggcaatcagaagatgattatcggaacacatgcaggatactctgtcacatttgatgaaaatactgtacgtgatatgggccggacagcatcaggtgttcgtggaatccgtctccgcgaaaatgattatgtggtcggcgcagcgattctggatgaaaataaagaagtcctagtcattactgaaaatggttatggtaagcgtacaaaagcctctgaatatccagttaaaggacgtggcggtaaagggattaagacagcaaatatcactgagaaaaatggtccattagctggtttaaccacggtcaatggtgatgaagatatcttattgattacgaacaaaggcgtcattatccgctttaacgttgattctgtttctcaaacaggacgcgcaacattaggggttcgtttaatgagaatggaagatggtgccaaagtggtaacaatggctgttgtagaaccagaagaagtggaagaagaaatcgttgaagttgtagaaacaacagaaaacgaaacaacatcagaaacagaagaa

SEQ ID NO: 20800 - DNA, 1128 bp, Enterococcus faecalis
atgaaattaacggtcaaacgaagtgtctttttacaagaattacaaactgttcaacgagcaatttcttctaaaacaacgattccaatcttaacaggtgttaaaattgtgttatcagaagatggcttatcacttactgggagtaacgcggatatttcaattgaaagttttttaagtaaagatgatgaaaaagctcaaatgaccattgaacgcacaggtagcatcgttttacaatctcgtttctttggcgaaattattcgtaaattaccagaagatatgttcacaatggaagttctagataacaatcaagttgcaattacttcaggaaaagctgattttacggttaatggattagatgctgataattatccgcacttaccagtaattgatactcaaaaccaaatgaaattacctgttcatttattgacaaaaattattagtgaaacaggttttgctgtatcgatgcacgaaagtcgtccaattttaactggggttcactttattttagaaaatcaaaaattacttgccgttgcgacagattcacatcgtttaagtcaacgtgtgatcccgacagaacaagcagtagaagactttaacattgtaattccaggaaaaagtttaactgaactttctcgttcattaaccaatgaagaagaaatggttgaaatcagcattatggaaaatcaagtgctatttaaaacagaaacaatgtacttctattctcgtttgttagaaggaaattatcctgataccaaccgtttaattccaactagccataacacgcaaattgaattttatgtaccagaattgctttcagcaatcgaacgtgcctctttactttctcatgaaggacgtaacaatattgttcgcctttcaatttcaccagattctgttgttttatatggaaattcacctgaaattggaaaagtcgaagaagctttaaactatgaaaatgtttctggtgaagcgttggatatttctttcaacccagattatatgaaagatgcgttgcgagcgtttggcgatatgaatattaccgtgaaattcctttctccaattcgtccgtttacattggagccaaccgaaacagaactagatttcattcaactaattacaccggttcgtacaaat

SEQ ID NO: 20801 - DNA, 354 bp, Enterococcus faecalis
atgaaaaagtcctaccgtgtcaagaaagaaaaagaatttcaacaggtgtttaataaaaaacaatcttgtgcaaatcgtcgtttcgtggtgtacgttttagagaaaccacaacaagcccattttcgagtggggatttctgttgggaagaaaattggaaacgcggtcacaagaaatgctgtgaagcggaaaatccgcgcgagtttatttcaattaaaagaccgtatctctccagaaattgattttatcgtgattgcacgtccaggattggaaaagttatcgtctgaagaagtgaaagctaatttaacacatgtgttaaatttagctaaaatattagatgtaagagagggaattgag

SEQ ID NO: 20802 - DNA, 825 bp, Enterococcus faecalis
gtgaagaagtataagcgcttattattaatggctgggttagtgaccttagtttttgttttatccgcctgcggaaccgcgcccgtaagtgaaagtagtacaggaatttgggatcgatacattgtttattattttgcccaagcgattaagttcctatcattaggcggcagtgtcggaattgggattatcctatttacgttagtcatccggattattttattgccgttgatgcatttccaaacgaagagtatgcgtaaaacacaagagttgcaaccgcaattaaaggccttgcaacaaaaatactcttcaaaagatcctgaaacacaacgcttattccgagaagaacagcaacgtttgtatgcagagaataatgtgaatccttacattggctgtttaccactgttggttcaactaccaattatgatggctttgtatcaagccatttcacgcgtgcctgagttaaaagaaggaacgttcttgtggttaagcctcgataagccggatccgtatttaattttaccgattttagcggctgtctttacgtttgctagtacgtatctttcaagtatgagccaactagaaacaaatgcctcactaaaaattatgaattacgttatgccagcgatgatcttctttatggggatttcattagccagcagtttatctctttactgggtggtctcaaatgccttccaaacagggcaaacattgttattaaacaatccattcaaaatccgtaaagagcgggaggaagcagcacgtcaagccaaagcacgggagcgagcgcttgaacgagcaaaaagtcctaagaaaaaagggaagaaaaaa

SEQ ID NO: 20803 - DNA, 693 bp, Enterococcus faecalis
atgaatccaacggttgaagcagtaaaacggaacttagatttaactagcagtaaacctctaaaaatttgtacctatgaagcctttaaaaaaaccattattttaggggatattcctgcaggtgaacggattaacgaaaaagaattttccgagcaattaaacattagtcggacgcccattcgctttgctttacaagaattagttaaagaacaattggtggaacatatacctatggtgggtatcgtggttaaagggatcagtatgaaagatgcttatgaaatttatgatattcgtaaatctttggacactttagcaaccattaaagccatggaactcatgacaccagaagattttgatgaattggaagccttacttctcgaaggagaacaatacaataaaaataaccaagtagatgacttactacagaacttttcagattttaattcctttatttatactaagagtcagatgctacgtttaaaaaaaattgtgactgatctccatgcttacttaatctatttcagagatattgcgattcgtgcctcagaacgtcgtagtattgccctagaagaacattggttaattttccgcggaatgaaaacaaagaatattgaccagatcacacttttaacccatgaacatctaaatcgttcgcttcaatttattttgaaagaaatggaacgtcggcaaattgaa

SEQ ID NO: 20804 - DNA, 1782 bp, Enterococcus faecalis
atggaatcggacgatgaatcaatagttttagaaaagagggacaaaatgaacgtcgatgtattactaaaaaatgtgtggctgtatcaaacagtcactcaaacattcgttcaacgaaatgttgcgattaaaaatgataaattttattacatttatgaagaagagaacgtcaatttgcagccccaaaaaacaattaatgccgagaatcaatggatgattcccggcttaattgatgcacacatgcatattgaaagttccatgacgacacctactattttttccaaagcagtagtgcgttacggtgtgacaacggtgattgccgatgcccatgaaatggctaacgtatttggcttagaaggcttaaaagcttttatggccgctgaaacagaactagatatctttcacgcaattccttcctcggttccttcgaccactcccgaattagaaacaactggtgggattatcggcttagcagaagtagcagaattactcaaagagccaaaagtgatttgtttaggggaagccatgaattttaaagggatttcctatgagccagattctttaattcgtcaaattatcgatttgtgtcaaaaacaacgaccaaccatgcctttagaaggccactgtcctaaaatcgaagatcaagagttagcagattttctatatagtggtatcacttcagatcatacccatcaatttcctaaaacgttaaaagaaaaaattgaagcgggcgtctttattcaatttcaaaataaatcaatcactcctgaaaatattcaggtgatagtagacaatgacttctacaattatgcaagtattatcacggatgacgtgatggctgatgatttgctaaaaggtcatctaaatgaaaatgtcaaaaaagctgttcatgcagggttgcctatcgaaaaagccatttatatggcaacttatacgccagccaaacgaatgggtctccatgatcgcggcgaaattgcacctggtaaaaaagctgactttttgttattaaatgacttagaaagttttgatattaatacggtttataaatctggaaaggtcgtttttgaaaaaggcgagcccttccattatccagaaaaaatcgaagagtttccagccacttatcaacaaaccatccaatgtaaaaagttaacagaagaagatttacttttaaaggtggctacaacaaaagaaacagttcgttgtaatgtgattcaaaaacaagaaattggcacatttacagagcgaattacaaaagaaattcctgttgaaaatggattgttgcaatggcaaaaagccaactgcgccttattaattgtgatggaacgttacggaaaaaatggtaatatttctttttctttaatggatcaacctctttccgagaaaggagccattgcgacaacctgggcccatgatcatcataatttaatggtgatgggtaatacgattgaggatattctgttagcgcagaatgaattattagcgatgcaaggcggctatttggttgcttcggatcagcaagtgatggcaacttgtcctttaccaattggtgggattttatcgcaagcaccgattgaacaattaggcgcttctttacaaaaagtccgacaagctatgcaagcgttaggctatcaaaatatgaatgaaatcatgtccttttctacactatcattacctgtctcgccagccattaaagtgacagattttgggatgatggatacgaagtcacaacgtttctatccattagtttttccagaggatggagttcttttgcatgaaaacactcat

SEQ ID NO: 20805 - DNA, 702 bp, Enterococcus faecalis
atgagcgaacaatatgtttatcaacatggtacgctaggcggtttaatggaaagtttgatggcaggaacggcagaaattggtacgttactcacgcaaggtgattttggaattgggacattagaaggctcaaatggcgaaattattttattggacggtacattgtatcatgcaaatcaaactggcgaaattactattctagaaggcgaagaattaacgccatatgccgcagttactcgttttcaagaagatggcgcattccctgtatcaacggaaaccgatgaaaatattaaagcacaaattttagaaaaaattagtcctaatttttttgcggcaattaaaattagcggtctttttgcgaagatgcatgtccgtgtggcacctaaacaagaaaaaccgtatccaccatttgtagaagcagcacgcaatcaacctgaatttacagcggagaatattcagggaacagttgtagggttctttacacctaaattatttcatggtgcctctgccgcagggtttcatttgcactttatcagtgaggatcaccaatttggtgggcacattcttgattttggcattaaacaagggactgtttcgtggatggaaacagcagaattgcgacagcattttccagttcatgatgctgattatcggaataaagaaattgatattgcaaaagctttgtccgcaattgaagaagcggaa

SEQ ID NO: 20806 - DNA, 1395 bp, Enterococcus faecalis
gtgagtaaaaaaattcgttttacagaaacggtgctacgggatggacaacaaagtttaattgcaacacggatgccaacctcagatatgctgccgattattaaaacaatggacgaggcaggatttcatgcattagaaatgtggggcggggcaacgtttgattcctgtgtccgctatttaaacgaggatccttgggaacgtcttcgccaaattcgcaaagaagttaaaaataccaaacttcaaatgttattacgaggacaaaatttactaggatatcgtcattacgctgatgatgtggtgcgggcctttgtcgaaaaatcagttgaaaatgggattgatattattcgtattttcgatgccttgaatgatgtccgtaatttacaaacagcaattcaaacaacaaaagaagctggcggacactgtcaagcagcgatttcttatactacgagtgaaattcataccatcgattactttgtaaaattagccaaagaattaagtcaaacaggagcggattccatttgtattaaggatatggcaggcgttttgacgccacaaactggttttgaattagtgagcaaaatgaaagatgccattgatttacctttagaggtgcatacgcatgcgactagtggtatttctgagatgacctatttaaaagttgctgaagcaggtgcggatatcatcgatacagctatctcttctttcgctggcggtacgagtcaaccagccacagaatctgtagccattgcgttagaagatttaggctttgaaacaggtttaaatatggaaaaagtaacagagattgctgactatttcaatccgattcgtgatcgctttagaagtgaaggcattttaaaccctaaagttaaagatacggaaccgaaaaccttgatttatcaagtgcctggtggtatgttatcaaacttattaagtcaattaacggagcaaggtttacaagacaaatatgaagaagttttagctgaagtacctaaagtaagagcagatttagggtatccaccactagttacgccgctttcacaaatggttggaacacaagccttaatgaatgtgatttctggggaaagatattccttaataccgaatgaaatcaaagattatgtgcgcggagaatatggcaaatcaccagcacctatcgcagaagagattaagcaaaaaatcattggggatgaagaggtaatcacttgtcgaccagcggatttattgaaaccagagttgcatagtttagaaaaggaaatccaacaatatgcaaaatctgaagaggatgtcctattatatgcgatgttcccgcaacaaggaaaagactttttaggacgtcgtgaagatcctttttacgatgtaccgttacagaaagtgacagtcaaacttgacttgccagaa

SEQ ID NO: 20807 - DNA, 1650 bp, Enterococcus faecalis
gtgagtaaaaaaggatcagatatcatagtagaaagtttaatcaatcacgaagtgccctatatttttgggattcccggtgcaaaaattgatggggtttttgatgcattagttgacaaaggtccagaattaattttagctcgacatgaacaaaacgctgcctttatggcacaagggattggtcgtttgacgggagagcctggcttagttattgcaactagtggacctggtgccagcaatttagcaactgggttagtaactgcgactgcagaaggggaccctgttttagcattggctggacaggtgaaacggtccgatttgtcaaaattaactcaccaaagcatgaataatgctgcattatttagtccaataacaaaattcagtacagaaattcaagatccagaaacattatctgaaaatattgccaatgcttaccgtatcgccaaaacagcgaaaaaaggcgcaacattcttatcgatcccacaagatgtcacagatagtccggtgacaggcgaagcaattaagcctttgtcggctccgaaactgggccatgcatcagcaggaacaatcgcagctttagctgaacgaatcaagcaagcgaaattacctgttttacttttaggaatgcgggcctctgcacgaaaagttaccgcagccattcgtgaattggttgctataactggtttgccagtcgtggaaacgttccaaggagcaggcattatttcaaaagaattagaagaacatttctttgggcgtgttggtttatttcgaaaccaacctggggaccgtttgttaaaaagaagtgatttagtgattgcgattggttatgacccaattgaatatgaggcacgtaattggaacgcagaaaaagatgcgcgcgttattgttattgatgaagttcaaatggaaattgatcaatatatgcaaccggaagaagagctaattggtgatatgtctaaaaatattttgaaattatcagaagcatttagtgaaccaatattaacagaagatgcgcaagattatttagaaacgcttcaagaaaaattaacgattaaagaagtaaaaacaagtacaattgaaaatcgattacatccattagaaattgttcaaacgcttcaagaaaaaaccacgaatgaaatgacagttactgttgacgtagggagtcactacatttggatggctcgccactttagaagttatgaaccgcgtcatttattatttagtaacggcatgcaaacattaggtgtcgctttgccttgggcaatctcagctgcactagttcgtccaaatacacaaattatctctgtttctggggacggcggtttcctattttcggcgcaagaattagaaacagcggttcgtttaaagcaaaatatcgtgcatattatttggaatgatggtagttatgatatggttaaattccaagaagaaatgaaatataatcgatcctctggcgtagattttggtccagttgattttgtgaagtatgctgaagcttttggagccaaaggggttcgagttcattcacaagcagaatttgccgcagctttagaagaaggaatgcaaacagaaggcccagtgattattgatgttcctgtggattattcagataatcaagaattaggtaaaacattgttaccagatcaactttat

SEQ ID NO: 20808 - DNA, 909 bp, Enterococcus faecalis
atgtcaaaagggaagaaaatttttgccattatctttggaattatcttggttctatttcttgcagttgttggaatgggagcaaaactttattgggatgtttctaaatcaatggataaaacctatgaaacagtagaacgatctaaaaaaagtcaggtcaatttaaacaataaggagcctttttctgttttattattagggattgatacaggcgatgatgggcgtgtcgagcaaggtcgttcggatacaacaattgttgcaacagttaatcctcgtgacaagcaaacaaccttagtcagtcttgctcgcgatacctatgttgatattccaggtcaaggaaaacaagataaattgaatcacgcctatgcttttggtggcgcatctttagcaatggacacagttgaaaactatttaaacatacctattaatcattatgtttcaattaatatggctggtttaaaagaattagtcaacgcggttggcggaatcgaagtgaacaataatctgactttttctcaagacggatatgattttacgattggtaaaatttcattggatggtgaacaagcactctcctattcaagaatgcgttacgaagaccctaatggtgactacggccgccaagaacgtcaaagaaaagtgattgaaggcatcgtccaaaaagtcttaagtcttaacagcgtaagcaactatcaagaaattttaacagctgtttctgataatatgaagacagatttaagttttgatgacatgaaaaaaattgccttagattatcgcagtgcctttggtaaagtgaaacaagaccaacttcaaggtactggttttatgcaagatggtgtttcctatcaacgtgtggatgaacaagaattaactcgtgtccaacaagagttgaaaaatcaattgaatacaaaa

SEQ ID NO: 20809 - DNA, 1548 bp, Enterococcus faecalis
atgaagcgtggcgggaaattatggtgtttcttatcagtgatttttattgcaacattaattattatgattactttcttttacggagtaacgacggttcaaacaattaaagaagttcgtaaaaaccaagagcaagcacttttagccgtcggggaacagttggctattgaaccgaatgttattgaagccttaaagaatgatcactattcagatgaattggaagcgtatacggttcgtttaggtgaaatccatcagttggattttatcgtgattatgaatatgcaggggattcgtttaacacatcctgatcgccaaaaaataggtaagcattttgaaggtggcgatgaagtgcgagcattaaaaggggaggaacatttgtctgttagtcaagggagtttaggagaatcattacgaggttttgtcccagtctatgatcaaggaaaacaaattggggttgtggcaatgggcattaaaatgacctcgctttcacaattgattgaacgaacaaaaaatgattacacagtgagtgtccttttaagtgttggttttggctttatattagccatcgtggtttcttattatttaaaaaaacaacttcacgatttagagccaagagaaattgctcgtctattagaagagcgaaacgccatgcttgaggaaacgaaagacgcaatccttgtgattgataccgatcaaaatattttattagcaaatattgaggcgactaaaatgtatcataatataacaaatagtgaagaaaatttactaggaaagaaactttcagcattggttttatctcctgaaaaattagtcgtacattcaaaaacagagcaattctatcgtcaaaatggccaggattatttcgtctcaatcgccccgattaatgtccgtaaaaaaacaattgggcatgttatctttctgaaaaatgcgacagaaacgtttattgtcgcagaacagcttgtcagcacaacaacatatgcttcggcattacaaagtcaatcacacgaatttatgaataagatgcatgtcatttatggcttagtcgatttagaagattatgaggcgctaaaacattatctagccgatttattgaaaccagaaaaggaatttgcacagcgcttagctattttggtcagaaatcctattctagcaggttttttaagtggggaaagaatcaagtttgcagaaattaaaacacaattagctattgaaatttatccagaaattccaccaaataaacgagatgaagatacgcaaaatttgattgctatctaccgttatattcatcgtttcctgatggagcaaacgttgccagaagagatcattgaaaccattgattatcagccaggaagtttgacgacgacttattcgtttgcttatccaaaagaacaactggaacgctttgagcaagagtttttcacttcttatttggcaagattattagagaatgcggaagcgacattgacttgggaaaaccaacaaaacaattggcttgtccttcgcataaatgttcattacgaaggagcagaggaaaatgaacctattgattat

SEQ ID NO: 20810 - DNA, 357 bp, Enterococcus faecalis
atgcacatagccgataattatcgagctttgaatacatcaagggagagaagaagaatgacagaacataaccacgatcatgatcacgaaggacatgaacacattactttagtagacgaacaaggaaatgaaacattatacgagatcttactaactgttgacggtcaagaagaattcggtaaaaattatgttttattatatccagcaggaattcctgaggatgaagatgttgaattgcaagcttactcctatgtggaaaacgcagaaggtacagaaggcgatttacagcaaatcgaaacagacgctgaatgggatatgattgaagaagttttcaatacattcatggctgaagaagaagag

SEQ ID NO: 20811 - DNA, 420 bp, Enterococcus faecalis
atgaggatcatggggctagatgtaggttcacggacagtcggtgtggctgttagtgatttattaggttggacagcacaaggcatcgaaattattcgcatcaatgaagaggaagagaacttcggttttgagcgattaggtgaattggtgaaagaatacgaagtcacgaaatttgtcgtaggtttaccgaaaaacatgaataattccatcggtcctagagctgaagcatccatggcatatggtgataagattcaagaattatttcaattacctgttgactatcaagatgaacgattaacaactgtccaagcagagcgtttcttggtggagcaagcagatgcttcaagagccaaaagaaaaaaagtgattgataaactagcggcagtaatgattctacaaaattatttagatgcacatagccga

SEQ ID NO: 20812 - DNA, 267 bp, Enterococcus faecalis
atgggttttacagacgaaacagtacgctttgattttgatgataatcgaaaaaaagcaatcagtgaaacgttagaaaccgtatatcgggcattagaagaaaagggatacaatcctattaaccaaatagtagggtatttactttctggggacccggcttacattcctcgttatcaagatgctcgaaacttaattcgtcgtcatgaacgtgatgaaatcatggaagaattaaccaaatattacttagcgaaccacggaatcgatatcaaa

SEQ ID NO: 20813 - DNA, 5184 bp, Enterococcus faecalis
atgaaaaagaaaattgttgaggattttaatcggaaaagtcagcataaaaaatggacaaaacgcaagatgcttaatttagcaatatcaagtggtttattatttacgtcattagcaatccctgtaagtatagctgttacctctggcacaatcagtgcatcagcagcggtcttggatatcgaactattatcaaatgttacgtcaaataatgacagtggcacttcaacgagtaatcgttggacagccgcaaaccaaaatcaaccagttaatttcacggtttctggtggcgctttagcagatgcttccgctgtgtttagtggacaaaaacaagcggtgttagtggttcctcctgagttaagaggaaatgtagctgcagcaggcagcgcagcaatcaataccaatgtcacgattgatctttcaaaagttacttttttgactgccgttttgaatgcagccaatgatttaaccaatgtgattactcaaattaccagtggggcgttagggaatttaactggtgttgatattgatttgacggaagtgaatcgtcaattggaattagttaataacattgaaaacttaggtgctgcttcatttacagctccggaaacgttagcagctgacggctcatacattagtgcaccgattagtgatggtttagggttagttttagcccaaaatgtttcaaacatcttacaagatttgaatgcggcagttcaagctttggaggcaaaaggtaccagtatcccaagtaatcttgtcgccgcagctataaatgcagccttgcttcctgtcaaaggcacggtaaacgtggctgtttcaggtgctttgcctttattagcggttggtggttcaggcgtaaatgagttagtggatgcttctttactaggcacaaccacggttactttaccaactaccgtttcaacacctcaaaatttatccaataatttagatgctcgttttgtaggaacagtcgttcaaacagatcttttagacgttaatttattagcaacagcagacggtgtatccaacatttattttgctgcaggcactactagtgaagtaaccgcaccaacaatcacaggagtaacaggtaattcaacagcaggttacgaagttaaaggaactgccgatgccaatgccacggttgaaatccgaaatgcaggaggcaccgtaataggcacaggtaccgctgatgggacaggagcgtttacagttaccgttcccgcaggtgaagcaggcgccaatgaaacgttaaccgccgtagcgaaaaacgccagcggcacagaaagcacgccaacaacgttccaaacgccagcggatgaagcaaccgtaaccgcaccaacaatcacaggagtgacaggtaattcaacggcaggttacgaggttaaaggaactgctgatgccaatgccacagttgaaatccgaaatgcaggaggcaccgtaataggcacaggtaccgctgatgggacaggagcgtttacagttaccgttcccgcaggtgaagcaggcgccaatgaaacgttaaccgccgtagcgaaaaacgccagcggtacagaaagtacgccaacaacgttccaaacaccagcggatgaagcaaccgtaaccgcaccaacaatcacaggagtgacaggtaattcaacggcaggttacgaagttaaaggaactgccgatgccaatgccacggttgaaatccgaaatgcaggaggcaccgtaataggcacaggtaccgctgatgggacaggagcgtttacagttaccgttcccgcaggtgaagcaggtgccaatgaaacgttaaccgccgtagcgaaaaacgccagcggcacagaaagtacgccaacaacgttccaaacaccagcggatgaagcaaccgtaaccgcaccaacaatcacaggagtgacaggtaattcaacagcaggttacgaagttaaaggaactgccgatgccaatgccacggttgagatccgaaatgcaggaggtgccgtgataggtacaggtactgctgatgggacaggggcatttacagttaccattcccgcaggtgaagcaggtgcgaatgaaacgttaaccgccgtagcgaaaaacgccagcggtacagaaagtacgccaacaacgttccaaacgccagcggatcctaatacgcccgtggcgacgccaattgttgagactgtaacaggtagtacaacaaaaggctatgaggtcaaagggactgctgaagttggcaccaccattgaggttcgcgatgcagctggcacggtccttggtactgcaacaactggaactgacggaaaatatacagtgactttagattcaggaacagcaacagcaaatcaaacgctgagcgttgtagcgaaaaacgctagtggcacggaaagtcaaccagcaacggcgacaacaccagctgatgtcactgcaccaacagttgataacatcacaggcaactctggttcgggttatgaaattacaggaacagcagaccctaacacaacaatcgaagttcgtgatccatctggggcagtcattggtacaggtacctctgatgcgaatggtgattttactgtaacgctaccaacgggaacgaccaatcctggggatacgttaacagtgattggaaaggataacgcgggaaatgaaagtcaaccgactgaagtccttgttcctgctgatgccacggttacagcaccaactgtaacaggagtaacaggtaattcagttgctggttatcaggtgacaggcaccgctgatccgaatgctaccatcgaaattcgtgatgcagatgggaacgtgattgcaacagggactgccgatgggactggttcctttgctgtgaaccttccagctgggacggcaaatgcgaatgaaacattgacagcgttagccaaagatcctgctggcaatacaagtacaccgacaaccttccaaacaccagcagatgaagtagtggcaccgccaagtgtcgacaaagttactgggaatacaacacaaggatatcaagtgacaggtaccgctgaacttggcaccaccattgaagttcgtgcaacagacggaacagttttaggcaccgcaacaactggaccgactggccaatatactgtgacgttagcttcaggaaaagcaacagctaaacaaacagtgaatgtagttgctaaaaatgatactggacttgagagtcaaccaactacagctatgacacccgctgatgttaccacaccaacaattggtgacattactggagattcaacaactggttatgaaatcactgggacggcggaccctaataccaccattgaagtacggaacccagatggaacaattattggtacaacgacaacggatgatcaaggaaactttactgtggaccttccagcgggagccgctaatcctggtgatacattaacagttgttggaaaagacggtgacggcaatgaaagtcaaccaacggaagtgacggtccctgaagatgcaaccgtagcagcaccaactgtgacgactgttacaggaacaactgccactgggtatcaagtaaccggcacggcagagccaaatgtcaccattgagattcacaatgaagcaggtttagttattgctacgggaacgactgatggtgctggcgcatttacaatcactcttccgacgggcacagcaacagctaacgaagccttaactgccattgcgaaagatgctgctgggaaagaaagtaatccgactgctttcaaaacacctgctgatccagatgcaccagtcgcgacacctactgttgacaaaatcactggtagcacgacaaacggctatcaagtagtaggagcagcagaagttggtacaacagttgaggtgcgtgacgccgatggcacagtccttggcatggcaactactggaactgatggcaaatacacagtgactttagagccagggaaggcctcagctaacgaaacaataactgtcgtagcgaaaaatgcaacaggaaaagaaagtcagccagctacagcaactacaccagtcgacttagccacaccaaccattgattctattaccggaaattctagtaaaggttacgaaatcactggaacggcggagccaaaaaccactattgatgtccgtgacgcagacggaaccatcattgctgctacaactgctaacgaaaccggccaatatacggtgactctaccagctggcgtagtgacaccaggagaaacgattacgattattagcaaagatggcgcaggtaatgaaagtcaaccagctacagccgttattccagcggatgttgttttagcggcgccaactattacgaaggttgaaggaaacaaagccaatggctatacagtcactggaactgctgatccaaatgtcacggttcaattttacaatagcagtgaacaattattggcaagtggcaatacaactactggaggtaccttctccgttcatattgcagcagggttagcaacagaaaaagaaacgttaaccgcactaaccacagatacacaaggaaatgtgagtcctaaaaccacatttatgacgccagccgatattacgggagaaccagagattaaaattgcggcaccaactgtttcttcagttttaggaacgtctaaagccggctacctcatcaaaggaacagctgaaccaaaccgaatcattcaaattagtaaccgactattaagaagtgtgattgctgtaggtgccaccgatgctgaaggcaacttcgctatccaattaacagcgggacaagcgactgctcaacaaagtttacttgcgacagctaccgatggcgcaggacattacagtacggctacaaccttcatgacgccagccgacccaacgaatcctggaggaggcaatggtaacactggcggaaataacggcaatacaggcggcaatacaggaaacaatggcgcaactggcgggaataatgggaatggttcaaacacaggttcaaatccaaatggaggttctggtttaggcacaacaggttctggcttaggttcactaggcaatggcctcggtacaaatggtagtggctaccaccctaaactaagtaccatcagttatggcactggaaatcacgggaaaacaggctacttacctagcacaggtgaaaaagagtcttcagccgtgacaacaagtttgtttggcgcctttgtcgcactccttgcgagcatgggaatcatcaaacgcaaacgtaaaaac

SEQ ID NO: 20814 - DNA, 1395 bp, Enterococcus faecalis
atgcaatcagctacaatggaatttgatacaattgcggcgatttctacgccgccaggtgaaggtgcgattagtattgttcgtttaagtggcgagcaagcagttgctattgcaaacaaagtttatcggtcaggcactaaagatttagctaaagtccccacgcacacgattcattatggtcatattgttgatccgcaaaacgatcaattgattgatgaagtcatgctttctgtgatgcgggcaccgaaaacatttacacgagaagacgtggtagaaattaactgtcatggcggcattgtcgtggtgaaccaattattgcaattactgttacgtgaaggcgcacgaatggccgaacctggggaatttacaaaacgtgcttttctaaatggccgaatggatctttcacaagcagaagcagtgatggacttaatccgtgccaaaacggataaagcgatgaatgttgcattgaaccaattggatggtaacttgtcgacgttaattcgttcattaagacaagaaattttaaatactttagcacaagtagaagttaatatcgattatccagagtatgatgatgtcgaagaattaaccacgaaattacttttagaaaaagccgaatttgtgaaagcgcagattcaacaattattaacgaccgctaaacaaggaaaaattttgcgagaaggcctaagtacagcaattattggccgaccaaatgtcgggaaatccagtttgttaaaccatctgttacgagaagaaaaagctatcgttacagatattgctggaacgacacgtgatgtcattgaagaatacgttaacgttcgcggcgttcctttaaaattaattgatacagcggggattcgcgaaacagaagacattgtggaacgaattggtgtcgaacgtagccgcaaagcgttagcagattcggatttaattttgttagtcttaaatcaaagcgaagaattgacagaggaagatcgtcaactgttggaagcaacgaaaggcttaaaacgcgttattcttttaaataaaatggacttaccgacaaaactggatcctaacgaattacaagaattagtccctgcagaagaaattttatccgtttcggtgttgtcaaacacaggcttagaccagttagaagcgaaaattgctgatcttttctttggcggccaaacaggcgaaaaagatgctacctatatttctaatacacgtcatattgctttgctggatcaagcagcgctttcgttacaagaagtgattaacggcatcgaagcaggtatgccagtcgatttagttcaaattgatatgacccgttgttgggattatttaggggaaatcgtcggcgatagtgtccaagatgaattaattacacagttatttagtcaattttgtttaggaaaa

SEQ ID NO: 20815 - DNA, 1896 bp, Enterococcus faecalis
atgaatcaatatcaagcagaatcatatgatgttattgtcgtcggtgctggacatgctggctctgaagcagccttagcagccgcacgaatgggcgttaaaacgttacttttaacgattaatttagatatggttgcttttatgccatgtaacccttctgttggtggacctgccaaaggagtcgttgtccgagaaatcgatgcattaggcggcgaaatgggtaaaaacattgataaaacctacatccaaatgcggatgctaaatactggtaaaggtccagcagtgcgtgcgttgcgcgcgcaagctgacaaacatgcctatgcgacagaaatgaaacataccattgaaaaagaagaaaatttaacccttcgtcaagggattgttgaagaattaatcgtggaagatggcgtttgtcgtggtgttgtaacttcaacaggtgccgcataccgtagtcaagcagtggtgattactgccggtactgccttgcgtggcgaaattattattggtgaattaaaatattcatcaggaccaaacaattcgcaaccttccgttggtttagccaatcatttaaaagaattaggtttagaaatcgatcgctttaaaacaggaacgccgccacgagtaaaatcaagtacgattgattattctgtgacagaggaacaaccaggcgataaagaacccaaccactttagttacagcacgccagatagtgcctacaatcaaaaccaagagccttgttggttaacttatacgaatgaaacaacgcatgaaattattcaaaaaaatctacaccgcgccccaatgtttactgggattgtggaaggtgtgggcgctcggtattgtccatccatcgaggacaaaattgttcgttttgcagacaaaccaagacaccaattgttcttggaaccagaagggttgaataccgaagaagtttacgtccaaggcttatctacttctttaccagaagatgtccaaacagaaatgcttcattctattgaaggattagaaaaagtagaaatgatgcgtacaggttacgccattgaatacgatgtggtagtccctcaccaattacgcccaacattagaaacaaaggtcattgaaaatctttatacagcaggtcaaacgaacggaactagtggctacgaagaagctgcgggtcaaggcttgatggcaggaattaatgctgcattgaaaattcaaggcaaagagcctcttgttttaaaacgtagtgatggctatattggcgtcatgattgacgatttagttacaaaaggcactaacgaaccttatcgcttattaacgtcacgtgcggagtatcgtttgattttacgacatgacaatgcggacttacgtttaacagaaatgggtcatgaaattggcttagtcaaagaagaacaatatgccgcctatctagtcaaaaaagcggctgttgaagcggaaattgcccgcttaggcaaacatcggattaaaccaaccaaagaagtgcaagcatttttggaaactaaaggcgctgctggcttaaaagatggtattttagctagagattttctgaaacgcccagaaatcagttatcaagaagtcgctcaatttattcccgcacctgaagaggcgctcgatccgaaagtaattgaacaagtagaaattcaaatcaagtacgaaggctacattaaaaaagccatggaaaaagttgagaaactaaaacgcatggaagcaaaacgcattccagaaaacattgattaccaagcgattaacggcttggcgacagaagcaaaacaaaaactacaaaaaatccaaccagaaacgattgcccaagcaagccgtatcagcggtgtgaaccccgctgacattagcattttgatggtctacatcgaacaaggaaaaatcgcgaaagtgcaagga

SEQ ID NO: 20816 - DNA, 483 bp, Enterococcus faecalis
atgagttttatctacgtattcggggcgctttttttaacagcttacttcgttcagatagctatgggaatgaaacagattaaacactttaatcaaaactaccaagaattgcgacaattagggaaagtcgcgattggtcgacgtgcagggaagttaaaagcaggcacgattatcttgtttgctgtggattcgcaagggaaaatcttagccgctagaaagatgcaaggtgtcaccgttctagctaaatttcatcccttacctcagtacgtgaacgaggatattcattatatggatcattaccatccactcgtacaaaaggaaaataaattaacccaacaagcgatggaaaatgcacgagaaatttacttacgtgttgagcttggcaattatcaagaaacacaaccattaacgccgcttaatggagccaaaattcaatggcaattatggaaaaataaagtacaaacaaaattgaaaggaagtgtcgag

SEQ ID NO: 20817 - DNA, 878 bp, Enterococcus faecalis
cggaccagtattttacgaaaattcaattggattttaacgaaaataagatacgttttttagattatgatcaagccaacgtctatgaagcgcccatgactgtcaataaggcgcgcttaatgggaattatcaataaagagggattacaatatcaagacgtttccgaaaatacgctaaccaaacaagggcaatgttatttaaccaatgatatgaagttgaaaaagtacagttatatcttagcttcgcaaccagttactcgttttaggaatgcttttttcaatgaaacggaagatatccaaaccaatgaagacagtcaagacttaacctacacgagtaaagaagaacgattgtttgcagaagaaaaactgggaaaaattgattttaaagggaccttgccagaagagaataaacgggactcaatctataatcaaagcttttcttatgtaaaacgtttaggaaccaatatggggaatttgcgttactttgatcgaacgaaagatagtgtcaattatcggacttttgtggaaggtttcccagtgttcagtaatgatttaaaaggccaagtggatattcgcatcacgaacaacgatggtgctgcaccaagcgtaaccattaacacaagtgtgaatacgatccaagtgccgattccttcagaagaagaagtgacgctggaaagcacggaaaaattgattaagcgtttagaaacggctggtgctaaaaaggaaaaaattcaatcggctgttatcggttatacgtggcagacaattgaagaagtcaaacaagtcgttgatttaagtccggaatggtatgtcctttataacaacaattggtacactgcaacggacttggtaaaacaattaccaagcttggaggtgggctaa

SEQ ID NO: 20818 - DNA, 675 bp, Enterococcus faecalis
atggaatttatgctagatacaattaatcttgaggctattcgaaagtatcagaaaattttaccactggcaggcgtaacgtctaatcccagtattgttaaacaagcaggaaaaattgacttctttgcgcagatgaaagaaatcaaaaaaacgattggacaagcgagtttgcacgtccaagtggtcggtcaaacgacagaagagatgctagaagatgcccaaaccattgtacaacaattaggccaagaaacattcattaaaatcccagtcaatgaagcaggcttggcagccatcaaacaactaaagcaggcaaattatcggataacagcaaccgctatttatacagaatttcaaggttatctagcgattgcggcaggtgcagattatttagcgccatattataataggatggagaatttaacaattgattctcaaaaggttattgagcatttagctgcagaaattaaacggacgaacgcaaagagtaagatcttagctgctagttttaaaaacgtggcacaaattaatcaagcctgtcaaatgggggcgcaagcggtcactatcgcaccagaactcgtgacacaaggcttggcaatgcccgccattcaaaaagcagtaactgattttcaggaagattgggttgctgtttttggagtagaaacggtaaacgaattagca

SEQ ID NO: 20819 - DNA, 1770 bp, Enterococcus faecalis
atgagatacacaaatggaaattatgaagcatttgctcgaccaagaaaaccaaaaggtgtagatgacaagagtgcctatatcgttggtggtggcctagcaggtttagcaacggctgttttcttaattcgtgacggtcaaatgaagggcgaaaatattcacatttttgaagaactcacgctgtctggcggttctttagatggtaaatttattccccatgatggctttgtcactcgcggcggacgcgaaatggaaaaccatttcgagtgtttgtgggatctatttcgttcggtaccatcattagaagtagaagatgcctctgtcctagatgagttttaccggttagatttagatgatccgaattcttcaaattgccgcattattcataaccgtggcgaacgtgtccccgatgatggacaatttactttatccaaaaaagcacaaaaagaaatcgttgatttatttatgacttctgaagatcaattaattggcaaaaaaattgaagatgttttcggcgaagaattttttgaatccaacttttggatctattggtgttcaatgtttgcttttgaaaaatggcactctgccattgaaatgcgccgttacatcatgcgctttatccaccacatcaaaggtttgcctgactttacagccttgaagtttaccaaatacaatcaatacgaatcgttagtgaaaccattattaagctttttaaccaatcaaggggtagactttcaatatgaaacaacgatcaatgatatccaagtcgacatcaaaggagctactaaagttgctcggcgattattgttgacacaagcgggcaaaaccaaagaaattcctttaactgaaaatgatttagtcttcgtaacgaatggctcaattactgaaagttcgacgcaaggagatcatcatacaccagcaccaattactcatgaactagggggaagttggaatctctggaaaaacttagcaaaacaatccccagaatttgggcacccagaagttttctgtgaaaatttaccagatgaaagttggtttgtctcagcaacgattacgtgggaaaatttcgatattgaaccgtatctttctcggttaacacatcgtaaattacgcacaggaaaaattgtcacaggtggtattattactatcaaagactctaattggatgatgagtttcgctatgcatagacaaccgcattttaaagaacaaaatgatcaacaatctataacttgggtatatggattgctttctaataaaccaggaaattatatcaaaaaaccaatcgaacaatgtacaggccaagaaattacgcaagagttactttatcatttaggggtcccggaaggggaaattgaacgtatttcagaagaatcggctaccactattccggtttatatgccgtttatcacttcttactttatgttaagagaaccaggcgatcgaccattagttgtaccaaacggctctaaaaatcttgctttcattgggaacttcgcagatactgaacgagatacggtgtttacaacagagtattctgtacggacagcgatggaagctgtttatcaattgctagaggttgaacgcggagtaccagaagtgtttgcttctgcatacgacttgcgcgtcttagcaaactctgtttattatttatctgacaagaaaaaattaacagaaatggatatgccgttcgtggaacgcaaaatggttgaacactttgtgaagaaatttgaggatacgtatattggtgatattttaagagaaaatcatttaatt

SEQ ID NO: 20820 - DNA, 714 bp, Enterococcus faecalis
atgctacccgaagaatttagacaactattagccgcaaaaggcattgaattgacagaccaacagatgacacaatttgaccaatatttccatttactagtagaatggaatgaaaaaatgaatttaacagccattacagaagaaaaagaagtttatttgaaacatttctatgattctgtttcgttggcattctttgaagactttgccagtgacaaagccatttgtgatgttggcgcaggcgcaggatttccaagtattcctttgaaaattgtttttccttcattaaatgtcacaattgttgactctttaaataaacgaattactttcctaacagagttggtgaatcaactaggtttggctaatgtttctttgtatcatgatcgtgcagaaacatttggtcaaaaagcagaatttcgtggcgcgtttgattacgttacagcgcgagcagttgcacgattaaatgttttaagtgaactgtgtttacccttagttaaaaaagaaggctattttttagccttaaaagcatcgaaaagtgaagaagaaattaatgaagcaaaacctgcaatcgctacattaggcggtcaatttcaaaaagaagttggttttactttgccgattacggcagacgaacgccacattgtcgtgattcaaaagaaaaaagaaacccctaaaaaatatcccagaaaacctggattaccaaataaacaaccgattaaa

SEQ ID NO: 20821 - DNA, 759 bp, Enterococcus faecalis
atgacacgaattatttctgtagcgaaccaaaaaggcggcgttggtaaaacaacgaccactgtaaatttaggcgcatgtttagcaaacttaggcaaaaaagtcttactgatcgacattgatgcacaaggaaatgctaccagtggcatgggtgttcctaaaccagatgtcgcacacgatgtgtatgatgtccttgtaaatgaagaaccaatcactagcgtggttcaacataccagccgtgaaaatttagatattgtccctgcaactattcaattagcaggcgctgaaattgaattaacttcaatgatggctcgagaatcgcgcttgaaattagcaattgatgaagtaagagacatgtatgatttcgttttaattgattgcccgccttctctagggcatttaacaatcaatgcttttacagcaagtgattcgattctaattcctgttcaatgtgaatattacgcattagaaggcttgagtcaattgctaaatacgattcgcttggttcaaaaacattttaaccctgaattgaaaattgaaggggtcttgttaaccatgtacgatgctcggaccaatttaggtgccgaagtcgttgaagaagtccgtaaatatttccgtgaaaaagtctatgatacgattattccaagaaatgtccgtttatccgaagcaccaagtcatggtttaccaatcattgactatgatattcgctcaaaaggtgccgaagtgtatcaagcactagcaaaggaagtgttggagaatgaa

SEQ ID NO: 20822 - DNA, 183 bp, Enterococcus faecalis
atgtatgatttaggcgatattgtcgaaatgaaaaagccgcatgcttgccaagcaaatcgttggcaaatcattcgcatgggcgctgatatcaaaatcaagtgcacgaattgcgggcatattgtcatgatgccgcgtcgtgattttactaaaaaattaaaaaaagtaatcgagaaaaaagcagac

SEQ ID NO: 20823 - DNA, 1113 bp, Enterococcus faecalis
atggcactaacagctggaattgtcggcttaccaaacgttggtaaatcgaccctatttaacgcaattacaaaagcaggagcagaagctgcaaattatccctttgcaacgattgatccgaacgtcggcatggttgaagtaccagatgcccgtttacaacgcttgacagaactagtaaaaccgaaaaaaacagttcccacaacgtttgaatttacagacatcgccggaattgttaaaggtgccagtaaaggagaagggctaggaaatcagtttttaagtcacattcgtcaagtagatgcaatctgtcacgtggttcgttgttttgatgacgaaaatatcatgcgtgaacaaaatcgggatgcggatttcgttgatcctttagcagacattgatacaattaatttagagctaattttagcagatttagattcaatcaataagcgctatactcgcgtggctaaaatggcgaaagcaaaagataaagaagcggtggaagaattagctgttttagacaaaattaaaccagttttagaagaaggtttatctgctcgtacgattgaatttacgccagaagaagagaaaattgttaaatctcttttcttattaaccacaaagccggtcctttatgtagcaaatgtttcagaagatgaagtggcggatccagacaacaacgagtatgtacaacaagttcgtaattttgcaaccagtgaaaatgcggaagtaatcgtagttagtgcgcgagcagaagaagaaattgctgaattggattctgaagaagacaaggctgaatttttagaagcaatgggcattgaacaatctggcttagatcaattgattcgtgcggcttacgatttgttaggcttagctacctactttacagctggtgaacaagaagttcgtgcatggacgttccgtaagggaatcaaggcacctcaagcagctgggattatccacagtgactttgaacgaggcttcattcgtgcggaaacagtttcttatgaagacctagataaatatggcaatatgcaagctgccaaagaagcgggccgtgttcgtttagaaggaaaagactacgtcgttcaagatggcgatgttatgttgttccgttttaacgtt

SEQ ID NO: 20824 - DNA, 663 bp, Enterococcus faecalis
gtgaaaaaagcaatagcagaatgtttaggaacatttattcttgtcttttttgggacaggaacagccgttctaggaaatggtatggaagggattggaacaacggggattgccttagcatttgggttaacaatcgttgctgctgcctatagtattggcacaatttcaggtgcacatctaaacccagctgtttctataggaatgtggcttaataaacgaatgacaacaatggaactaatctactatgtagtgggacaaattgttggtggcttgattgcctcatttgctttattaagcattctaaaaggtgctggtaaaagtattgagaacttaggtcaaaatggcgtaggggaattaagtgttgctggtgcattgacagtcgaaattattttaacatttatttttgttttagttgtcatgacagttacaagtgctaagaaaggcaatgcttcattagcaggaatcgtaattgggttaacactaacaatgattcacttagtcggcattcctttgacaggaacttctgtcaacccagctcgtagcatcgcgccagccgtttttgcgggtggttcagcgttatctgagttgtggatttttatcgttgcgccattaattggtggattattagccgctcttgtagcaaaattcgtcttagatacggaagaa

SEQ ID NO: 20825 - DNA, 627 bp, Enterococcus faecalis
atgacagacaaaaagacaaccgaaaaaaaagaaacagaaactgctgcaacctttacagaagaactaacagcagttcttgaagaaataaaagaagaacctgtaaaagaaaagaaaaaaggggaaattgtcaccattgtgaatgaaacagatattcaaattggtgaaagagagtaccgaattgttaaaaatcatcgtgatgcctttgatcctgaacgcttaggtgaacggtttagtgaagtattagctcgttatgattatatcgtaggagactggggctatgaacagttacgcttgcgtggcttttttgatacttctaatcgtcgggcagcgccggatcaacgcattgatacactagaagactatttgtatgaatattgtaattttggctgtgcctattttgtaattgaacgaacaggggaacgtaaagaaaaaacaacgcatcgtcgtcgtcgccataaaaaaaataatcgttctaacgcgtttgtcgaggaaaagagtgcgcccgctaataaaaatagcaagccagtgattcgtacgagaaaagaagaaaataaaaaaacgactacacccaaacagcctagtcccaaaaaatctggcaaaggctttacgattcgtcaacgtgaggag

SEQ ID NO: 20826 - DNA, 1065 bp, Enterococcus faecalis
atgggaaaagaatatcatgttgccgtggtaggagcaacaggtgctgtcgggacaagaatgattgaattgttagcagaaacaagtttgccaattgccagtgtgaggttattggcgtctaagcgttctgctggacaagagattcagtttaaagggcaacctcttatcgtggaagaattagtcccggaatcatttgaaggaatcgatttagcattatttagtgctggtgggagtatttccgaaaagtttgcaccagaagcagttaagcgcggagctgtcgttgttgacaacactagccattttagaatggcaaaagatgttcctttagttgttccggaagtgaacccggaagccttgaaaaatcatcagggaatcatcgcaaatcccaattgttctacgattcaaatgatggtggccttagaaccaattcggcaagcgtttggcttagaacgaatcatcgtttcaacgtatcaagctgtgagtggcgcaggtatccgtgcaattaatgagctaaaagaacaagccgaagattttttagagggaaaacctgtcagcgaatggtcagctgaaattttaccagctggcagtgacgaaaaacattatccaattgcttttaatgcgttgcctcaaattgatgttttttcagaagcagggtatacctacgaagaatggaaaatgatgaatgaaacaaaaaaaatcatgggagacaacaagctaaaagtcgttgccacctgtgtccgtattccggtaatttcaggacattctgaatctgtttatatagaagtgaaacaagcagatgcatcggtctcagccatccaagaattaatggcgcaagctccaggtgtaattttgcaagatgagccaagtgaacaactatatccacaagcgctaaatagcgtcaaccagaaagaaacatttgtcggccgtattcgtcaagacgttgacgtgaagaacggtttccatttatggattgtgtcagacaacctattaaaaggagctgcttggaactcggtccaaattgctgaaacgctacacgaaatgaatttgcttcgtgtacctgaaaacgac

SEQ ID NO: 20827 - DNA, 1269 bp, Enterococcus faecalis
atgttagatgtaaaaatgatgcgtcaaaattttgacgaagtaaaagcaaagctacaaacccgtggcgtgaaagaagaaatcttagtggaatttctgcgtttagatgaaagtcgccgtgatttattagtcaaagtcgaagaaatgaaaaaataccggaatgatgtgtctgctgaaattgctcaattaaaacgaaacaaagaagatgcaacggccaaaatcgcggaaatgaaagaagtcggcggcaatattaaagcattagatgcagaaattaacgctattgacgaagagctacgtgggatcacaactactttaccgaatttgccagatgattctgtgcctgttggtgctggtgaagaagaaaatgtagaagtacgtcgttggagtgaaccaagaacttttgcttttgaaccaaaaccacactgggaagtcgctgaaaacttaggcattctagattttgaacgtggtgccaaagtagctggtagccgttttgtttattacaaaggcttaggtgcacgcttagaacgtgcgttatacaacttcatgttagatttacatgtttatgaacatggctatacagaaatgattacgccttatatcgttaatgacaccgccatgttcgggactggccaatttcctaaatttaaagaagatgtcttccaattacaagatacggatttaacgttaattccaactgcggaagtccctttaaccaattactacaacaatgaaattttagatggcaaggatttaccgatttactttacggccttgagcccttctttccgttctgaagctggtagcgctggtcgtgacacacgaggattaattcgtttacaccaatttaataaagtcgaaatggttaaatttagtgatgcagagcattcttatgaggaattagaaaaaatgacgaataatgccgaagaaattctgcaaaaactgggattaccttaccgtgtcatggctctttcaacaggtgacatgggcttctcagctgcgaaaacttatgacttggaagtttggattcctgctcaagagacgtaccgtgaaatcagttcatgctcaaactgtgaagatttccaagcgcgccgtgcgatgattcgttaccgtgatgaaaatgataaagtccaatatgcgcatacactcaatggttctggtttagccgtaggacggacagtcgctgctattttagaaaactaccaaaacgaagatggctctgtaactgtaccagaagtcctagttccttacatgggtaacctaacagttattaaa

SEQ ID NO: 20828 - DNA, 2493 bp, Enterococcus faecalis
atggatgaactatttacagaaagtgcgaaagccgtactggcgattgcccaagaagaagcgaagtattttcgtcaccaatccgtcggttctgaacatttattattagcactcgttttagaaccaaatgggattgccggaaaaacattacgacaattgaatactgacacagaagacatccgtgaagaaattgagcatttaagtggctatggcaccatgcaaagtccaatgggaaataacaacttatacttaccttattcaccaagagccaaacaaatctttgcctatgctggagatgaagcgaagcgcttaggggctcaaaagattggtaccgagcatttattattaggcttgttaagagacgaagaaattttagcgtctagaattttagtgaatttaggattaagcttatccaaaatgcgtcaattattattgaaaaaaatgggcgtttccgaacccaatggcgcacaacgtcgtcggaatggtcaaaataaaaatgcgccacaagggacgccaacattggattctttagcaagagatttaaccaagttagcacgagaacaaagcttggatccagtagttggtcgcggtaccgaagtccgtcgtttgattcaaattttgagtcgccgtaccaaaaacaatcctgtcttagtcggtgaaccaggtgttgggaaaacagcgatagcagaagggttagcccagaaaattgtcaaccgagaagtccctgaagatatgcaaggcaaacgtttaatgatgctagacatgggtgccttggttgctggaaccaaatatcgaggtgagttcgaagatcgcttgaaaaaagttgtcgatgaaatctatcaagatggacaagtcattttatttattgacgaattgcataccttgatcggtgctggcggtgcagaaggggcgattgatgcttcaaatattttaaaacctgctttagcacgtggcgagttgcaaacaattggtgcgacaactctggatgaataccaaaaatatattgaaaaagatgccgctttggaacgtcgttttgcccgtattcaagtagcagaaccaaccccagaagaagcagaagaaattctaaaaggcttgcgttcccgctatgaaaaacatcatggcgtagaaattacagatgaagctctacatgcagcggttcaattatcgattcgctatttaaatgaccgccaattaccagataaagcaattgatttaatggacgaatctgcagcaaaagttcgtttagataaggcagatcaaccttcagaaattaatgaattgcgtaccgaaatttctcaattaattacggaaaaagaagaggccattcaaaaccaatcatttgaaagtgctgctcggattcgtcaaaaagaaaaacaagtgatggaaaaactagaagaattgattgcagtgaaagaaaaaagtctgtctggttacagtacacaagtaacagaagaagacgtggctggggttgtttcacaatggacaggcgttcctttgcagcagctagagaagaaagaaagcgaacgattgatggaattagaaaccattttacatcaacgggtcgttggccaaaatgaagcagttgaagctgtttcacgcgctatccgtcgtgcgcgtagtggcttgaaagacccagcaagaccgattggttccttcatgttcttaggaccaacaggggttgggaaaacagaacttgccaaagccttagccgaagcgatgtttggcagcgaagaagctttgattcgcgtggacatgtctgagtttatggaaaaatacagtactagccgtttaatcggttctcctccaggttatgtcggctacgaagaaggcggtcaactaactgaaaaaattcgtcaacgtccttattccgttattttgctagatgaagtagaaaaagcccatccagatgtctttaatattttattacaagtcttagatgatggccatttaacggatgccaaaggacgaaaagtcgattttcgtaacacgattttaatcatgacctccaatttaggggcaacagcgattcgtgaagaaaaacatgttggcttcaatgtgaaagacatttctaaaaatcatgaattaatgcaaaaacgaatcatggaagaattgaaaaaagccttccgtccagaattcttaaaccgaattgatgaaacggttgtattccattccttgaaacaagaggaaattcatgaaatcgtaaaaattatgagtcaatctgtcgtgaaacggatggctgaacaagaggttaaagtgaaaatcacaccagctgcaattgaagttattggtaaagtcgggtttgatccagaatatggcgcacgtccaattcgtcgggccttgcaaaaagaagtggaagatcgtttaagtgaagcccttctttctggtcaaattcagttaggggataaagtaactttaggcgctagcaaaggcaaaattacgttaaatgtgcgggcaccaaaagcaccaaagacagaagcgaaagaattacaaactgta

SEQ ID NO: 20829 - DNA, 1008 bp, Enterococcus faecalis
atggaacaatctttttttcgagaattactacattatcaacgtccaaaggataatccttttcgactagtgtttgctggcttggttatgttcagcattctttttttgggctatatcaatcatcaattattgatttcaagctttggctcgttaggtatttttacttttttatattatcagccgctaccattaaaacagttaatgactcgtttatctgtggtcggtagttacctttttttaggaaatttgttaggcatgttatcgacccatattgcatggcttattcccattgttgttgcactggttggttttggtggccgctttttctttgaagtctacgatatttcaaaaccaggggccttctttggtgtgatggtgacagcgatgggtgccagtacgagcattccgctagcaaaaattccgttcatgagtggctgtatgttattaggcattggcttttccattttgtttgcactagtgttgcattttacagagaaggaaatcagtgtcccgctagctaagcgatcattacgggaacgaatttatcagcatccagaagcgccattagatagcatatattatagctttgttttattttttgctgtatatatcagcgaaagtttacatttacaaaatccgtattggttagtcgtttcctgtgcatccattctacaaggagacaatttacgtgcgattaagcagcgaaatattcagcgaatttttggcacaacgattggattggttatttccgcttttctgcttaatttagctttgacaacttttgaatcgattgtcgtgattacaatcttatttgtgaccgttgagtattttattcgtcgtaattatggattggcgcaatttttcacaacgcctatggctctgatgctttcattgctcgttcgtcagcagtacgtgataacattgattcaattccgctttttggggattgttttaggcagcttgttagggcttagcagcagcgtggctattcaccgttgtagtaacgtttta

SEQ ID NO: 20830 - DNA, 1347 bp, Enterococcus faecalis
atgaaaacctatgattatattgttattggtggcggtagtggcgggattgcttctgctaaccgcgcaggaatgcacggagctaacgtccttttaattgagggcaacgaaattggtgggacctgtgtcaacgttggttgtgtgcctaaaaaagtcatgtggcaagccagcagcatgatggaaatgatggaaagagatacagcaggctacgggtttgatgttgaaatcaaaaattttagctttaaacaattagttgaaaatcgtgaaaaatatattgacttcttacatggtgcgtataatcgtggtttagacagtaacaacattgaacgtatccatggttacgctacgtttactggggagcaaacaattgaagtcaatgggacagaatatacggcgccgcacattttaatcgcgacaggtggtcgtccgaaaaaactaggtattccaggagaagaatatgccttagattcaaacggcttctttgcgttagaagaaatgccaaaacgtgtggtctttgtcggtgcgggttacatcgcagccgaattagcaggaaccttacatggcttaggcgcagaaacacattgggccttccgtcatgaacgaccattacgaagctttgatgacatgctttctgaaaaagtcgtagaacgctatcaagaaatgggcatgcaaattcatccgaatgcaacaccagctaaaattgaaaaaacggcgcagaatgagtacgttattacatttgaaaatggtgaatcaatcacgacagatgccgtgattttcgggacaggccgtcagccgaacacggatcaattaggcttagaaaatacgaaagtagcccttgatgaaaaaggctacgtcaaagtagataaattccaaaataccacgcaaaatggcatctacgcagtcggcgatgtcattggtaaaatcgacttaacgccagtcgcgattgccgctggtcggcgcctgtctgaacgcttatttaacggacaaaccgatttatatctggattataacttggtgccaacggtggtctttacccatccaccagttgcgacaattggcttgacggaaaaagcagcgcttgaagaatatggtgaagaccaagtgaaaatctatcgctctagctttacaccaatgtattttgctttaggagaataccgtcaaaaatgcgacatgaaattaatctgtgtcggcaaagaagaaaaaattgtcggtttgcatggcatcggcatcggtgttgacgaaatgctacaaggctttgcagtcgctattaaaatgggcgcgaccaaagctgattttgataatactgttgcgattcatccaacaggctcagaagaatttgtaacaatgcga

SEQ ID NO: 20831 - DNA, 816 bp, Enterococcus faecalis
atgaaaacaagcgttaagtttgaaacgatttttccactgacaacggcaccattaattcagtgcattacgaatgaaattacgtgtgagtctatggcgaatgcattactttatattgatgctaaacccattatggcagatgatccccgggaatttccgcagatgtttcagcaaaccagtgctttggttttgaatttaggccatttatcacaagaacgagagcaaagcttgttagcagctagtgattatgctcggcaagtgaataaactgaccgtagtcgatttagtcggttatggcgccagtgatattcgaaatgaagtcggggaaaagctggtgcacaatcagccaaccgttgtgaaaggaaatctttcagaaatgcggactttttgccagttggtgagtcatggcagaggagtggatggcagccctttggatcaaagtgaagaagcaattgaggaactgattcaggctttacgtcaacaaacgcaaaagtttccccagacggtatttttagcaacagggattcaagatgttttggttagccaagagcaagtgattgtcttacaaaatggcgttcctgagttggattgtttcactggcacgggcgatttagtcggcgcattagttgccgctttattaggtgaaggcaacgcgccaatgactgcggcagtagccgcagtgagctattttaatctttgcggagaaaaagccaagactaagagccaagggctggccgattttcgccaaaatacgttaaatcagttatctcttttaatgaaggagaaggattggtttgaggcggtgaaaggacgagtgcta

SEQ ID NO: 20832 - DNA, 633 bp, Enterococcus faecalis
atgagagagaaattgaaagtttatttggtgacaggccggtatgattttagtgatactgaatttttaaaacgaattgaaactgcttgtcgcagtggagtgacattggtccaactgcgcgaaaaggaagtgtcaacacggcgcttttacgaattagcagtgaaagttaaagtggtaacagatgcgtatcagattccgttgattattaatgatcgtgtcgatatttgcttggcagtggatgcagcaggtgtgcatataggggatgatgaattaccggttgctcttgtgcgaaaactggttgggtccacaaaaatcgtaggtgtttcagccaaaacggtggcacgaggagttgaagcggaaaacgagggcgccgattatttaggcgtgggcgcaattttccccacaacgactaaggacagtccgttaacttctttgcagacactttctgaaattgccgcagcagtcacgattcctgttgtagcgattggtggaatcaaagaagaaaatatagaacaacttatgggaacgggagtggctggtgtttcactggtcagtgaaattatgctggctgaacagataaccgagaaagttcaagggttgatgcgtgtaacggagcgaatgttggaggcgagaaaa

SEQ ID NO: 20833 - DNA, 1188 bp, Enterococcus faecalis
atggaaaagaaaatttcaccaaatttaacgctctttgcattagctatcaatgctttcgcaatcggttcaacagaatttattagtgtgggtttattaccaatgattgttaaaagttttcatattagtctttcccaagcaggtttgactgtttctttgtacgctttaggtgtgacgattggggcgccgttattaacaattttgacaggaaaatggaatcgtcgctcattaatgctggggattatgcttcttttcattagtgggaatttaattgctgcgtttgcgccaacgtttattattttattggtagggcggatactttctgcattggcgcatggcattttcatgtctgtttcgactgtcatcgccgcagatgttgtgccgccatcacgtcgtgccagcgccattgctattatgtttacgggcttaacggttgcaacagtgactggcgtacctttagggacgtttattgggcaacaaacagcttggcatatgtcctttctttttatagccagtattggcttggtgggactgattgctagttattttttagttcccaaaaatttaccgataccagggaaggttgacataaaaggaatcacgcggatttttacgaacaaacccctcgttttctcttttctaattactgcttttggttatggtggaacgtttgctgcatatacgtacttgtcaccgttattggaaaatttaggcttttcagccaacgcggtagtgattattttagttgtttatggcgtaatggtcgcaattggcaatacagtaggtggtcactgggcaaataaaaaacctttagattcgttagtaaaaatgtttagcttattaattctgtccttagtctttttattcattactgttttaatggataacagtcttctaggcttattagcaagtttgatgttgggcctatttgcctttatgaatgtacctggtttacaactatatgttgtagaattagcggaaaagtatgttccagaagatatcactttggcctcagcttttaatattgcagcctttaatattgggattaccgtcggctcaatgacaggtggggtggtcacagatcatttatcagtaacatatacaccgatttttggtggttttatcgtgctaattgctgtcttgttcgtactttatattcggaagcaagaagaacaaaaaaacaactatctt

SEQ ID NO: 20834 - DNA, 789 bp, Enterococcus faecalis
atgattgatttaaaaaagaattaccaaattatggggattgtcaacacgacccccgactctttttctgatggcggtagctacacaacggtcgacgtggcctatcaacatgcgcttcatctactagaagcgggggccgatattttagacattggcggccaatccacacgtcctggctacgaagaagtttctccacaagttgaggcagaccgagtattaccattaataaaaaaaatacgtgagacttctctagcgccgatttctgtggacacctactatcccgaagtagcggaagccgcgatccaagctggcgccacaatgattaatgacatcaaaggattagacactccggggatggcagaagtcctcgcacaatatcctgaagtccaagttgtgattatgcattctagaaaacgccaatcgctttctttaaaagaagagttgcaccaattttatacagaaaaaattgaacaatgccaaaaatatgggctttccttagaaaaaatttgtttcgatccagggattggctttcataaaactgtcgcagaaaaccttcaactgttaaaagatcctaacgcctttcgctaccaagattatccgttactatacggcgtttctcgcaaacgaaccattggcgctttaacgaacgaaccagaaccagccaaccgtgattttggctcagccgctgcttccttgtatgcagcacaacaaggcgtagaaattttacgtgttcataatgtccaaggcttaaaacaaacatttgatgtctggcgagcattgtcggagaaggag

SEQ ID NO: 20835 - DNA, 660 bp, Enterococcus faecalis
atgacatttacagaacaagccaaagatcaagcgcaagcttcttggcaagggagttttcagcatccttttatcacagaattacatgaaggaaccttgagtccaacgatttttcgctactatttaattcaagatcattactatttaaaacactttagtcaactttatcgcttgattgcggcacaaacgcaacaacctcgattgaaaaaattactcttaacaaatgcggaaaatctcgcgttgggcgaattagctattcgtgaaactttttttgaagaactagcgattacggaagaagaagttgcagcgacaccgattgcaccaaccgcgtatcactatgtttctcatatgtatcgccaacttattgaaggaacgcctaagacggccgcagcaagtatgttgccttgttcttggctctatcaagaaattggtgcacagttagtcaaacaacactcaccagagccactgtaccaacgttggattgaaacctatgctggggaggaagcgtaccaacacgtccaagaggaacgccaactgttagaccaattatatgaagaaagttcaccacaagaacaagcagctatgatcaccgcttttgttatcagcagtgagatggaatacgctttttgggaaatggcctatacacacgaaacctggattggt

SEQ ID NO: 20836 - DNA, 594 bp, Enterococcus faecalis
atgaattatccagaaccgattgcaaaattgattgaaagttatatgaaattaccaggaattggtcaaaaaacagcgacacggcttgctttttatacaattgatatgaaagaagaagatgctaatgcttttgcaaaagcgctaattagtgtcaagagagatctccatttctgtagtatttgcggaaatattactgaagaagatccttgtgaaatttgccaagataaaaatcgtgaccgtagtattattttagtagtggaagaaccaaaagacgttatgtcaatggaaaaaatgcgtgaatatcaaggcttgtatcacgtactccacggggtgctttcaccgatggaaggaacaggaccagaagatattaatattgcctctttgatcaaacgattgcacgatgatgaagtgaaagaggtcattatagcaaccaacgctaccactgaaggagaagcgacggcgatgtatttatcacggctcattaaaccagctggaatcaccgttactcgtttggcacacggcttgtctgtcggcagcgatattgaatatgcagacgaaataaccttgctaaaagcagtcgaaggacgtcgagaaatt

SEQ ID NO: 20837 - DNA, 636 bp, Enterococcus faecalis
gtgcagggtatttttatcacatttgaaggtccagatggtgctggtaaaaccagtgttttgaaggaagtttctgaaagattagctaaagagtcaaaacgaaaaattgtcactacaagagaaccaggcggcataccgattgccgaaaagattcgaacagttattttagatccaagaaatgacagaatggatgagcgaacagaagctttactttacgcagctgctcgtcgtcaacatttagtggaaaaaatattgccagctttggaagcgggtcatttagtcctatgtgatcgttttgttgacagctcattagcctaccaaggcgctggacgtagaattgggattgcccccattgcttcaattaatgcgtttgcgacagaaggtgtctcaccagattttacaatttatttagacgttgactcagatactggcttacggcggattcaagaaaatcgaacacagcaaattgatcgcttagattcagaaggattagaatttcatcaacgtgttcgtcatgaatatttgaaattagcagaagaaaatccacaacgtatcaaaaagattgatgcacggatgagtttagaacttgtcgtagaagcaacgtatcaggcgattattgaacgttatccagaaaacttt

SEQ ID NO: 20838 - DNA, 870 bp, Enterococcus faecalis
atgcaaaaacagaaaagttttgataagcaaacaacaaaaggaaaattgtatcttgtcccaacaccgatcggcaatttagaagatatgagtattcgttgtttaaacatattgaaagaagcaacggtgattgctagtgaggacacaagaaacacacaaaaattgctaaatcattttgagattacaacaccacaaattagtttacacgaacataattacaaagagcgaattcctcaactgattacacgattgctgaatggtgaaacgattgcccaagttagcgatgcaggtatgccttcaattagtgatcctggccatgaattggttacagcatgtcttgaagaagaactggcagtgattgccttgccaggacctacggcaggaatgaccgctttgattgcctcgggtcttttaccacagccatttacgttttatggttttttaccaagaaagaaaaaagaacagaaagacgtgttatcagcattaaaagaagaacggccgacacagattttttatgagtccccctatcggattgctaaaacggtagcaacgtttgctgaagtctatggtcaagaacgccccgctgtgatttgtcgggaattaacgaaacttcatgaagagtatttgcgtggtaccttaggagaactaacagaatatttagcagaaaatacgctaaaaggcgagtgttgtttattagttagcgggtttactggtgagaaagagacaatagcagcaatgccagctatttccctcaaggaacatgtgcaagttttaatggaggaagagggacggagttcaaaagaggcaatcaaagaagtggctaaattgagaaatgtaaaaaaacaagaagtatataaagaatatcattccatt

SEQ ID NO: 20839 - DNA, 765 bp, Enterococcus faecalis
atgaaaaaaattgtagaagtaaaccatgtcagcaagacatatggtcgtttaaataataaaacagaagtattagataatatttcgtttaccgttgatgaaggcgaatttgtggggattatgggtcccagtggtgctgggaaatcgacactgttgaatgtcttatcctcgattattttgccaaccgcaggaatcgtgcgcatcgccggacaagatattttaaaaatgcgagataatcaattaagtgattttcgaagaaacgaaatggggtttatttttcaatcgtttaacctaattgatacgttaaatgtgaaggacaatattctgttgcctttagctgtagaaaaagtttcattagaagaaatggataaacgtttgttacatgtgacttcgattttggggattcaggagcttttatctgcttatccaccagagatatctgtgggacaaaaacaacgggtagcagctgctcgtgctttgattacgaaccctaaaattatttttgcagatgaaccaactggctcgctggattcaaaatcagcaacagaattgttgaaatatttagctgaaattaatctacatgatgatgccacaattttgatggtgacacatgacccgtacacggccagtttttgcaatcgcatcttattcattaaagacggtgcgattttctcagaagttgttcgtcaaggatcacgtaaggaattttttaatcgtgtgatagatatgcaagcaacgattggtggaggcgggcgcgcaaatgatttt

SEQ ID NO: 20840 - DNA, 1518 bp, Enterococcus faecalis
atggaaaaattagcgattggtgtcgacgttggcactacgcaagccaaagcagtggcttttcaagcaaatggcacagtcgtagcttctagctatgtgcgttatccattaattcaagagactgaaggaatggcggagcaagacccagaaacgctgttccaagctgtggtgaactgtattcgaaccgtcacacaacaagtgaagaatcaaccaattgggctcatttcttttgcttcagcgatgcatggcttaattgccatggatgcgcaaggacgcccattgacccaagtgattacttgggctgacacacgagcatctgattatgcggaagcgttaaaagaaacgccagcggcccaattgttttatcaattgacaggcatgccagttcatccaatggcgcctttgtacaagattcgctggctgcaggaaaatcagccagccgttgcgcagagcgcggccaagtttattgggattaaggactacattttttaccgtttctttggcgaatactggacagattatagtagtgcttcaggaatgggtttatttaatattcacacgcgacaatgggaaacgtcgattttagcgtatttatctattgaggaggaacagttgccaaaagttgccccgtcaacgttcatttttccagcgttagcgccttcttggcaagagatgcttggtgttgaggaggaaacggttttagttcttggtggcgcggatggtccattgtctaatttaggtttgggagcgctaggaatgggtgtagcgactttgaccgttggtacgagcggcgcacttcggtatattgtcgaagaaccttttttgcatccgcaaggtgaaacgttttgtttcgctctagatgaacagcactgggtgattggtggcgcaagtagtaatggtgcagttgcgttagattgggcgagccaaacgatttttgcagaagaacgtcagcaagctatccaaaacgggaccaatctctatgacccaattatggccaaaattgcaaccgtgccagccggggcaaatggcttactgtttcatccttatttgcttggtgaacgagcaccgctgtggaatgcagaggcgagcgcaagttttattggcttgcgcaaaaatcaccatgccggacatttagctcgagcggtggtggaaggaatctgtttcaatttaaaaaccattttagaggatttgaaacaactcggtggacccgttcaggagattcgggcgacaggcggctttgctgattcccctgtgttccgtcaaatcatggctgatgtgctgggagaaacgttatcgttcactgatagcaccgaagcttcggcattaggcgctgttttgctaggttggcaaggcttagggcagttaccaaatttgcaagcagcggcgcaacaggtgctgattcatgaaacggtcacgccacgagcggatcaattgctagtttatcaagaactgtatcctgtttttcaagaaacccaacaagttttagcacaaagttatcaaaaattagcagaattccgcaaa

SEQ ID NO: 20841 - DNA, 465 bp, Enterococcus faecalis
atgaaatttgaaaaaacaaaagaaattttgaaccaactcgttgcagatttaagccaattttccgtggtaattcatcaaacacattggtatatgcgtggacctgaatttttaacacttcacccacaaatggatgaatacatggatcaaatcaatgagcaattagatgttgtttcagaacgtttaatcacattggacggctctccattctcaacattgcgtgaattcgcagaaaatacaaaaattgaagatgaaattggtaactgggaccgcactattccagaacgtatggaaaaattagtagcaggctaccgttacttagcagacctttacgcaaaaggaatcgaagtttctggtgaagaaggcgacgactgcacacaagacattttcatcgcaaacaaaacagacatcgaaaaaaatatttggatgttacaagccaaacttggcaaagcgcctggtattgacgca

SEQ ID NO: 20842 - DNA, 1518 bp, Enterococcus faecalis
atggaaaaagtaattaatatgattcaaacgattgatgaatgggcacgtaaagaaccccaacgtcctgtttatttaaccgaagaaaaagtctctacgtatggagagttaaaagaaaagtcagacaatctagccgcttatttagctgagctgaaaacggacaagtcagcgattgtcgtatacggagaattagattttgaaatgattgtgagttttttaggcgcatcgaaagctggttttagctatatccccattgatgcacatacaccaaaagaacgcattgaactaattctaaacgtagccaaaccaaccgcagtgattgctgtgcatgaatggcctgaattagccaccgaagtgccagtaattacggcggaagaattaacagaaatgatgatgcatgcaccccggcatgcgcctgcgttgatgcctgtcacaggagcaagtaattactatatcattttcacttcagggacaactggcgtaccaaagggtgtgcaaatcagccatgataatttagttagctttacgaattggttgttgcaagattttggtttagaagaaggggcccgctttttagcacaggcaccttattcgtttgatttatcggtgatgtctatttatcccgcattggcgttaggtggctcattaactccgttacccaatgaaatcattaacgattttaaacaattatttacgcgtttgccacaattaacaatcgacgtctgggtttcaacaccgtcctttattgaattgtgtctaatggaaccaagcttcgatggtgaacatctaccagcactgcgcacgtttttattctgcggagaagaattaccaaaaccaacggctgagaaattagccgctcgtttcccaactgcgcatatttataatacgtatgggccgacagaagcgactgtagcgattagtgccattgaaatcactcaagaagttttaaaaagtgtccaacgtttaccaattgggtatgtgaaagaggatacgcaaatttatattatggaaggcatgtcaaaattacctgcaggtgaaattggtgaaatcgtcattgctggaccaagtgtttccaaaggctatctaaataatcctgcgaaaacagctgaagcttttttccaattagatggcgtaccagcttatcgcacaggcgatgctggaaagttagtcgataacctattgcagtatgagggacgcttagattttcaaattaaattgcatggctaccgcattgagttagaagaagtggatcatcacttaacgaatgtttcctacgtgaaacaagcagtcgttgtgccgaaatatcaaggaaataaagtccaacaattaattgcctatgtcgttccgcaagcacatgaattttcaagtgattttcaattaactaaggcaattaaacaagaattagccacgttgacaatggactatatgattccgcaaaaatttgtatatgttgaacaattacctttgacaagtaatggtaaaattgatcggaaagggttgatgaatgaggtgaatgccaca

SEQ ID NO: 20843 - DNA, 561 bp, Enterococcus faecalis
atgaatttaattaatcaaaaactttttgactttgaatgtgatgcctatcacgatggtgaatttacacgagtatcaacagaagatattttaggaaaatggagtattttcttcttttatccagctgatttttctttcgtgtgtcctacggaattaggggatatgcaagagcattatgcgcatttacaggaattaaattgtgaggtttactctgtttcagaagatagtcattatgtgcataaagcatgggctgacgctacagaaacgattggaaaaattaaatatccaatgttagccgatcccaacggtcaacttgctcgtttctttggcgttttagatgaagcttctggaatggcttaccgtgcttcatttattgtgagtccagaaggggacatcaaatcttatgaaatcaacgacatgggtattggtcgtaatgctgaagaacttgttcgtaaattagaagcttctcaatttgtagcagaacatggtgataaagtttgtccagccaattggcaaccaggagaagaaacaattgcgccaagcttagatttagttggtaaaatt

SEQ ID NO: 20844 - DNA, 912 bp, Enterococcus faecalis
atgaaaattggagtcattggtttaggaaatattgcacaaaaagcgtatttgccaacttatagtgaatgccgccacttggcagagtttgtattagcaactagaaacccagaaacacgacaaaaaatcgctgatcagtatggctttacagaaaccgttgggaccatagaagaattgattgaagtaaagattgatgcttgttttgtccatgtagccacaaaagtgcatggtgcagtcgttcgccaattattacaggctggtattcacgtctttgtggacaaacctttaagtgaagaccttgctgaagtcaaagaattacaagcattggcggcagcaaaaaatctgcgcctgatggttggcttcaatcgtcgttttgccccttatacggaagtattgaaaaatattcctgaaaaacaaacaatttttattaaaaagaaccgcatcaatacaacgagagaaacaagttttatgatgtatgatttatttttacatgtcgttgataccgcagtttatttagcggaaggaccgctccacgtggtgcagtcaaaattagtggaagaaaacggtcatttaaaacgagcaattttacaattagaaaccgaacagacaacgattgtttgttccatggatttacactctggggccaatacagaaacttttgaagtcaccagccccacaggtacttatcgcttggaaaatttaacgcatttgaccatccaaacagaagaagaataccaagtaaaagagatgggagattggacgccaacattggaaaaaagaggtttttaccaaatggttactgctttcattcaggccattcaaaaaccgcaagagcaagagttaaagcaagaaaaagtctatgaaagtcatgcgttatgtgaagaaatgctacgccaacaacaacggcatgttctt

SEQ ID NO: 20845 - DNA, 543 bp, Enterococcus faecalis
atggaaacttttgaaagaaattggtacgtattgcacacctattcaggctatgaaaataaagtaaaagcaaacattgaatcacgtgcacaaagcatggggatgggcgattatatttttcgtgtcgttgtaccagaagaaacagaaaaagaagtcaaaaatggtaaagaaaaagaaatcgttcataaaactttccctggttatgtgttagtggaaatgattatgaccgatgattcttggtatattgttcgtaacacgccaggcgtaactggttttgtaggctcacatggtgctggtagtaaacccgctcctttattacaagaagaaattaaccacattttacgttcaattggcatgagcacccgtcaatcagacttagaagtagcgctaggcgatacagtgaaaattatcgaaggtgccttttctggtcttgaaggtgttgtgacagaaatcgatgaagaaaaacaaaaattaaaagtaaacatcgatatgtttggtcgtgaaacaagtacagaattagactttgaacaagtcgataacattgat

SEQ ID NO: 20846 - DNA, 798 bp, Enterococcus faecalis
atgacaacaatcacacgaattagtaaagataaaggtgaattttatctactttggctatcttcaggcgaaaaactgcgtgtctcggaagatattttagtacggcagcgtctgctaaaaggccaagagttatcagatactttaatagaagaaataaaaaaagccagttcttatgatgtcgggttacaaatggcgatgaattatttaagctatcaattacgttcaaagaaagagatttttacttatttaaaagagaaagaaattgtacctgaagatcgagtaaaaatcgttcaacgtttagaagagctgcggttgttggatgatgcaatttttagtgaaagttacgtacggacagctatgcgaaccagtgataaaggaccacgaaatgtggcacaacaattaaagcaaaaaggtattagtgaagaagatattcagcatggtttgaccttttatacgttagatgaacaacttaatgttgccacagcaactgcagaaaaagccatgaaacgctatcgaactaaaagttttaaagatgcacttcagaaaatgcgtctgcatctgatgcaaaagggctttacaaatgaaatcattgatctagctttggaatctttagcttttgaaaaggacgaagaacaagaacaacaagcgttagacaaggaaggcgaacgtttatggcgtgccaatcagcgatttgatttttctaaaaaagtccaaaaagtcaaacaaagcttattccaaaaagggtttgactatgatttgattcagcaatttattagcgaaaaggaagtagaacatgacgaa

SEQ ID NO: 20847 - DNA, 522 bp, Enterococcus faecalis
ttgactgtttacttaagaaaagcagaaccttctgatttgcctgacatccttgctatcattgaagatggacgccgcaccttacaaaaaagtggcattccccaatggcaaaacggcgatggcccgaatcaagaaattttagcaaaagatatcgaccagcaaacttgctatattttaatggttgaggatgccttggcaggcgttggtgttttatgttcggagattgatcctgcttatgaagcgatttttaatggttcttggcaacctcattctcaaactacgtatacggcaattcattgtgttgctctaaaaagttcctttcaaggtcaaggactggctttggtgcttttgcgctcactggttacagccgctcgtttgcaaggtgctactgatattcgaatcgatacacatccacaaaatctcgctatgcagcacctgattaaaaaagctggctttgtttatcaaggtgacgtgattttagatgttaacgatggcgaacgttatgcttatcagatgatattgaaa

SEQ ID NO: 20848 - DNA, 819 bp, Enterococcus faecalis
gtgccacaatttgcttctaaagccgaagaaaaaaattattatgaacgccaagctagcttagcagagtttttaacttggtatcatcaacaagaattacctgaatatgaaaaaccctctttaaccgttgatatggttcttctttgttacaacaaggaagctgatcaattaaaagtcttactgattcaacgtaaaggtcacccctttagaaactcatgggcgcttcctggcggttttgttaatcgcaacgaatctactgaagatagtgttttaagagaaacaaaagaggaaactggtgtggtgatttctcaagaaaatattgaacaattacacagctttagtcgcccagatcgagatcctcgtggctgggtcgtgacagtcagctatttagcctttattggtgaagaacctttaattgctggcgacgatgccaaagaagtccattggttcaatcttgaacggcatggtcaacacatcacgttatctcatgaagatgtggaaattactttagacttgaaaacagcggcctctcttggtaaagatacattagccttcgaccatagtgaaattataattaaggcgtttaatcgtgttgttgataaaatggaacatgaaccgcaagtgcttcaagtcttaggaaaagatttcaccattacggaagcccgtaaagtttttgcgaagttcctcggcgttgattatcgcagcattgaccattcaaattttaaaaaagccatgacacaatattttgaagagttaggtgaacgtcccgttggcattggccgcccttcaaaaatttaccaattgaaaacaacaacaggtttc

SEQ ID NO: 20849 - DNA, 693 bp, Enterococcus faecalis
atgaaaattggaattattggagcaatggatcaagaggtcaaaattctaaaagaaaaattgacagacacgatgtcatgggaacgagcaggcgctttatttgtttctggttcgttaggaagacatgaggtgattgtggttcgttcaggaattggtaaagtggcctcagctgtgaccacgactttattgattcatcaatatggcgtaaatatggtgattaatacaggttctgctggtggtatcggtgaaggactaaaagttggcgatttagtcattgcagacaaattagcttattttgatgttgatgtcactggttttggttatgcctatggacaattgcctggtggtgtgcctttgtattttgaaacaagtgaatacttgcggatggaaattgcgaaagccgctgaaaaaactggtttagctattcgtaaaggattgattgttactggagatacttttgtggatagcgctgagaaaatcgccaaaattaagaaagagtttcctgaagccttagcttgtgaaatggaaggcgcagcaattggccaagccgcttcacagttcaatattccattcttagttgtacgggcaatgagtgatacagcagatggcgaagcaactcaaagctttgacgaattcatcgatgaagctgggaaaaaatcagccgaaatggttattcattttgtcgagaacttagtt

SEQ ID NO: 20850 - DNA, 957 bp, Enterococcus faecalis
ttgacaaaaaaattatatcaatggggcatcgtaggattaggtggaattgcccacgaatttgcttcaacgtttaaacaagaaactagccaacttgcagctgttgcttcacggacattgtctaaagcagaacaatttgccgctgattattcaatccctaaagcctatggttcttatgaagaattgctagcagatgaaacaatcgatgttgtctatatagcagtgccaaataaacaacatgctgaacacattttaaaagcgctccaggccggaaaacatgtgttgtgtgaaaaagctattacgatgaacgcggcagaattaaaacaagccttggcagttgcagaaaaaaatgaccttattttagcagaagccatgactatttttaacatgccactatacgacgaattacgtcgcttgatggatgctggcaaatttggtcagttaaaaatgattcaagcaccatttggaagttacaaagaacccgatcctaaaaatcgcttttttaatcctgacttagcaggcggcgcattgttagatattggtacttatgcggtttcgtttgctcgttggtttctcagctcacagccagacgttttagcttctagcatggttcccttctctactggcgttgatgaacaatcggtgacattgcttcggaataaagaaaatgagttggctactatttcattaacattccaagcaaaaatgccaaagcaaggaattgttgcttttgaagatgcctatattaccattacagattatccacgcgcagatgaagcgattgttcactacaacgacggtacggttgagaccatcgtttctgggtactcagctgaagccatgaattacgaaatctacaatatggttgaagcaatcaaaggtacacaacccaatcgctccttatttttcacgacagaagtcattgatattttggaccagatgcaaaaattatggcagaat

SEQ ID NO: 20851 - DNA, 624 bp, Enterococcus faecalis
atgttttttacatttatgcgtggcgtggttcgcgtcattttatttgtgattaatggaaatgcacattatgaaaataaagaaaaattaccaaaagaccaaaactatgtcttagttgcgccgcatcgaacatggtgggaaccgctgtatttagctgttgctggcagtcctaagaagtttagttttatggcaaaaaaagagttgtttaaaaatcctgttttacgtttcattttaaaacatgcgaatgcgtttccagtggatcgtgagaagcccggtcccagcgcgattaaaacacctgtcaaaattttaaaaaattctgatttaagtttgattatgttccctagtggcacgcgtcattcctcagaattaaaaggcggggtagccttgattgctaaaatggggcgagtacctatcgtgccatctgtttatcaaggtccattaactttaaaagagttgtttaaacgtaaaaaagtaacggttcgttttggggagccaatcgatattagcgatattaaaaaaatggataaagacggtttagctgaagtggaacgtcggatgcaagaagcatttgatcagttagataaagaaattgatccaacttttaaatatgaatcaacagaaaaagaa

SEQ ID NO: 20852 - DNA, 1134 bp, Enterococcus faecalis
atgaaatttttacatacagcagattggcatattggcaaaaaattacatggttttgatttattggcagaacaaagggaagcctttgaacaaatcttagcaattgcgaaagaagagcaagtggatgctgttgtgatcgctggagatttgtatgatcgctctgttccagcagttgaagcagtcgagatttttaatgaaatgatgattcaaatgaatctcaaagagcatttccccgtgttagctatttcgggaaaccatgatagcagcacgcgtttagaaacaggaggcccttggtttaaccaaacgcaatttcatttgaatacgcgtttagaacaagcctttcaaccaattgaaatcgacaatacccaattttatttgttgccttattttgaaccgattgcggctcgcttatattttgaagatgaaacgattcgaacgattcaggcggcgatggaaaaagttgtcgcgaaaatgcaggaatcttttctccccaataaaaaacaggtgttagttagtcatttttttgtcgctggcagtgaaaaaactgattctgaaacaaaattaacagtgggtggtttggatgttgtaccgacggctttgttagagccttttgattatgtcgcgttgggccacttacatggaaaaaatgcgttgcaggcacctaatgctcgatacagtggctcgcctgtaaaattttctttatcagaaatgacacaagaaaagggtgtttggcttgttgaaacagaagctgaagttcattttcaattccgtgctttgaaaccattgcgagacattcaacaattgacgggctcgtttcagcagttaacggatcccgctttttatcaagaagtgaatcgggaaaattatttacatgtccaattaaccgaccgagcgatcattcccaacatgatgaatcaattgcgaaaaatttaccccaaaattattgggttggaacgtttgaatggtcgagaaacaagcagcggaaatcagaaaaaagtggtacaaatagaacaacgttcaccagaagaacatctgcatgacttttttaacgatgtgacaggagaggccttgacagaacaacaagcacaatgggtccaagaagaactgagtacacttaatcaattagaaagagggaag

SEQ ID NO: 20853 - DNA, 3135 bp, Enterococcus faecalis
atgaaaccattatctttaacattgaaaaacttcggaccgtatattaatgaaaccattgattttacgaagtttgaagattcttcactttttctaattagtggaaaaacagggtctgggaaaacaacgatttttgatggaatgagctatgctttgtttggtgaaagttctgggaaattacgtttaggcaaagaaatgcgttccacatttgctgacccctcagaagccactgaaattactttgctttttaaacataacgagtatctctatgaactgaaccgccttcccgaacaagaactttttaaaaaacgtggcacaggagtccgtaaacaaagtgccaaaatttctttaattgtcaaagatgctcaagggaaagaactacgagcctattctaaaagacgcgaagtggacgaactcattcaagaattattgcatttgaatgccaatcaatttgctcaaattgtattgttaccacaaggagagtttcggacttttttaattgctaaaagtgatgaaaaagaaaaggttttgcgtaatttattcggaacagaattgtatcagttgttcagcgaaaatttaaaagaacgcttaaaaattgccaatcaagagattcaagaaacccagcaaaaaattgaactgaaaacagaacagttgcattggtcagaagaacctgaaccgacaatgacactttttgaaaaacttcaattattagaaagccaacaacaagaggctcagcaacaactattagttgaaagagaacaaattgcaaccttaaaacaagccaaacaagcaaaagagcaagttcgttatgccattgaagaacggcaaaacttgcaacagcaaaaagaagaattactggaaaagaaagcaaaacaagctgaacaggaaaccgtcattgagcggctaaaggaacagattcagcaattaaaatggagccaaaaacagcaatctttagctgaaaaagtctttgaaaaacgaagcgaaaaacaacaaaaagagcaagaaacaaagtccaaacaacaagctcttatggaaacacaacaagcattgacagattggcaagcaatcatgagtgagttggaagaacaacaaccattgattgctgaaaaacaagaacgtcttcaaacgattcaacgtcaattaccacaataccaagaatatgaacagttagcccaacaacaaatagcagaacaagccaattatcaagccattcaaaaagagtatgaatcttgccaacaggaaaaaataacattagcggataaagtggcgacagccaaacaatttattgaacaagaaggaacacttgaaaaagcaaattttgaatgttctagtgtagcagatcattggcaaaattttgtagaacgttggcaaaaaaatcaaaaagcttggcaaaaaattagtcaaaaccaaggggaattgcacgagttgacacaacggtttgctgttgaacagcaacaaaaaagcgccgaagaagcgaagttgcagacaaagaaaagtcaatgggcctctttacaaatccaacgattaagcttgttacttgaagagggggaaccttgcccagtttgtggctctttagaacatccaaaacaacaaactcatcaagaagtttccttagaagagattgatcaagcggaacgggaattaacggaagttgaaaaaacggttcaacgatttactgaaacgctctctgcattaggggcggaaaagcaacagaaagaaagccaattacaagaacaggaagctgcgtatactgaggaacaagaacaattagcagcgcagtttgctgacttgcagttgccgttaacaggactaactttttcacaagtaacacctgcagaaattgcggaagttgagtcgcaattagctaaagaaaaacaacaaatagcacaaaaactaacggaaatttcagtcgaaaaggaccatctagcggaactagaagaacaagtagctgaaaattcccaacgctttgaagtgctccgacaacaagtagaaacaatgcaacaaagtctggaaagaatcactatccagcagcaaatgattgctagccaattattggatgcaaccgtcacatacgaagaaatgaccaaacaacaaactttgcttcaagaagaactctctgcatttgaacgtcaaaaagaaaacgtgacgacacaaggagaaaccttgaagaaagaagaaatgatccttgaaagtacgttgacgcatttggagaaagaacaacaaacacttcaacaaacagtcgcacaacttgagagtcagttaaacgcagttttaacggaacaaggagtgacagaggaccaattgacggagtggttgaaagaggtaccgacactagaaagtcagcaagaacaaattgctttatttgaacaagagcaaacccaactgactatccaactcgctgaaattgagaaaaaattatctagtgatacgttcccagaattatctttaatcaccacagaaattgaacaaataacacaacaaattgaagaacaagaaaaaaaatactatcaactgcatgaaaaaatgcaaaataaccaacagttggttcaagaaattaatgcgcaaagaacaacaattgaagacaagtttgaggaagttgctgcactacagcagttggcagatacggtgaatggcaataatcctaaaaaaattagttttgaacggtatatgttacaaacgtatttagaaagagtgctgacagtcgctaatcagcgtttagaccgcctgaccaatagtcgttatcaatttgaattgaatcacgaagcaggcagttatcggaatcaaacggggctagaaatcaatatttatgatgacaattcagggacggtacgcagcgctcacacgttatcaggcggggaaagttttatagcagcgttagctttggcactttctttagcagaagtgattcaagaacaagcaggcggagtcttaattgatgcgttgtttattgatgaaggctttggttccttagatgaagaagcattggaaatggcaatggaggcgttagaaacgattgaaaatgaaggccgcatgattgggattattagtcatattggcgaattaaaagcacgaattccacaacaattacaaataaaaagcaatgggaatggtcaaagtaccgttcactatcagctagct

SEQ ID NO: 20854 - DNA, 1293 bp, Enterococcus faecalis
atgattgatcgttatacaagacccgaaatgggcgcaatttggacagataagaaccgctacaaggcatggctagaagttgaaattttggcggatgaagcttgggcagaacttggcgaaattcctaaagaagatgtacaaaaaatccgagaaaatgcatcatttgatgttgcacgtattttagaaattgaagcagaaacacgtcatgatgttgtcgcttttactcgtgcggtttcagaaacgcttggtgaagagcgaaaatgggtacactatgggttaaccagcacagatgttgtggatactgcctatggttatctattgaaacaggcgaatgatattttacggaaagatttacaaacatttacggagattgtcggagccaaagccaaagagtataaacatacggtcatgatgggaagaacgcatggcgttcatgcagaaccgactacatttggtttgaaattagcgttgtggtattctgaaatgaaacgcaacattgaacgttttgaacatgcagccaaaggtgtcgaagcgggtaaaatcagtggagccgtaggtacctttgccaatatttcaccatttgttgaagaatatgtttgcgaacatttggggatccgtgctcaagagatttcgacacaagttttaccacgtgatttacatgcagaatatgtttctgccatggcattaattgcgacaagtattgaaaaatttgcaacagaaattcgtggtctacaaaaatcagaaacacgtgaagtagaagaattttttgcaaaaggacaaaaaggatcttcggcaatgccgcataaacggaatccaattggttctgaaaatatgactggtttggcacgtgtgattcgtggtcatgtcattactgcctttgaaaatgtgagtttatggcatgaacgagatatttctcactcgtctgctgaacggattattattccagatacgacgattttactaaattacatgttgaatcgttttggtaatattgtcaaaaacttaacggtcttcccagaaaatatgaaacgtaacatggatgcgacctatggtctaatttacagccaacgtgtcttgttaaaattgattgatcatggcatgacacgtgaagaagcgtatgatctggtccaaccaaaaacagcttacgcatgggatcatcaaacggcgttccgtccgttgctagatgcggatgaaaaaattacatctgtcttatcaaaagaagagctagatgatgcctttgattaccattatcatttaaaaaatgttgacacgatttttgaacgtgttggtttaggg

SEQ ID NO: 20855 - DNA, 800 bp, Enterococcus faecalis
tttccaaaatctacttacatgtactggcaaaaacgcctcgacagaacagcttcaacacaaatcattgaagaagaaattcaagcgattcgtaaaaaacatcaacattatggctatagaaggataacccaagaattgaaacgacgtggatttcaagtgaataaaaagaaagtccagcgattaatacaaaagttaaagttacaagtcaaagcttttactaagaaatccagaaaatataattcctataaaggaatcgttggtaaaatcgctaaaaatttgattcgtcgccgatttaaaacctctgttcctcatcaaaaaattacaactgatacaactgaatttaagtactttgaagcagataacgcaggcatctttcgtcagaaaaaactatacttagatccatttatggatatgtataatagtgaaattctaagctatagcctttctactcaaccaaatggtaaaacagttatggaaggtctgaaagaagcaatttctcaaacaaatgattgtccctatcggcgcacctttcactctgatcaaggctgggcttatcaaatgaatgtctatatacaaacattaaaggacaacaatatctttcaaagtatgtctcgaaaaggaacctgtttagataattctcctatggagaatttcttcagtatcctaaaacaagaagtgtattatggaaaaatctatcaaagtcaaatgaattgatagaagcaattgagaactacatttattattacaatcatcaccgaatcaaggaaaaacttaactggaaaagcccagtagaatttcgacaa

SEQ ID NO: 20856 - DNA, 555 bp, Enterococcus faecalis
atggcaaaatacagttttgaatttaaacttaaacttgttcatgactacttatctggtcaaggaggtctaaggtttctcgcaaagaagtatgggtttaaagatagttctcaaataagcaaatggataaatgcctataaagaacttggtgaagaaggcctacttcgcagtcgaaaaaataagaattactctgttcaatttaagctagatgcgatagagttatatttaacaacagagttgtcctatcaagaagtagctaatcttctaaaaattcgcaatccatcattgattgcgaattggcttagaacgtatcagaagtttggtatagagggactctctaaacagaaaggacgtccacctaccatgtctaaaaagaaacgaaatgaaccccaaccactaccaagtgaacgatctcaagtagagaaactagaaaaagaaaatagaatgttaaaaattgagaatgcctatttaaaagaattgaggagactgcgtttagaggacgaacaaaaaatgaacgaatcgcacgaatcattcacagtctccgaagacactttcgat

SEQ ID NO: 20857 - DNA, 2604 bp, Enterococcus faecalis
atgaatattgaaaaaatgacaaccacgctacaagaggcgattgctgaagctcaaaaagttgcggtgacacgtcaacatcaagaaattgatatcgcacatttatggaaaatttttcttcaaccaaaccattttggacgtaatttttacacagatgctggtttagatgttgacgcatttgaacgagaagtagataacgcgttagatgaatatccaagtgtggcaggcggtaatgtgcaatatggtcaaaatttaagtcaaaatttgttccatttattgcaagaagctgattcacttcgagaagaattccaagatgaatttttatcaaccgaaattgtacttttagctttaatgaaattgaaaaattatcgtttaacaaaatatttaatgcaacaaggcattacggaaaaagagttaagaaaaaatattgaagagatgagaggaggagatcgtgtgacttctcaaaaccaggaagaacaatataaagcactagaaaaatacggtgttgacttagtacaacaagtaaaagcaggaaaacaagatccaatcattggtcgtgacgaagaaattcgtgacgttattcggattttatcaagaaaaactaaaaataatccagtcttaattggtgaaccaggtgttggtaaaacagcgattgttgaaggattagcacaacgaatcgttcgtaaagatgttcccgaaaacttaaaagataaaaccattttttctttagatatgggcgccttaattgcgggagcaaaattccgtggcgaatttgaagaacggttaaaagctgttttaaaagaagtgaaaaaaagtgatggcaaaatcattttattcattgatgaaattcataatatcgtcggagctggtaaaacagaaggcagtatggacgccggaaatttattaaaaccgatgctagcacgtggtgaattgcatttaatcggtgccacaacgcttgatgaatatcgccaatatatggaaaaagataaagccttagaacgtcgtttccaaaaagtattagtcaaagaaccaacagtagaagatacaatttctattttgcgtggcttaaaagaacgatttgaaattcaccacggcgtgaatattcatgacaatgctttagttgctgccgctactttatccgatcgctatattactgatcgtttcttaccagataaagcgattgacttagtcgatgaagcaagcgcaacgattcgagtggaaatgaattcgatgccaacagagctcgatcaagtaacacgtcggttaatgcaactagaaattgaagaagcggccttgaaaaaagaatcagatgatgcaagtaaaaaacggttagccaacttgcaagaagaattagcagatttgcgtgaagaagccaactcaatgaaaatgcaatgggaaacggaaaaagaagaagttaatgcggtttccaataaacgtgcagagattgataaagcaaaacacgaattagaagatgctgaaaataattatgatttagaacgagctgctgttttgcgtcatggaacaattccgcaattagaacatgaattgaaagaattggaagaaaagaacgctaaagataacgtcaaaatggtacaagaatcggttactgaaaacgaaattgcgcaagtggtcggtcgtttaactggcattcctgtgacaaaattagttgaaggcgaacgagaaaaattaatgaaactgaatgaaacattacacaaacgtgtgattggtcaagatgaagccgtcgatgctgttagtgatgcggtgattcgttcaagagcaggcttacaagatccaaatcgcccactcggttcgttccttttcctaggaccaactggtgttggtaaaacagaacttgctaaagctttagctgaagatttgtttgattctgaagatcatatggtacggattgacatgagtgaatacatggaaaaacatgccgtgtctcgtttggttggtgcccctccaggctatgttggttatgaagaaggtggccagttaacggaagctgttcgtcgaaacccttatacaattgtcttattagacgaaattgaaaaagcgcacccagatgtctttaatatcttattacaagttttagatgatggtcgtttgacagattctaaaggtcgggtcgttgattttaaaaatacagttttaattatgacaagtaacatcggctctcagcttttattggaaggtgtgacacctgaaggaacaattccagaagaagttgaaaatcaagtcatgaatattctaaaaggacactttaaaccagagttcttaaacagaattgatgataccattttatttacaccattaagcttggataatgtgaaaggaatcattggtaaaatgaccgcacaacttgctcatcgtttagagcaacaagaaattgtgttggaaatcactgatgaagctaaaacatggattgctgaaaatgggtatgagccagcttatggagctcgtccgttaaaacgtttcattactcgcgaagtcgaaacaccattagcaaaagaaattgtttctggacgagtaatgccaaaaacaaaagtcacgattagtctattagacaatcaattagtttttgaaaatgaaccgatagaagaagtg

SEQ ID NO: 20858 - DNA, 1713 bp, Enterococcus faecalis
atgttaaagcgtttttttgggtattatcggccgtatcgtcgattatttattttggattttgggtgtgccgtttttgcggggctgttagagttggcttttccagtagcagtcaaccaagtaattgataagattatgccaaaaggagattttcgcctcattgcattagctagtgcgggcttatttgcattttatataatcaatacgtttttacaatttattgtggtttattttggtcatatgttaggcgtgaatattgaaacagatatgcgtgaagaattatatcaacatctgcaaacacaaccgtttgagtattatgataatcaaaaaacagggaaattaatgagccgtttgaccactgatctttttgaaatttcggaagtggcgcatcatggtccagaagacgtctttattacgattatgacgttagcaggttcttttttattaatgttaaccattcacgtgaaattagccatcgctacgtttattttattgccatttatcacgattgcgctaggctattttaataaaaaaatgacaaaagcgaatacggatatttacgataatttaggtgaatttaatgctgggattgaagcgtcagtaagtgggatacgtgtcacgcaatcttttgcaaatgaaccgtttgaacgaaaacagtttaattatttaaatcaaatgtatcgaaaatcgaaattatatttttataaggtgatgggtgtcagttccgcctataattacttattaattcgtctgataaatttattttcattaatttttggtgcgtattatacaattaaaggagaaattacagaaggtcagtttgtaggatttattttattagccaatatttttattcggccgattgaaaaagtcaacaatatgattgaaagctatcccaaaggatttgctggctttaaacgttttacggaagaaatggacaaacaaccgtccatcaaagatttgccaggagctgttgctgtttcacatttagaaggaacgattgcctataaggatgtttcatttgcttatgaagatggcacaaaagttttagaccatatcaatttaaaaattcaacctggtgaaaccgttgctttcgttggacaaagtggttcaggaaaaacgaccttgtgcaatctgttgcctcgtttttatgaagtcagtagtggtgaaattacgattgacggtagaaatatccagaaaatgaccttggcttcattacgtaagcagattggaattgttcaacaagatgtgtttttattccctggaacattacgagaaaatattgcttatgggaatttaaatgctacagaaatagacattcaacaagcggtgaaattagcacatttagaacatgtaattcagctaatgccagatggcttggacacaattattggcgaacgtggcgtgaaattatcgggcggtcaaaagcagcgagtggcaattgcgcgaatgttcttgaagaacccgccgattttaattctagatgaagcgacttctgcattagatacagaaacagagcaagtgattcaagagtcattaaactcgttagctgacgggcgaacaacattaattattgcccacagactggcaacgattaaacatgctgatcgaataatcgtagtgagtgaccaaggaattttagaagatggaacacatgaaactttgtacgcgcaaagaggccactatcgtcgcttgtacgatgctcaatttagaaca

SEQ ID NO: 20859 - DNA, 1080 bp, Enterococcus faecalis
atgtatttttttctaataaaatgtataatagaactattcactatcttaagtctaaagtcaggtggttatttaatgaaaacaattttttctggtattcagcccagtggtactccgacaatcggaaattacattggtgcaatgaaacaatttatcgaattacaaaatgaatacaattgttatttttgtattgtggatgaacatgccattaccgttccccaagaaccgcaaaagctacgccagcaaattcgtagtttagcagctctttacctagcggttggtttagacccacaaaaagcaacaattttcatacagtctgaagttagtgcccatgcagaagctggttggatcattcagtgcaatacttctattggtgagttagagcgaatgacacaatttaaagataaatcgcaaaaaaatggtcgtgctggcgtaagcgctggtcttttaacataccctccattaatggttggtgatatcgtgttgtacaacgctgacttagtgccagtcggagatgatcaaaaacaacacttagaattaacacgtgattttgtggaacgcttcaacaaacgttacgcccaaaaaaatcaagaaattttaacgattcctgaagtaaaaatcgctgagcaaggtagtcgaattatgagcttacaagaaccaacgaaaaagatgagtaagtccgatacaaatgtgaagggctttatttcaatgcttgatgagccagcagtaattcgcaaaaaaatccgctctgctgtaactgattcaactggtgtaattgaatataataaagaagaaaagcctggtattactaacttactaaatatttattctgctgcgacaggtcaaactgttgaggaacttgttcaagcatacgaaggcaaaggctatggagacttcaaagcagatttagcagaagcagtagttgccttattagaacctattcaagtgcgctaccaagagcttctagcttcagaagaattagatatgattttagatgagggcgcagaaaacgctcgcctggtagccaacaaaacacttcaacgaatgaaaaatgctgttggtttgggaagaaaagttcggcgc

SEQ ID NO: 20860 - DNA, 657 bp, Enterococcus faecalis
atggttgaaatttatttgttcgtcaatcctttaggcggcgtctgtttagaaattgaaaaagaaattatacaattgtctgttaacgacaagaagaaaatacaattgcgctttattcctttattaaatatgaaaacgatcaatgaatttttgagtcgtcaacatattccgattaatgacattaaacgacggaatcgaatttttgaagatttatactcagccgctcttgactataaagcagcacagttacaaggccgaaaaaaaggccgacaattgttgattggcttacaaaaagcagtagctgaagacggtctagcttactctcctgagttatcagaagaactacttctagcggctggcggggatattgatatgtatcgtaaagaccgacaatccgattttgtcaaagaatctttccaaaccgaccaaaaagttgctcgagaaatggggattaaacaacaccctaccgcagtcgtttacaactatacttgcgagaacgatttcggcattttagtcgaaaattttgaaaacatggatgaaattaaacaactttgtcgtgttcatccacataacgaaccgttgctgaaccaaggtgacgcaacctttgaatttaaacgtcgctccaattatcattttccaaatggacatttacatttatta

SEQ ID NO: 20861 - DNA, 795 bp, Enterococcus faecalis
atgaaagtggcgattgttcataactcggaagaaaaatcgaaacaagtcacaaaacaactgacaacactattagagcaaaaccaaattcaaatagacaatcgtcaacctgaacttgtgatttcagtcggcggagatggtacgcttctttccgcttttcatcgatttaatcatctgttaaacgaagtaagtttcttaggtgtacataccggacacttgggtttctatacagattggcgtgattatgaattaaaagaactagttgagagtttgtgtattcatcgtgaaaaaagtacgagttatccattattagatgtgcggattcggtttagagatgggaaaccagataaacattttttagcattaaatgaatcaacaattaaacgaggaaaccggacgatggtgggcgatgtgtttattaaagatgaactgtttgaacgatttcgtggtgatgggttgtcgatttcgaccccaaccggctctactgcgtataataaaagtattggtggggctgttttgcatcctagcattaatgcgtttcagttaaccgaaatcgcctccttaaacaatcgtgtctttcgaacattggggtcaccgattgtaatcgcacatacggagtggctggagattaaattacaggaaagtgatgattattttgtcacggtggaccaattagatatttatcaagaaaatatcgcttctgtctgctatcgaattgcagacgaacggattcattttgcctcttatcggcacatgcatttttggcatcgagtgaaagatgcctttattggtgaggat

SEQ ID NO: 20862 - DNA, 891 bp, Enterococcus faecalis
atggaatttcaatggacatatgacaaagaaacaacacaacaagtgaaatattttttaaaggaacaaggtgtttcaaaagggttattagcaaaggtgaaatttcagggtggtaaaattcaagtgaatgggaccgttcaaaatgccatctatcctttacaaactggcgatgtcgttaaaatgacgattccagatgaagcggaacatgagacattattaacagatgatgaaccgattgaaattgtgtttgaagatgatcattttttagtagttaataagcctgctggcattgcctcgatacctgctcagtatcatccttcaggaacgatggcgaatcgtgttaagggctattacaagcgtcaaaattacgtgaatcaagttattcatgtcgtgactcgtttagatcgagatacttctgggctgatgttatttgcgaaacacggctttgctcatgctttaattgaccaagaattacgagaaaaaaaggtgacaaaaatttattatgcccttgttggtggagcgattgagcagttaagcgagcatcaattgattgaaaagccaattgggcgcgacttgtcctctttattaaaacgccaagttatcgaaacaggtcaatttgctagtacagaatattggctcgcaaaaagaggagcccaagcagcagctgtgcgcattcagctccatacaggacgaacacatcaaattcgggtacattttgaagcaattggctgttcattgttaggggatgagatgtatcatggaaagatggatcaaggaattgagcggcaagcgttgcattgcatggaactaatttttactcatccttttaccaaagaaacggttcatctgatttccccactagcggaggatatgaaaagtgtagatgatacgtta

SEQ ID NO: 20863 - DNA, 504 bp, Enterococcus faecalis
ttgacgaaccatattgttttatttgaaccacaaattccagcaaatactggaaatattgcacggacatgtgcagcgacgaatacaccgttgcatttaattgaacctttaggattttcaacagatgataaacacttaaaacgtgccggattagattattggaatgatgtaaatattacgtatcataaagattcggctgcctttttagcccatgtggcaggcaaacacttgcatttagtaaccaaatttgctcaccaaacatacagtgaggtcaattataatgatggcgaagaccattatttcctttttggaaaagaaacaacgggcttaccagaaacgtttatgcgagaaaacgaagaaaagtgtatccgaattcctatgaacgatgaacatgtgcgctcattgaatctttctaacactgccgcactaattgtttatgaagccttacgtcagcaaaattttccgaacttagaactgacgcatcattatgaaaatgataaattggat

SEQ ID NO: 20864 - DNA, 2595 bp, Enterococcus faecalis
gtggtaacactttttggtgaggacgaagaaaaagcctttattgttggaactgtacaagcaatcttttttgaaaatcccagtaatttttataaagtcgttcttgtaaatgtgaccgatacaaatacagattatttagaaaaagaaattgtagtaactggaagttttggccaagttcaagaagaggaaccctatcgtttctttggtcattttgtggaccatcctcgttatggcagacagtttcaggtggatagttatcagcaagaaagaccgacttcggctagtggggtggttaactatttatcaagtgacaaatttcctggcattggtaaacgaaccgctgaaaaaattgttgaagtattaggggaaagtgcgattgaccgaattattgatgatcctagtgttttggaagaagttactgttttaaatgaaaaaaaacgtcaagtaatcgtcgaaacaattcgcttgaatcacgggatggagcaagtgattgtgggactaaatcgatacggctttggtagtcagttagctttttcaatttatcaaacctatcaagaagaaaccctttctgtgattcaagaaaatccctatcagttagttgaagatattgagggagtcggatttaaacgagcggacaatattgctgaacaaatcggcattcaggcggattctgctgttcgaattcgagcggcgattttacatgaagtgtttgaacactctattcgttcaggcaatacgtatgttcaagcagatgttttgttagaagaagcgattcggaccttggaagcaagtcgcccagtggaaatctcacctgatcaagtggccaatgaaatcattacgttagtcgaacatggaaaaatccaacaagaagagactaaactttttgagaacagtctctatttttctgaatggggcattggtacttcgattcaacgtttactttctcgtaaaaaagaaattcattatgaggaagaagaagtccaaaaaaatatccgaatgattgagaaacgtttaaatattcagtatggcgactcgcaacaagcagcgattgaagaagcgattaaatcgccgttatttattttaactggagggcccggaacagggaaaacaactgttatcaatgggattgtctcgttgtttgcggaactaaatggcctttcattagatctcaaagactatacgcaggagatgtttccaatcttgctagcggcgccaactgggcgagcagcgaaacgtatgaacgaaacgacaggtttacctgcaagtaccatccaccgtttgttaggcttgacaggtcgtgaaaaaaatccgagtttaaccgccaaagaattagaaggtggtttgctaattgtagatgaaatgtccatggtggatacttggttagccaatacgttattaaaagctattccgacaaacatgcaagtgatttttgttggtgataaggatcagctaccgtctgtcggtccaggtcaagtcttacatgacttattgcaaattaacgaaattcccaaatgtgagctaaacgaaatttatcgtcaaggagacggttcaagtattattcctcttgcccatgaaattaaagaaggaaagttgcctgctgattttcaaaaaaatcaaaaggatcgctcgttctttgcaagtgatattggtcatattgaagaatacattcgacaaatcgtcacaaaggcaaaagcaaaagggtttacgccacaagatatccaagttttagcgccaatgtatcgtggcgcagccggcattgatgccttgaataagatgatgcaagaaatcttcaatccaaatgatggtaagaaaaaagaagtcaaatggaatgacaccgtctatcggatcggggacaaagttttgcaactagtcaatacgccagaattaaatgtgttcaatggagatatgggagaaatcgtcggaattactttagccaaagactcagaggacaaagtggacgagttggttttacagtttgataataatgaagtaacgtataaaagaaatgaatggaataaaattacgctatcgtattgttgttcgattcataaagcgcaaggtagtgaattccgcatggtgttactgccaatggttcatcagtatagccgaatgctgcaacgaaatttgctgtatacagcagtgacacgtagtaaagaattattaattctactaggtgaggtttctgcttttgaaacatgtgtcaaaaacgaatcggctagtcgcatgacgatgctaaaagaacgaatcgtgaacgcagaacaaatgaccttaacgactagaactcagttagaagcctatgaagaaggtttaacggcagaccatccatttactgaaacggaaacaaaagctgtcttttatgaaactgaacagcaatcaacgaaagccgatcagatcaaagaaacagacgagcaattagttgacacaacggtacaagaggtttcactatttgctgatgaaggggaagagtcaacctcaccagctgaaccacagaaagaagaacaattacctgaaaatcctgtattgtcaattcaagaaattcaagaaaataaaattaatccaatgattggtatggctggaaccactccatatcagtttatg

SEQ ID NO: 20865 - DNA, 1875 bp, Enterococcus faecalis
atgaatcagacagcaaatagcaagaaaaaacgctatattacaggttttgatggcattcggacgatcgctgtaattggcgtgattttgtatcacctttttccccaagtcatgcgaggtggctacttaggtgttccgattttctttgttgtttcaggttatcttattaacgacttgttgcggcaagaatgggcagaaaatcagaccattgatttaaaaggattttatgtgcgaaggatgaaacggctgtatccagcattaattgtgatgcttttaagtgcagttagttatattacactctttcagcaggatttattaaacaatattcgcagcgttgtcgctagtagtattttttattacaacaactggtggcaaatttttaaagggttttcttattttgatggatttgcgacacaatcgccatttgtacatatttggtcattggcagttgaagcgcaaaattatttaatttggccattactttttattcttctggaacgctttgttcgtaagcgcggtcgaattttcagcttagttttaatcggcgctttaatttcggtgacgctgatggccgttttatatgttcctggcgcagatcctacacgtgtctattatggaacagacacacgtgttttttctattttactaggtagtgcattggcgtatgtttggccaagcacacgtttgaaagaagaaattccagaagcctctaaaaaaatcttaaatggcgctggtttaagtgccttagttcttttagtgttagcctttttaacattatcagatcatacaaattttgtttattacggcggcatgtttttaattagtttggcagccactgtcttagtggccgtcactgcacatccaggggcagatatgaatcgttggttaacgaatccggtctttacgtggataggtaaacggagttatggcatttacttgtatcaattcccaatcatgattttttatgaggccaaaattaagaccttatcggaccatgtttttctacattcattggttgaaatagcattaattttagtcgtgagcgaattgtcttatcgttttatcgaacatccactgacacgattgtcttataaggatgtctggactcaattcactgagttcttacggaaaccgtgggaccttcgtgaaaaagggacaatggcctttatgacagtgattagcgtgattgcagtattcggtttaattgtggctccagcaaacgctaaaagtgcgcaacaagagcaactagaaaaaaatattgcgaaaaatcagcaaaaaattgaagaacgtaaaaaagaagtccaagaaagtggcacgaaaaatagtagcacgtccacagaaagtagtacaaaaccgagtgaaagccaagacgttctacccacacaactcacaccagagcaagtaaaaaaagcgcagaatttagaaatcacaactattggtgattctgttattctagatggtgctagcgggttacaagatattttccctaaaatgattatcgatggggaagtgggccgtcaattgtatagtagcatttcactaattggtgaactagacaaaaagaaaatgcttaaaaatactgttttagtgagtttaggtacgaatggtccttttacagaggcacaatttgatgaatttatgaaagcgttaggtaatcgaaaagtttattggattaatgttcgcgtcccaactagaagatggcaaaatcaagtgaatagtttacttagtcaaatggacaaaaaatacgataacttaacggtcattgactggtttaattatagtaacgcccatgatgattggttttatgatgaccgagttcatccaaatgtggcaggtggcgagcaatacacacactttatcgcggagaaaattttacag

SEQ ID NO: 20866 - DNA, 606 bp, Enterococcus faecalis
atggaaaatggttttttgtttttagatgaaatgttgcatggtgttcgttgggatgccaagtacgctacatgggataacttcacgggaaaaccagtggatgggtatgaggtgaatcgcatcatcggcacaaaggccgtggcgcttgctctgcgcgaagcacaaatccatgcggcagcccttggctacggcttgcttttatgggatggatatcggccaaaatctgcggtggactgtttcctgcgttgggcggcgcagccggaggacaacctcacaaaagaaaaatattaccccaatattgagcgagccgagttgattacaaagggctatgtggcctcacaatccagccatagccgtggaagcacaattgatcttacgctctaccacttggatacaggggaacttgtttcaatgggaagcaacttcgattttatggacgaacggtcgcaccatacagcaaaagggatagggaatgcagaggcacaaaatcgaagatgcttgcgtaaaatcatggaaagcagcggatttcagtcctatcgctttgaatggtggcactataagttgattgatgagccataccccgatacctattttaattttgctgtttca

SEQ ID NO: 20867 - DNA, 933 bp, Enterococcus faecalis
atgtcttttgcctcggatgtcaaaaaagagttaactggtttagaagtccatcgagaacacgcgaaagcagaattagcagcattaattcggatgaacggctcgcttagcttagttaatcaacagtttgtcttgaatgtacaaacggaaaatgctgcaattgctcgtcgaatgtattcattgctgaaagatcattaccatgcacaagcagaattattagttcgtaaaaaaatgaaactaaagaaaaataatgtttacattgtgcgtctaaaacaagatacacaaaaaattctagctgatttggatattatggatggggtcgtttttaatggcaatgtgtcaaatgaaatcatgggtaacgcgcaaaaaatgcgttcctatttacgcggggcctttatggcttctggctcagttaataatccggaaacaagtcgctatcatttagaaattttttcaatttatgaagaacacaataatgatatttgtaagatgttgaattactatgacttaaacgctcgaacattgggacgccgaaatgggtatatttgttatttaaaaggtgctgaaaaaattgccgactttttaacattaattggtgccacgaactctatgttgaaatttgaagatgtccggattgtccgtgatatgcggaattcagtaaatcgtttagtgaattgcgaaacagcgaatttaaataaaaccattgatgcggcttcaaaacaaattgaaaatattcaatttattgaaagtacagtagggctgacgtcattaccggagaaacttcaggaaatcgcagaattacggttagagtatccggaagttagtctcaaagaactaggggaaatgattccttcaggagctatttctaagtcaggtattaatcatcgtattcgaaaaattaatgaatttgcagaaaaattacgagaaaaaagtgcg

SEQ ID NO: 20868 - DNA, 993 bp, Enterococcus faecalis
atgaaaacctatcgaattcgtaaaccgaagatcgtggttgttggtggtggaacaggcttgccagtaattttgaaaagtttaagaaatcaaagtgttgatattactgccgtcgtaacggtcgctgatgatggcggtagtagtggcgagcttcgttcctctattaataacatgacacctccgggagatttaagaaatgttttagtggcattgtcagatatgccacaattatatgaagatatttttcaatatcgttttgataaatcagatagtcattttgccaatcatgcaatcggtaatttaatcattgctgctgtctcagaaatgagaggaagtacgtatgaagcgattcaattgctttcaaaaatgatgcatgttgatggacggatttatccatcatcagaacggccattaacgttacatgctgtatttaaagatggctcagtggcggtgggagaatcaaaaattgcactggatcgcaagacgattgaccatgtgtttgtaacaaatacacacggagaagagcagccaagagctgcgcgtaaagtcgtcaaagcaattgaagaagcagacatggtcgtgttagggccagggagtctttttacaagtattttgcctaatttagttattacagaaattggtgaagccatcaaacaaacggcagccgaagtagtctatatttgtaacatcatgacccaaaaaggggaaacggaacattttacggatgcagatcatgttcgtgtcttaaacgagcatctacaagcgcagtttgttgatacggtgctggttaacacagaaaaagtaccagaaaattatatggatcctgaaatttatgatgaatatttagttcaagtaaagcatgattttcaaggattacgtgaagaaggttgccgagtcatttcgacagactttttagaattaagagatggcggagtttttcatgatggggaaaaagttgttgaagaacttttccgtatcgtatttggaacgaaatat

SEQ ID NO: 20869 - DNA, 2817 bp, Enterococcus faecalis
atggcaaatgataaaattgtgattcatggtgcacgcgcccataacttaaaaaatattgatgtcacgattcctcgtgacaaaatggttgtcgtaactggactatctggttctggcaaaagttcattagcgtttgatacgctttacgcagaagggcaacgacgttatgtagagagtctctctgcttatgcgcgacaatttttgggacagatggataaaccagatgttgacagcatcgatggtttaagtccagctatttcaattgatcaaaagacgacaagtaaaaacccacgctcaacggtggggacggtcacagaaatcaatgattatttacgattgttatttgctcgggtaggtcatccaatttgtcctaacgatcatattgaaattaccagtcagtctgttgaacagatggttgataaagtcttagagctaccagagcgaacaaaaattcaaattttggcccctgttgtggtcaagaaaaaaggccaacataaaaaagtgtttgaaatgatccaacgtgaagggtatgtcagaatgcgggtggatggtgaaacctatgatgttagtgaggcaccagaacttgaaaaaaataaaaaacatgatattgcgattgtgattgaccgtatcgttgtgaaagaaggcattcgctctcgcttgtttgattcgtttgaagcggctttgcgtttagctgaaggttacgcaattgttgatgtgattggtcaagaagaaatgttgtttagtgaacattatgcttgtccttattgtgggttcacagtcggtgaattggaaccgcgcttgttttcatttaatgcaccatttggcgcttgtcccgattgtgatggtttaggtgttaaattagaagtggacaaagacttagtgattccagatcccactaaaaccttgagagaaggggccattgttccgtggaaccctattagttcccaatattatccacaaatgttggagcaagcagccaccagttttgggattgatatggatacgccgtttgaagaattacctgcagaccaacaagaaattattttaaatggttctggcgagaaaaactttcattttcattatgaaaatgactttggtggtgttcgtgatgtggaagtgccatttgaagggattttaaaaaatattaaacgacgttatcatgaaacgaatagcgattttacacgagatcaaatgcggttatacatgacagaattgacttgtcgaagctgtcaagggtatcgtttgaatccgcaagctttagctgtaaaaatcaatggcacgcacattggtgaagtcagtgaattagcaataaaaaatgcggtccaattttttgaaggtgtgtctttatctgaacaagaaacaacgattgctcggccaattttaaaagaagtcgaagatcggttaaccttcttaaaaaatgttgggttagattacttaaccttaagtcgagctgctggtacactttctggcggagaagcacaaagaattcgcttagcaacacaaattggatcaaacttatcaggcgttctttacattttagatgaaccatcaattggtttgcatcaacgagataacgaccgcttgattgactcattgaaaaaaatgcgggacttaggcaatacattaattgtggtggaacatgatgaagatacaatgatggcttcggattacttgattgatgtgggacctggcgctggacatctgggcggtgaaattgtagccgctggtacgccggaagaggttgctaaaaatccgcattcattgaccgggcaatatctttctgggaaaaaagtgattcctgtaccaaaagaacgtcgcaaaggtaatggcaaagcgatcaaagtcactggtgccagtgaaaataatttaaaaaatgtcagtgttgaatttccgctgggtgaatttgttgctgtcacaggcgtttcaggttcagggaaaagtactttagtcaatcaaattttaaaaaaagcgctggcccaaaaattaaatcgtaattccaataaacccgggaaacacaaaagcatcactggttatgaagccattgaaaagattgttgacattgaccaaagtccaattggtcgaacaccaagaagtaatccagcgacttatactagtgtttttgatgacattcgcgatttgtttgcccaaacaaatgaagccaaggttcgtggctataaaaaaggtcgctttagttttaacgtcaaaggtggccgttgtgaagcttgtcgcggggatggtatcatcaaaattgaaatgcactttttacctgatgtctatgtgccttgcgaagtttgtcatggcaaacgttataattctgagacgttagaagttcattataaaggcaaaaacatttctgatattttagatatgacggtggaagatgccgtagaatttttcaaacatattcctaaaattcatcgtaaattgcaaacaattgtggatgtaggcttaggctatgtgacattggggcagccggcaactactttatctggtggggaagcacagcggatgaagctagcgagtgaacttcataaaaattctaatgggaaaaacttttatattctggatgaaccaacaacaggcttgcataccgatgatattgcgcgattgcttctagtattagagcgtttagtggaagcgggcaataccgttttagtgattgaacataacttggatgtcatcaagtctgcggatcatgtgattgatctagggccagaaggtggcgacggtggtgggacgatcgtggcgaccggaacaccagaagaagttgctaaagtcaaagacagttacacaggatattatttaaaacgtgttctgaaa

SEQ ID NO: 20870 - DNA, 735 bp, Enterococcus faecalis
atgactgaaaaaatcttagttgaacatttagtaaaaaaatatggtgacaacacggtcttaaacgacattaatgtttctattaacgaaggcgacgtagtctgcgtcatcggtccttctggttctggtaaaagtacttttttacgttgcttgaatcaattagaagaagcttctagcggagacattattattgatggtgcgaacttgacagataaaaatacggacatcaaccaagtccgtcaacatatcggcatggttttccaacatttcaatttgtttccacatttatctattttagaaaatattgttttagcaccaaccgatttaggtcgcttatcaaaagacgaagcggagaaaaaagcgttagaacttttagaacgtgttgggttggcagataaaaaagatgcctatccagattctttatctggtggtcaaaaacaacgtgtcgcaattgcacgtgcgttagcgatgaatcctgatattatgcttttcgatgagccaacatcagcccttgatccagaaatggttggcgatgttcttggtgtaatgaaagatttagcaaaacaaggaatgacaatggtcatcgttactcacgaaatgggctttgcaaaagaagtggctaatcgagtaatgttcattgatggcggtaacttcctagaagatggttcgccagagcaagtctttgaaaatcctcaaaaccctcgaacaaaagatttcttagataaagtattaaatatt

SEQ ID NO: 20871 - DNA, 801 bp, Enterococcus faecalis
atggattttaatatggatatgtttcgcttagatgggaaagtcgcattgattacgggcgcagtttatggaattggctttgaaatcgccaaatcattagcggcagcaggagcaacgatcgttttcaataatttgactcaagaatcagtcgatgaaggatcggcaaattacaaagcagaaggcattgaagcaaaaggctatgtctgtgacgtaacggatgaaaaagcagttcaagcaatggtcaagcaaatcaaagaagaggttggttcaatcgatattttagttaataatgctggaatcataaaacgaattccaatgacagatatgtcagcgacagatttccgacaagtcatcgatgttgatttgaatgcgccgtttattatgtcaaaagcggttattcctgagatgatcgagaaaggcgggggtaaaattattaatatttgctcaatgatgagtgaattaggtcgtgagactgttagtgcttatgccgcggcaaagggtggtttgaagatgctaacaaaaaatattgcttctgaatatggtcaattcaatatccagtgcaacggtatcggtcctggttatattgcgacaccgcaaacagcgccgctgagagagctgcaagaaaacggggaacgtcatccatttgaccaatttatcgtcggtcgtacgccagcagcacgctggggtgatccggtcgatcttgcaggtccatcagtctttcttgcctcacaggcctctgactttgtaaatggtcatgttctgtatgttgatggcggaattttagcttatattggtaaacaacct

SEQ ID NO: 20872 - DNA, 948 bp, Enterococcus faecalis
atgaaataccaagtattactttattacaaatatacaacaattgaagatccagaagcttttgcgaaagagcatctagctttttgcaaatcattaaacttaaaaggccgtattttagtagcgacagaagggattaacggaacgttatctggtactgtcgaagaaacagaaaagtatatggaagcaatgcaagcagatgagcgctttaaggatacattctttaaaattgatccagcagaagaaatggccttccgcaaaatgtttgttcgcccacgttctgaattagtggcgttgaacttagaagaagacgttgatccattagaaacgacggggaaatatttggaacctgcagaatttaaagaagccttattagacgaagacactgttgtaatcgatgctcgtaacgattatgaatatgatttaggtcatttccgtggtgccgtgcgcccagatatccgtagcttccgtgaattaccacaatggattcgcgagaacaaagaaaaatttatggataaaaaaattgttacctattgtactggcgggattcgctgtgaaaaattttctggctggttattaaaagaaggatttgaagatgttgctcaattgcatggtggtatcgccaactatggaaaaaatccagaaacacgtggcgaactttgggacggcaaaatgtatgtctttgatgaccgaatcagtgtcgaaattaatcatgttgataaaaaagttattgggaaagactggtttgatgggacaccttgcgaacgctacattaactgtgcaaacccagaatgtaatcgtcaaatcttaacttcagaagaaaatgaacataaacatttaggtggctgctcattagaatgtagccagcatcctgccaaccgttatgtaaaaaaacataatttaacagaagcagaagttgctgaacgtttagctttgttagaagcggttgaagta

SEQ ID NO: 20873 - DNA, 3012 bp, Enterococcus faecalis
atgaaaaagcgcgtagttatgactattgcggggattatgggaggaacctttacctcgagtgctgttgcattagcacaaacaaaaacaagtgtggaagaaaggggtccagtacaagagagtacgatttcaataccagacagtgagatattggcggaggaaaaggaggtagcagcaacaatagagtctactaccacgacgtccaccataaagacaaccagcgatagcctcgaaaaagcccttgaggcaactacctcagagacttcttcgacagaatcggggagcgcaagtcagtcaagcgcttcacaacataggaaagaaatagaaacagaggaaacttctctaaaagcacaaactacatcaacggttttaacagggatgataggaacgagtcaatggagtttagatcctacatctggagaattaactataggcccaggagtttttagtgatgatgtatcatctgcgttcgactccatatcaaatgttaaaaaggtaacattttctggaccggtgaaagcaggaaaaagtttaaaaagtttattcagtagctggtttgcgctattgtccattgaacgtctggattatctggacacgagtcaagtgacagatatgagttatatgtttactaattgtactggattacaaacgttagatgtatcaaattttgatacgagtcaagtgactaatatgagtatgatgttttataattgtcgtggattacaaacattagatgtatcaaattttgaaacgagtcaagtgacagatatgagttatatgtttgatgcttgtagcggattacaaacattagatgtatcaaattttgaaacgagtcaagtgacagatatgagtagtatgtttgatgcttgtagcggattacaaacgttagatgtgtcgaattttgatacgagtcaagtgactaatatgaggggtatgttttttctttgtactggattacaaacgttagatgtatcaaattttgacaccagtcaagtgacagatatgaataatatgtttgctgggtgtaaggctttacagacactagatttgtctaattttaatacaaatcaagtgacagatatggctgggatgttttcgtcttgtgataaaatccaaacagtaaatgtgtcaaattttgacaccagtcaagtgacaaatatgaggggtatgttttctcattgttgggaattacaagcattagatgtaactaagtttgatacatccaaagtgacagatatgagtgatatgttttatggttgtaaggaattacaaacattagatgtgtcgaattttgatacgagtcaagtgatatatatgagtgacatgtttggtgagtgtagcggattacaaacattagatgtgtcgaattttgatacgagtcaagtgatatatatgagtgacatgtttggtgagtgtagaggattacaaacattagatgtgtcgaattttgatacgagtcaagtgataaatatgagtagtatgtttgctgattgtagaggattacaaacgttagatataactaattttgatacgagtcaagtgacaaatatgagtagtatgtttgctgattgtagaggattacaaacgttagatataactaattttgatacgagtcaagtgacaaatatgagtaatatgtttgatggttgtagaggattacaaacattagatgtatcaaagtttgatacaagtaaagtaaccggtatgatttatatgtttagagattgtagcggattacaaacattagatgtaactaagtttaataccagtcaagtaacatatatgtggaatatgttttctggttgtagtggattacaaacgttagacttatccaattttgataccagtcaagtaacaaatacggatgagatgtttgataattgtgatgccctaaaaaagataacattgggggctaaatcaatatttgggactaagactaatactaacttgccgtctatagcagatacttctttgtatactggaagatggattggagtaaacacgagtaacacttatagtgatagtaatacatttatgtctaattatgacggatcagttccagatacgtatgtatgggaaaaagctagcgttctaaacagtactttagagccttcttcagtaagggttcattcagaaagtgaagtagaatggacttggaaaataactaattcgtcgtctaagtcagccgagaatgtttactcagatataaccttacctgagggtcttaaaattgacaagaatagtgtaaaaaagaacaatttgcctgtgtcggtagatgatattaatggtatgaacaatttaggaacactatctagtaacgaaacagttacatttacgtttaagacaatagtatcagggaaaccagataaatggttggaattaatgggaaaagtgacttgggaagataatggcatccgcacagtcaatagttctaataaagtgaaaatcatcgatgaggagcaaaaagataaagggaatcaaacaaatgatttagagttattatcagttccagttgggtttcgttatggcatcttgaacaaaagtaacacaccacaaactatccatttaaatgcgagaaattatcaaactcacacgaacgttgtcacggatggtttctatacacgtttgagggatgatcgcacaaaagataacggttggaaactaactgcgcagttatctgattttagcgatgagacaaattcaacggtgttaacgaattctgggatagctttaaaaatggaaaatatgaaaattgaatctataaaaaatcgagatactccacaagagagtattgatcaaaatccaacaggaacaccttcaactgttagcacgaatgaaacgctgatatcaggacaagcagcaaaaacattgatcaatgcacaggcaaatgaaggtcacggtacgtggcaactaaggattccttttgataaagtgtccttgactgtaccagcgaatacaggggaaataaataaaaattatacagcgactttgacatggtcattagatgatacacca

SEQ ID NO: 20874 - DNA, 933 bp, Enterococcus faecalis
atgacagaagtggtaaagatttatcaactggtagaaaatctttctttagaagtagtatacggagatgaagaaagcttaaatagaacaattaaaactggtgaaatttcccggccaggtttagaattaactgggtattttaattattattcccatgaccgtttacaattatttgggagcaaagaaattacctttgcggaacgaatgatgcctgaagagcgtttattagtgatgcgccgtttatgtgcgaaagatactccagcctttatagtatccagaggactagaaatccccgaagaattaattacagcagcaaaagaaaatggcgtttctgtattacgttcaccgatttcaacttcccgtttactaggggaactatccagttatttagatggccgtttagctgttcggacaagtgtccacggagttttagttgatgtttatggacttggtgttttgattcaaggagatagcggtattggtaaaagtgaaacagctttagagcttattaaacgtggacatcggctaatcgcagacgatcgcgtcgatgtttatcagcaagatgaattaaccgtggttggagaaccaccaaaaattttgcagcatttaattgaaattcgtggtatcggaattattgacgtcatgaacctgtttggagctagtgcggtccgtggctttatgcaagttcaattggtcgtttatttagaggcatgggaaaaagacaagaaatatgatcgtcttggtagtgatgatgcaatggttgaaatagctaacgttgatgtccctcagattcgtattcctgttaagaccggccgaaatgtggccattatcattgaagtagcagcaatgaacttccgcgcgaaaacaatgggctatgatgcaacaaaaacgttcgaagagcgcttaacccgtttgattgaagaaaattcaggagaa

SEQ ID NO: 20875 - DNA, 927 bp, Enterococcus faecalis
atgtcaaaaatagtgattgcattaggtggaaatgcgttaggaaattcttcgaaagaacaattggcaaaagcacaaaccgctgcaaaatccattgttgatttaattgaacaaggccatcaagtggtgattgctcatggcaacgggccacaagttggcaaaattcgcttagcttttgaggaaacgagtcaatctccagaagatgtcgtgccgtttcctgaatgcacagcaatgagccaaggctatattggctatcatttacaacaagcaattgatgaagaactagtagccagaaatttaggggaacaaccagttgttacgttaattacacaagtcgtggtggatccaaaagacccagcgtttacaaaaccaacaaaaccaattggtggttattatgacgaagaaacagccaaacagttgatggcggaaactgggaacgtctatcaagaagatgcgggtcgaggctggcgacgggtagttccttcaccaaaaccaattgatatttacgaaaaagttagcttgcgaacacttgttgatgcaggacaaatcgtaattgcttgtggtggtggcggggttcctattgcctatgatggtccagtctatcatggtgtagatgcagtcattgataaagactttgcggcagcaaaaatggctgaactcattgaagcagatgtttttgtggtattaactgcagtggaacatgtttttgttaactttggtcaagcaaatcaacaagctttgaccgatgttacggttacggcaatgcaacaatatatagaagaaaatcaatttgcgccaggtagtatgttacctaaggtggaagcggccatcagttttgcagaaagtaaaccaaaccgccaggcgattatcgggcttttagaattagcttcggaagcaatcaaaggagaaagtggtacacgaattacacaa

SEQ ID NO: 20876 - DNA, 1374 bp, Enterococcus faecalis
atggaggggaaaaagaaatttagtttaacgagtgccattttatcagtgatctgtgtggttttcgttgctgaagcagcggcgcctgttgctgcaattggtaattctcagtttttttggtggattttcttattaattgcattcctattgccatatgggttaatttcatcagaattaggaacaacttatattggtgaagggggcatctatgattgggtgaccaaagcatatggtcatcgttggggtgccagagtttcttggtattattggattaattatccattgtggctagcttcattagccgttatgacgccagaactattaacgacaattacaggtattaagttttcaacaccgatgatgattattgttgaattaatttttacttggattgtggtttggattagtttttatccagtcagcgacagtatctggattctaaatggagctgccgtaatcaagatggttttagctgtcttaattggtgggctaggattgtatgtagccttgacgaaaggtgttgccaatgaatttaccttgaaatcaatgctgccaacgtttgacttaaggagtttatcttttatttctgtaatcatttttaatttgttagggtttgaagtcatctgtacgtttgcagatgatatggaaaatcctaagaagcaaattccacaagctattgtagcagcggggttagtcattgcggccatttatattttttcagcctttggaattggggtagcgattcccaccgatcaaattagtaccggcagtggtatgatggatagctttaaactattgacaggctcgacagaaggttggttcattatgttgatggctttcctattccttcttacgttgttcggaaacatgatttcttggtcattaggagtcaataatacagcttgttatgctgctgaaaatggtgacatgcctaaattttttgaaaaacgtagtaagaaaaatgacatgccaattggggctgctttgatgaatggcattgtggcatcggtggtcattgtattagcaccaattttacctaatcaagatttattctgggcctttttctccttgaatgtcgtcctattcttgttatcgtatatcccagttttcccagctttttataagcttagaaaaattgatcccgatacaccacgtccgtttaaagttaacggaaaaccaggatttttaaaagttttagtggttttgccaatgattatgattattatttcactgattttcacagcagtgcctttagattttagtcccgcagcattaaatgaaaaattaccaatcacaattggggcaatcatttttattctgtttggtgaagtaattatttacgtgaaaaaaattaagaagggaacgaaagaaaatggc

SEQ ID NO: 20877 - DNA, 894 bp, Enterococcus faecalis
atgaaagttaaaaaggcagttattccagcagctgggttaggaacacgtttcttgccggctaccaaagcgatggcaaaagaaatgttaccgattgttgataaaccaacgattcaatttattgtagaagaagcactagcttcaggaatcgaagatattttaattgtgacaggcaaagccaaacgtccgattgaagatcattttgattcaaatgttgaattagaaaataacttaaaagaaaaaaataaaaccgatttattgaaattagtcgaagaaacaacggatgttaatttacattttattcgtcaatcccatccgaaaggcttaggacacgctgttttacaagcgaaagcatttgttggcaatgaaccttttgtcgtgatgttaggcgacgatttaatggaagataaagtgccattaacgaaacaattaatggatgattacgaacaaacacatgcttcgacaattgcggtaatgaaagtaccccatgaagatacttcaaaatatggtattatcaacccagaaaaagaaatcgaaaaaggactatacaatgtcgagaattttgttgaaaaaccaaaacccgaggaagcaccaagtgatttagcgattatcggccgttatttattaacccctgaaatttttgatgtacttgaaaatcaaaaaccaggcgctggtaacgaaattcagttaacagatgcgattgacactttaaataaaacacaacgcgtttttgctcgtgagtttaaaggagaacgttacgacgttggcgataaatttgggtttatgaaaacaagcattgaatatggtttgactcatccagaagtaaaagataatttacgagaatacattattaatttaggtgctcaattagcgaaaaaagagcaaccaaaagaaaaa

SEQ ID NO: 20878 - DNA, 1260 bp, Enterococcus faecalis
atgaattcagctttttttgaagaattaaaagcccgtgggttggtctaccaagtcacagatgaagaagccttacaaaaacaattaaatgaagaatctgttaaattatatatcggctttgatccaacggcagacagtttacacatcgggcatctactgccaattcttatgttacgtcgtttccaacaaaatggtcatgtgcccattgctttagttggtggcggaacaggcatgattggtgatccatcattcaaagatgcagaacgtagtttaaacacacttgatacagtgaaagcttggtctgaaagtattaagggccagttgtcacgttttatcgattttgaagatgaaaaaaatccagcgattctagcaaataactatgattggcttggagagctttcgttaattgatttcttacgtgatgttggaaaaaactttacaattaactatatgatgagtaaagaaagtgtgaaacgtcgaatcgaaacaggaatttcttatactgaatttgcgtatcaattattacaagcgtatgatttcttgaaattgtacgaaacagaaggttgtttattgcaattaggcggcagtgatcaatggggaaacattacttcagggattgaattattacgccgagaacaagaagttcaaggatttggcttaactatgcctttaattacaaaagcagatggtaccaaatttggtaaaacagaaggaaacgcagtttggctagatgcggaaaaaacttcgccatatgaattttatcaattctggattaacacagatgatcgtgatgtcgtgaaattcttgaaatactttactttcttaacattggatgaaattgcaacaattgaagaagaatttacagcgaacccaggtcaacgtgctgcgcaaaaagcgttagccaaagaagtgactactttagtccacggtgaagcagcctatcatcaagcggttaaaatttcagaagctttattcagcggggatatccaaagcttaacagcagaagaaattaaacaaggctttaaagatgtaccgacgtatgaggtgcaaccagaggatcaattaagtttagtcgacttattagttacctcaaaaatagaaccatccaaacgtcaagcccgtgaagatgttcaaaatggagcgatttacgtcaatggagaacgtagacaagatttagcagctgaattgacagaaactgataaaatcgaaggacaatttactgtgattcgtcgcggtaagaaaaaatatttcttgttaaaatac

SEQ ID NO: 20879 - DNA, 891 bp, Enterococcus faecalis
atgttattaggatcacacgttagtatgagtggcaagaaaatgctattaggctctgccgaggaagcggctagttatggctcaacaacctttatgatttatacaggtgcgccacaaaacacgcgtcggaaaccgattgaagaaatgaatattgaagctgggcaagcttttatgaaggaacacaatttaagtaatatcgtcgttcatgccccgtatattattaatttaggtaatacaattaaaacggaaaatttcggttttgccgtagactttttgcgtcaagaaattgagcgagcacaagcgttgggagcaacgcaaatcacgttacacccaggtgcgcatgttggtgcaggtccagaagccggcattaaacaaattgttaaaggtctaaacgaagtcttgtggaaagagcaaatccctcaaatcgctttagaaaccatggctggtaaaggaaccgaaatcggccgtacgtttgacgaactagctgcgattattgacggagttacgctaaatgataagctttctgtcactctggatacttgccacattaatgatgcaggttataatgtaaaagatgattttgatggcgtattagttgaatttgataaaattatcggattggatcgtttaaaagttattcatgtgaatgattctaaaaatcctatgggctcacataaagatcgtcatgccaatattggctttggcactattggttttgaagctttaaacggtgtggttcaccatgaaaaattaactgctttaccaaaaattttagaaacaccttatgtcggagaagacaaaaaaaataaaaaggccccttacggctttgaaattgcgatgttaaaaaatcaaacatttgatccagaattattagaaaaaattcaaggacaaaac

SEQ ID NO: 20880 - DNA, 2595 bp, Enterococcus faecalis
gtgcatacaaagagaggagaactgttgatgcagacaacagaagaaatgcaatctggcgatggacgccgaggtcgattgcggatattttttggatttgcggctggtgttgggaaaacctacggtatgttgacagaggctcatgaattattgatgatgggaaaacatgttgttgtcggctatatcgaacctcatgatcgtccagataccaatcgattattagaaggattaccgcaaattcctcctaagaatattttttataaacaaatggttttaacagagccggatattgatcaaatcattcaacagaagcccgaaatcgtgttgattgatgaactggctcattccaatgcggaaggttctcgaaatcgtaaacgataccaggatattgatgaactgttgaatgcaggaatcgatgtttttactacggtcaatgttcaacatatcgaaagtttgaatgatatcgttgaagaagttaccggaattgaggtcaaggaaacggtgccggacacttttctacggcaagcgacaataagagtgattgatgtggagcccgatgagctgatcgaacgacttgaacaaggaaaaatatatgcgaatgaaaacgcgaaacgtgccttgaaaaatttttttattccacaaaaattggaccaattacgtggattagcaattcagcgagcgtcggatcatattaatcgaattagtggaaagacaattgggatacaaagtaaattattgacggtggtgaacgatgcctttccaaaaatgaccgaaaaatgtattcgctggacagcacgtttagcgcaaggtctagttgtcgattggacagtgattcaagttcgtacgcaagaaaatacaccaacgaacattcctttagccgataaattaggtgcggaggttattagtattgaagaggatgatagttttgagacgattgtcgagttcgcaaaaatgacgggtgttactgatattattatggggaaaaatctaaggcagccgtggtatgaaaaaatctttattgaagcgtttgatgatcgcttgttaaaacgattgaaagatacggaacttcatttaattcctttcaatgaagaaaagcggtctttattttttaagactcgtaaagtcattgagggtggcggaaaagatttagtgattgcaattggtggtgtttttctagcgacggtcgtgacggaattgatgcaatatatccacgttggcgatcaaaatctgatgcttatttatatttcattcgtattattagtcgctcgaacgacatccggttatttttggagctcattatcctctattttaagtgttttgtcttttaactggttttttgtcgaaccattatattctctgacagtatataaacagggatatccttttactttattgctcatgctagttgttgccctgatgagcagtaatttaatgattcgattaaagaaacaagcagatacttctatgaaaaaagagcaccaaatggaaattttgtacgaattgaacaaacgatatgttttagtggaaagtcgaaaacaaattcttgatatttctgccacttatttatcaagattattggaacgagaagtgattatttttgatcgtcaagtgaagacagagagtgttcattgtatcaacgaaaaaaaatcaatattaaataatgaagacgaagcagctgtagccttttgggcagcaaagaaccaaaaagaagctgggaatggtacagacacactaaatggagctaaaggattctatttgccgattgctgcaggcaggaagacgttggcggtattaggcattgaacgaaatgcagatcttgatttggaaaatgatcagctcaattacttaaaattggtgctgactcaaattgcggtcatcttggaacaaacagaattgaaagatgagaaagagcaagttgagttagaaaatgaacgggaaaaagtccgcagcaatttattacgagccgtatctcatgatctgagaacaccattaactgttatctcagggattgctgaaacattaggcattggaaatgatttaaaagaagagacacagcgaaaattattaaaggatattcaagaagagtcacaatggctgattcggatggttgaaaatcttttatccatcacgcgaatcaacatggatactatgaaggttaataaaactgctgaaccagtagaagaggtcatcgaggctgtttataagcatttgaggaaggtctatccagacggccaagtggatattcacctgccagaagaggtcatttttattcaagcggaccccattttgattgaacaagcgttgtttaatctgatagaaaatgcgtttcgtcatggagaaaatgatctaccagtcaaactaaacgtctatcaggaaaaagaacaaacagtttttgaaattgaaaatcacggcgaaattccattaaaacaatttcaaaagatccaatcaaacttgtccggcacaaatgaagtaccggttgactcaaaaaatggtttaggaatcggattgagtattgtaaaaacaatcgtccatgcgcacaatggtaaaatggaaatgacgataggtaggggcaaaacattggttcgaatttatttgaag

SEQ ID NO: 20881 - DNA, 324 bp, Enterococcus faecalis
atgatagaaagaagggtatctatggcaattacagaagaacaagtcaaacatgtcgctaaattatcaaaattatctttctccgaagaagaattagcggactttaccaatcaactagataaaattattgatatggtggaattactagaagaagtagatacaaccggggttccttttacttcaaatgtgaatgaatcaatcaatgtcatgcgtgaagacgtagcgacaccaggaatggaccgtaaagaattaatgcggaatgttccggaatcagagaatggttacattaaagtgcctgcaattatggataacggggaggcaggagcc

SEQ ID NO: 20882 - DNA, 759 bp, Enterococcus faecalis
gtgaagccagttatagtcaaaaatgtgcgaataggtgaagggaatcccaaaattgtggtgcccattgttgctccaacagccgaggatattttggccgaagcaacggcgagccaaacactagattgtgatttggtggaatggcgtttagactattatgaaaatgtcgctgatttttccgatgtatgtaatctttcacaacaagtaatggaacggttggggcaaaaaccgttattgttaacttttcgtacacaaaaagaaggcggcgaaatggctttttccgaggaaaattattttgcattgtatcatgaattagtaaaaaagggtgcgttggatttattggatattgaattatttgcgaatccgctggcggcagatacgttaattcacgaagctaaaaaggcggggattaaaattgttctctgtaatcacgactttcagaaaacaccgtcgcaagaggagattgtcgcgcggttacgccaaatgcaaatgcgtcaggcagatatttgtaaaatagctgtgatgccacaagatgcgacagatgtacttacgttactttcagcaaccaatgaaatgtacacccattatgcatccgttccaatcgttactatgtcaatgggacagttagggatgattagtcgcgtaacaggtcaactgttcggatcggcactaacttttggctccgcccagcaagcgtctgcaccaggccaactatccgtacaagtattaagaaattatttaaagacattcgaacaaaacaag

SEQ ID NO: 20883 - DNA, 2028 bp, Enterococcus faecalis
atgaaaaaaatctatcaatgggcagtgggacaatcctttaaaaaattggatccacgccaacaagttaaaaatcccgtgatgtttgtcgtttatttaggtgcgctcatcactacaatattatgcttctacccaatgggtataccgttatggtttaacatttcaataaccatttttctttggttgactttgctttttgcgaattttgctgaagctgttgcagaaggacgaggaaaagcacaggccgatagtttgaaacaagcaaaaaaggaagtcatgacttataaaattaacagtttagaagatatcaaagaagagaatttcattgaattacagtcttctgatttaaagcgaaacgatttggtctatgtacgtgcaggagagcaaatcccagctgatggtgatgtaatcgagggggctgcatcagtagatgaaagtgccattactggcgaatcagcgccagtaattcgtgaatctggtggggatcgcagtgcggttactggcggaacaaccgtcgtttccgattatttagtgattcgtgttacctcggaaaacggtcaatccttcttagataaaatgattgccatggtagagggaactcaacgaaaaaagactccgaatgagattggtttgcagattttcttgattactttgaccattattttcttaactgtatcaattactttagtcccatttactgatttcagcagtcagttatctggtaaaggagaagctttatcactggttattgtgattgctttactaatctgtctggcgccaacgacgattggggccttaatctcttcgatcgggattgcaggtatgagccgcttgacgaaggaaaacgtcattgccatgagtggtcgtgcgatcgaagcagctggtgacgtggatgttcttttactcgacaaaacaggaaccataacattgggaaatcgacgagcaagcgattttttgccagtccatggtgttagtgaagaacagttagcggatgcggcgcaattatcttctttagctgatgagacagcagaaggtcgaagtatcgtgattttagcaaaagaacgtttcaacttgcgggaaagagaattccagcaatcagaggttaaatttatcgatttcagtgccaaaacacgcatgagcggaattgattatcgcggtgacgtgattcgcaaaggtgccgcagacaccatgaaaaaatatgtacaatctaaaggagaggactatccatctgaatgtgacaagattgttgataaaatcgctcgagcaggtggaacacctctagtagttataaaaaataatcgtgtgatgggtgtcgtctatttgaaagacatcgttaagaatggtgtaaaggaaaaatttgctgatatgcgtaagatgggtatcaagaccatcatgatcactggggataaccccttaacagcggcagcgatagcagcggaagctggagtagatgatttcttggcagaagctaccccagaaaataaaatgaatctgattcgcgagtatcaagaaaagggtcacttagttgcaatgactggtgatgggacaaacgatgcaccagcattagcgcaagccgacgttgcgatggcgatgaatacaggaacacaagccgcgaaggaagcggggaacatgattgatttggattccagtccaacaaaattgctgcaagtcgtacagattgggaaacaattgttgatgactcgcggcgcgttaactacgtttagtatcgcaaatgatatcgctaagtattttgcggtgattccagtactattttacagtatttatccgcaactggatcgattgaatattatgggattaggtagtccactgactgcgattctatccgctgtcatttataatgcagtcgttatcgtggccttgattccactagcattaaaaggtgtgaggtatcaagaaaaaccggccagtcaaattttgagtcataatctgctgatttatggacttgggggaattattgcaccatttatttttatcaagattatagatctgattctctcgctgatcatttta

SEQ ID NO: 20884 - DNA, 2256 bp, Enterococcus faecalis
atgacacaaaaacatgccttggttcagggaatgaatcctcgacaagaagaagccgttttgcatacagaaggaccactgttagtcatggctggtgctggtagtggaaaaacgcgggttttaacacaccgaattgcctatctaattgaggaaaaagaagtaaatccatggaatattttggcgattacgtttaccaataaagctgctaaagaaatgaaagagcgtgtaaataaattactggaaacgggtggcgaagatgtatgggtctccacttttcactccatgtgtgtaagaattttacgtcgtgatgtggatcagattggttacaaccgtaattttacaattattgacccatcggaacaaaaaacattaatgaaacgcatcttaaacgacttaaatattgattcaaaaaaatatgatcctcgctcaattttaggtacgattagcaatgccaaaaatgaattacaaacgcctgaaaaagttgctgaaatgcaaggttccttatatgaagaaattgtcgcaaaatgctatgaagcctatcaaaaagaattgcgcaaaaaccaatgtatggattttgatgatttgattatgaatacgattcgtttatttaatgaacaaccagatacgttggctttctaccaaaataaatttcactatattcatgtggatgaataccaagataccaatcatgcacaatataccttagtcaatttattggctgcacgtttcaaaaatctgtgtgtcgtaggtgatgccgaccaaagtatctatggttggcgcggggcggatatgcaaaatatcttggattttgaaaaagattatccagatgccagtgtaattttgctagaacaaaattatcgatccaccaaaaacattttggcggctgcgaatgatgtcatcaaaaataaccgtaaccgccgcgagaaagaactgtggacagaaaatatagacggtgaaaaaattgtctattatcgcggggacacagaacgggatgaaacacaatttattgtgagccaaatccaaaaagaaatgcgggaaaatgaccgaatttatggtgattttgcggtattatatcggaccaatgctcaatcccgtgtagtggaagaaatgctcttgaaatctaatattccgtataccatggtgggcggacataaattctacgaccgtaaagaaattaaagatattttggcttatttaagtttgattgccaatccagatgattcgattagttttgaacgaattgtcaatgaaccaaaacgaggaatcggtaaaagttcaattgaaaaattacggctatttgcggatacgcatggttgggctttgctggaagctgcccaaaatgttgatttggcaaatatttcaggaaaagcgggtaaagagcttggtaattttggcatgatgattcaagacttaacgaaaacagtgccctatttaacgattacagaattggtgaaagaaactttacaacgtagtggttatcgggaagctttgatggcgcaaaataatttagagtctcaagctcgcttagaaaacttggacgaatttttatctgtgacacaagaatttgataaacgttttgaagcgcaaaacaacgacgatccaaatggcgaagaaacaaaattggcggatttcttaacagatttagccttggtttctgatttagataatttagaagagagctcttcgcaggtaaccttaatgacgttgcatgcggccaaagggctggaatttccagtggtctttttaatgggcttagaagaaggggttttcccattatcacgtgccatgctagaagaaagtgaactggaagaagaacggcgcttggcttatgttggtatcacacgagcggaagaagccttgttcttaacgaatgcttattcgagaacattatatggtcgcacgcaatataatcgaccaagtcgctttttagaagaaattgaggcggagcgtttaatgaaacaaggggcggcagccaatttacagaaagctccagcgcgcacctttgatcctaaagtatttaagcccagcgcaagtaaaccagcttatacacaaccagctacaaaatcagttagcaacaaagtggcaagtggtggcgaaaaagtttcttggcaagcaggtgataaggtccaacataaagcatggggcgttggtacagtcgttcgtgtaggcggttcggccaaagacttagagttggacattgctttcccagaaaaaggcattaaacggttgttagcggcatttgcaccaattgaaaaaatt

SEQ ID NO: 20885 - DNA, 915 bp, Enterococcus faecalis
atgatttacacagtgactttaaacccttctatcgactttatcgttcatgtcgatcatctacaaattggtgatttaaatcggatgacgaatgattttaaattacctggcggcaaaggaatcaacgtttcacgtattttaaaacgtatggagacagaatccactgccttaggttttttaggtggttttacaggctcattcattgctgattggttgaaaaaagaagaaatccaaacgaatttcactcccgtgtctgctgatacacgaatcaacattaaattgaaatcagatactgaaacagaaattaacggcttaggacctgctctaacaaacgaagaaattcaagaactaaaacaagcagttagtcgtgttcaggctggtgatattgttgttctttcaggaagtacacctgcttctctacgcaaaggattttacgaagaattaatccaaattgtgaaggaaaaaggcgcagaatttgttattgatacgacaggtgaagatttaatgaacgctttgtcacaaaagcctttattggtcaagccaaataatcatgagttggcagaattatatcatacaacctttacaagtattgaagatattttaccttatggacatcggttactagaagaaggagcacaacacgtaattatctcaatggctggtgatggtgcattacttttcacaacagaaggtgtttatcgttccaacgttttaaaacgtccactgaaaaattctgtcggcgctggcgactcaatgattgctggttttattggcaacttttcaaaaacacaagatcctttagaggctttcaaatggggtgtcgcttgcggtagcgcgaccgcattttctgatgatttagcctcagaagattttatccaagaacttattcacgaagtaacaattgaaaaaatttcagaa

SEQ ID NO: 20886 - DNA, 1920 bp, Enterococcus faecalis
gtgaacattaatgatttattaataaaagatgtcatgattatggatttacaagctactgataaaaaaggcgcgattgatgaaatggtccaaaaattatacgatggtggccgcatctctgacattgacacttacaaagaaggaattttaaaacgcgaagcacaaacatcgactggtttaggcgacggcatcgctatgcctcacgcaaaaaatagtgccgtaaaagaaccgacagttctttttgctaaaagtaaaaaaggtgttgattatgaagcactagatggacaacctacttatctattcttcatgattgctgctccagaaggcgccaatgatacacatctccaagcgcttgcggccctttctcgattacttatcgatccagaatttgttggcaaattgaaagaagcggaaactccagaagctgtacaagcacttttccaagcagcggaagatcaaaaagaagcggaagaaaaagcagaacaagaacaaacaacgccagcaccagaaagcaatcgtaaatatattattgctgtgactgcttgtcctacaggaattgctcatacttacatggccgaagatgcgctgaagaaaaaagcaaaagaaatgggcgtagacattaaagtagaaacaaacggttcagaaggaattaaaaatcgtttaactgctgaagatattgctcgtgctgatggcgtgattgtcgcagccgataaaaaagtagaaatgaatcgatttgatggtaaaaaattagtcaatcgtcccgtcagtgatggaattcgtaaaaccgaagaactaattaacttagccattagtggtgaagctcctactttccatggcagtgactcggctgcaagcgaccaagaggattcagcggaaggttcaatcggttctcgtatctataaagatttaatgaatggtgtttctcatatgttacctttcgttattggtggcggaattgccattgctctttcctttatgattgatcaatttatcggggttcctcaagatcaattagccaatttagggaattacaatgacgtagctagctggtttaaccaaattggtggcgcagcatttggctttatgttacctgtcttagctggttttattgcttctagtatcggggatcgtccaggcttagttgctggtttcgcggctggtgcattagcaaacgccggaggagctgggttccttggggccctaatcggtggtttcttagctggttatgtagtggttcttttacgtaaagttttcaaaggcttgccaaaatcattagatggaattaaaaccattttattctatccagtttttggtttgattattacaggcttattaatgttagtcattaacatcccaatgaaagcaattaatgatgcgttaaatcatttcctacttggcttagatggcacaaatgctgctttacttggtgccttattagctggtatgatggccatcgacttaggtggaccagttaacaaagctgcttatgttttcggtacagctacgctagcaagtactgttgcagaaggtggcagcgtggtcatggcttctgtaatggctggcggaatggttcctccattagcaattttcgtagcaactcgtttatttaaaaataaatttacaaaagatcaacaagatgccggcttaaccaatattgtaatgggactttcttttgtcactgaaggggcaattccttttgcagcagctgacccattacgtgtgattccaagtttcgtggtaggttctgcctttactggtgcgttggttggtgcgtttggtatcaaattattggcaccacatggaggaatcttcgtcgtcttcctattaagtaatccattactatatctattgttcatcttaattggggcgattatttcaggaattgtctacggacttttgaaaaaacctgtcgaagtacctgct

SEQ ID NO: 20887 - DNA, 1581 bp, Enterococcus faecalis
atgagggaaaagttattaatagggagtttttggttatcattctttaatattgtttgtaaaattctcggattcatttatctaataccttggctaaaatttatgggaactatccacaatcaacaaactgctcaagctatttataatgttgcatacttaccttatgctttattcttatcacttggtacagctggatttcctagtggcattgctaaaaaaattgctgaattaaatattaatggaaataaaaaccaaataaaagaattgttcaaaagtggcttgatagttatggaaataatagggattctctctgctttattaatgtttatttttgctcctacattaagtaaaataagtccaatagttgatcatactgcgggtatcacagcaatccgtagcctttgtttttctttattaattattcctatacttagcgcactaagagggtattttcaaggtctaaattatagttttccttttggtgtttcccaactactagaacaattagttcgagtagtttgtattttagtaggaacctatctaattagagttcaatttaatggtagtattttatctgcagttatattaagtacatttgcatcctccatagggggaatagttgcatttctttatctactttttatcggaaaaaaaagaaatttgtttcaacttaaagatttttacttcttacctttaaaatctatatctcacatgaaaggtcttgctatagatataatcaaggaatcattgccgtttgtatatgtaggatcggctatttctattttacaattaattgatcaattttctttaaaggttttgtattctttgttttttcctcaaagtagtttaagcgaacttcaaacattgtatacattagcctctgcaaatcctaataaattagctccagtactactaggtattattggatcaattactatttcagctctacctttaataagtactgtaaaatcaaaacctgagttattacaaggtacctcacaaatactacgattagcctttacatttttactacctacttcgataggaatgataatattatgcaatcctcttaatacattattctttggatttaatttagatggaagtagatatttatcagcaacaattattagcacatctctattagggatttttacaatagtattatctattttacaagcactaagttttcataagaaagctatgcaaatcacttcaataactcttttattaaaacttattattcaaattccatgtatatatctatttaaagggtatggattatcgattgctacaattatatgtacgatgtttacaaccatcatagcttatagatttctaagtagaaaatttgatattaatccaataaaatataacagaaagtattattcaagattagtttattcaactatagtaatgactattttaagcttactaatgttaaaaatcatttctagtgtttacaaatttgaaagtactcttcaactattttttttaataagcttaatcggatgtttaggtggagtagtattttctgtaacattatttagaaataaatttatttctaaattaggcaagcttttt

SEQ ID NO: 20888 - DNA, 1305 bp, Enterococcus faecalis
atggtttacttcccaaaaatcgaaaaaattaaatatgaaggaacgaacacaaaaaatatgtacgcgtttcgacactataactcagaagaaataattatgggaaagactatgaaagaacatttacgatttgctgtagcatactggcacactatgacacaagacggttcagatccttttggaaaagcagttaataagcgaagttggttgggagaatctcctatggagactgcaaaaaaaagagttatagctttttttgaaattttagaaaagctagatgttgaatatttttgttttcatgacattgatattgctccagaaggtaactctttaaaagaattcttttctaatattgatgaaattacagatttaataaaagaaaagatggatgaaactggtattaaactattgtggaatactgcaaatatgttttcaaatcctcgttatgtcaacggcgcagcatctacaaataatgcaaacgtatacgctatcgcagctgctcaggtaaaaaaaggtttagatgtttcaaaaaaattaggtggagaaaattatgttttttggggtggacgtgaaggatatgaaacattactaaatactgatatgaagtttgaacaagataatattgcgcgtctattcaaaatggctatattttacggtgaaaaaattggacacaagccacaatttttgattgaaccaaaacccaaagagccttcaaaacatcaatacgatttcgatgctgcaactactatggcatttattttaaaatacgggttagaaaaggattttaagctaaatctagaggctaaccatgcaactttagctggacatacatttgaacatgaacttaatgtagctcgaaactatggtgccttgggttcaattgatgctaatcaaggtgatgttctgcttggctgggatacagatgaatttcctactaatgtttatgatgttacattagctatgtatgaaatactagaaaatgggggtattgaacctgggggaataaactttgattctaaagttagacgttcatcttttgaaatggaagatttattacttgctcacattgctggaatggatacatttgcgagaggattaaagagtgcgatgaaattaaaagaggatcgtttctttgaggatctaaaagaacagcgttattcatcgtttaaaaaaggtattggagcaaaaattatttctggaaaagaaaatttagaaagtttaactaattatgccctaaaaaatgatgaaccaataatagaatcaagtcatatagaatatgtaaaaaatattttaaatgattatctgtat

SEQ ID NO: 20889 - DNA, 1281 bp, Enterococcus faecalis
atgaagacgttaattaagaatggaaaaatcatcaaaaaagagaatcaattgattgaggcagcactttggctagaaaatggtgtgattcacgcaatcggggaatcgtttgacgaagcagattttgagcaagtgtttgatgcgaacgggcaactaatcacgccaggcttggtggatgtgcatgttcactttagagaaccaggctttacgtataaagaaacgattaaaacgggtagtaaagctgctgctcgcggtggttttactacggtttgcgcaatgcccaatttgaatccagtaccagatacggctgaaaaattaagtgaggtttacgacttaattcaaaaagatgcagtcgtgaaagttttacaatatgcccccattacagaagagctacggagtgaagttttaaccaatcagaaggccttaaaagaagcgggcgcctttgcatttacgaatgatggtgttggtgtccaaacggcaggaacgatgtacttagccatgaaagaagcggctgcattaaatatggcacttgttgcgcacacggaagatgaatctttattatttggtggtgtgatgcatgaaggagaagtttctaagaaattaggcctaccagggattttaagtgcaacggaagcttcacaaattgctcgggatattactttagcgaaagaaacaggcgttcattatcatgtttgtcatgtttcaacagaagaaagcgtgcgcgttattcgagatgctaaaaaagcagggattcacgtaacagccgaagtttcgccacaccatttaattttagtcgatgaggatattcctggtgacgaagggttttggaaaatgaacccgccattacgtggtttagcagatcgacaagcattgattgacggcttgttagatggcacgattgactgtattgctaccgaccatgcgccccatggtttagaagaaaaacaacaatcatttttaaacgcaccttttggtattgtcggtagtgaaacggccttccaattgatttatacgaactttgtcgaaacaggcattttcacattagaacaagtgattgattggatggcagtgaaaccggcagaaatttttggattaaacgcaggaacactaacaattggtgcaccagcagatattgcagtttttgacttagcaacagctgcaccaattgatgcagaagcatttgaatcaatggctgtcaatacaccatttacagggtggacagtcaaaggaaagacacttatgacatttgttgacggagcattagcttggtcggaggaggcgcag

SEQ ID NO: 20890 - DNA, 1077 bp, Enterococcus faecalis
ttgaaaaggttattgattttagaagacggaacagtatttgaaggaaaagcgtttggtgcagaaggcaatgtagtaggagaagttgtttttactactggcatgacaggttaccaagaagcaattactgaccaaagttttaatggacaaatgattacttttacgtatccattagttgggaattacggggtcaaccgagatgattatgaatccattgcaccaacctgtaaaggtgtcattgttaaagagcatgcgcgggttgcttcaaattggcgtcaacaaatgaccttggatgaatttttaaagcgcaaagggattccgggaatttcaggaattgatacgcgtgcgctgactcgtaagttacgatcagctggaacaatgaaagggagcatcattgatgccgtggatgatttgccgcatgcgtttgatcaattaaaagcgacagtcatgccgaaaaatcaagtggcacaagtctccaccactaagccttatccgagtccaggtattgggcgtaatgtggtcgtcgttgattttgggttgaaacatagtattttgcgagaattatcaaaacggcaatgcaacttaaccgtgttgccttataatacaacggccgaagagattttagaattaagtcccgatggtgtcatgttgacaaatgggcctggagatcccaaagatgtgcctgaagctattgaaatgattcaagcaatccaaggaaaagttccgattttcggcatctgcttaggtcatcagttattttcattagcgaatggtgcggatacgtataagatgaagtttggacatcgcggtttgaatcatcctgtacgagaaattgcaacaggacgcattgatttcacttcacaaaaccacggatatgccgtagatgaagcaacaattgatccagaaaaattacttgtgacccacgtggaagtcaatgatggaacggttgaaggcgtgcgtcatcgagattatcctgcttttactgtgcaatatcacccagatgcggctccaggaccgcacgatggtcttcatttatttgacgaatttatggaattaatggatgcatggaaggagcaaaac

SEQ ID NO: 20891 - DNA, 3180 bp, Enterococcus faecalis
atgccaaaacgaacggacatcaagaaaatcatggtgattggttcaggaccaatcattattggacaagcagcagaatttgactatgcaggcacacaagcctgtttagcgctaaaagaagaagggtatgaagttgtcttagtaaactcaaatccagcgactatcatgaccgataaggaaatcgcggatcatgtttatatcgaaccgattactttagaatttgtttcaagaattttgcgaaaagaacgtcctgatgctcttctaccaacattaggtggtcaaactggattaaatatggcgatggaattatcggaatcaggaattttagatgagctaaatgtagaattgctaggaacaaagctcagtgcgattgaccaagcggaagaccgtgatttatttaaacaattgatggaagaattagaacaaccgattccagaaagtgaaattgtcaatacggtggaacaagccgtggcttttgccaaacgaattggctatccaattatcgttcgtcccgcatttactttaggtggaacaggcggcggcatgtgtgatacggaagaagaactccgccaaattgctgaaaacggtctgaaattatcaccagttacacaatgtttaattgaaaaaagtattgctggttttaaagaaattgaatatgaagtgatgcgtgattcggctgataatgcgattgtggtttgtaacatggaaaactttgatcctgtcggcattcacactggggattcgattgtttttgctccgagtcaaaccttatcagattatgaataccaaatgttgcgagatgcgtctttgaaaattattcgtgcattaaaaattgaaggtggctgtaatgttcaattagctttggacccgcatagctttaattattatgtgattgaagtgaatcctcgtgtttctcgctcatctgcacttgctagtaaagccacagggtatcccattgcgaagttagctgcaaaaattgctgttggtttaacattagatgaaatgaaaaatccagttactggaaccacttatgccgaatttgaaccagctttggactatgttgtttccaaaattcctcgatggccttttgacaaatttgaaaaaggtgctcgagaactaggaacgcaaatgaaagcaaccggggaagtcatggcaattggccgcaatattgaagaatccttattaaaagcagttcgttctttagaaattggtgcttatcacaacgagttagcagaactaagtcatgtcagtgatttggaattaacgaagaaaatggtccatgcgcaagatgatcgattgttctacttatcagaagccattcgcagaggatatagcatcgaagaattacaaagtttaacgaaaattgatttattcttcttggataaacttttacacattatcgaaattgaaacagcccttgaaagtcacgtggacaacgtagctgttttgaaagaagccaaacaaaatggtttttctgatcggaaaatcgcagcactttggggacaaacagaacaagccatcgctgacttccgcagagccaatcaaattgtgcccgtctataaaatggtggatacgtgtgctgcagagtttgaatcacacacgccttatttttatagcacgtatgaagtggaaaacgaaagcaatgtttcgaaaaagccttctgtactagtattaggttctggtcccattcgcattggtcaaggggtcgagtttgattatgcaacggttcattctgtcaaagcgatccaagcggctggttatgaagcaattattatgaatagtaatcctgaaacagtttcaacagatttctctgtttctgataaattatactttgagccattaactttagaagacgtcatgaatgtgattgatttagaaaatccgattggcgtgatcgtccaatttggtggacaaacagcgattaatttagctgagccgctcacaaaacaaggcgttaaaattcttggaacaacgattgaagatttagatcgtgcggaaaatcgtgatttatttgaacaagctttgcaagagttagcgattcctcaaccaccaggagatacggccacaagtgcagaagaagcagtcgtgattgctgatcgtatcggctatcccgttttagttcgtccaagttatgttttaggtggtcgtgcaatggaaattgtcgaaaatcaaaaggatttggaagattatatgcgacatgcagtcaaagcttctccagaacatcctgtcttggttgatagctatttattgggacaagaatgtgaagttgatgccatttgtgatggtgaaacagtactaattccagggattatggaacatattgaacgagctggcgtgcattctggtgattcaatggcggtttatccaccgcagtatctttctcaagaaattcaagcaacaattgccgattatacaaaaaaactggcacttggtttaaactgtgtaggtatgatgaatattcaatttgttattcatgaaaatcgtgtttatgtgattgaagtgaatcctcgtgcgagtcgaacagttcctttcttaagtaaaatcacagggattccgatggcccaagttgctacaaaagcgattcttggtgagaaactgactgacctaggatatcaagatggattatatcctgaaagtaaacaagttcatgtgaaagcccctgtattctcctttacgaaactacaaaaagtagatacgtacttagggcctgaaatgaaatcaactggggaagttatgggtagtgattattatttagaaaaagccttgtataaagcctttgaagcatctggcttgcatttgccaagttatggggctgtacttttcaccattgctgatgaaacaaaagaagaggcgttagaaattgctaagcgtttttcagcaattggctatagtttagtcgcaacggaaggaaccgctgactttttagcgaagcatcagttgcctgttaagaaagtgacgaaaatttctaatcctgaaggggaaaccgtgctggatgtcattcgcaatgggaatgcgcaagtggtaatcagtaccatggataaaaatcgttccagtgccaaccaagatggattttcaatccgtcgggaagcagtcgaacatgggattccattgtttacctcacttgacacagcaaatgcgattttaaaagttttagaatcaagagcctttacgacagaagccatt

SEQ ID NO: 20892 - DNA, 1572 bp, Enterococcus faecalis
atgacgatcaatcaaaaagaagcagtcgatagtcgccgtacgtttgcgattatttcccatccggatgccgggaaaacaacgattactgaacaattattattatttgggggcgccatccgccaagctggaacagtcaaagggaaaaaaacagggaactttgccaaatctgactggatggaaattgaaaaacaacggggaatttcggtaacgagttctgtgatgcaatttgactatcaagacaaacggattaatatcttggacaccccagggcatgaggatttctcagaggatacgtatcggaccttaatggccgtggatagtgctgtgatggttattgacagtgccaaagggattgaagcacaaacgaaaaaacttttccaagttgttaaaaaacgtggtattccaatttttacttttattaacaaattggaccgtgacggacgggaaccattggaacttttagaagaattggaagaactattggatattgaatcttatccaatgaactggccaattggtatgggaaaaggcctagaaggtctatacgatatttataatgaacgcgtggaattatatcgtccagaaaataatggcggggagcgttttattcctttaaaagatggcgatataccaagcgatttaccattgcacaataacagcgtttatcaacaagtgttggaagatgttgagttattggtagaagcaggcgatgaatttagcgaggaaaaaatcgctcgtggtgatcaaacgccagtcttcttcggttctgctttgacaaactttggggttcaaacatttttagaaaccttcttacaatttgcgcctgcgccacatgcgcataaaacagaagagggtggcgaagtaagtccttatgaaaaagaattttcaggctttgtctttaaaattcaagcgaatatgaaccccgcccatcgtgatcgaattgcttttgttcgaatttgttcaggtgtttttgaaagaggcatggacgtgaccttaggtagaacaggcaaaaaagtcaaattaagtaacgtgacgcaatttatggcggatgcccgcgaaaacgtcacagaagctgttgcaggcgatattatcggcgtgtatgacacaggaaattaccaaattggcgatactttgtatgaagggaaaatgaatgttcaatacgaagagttgccgtcatttacccctgaattattcatgaaagtgactgccaaaaacgtaatgaaacaaaaatctttccataaaggaatttaccaactggttcaagaaggagccattcaattatacaaaacatatttaacggaagaatatatcattggcgccgtaggtcaattgcagtttgaagttttccaataccgaatgtctaatgaatacaatgctgaagtggtaatgacgccaatgggttctaaaattgcccgctggattaatccagaagatttagatgaacgcatgagctctagccgaaacattttggcacgggaccgtttcgatcaacctttgttcttatttgaaaaccaatttgcggaacgctggtttgcggataaatatccagatgttgaactgaaaagtttgatg

SEQ ID NO: 20893 - DNA, 1377 bp, Enterococcus faecalis
atgaataatgctgaccctgagagtcagtcgctaattgcgcaacttctattattagtcgtgttgacgtttatcaatgcctttttggcagcggcggaaattgcagtcgtatctgttaacaagaatcgtgtggaacaaaaagcggaagacggcgacgcaaaagctcaaaaattgcttaaggtattgcaagaccccaataactttttatccacaatccaagtagggattactttggttaatatcctatctggtgcttcattagcagagactttatctagtcgtttggcccctgtattaggtggcggcgccgcagctaagagtcttgccagtatcattatcttagctttgttaacgtacgtttctattgtatttggtgaattataccctaaacgaattgctatgaataaatcagaagaagtcgctcaattgacttctggtgcagtccgctttttaggagttatcgcgcgtcccttcgtttggttgctatcggcttcgaccgatttattatccaaaatcacaccaatgactttcgatgatgctgattcgaagatgacacgagatgaaatgcgctacatgcttgaaacagaaggtgttttggaaaacgaagaactagaaatgttacaaggtgtcttttcattagatacaaaagtggcacgagaagtaatggttcctcggacagacgcattcatggttgatatccaagatgatgtccaagaaaacatcaatttaattttaggagaaaattattctcggattcctgtttatagtgaagacaaagataaaattgttggtattttacataccaaaacgttactaaaagctgcacgtaatttaggctttgaaaacattgaattaggcgcgattatccaagaaccattatttgtcccagaaaccatttttattgatgatttactttatgagttaaaacgaacacaaaaccaaatggcgattttactagatgaatatggcggtgttgtcggtttagcaacactggaagatttactagaagaaatcgttggtgaaattgacgatgaaacagatgaagtagaaaatttatatacacaagtggccgacaatgaatatttggttcaaggacgcatgttaattgacgaatttaatgaagtatttgaaacagatttacacatgagcgatgttgatacaatggcgggttacttaattacagcattaggaaccattcctgatgaaggggaaaaaccttcttttgaagtgggcaatattaagttaactgctgaagaaatggaaggcacacgtttgctagtcttacgcgttcatttctacgatgaagaaactgtcgatgaagaaccagaagaaaatcgtcgttttttccgtaaagaaatggaagatgacgaaccaagacgt

SEQ ID NO: 20894 - DNA, 630 bp, Enterococcus faecalis
atgacaaaagtagcaaaaaagattgccaaagatttattagatattgaagcggtatttttaaaccctaatgagccgtttacctgggcaagtggcataaaaagcccgatttattgtgataaccgtatcacgatgagttatcctgctgtgcgtaaagaaattgcagaaggcttagcggcaaaaattaaagagactttcccagaagtcgaagtgattgctgggacagctaccgcagggattccacatgcggcatgggtagccgatattttaggattaccaatggtttatatccgcagtaaagccaaagatcacggcaaagggaatcaaattgaaggccgaatttctgaaggacaaaaaatggtagttatcgaggatttaatttcaacaggcggtagcgtgttagaagcggcagaagcggcggaacgtgaaggagcaacggttttaggcgttgcggcaatcttcacttatgagttacccaaaggaacggcaaattttgcagataaacagatgacgttactaacgttaaccaattattcaactttaattgatgctgcattagaagcaaattatatcgaagaaaaagatgttaccttattacaagaatggaaaaaagatcctgaaaactggggcaaa

SEQ ID NO: 20895 - DNA, 1131 bp, Enterococcus faecalis
atggaaaataaagaagttataattattggagcaggcgctgctggcgtaggtatgggggttgctttaaaagattttggcataaataattttgctattttagagagaaagcaggtaggtaatagttttattaaatggcctgagcaaacaagatttatcactccttcttttacaagtaatggatttgggatgcctgatttaaatgcaatagcaattgatacatctccttcatatactttaggtgaggaacgtttatctggaaaagattatgctaaatacctacaattagtttcagaagaatataagttacctattaagacaaattgtaaagttcaatctattaaaaaagaaaaaactggttatttgcttgaaacaacaaaaggatttatttatgcagaatatgtaatttttgcgatgggagagttctcttttccaaataaatctagtattaaaggtgcttataagaatagtttacattatggcgagattaattcttggattgaaattaaaggggataagcagacgattatcggaggaaatgagagtgcgattgatgcagctattgaattagctaaattaggtaaacgagttacaatttatacagatactttggggttaaatataagagatgctgacccgagcaaaaggttagcaccacgcacaagacagagattttttgatttacgtgtaaaccaaaaaaaattagatagtattaaaatatacacaactaccaaagttaaaaaaattgaaaaaaagtctactagttatatattgattacagaaaatgggaaatcattacctgtagaaaatataccaattctttgtacaggttttaaaaatggcacaaaatctattactgcatcattgtttaagtataaggaaaatggagaggttcttttaaatgattttgatgaatcgacaatagctaaaaatattttcttaaccggtccaaatgtacgtaaaggtaataccattttttgttatatatataaatttcgccaacgttttgccgtaatcgctaatgaaattgcccgacgaaaacatattactattgacgaaaaaaaattgtcatactataaaaatcaatctttttatttagatggttgctctgggtgtgaagtaagatgtagttgt

SEQ ID NO: 20896 - DNA, 699 bp, Enterococcus faecalis
atgcaaattatccgtgtagcaaatgcagaagaaggcggcaaaaaagcgtttgaattaattaaagaaggtatgaacaatggtgcgaaagttttaggcttagcaacaggtagtacaccagaaacattatataaagaaatgactgcaagtgatgtcgactttacagaaatgacttctgtaaacttagatgaatatgttggtttaggtggcgaagatgagcaaagttaccgttatttcatgaacaaacacttattcgacaaaaaaccatttaaagaaacatttgtaccaaatggtaaagcagaagatttagatgctgcttccgcagaatatgaaaaaattatcgatgcacatccagtagatatccaaatcttaggtattggtcaaaatggacacattggtttcaacgaaccaggcacacctctagatagcttaacacatgtcgttgagttgactgaatcaacaatcaacgcaaacaaacgttattttgacaaagtagaagatgtcccaacacgtgctgtttctatggggattggctcaatcatgaaaggtaaaaaaatgattttaatggcttatggcgaagcaaaagcagaggccattaaaggaatgattgacggaccagtaacaacagacatgccagcaagtgcattacaaaaccatcaagatgttgttgtaatcattgatgatgcagctgcaagtaaatta

SEQ ID NO: 20897 - DNA, 777 bp, Enterococcus faecalis
atggaatttcagttggataaagactggcgtctgcagccgataaagggcgcaactggtcaaacatacatgggaataaaagaaaccgagaaagtgttcattaaacgaaacacttctccacttcttgcagcattgtctaaagaagggttagccccgaagatgatttggacaaagcggacagcgaatggcgacgtactaacagcccaagaatggctggaaggacgtttattacatgcggacgaaattggcaaacgcaatgacgtgattgacgtgttataccaattgcatcattccaatttgctgaaagacatgttgaaaaaaattggtggcgaagtttgtaccccgctaacaatgttgaaagagtataagcgtcaactacctaaagaattaaaacgaaacagttatttaaaagaagtaatcacttatttatataatcatttaccagaatatccagaaactagttatgtagctgttcacggcgatgtgaatcatcggaattggttagtctcgaataattatctctatttagtagattgggattctgtgatggtcgcggacccagcggtagatttaggaatgattttgagtcattatgtccctcgttccggttggaatcaatggttactatcttatggtttaatcccgaatgaaagtacggttcaacgaatttattggtatggtttatttagctttttacaagagattgttcgtcatcaccaagagggcgaaagaagagcaatgactgcagaaattttacaattaaaacgaatgtttagtatt

SEQ ID NO: 20898 - DNA, 816 bp, Enterococcus faecalis
atgaattacatttatttaattaatgaacattatcccttattaacaaaatcggaacgaaaagttgctgattttattcttaactctggagaatctattatttacagtactatgaatgatattaaaacaaaagcgaatgttggcgatgcaacaatcattcgcttttgtcaaaaacttggattttctggtttttctgatctaaaaattgaaattgctaaagaagattttagcaaaaaaaaagaacaaccatctagtggtaaataccacgatgaagttgctaaaagtttgattgaagtacttcagtctacttcttgtttaattaatgaagaaaaattaacaaaagcaatccaacttattaatcaagcaagcagcctatatatttttggtgtaggatctagtggaaatactagtcttgatttggaaagtatgtttttgagggtaggaatacaagctaaagctgtattagatcctcattatcaagctcaagttgcttctttgttaacagatagagatttagttattatcttttctttatctggaaaaacaaaagatacttatgactcattaaaaattgcaaaaaataatggagcaaaaatacttgctataacgaattatattcattcaccgataggaaaatctgcagatttagttttacaaacagcaatcgaagaatttttaaatggtggttctttagctggaaaaatttcacaactttatatttgtgatttgttagtacatgaatatgaacaaaataacaagattaattcattggatttaagagaaaaagtcttacgttcaattattgataaaagaattgaa

SEQ ID NO: 20899 - DNA, 336 bp, Enterococcus faecalis
atggaaatggaaaaaacaaaccgcatgaatgcgttatttgaattttattcgacattattaacggaaaagcagatgaattatatggagctttactatgctgatgacttttctttaggagaaattgcggaagaatatgaggttagtcgccaagcggtttatgataacattaaacgaaccgaaaaaattttagaagaatacgaaaaaaagttacatctttattcaaactatgttgtacggaaagaatttcttgaacaactacagcagtatgttcaagaaacttatcccaaagatagtgaaatcaaaaaatatattgaacaaattcaagaaatagaggaa

SEQ ID NO: 20900 - DNA, 750 bp, Enterococcus faecalis
atggaatatacaattaaaaaaatggcttcactatctggcgtcagtgcacggacgttacgatattatgatgaaattggtcttcttcaaccagccagaattaattcttctggttatcgaatttacgggcaagccgaggtgaatcgtttgcaacaaattcttttttaccgtgaattggatctgaaactagatgaaattaaagaaattttggagcaacctgactttaatgttgaacaggctttatacgagcatcaacaaaaactattggaaaagcgcaatgaaattgatcgtcttttagcctctgttcaacaaaccttacaccattacaaaggagagataaacatgtcagatcagcaaaaattcgaagcattcaaacaacaaaaagttcaagaaaacgaagaaaaatatggtaaagagattcgggaaaaatatggcaacgaaacgattgaacaagccaacaaaaaatatttaaacttgacggaaaaagacatgcaagcaatgcagaacgtggaaaaagatttattttctaagttagccatgtatcaaaaatcacccaagttgactagccaacttgcgcaagaaattttccaattacacaaagattggttaatgtactcttggtcaagctattcgccagaagcacacaaagggttaggccttatgtatgttggcgatgaacgatttacgtcatattatgaacaacacggcgctggttttgccgaagcgttaaacgcaattatccaaaactacgct

SEQ ID NO: 20901 - DNA, 942 bp, Enterococcus faecalis
gtgaaaaaattacgtgaattaacagtagaagaactttttgaatcatttgttctaattaaaaatgccgatgtacgtgtagctaaaaatgggaaaaagtttattgcctttacctttcaagacacatctggcacgattgacggaaaatattgggacgcctctgaggatgaaattacacgatttactgcgggaaacgttgttttactgaatgggaaacgagaagtttatcaaaataaaccccaagtaaaaattttacacatgcgtttagcgacagcagaggaaccaagccagccaagtttatatatggaacgagcgcctttgaaaaaagaagagatggtcgaggaaatcaatcaagtgatttttgaaattaccaatgctcattggaatcgtattgtgcgctatctcatgacgaaataccaacaagaattttatgaatttcctgcagccaaacggaaccatcatgcttttgcgaatggcttagcttaccacactgtctcaatgttgcgcctaggcaaagcaattgctaaggaatatactgaaattaacacgtcactattatacgcggggattattttacatgacttaggaaaagttttagaactatctggtgctattacgacagaatatacggtggcagggaacttaattggtcatttagttttggtggatgaggaaattaccaaggcgtgtttggctttgaaaattgatgatcgagaagaagatgttgtcgttcttcggcacatggtcttagcccaccatggattgttagaatatggctcacctgtgcgaccaagaattatggaagcggaaatcttacatcaaattgataccatggatgcgtccattcaaatgatgctaggggcaattcgtcaaacacagcctggggagtatacggaacgaatctttggtttagataaccgcagtttctatgttccaaaagataaa

SEQ ID NO: 20902 - DNA, 2709 bp, Enterococcus faecalis
atgaaattactcgcagtagagattgtgggctttggaaaatggcaacaacagaaaattacatttgaatctggtaatcaattgctgtacggcgcaaatgaagttggcaagtccacattgtatcaatttattcaagcaatgctgtttgggtttcccacaaagggcaaaagaaaacgcgattacgcacctaaaaatggtggctcgtatggtggtcgtttgtggttggcacatcctgtgtttggggaagttcaagtcgagcgttttaaagaaaaaaataaagggcaagcaatcatttattatcaacaacaaatgggggatgaaaaaaccttacagcaaatgttacatccgctaacgaaaaagttatttcaagaggtttttactttccaacaagaacaattaattacgagtgacaagttgacagaagaggaactgcaaacatccttgttagccattggtgtttctggtagtcaacaacttttgacttaccgaaatgcgtactttaaagaagcacaaaaaatctttaaaggtaaaggacagcagccattactcaatcagaagttggcggcttatcaagaactaaaagagcaaattcaagagaaagaagcgcagcaacaaacttttcaacaattagaagaaacgattcgcgaaacagaacaacagcgagtgacactgcaacagcaattaaaagaaacgcaacaggacttgttacaggttgcggaacagcaacgtcactttcccttgtacgaagaatggcagtcgctacctgaagaaacagagaacgttgttttagtaaaagaagaccaagttcaattagaagaaacctttcaagaatatatgtacctagacaaagaacgacaacgtttgaccaaagagttatctcttcagtcagaagcgctcgatgttccagaaggatatgctttttacctagaacaagaagcattgattcaacaattgttgaatcaacgctatgatatgcaacaattgatgacggaatcggaatggatgacccaaacctttgagcaaaatcgtcaagaaatggtccttttagagaacgaatggtcatggtcgcctgaacgaccaccacagcttttttatgacaacgaaaccgttcaaaagtggcgccaacaacaagttgcgtatacgcaagctcttcaaaaaggacaagaacagaaagcattcttggcttctcaaattgaaaatctggaagaccagttaacagattttgaaaaagcgcatgccgcattttttggtgaagcgacgcgtgcccaaaaagcacagaaaacaagtcaaccactttggttattgctaggaagtatccttgtattactcggtttctttttgccaagccctttaaaatggggcctagttctcgtgggagttagttttatcgcgaaagaagtgcttagctacgccactagaaaagaagcttcctctgatgaagtgaaagaagagtggcagacaaaactttcgcaactagattatttaaatgaacagttccaacaggcgctgaatcaagaacgtgaggcacaactgcaagtggaacaacttgaacaagcagtagcggagcaagcccaagtccatcaattaggaaaaatgcaacaaattgatactttaatgaatcagcgggaattgattacgcgctatttattgcttgttcaaacaaatgaagaactcatgagtcaattgaaggaaaatcaacaaaaacgccaagtatttgaagaacaaatcttcccattgatgacgcatttacccttgcaaggaaagagcctttccgaaaagttacactttttagaagggtttgctgaagaaatggagaaagttcgctttgctcaagagtatcaagcagatggctatctcaaacagcagttacgagagttgaaaactaaacagcaagaagcattaacacgaattcagcctttactaattcgttatcggattctatcaatcgctgatgttccaagtaggattcaacagctgaccactcagcaagcccaagttggtcgtgggcaagaattagcgacgcaattaggtaatctgtttccagaagcggtaacagaagcaacgttaaaagaccgttctttacaactggcgcagcaacaagcattggaagaaagccagttagataaaatacaagaacagtatcaagcgctgatttatgaaaaacaacaattaatgacggatggtaccttagatgagttgtatcaacgacaagcaattttaaaagcggaaatcaaagaactagctcaacgttggtctgggtatcaactagcgggacaactgctaatggacctattaacagagctttcggaacaacaattgcccagcttattacagtatgcatcaagctactttgcacttttaacaaatcagcgttatcaatcaatccaagtagccgaaggtcaactagttgcggtgacgaaagaacaagaaatgttttatttacatgaattatcaactggcactaaagatcaattgatgatggctgttcgttttgcctttttagcagtccaaggcgagcaactgatttgtccaattatcattgatgatggctggttacactatgatcatcaaagaaaagcccaattagctgaattatttactaaatttggtcaaaaacagcaagtcatttgtttttcttctgaccaagaaatggtaagctattatcaggacttacaacaaagagtaattgcgttagaaggaggaagcgtcaag

SEQ ID NO: 20903 - DNA, 1233 bp, Enterococcus faecalis
atgaaactattgcatacagctgatttacacatggatcggtcttttgaagggttaactgggatcccgacagccttagcgaagcgcttaagagaagctaatcaacaattgttaatgaatatcgtaacagttgccattcgagaagcggtggacttggttatttttgcaggagatacgtttcatcaaagtcagacctctatttcaatgcaagcccaattgatggctgcattagaacagttgaaacaagcagaaatccctgtgattctaacatttgggaatcatgattactataaaaaagaccgctattggttttcttttccagacaatgtctttttatttgaaaaagaaatggttgagacactgtattttgaaacgaaagcgggcgaacaagtggctgtttcagggtttagttatgagcatccctggattgatgaaaataaagcactagaatttcctatcaaacaagcagaatctgatattcatattgggatttatcatggagacaccagtcggaaagcgcaacaaaattatgctccgtttacatggaaggatttaaaagccactggctataattattgggcattgggccacattcatcagccgcaaattgttagtgaacaaccgctaattgtttatcctggaacacctcaaggacacacgaaaaaagaacagtctttacaaggggttgcagtggtcacactttcccaaaatcaagcgactgttcaatttgaaaaagtcgcagaaatagattggacgaatgaagaagtatctcttgcgcaatgccgtgacacccaaagcgttttgtcttatcttgaaaccagtttgctgacgaagtggcaggcgcatcagcaacagcaattgatggcgttgacactgaaagaaacgcaacatttggatgtgaccgtggtgcaagccattgtcaatggtgaactattaagctacttacagcagcagcttttacaaaaaacgcaaggtgatttttttgtttatcgcctaatactgcaagcagaggaaccaacgaaagaaccgatctatttagccgctagtcccaacttattaacggcattagaaaaaacatacttagatccagttatttttgaagataccaccaaggaattgttacgttatccagaatttgctggaattttttcaatggatgagcagtggcgattagagagcttgcgcctagcacatgagcaaattaatgaagactttactattcaggaggacccacta

SEQ ID NO: 20904 - DNA, 2310 bp, Enterococcus faecalis
gtgaaaaaatcaaactatcaatggcagttacagacaaagacagaattacctgtagaatttatagaacaattaaaaaaagaagaaattaatccattaattggccaacttttatggcaccgcaatatccggacagaagaagcattacgtaagtttctacatccgactatcgaagatatttatgatccgttcttaatgcatgatatggagaaagcggtagcccgcatccagcaagccgtcgaagcgggtgaacaaatccttgtctatggggattatgatgcagatggcatcactagtaccacggttatgaaagaagcaatcgaattagtcggtggcatggttcagtactttctaccgaatcgttttgttcatggctatgggcctaataaagacgtatttgctgaacaaattgaacaaggagtccaattaattgtaaccgttgataatggtgtagccggacatgaagcaattaactacgctatggcacaaggagtagatgtaatcgttactgaccatcatgaattgcctgaacaattaccagaagcctatgcgattgtccaccctagacatccacaaggtgactatccttttggagatttagctggtgttggcgtggctttcaaagtcgctactgcgttacttggtgaattgccaattgagttattagatttggtagcaattgggacgattgctgacttggtttcattaaccgatgaaaatagaacgtttgtcaaaatgggccttcaaatgattcaaactggtgatcgaattggtttagacgttttattacaagaagcgggtgtgaaaaaggaagctgtttcagaagaatcaattggctttaccattggacctcgtttaaacgcattaggtcgattaggggaagccgcaccaggtgttgaattgatgactacatttgatgaagaacaagcgctggaaatcgctaaatatattgatcaacaaaacaatgaacgaaaagacattgtaacgacgattgccaaagaagccctggatttattcgacccgaatgcgccggtccatattttagcgaaacaaggctggcatgaaggcgtcttagggattgtcgcgggccgcattatgcaagaaacggggaaaccaaccattattttagcaatagatgaatctggtacgactgctaaaggctctggacgcagcattagcgcattgaatctctatgaggcgttgaacgaagtgcgtgagcaattcactcattttggtgggcatcatatggcagcgggaatgactttacctgttgaaaatattccttttgttcaagaacatttggcacactttattgaaaaaaatcaaattgatatggctaatggacaagagttgctcattagtgagagcttagcggtttcgcaggccacgactacttttattgatcaattgcgtattttggcgccttttgggaccgataatactgttccaacttttgtatttaaggaaatcacgcctacgcaaattcggcaaattggtgcagataatgcacatctgaaatttcaaatgaatcaagaaggggcacaattggatgcaattgcttttcaaatggggcctcaagcggatgaactagcacaaggaaccgccgatgtggcaggccaactttccatcaatgaatggaatggtcgtaagaaaccacaattaatggtgactgattttgctgtattgggaagacaattatttgattttcgtggcaaaaataatcaaacgaaaccaattccttcagaagcaacagcttatcttttgtttgatgaaaaaaatcaaaaattcatttcagatccaaccgctaatattattgtttggtcaaaccaagaagaattggtggaagctgtttctcaaaatcaaatcgaacaactggtttttgtcgactgtcctgtggaagcaatcacggttaaagaaattgttgaagcgactgagatacaacgtatatacatgatgtttatttcaccagaagaagcttatttaaacggtatggcttcacgtgaacaatttgcaacattgtataaatttattttgcagcaaaaagaagtaaatctacgttcccagctatcgaaggtggcaaattacttaaatatccaagaaaaattattaattttcatgatacaggtgttttttgacttaggatttgttacaatagaaagcggtgttttaaacagtattgagaaacccgacaatcgaccattgactgaaagtcaagtgtaccaacaacgattgaaaaaaataaaaacagaagaatttctactttacagtgattgtcaaacaatacaacaatggctgtggaatgaggaggacaaa

SEQ ID NO: 20905 - DNA, 651 bp, Enterococcus faecalis
ttggaaaaaacgcatttctcaaaaaaatacctaatcgtgaacgaagtcttgaatgcagttacacatggcataggcgcaggtttaagtattgctggcttagtcattttacttgttaaaggagctcgtttaggctcaccgattcacgtggtatcttatgctatttatggctccatgttgattctactttttttatcttcaacgttatttcatagtttaatttttacaagagccaaaaaggtctttcaggtcttcgatcatagttctattttcttattgattgctggcagctatacgccgttttgcttaattagtattggcggttggttaggttggaccttatttagtttagtctggttaatcgccatcgtcggtattgtctataaatccctcacgttgcataaacaagaaacagtgaaaaacatttcaacgattatttatattgttttaggttggctctgtatcatagctgctcgtccgttatatgaatctcttgggtttacaggaacagcgttattggtcgcagggggtgtgtcttacacattaggtgcagccttctattcattgaaaaatgtgcggtttatgcatgtggtttggcatttgttcgtcatgcttgcagcgatcctcatgtatttttctgttctcttttatacg

SEQ ID NO: 20906 - DNA, 972 bp, Enterococcus faecalis
atgtgtacagcaattacttatgtatcaaaagatcattactttggaaggaattttgattatgaaatttcttataatgaggtggttactattacgccgagaaattataagttttcatttcgagaagttggaaatttagatcatcattttgcaataattggaattgctgctgggattgctgattatccgctttattatgatgcaataaatgaaaaaggattaggaatggctggattaaacttttcaggctatgcagattataaaaaaattgaagaaggaaaagaaaatgtttctccatttgagtttattccttgggtattgggccaatgctctactgtagatgaagcaaaaaaattattgaagaatcttaatttagtaaatattaattttagtgatgaacttccgttatcccctctccattggctgttggctgataaagagcaatctattgtggttgaaagcacgaaagaaggcttacgtgtatttgataatcctgtaggcgtattaacaaataacccaacatttgattaccaattatttaatttaaacaattatcgtgtactttcaactagaactccaaaaaataatttttcagatcaaatagagttagatatttatagtagaggaatgggtggtattgggttgccaggagatttatcatcagtatctagatttgtaaaagcaacttttactaagttaaattctgtatcaagaagttcagaatatgaaagtattagccaattttttcatattttaagttctgtcgaacaacaaaaaggattgtgtgatgttggtgatgaaaaatatgagtatacgatttattcttcatgttgtaacctggaaaagggaatttattactatcgtacgtatgacaatagtcaaattactgctgtggatatgaataaggaaaatttagagaaggatagcttaattgtttatccaatggtggaaacacaacaaattaactatgctaat

SEQ ID NO: 20907 - DNA, 1515 bp, Enterococcus faecalis
atgcaagcactgattgaaacttttttcgctcgaaaagaagaatatctgcaagcgttaatcgagcatatgcaattgtcctttatctcgttattattcgctgcgttgattgcaattcctttagccatttatttaacaagtcatcgtaagttagcggaaagtctgttacaagtgactgggattttccaaaccatcccttctttagccttgctaggcttactgattccgttaattggtattggtcgaccaccggcaattgttgcgctagtgatttatgccttattcccaattttacaaaacacctatactggtttgacggaaattgatccttcgttagaagaagctgcagaagcatttgggatgagtaaaaaagaaaaactgtttaagtttgagttgcaaatggcgttaccatttattatttctgggattcgaacggctaccgttttaattattggtacggccacgttggcggcgttaattggagcaggtggtttagggaccttcattttattaggaattgatcgaaataatttatcgttgatttttattggagccctttcatcggctgcactagcagtcttatttaattatggaattcattggttggaaaaagcgaatgggcggcgactaatcattggcggtactattttaggccttttgttaggtggttcatttttctggaatcaacaaacttcttcaaaggaaaagcagctgacaattgctggcaaattaggagcggaaccagatattattattaatatgtataaagccttaattgaagaaaatagcgacattcaggtgacgttaaagccaaactttggcaagactacttttttatataatgccttgaaatcagatgaaatcgatctttatccggaatttacaggaacagtgatcgaaacctttttaaaaaatcctcctcagctagacaatcaacctcaagtagtctatgaagcggcacgcgctggcttgaaaaaacaagaaaaccttactttgttgaaaccgatgcgctatgaaaatacgtatgccgtcgcagttaagcgctcatttgcaaaagcgcatcaattaaaaacgattagtgatttacagaaaattagcaatcagttgaaagcaggttttacgttagaatttattgatcggcaagatggttataagggattacaagaaaaatatcatttaaatctgaatgtccaatcgatggaaccggcgttacgctatcaggcgattaataatggtgaggtaaatgtgattgatgcctattcaacggatagtgaattgagacaatacgatttagtaacgttagaagatgatcaagcgctatttccgccttatcaaggagcaccacttattaaaacagcaacgttggaaaaatatccagaattagcagaaatattgaataaattggcaggaaaaattagcgaagaagaaatgagtgaaatgaattatcaagtcaatgtggaagggcaagatcctagcatagtggcgaaagactatttaaaagaaaagaatcttcttaaa

SEQ ID NO: 20908 - DNA, 1413 bp, Enterococcus faecalis
atgacaattgattggacaaaagaagtcgaagcacgtaaagacgacttattagaagatttacaaaacttattacggatcaacagtgaacgtgatgatgcacaagcaacacctgaagcgccctttggacctgggccagttgctggcttaaaacacatgttagcgtatggtgaacgtgatggctttacggtgaaaaatgtcgacaattacgctggacacattgaatatggtgaaggcgacgaaacgttaggaatttttggtcatatggacgttgttcctgctggtgatggttgggaaacagatccttatgaaccagtcattaaagatggcaaaatttatgcacgtggtgcaagcgatgataaaggcccaagtatggctgcttattacgcaatgaaaattatcaaagaattaggcttacccgtgtctaaaaaaattcgtttcgtagtaggaagtgacgaagaaagcggctggggcgatatggattactatttccaacatgaagaagcgccagactttggtttctcaccagatgctgagttcccaattatcaatggggaaaaaggaaatgtgactattcgtttaactttccgaggcggtaacggcgctgattataaattagaaagcttcaaatctggcttacgtgaaaacatggttccgggaacagcagatgctgttgtaacggctgcttcagcagacgaagcggcttcactagctgctagctttgaaacattcatcaaacaagaagcaaaaatttcaggtaacgcagaactttcagataaaacagtgactttccatgtagttggtaaaggtgctcacggtgctagcccacaatctggaattaacgcagcgactttcttggcaactttcttaaatgattacagctttgcagaaggcgcatatagctttattaataccattgctgaatttatccatgaagatttttatggtgaaaaattaggcgtggcttttgaagacgaaaaaatgggtaaattgacaatgaacgctgggattgttaactttgatccagaaaaccctgaaaatagcttagtaacattaaacttccgctatccaaaaggaacttcagcagaagaattacaagcaaaagttcaaacaacagtcggtgaaacggtcactgcaacacaaggagatcgcaaccaagaaccgcattatgtaccagttgatgatccattggtggcaacgttactacaagtttacgaagaccatacaggcgaaaaaggccaagaacaaatcattggtggcggtacttatggccgcttattgaaacgtggtgttgcctatggcgcaatgttccctggctacacagacacaatgcaccaagccaacgaatttatggaattagatgacttattccgagcagctgctatttatgcagatgcgatttatcgtttagcgaag

SEQ ID NO: 20909 - DNA, 1647 bp, Enterococcus faecalis
atgatcaatcaaccaaattcagttgatcaaccaatcctgacgaaccaagaaaaaatggtcaaaggctcagcttggatgacagctagtaatattatctcccgcatgttaggggcgatttacatcatcccctggtacgcttggatgggcgagcacggaaacgaagcgaacagtttgttttcaatggggtatacgatttatgccttattcctaatgatctctaccgccggaattccaggtgcgattgccaagcagacctcgcattataattcattgaacgaatataaaattagtcgacagcttttttatcgtgccttacaactaatgggtggcttaggtgtggtttttgctattgtgatgtatttggcatctccggcattagcagctttgtctggcggaggacctgaattagttccaacaatgcgttcattaagtttagccgttttagttttcccaagcatgagtgtcattcgcggttatttccaaggaaatcaagaaatgatgccctttgctttatcacaaattgttgaacaagtagcacgagttttttacatgttattaactgcttttattatcatgaaagtctttgaaggtaattacgttacagcggtgacccaagccacttttgcggcatttattgggatgctcgcaagttttgcggttttaggttattacatgtacaaacaaaaaccattatttgattatttagaagaacacagcgccaatgaacatgaaattgctccaaaagagttattgattgaaacttttaaagaggcgattccttttatcgtagtcggctcaggagtgactgtctttaaacttgtcgatcagtttactttctcaaactttatgcgtttgtttacggattattcagatacccaattacgagagcttttcggtatttttaatgccaatccggacaaattaaccatgattgtcgtggctttagcgacttcgatttcggctactggattaccgttaattacagaagcggtcaccttaaaaaatcaccgtgaattagcgcgtttgattagtaataatttacaactttttgtgtttgtaatgttgccagcaacgttcggtatgattgttttagcgcaaccactatacactgttttttacatgccagatgctttaggtacttctttattagtgcaagcttgttacgctagtttattcttgggcttgtatatgttagtgtcaaatatgttgatggggatgtatgaaaatcgtgatgcaatgcgttatttaggaattggtttagcagtgaaattaatcgtgcaattccccgcaatccgtttatttgaagtttacggtccgttattagcaacgatgattggctttacggtttcttgcgtattgattctaagaagaattcgtcaagtgacacgttttaattacaaattaaccttacggcgaacattgttaatgttctgtattacagtcatcatgatgattatcgctttgattttccgtcagttcttgtatctatttttagatccaactagacgtttccaagccttcattatcgttgtaattgtggctgctgcaggaggcgctttttatggctattcggtcttgaagattcgcttagctgatcgtttattagggaaaaatgccgcaaaattacgtgcaaaattcaatattaaa

SEQ ID NO: 20910 - DNA, 552 bp, Enterococcus faecalis
ttgaagaagaaacgtgattatgttgggtatttaatgtactttctgaaaattttagtaccagcaatcgtagccgtttttattttaagaggatttttcctgattcctgttcgggtggatggccattctatgcaaaaaaccttgaatcaaggagatatgattgtgatggaaaaattctccgccattaaacggtttgatgtggtggtctttaaaacagatacaggatcgattctgattaaacgtgtgattggtttaccaggagaagctgtgcgttacgaaaacgatcaattatatgtcaataatcagccaatcgctgaaccgtatttaactaaaaacagaaaaaaagatcatgaaacgatgccttacactacgaattttgattcaaaagaattgttaatgcaagaaaaattacctaaagatagctattttgtgcttggtgataatcgccgtatgtccaaagacagccgttcttttggtgcaatacatgcagatcaaatcttagggaaagcacaatttgtttattacccactcactcatatgaagatcattcctaaa

SEQ ID NO: 20911 - DNA, 597 bp, Enterococcus faecalis
atgaaatcaatcaaaacgattttacttggaacaactttggccgcaggtttaggattattcttaggaacagacgcaaacgcagaaagcttatatacagttaaagcaggagatactttatcaacaatttctcatcaatttgcaggagacaatagcttaattcaaaaaattgcttctgataacaaattgccaaaccttgatttaatttttgaaggagaacaattagttattcgttcagaaaaagaagttgctaatactccagcaccagctgtagaagttgcaccagttcaacaagtagttgaacaacctgttgcacaaccagtacaacaagaagtacaacaacctgttgctcaagaagtagcgcaaccagcagcacctgctgcaagcagtgatgcaaaagagtggatcgcacaacgtgaatctagtggttcttacgatgcaacaaacggtcagtatatcggtcgttaccaattatctgcctcttatttaaatggtgactattcacctgccaaccaagaacgcgtggcagatcagtacgtagcaggtcgctatggttcatgggatgcagctaaatcattctggttagcaaatggttggtac

SEQ ID NO: 20912 - DNA, 834 bp, Enterococcus faecalis
atgttgacacttgcagtacgtgcccatgatgttggcaccaaaatatctcctgtggaattggctaaaaaaattgctgaaacgaacataacttcaattcaatttgccttaggtatttcttatccagaatatgcaagtgctgctgttctatctccaggactaggaagccaattgaagaatattttcgaagatgaaaagattacgattagcgtcctaagttgttatattaatctgattcatccagatttagaagagcgagaaaaacgactgcatcaatttgaaacatacattcgttacgattcaatgtttggggcaaaaatcgttgcaactgaaacaggcagtatatatgaaacgatttattacactgaagataattatacagaagaagcctacgaagaagttttattttctgttagaagattatgtcgagaagctgaaaagtatgggataattgttgggattgaaccaggaatcaatcatccaattcatacaattgaaaaaatgcaacgattgattgacgaggttgcttcaactaatttaggtattattttggatcctaccaacttaattcgagtagatatagataaaacgtatttggaaatagtagaagaagcgtttgagtgttttggtgaaaaaatcgttgcttttcatttgaaagatttcattataagaaatcagcagatatttccggtagccattggcgaagggcaggtacctcttacagaaaccattcaatttttgaataaacataagcccggactgttcactatttttgaggaaacaccatttgaaaaaatagcaagtgcctatcaaaaagtttcgcaatatcattccatt

SEQ ID NO: 20913 - DNA, 309 bp, Enterococcus faecalis
atgataaaaaaagccttttgtatgcaagtatatcctgatcaacatgccgaatatcaacgacgtcatgagaagttatggccagaaatgcgtcaaatgctgaaagaacatggggcaattaagtatcaaatttttttaaatcctgaaaccagtacactttttggttatttagaaatagaagatgaagctcgctgggagcaaatagcactgacaccaatcaatcaaaaatggtggaactatatggaagatattatggaaacaaatcctgattgctcgccgatgacggctgaattaaaaaaagtttttgaacta

SEQ ID NO: 20914 - DNA, 1284 bp, Enterococcus faecalis
atgacaaccattacacaaaaatatgaagaagcgaaagaaaaatatgccagtattgacgtagataccgaagctgtattggaaaaaatggctgatgtcaaaatttcaatgcatgtgtggcaaggagatgatgtgagaggcttcttaagtgaggatgaactttctggtggtatttcagttacagggaattatccaggcgttgctcgaagtccccagcaactacgtcaagatttagaaaaagcgttttctttaattccaggaaaacacaaattgaatttgcatgctatttatttagacacagaggaaagggtggatttaaacgaactggaaccaaagcattttgaaccatgggtgacttgggcaaaagaaaatggcttaggattggactttaatccaacctttttctcgcatccaatgtaccgcgatggctttactttagctcatccgaatccgcaagttcgagacttttggattgagcatgggaaacgttcacgaagaattgctgaatattttggaagagaattaggacaagtagctgtcaataacttttgggtgccagatggctttaaagataacccagttgatcgtttaacgccgagaaagcggctaatggcttcgctagatgaaattttttcagaggaaattgatccagcttatacagtcgatgcgatggaaagcaagctctttgggattggttcagaagcctatacagttgggtctcatgaattttatatgggctacggtttaacgcggaataaattaatttgtttagatgctggtcattttcatccaacggaagtgatttctaataagttatcttcattatccttatttggcgaaggaatgctattacatgtcagtcgtccagttcgctgggatagtgaccacgttgtcattatggatgatgaattgcaagaaattgccaaggagttagttcgcaatgatttattaggaaaaacacacgtgggcttagatttctttgatgccacaatcaatcgtgttgccgcttgggtgattggcacccgcaatacacaaaaagcgttaatgaaagcgatgcttgagccaacaaacgtcttaaaagaagctgaattgataggagattttaccacacgtttagccttaacggaagagttaaaagactttccatttgccgatatctggaactactactgtcaagaaaatcacgtacctatcggcttagattggttaacggatgttcaagaatacgaaaaagtgattttaccaactcgtcaattgccaacaggtaaagatagttgtcgtttttca

SEQ ID NO: 20915 - DNA, 870 bp, Enterococcus faecalis
atggattattgggaaaaagccgactactcttggtcagacgattctaagcgacatattttgacacctagcagcaaaagtcgcacacttttttattacatacaggaaattggacagtttaaagcctcgcgcccttattatacggagcgggcacatttaccatcatacttaattaaattcacgctaaatggtactggggaattacgctatcgttatcatacatacagcttacagagaggtgatttattctttattgactgtcgggattatcaatactatcaagcaaccagcgaagatccttgggaaatggactggattcattttgaaggaggaaattctggtgcttttttccaagaatttatgaaaaatggttcaccagttttctccactaatcagcttccagaagataatcctattcatttaatcattcagcaattattacaattacaagatttacaacatgcgcaaactgattaccaatcttccgtcttaattcatcaattactgaacgaattattgttgcaaaagtatcgtcaagactttacctacgaaacgattccatcattggttttggaaatgaaagcttacattgatcaacatttcaaagaaacaatttctttagaagacttggctcaactctttcatttaaataaatatcaattgaacaaagagttctccaaatacattggattaccgccaattaaatatcaaattagtaaaaaaatttcttattcaaaagatttactacgctattctaatcaaacagtgaaagaaattgctgtagatgttggtttagaaaactatgcctactttagtcgattatttaaaaagcgaactggattaactcctagtcaataccgtaaaagtggcttc

SEQ ID NO: 20916 - DNA, 414 bp, Enterococcus faecalis
atgattaaaacaagtgcagtaggaagattaacaaaaagttcagaactaagagtaacgtcaacagggaaggccgttgccaattttgcattagcttgcaaaagagaaagacttgataaagaagggaatgcccaaacgacttttattcaatgtgtaatctgggggaaacctgcagaggtgttagcaaaatatacgcaaaaaggttcattaattgcagtaaatggtgaattgcaatcacgttcttatgatgatcaacaaggacaaacgcattatgttacagaattagtcgtagcaggctttgaatttttagaatcaaaagaaactgtacaaaatagagaacaaaaacaacaaatgccagaaatggcgaacgccgaaccgttttatggtatggatgatatggaaccgcctgcttatcat

SEQ ID NO: 20917 - DNA, 600 bp, Enterococcus faecalis
atgcattcaatttttaaaaaaggacatcctgaagcacctgtctttgtgctacttcacggtacaggtggtgatgaaacatctctcctaccaattgcccaagaactaaataaacaagctactgtgctaagtattcgtggtgatgtttcagaaaatggaatgaatcgttattttaagcgcctagcggaaggtcattatgacttagaagatctagaaaaacgcggcgaggcgcttcataagtttattcaacaagccgctaacgagcatcaattttcattggataaaattatttttattggctattcaaatggggccaatatcgctattcaattattgcttactcatcccgacagctaccatcaagctgtcctctatcatcccatgtttcctgttgaattgaccaatcaaccagacttgaccgacacttctgttttattatctctaggagagcatgacccgattgtcccacttcctgagagtatgcgtgtgattcaactatttcagaatcatggagcaaccgtacaagaggtttggacacaaagtcatcaattaacttatcaagaaattaaggaaacacaaacttggttggcacatctgtcctct

SEQ ID NO: 20918 - DNA, 426 bp, Enterococcus faecalis
atgaaccaacagcaagaagctttaaaagcctatatcggtttattaagaaccagccatcgactagagcaacttgccaagcaagatgtcacttgttatgacttaaacattacagaattttcagtattagagctgttactccataaaggtcctcagaccatccaaaaaattaaggagaaaattttaatcgctagcagtagcaccacttatgttattgaccaattacataaaaaaggctatgtaacgcgcacccccagtgaaaaagaccgacgcattacttacgttgaattaacagaagctggaaaaacattaattgaagaaattttcccgacgcatgcaaagcgaattgcagaagcatttgaacaactctcttccgaagaattaacacttcttcaaaaaactttacgaaaaataacaaatgaaacgaaa

SEQ ID NO: 20919 - DNA, 843 bp, Enterococcus faecalis
atggttcaagcattaccaagtaatattgggattcaacaagtcactttgaaagtggctgatttagataaaatggtaaacttttatacgaaaacaattggcttaaaacttttaaaacaaggagagggacgtgcttggctagcgccacaaggcaccaacgatgcaattcttgtcttaaaagaactaacagctggggaagaaaatcagggtaccactggcttgtaccatattgctttcctgctaccaacccgcaaagatttaggcaatatgttgctgtggcttttgcaggaaaatgtgcaaattggcgcagcagatcatggctatagtgaagccctttacttaagtgatccagaaaataatggcatcgaaatttattgggataaaccagaagaagtctgggatattcgtccaaatggtgaaattatcggtgtgacagaagaattagacggtgatagtttagctgcagaagctgacggtcactggctaggaatttccgaaggttctaaaattgggcacattcatttgaaagtggccgatttagatgccactgaaacgttctataaaaacttagggtttggcttaaagtctaactttggtcaacaagcgaagttttttgcagcgggtcagtaccatcatcatattgggacaaatacatggagcggcaaacagctgccaacgattcaagaaaatcaatttggcttagaaaattacaccttccgtttaccaactgcggcagatttagagatagtccaagccaatgcggaagaagcaaagttacattttattgccaaagatcatttacttgcgttagaagatcctagcggcatgattattcaatttacctat

SEQ ID NO: 20920 - DNA, 1407 bp, Enterococcus faecalis
atggcggaacaaacagatttactgattttaggtggcggaacaggaggctatgtagcagcaattcgagctgcacaaaaagggctaaacgtcacaattgttgaaaaatacaaattaggtggcacttgtttgcacaaaggctgtatccctacaaaagctttattaagaagcgcagaggtttttgataccttaaaacaagcggcttcttttgggattgaaacagaggcagcgtccattgatttttctaaaatacaacaacggaaagaaggaattattgagcagttacacaaaggtgttgaaggcttatgcaagaaaaataaaatcaaaattttagcaggcgaaggtgcgattttaggtccctccattttttcaccagtctctggcgcagtggcagttacgtttaatgatccaacacgagaagaagaaattatcgttcctaaaaatgtcattattgcgacaggctctagttctaaaacgttacctaatttgccattggatgaagaatttatcttatcttctgatgggatgcttgaattagaagagctaccagaatcaattgcaattattggtggtggcgttattggtgtcgagtgggcttctttattaaatagtttaggtgtcaacgtaactatcattgaatttttggatcgtttacttataaatgagagtgcaacaatttctaaagaattaaagaaacgtttagagcaacgaggaattaacattttattaggaagcaaagtccaagaagcgaaagttactggacaaaaggttcaagtagaagttgcaggacaagaaaccctcaccgttgacaaagtcatggtagcaattggacgtcagcccaatatcaataagttagggttacagaatacctcagtgaaatatactgacaaaggcattgaagtaaatgaattttatcaaaccacagaaggacatatttatgcgattggtgattgtatcgatacactccaactagcacatgtggctatgaaagaaggagagttagctgttcagcatcttttaggcgagacagttgaacctttaaattatacaaacgtacctcgaggtgtttatacaaatcctgaaatagcaagtgtcggctatactagagaaactttaccagcagaaaaagaagtagtaattggcacctttaattttaatggtaatggtaaatcacttgtttatggagaaacagatggctttatagaagtaattcgtgacaagaagaccgatgatttattaggggtttctatgattggcccacatgtcacggatttaattgccgaagcaagtactgccatgtatttagatgccgcgcccattgaaattggtgaagcaatccatgcgcatccaacaatgacagaagtattgcaagaagcagccttagatacttatggcttagcgattcacaaa

SEQ ID NO: 20921 - DNA, 1005 bp, Enterococcus faecalis
atgaaaaaaagaaaggttttatttacagcagttatggtattggcaggattacagttgctaagtggttgcggcaaaacagaagcttcggcaaatgatacggtagtcttgcgctatgcgtatgctagtaatagccaaccagttatcgattctatgaagaaattcggtgaattagtagaggaaaaaacagatggtaaagttcaaattgaatattttccagatggtcaattaggaggagaaacagaactaattgaattaacacaaacaggtgcaattgattttgcaaaggtcagtggatcagcattagaaagtttttctaaagattattctgtatttgccattccgtatatttttgataatgaaaaacatttttttaaagtaatggataatcaagcgctaatgcaaccagtgtatgattctacaaaaaaattaggatttgttggtttaacttattatgactctggtcaacgaagtttttatatgagcaaagggcctgttacatctccagatgatttgaaaggtaaaaaaattcgggtcatgcaaagtgaaaccgccatcaaaatggtagaacttttagggggttcgccagtacctatgggtagttcggaagtatatacttctctacaatctaatctaatcaacggtgcagagaataatgagttcgttttatatacagctggtcatggtggtgtggctaagtattattcttatgatgagcatactcgagtgccagatattgtgattatgaacgagggaacaaaagaacgtttgacagcgaaacaagaacaagcgattgaagaagcagcaaaagaatcgaccgcttttgaaaaaacggtctttaaagaagcggttgaagaagaaaagaaaaaagcacaagcagaatatggcgttgtgttcaatcaagtagacagtgaaccattccaaaaacttgttcaaccgttgcatgaatcattcaaaaatagctcagaacatggcgaactgtatcaggctattcgccagttggcggac

SEQ ID NO: 20922 - DNA, 786 bp, Enterococcus faecalis
atggaatttaaaatgaatgattttcaattagatggaaaagtagcgttaattacaggtgctgtttatgggattggctttgagattgcgaaatccctagctgaagcaggagcaacaattgtttttaataacttatctcctgaatcagttgaacaaggcttggaaaattatcgggccgcagggattgaagcacgtggttatgtgtgtgatgtcactgatgaagagcaagttcaagcgatggttgctcagattaaagaagaagtcggctctattgatattttagtcaataatgcgggaattattaaacgaattccaatggtggatatgtcagcagaagagttccgtcaagtgattgatgttgacttgaatgcgccatttattatggcaaaagcggttattccagatatgattgaaaagggtcatggcaaaattatcaatatctgttcaatgatgagtgaactaggtcgtgaaacagttagtgcgtacgcggcagcaaaaggcggactaaaaatgttaacgaaaaatattgcttctgaatatggacaatataatattcaatgtaatgggattggacctggctacattgaaacgccacagacggcgccattaagagaaccagggcatccatttaacgaattcatcttgggacgaacacctgctaatcgttggggcacaccagcagacttagctggcccagcagttttcttagcatctaacgcttctgactttgttaacggacatatcttatatgtcgatggtggaattttagcttatattggaaaacaacca

SEQ ID NO: 20923 - DNA, 2343 bp, Enterococcus faecalis
ttggataaaaagtcactgataaaagcagccttactacttttagtcggctgtttttttgtgtttacacaaactacatcggtcaatgccgcacctaaacctgatgaaaataaggttattgttacggagccaactactaatgtagatacaatatatgatacttacaaagacaatgcttttgagttaatgactaaagaaaaagaaaaggattctgcttttggggttaaagaagcaattactaacgcttctgcagcagtcaaaacatttgtatgggctggggtaaaaggactcggagagtttaatgcagttatggtaaaaacactatttagtatggatattataactgctattaagcaaccgattatgaacctaacgtctagcatagcaactaatatgttaggaattgcgggaacgattggtattgcctttgtctttgttattttaggtgtaaaatttattggacaacaacgatacaaacggttttttggtatttttttaatgacgattcttatttttacgggtctttccgtcctaaaagatgccaacacgtccaattctttgtttgatatgatgtttagtgtagataaagaagttgagaccgcatttgtaaatattaatccggtcttaggtgatgttagtgtaccaatgacagagaaagggaaagataagaacggaaatgaagtagagcaaaaattatctgcagatcaacgagcaaaaagtgcaggaaatttaattgcttcacgtgttttttacaccaatgtgtatgaaccttacttgctcatgaactatggaacaagtgatgttaataaaatccgtaagaaaacagtaaagtataaagataaagaatatgatcgaatcaacttattgttagacaacgatatgaatagcgaagaaaataataagttaatggaagaagttgtaaattacgaaagtaaagacttaaaaaaccgttcaattatgtattataacaactggaccaatactttttatggcttgttttatctggtagttaacttcattcaaacagtggtgtatttcctgttaagtttcttacgattaattattgcggtcattcaattgttcctattgccgttgttaccgttattgttgttcgcaggactctttttaactgaaacgaacgtctttgcgaattactttaaaacctttggcatgactatttttatgaagggaatggttggttttgcgactattttctttgcaagtttcttatcactagggtttcaattaagcaatcagacagaaaacgtgtggcagaagatattaacgatacttatttatcttcttacaccgcttggcttgtatgtcttccggaaattctttgctaatcttgtcacgggacgtgtttcactttctgatggtgtcgggtttatcggaaatccttttggcacagaagctaatatgcgtagagcggcaaaagaacaaaagcaagagaataaggagcgcaggaaacaggcacaagaagaacgtaaagcagctattaaaaaacgtcaagaagaagcaaggaaacatggtaaagcagaaactggcttaaaacaacggccattaaataaagaacaagaaaaacgtagtgcactacgccgtgaattgaagccaagacctcaacataaagcgccaaatgctatcgaaaaagcacaagaaggattaagacaagcgcacgaaaaaggacgtatgcaagaacagaaatctgaagaacaactcaaacggcagcaacatgaatcagctcgccaaaaagaatatgaaaaagatcgattgaaaaaacaggaatcacttaaaaaaattaatgatcaaagcgacgaatcaaccaatttaacagctttaagaaatcaaaatcggcgtactggacagcgaagtaaaaaacgcgaaacaggtcatcaaacacttatgaaacgacaaggagaaaaagtacttcaaccaacaaataaaccaaaagatatgaaaaagcaagtggttgctcgtagtccaagacgaacaggacaaccaacgactcgtcaaaatatccaaccaaaagtagcggcccaaacggtcaaacggagtggtggaacgttgggaagtaatcctgcctatcgacgtccagaagtacgaaaaaaaatggatcaagtgaagcaagtaacgcaagttgatgtacctcaaacgcattctacaccacaacgtgtacaatccaaggtaaatgagccaatcacacgtatgaatagacataatacgccaatcattaagaaagaaaagaaaactaaacaaccaccagttgttcgcagagaacgcaagaaacctggtacacagaagataacaaacaaacctaaaggagtgagacaacctcgtgcaaggaaa

SEQ ID NO: 20924 - DNA, 456 bp, Enterococcus faecalis
ttgattaataacgttacattagttggacgattaaccaaagacccagatttaaggtatacgcaaagtggaacagccgtaggtcaatttacgttggccattaatcgcaactttaccaatgctaacaatgaaagggaagcagattttatcaactgtgttatttggcggaaagctgcagagtcattagcaaattatgcaacaaaagggactctgatcggtttaactggtcgcattcaaacaagaaactatgagaatcaacaaggccagcgtatttatgtaactgaggttgtcacagaaagcttccaactattagaatcaagagaagtaaacgagcaacgaaaagaacaggctacaggtaaagctacgtttgataaacagtcaatggataaacctgatcctctggatccattttcgccagaaaatagcatagtggatatttctgataatgacctgccgttt

SEQ ID NO: 20925 - DNA, 1991 bp, Enterococcus faecalis
ttaaaaaatcaggtttatcaaaagaagaattgattcaggcatatcgtgaagtactaagaggacgtcgtttagacgaacggttgtggcaattaacaaggattggtaagacctctttcaatatttctggtcaaggggcagaagttgcacaagtagcgatggcgatggcttttgatcctcaaaaagattattttttaccgtattatcgtgatatgaccgcgtgcttggtttggggcatgacctccaaagatattttaatgggttcttttggaaaagaagcggatccttcttcccatggtcgtcaaatgccgaatcattatggttcaaaagagcataatattgtttccttctcttcaacagtaagtacacaaatgccattagcgacaggtgttggttatgcagcgcaacttcaaaaagctgattttgttgcattaaccaccactggggaaggctctgccaatcaaggagaagtccaagaagctatgaactttgcaggcgtaaaaaaattaccagttatttttgttgttgaaaataatgaatatgcgatttctgtcccaattgaagaacagtatgccaataaacgaatggccgatcgcgcgaaagcttatggctttgaaggtgtaaccgttgatggtagtgattttactgaagtctatctagcatttaaagaagcagtaaaagcggctcgcgggaaaaaaggaccaaaattgattgaattaatggtttcgcgcttgacgtctcattccgctgacgatgatcaatctgtttatcgttcaaaagaagaaattgaagaaatgaaaaagaacgatgcagtgaagctttttgaaaaacaattattagaagagggctatttaacagacgaagacattgccaaaattgatgaagaaattcgtgcagaaatcaatcaagcaacggatgaagcagaagcaatgccagatcctgtaccgacatcaattttagaagaagtgtatgcaaaataagagaagaggagaagaaatataatggctgagatgacttatttagaagcaattaacttaggaatttctgaagaaatggctcgtgatgaaaaagtagttatttttggagaagatgtcggcggcgacaaaggcggcgtgttcggtgtaacaaagggcttggctgctaaatacggtgacgagcgttgttttaatacaccgttaacagaaggcttaattggtggtttagctgtcggcttaggtttaatgggctatcgcgcaattggtgaatttcaatttgcggattacattttgcctgcaaccaatcaattgttatcagaggctcggacaatgcgctatagaacaaaaggcgattggactgcgccaatcgtttatcggaccccttatggcggcggtgttcgtggtgggctgtatcattctcagtctacagaaaaagtcttttgtggacaaccaggattgagagtggtgaccccttctaatccttatgatgcaaaagggatgattaaagcagcgattcgttccgatgatccagtcattttttacgaacataagcgtttatatcgtttactaaaagatgaagtgcctgcagatgattatatcgtaccaattgacaaagccaatgtcgttagaacgggtagtgatttaaccgtgattagttacggcatgaccttgcaattagctttagctgcggcggaaaaactagccgctgaaggaattgatgccgaaatcgtcgatgttcgctcattatatcctttagatcgcgaaacattagtggctgcagctaagaaaacagggaaggtcttactcgtaacagaagacaataaagaaggcagcgtgatgagtgaaattgcggcaatgatttcagaagatgctctctttgatttagatgcaccgattcaacgacttgcaggacctgattgtccaagcatgccttatgcattacctttagaaagagaatttttaatcaatgaagagcaagtattagcagcaatgaaagaattagcagaattttaattgaag

SEQ ID NO: 20926 - DNA, 1296 bp, Enterococcus faecalis
atggccacaaaagaaatcaaaatgcctcatctaggcgaaagtgtcacagaggcagccattgtccaatggttagttaaaccaggagattcagtgaaacgctatgatcccttaatggaagtcgtttctgataaagtcaccacggaagtcccatcagattttgatggtgtagtaaaagaatttctgatttctctagatacagatgtgcccatcggaacagcggtgatgacgttagagacagaagaaacaacagaagaaacagaagtagctactttagcaccagtgaaagaagcaagtgcggaacaagcgcaagaacatgaaacggctgaaacaacaagcactgcgacgtcccatcaaaaaaataatggtcgttattccccagcagtccttaaaattgcccaagaaaaaaagattgatttaacacaagttacagggacaggtcgtgatggtcgaattactagaaaagatgttacaaactttacaccaacacaggcaagaacacctgagaaaacagtgagtccaggaactagcccttcaatttcagaggagccagttgcttcgcaaaatgaaagcgccgcaacagctagtccaactgaaacaagcacagataaaattgtctctgcagatcctgtacgtaaagcaattgctaaaaaaatggtccaaagcgtcaacgaaatccctcacgcttggttaatggtggaagcggatgtgaccaacttagtccaacttagaaattcattaaaagatgaatttaaacaacaagagggcctatctctaagcttcttcccattttttgccaaagcagtcattcaagcgttaaagaaaaatccaaaaatcaatacatcttgggatgatggctcaattatttatcataaagatgttaatttatccatagctgtaacgacagacgagcatctttatgtgccagtgattcaacaagcggataactattcgattgcagggctagccaaagaaatcaatcgcttggcacaagaagtccgacaaggaacgctagcaagcaaagaaatgcaaggagggacctttactcttaataatactggaacactaggttccgtccaatcgatgggaattattaaccatccacaagctgcgatattacaagtagagtcaattaataaacgccttgtgccaaccgcagatggaggctttaaagtggcagatatggttaatttatgtctttctattgatcatcgaattttagatggacaacaagcaggtaagttcttgcgagatgttaaagataatttagcgaaatataatgcggatacggatatatat

SEQ ID NO: 20927 - DNA, 849 bp, Enterococcus faecalis
atgaccattcaatggtttcccggccatatggccaaagcaagaagagaagtttctgaaaaaatcaaatatgtcgatattgtatttgaactagttgatgcgcggttaccgctttcttcccgtaacccaatgatggaccaaattgtccaacaaaaaccacgattagtccttttaaataaaggggacttagcagataacgaccaaaataaaaaatggcaacattactttcaaaagaaagggtaccaaaccctagttatcaatgcccaacaaaataaaggaatcaataaaattgtgccagcagccaaggaagcgttaaaagaaaaattggctcgtgaacaggcgaaaggcttgaaaccgcgtgcgattcgcgccatgtgtattgggatccccaatgttggtaagtcaaccttaatgaatcgtttagtcggaaaaaaaattgcgcaaactgggaacaagccaggtgtgacaaaaggacaacaatggttacgctctggttcccaattggaattactggatacaccagggattctctggccaaaatttgaagatgaagaaattggaaaaaaattagctttaactggcgctataaaagatcaattattgcatctagatgatttggcgatttatggattagaattttttgcacgtttttatccgcaacgtttgacggaacgatatggtttaacagaggaagagctatttttacctgccccagaacagttgatgttaattagccaaaaacgtggttttagagatgattataatcgagccagcgaaatgattattttagaaattcgcagtggaaaattaggtacgtatactttggaccgctgggaagaactaggagacgaa

SEQ ID NO: 20928 - DNA, 765 bp, Enterococcus faecalis
atggcaaaagagtcgattcaggcaatcaaagaagcgttgttaactgtcactgatgcaaccgatgaacgattagcaagctggcgagaagatgaacgttcaggagtgcaacaagcgatcaaacaatgggaacgtcgccagttagccaaagaaaaagagtggcaactttttaaagaaatgagtcaatttgaggaagcggcctataaaaaaggccatcgtttaattgcaggaattgatgaagtaggccgcggaccattagctggccctgttgtgacagctgcagttattttaccgaaagattgtcagttattaggcttaaatgattcaaaaaaactatctgctaaaaaacgggaaacgttatataaccagattcaagaacaggctgtcgctatcgggttaggtatcgctgatcaaggagtcattgatcaaattaatatttatcaagcaactaaacaagcgatgaaaatggcaattgacgatttagcttttacaccagattatttattaattgatgcaatgcagttagacgttccccaaccacaagaaagtttgattaaaggggatgcacgctccatttcgattgcagcagccagtattattgcaaaagtaacaagagatcgattaatggaagaatatgatgaattatatcctggatatggatttaaaaacaatgcaggttatggaacaaaagaacatcttctcgggttagaaaaatacggtgtaacgcccattcatcgacgtacgtttgcgccaataaaagatatgatt

SEQ ID NO: 20929 - DNA, 1152 bp, Enterococcus faecalis
atgaacgcagtacattttggagcaggaaatattggacgcggctttatcggcgaaattttagctaaaaacgggtttcatattacgtttgtggatgttaatgaaaccatcattcaagcgttaaaagaacgtaaaagttatacaattgaattggccgatgcctcacatcaacaaattaacgttgaaaatgtgaccgggttaaataacatgacagaaccagaaaaagtagtagaagcaattgcggaagccgatttagtcacgacggcaattggtcctaatattttaccaagaattgctgaattaattgctcaaggaattgatgcacgtgccgaagcaaattgtcaaaagccgctggatattatcgcttgtgaaaatatgattggtggttcaacctttttagcagaagaagtggccaaatatttgaaaaacccagcttatgctgaacaatggattggttttcctgatgcggcggttgatcggattgttccattacaaaaacatgaagacccactttttgttcaagttgagcctttttgtgaatgggtcattgatgataccaaccgaaaagccaaagagattcagttagaaggtgttcattacgttgctgatttagagccgtatattgaacgaaaattatttagtgtaaacactggccatgctacagttgcctatacaggggcgttgttaggctatcaaaccattgacgaagcgatgcaggacgccttagtggtagcacaactcaaatcagttttgcaggaaaccggtaaacttttagtggctaaatggaattttgatgaacaagaacatgcagcctatattgaaaaaattattcaacgtttccaaaataaatatatttcagatgctattacacgtgtagcacggacaccaatcagaaaattaggtgcgcaagaacggtttattcgaccaatccgtgaattacaggaacgcaatctagtgtcgccgcatttattagcaatgattggtattgtctttaattatcatgatccagaagatgaacaaagccgtcaattacaggaaatgcttgaccaagaaagtgttgatacagtgatcgctgaagtaacgggcattgaagatccagaaacggttaaaaatattaaacaaaacgtagaacgctatgcgcgaccacaagtagca

SEQ ID NO: 20930 - DNA, 435 bp, Enterococcus faecalis
atggaaaatcttacgaatatttcaattgaattaaatcaacagtttaatacaaaagaagaagctattcgcttttgcggcgaaaaactagtcgaggcaggctgtgttgaacccgcttatatcgaagcaatgattgaaagagaccaattgctatctgtttatatggggaattttattgccattcctcatggaacagaagaagccaaaaaattagtgaaaaaatcaggaatctgtgtagtgcaagttccagagggtgttaattttggcaccgaagaagatgaaaaaattgctaccgtattatttgggattgccggagtcggtgaagaacatttgcaattagtccaacaaattgcactttattgtagtgatatggataacgtggtgcaacttgccgatgcattaagtaaagaagaaataacagaaaatttagccattgct

SEQ ID NO: 20931 - DNA, 831 bp, Enterococcus faecalis
atggcaatcaaagcaattgtaatggatattgatggcaccttgttaacttcagaaaaaaagatttcaccaaaaacgcgacaagcattagtagctgcacaaaaacaaggcctatcactgattttggcttctggccgcccgactaacggtatgcggcccttagcagatgaattggagatggctcattataatggacacttactttcctataacggcgcttgtgtcacccatcacggcagtcagcaacaactatttaatcagacaatttcaaagtcattgagtcaacaaattttagagcatttgaaacaatttgacgtaattccaatgattaatgatgaaacatttatgtatgtcaatgatgtttttcataacaccttacatttagagactggtgattttaatattattgaatatgaatcacggggtggcaactttcaattatgtgagtggcgtgatttagccgccagactaaactttcccttgaacaaaattttaattgctggtgaacccgcctatttacaaaaatatcatgaggccatctacgcgcctttcaaagaaaccgtcaccgctgctttttccgctcctttctattttgaatttaccgctaaaaatattgataaagcgcgttctttagaaaaactaaccctacagttaggtatagctgctgaagaagtaattgcttttggtgatggtcacaacgactatactatgttggaatgggccggcacggggattgctatggaaaacgccgttgacgagcttaaaagcatcgcaacggaagtcactttatccaacgacaatgacggcatcgctgttgcattaaccaactttctt

SEQ ID NO: 20932 - DNA, 396 bp, Enterococcus faecalis
atgaaaaaaatacttacttacggcacatttgacctcctacactatggtcatattaatttgttgaaaaaagcgaaacaacaaggggactacctgattgttggactttcaacagatgcttttaatttagaaaaaaagaaacaaagttatttttcatatgaaaaacgtaaacaattattagaggcaattcgttatgttgatttagttattcctgaaactagttggaaacaaaaagtttccgatattgctgaatttaaaattgatactttagtcatgggcgatgattggcaaggggcttttgattttctagaagttgaaacaaccgcaaaggttctttatttgccacgaacgccagaagtatcaaccacacagataaaaaaagaattatattatagtgaa

SEQ ID NO: 20933 - DNA, 744 bp, Enterococcus faecalis
gtgaaaagtaaggtacgcactgaatatattgggggattaccagttgacgtattaacacatcaagaaattatggatgacttagaaagttatctcaaagctaaagagaaaatgattgtaactagcgttaatccgcagatttcattgttagcatttgaacatccagaagttaagttatatttgaaaagagcaactcatcggattgcagatgggataggtgtggtcaaggcatcgaagctaatgggtgggtctattcgtgaaagagttacaggaattgatgtcatggataattttttagagtatgcaaatcaacataaggaacgaatcttcttgtatggtgcaaagcaagaagtagttgaagcagcagctaaaaatattcaacgacaatatccagggattgttattagcggtattttacatggctatacaaagaaaaaacagcaagaaattgtggaacaaattaacaaagctgaaccaaggtttgtctttgtagcattaggttcaccgaaacaagagatttttttggaacaaacaattgatcacctgacagctaatgtatttttagacgtaggcggtacttttgacgtattagctggatcagtaaaaagagcgccagaattttatataaatcacaatttggaatggttatatcgttgtttgacaatgaagagatacgatcggttaatgcaaattcctaaatatatttatttgactattaagtatcggaacaacaagtctagggggcag

SEQ ID NO: 20934 - DNA, 810 bp, Enterococcus faecalis
atgaaaaaaattctttttgctagtttatttagtgccacactactatttgggggaagtgaaatttctgcttttgcacaagaaattatccctgatgatactacgacaccgcccattgaagtaccaacagaaccaagtacaccagaaaagccaacagatccaacaccgccaattgagccacctgtagaccctgtagagccacctattacaccaacggagccaacagaaccgacagagccgacaacaccaacagaacctacaactcctacagagccaagtgaaccagaacaaccaacggagccaagtaaaccagtagaacctgaaaaaccagttacaccaagcaaaccagcagaacccgaaaaaactgtgacaccaactaaaccaacagaatctgaaaaaccagtacaaccagcagaaccaagcaagccaatcgacgttgttgtaacgccaacaggggaattaaatcacgctggaaatggtacacaacagccaacagtccctattgaaacaagtaatttggcagaaatcacgcacgtgcctagtgtaacaacacctattacaactacagacggagaaaacattgtagctgtagaaaaaggtgttccacttacacaaacagcagaagggttaaaacctattcaatcaagttacaaagtattgcctagcggaaatgtagaagtaaaaggtaaggacggtaaaatgaaggttttaccatacacaggtgaagaaatgaatatctttttatctgccgtaggcggtatcttgtctgtagtatctgggtttgtcatctttaaaaaacgcaaagctaaagta

SEQ ID NO: 20935 - DNA, 267 bp, Enterococcus faecalis
atgaaacaagatatccatccaaattaccaaccagtagtattcatggattcaacaacaggtttcaaattcctttcaggttcaactaaaggatcttcagaaactgttgaatgggaagatggcaacacttatccattattacgtgttgaggttacttcagactcacacccattctacactggtcgtcaaaaattcacacaagccgacggacgtgtggaccgtttcaacaaaaaatacggtctcaaagacgaaaacgcaaatccagacgca

SEQ ID NO: 20936 - DNA, 1290 bp, Enterococcus faecalis
atgagcgactatttaacaatggctgaattggaaaacagtacgttaaaagatatttatgcatacgcgaaagagtttaaaattccttattatagccaaatgaacaaaaaagaattgtctttagctgtgattcgtgcacaagctgagaagcaagggtttttcttcatggaaggaattttagatattgtttctcaggatggttatggctttttgcgaccaattaattatggaccaagtgcagaagacatttatatttcttcttctcaaattcgtcgtttcggattgagaaatggggacaaagtagctggcaaggcgcgtccgccaaaggaatcagaacgttactatggactcatgcatgttgaaagtgtcaatgggaaagatcctgaagaagcgaaagagcggccacattttccagcgctaacaccgttgtatcctgaaaaacaattaacgttagaaacaacggctggcagattatcaacacgaatgattgatgtatttgccccaattggttttgggcaacgtggtttaattgtagcgccgccaaaagcgggaaaaacaagtgttttaaaggaaattgctaatgggattacagaaaatcatcctgatgtggaattgattctgttgttaattgacgagcgccctgaagaagtgactgatttagagcgaagcgttaaaggcgatgtggtttcttcaacttttgatcaacaaccacaaaatcatacgcgagttgctgaattggttctggatcgagcaatgcgcttagttgaagacaaacgggacgtagttattttaatggacagcatcactcgtttagcaagggcctataatttagtggtcccgcctagtggtcgaaccttaagtggcggaatagatccagctgcgtttttcaaacctaaacgattttttggtgctgccagaaatatcgaagaagggggcagtctgactattttagccacggcattggtggatacaggtagccgaatggatgatgtcatctatgaagaattcaaaggtacaggcaacatggagctccatttatctcgtgaattagcagaacgccgtattttcccagcaattgatattaaaaaatcaagtacgcgaaaagaagagttgctaatgacaccagaacaactagaagaaacgtggaaattgagaaataatatgtcaggagactcgctggaatatacggatcaattcataaaaatgttgaaacggacccaaaataatcaacaattatttgaagttttccatgatgtttcgtttggcaaacaaattaaaagaaatccaaaaaga

SEQ ID NO: 20937 - DNA, 2076 bp, Enterococcus faecalis
atggcctataagtatctcgtgattgtagaatcacctgccaaagccaaaacaattgaaaaatatctaggaagaaactacaaggtggttgccagtgttggtcacattcgcgatttaccaaaaagtaaaatggggattgatattgaaaataattatgaacctcattatatttcgattcgcggaaaaggcgatgtcatcaaaagtttaaaagcggctgcaaaaaaagctgaaaaagtctatctcgcagccgatccggaccgagaaggtgaagcaattgcttggcatttagcttatcttcttggccttgatttaaaagataaaaaccgtgtggtattcaatgagatcactaaagaagcggtaaaagcggcatttaaagaacctagaaccatcaacgttgatttagttgatgcacaacaagcacggcgcattttagaccgtttagttggatactcgattagtcctattttatggcgtaaagtcaaaaaaggtttgagtgctggtcgtgtgcaatctgttgctttaaaaatgattattgatcgagaaaatgaaattcgagaatttaaacctgaagaatattggagcattgatgggaatttccaaaaaggtcgcaagaaattcaaagcaaatttctggggcgtagatggtaaaaagaaaaaattaccaaatgcagaagcggtgaaagaaatcacttctcggattgacggtaaagattacgatgttacaaaagttgagaaaaaagaacggaaacgtaatcctgcattaccttttacaaccagtagtttacaacaagaagcggcacgtaaattaaatttccgtacccgtaaaaccatgatggttgcgcaacaattgtatgagggaattgctttagggaaacaaggcactgtggggctgattacctacatgcgtacagactcaaccagaattgctgattccgccaaagcagaagctgctgaattcattgaaaagacctacggagatgagttttcagcacatggcggccgcaaagcaaaaaatacgcaaggtgcacaagatgcccatgaagcggttcgtccgtcaagcgttttaagaacacctgatgaaatgaagaagtatttagataaagatcaattaaaattatatactcttatttggtcgcgctttgttgctagtcaaatgacaccagcgattttagataccatgaaggtcacgcttcaacaaaacggcgtaacgtttattgccaatggctccaaagtgaaatttaaagggtttatgcaagtatatgttgaaggacgcgatgatggtaaagaagacaaggaaaatattttacctgaattagtggaaggtgacgttgttaaatcggtcgatatcgaaccgaaacaacactttactcaaccaccggctcgttttagtgaagccacgttaatccggactttagaagaaaatggtgtgggccgaccatcaacgtatgcgccaacattagaaaccattcaacggcgttattacgtgaagctaaccaataaacggtttgaaccaacggaattaggtgaaattgtgaattccctagtttcagagtttttcccacaaattgtcgatacacattttacagcgacaatggaaacggacttagataaagtcggtgaaggccaagaaaaatgggttgaagttgtcgatcgcttctacaagcccttcgaaaaagaattaacaaatgccgaagaaaagattgaaaaaatccaaattaaagatgaaccagcaggctttgactgcgaactatgtggacatccaatggtgattaaactgggtcgctacggaaaattttatgcatgtagtaatttcccagattgtcggaatacaaaagcgatcgttaaagaaattggcgtgacgtgtcctgtgtgtcacgaaggacaagttatcgaacgcaaatcaaagaaaaatcggattttctatggctgtagtcggtacccagagtgtgacttcacttcttgggacaaaccagtaggccgaccatgtccaaaatgtgggcaatatttagtagagaaaaaagttaaaggcggcaaacaagtcgtttgtatcaatggcgattatgaagaaaacgtccaaaaa

SEQ ID NO: 20938 - DNA, 1290 bp, Enterococcus faecalis
atgaaaaaaatcgtaatcaatgggaatcgtccattaaaaggcgaagtaaccattagcggcgccaaaaatagtgtggtcgctttaattccagctgctattttagcagattcgcccgtgactttagatggcgttcctgacattcaggatgttcactcattaattgaaattttagaaattatgggtgctaaaattacttttgaaaataatacattaattattgacccaacagaagttgtttctgtgccaatgccaaaaggaaaaatcaatagcttacgtgcatcctattattttatgggctcacttcttggtcgatttggggaaggcgttgtcggcttacctggcggttgttacttaggccctcgtccaattgatttacatatcaaaggatttgaagcattaggcgctcatgtaaccaacgaacatggggcgatgtacttgagaacagacgaagctggcttacaaggaacccgaatttttatggatatggtatctattggcgctacaatcaatgtcatgttagccgcagttaaagccaaaggcaaaacgattattgaaaatgctgcgcgtgagccagaaattattgatattgctacattattaaataacatgggtgcaaaagttcgaggagctggaacggatgttattcggattgaaggagtcgaagaattacatggctgtcgtcactcgattattccagatcgaattgaagctgggacttatttagctatggcagcagctatgggtgaaggaatcaaggttcgaaatgttatttatgagcatttagaaagcttcattgcgaaattgcaagaaatgggcgttaagatgacaattgaagaagacatgattgaagttcatccatcacatgatctgaaaatgacgacggtgaaaacctatccgtatcctggttttgccacagacttgcaacaaccgttaacgccattacttttaaaagcacaaggaactggtgaaattattgatacgatttatgctcaacgaaataagcatatccctgagttggtgcggatgggggctgatgcttcggttgaaggcaatatgattatcttaaatggcccaaatcaattgcacggtgcagaagtagtcgcctctgatttacgggcaggcgcttgcctagtcactgccggcttgatggctgaaggtacgaccactatttataatgtagaatatattttacgtgggtacgaccacattatcgaaaagttaactgctttaggcgctgatattcaaatgctagaaaccgaagaacaagaaggtccgtttgaggtggatcaa

SEQ ID NO: 20939 - DNA, 1305 bp, Enterococcus faecalis
atgacaaaaaaagtcacaattattggtgccggtttagccggaagtgaagcggcatggcaagtggccaatgctggggtaccagttgatttatatgaaatgcgccctgtcaaaaagacaccagcgcatcaaacagaaaattttgcagagttagtttgttctaattcattacgtggaaatagtttaaccaatgcggtaggtgttttgaaagaagaaatgcgccgtttaaattcaatcattattggtagtgcagatcaaaccgctgtaccagctggcggcgccttagcagttgaccgtgattctttttctgaaacaatcactgaaaaaattaaaagtcatccattaattacaatcaaaaatgaagagatcaccgatattccggaagggattgtaattattgcaacgggtcctttaacctctgaaagcttatctcaaaaaattcaagaatttaatggttctgaaggcttttatttttacgatgcagcagcaccaattattgataaatcaacaattgacatggataaagtttatttaaaatctcgttataacaagggggaagcggcttacttaaactgtccgatgactgaagaagaattcaatgcttttcatgaagcactagtcaatgcagaagtggttcctttacgcacgtttgaaaaagagaagtttttcgaaggctgtatgcccatcgaagtaatggcgcaacgtggcattaaaaccatgttgtttggcccaatgaaacctgtcggactagaagaccctaaaacaggtaaacgcccttatgctgtaattcaattacgtcaagacaatgctgcagcttctttatacaatattgttggtttccaaacgcatttaaaatggggcgaacaaaaacgagtattccgtatgattccgggattagaaaatgctgaatttgttcgctatggcgtcatgcatcgtaatagttttatgaattctccagagttgctaaaaccaacctaccaatcaaaaaaacgtgacgacctgttttttgctggacaaatgactggtgttgaaggatatgttgaaagcgcggcaagtggtttactcgcaggtattaacgcagctcgtcttgccaaaggggaagagccgattgaattccctcgcgaaacgactttaggaagtatggcttattatattacacatgcagaaggcaaacatttccaaccaatgaatgcaaactttgggcttttcccagagttacctgaacgaattcgtgacaaaaaagaacgctatgaagcaattgctaatcgggccttagatgttcaagctcaagttatccaatctttagat

SEQ ID NO: 20940 - DNA, 897 bp, Enterococcus faecalis
atggaagaaaagaattggcctgagttatttgctcgttatcttattgtcgaaagaggctattcagaaaaaacaaaaaaagcatatcaagaagatatacaacattttttttcgtttttaaagacttcaggtaatgacaattatttgactgtggaacatttggatgttcgggcttatttgagcgaattatatgatcaggaatatagccgcaattcgattagtcgaaaaattgccagtttgcgttctttttatcaattcttattaaaaaatgaagcaatccaagagaatcctttttcctatgttcatatgaaaaagaaacagttacggttgccccgttttttttatgaaaaagaaatggatgcattatttgagagcgcacaaggggagcaaccgcttgatttgagaaatcaagcattactagaagttctgtatgggactggtattcgggtcagtgaatgtgcgaacttaacggtggacgcagttgactttcaagcttctgttttattggttcacggaaaaggaaataaagaccgttatgtgccttttggttcatttgcacaagacgccttaaaggattacttagagaatggccgcgcgctattaatgacaaaatatcaaaaaaaacatccgtatgtctttgttaatcatcatggtgaacaaatcacgccaacagggattgaatatgtcttaaaccaactaattaaaaaaagttcattaaatgcggaaattcatccccacatgttacgccatacatttgcgacacatttattaaataatggcgccgatatgcggacagttcaagaattattaggacatgctaatttatcaacaactcagatatatgcgcatgtgacaaaagaaagtttacaaaaaaattatcgaacgtttcatcctcgtgca

SEQ ID NO: 20941 - DNA, 546 bp, Enterococcus faecalis
atggttgaatcacaatttcactctacaacaatttgtgcagttgaaaaagatggaaaatttgcaatggctggtgacggccaagtaacaatgggcgaatctgtcgttatgaaaggtacggccaaaaaagtgcgccgtatttacaatgatgaagtcgttgtcggttttgcaggaagtgtggcagatgcctttacattagaagaaaagtttgaaggaaaattaaatgaatacaacggaaacttaacgagagctgcggttgagttagcccaagagtggcgtacacaacagtctatgcaaaaattagaagctatgctgattgtgatgaataaggaagaaatgctcttagtttcaggaactggggaagtcatcacaccagacgatggtattttagcaattggttcaggcggtaattttgctttgtccgctgcaagagccatgaaaaactttggcgataaagaaatgccagcgaaagagattgctaaaaatgccttaaatattgctgcagatatctgtgtatttacgaatcataatatcattgtagaagaatta

SEQ ID NO: 20942 - DNA, 651 bp, Enterococcus faecalis
atgaaaatcgtcattttgttacttgttgcctatttattaggttcgattccctcaggtgtttggattggtaaacttttctttaaaaaagatatacgccaatttgggagtgggaatacaggaacaaccaatacatttcgtgtcttagggaaacctgccggaattacggtattattaatggatatcttgaaaggaacgttagccacttcattaccctatttgtttggtttacaaggcgtgaatccgctcttctttggggtagcagctgttttagggcataccttccctatttttgccaatttcaaaggtggtaaagccgtagccactagcgctggcatgttattagcatacagccccacattttttatttattctgctcttatttttgtgatttgtctgtatctaaccagtatggtgagtttaacaagtatgattagcgctgtactaattacactttctactattattttgcctttcactgtcccagctattttaccaacatttaactggttattaaccgtgattgcgattgctttgactacttttatctttgtccgtcatcgtgaaaacattcagcgaattaaaaatggaacagaaagtcgtctttcttttggcttacgtgcaaaaaaaataaagaaaaaggctgtgaacaaa

SEQ ID NO: 20943 - DNA, 1419 bp, Enterococcus faecalis
atgaggagcgcagagagtattcgctactgcgttgctctcgccttctttctattggaggaaagtaagatgaaaaaatcgtcaaaagtagcacttatttttgcattcttagttagtatttttgtgccagttgcggcctttgctgatgagattggggatgtagttgccccgacaggaatcatggcattagttgtgattattccattgattgttgttttggttctattgtttatgaaagtcgatatgattatcgctggtttaattggtggcgtcttagcgatgctgattggtggtattggactagaagaagcgaataaacagatgttggaagctatcccgatgatgttaggaattaccgttcccatcattaattcagctgttgcgatggcggtctttaaagcaggtagttattcagctgcattaactttagccaaacgaggcacaaaaggaaaagtcgagtatgtttcagcttttattgttatcttattagccgcagccacatatatgtcaggaattggtggcggaagtgcgatggttattgcgccattggcctttgctgcagttggcgttgttcctgaattaattgcagcaatgtctttagctgctgcggtatcatttacaacatcacccgcttcattagaatcaagtattgtttcaaaattaggcgatatcagtgtcggttcatatgtttcaaccatgcgaccttactggttattcttcgtagcattagcgattgtgttagccttttggggaacgaaacatagaaatgttggctttaaagagtcggcagatgatgaatttgataaaaagagcaatggtgaactatttaaaattaccttgccagccattttcttattgtttgctgtaatttttggaccaattgtgaatgatttaattggttttgccttctttacgccacttgtatacatgattttaacattagttttaattttcttatgtacagatttctcaatgaacaaatctgtcgaagcgatggtagatgggtctacatatattttgactcgtttattccaagtagggattttcttagcctttattaatgttattgcacaaacaggaacgtttgctgtaatcgcaggtgttgctgaaaatgcaccagcctttattgtcgtgccagttgccattttaacagggattttaattgggattccagctggggcctacgtaggttctgttttaactttagtgctaccagttgctgtatcgttgaacttcccgccgttagcattaggttttgtagcaatgggtgttggtttaggtagtcaaatgagtttcgttaatattactatgcaagctttatcttcaggcttccaaattccaattttggatgttgttaaaggaaacgtgaaatggttaagtattgcctctgtactattattagttatcggtttaatctttgga

SEQ ID NO: 20944 - DNA, 471 bp, Enterococcus faecalis
atgattacgttagcgcaggcagaagttgggaaagtctatacagtcgaaagcgtccaagcagatattcagacaaagaaacatctgaacaatttaggtgtcgttgcaggccaagcagttgtccttgtcaattatcagaatcaaaatggtattgttttattacataatagtcgaattgcgctgacagatacgattttacaagcgattcatgtggaggagcgctcggcgaatgagaaagtttgggtctccttggataccttaaaagttggagaacgcgctacaatagtagggatccacggacaaggagcggtgaaacgtcggttgatggacatgggcttaacaaaaggaacagtaatttttattcgcaaagtagctcctttagctgatccaattgaaatcaatgtacgtggctacgaactaacgttacgaaaaagtgaagcggaactaatcttggttgaaaaggaggaaagcgaa

SEQ ID NO: 20945 - DNA, 584 bp, Enterococcus faecalis
atgaacgtaaaaatcttttcaaaaaataactgtatccaatgtaaaatggcgaaacgtttcctaagtgaaaataacatcgcttttgaagaaatcaatatcgacgcacaaccagatgctatcgactggttaaaagaacaagggttccaaagcgtaccggtaatcacatctgaagcaacaaccgttgttggcttccgtccagaccaattaaaacaattggctagctaagatgaaacttgtttatttttcagtcaccggtcaaacaaggcgctttattaaaaaattggatttgcctgcttatgaacttgagccagcgaatcctttttttgaaataaatgagccttttattcttgtcattcctacctatgatgcagaaattacagaggtagtgaatgactttcttgattataaaagtaaccaagaactgttagttggtgtagctggtgggggcaaccgtaattttgctgaattatttgtctataccgccaaagatattgcccgcgattatcacgttccgcttctatactcctttgagtttagcggaacagacgaagacgtggagacctttaagaaagtagtggaagaaa

SEQ ID NO: 20946 - DNA, 2157 bp, Enterococcus faecalis
ttgagtctaaaagaaattaaagatgtcagctatttcaaactgaataacgagattaaccgtcctgttgatggtcaaatccctttaaataaagataaagaagcactcgcagccttctttaaagaaaatgtagaaccgaatacacgtaaattcagctctgctgaagaaaaaatcaactttttaatgaaagaagattttattgaaactgaattcatcgaaaaatattcaatggactttattgaaaaattatatgctttcttagatgaacaacatttccaattcaagtctttcatggcggcttataaattttattctcaatacgctttaaagaacaacgccggaacagagtatttagaaacatatgaagatcgggttgcctttaatgccttgtattttgcggatggcgatgaagagttggctttaacattggcggatgaaatgatccatcaacggtatcaaccagccacaccttctttcttaaacgctgggcgtaaacgtcgaggtgaattggtttcttgtttcttagttcaagtaacagatgatatgaacagcattgggcgttcaattaattctgcccttcaattatcacgaatcggcggcggcgtaggaattactctttccaacttacgtgaagcgggcgcaccaatcaaaggttatgatggcgcagcaagtggtgttgtccctgttatgaaattatttgaagatagctttagctactctaaccaactaggtcaacgtcaaggtgctggtgtggtttatctaaatgtcttccatccagatattgaaatgttcttatctgctaaaaaagaaaacgctgatgaaaaaatccgtgtaaaaacgttgtctcttggtgttattgttccagataaattttacgaattaacacgtaacaacgaagatatgtatttatttagtccttatagtgtggaacgtgaatatggtgtgccttattcctatgtagatattaccaaagaatatgataacctagtggccaatccaaacatacgtaaacgtaaaattaaagcccgtgacttagaaaatgaaatttctaaattacaacaagaatctggctatccttatatcatcaatattgatacagctaacaaaaacaatccgattgatggcaagattatcatgagtaacttatgttctgaaattcttcaagttcaaacgccttctgttattaatgggaaacaagaatatgaagttttaggaacagatattagttgtaacttaggttcaactaacattgttaatttaatggaaagtcctgactttggaaaatctgtccgcgctatgacgcgtgcgttaacttttgtaacagatgcttctgaaattgatgtcgtgccaactatccaaaatggaaatcgtttaagccatacaatcggactaggcgcaatgggcttacacaccttcttcgctaaaaatcatatggaatacggctctgaagaatcattagactttacagacatttatttcatgttattaaattactggactttaatggaaagtaaccaaattgcgaaagaacgtaaccaagtcttccataattttgaaaaatcagattatgcttctggtgcttacttcgataaatatattgaaggcaactttacaccaaaatttgataaagtgaaagaaattttcaaagacattcagattccaacggctgaagattgggctgcgttacgcgatgctgtgaaaaaagatggtctttatcatcaaaatcgtttagccgtagcgccaaatggttcaatttcatatattaatgatactagtgccagcattcatccaattactcgtatgattgaagaacgtcaagagaagaaaattggtaagatttactatccagcgccttatttagctaatgatacaatcccttactatacttctgcttacgacatggatatgcgcaaagtgattgatgtctacgcaacagcgcaacaacacgttgatcaaggaatgagtttaaccttgtttatgcgttcagaaatccctgaaggcttgtatgaatggaaagaaacaccaaaacaaacaacccgtgacttgaacattttacgtcattatgcgttcaacaaagggattaaatcaatttactatattcgtacatttacagatgatgctgaagaaattggcagcaatcaatgtgagtcttgcgtgatt

SEQ ID NO: 20947 - DNA, 963 bp, Enterococcus faecalis
atggcaacgtattatgaagcaattaactggaacgccattgaagacgtcattgataaatccacttgggaaaaattaaccgaacaattttggttagatacacggattccgttatccaatgacttagatgattggcggactctttccgatttagaaaaaactactgtcggctacgttttcggcggtttaactttattagatactgttcaatcagaaagcggcatggatcaactgagaaatgatgtgcggacgcctcatgaagaagccgtcttaaataacatccaattcatggaatctgtccatgccaaaagttattcttctatcttcagtacattaaatacaaaaaaagagattgatgatatttttgagtggacaaataccaacaaacacctgcaatataaagcagaacggattaacgaaatttataaaaacggtactccgttagagaaaaaaattgctagtgtatttttagaaacgtttttattctattctgggttttacactcctctttactatttaggaaacaataaactagcgaacgtcgctgaaattattaaattgattatccgtgatgaatcagtgcacggcacgtatattggctataaattccaattaggatttaatgaattaccagaagatgagcaagataaactaaaagactggatgtataatttactttacgaattgtacgaaaacgaagaacgttatacagaagaattatatgatgacttaggttggaccgaagaagtaaaaacctttttacgttacaacgccaacaaagctttaatgaacttaggtatggatcccttatttgcggatacagccaatgatgtgaacccgattgtaatgaatggtatttcgacaggaactagcaaccatgacttcttctcccaagtaggaaatggctatttactaggaacagttgaagccatgaaagatgatgactatctttacggtttagataaa

SEQ ID NO: 20948 - DNA, 1284 bp, Enterococcus faecalis
ttggataaaaaagtcgaaaaaattcaagaaaaagttcgtttgttttataaaaagcatcagcggaatacaacgattgttgtggtaattagtttaagtatgattttaatattaggaatggctgcttggtatgaaggaaagggaatctcttatgaagcaaaacaaactgcactgagagagaagcaacatgccttacaaaaaaagagagacgatatcttagcagggaaaatgactgaagcgtcaacccagacaacaataaataacttttctaaacaagaaataactggtgaaaatgaattagtgacaattactggaacgaatgggcagttgaacattaatgatgctaatatctatgtttcagataatgcaggtattgtctcaaatcaacttaaacagaaaatgtttcaattgaatcaacaattgttggaaaatgcgaatggcgcacaatttatgcttattaccgttcctgcgttacctagtggggaatctgttgaatcttacagcaataagattgctaatcaattaggtgtaggggatcgtgaaaaaaataatggtgtggtttttctaatggcaattgaggatcgcgagtctcgcttggaagttggatatggcttagagagtattttaacggatagctatgcggatgatattattaataatgaagaagtaaaagaggcttttagagacgaggattataatacaggtctcaataaaattattgatcaagtatcggctgcaatcaattcaaaaaccgcacaagtggataatgaattaacaaatatacaaacagagttaaacactaacacaacgaaaagaaatgttcttttaatggcaagtattgctgggatgctcatttgtgctgtttatattttacaaattttaagaacaagaaaacttgttaaaaaaatgtatcaagattatttgaattgtttaccaacaaaggctgtcctaaataactcagaacagacaaagaaagtattaaataagatgaaaaagacttctttttattgtttatatcttaatggagcaacgttatttgccacgaaagggaaaataagacgtgccactaagcgtggttctttactaagtatatatccaaatgcaaaaaaacaatcttttgggcgtttattagtaggagatactttatatagttatgatggtagtgttttgacgtatgcttatttaaactcacaatacaatccgtctaatcatagtagttctggtagcggcagtggtggttcattcggtggcggctcattcggcggtggcggcgcctcaggaagttgg

SEQ ID NO: 20949 - DNA, 1362 bp, Enterococcus faecalis
atgattttaaaaaccaaactatttggcaaagtctatcaatttacatccgttaaagaagtcttagccaaagccaatgaagaaaagtctggcgacaagttagctggcgtagctgctaattcagccgaagaacgcgtggcagcaaaagtcgttttatcggaattgtccttaaatgacttgtttaacaatcccgtcgttgattatgacgaagacgaagtgacacgcattattattgaccaagtcaatatgcgaatttttgaaagtattaaacattggacagttgcagaattacgcgaatttatcttatcttcggaaacaaccgattttgatatcaaacgaatttcccgtggactcacttcagaaatgattgctgctgtctgtaaattaatgtccaacatggatctaattgttggcgcaaaaaaaatcaatattgaaaaaaccgccaacacaacaattggccgtcccggaactttttcaaatcgtttacagccaaaccatccaaccgataatgtcgatggcattatggcatcagttatggaaggtctttcttatggcgccggtgatgccttaattggtttgaatcctgttgatgattctacagaaagtgttaaacggatcttaaacaaatttgaagagttccgcagtgaatgggaaattccaacacaaacttgcgtgcttgctcacgtaacgacacaaatggaagccatgcgtcaaggcgcgccaactggcttagtctttcaatccatcgctggttcagaaaaaggaaacactgcatttggtttaaatgcagaaattttagctgaagcacaagatttagcgcttcacagtggtcaagcagctggtcctaatgtgatgtattttgaaacaggtcaaggctcagaactttcttctgaagcgaactttggcgcagaccaagtcacaatggaagcgcgttgttatggcttagccaaaaaatttgatccgtatattgtaaataccgttgtcggctttattggaccagaatatctttacgattcaaaacaagtcatccgcgctggtttagaagatcatttcatgggcaaattaactggaatttcaatgggctgtgatgtctgctacaccaaccatatgaaagctgatcaaaatgatatggaaaacttagcaatgttattagcaacagctggttgtacgtatatcatggggattcctcatggcgatgatgtcatgttaaattatcaaacaactgggttccatgaaactgcgacgattcgtgaaacattaggcttacgtccaattaaagaatttgaagaatggatggaaaaaatgggcttaatggaaaacggaaaattaacaagtcgcgctggcgatgcatctgtatttattaaa

SEQ ID NO: 20950 - DNA, 3009 bp, Enterococcus faecalis
atgttacacacagtaattttgaaaaacaattaccaagactccatcaacttaatgttattgaccaataaaatcaatgcattagatggtgtaaccatgagtcaaatcatgatgggaacagatgccaacaaagacatccttaacaacacgaacttgttaacggatgaggccaatagtgcatctgcaaacgacatgatgattgtggttgacagtgaaaaagaaaacatcatggaagaagttatgccagcgattgatgaattcttagatgatttatcagcaaagggaactagtgaagaagcacaagcagcaacttcttggtcagaagcgtttgatcttttaccagaggcgaatgtagcgctattcagtattcctggtgaatatggtgcgccagaaatggaacgtgccttaaaaaatgatttacacgtgttctctttcacggataatgtgtcaattgaagatgaagtacgtttgaaaaaattagcgcatgaaaaaggcttactaatgatggggcctgactgtggaactggtattatctcaagtattccaatcgcctttacaaatgttgtttctccaggaaacattggcgttgttggtgcttcaggaacagggattcaagaagttacaacgattattgaccgcttaggtggcggagttgttcacgccattggtactggtggtcgtgacctaagcgacaaagtaggcgctatcacagtgaaagatgctattgtggccttagaaaatcacgaaccaaccgatgtgattacagttatttctaaaccacctgcaaaagaagttcgtgatgaagtggttgaattattacaaagcatttcaaaaccagtcgttgcgattttcttaggagaaaaaccaacaagtcacgaaggcaaagtttatctagctcatacattagaagaaacagctaaaattgctgttgatttagcaaatgatgtggccgtgaagaaaaattactttgaagcattagcaaaaccagctgtaccaacattaccagaagataaagttgtaaaaggcttatattcaggtggtacattagcttctgaagcaggtatgttaatttcagaagctttagatcttggcggtttagtgaaagcagaaggttatgtcttgaaatctcacggttatgaagtcattgacttaggcgatgatatgtatacacaaggtcgtccgcacccaatgattgacccagatgttcgtatcgaaaaaattcgtgaatacgcacaggatgaaaaaacggggattatcttattcgatgtggtgttaggctatggtgctcatgaagacatggttggtgcattgttaccagcaattgaagaagcgcgtgccacagccaaagaagcaggacgtgatctttactttgttgcaactgtctgtgggacgacgaaagatccgcaaaattaccaatcgtctgttgatcgtttgaaagaaggcggcgttttagtagcagaaagcaatactaaagctgttcaattagctttattactaaaaggaatcgaaatttcagaagacgataaagaagtggttgcttacaacggaccaactgtcgatgtaccaaaaccaggcgaaaaagtaatggaactattaacaaccaaaccaagaatcattaacgttgggttgcaaagctttacagaatcaatcgttgattacggtggcgaaactgttcaatttaactggcgtccacgtgctaacggcaataaaaaaatgattaaaattttggatgctttggaagattacagtgaacaaatcgaagctgaaaatcacaaagtaacagacaaaattaaaaatgcacaaccattcttagtagatgtggtacctgcgaaatcagtgattccagaattaaatgatgacgcacaaaaaacattacttcatgctggaccaccaatccaatggtctgaaatgactggaccaatgaaaggtgcttgtatcggagctgcattattcgaacgttgggcagacaatgaagaagatgctttgaagatttttgaagctggcgaagtacgtttcattccttgtcaccatgtaaaagcagtaggaccaatgggcggtattacttctggtaatatgccagtctttgttgtggaaaatcgcttagaaggtaacgaagcatactgtatcttgaatgaaggtatcggtaaagtattgcgttttggtgcttattcacaagaagtggttgatcgtttagattggattaaagatgttttaggaccaactattgcgaaagccttgaaactttctgaagaaggcttgaacttaaacgtattgattgcgcgctctattacaatgggtgacgagttccaccaaagaaatattgccgcatctttgaacttcttaaaagaattgtctccattaattatcaaaacagatattccagaagatcaaaaatacgaagtaatcaaattcttagctgacacagatcaattcttcttaaatgtcatgatggcaactggaaaagcaattgttgatggtgcccgtaaagataccaacggaacaattgtcacaacgatgactcgtaacggcgtgaactttggggtccggattgcagaaacaggcgatcaatggcataccgcaccagtaaatacaccaaaaggtctttacttcactggtttcagcgaagaagacggaaatcctgatgtcggggatagtgcaattactgaaacagtaggtgttggagcaatggctatggtagctgcacctggcgtaacacggtttgttggtgcaggtggctttgaagatgcgttagcaacctcaaatgaaatggcaaaaatctgtgaaggaaacaacccaacattctcaattccaacttgggatttccaaggaacttgtttaggaattgatatccgtaaagtggtggaattaggaattacaccaatcatcaatacagggattgcacacaaaaatgccggtgttggtcaaattggtgcagggacagttagagcacctctaggctgttttgaaaaagccctagaagcgtatgctgagaaactaggcattacggttgaa

SEQ ID NO: 20951 - DNA, 2334 bp, Enterococcus faecalis
atgccaaccgcaaattcaggctcgcgagctgctagacatgcatccaacacctcatcgaagtcaagttacaagaaaaagacacaaccgccgaaaaagaaaaaacggcttgttttaaaaatctttcttggcttacttatcgctgggatggtcgcttttttagcaggcgttggtcttttttggttctatgcacgacaagccccaaaattagaagatgacaaactgaatgcgacagtttcatcgaagctttacgatattaataatgaaatttttgaggatttaggcgcagaaaagcgtgaattaattcaaccaaatgatgtgcctcaattattaaaagatgccattgtttctgtcgaagaccgtcgtttctataaacacattggtgtggatccgattcggattatcggttctgccctttcaaatgtcaaaaatggtggattacaaggcggaagtaccttaacccaacaattaattaaattgtcctacttctctacaaaagaatctgaccaaaccttgaaacggaaagcacaagaagcatggatggctgttcgtttagaacgtgaaaaatcaaaagaagaaattttaacttactacattaacaaagtctacatggcgaatggtttttatggaatggaaacagcggctgaaaattattatggtaaacatttatctgaacttgatttaccacaaacggccctactggcaggaatgccacaagcgccaaactcatatgatccctatacaaagccagatactgctaaagaacgccgggatgttgtactttacacaatgtacgacaataaaaaaatctcgaaagccgagtacgaaaaagccaaagctaccccaatcgatgaaggcttagtgccattaaaagccagtgatgacaatcgaaaagtcgtagataattacgtcaaagaagtaatcaatgaagtgaaagcaaaaactggtaaaaatgtttacacagacggactagatatctacacaaacttagatatgaatgcccaaaaacaactttacgatattgtcaacagtgatcaatacgttgcgtttccagatgataaaatgcaagtggcttcaaccgttattgatgttgcctctggacaagtccgagcacaaattggtggtcgtcacattcctgatgatgtgcaattaggaaacaatttagctgttaacacccaacgtgatgttggttcaaccgtgaaaccaatcatggattatggtcccgcaattgagaatttaaattattcgacaggtcgcctcatggtggataaaccaacgaaatatcctggtaccgacattgatgtcttcaactctgatttgacataccaaggcgtcattactatgcgccgtgcgattatgggttctcgtaacacaaccgcggtccagacgtttgatgaagttggtaaagaaaacatcatgcctttcattaaaggactaggaattgactataaaaacttagaagcgtcaaatgccatttcaagtaacacaagcgatgtagatggcgataaatacgggatttcctcattgaagttagcagcagcttatgcggctttcgccaataacgggatttataacaaaccgtattacgtaaacaaagtcgttttcaatgatggaactagcgttgattatcaacctgatggtaaacgtgcgatgaaagactctaccgcctatatgatgacggatatgttaaaagatgttttaaacggcggaacaggatttaacggcgccattccaggcttaatccaagcggccaaaacagggacttctaactatactgatgaagatttagcgcgaatgggcacaacagaaaaaggaattgccccggatagtacctttgttggttatacaacacactatgccgtttctgtttggactggatacaatgatcgaaatacaccaatctatcaagaatactatggaattgcctcggatgtttatcgtgaaataatgagttacttgtctcaaaatgtttcaaacgatgactgggtgcagccagacagtgttgtgcgggtaggtaatgaattatacgtgaaagatgcctatgaggtaccaaatgtacaagttttaccaagtactacctcttcagcaccacagccggaatctagcagtacggtggaatcctcttccacaaaagaagcggaaagttcatcaagttctagttcagaaagtgcgccttcttcctctgaagcgccaccatcaaccgaacaaccggcaagctcttcctcagcagagcaaccggcaacatcagaacaaccacctgaaccttcaagttctagttcacaagaaccgccgcaaccacctgaaagtagttctaaaccagatgaaaataaagcagca

SEQ ID NO: 20952 - DNA, 849 bp, Enterococcus faecalis
atgagcacaacttttccccttcacaccgaatcatttatgctccttgattcaggttgtttaacaaacagtgactattttttaccttttgctttgaccgatgttttaactactttttcaggaatgcagcaccaaccaatcattcatttctggcaattggatcaagcaatgattcttggcatgaaagatacccgtgtaccacatctaaaagaaggcatcgcttctctgcaagaaaacgattattctgtagtcgttcgcaatgccggcggtttaggggtgattgccgattcgggtattttaaatgtttcacttattttaccaaataattctgaacacaaattaagtatcgatgcggcttatgaattaatgtgggcttggctccgtcagagttttccggagaaagagattgacgcctttgaaattactacatcctattgtcccggtacttatgatttaagtattggcggtcaaaagtttgcagggattgcccaacgacgcgtcaaagacggtatttctgtcatgatttacatcagcgttaacggcaatcaacttgctcgtggagaagtggttcgagacttttaccttgctgggttacaagaacaatttggtgaaaatggctatccacccgttgatccagcagtgatggcaaatttagaaaccctgattgagactccattaacaatagacgccgtaaaaacccgtttaatcgaagcattacctcaacaatttgaaaaatctattgatccaaacttaaccgaaccaattataacctcagaatggttccaaacaaatttaactgtccagctggaaaaaatggcgcaacgaaacgccttaattaaaggagagatctta

SEQ ID NO: 20953 - DNA, 1350 bp, Enterococcus faecalis
gtgaacgtagttaaattcggcggtagctcgctagcatcagcaccacagttacagaaagtcttacaaatcgtcaaggaagagccgcgccgaacgtttgtcgttgtatccgctcctggaaagcgaaccccgcaagatattaaagtgactgatttattgattcaatactatcagcgctacttaaataatgaggaaattgaatcgacaatctctgccatcattcgtcgttatgaagatctttttgatgaattacacttggataaagcagttttagctgatattgctatttcgattcgccaattagccactttaccaaaagaaaacaatgcttttttatttgactattttttagctagcggtgaggacaataatgccaaagttgttgccagttttttcaagcaaaatggcttagatgctcgctacattagtccaaaagaattaggtctcctagtgacacctgagccaggcaatgcccgcattttaccaaaagctttagagaaaattagtgtctatcgtgagactcaacaaatcttggttattccaggtttctttggttatacagaagccggcgaaatttgtactttttctcgtggcggttccgatatcacagggtccattgttgccgcaggtgttcaagcagatttgtatgaaaactttaccgatgtggacggaatttatgtcgcccatcctggaattattgaacagcctcaaacgattcaagaattgacctacagagaaatgcgggagttagcttatgcaggctttgccgtcctccacgacgaagccttaatgcctgcctatcgcgcaaatattccagtcgttatcaaaaataccaacaacccacatcatcctggcaccctaattaccacctctcgcaaagtgaagcatgctcctgttgtaggaattgctagtgatcaagggttcgcaagtatttacattagtaagtatttaatgaatagagaattaggttttgggcgacggctcttagaagtactagaaaaattagccttgagctatgagcatatgccctcaggaattgatgacatcacgattgttttaagagaagaccagttaacaactgaaattgaaaatcgactgatggctcaactccaagaagttttagcgcctgatgagttacgcatcacgcatcatctttctatgattatgattgtcggggaaggcatgcgccaacgaattggggttactgctgaaagtacaatggcgttagccaaagaaaaaatcaacttagaaatgattaaccaaggatcttcggaagtaagtattatgtttggtatcaaaaaagaacaagaggaaaaagccatcaaagccttatatcggacgttcttccatgat

SEQ ID NO: 20954 - DNA, 372 bp, Enterococcus faecalis
atgaaaatggctcatacatgtgtgcgtgtaaaagatttagaggcatcattagatttctatcaaaaagccttcaattttgaagaaagtcgccgtcgtgattttccagaaaataaatttactttggtttatttaactttaccaggagacgactacgaactagaactaacttataattatgatcatgaagcatacgatttaggaaacggttatggtcatatcgccatcagtacagatgatttagaaggattacacgaaaaacatcaagcggctggctttactgtcactgacttaaaaggcttacctggaactgcaccatcttattactttgttgtcgacccagatggttataaaatcgaagtcattcgtgaacgt

SEQ ID NO: 20955 - DNA, 822 bp, Enterococcus faecalis
atgactttggataaaacaaaaaaattagcaaacggcaatgaaatgccacgcctaggtttaggtgtttggcgtgtagaagatggctcagaagcaacaaattcagtaaaatgggctttagaagtgggttatcgcttgattgatacagcagccgtttataaaaacgaagtaggggtgggcgaaggcattcgtcaatcgggtattccccgcgaagaaattttcgtgacgacgaaattatggaatgaagatcaaggctatgaaaatgcgattaaagcgtttgataaaagcttagaaaaattagggttagactatgttgatttatatttaattcactggcctgttgctggtaaatataaagaatcatggaaagcattagaagaaatttacgcaagtggtcgtgccaaagcaattggcgtttccaattttcatcaacatcatttggaagatttattaacagaagcaaatgttgtgccaatggtggatcaaattgaattacatcctacgttaacacaagaaccgctacgaaaatatttagccgaaaataagattgccgtggaggcttggtctcctctaggacaaggtaatttattatctgaaccagtactagtgaaaattggtgaaaaatatggtaaatcagcggcccaagtgattattcgttggcacttacaaaatgatattatcgtgattcccaaatctgttcacgaaaaaagaattcaggaaaattttgctgtctttgattttgaattaacaccagaagaaataaccgcaattaatcagttaaataaggatcatcgttttggtgcagatccagataattttgatttt

SEQ ID NO: 20956 - DNA, 918 bp, Enterococcus faecalis
atgttgatacttggtttagccagtactgaaacagtcgattcttctgctcctgatttagcagaagcgaccgtaaaaaaagtgagcgcgctacaacgcttttggaacaatattaattgggatgccattgtcgctaccttaattgaaaaaagtttatcaattttatttttaatttttctattttttattattcagcgaatcgggaagtatttaattgatcgcacctatgcaaattatagtaaaaagcaacattttagtgaaagccgtttaaaaacgttacacactttaatcattaatgcatttcaatatacgctgttctttttcttcatctattctcttttgaccattgtcggtgtgcctgttggctcattattagccggagctggaattgccggtgttgccattggtttaggggctcaaggattcatgaatgacttaattaccggatttttcattattttggaacaacaaatggatgtaggcgattatattcgcttattggcgttaaatattgaaggaactgttacttctgtcggattacgaaccactcaaattaaagcggttgatggaactgttcattttattccaaaccgaaacatcaccacaatcagtaacctgtctcgtgccaatatgcaagtgttaattgatgtccgcatcaatcctgaagaaggttatgaaaaaatttgtgaagtgattacagaagtcaatgaaacattaaaagaaaagtatatcgaaagtattcaaactgagccagatatttttggtatggtcgatttaggcaatggcaactttgcggtgcgaacgaccatgtatgtactaaacggcaaacaatttgcggtcaaagaagaatttctagcccaatatatcaaagcattaacagaggccggttttacgattcccaatacgcccattattgcaaaa

SEQ ID NO: 20957 - DNA, 708 bp, Enterococcus faecalis
atgaacaataaagcgatcatccaagcaatgaaacaacgtgtttatgaagcgaatctggctttgccaaaactgggcttagtcaaattaacgtggggcaatgttagtgaaatcaatcggtcattagggattatcgtaattaaaccaagcggcgtcaagtatcaagaaatgaccaaggaacagatggtagtgactgatttaaagggacaactattggaaaccaatgcattaaagccgtcttctgatttacccacgcatctttatctttatcaaaaaatgccagaaattggagcgattgcgcacacgcactccctgaatagtgttacgtgggctcaagcagggcgagccttacctccttacggtaccacccatgcggatgctttttatggcgctgtaccttgcacaagagcgctctctgaaagtgaaattaaagaaaactatgaagaagagactggcaaagtcattgttgaaacatttcatgaacaagaattagatcctttagcagttccaggagtgttagtttatggacatggcccatttacttggggaatgactccggaaaaagcagttgaaaacagtttgattttagatgaaatctgttcaatggcacgtttgacggaaataattaatccagatgttgaaccaattgatcattttttattggataaacactatcttagaaaacatgggatttccgcttattatggtcag

SEQ ID NO: 20958 - DNA, 1353 bp, Enterococcus faecalis
atgattagacatgatagtcgtgcaccaaaagaattgcgaaagatcactattgaaaccaatgtttttaaacatccagaaggttcggtggttatttcgtttggcgatacaaaagtaatttgctcagccactgtcgaagaaaaggttcccccatttttacgaggcgggggaacaggttgggtagcagctgaatatagcatgctccctcgcgcgacgaacacaagaaatattcgggaaagtgcgaaaggaaaattaacagggcgaacaatggagattcaacgtttgattgggcggtcattgcgagctgttgttgacttagaaaagttaggggaacggagcattgttgtcgattgtgatgtgattcaagcagatgggggaacccgtacagctagtattacaggcgcttttgttgctctacgcttagcagtcaatcatttattgatgactggtgcactagcggaagacccaattaaagagcatttagctgctgtcagcgtgggtattttacccgatggttattgtgtgctggacttagattacgcagaggactcgaatgctgcagtggatatgaacatcgtgatgaccgagtctggtgaatttgtggaaattcaaggaacgggtgaagaagctaccttctcaggagatgagttaaatgccatgctcttttatggaaaaacagggattgaggaattaattgcgtatcagaaagaagcgctttatgctttagcctctgaagaagtcccttcgcaagattcagaagagaaagtgattgtcattgcgactagaaatcctggtaaagcgaaagagtttagttcaatttttggtgaaaaaggatatacagttaagacgttattagattatccgaatttgccagatgtagaagaaactggtcgaacatttgaagaaaatgctcgtctaaaagctgaaacaattgcagaaattttacagaaaccagtactagcagatgattcaggattaattgttgatgccttaggaggaatgccagggatttattctgctcgttttgctggtgagccaactaacgatgcttcaaataatgcgaaactactacatgagttaacgggcgtgccaaaagaaaaaagacaagcgcgtttccattgtacattggtttttgctgaaccaaagaaagaaagtctggtggtcgaagctgaatggccaggagaagtcggtacgattcctcgtggtgaaggaggctttgggtacgattcacttttctatgttccagagcttggtaagacggcagctgaattgtctggagaagagaaaaataaagttagtcatcgtggacaagcagtggcaaaattaaaagaacaatgggaagaatggctaaaaaaa

SEQ ID NO: 20959 - DNA, 972 bp, Enterococcus faecalis
atgagcaagaatttttgggcaacattgccaaagcccttttttgttttagcaccgatggaagatgtcactgatgtggtctttcgtcatgtcgtgaaagaagctggggcaccagatgtgttttttacagaatttactaattcggatagttattgtcatcctgaaggaaaagatagtgtacgcgggcgcctcgtttttacagaagatgaacagccgatggtggcacatatttggggggataaaccggaatttttccgtgaaatgagtatcggcgtagcggagatgggctttcaagggttagacataaatatgggctgtcctgtgcctaacgtggctgagcgtggaaaaggcagcgggctaattttgcgcccagaagtcgcggctgaattgattgacgctgccaaagcaggtggcttacctgttagtgtcaaaacacgcattgggtttactgaaatggcggaaatggaggcgtggatcacgcatttattagagcaagacattgcgaatctatccattcatttgcgaacacgaaaagagatgagcaaagtggatgcccattgggaggtcattccgcaaattatggctattcgggaccgtgtcgcaccgcaaacgacaattacgattaatggggatattcccgatcgtcaaaagggcctagaattagcagaacaatatggtgtagatggcatcatgattggtcgggggatttttaaaaatccttatgcctttgaaaaagaacccaaaacacatacgccacaagaattgctgggcttgctacgtttacaattggatttgcaagacaaatatgcggaattggtgcctcgctccatcgttgggctgcatcgcttctttaaaatttatgtcaaaggctttccaggtgccagtgatttaagagcacaattaatgaatacaaaatcaacggatgaagtgcgccagttgttagcgacgtttgaaacagaacatggtgtgcttgac

SEQ ID NO: 20960 - DNA, 972 bp, Enterococcus faecalis
atgggcattccaatcaccattgtttctggctttttaggcgcaggaaaaacaaccttaattaaccatgcgcttgcgcaatcaccgtttcctaaagaagaaattattattattgaaaatgaatttggtcaaacaggcgttgaccacgcattacttttacaaaccacggaacgaattattcaattaaataacggttgcatgtgctgcagcttacgaggagatcttcttgcctctttatcagcaatcttagaagtgtatcaagaagaacaacaacccattgcccaagtcattttagaaacaacgggcattgctgatccgcaaccaatcattcaaacaattttaacgaccccgcacatcaaaaatcatttctatatagacagtctcttaacggtcgttgatgggcatcattggcaacaacagcttcaagaagccgaagccatcaaacaactggccttagcagatcgcctctttttttctgtcaaggaaccagcagacagcactcagctaccaacgttccaagaaacccttcgtaccattaatccttttgctgatattttatcctttcaagccaacgagcctcttttggctagtgacttttttcaattaaataagtttacggcaacacttacagaacacgaaatgactcattccccgcatgagcacgcccacgagcatcatcaccatacctttcactccctcacgctaacggcgtcctcagccatcaacgaacctcttttcactcgttggcttgattggttaatgtatacgcatcaggaaaagttataccgtttcaaagggattctcgccttacaggagcatgacttggccattgccatgcaaggcgtcaaccagcaagtggcctttcaaatgacgaatcaaccccctcaagaaacgacaattgttctgattggcaaagaattagagacaaaaaaaattcaagaaacctttcaaaccctcaacaaaatagctactccg

SEQ ID NO: 20961 - DNA, 267 bp, Enterococcus faecalis
atggctaaaaaatcaaaaattgctaaagcaaaaaaacaacaagcaatgattgcaaaatatgcgcctattcgccaagccttaaaagaagctggcgattatgaaggtcttagcaaattgccaaaagatgctcatccaagtcgcttaaaactccgcgatcaaacagatgggcgcccacgtggctacatgcgtaaatttggcatgtctcggattcgtttccgtgaattggctcaccaaggcttgattcctggcgtcaaaaaagcaagctgg

SEQ ID NO: 20962 - DNA, 1044 bp, Enterococcus faecalis
atgacattacaagcgcaattagaagctcttagagacaatacgctcaaagaaatcgcacaagttgctactttaaaagaattaaaccaaattcgcgtagaaacattagggaaaaaagggccaatcaccgaagtattaagaggcatgaaaaacctttcaccagaagaacgaccggtggtggggggctttgcaaatgaaattcgtgatttattaacagaagcaattgaagcgcgcaaagttgttttagaaaacgaagcgttaaatgcggcactaaaagaagaaagtttagatgtaactttacctgggaaacaaatgcctcaaggcacacgtcatattttgacacaagttatggaagagattgaagatattttcttaggcatgggttatcaagtagtggaaggatacgaagtagaatccgatcattataatttcgaacgcatgaatctaccaaaagatcatccggcacgcgacatgcaagatacgttttatatttcagatgagatgttaattcgtacgcatacttcaccagttcaagctcgaacaatggaaaaacacgatttttcaaaaggtgcattacgaatgatttctcctgggaaagtattccgtcgtgatacagatgatgcgacacatagtcaccaattccatcagattgaaggccttgttgtcgataaaaatgtcacaatgggtgatttaaaagggacgttagaagtcatgatgaaaaaaatgtttggtgaagatcgtaaaattcgtttacgtcctagctatttcccttttacagaaccttcagtcgaagtagatgttagctgttttaaatgtggcggcgcaggttgtaacgtctgcaaacatacaggttggattgaaattttaggtgcggggatggttcatccagatgtgttacaaatgtcagggattgatccaacagagtactcaggctttgcctttggcttaggaccagatcgcgttgctatgttacgttacggtgtaaatgatatccgtaatttttatcaaaatgatttacgtttcttaaatcaattcaaggtaaaggag

SEQ ID NO: 20963 - DNA, 3588 bp, Enterococcus faecalis
atgagtgtgcagtttattagaggaaccgccgtggcagacttagaagcgccacttatacaggcgacaaaacaatggctagaggaagacgcacagcatgaagtattctatttagtcccgaaccatattaagtttgagcaagaaattcaagtcttgcaaaagttacgtcaattacagacaactacgtctgattcaataaccagtacccgtctgcaggtttttagtttttatcgtttggcttggtactatttacaacatacacctttttactcggcagatgttttatctgatgcaggtgctgcgatgatttttcgcaaaattttagtagaagcagaagaagagttacaaatttttagaggtgaaattaacaagcctggctttattcagcaactatttcagctttatcaagaaatgcgcgaaggcaatattgagattgcggagctttatccatttttagaaaaacaaacggagaaccctaaaggacaagatttacaacttaagtttcaagatttaacgttaatttttacgcgattccaattgcaaatgagtcagtatggctatgaatcagcggagattattcaacatttaagcgagtatttacaaacggttgatttgtcgaatgttcaattcgttatttcaggctatcagcagtttactgccagagaattaaagttgattgaagtgctaatggcgcaagcaggttctgtgaaagtagcccttttattggacaaacaatatccgcatgacttacctgatccgcggtcgttattttatgaagcgggacaaacctatcatcagctttatcaactagcaagacagaagcaaatcccgattctttcagattatgtggaaaagaaagaggtattaattacaaatccagatttgcaaggattaaacgattattggattcaatcgcaagaacacctgcctccattaagcacagctgactggaggggcgatggcttatttctgtggcgtgctgaaaacgttaaagaagaattaacacatgttgcaaccgaaattcgccgtttagtggtggaagaagggtatcggtacaaagaaattcaggtgttgactcgtgatttagattgttatgaaaatttattagaaccgatttttgcggaacacgagattcctgtttatgtcgaccgagatatggctatggatcggcatcctttagtcgaatggattgaatctttatttgctattcattcgtacaattatcgttatcgcgatgtgctccgttttttgagaacggaattatttatgccaatgaatcaactcgctacttctgaagaaagcttgactgattggttaaaccaacggaacgcttggcgcagaaaagttgatattaccgaaaatgtagtcctggcatacggctatgaaggttattattggtcacaagaaaaagattgggaatttattcggtatgattttgaagcggaagagcaagaagatgtcgctacgatggaagaagagtcaaatgcgattcgtcaatcgcttcaacggctgttacctagttactttcaagcaatgataagtgccaaaactggtttggaagcagcgaccgtcttctatcactttttactgcaaagtggtgtggcaacacaattaaaaatgtggcgcttacaagctatcgaagcaggtcaactagaaacagctcgtaaccatgaacagacttgggatgcattgatgtcattactagatgaatacgtcactgtttacggagaaagttcgtttgattttacaacgtttcaagaaatatttgttagtggtttggaaggtttgcactatagtaaagtgccgacagcgattgaccaagtacaagttcgcgcaatggatttaactcgacctggcgctgccaaggttacttttgctattgggatgacggaagaaatttttccacaaaagattgaaaataaaacactattgtctgatgaagaacggcagacaatcaatgatactttaacggaaaaccaatatttacgtgggacaaccggacgcaaaattgcgcaagaaccttatgttgcgtatcttgtcttttcttcagcgcgagaacggttatatttaacctatccaagtgttaaagataccgctcaagaagtcaaaccgtctccttattttaaaaatatccaaaaagatttaaacttgcccgtttttgaaaaaaatgaaacaaccattttcgatgatgaaacgaccagtttagcccatattagtacgtatcggacgttaatcggtgaattaacgcgtttgaaaagacaacggaaagaaacacaagaaggactgttgcctttctggttaaatatggaaaaagcgctaatgaaccaatcaattgcgccgctagccaagcaagttttcgaaagtttaacgcatcaaaatattcctgaaaagattgatgaggtcttagcagaacctttatatggtaaagatatttatacgtccgtttctcggatggagagtttttatcgctgtcagtatcaatacttttctcgctatggcttacgtttgaaagaaagagatgtctttgggctttcgccagcagctacaggggaattttttcatgaagcattggatcagttctttaaattattgattatgaatcaacggaacttatctgaattaaccgatcaggaagtcaatttattggcggaggaagtactaaatagtattttaggggatgcgcgtttttctgtattaacgacctctagtcgcatgaactatattcgctatcaattgagtcaaacaattaaaaaagtcagttgggcgctgaaacgtcaaagccaacgaagtggcatgacgactgttcaaacggaagtgttatttggccaaattgccgctaaaaaaggaatttctggtttggaattaccattaaaaaatcaagggaagattcatgttcggggaaaaatcgaccggattgatcaattggttacccccgaatcaacctatttaggtgtgattgattataaatcgagtcaccgtaaatttaatatgacagaagcgtattacggcttagccatgcaaatgctgacgtacttggatgtggctttaatggatgctgtgcaattagttggtcaagaagctaaacctgctggctcactttatctgcatgtacacaatcctacattatcttatgaaggcaaagacgacattgaacaacaaatgcttaaaaaatatcagtttgatggtcttttgatgaaagacccagatttattggatcatttagatacgagtctgcaagctaaacaaagttcgttgctgtttccgattgaagaatccgccaaagaacaaattaaacctggtcgtcgccaagaagataaatttgtgacagaaccagaattaggcgcgttgctttcccataaccgaaataaatttattgaagcggggaatcaaattattggcggcgaagttcaacttaatcccgcttatcaaggcaaggaacggattgcttgtcgctattgtccgtttcgaagtgtctgtgattttgatgtgatgctaaaagaaaataattatcatcgtattgagaatttatccaaagaggaaattatggcgcgcttgttaaacaaagatgaggaaggagcaaccgaagatgag

SEQ ID NO: 20964 - DNA, 546 bp, Enterococcus faecalis
atgagtttgaaatcaaaagaattaattaaaacagtcgtcttttttgcctgtttagctttgggtctgtttttactgagacaatttgtatttacgcctgtcgtagtgagaggtcattcaatggatccaacgttagcagatggtgaacgggtaattacgttaaaaaacacagaaattaatcgtttcgatattattactttcccagcgccagatgaaccagataaaaattatattaaacgtgtgattggtttacctggagatacaattgcgtacaaggatgatacgttgtacatcaatggaaaagaagttgacgaaccctatttagatgaatttaaaaaagccttaacagatggtcaacctttgacaggcgatttttcattaaaagaaaaagtaccagcagatagctactttgttttaggtgataatcgacggaattcaaaagacggtcgtgtcattggttttattcataaaaaagatattttgggtgaagtgaaatttgtgatgtggccattctcacggtttggtccaataccagaagtgtcaaaacaa

SEQ ID NO: 20965 - DNA, 1767 bp, Enterococcus faecalis
gtggtcgaattatttattttaatgatggaacgggtgggcttaattattttactggcctttcttttagtgaatgtgccttattttaagcgtgttttattaagtcgtgaaaaaatgtcttcaaaagttcagttgattttgatttttggtttatttgctattatttctaattttacaggtatcgaaatcgctaagaatcagattgttcccaataatttactaacctatttaagcagcaatgcttccattgcgaatacgcgtacgttagtaattggcgtttctggattagtgggtggtccgattgtcggcagtgcggttggtttaattgctggctttcatcgggttattcaaggcggggggcatagtttcttttatgtgcctgcttctttaattgttggcttaattgccggttttttagggagccgcatggcaaagcaaactgtttttccgtctgccggcttttctgccattgtcggagcgtgcatggaaatgattcagatgatttttattttctttttcagcggtgatctatcggatggggccacgttggttcgttttattgcgctgccgatgattttgttaaatagcgtaggaacgttcatttttatgtcgattctaacgacgacattgaaacaagaagagcaggccaaagcggttcagacgcacgatgttttggaattagcagcggaaacactgccatattttcgagaaggcctcaataaaaattccagcaaaaaagttgcggagattattaagcattatacaaaagtcagtgcgattagcatgacaaacagtcatcaaattttagctcatgttggcgcaggaagcgatcatcatattccagagctagaagtcattacggagctttctcgggaagtgttacggacgggccgaatgaccatcgcgcatgccaaagaagaagttggttgttcggaccctaattgtccgttgcaagcggcgattgtgattccattattttcccatcagcaaattgttggcaccttaaaaatgtactttacagatccagcgcagttaacgcatgtcgaggagcagttagcagaaggtcttgggacaatcttttcttcacaaattgaattaggtgaagcggaagtacaatcaaaattacttaaagaagctgaaattaaatccttgcaagcgcaagtgaacccgcatttcttctttaatgccatcaatactatttccgcattaatgcggaaagacagtgaaaaagcgcggaaactattgctccaattaagcaaatactttcgaggcaacttgcagggagccgtgcaaactacgatcccagtttcacaagaactagaacaagtaaaagcctatttgtcattagaacaagcacggtttccgaatcgttatcaagtaacatttgacgtggaagaagcggttgcttcagaaaaagtaccgccgtatgcgattcaggtgttagtggaaaataccatcaagcatgcatttggcagccggaaggagaacaatcaagtccgggtagtggtcaaagcaaaacaacacaaattacatgtggatgtgtatgacaatgggcaagggattcctgaagaacgccgcttgctattaggaaagacgacagtgacttcggaaaaaggcaccggcacggcactggaaaacttgtcccgcagaatggcgaacctttatggatcagaaggttgttttttaattgaaaatttagagacaggcgggagccatgttcatttagaaatcccgatggaacaggaggaattagatgcacgtattaatcgt

SEQ ID NO: 20966 - DNA, 726 bp, Enterococcus faecalis
atgcacgtattaatcgttgatgatgagcccttagcacgagaagaattgagctatcttgtttcccaacatccgcaagtgacgagcgttgcagaagcggattctgtggcggaggcaatggaagagatgatggatcaaaagccagatttgttatttttagatattcatttgaccgatgaaagcgggtttgatttagcggaaaaattaacccatcttaaaaaagcgccctacttggtctttgcaaccgcctatgatcaatatgcgttaaaggcctttcaagtgaatgcaaaagattatattttgaaaccttttgaagaagaaaaaataacacaagtcattgaaaaagcatcgaaagaaatgggtcaagctgtcccagaaaacactgccgaaaaaggaccaaaatctgaagcaatacctattcaaggggaagaccgcatttatcttgtggcgccagaagatatttacctcgtttctgtcgaagaacggcaactgagcatttttgtagatcaacaggtctacaagatgacagggaccctcaacagtatcgaacaaaaattacctgccacgctctttattaaaacgcatcgaagtttcatcttgaatcgaacaaaaattcaagaaattcagccgtggtttaataacacgttgcaagtaattttaaccaacggctcaaaagtacctgttagccgttcatacgtcaaagaatttaaagaaaaacttggcttaagt

SEQ ID NO: 20967 - DNA, 4848 bp, Enterococcus faecalis
atgaaaaagaaaatcgctgttttattggcaacttgtttacttgtacaaccatttttatctgtttcagcgtgggcgattgaaggggagcaacaaacagaacgtacgcagacacagccaaaaacagcagaaaccagtacaagtgaagcaacaaaagaaagcagcgcacattctacagaacagtcatcaatgactgaatctagtgctatcacagaaaaagtaaccacctcttccacagaaacaaaaccaagcgaagagcagaagcaaatcacgttgacctttgaaacaacggatcaagctttgtttctaaatgatgccaaaagttatcaagtggtaaaagaaaaaaatcagccacttcggacagaagaattaccaaaatgggcgaatagtgaggaaaatgcgactttcgttggctggtcttatcaaggcaaaacatatacaaatgaagaacttcttcaattagagttttcagaagatacacaacttacggctgtctttaaacagaaactgacacgcatggccagagctgtttcaattgatcagtccattgcggacacaattgctcctgcagataaaacaaaagtgattgttgtgccaagtcctgcaggagatggagcagcgtacaaagaatatgcatcgacagaggctggcttgaaagaagccttgtttgatttgtatcaacaggggaacaatggcgatttcactctttatataggaaacaatattacgacgagtgcggcgaccaccgctaaagtgattcctgacaccgttacggcaagtaatatgaccttttacgccttgcaaggtaaggtcaatcatttagtgattactggaaacagcgcggatccgattagtatggatcaaacggcgccaacgggttctaagacgttaggatttaatcaaaatatctattttggctcaaacatcactttgagaaatctaaactatacaggtacgaatatgtatttaaatggttacagtttgaacctgaatggcggctctagtggaaacggtctgaccgtatacggtggaacggatacaggagatgtttcaggaaacccaactttaacagtaaatagtacaggtacagggacatggaatttctatggcggaaaccaaaatggtggtaatttagctggaaatcctacgattgttattaacaatacacggagcggactaaatacattaagtgggggcgccaatattgggacagtgactgggaatacttcattggttgtcaatgattctggtggcagaattgcttcaatttatgggggcggttatgggaccaacgcaaccaacacagcgaatgttactggtaacgtctcaacaaaggttgcgattacgaatgctgctacaggtttccaattaagtacgtattatggcggtgttcaatacggaaatattggtggaaaagtaacaaacgatatttctggatatggccgttggtatacagcgggtcaacgttttattggtggctcttcccgcggcgatataggaacgaatcgtgcgactgatggaattactacaaatttaaatacacagttgtatagtgcgggtcgtgcagattttgaaggaggcaaccaatattctggaacgatcatcggagatattacgaatgtggttacagcaggaacgaattccgctggtggtattaatgattttaacggcggtgctggtaacaatgtttcgaaatttaacaagagtcaaattggggcctcaaatgaagcaacgtatgatgcttatacaccacaacaaagagcagaattagccaaatcagcagcagcttttaaagtttttggaaatatttcttctaaattagtcagcggttcgtttaataatggtgcaatttactcaactgcagctggccgcggcggttatatcgaaggaaatacaacaattgaagtgggaacagcgaatggtgatgggtccttaggtggcgatggtatggcttattcaggcgcaaaaccgacaagcttagattattcaacgaccgataaaagtcgtgggtatagttcaggttgggatattgttggtggcggcggctatcctgctagtaatgatacttgggatatctatataaaaggagatactaagactgttttaaataataccattgctcgctggacatatggtggctctttttcaggtgtcgttgaaggcaatacttctaacacattgaatggcgggattgctgacacattagaaggaacaggctatcaagcagctcgagtttatggaaacggtcaaacaatcgttaataatggtcaagtcgattggtttctttcaggcggtggctggaatgatgccaaaaatgttgggaatgtcggtgtaacggtttatgaaggagtaattaatgcttcgatgggtgcttcttatggagcaagcggtggccatacaattactggtaattcagacaatcgcatctacggaggaaatttctcaggaactcctcggacaggcgcgaacggtttttcaggtgggattaccaatgcgggctcacttcttggaaatgccaaactcttaattgatttaagaaattacaacggagagtttaagttgcctggtaatacctacattactggtggtcggccctatggtcaaaatacgacactaggaacggatgaatcaaacacaattactttaaatattttcactaaaacaggtgtggaatctctaaatggggccagcatttacggtgatggtggaaccaatgctgcgtataccaagaacggcaagattacaatgaatattcaagcagcgggttctagtattggaaatttatatgcgacacagtattccaatatcagtggcggaaaaatcttacgtgatgttaccgcaaatgttcaaggtgcagttagtattaacggtttatccggtggttcatcaacagataatttcactaatgcaattgtgaatgctagttcaaataaagtggcctttaactttgggactaacgttgacggcaccaataactatcaaacagaaccactaaatgcgacaggcttaggcgttgtcaactttacggaattaaatgtcaccaatggcattaaattaatggctaatggtgggaacatcaaaaatggcgtttctgctactgccgcgaaccacagtacgacttacaatgaattcggatcaattcatctatctaaaaacgctggaattgggatcaccaacacagccaatttaatctcagctagcaaactaacggttcaggatcatgcaacattagaaacaattcctggtacaggtaaagtaaacattgcggattttgaagctgtcgatccaacaaaagatgaacttttatggattaaaccaacgacagatacaactgctttggtggatagcacagggacttggtttggaaatgtcaaagcctatcaggtcttgacgattaatccaacggtcaataatgctacaaaacttacgccaacaacgtttcatgggattgaaaaagcgactggaaaaacatttattggcgataacgatgtgaccaagggcgccaatggctatgggatagcaattcctggctccatcatcgattacgaagtggaaacgcctggaattgtggcaggtgcaggtactatttctcatgatgtaaaagaggtcaaagccggcaatgcgccattaaccttacaagcgtggggcaccgaagtagctggacaaaaagttcaaaaaggacgtttgatgattccgacctcaagtgctttaacaccaaccctaagcttccttcctgacgaagtaacaggttcttggttgcaccaaggaacggttaagtctagtgaagttgggagcgcgatagagcaaattccagagcaaaaagataccaccccgctttcatggaaagcgacgaatatgaactacagttatcaggtgaaagttcaattttcaaataaagtggaactttcggggcaatcggtgattgtcacagaagatgaggcagcacagctaacaactgttgataaggtagtggaaatgctcggcgcaaaaggtcggccgtttttcaagacctcattaaaagagacggatttaccacaaattcaagcgccgttagcagaaaaaactgtatcgcggacacatgatattcaattagaagcagggacgtcaggagataatttgcaaaacaaaacggttcatttagttgttgtgaaaaatgaaagtatccttgccaaagatcgttcgtttgccttgtatgcgacaagtgcgcatttgaaattaaaagaagcaaatggcttaacgaattcagacgagttggcacaatggacacaagcaacggtgattttcgcagatggtcgggccaatcaaacaccaagtcttgatgccgcaaccttccaagccattcagcaagcgaaaccagaagaattagccaaaacggtgccagccaattatcaatttacagaagctggtgaaacgttaaataaaaaagtcaatgtgtctatttcaggtgaattaacgttagaaaaagtacctaaaacaattgattttggcaaacaaaaaatttctgccaagccagaagtttactggccaactctttcagatgatttagtcgttcaagacacacgcgggtcagaaagtacgccttggaaactgaatgttcaggtaactaatcccttaacgaacggcacagatcaattggaagatttgtcattggttacagacaaaggagaatttttactcaataaaggagatacggttgttacagaaaatgaaggctcaggttcaggtagttatacaattaaccaaggttggggtgcggcaaaccaacggggacttaaactatctgtgccagtcgagaaacaaaaagttggcgaattcaaagggacattgtcatggtcattagtcatggcacca

SEQ ID NO: 20968 - DNA, 732 bp, Enterococcus faecalis
atgaaaaaaacagtattagcagtagtagggattgtaggatttagcggtgtcctagcgacacaacaagcatttgcggaagacattaacgtgaactatacaagtaatggcgccattacatttgaaccagatacagatccaacgaagccagttaacccaaccaatccagatgaaaaagttgaaccagaagatccaactgacccaactggaccaaaaccagggactgcaggccccttatcaattgactatgcttcaagctttcaatttggcgcccaaaaaatcacttccgatacgaaagattattacgcacaaattcaaacatttaaagatggaacaacaggtcccaactatgttcaggtaacggataaacgtgggacacaagaaggctggacgttaagcgctgtacaaaatgggcaattcaaaacagcccaaaatgaagaattagtgggggccgctttatcgattgccaatgcaggtgtgacatcgattgttgatgccgcatacgcgccaacaccaacagcagcacatacctttgttcctggaacagaagtagaattagtcaaagcagaagatggcaaaggaatggggacttgggtctatcgttttgggaaagatgcgacagaaggtgctactgccgtgaaattaaatgtcccaggtaaagcgattaaattagcaaaagaatatcgtacgaccttaacatggacattgaaatctgtaccaacgaatgttggaggc

SEQ ID NO: 20969 - DNA, 759 bp, Enterococcus faecalis
gtgaaagtgagtatattttcgacatgcgtggtggatttactttttccaaatgtagggcaagcaatggtagaggttttggaacgttatggctgtgaaacggttttaccaacaagccaaacgtgttgtggtcagccaacgtataatagtggctatgtgacagagagcacgacaacgcttaagaatcaaattgatagttttgacggtgccgattatgtggtgggacctgcggggtcttgtgtcggcatgatgaaagaataccacaaatttttagcagatgatcctatttatggaccaaaagcacaacgtttagctgagcgaacttacgagtttagtcagtttctttatcgtgtcttaggggtcaaagatgttggcgcaacgttacatgggaaagccacttatcatcgttcttgtcatatgacgcgaattttaaatgaacgagaatcaccctttgttttgttggatcatgtgaaaggattagaaatgattcctttaggacatcttgaaaattgttgcggatttggcggaacgttttcagtgaaaatgccagctatttctgaacaaatggtgacggaaaaaatgaacgatgtgattgatacaggcgcagaaattttaattagtgcggatatgggttgcctgatgaatatcgggggtaaattcaatcgtgatgggaaaaagattaagattatgcatattgcagaagtccttaatcacgaagtggatgaagcacgcatggaccaaccacaaatcatatcggtaggg

SEQ ID NO: 20970 - DNA, 1350 bp, Enterococcus faecalis
atgagtgaaacacaacaaacaaccttaaaaaaacaattaagctcgcgccacattacgatgttagccttagggggagcgattggcgcaggtctttttaaaggaagtggcgaagcaattggtattgctggtccttctgttttaatcgcctttctaattggcggtgctgttctcttcatcgtcatgagtggtttaggaaaacttgttttagatggcggagacacacatcatggtttgtctggcttggttcgaccatttttaggtgcacattctgctgattttattgattgggtttattattccatgtggacaattaatattatcgcagaagcggttgccgcagcttcctttttacaactttggtttcctaatattcctgcttggttttttgtttttattttagctattttaacgacgctcattaatctttactcggttcgtttatttgcagaaacagaatattggttggcgtttgctaaaattagtgtcatcattttgttaattatttttggtgtttatctggtgggacaacaaatgctaggcagtggtgtcttccctactttacaaagtatcaccgatcatggtggcttcgccccacatggcatgaaaggtatagttaattctttattagtagttatttattcttatggcggttcagaattaatcgcgattactgtcagtgaagcagatgatcctaaaaaagccattcctaaagcgattcgtggtgtgatgggacggattatttccttctatatcattccattattcttacttttgattattttcccttggaataccttagcaggcacaacggtgagtccatttgttatggtttttgaaaaaatgaatattccttttgctgctgacatcgtaaattttgtgattattttagccttgttttcttctattaattctggagtatacgcctcttctcgccttttatattttcgcttaaaagataaaaaaggacccatgagtaaactaggggttttaaacaagcaccaagtacctcaacgttcagttttcttctgcgccagtgttttatatctgggcgttattctttcttattttgttggcgatgaattatttggttacttagccggttctctctcttacactgtcttgctaatttggattttaattagcgctgcggcgtttgttctgtctttaaaacgagggtctctctttgaaaaaagtattaatctccttgcgttaatcattttaggtctcatctttattggcatcttatttacaaattcgttaggcgtcactcttttaacaggcctactgtactttgttattttctttagttatcgtaagaaaaatgattcctttctactctctgatgaaagc

SEQ ID NO: 20971 - DNA, 2670 bp, Enterococcus faecalis
gaatatgatgtttcagttacttctgaaaaaataacagtagaggattctgctaaagaatcaactgaaccagaaaaaataactgtaccagaaaatacgaaagaaactaacaaaaatgattcggctccagaaaaaacagaacagccgaccgcaacagaagaggtaaccaatccatttgcagaagcaagaatggcgccagctactttgagagcgaatctggcactgcctttaattgcaccacaatacacgacggataattctgggacttatccgacagctaattggcagcccacaggcaatcaaaatgtgttaaaccatcaagggaataaagacggtagtgcacaatgggacggccaaacgagttggaatggggaccctactaatcgcacaaattcttatattgagtatggcggtacaggagaccaagccgattatgccatccgaaaatatgctagagaaacaacaacaccagggctttttgatgtatatcttaatgtgcgtgggaatgttcagaaagaaatcacgccattggatttggtcttagtcgttgactggtccggtagtatgaatgaaaacaatcggattggtgaagttcaaaaaggagtgaaccgttttgttgatacattggcagatagcggtattaccaataacatcaacatgggctatgttggctactcaagtgacggttataataacaacgccattcaaatggggccgtttgatacagtcaaaaatccaattaaaaatattacgccaagtagcactagaggaggaactttcactcaaaaagcattaagagatgctggtgatatgttagcaacgccaaatggacataagaaagtcattgtacttttaacggatggcgtcccaaccttctcttataaagtgagtcgagttcaaacagaggcggatggtcgcttttacgggacacaatttacgaatcgacaagatcaaccaggtagcacttcttatatctctggtagctataatgcgccagatcaaaacaatatcaataaacggattaacagtacgtttatcgccacgataggtgaggcaatggtcttaaaacaacgtgggattgaaatacatggattgggcattcaattgcaaagcgatccacgagctaatttatctaaacaacaagttgaagataaaatgcgtgagatggtgtcagccgatgaaaatggagacctttattatgaatccgcggattatgcaccagacatttctgattatttagcgaaaaaagccgttcagatttcaggaacggttgtaaacggaaaagtagttgatccaattgctgaaccttttaaatacgagccaaatacattatcaatgaaaagtgtgggtcctgttcaggttcaaacattaccagaagtgtcgctaacaggcgctacaattaatagtaatgagatttatttgggtaaagggcaagaaattcaaattcattatcaagtacgtattcaaacagagtcagaaaacttcaaacctgatttttggtatcaaatgaatggtcggacaacgtttcagccattagccacggcccctgaaaaagttgattttggggttccttcgggaaaagcacctggcgtgaagttaaacgtgaaaaaaatctgggaagagtatgatcaagacccgacaagtcggccagataatgtgatttatgaaattagtagaaagcaagtaactgacacagccaactggcaaactgggtatattaaattatcaaaaccagaaaatgataccagcaatagttgggagcgcaaaaatgtaacccaactttccaaaaccgcggatgaaagctatcaagaagttcttgggcttccccaatacaacaatcaaggacaagctttcaattatcaaacaacccgtgaattagcagttcctggttacagtcaagaaaaaatcgacgatactacttggaaaaacacgaagcagttcaagccattagatttaaaagtaatcaaaaattcttcctcaggtgagaaaaacttagtgggagccgtctttgaattgagtggtaaaaatgttcaaacaacattagtggacaataaagatggtagctattccttgccaaaagatgtgcgcctacaaaaaggggaacgctatacattaactgaagtaaaagcacctgcaggacatgagttaggcaagaaaacgacttggcaaattgaggtgagtgagcaaggcaaagtaagcatcgatggacaagaagtgaccaccacaaatcaagttattccattggaaattgaaaataaattttcttctttgccaatcagaattagaaaatacaccatgcaaaatggcaaacaagtgaacttagcagaggcgacttttgcgttgcaaagaaaaaatgctcaaggaagttaccaaactgtggcaactcaaaaaacagatactacaggattgagctattttaaaattagtgaacctggtgagtatcgaatggtggaacaatcaggaccattaggctacgacactcttgctggaaattatgaatttactgttgataaatatgggaaaattcactatgcaggcaaaaatattgaagaaaatgcgccagaatggacactgacacatcaaaataatttgaaaccttttgacttaacagttaataaaaaagccgataatcagacgccacttaaaggagcgaaattccgtttaacaggacca

SEQ ID NO: 20972 - DNA, 1044 bp, Enterococcus faecalis
ttggcagatgatcgtaaagtggctttagatgccgcactgaaaaaaattgaaaagaactttgggaaaggttctattatgaaattaggcgaaaaagctgatcaaaaaatttcaactatccctagtggttctttagcgttagatgttgcattgggcgtaggtgggtatccacgtggccgaattattgaagtatatggtcctgagagttcaggtaaaacaactgtttctttacacgcaattgcagaagtgcaacgaaatggtggaacagccgcttttatcgatgctgagcatgcattggatcctcaatatgcggagaaactaggcgttaacatcgatgaattacttttatctcaaccagatacgggcgagcaaggcttagagattgccgatgccttagtttcaagtggtgcgattgacatcgttgtcatcgactcggttgctgcgttagttcctcgtgcagagattgatggtgagatgggagcgagccatgtcggcttacaagctcgactaatgtctcaagcactacgtaaattatcaggctcaattaataagacaaaaacaattgctattttcattaaccaaattcgtgaaaaagttggcgtgatgttcggaaatcctgaaacaactcctggtggacgtgcattgaaattctacgcaacggttcgtctagaagtccgtcgtgcagaacagttaaaacaaggaacagacatcgtcggtaaccgcacaaaaattaaagtcgttaaaaacaaagtggcgccaccatttaaagtggcagaagttgatatcatgtatggccaaggtatttcccaagaaggcgaattactagatatggctgtggaaaaagaccttatcagtaaaagtggtgcttggtatggctacaaagaagaacgaattggccaaggccgtgaaaatgccaaacaatacatggcggatcatcctgaaatgatggcagaagtgtctaaattggtccgtgatgcatacggcatcggtgacggttcaaccattacagaagaagcagaaggtcaagaagaattacccttagatgaa

SEQ ID NO: 20973 - DNA, 2574 bp, Enterococcus faecalis
atgccacaaaagacaaaaaatacacccatgatggaacaatatttatccattaaggcccaatacaaggatgcgtttttattttatcgcttaggtgatttttatgaattattttatgaagatgctatcaatgcagcgcaaatcttagaattgacgttaaccagtcgtaaccgcaatgcggatgatccgattcctatgtgtggcgttccttatcatgccgcgcaaggctatattgatacgttgattgagcaaggctataaagtagcgatttgtgagcaagtggaagatccaaagactaccaagggcatggtcaaacgagaagtggtccagttggtaacgccaggaacggtgatgaatagtaaaggcttggaagccaaagacaataattacttaaccgctgtgctaacagatggtaatcagttcggttttgcctatgtagatttgagtacaggcgaattaaaaacagcagtcttggctgatgaagagggcgttttgaacgaagcttctgcgttgcaaacaaaagaaatggtcctaggttcagggatccctgaatcgttaaaagagaacttaagtttacgtttaaatatcatcttttcgacacaagaaacggtggaagaaaatgccgagtttagttttttaaccaatgaactgattaatccattagaaattgaaattacaggcaaattattatcttatttatccgttacccaaaagcggagcttgtcccatattcagaaagctgtggaatatcagccagatcatttcttgaaaatggatcattattctaaattcaatttagaattgagtcagtcgattcgaacaggacagaaaaaagggactctattgtggctattagatgaaacgaaaacagctatgggcggccgtttattaaaacaatggttggatcgtccgctgattcaggaacgtcaaattaaggcgcgtcaagaaatggtgcaatccttattaaatgcctattttgaacgcttggatttgcaagcagcattgacgaacgtttatgatttagagcggttagcaggacgcgtggcattcggcagtgtgaatgggcgtgatttaattcaattacggacctctttagaacaagtaccaacgattcgacagttaattgtcgggatcaatcaaggggaatgggatgatttgttagtcgacttaaaccctgttgaagatttagtggcattgattgcgacggcgattaatgaagaagcccctttacaaattactgaaggaaaggttattaaagacggctataacgaccaattagatgaataccgtgatgccatgcgcaatggtaagcaatggttagcggagttagaagcgaaagaacgccaagaaacagggattaaaaacttgaagattggctacaatcgggtctttggttatttcattgaaatcactaagtcaaatttagcgaatttagaagaaggaaaatacgagcgtaagcaaacattagctaatgcggagcgctttattacgccagagctaaaagaattagaacgtttaatcttagaagccgaagaaaaatcagttgaactagaatatcaattgttcttggccgtgagagaacaagtgaaaacgaacattgatcggttgcaaacactggctaaaaccattagtgcggttgatgttttacaatcttttgcaacaattagtgaacggtatcaatacgttcgaccaacgttaagaagtaacacgaaaaatttggcgattgtcgaaggacgacacccagtcgtggaaaaagttttagggcatcaagaatacattccaaacagtatccgcatgaacccagaaacagatattctcttgattactggaccaaacatgtcagggaaaagtacctacatgcgtcaattggctttgacggtggtcatggcgcaaattggctgttttgtaccagcggaaagtgctgaaatgccaattttcgatcaaatttttacacggattggggcctctgatgatctaattgcagggcaaagtacctttatggtagaaatgatggaagccaaccaagcactgcggcacgccacgcctaacagcctaattttatttgatgaattaggacgcggcacggcaacctatgatggaatggcgctagcgcaagccatcattgaatatatccatcgtgaagtacaagccaaaacgctattctctacacattatcatgaactaactgttctagatgaaaccttaaaaggcttgaagaatattcacgtgggcgctgtcgaaaaagatggcgaagtggtctttcttcataaaatgatggaaggacctgctgataagagctatgggatacatgttgctaaaatcgctggtttaccaagcccgcttttagaacgagcagccaccattttatccgctttagaagcggaagaaacaacgattccaatttcagttcatcatgaagaagtttcagaagtacatgaagaaaccgagcaactttcattatttaaagaagtttcaacagaagaattaagtgtcattgacacattgaagaaaatgaatctattagaaatgacaccactagatgcgttaaacatgcttcatcaattgcaaaaacgtatc

SEQ ID NO: 20974 - DNA, 2130 bp, Enterococcus faecalis
atggggaaaattcaagaactatccgaacaactagccaaccagattgctgctggtgaagttgttgaacgtcccgcttctgtcgtcaaagaattggtggaaaatgcactggatgcaggaagcactcaaattgatatttttattgaagaagctggcttaaaaaccattcaaattattgataatggtgaaggaattgccaaagaagatgtactgaatgccttcaagcgccatgccacaagcaaaattcatacaagagatgatttgttccgaattcgcagcttggggttccgaggcgaagccttaccaagtattgcctcagtttctgaaatgattgtcgaaactgccacagctgaggaagaagaaggcagctatgtgattctaaaagggggcaaggtcgaagaaaaccgaccagcagccctccgtaaaggcacaaaaatgaccgtttctaatttattttataatacgcccgctcgtttgaaatacgtcaaaacgatccaaacggaattggccaatatcggtgacattgtcaatcgtctggcgttaagccaccctaaagttgcttttcgcttagttcatgatggccacaaaatgatgagtacaacaggcaatggtgatttaaaacaaacgattgcggggatttatggcattagcaccgcaaagaaaatgttgaaaattgaaggaaaagaccttgattttactttgacagggtatgtctcattgccagaagtcacacgggccagccgcaactatttatcaacgattatcaatggtcgctatattaaaaatttcgcgttaaataaagcaattgtagccggctatggttcgaaactaatggtggggcgttttccaattgctgtgttagaaattgaaatggatccgctgttagtcgatgtcaatgtccatcctactaagcaagaagttcgtttaagtaaagaaaaagatttaatggcattaattgaacaggcgattcaagaagtgttgagccaagaacagttgattcccaatgcggcagacaatttgcgttttaaaaagaaactaccgccagaacctaaagccgaacaaatggaaattcctttatcgactgaacaacctgcggtaaaacaacgaccgggcagcttaagctataatcccgcaacaggccgcttctatgcggaacatgcgacagacgaaacaccagcctcaagcgcccctgaagctgtcaaccagacagaaagagcagtggacccaatggacgatccatttgcgccgccagtgccagaatcaacgagtgtagcggaagaaacgtcagcttacgaaacctcttcggcagctgctgattccgcaaatcattgggaaacagctagtaatgagcaacaggtaatagccgaagaaacgaaaataactgaagtgcctgattcagaaccttctctgcgttcatcagaggctgctgacgaggttttccaagaagaaatgaaacttcacccagaattcgatgccaatagcgctgcgagtcaaagagaactgaaacaagccctgaacaagttggaagaagaacgaccgacagagcgttttcctgagctagaatacttcggtcaaatgcacggaacttatttattcgcacaaagcaaagatggcctgtttattatcgaccaacacgctgcccaagaacgaattaaatacgagtacttccgtgaaaaaattggcgaagtcagtgatgatttacaagaactattggtaccaatcgttattgattatccaaatagcgatgccttgaaaattaaagagcagaaagaaacccttgcggaagttggcatccatttggaagactttggacaaaatagtttcattgtgcgggcgcacccaacttggtatcctgcaggcgaagaggaaagcattgttcgcgagatgattgacatgttgctaacaactggctcggtcagcgtgaaaaaattccgtgaagcaactgccattatgatgagctgtaagcgatccatcaaagccaatcattacctcaatgagcaacaagcacgcgtgctattaaaagatttagccttgtgcgaaaatccgtttaattgtccgcatggacgtccggtgctgattcattttacgaattcagatatggaacgaatgtttaaacgcattcaagacccccat

SEQ ID NO: 20975 - DNA, 711 bp, Enterococcus faecalis
atgaacaagtttcatgacatatttttagaattagaacaacaaattgtccaaggcgactatcagccaggcgatttattacctagtgaaaatcaattagtggaaacttacaatgtttcccgtgaaacaattcggaaagccttgaatttactgattaacgctggctacattcagaaaaaacaaggcaaaggctcgattgtgctcaactttaaaaagtttaattttcctatttcaggggtgaccagttacaaggagttacaacaaacgcaacatattgaaagtcatactcatgtggtttccttagaagaaattcctgtggagcgcaacttggctcagttgactggttggacggaaggggcccctgtgtggcgcttagttcggcaacgggagattgaaggggaagtcgatattttagatattgattacttgattaaagagattgtcccagaactgccgaagcaccgtgccgaagattcgattttcgattatctggaaaacgaccttggcttggcgattagttatgcccagaaagaaattaccgtggaaccgctcacagagatggacaagcagctgattggtgaagtcgaaggcaatcatgtcgtcgtggttcgtagtatcatgaacttggaagatacccgttgttttggctatacggaatcccgtcaccgcttaaacaaatttaagtttgtggaattcgcccgtcgccgtaaattg

SEQ ID NO: 20976 - DNA, 1302 bp, Enterococcus faecalis
atgattaaaaaagactatgcacaaattaaagaaacattgtatacagaaacactggaaaatggtttaaaggtttacctattaccgaaaaatgatttccaaaaaacgtatggcttgtttacgaccgattatggttccattgacaatacgttcgtgccaattggtcaagaggaaatgattgaagtgcctgacggaatcgcccactttttagaacataaaatgtttgaaaaagaagatggcgatgtcttccaaaaatttgggcaacaaggggcttcagcgaatgcctttaccagttttacgaaaacgagttatttgttttcaacgacggatcaagtgacacaaaatctagaaacgttgcttgattttgtgcaatcgccgtatttcacgaaggaaacggtcgaaaaagaaaaaggcatcatcggacaagaaattcaaatgtatttagatgatcctaactggcgcttgttctttgggattttaggcaatctttatccgaagcatccattgcatattgatattgccggcacagtggcaagtattgcggagattaccgcagaagatttgtatacatgttacaatacgttttatcatccaagtaatatgaccttattcgtggtagggaaaatggaccctgaagcgttaatggccttcattcgtgaaaaccaagcggcgaaagagtttcctgccgcccaacctattcgtcggcattttcctgaagaaacagctgctgacattgtcaaagagagcgccattgaaatgacagtcacacgggcaaaagtgcttgttggtttgaaaggcttagatgaagtgccaacaacgggtcgtgacttaatgaaatatcaagtcaccgtgaacttgttgttacaattattgtttggtaatacctctcaaaactatttggctctttatgatgaaggcttgttagatgatagttttagttatgactttaatttagatcgcagtttccattttgcggatattggcggcgatagtgagcaaccagaagtcttagcagaacgaattgaagctattttattatctgccacaacaagtccagaattaacggaagaaaatttgtccttattgaagaaaaaaatgattggtaaatatttccaatccttaaactctttagagtatatcgccaaccaattttcacaatcattgtttggggaaaccacgctgtttgataagattgaagtcattgaaagtattcaattagccgacgtccgccaagtagcagagacctttattcgtgaagaaggattgagccgtttctacatgtatcctaaaggagaaaccgagcaa

SEQ ID NO: 20977 - DNA, 864 bp, Enterococcus faecalis
gtggccagcgtaaatattggagaaacactaaaagaagcaagattgcagaagaacatctcaattgatgaactgcaacaaatgacaaaaattcaaaaaagatatttagaaattattgaacaaaacgattttgagtccttaccaggcaccttttatgtgcgggcgtttatccgccaatatgcaagtgcggtcggcttagatggcaatcaattggtagatatctatgatggcaaagaaccagcaattgtcgaagaacccaagccagtgtatgaagagcttgaaggatcacgtaagcaattgcatgacgaagaaaagcaatccagttggttactgcggaacttaccggccattgccttttcgttaattggtttagccattgcggtcgtggtgctgtacattatgtggcaagatcaaaaagccgaaccgattattcaaacaccggcaactagtgccagtgtggaaaagcccaaagaatcaagtcaagccccagaaagtagcacacaaagtagtacaccgccgtcttcttcaagcgaaccagagaagaaaacagctgtggctgtggtgagtgatgctaacaatcaagtgactgcaacggttaaagatgcgaatagtccaatcaacattacctttaaagggactgaaggctcttgctggattggcgtgatggtcgatggcaactatacgtaccaacacaccctgcaagcaggagagacccaaacaacagctttacctgcgaatgccgccaatgcaacactgattctaggcgcctcaaataacgtcgccattcaagtcgatggcgccgatttaacactggaaaaaacgccagttttaattcgtaaggatgttacattagggattacgtatcgt

SEQ ID NO: 20978 - DNA, 576 bp, Enterococcus faecalis
gtgaatttaccaaataaattaacagttttaagaatatttatgattccgatttttattattattgtgtcggtgccaatggactggggaacgattagttttggcgacacaacgttagccgttacccaattagtgggcgcgattatttttgcagttgctagttttacagactggttggatggcaaaattgcccgtgcacaaggcttggtgacgaacttcggaaaatttgcggacccattagcggacaaaatgctagtgatgaccgcttttatcgtcttagttggtcaaggcaaagtacctgcttggattgtagcaattattgtttgtcgtgaattggcagtaactggtttacggttgttattagtcgaacatggcgaagtaatggcagcagcttggccaggaaaagtaaaaacagctacccaaatggttgcaattattttactgttcattaacaacattccattttcagcacttcatctaccactagatcaaatcatgctatatgcctgcttgattttcaccatttactctggtgttgattattttgctaagaataaagatgtttttaaaggttcgatg

SEQ ID NO: 20979 - DNA, 423 bp, Enterococcus faecalis
atgaaattttcaaaaattatggttggtgttgaagagtcgccagatgcgttaaaagcatttcattatgctatccaaaaagcaaaagaagaacaagctgaattggttattgtttcgattttagaagagaaagagattaatgtttaccaatcgttagataaaaattattggcaagaacagttggcgaaattagagaaacaaacggaaaaatatcaacaagaagcgttagcgaatggcatcgataaagtaagtgtaattgtcaatgaagggaacccaggagaattaattattaataagcttattcctttgaataaaccagatttgttaattattggctccaagtcaactagcaaattaaaaagcttttttggtagccaagcagcttatatggctcgatatgcaccaatttctgtaatgattattcgc

SEQ ID NO: 20980 - DNA, 1596 bp, Enterococcus faecalis
ttgaaaaattcagaagaacatgaaccaaagcaaagacatcatttgattgaatatgcaaatggtccttcgcttgaagaaattaatggcaccatcgacgtgcctaaaaatatgagtttttggaaaacgttatttgcttactcaggtccaggagcattggtagcagtggggtatatggatccaggaaactggtctacttcaattactgggggacaaaattttcaatatttattgatgtcgattattttaatttccagtttgattgcaatgttgctccaatatatggctgctaaattaggcattgtttcacagatggatttagcacaagcgattcgtgctagaactagtaagacgttaggtattgtattatggattttaacagagttagcaattatggctacagatatcgctgaagttatcgggggcgcaattgccttatatttattatttcatattcctttaggtctggctgtcttcattacggtatttgatgttttacttttgttgttattgacaaaaattggttttagaaaaattgaagctattgttgttgctttaattgttgttatttttgtgatttttgcttatcaagtggcattgtcaaatccagtatggggagatgtaattaaagggctggttcctagcgcagaagctttttctacatcacatgcggtgaatgggcaaacgccactgacaggtgcattggggattattggtgcaacagtgatgcctcataatttgtatttacattcttctgttgtgcaaagtcgtaaaattgatcgtaaagataaaaccgatattcaacgcgctttacgcttttcaacttgggattctaatattcaattaacgatggcattttttgttaactctttattattgattatgggtgtggccgtttttaaatccggcagtgtcaaagatccttcattctttggtttgtttgatgctttatcaaatccagcggttatgagtaattctattttagcgcatattgcaggttctggaattttatcaattttatttgcggtagccttattggcatcaggacaaaattcaacaattacaggaacgttaactggtcaaatcattatggaagggtttattcatatgcgcgtaccaatttggttacgtcggatggtcacacgtttgttatctgttattcctgtcttaatctgtgttttaatgaccagcggaaaaagtacagtggaggagcatattgcgattaataatttaatgaacaattcacaagtttttctagcatttgctttgccattttcgatgttgcctttactgatgtttacagatagccgtgttgaaatgggtgaacattttaaaaactcgtggttaattaaattgttaggctgggtttctgtcattggcttaatttacctcaatatgaaaggtttacctgatcaaattgaaggattcttcggtgataatccgacagcgagtcaaattacgttagccgataatattgcctatgtcatcatagcactcgtcatcctcttgttagtttggacggttgtggaattatataaaggcgataaacgatatgcacagcagcttgcagctatggagcaacaagtagaggaggttaaa

SEQ ID NO: 20981 - DNA, 366 bp, Enterococcus faecalis
atgctttcagcgtttatcccttccctacatagctacccagcaatgcccttggcagaacaactggtacaccagcggtaagtccatcccggtcctctcgtactaaggacagctcctctcaaatttccaacgcccgcgacggatagggaccgaactgtctcacgacgttctgaacccagctcgcgtgccgctttaatgggcgaacagcccaacccttgggaccgactacagccccaggatgcgacgagccgacatcgaggtgccaaacctccccgtcgatgtggactcttgggggagataagcctgttatccccagggtagcttttatccgttgagcgatggcccttccatgcggaaccaccggatcac

SEQ ID NO: 20982 - DNA, 411 bp, Enterococcus faecalis
ggtacaggaatatcaacctgttgtccatcgcctacgcctatcggcctcggcttaggtcccgactaaccctgggcggacgagccttccccaggaaaccttagtcatacggtggacaggattctcacctgtctttcgctactcataccggcattctcacttctaagcgctccagccgtcctcacgatcgaccttcaacgcccttagaacgctctcctaccactacacctaatggtgtagtccacagcttcggtaatatgtttagccccggtacattttcggcgcagggtcactcgactagtgagctattacgcactctttaaatggtggctgcttctaagccaacatcctagttgtctgtgcaaccccacatccttttccacttaacatatattttgggaccttagctggtgg

SEQ ID NO: 20983 - DNA, 882 bp, Enterococcus faecalis
atgaaaagtatgactggatttggaaaaaagaccattcaaaatgaaaattatcaattggatatcgaagtcaaaagtgtcaaccagcggtttttagatattcaattgcgtatgcccaaggaactgaatgcctatgaactggtgattcggcaagtaatcaaacgcacgttaaaacgtgggcgtgtggaagtctatgtaaatctccaaaaaatcggcaacaatcaaaaagaagtgcgcgtgcagtgggacttaattgatcaattattaacttcggtagatcaacatttaaaggaaaaatatccggaagcaacgtttgatgcaggggacacggtcaaccatttattaaagcaaaatgattttgtcgaaatagtggaagcagaaattgttgatcagacatttgaaccatttcttgttcaagcatttgaagcagccatcgctagtcttgaccaaagccgtgtgcaagaaggaacgcaaattaaacaagtcctgcttgactatgtagcagtgttgacccaatcaattcaagaactgcaagcgtttgtgggcgtttttgaacaagaataccgtcaacgttttgaagcgaaattaaacgaatggttaggtagccaagtggatgaaacacgcttattaacagaaatggccattttattggaaaaaggcgatattcatgaagaattggatcgtttggatatccatattgataagttgcatcagttgcttgacgaaacagaaccagtgggccgagaactagatttcttaattcaagaaatgaaccgtgaagtcaatacgattggttcgaaatcaagtccaattgaaataaaaaatagtgtcgttcaaatgaaaacaaccttagaaaagattcgtgaacaaattcaaaatgtcgaa

SEQ ID NO: 20984 - DNA, 1377 bp, Enterococcus faecalis
atggctgaaaaaatccccaagaaattaaaacgttctgttcgatacgttgctttagaaaccatcgaacgtgtggataaaggtggggcgtactccaatcttttacttaatgaaatgatgacaaaatcagaactaagcgagaaagatggccgcttgtttacagaacttgtctacggcacaattagtcgcaaattattgttggaatactacttaacaccatttgttaagaaaccgcaaaaagtcgataattgggtgaaaaatttattgattttatcgttatatcaattactttatttagataaagtgcctgatcacgcagtcattaatgaagcggttgaaattggcaaacgtcgtggcaatcctgggattggtaaattcgtgaatggcgtgctgcgggcgttccaacgaaatggagcacctagtttggccgcaattagcgatccagttgatcgtttagcaacggaaattagtatgccacgttggttaacagaaaaattacttgcccaattaggcgaagaagaaacacggcagttgggtttgtcattatttgaaaaaagccatgcgagtggccgcgtaaacacacggtttatttcacgagaagaagcgctggaagaattacaagaaacagggattgccgcgaaggaaagtcaactttccccttatggtgttgtcgctgaaaaaggctacttagctggcagtgaactgtttattaacggttgtttaaccattcaagatgaaagctctatgctcgtggctccatcgatgcaaattgaaccgcatcatcgtgttttggatgcctgcgcggctcctggtggtaaaacgactcatatcgcaacttttttagaggctgaagcaggtggtcgtgtgacttctttagatattcatgcgcacaaaattaagctaattaatgaaaatgcgcaacgcctccatgtggcggatgtcgtccaagcagaaaagcttgatgcgcgacaagtggccgaagaattccccgcagaaacctttgatcggattttagttgatgcaccatgttcaggcttagggctaatgcgccgtaaaccagacattaaataccataaaacggccaatgattttcaaaatttacctaaaattcagttagaaatcttagaaagtgttgccccaacactaaaacaatggggtataatggtctatagcacttgtactattacgccagaagaaaatcaggaagtggtggcagcctttttagccaaacaccctgaatttgaaaaaattgaaattgttgcaaatgaaaatgtccaagcagtagtaaaagagcaagaactggttctgtatccccatcaatacatgacagatggcttctttatttgctgtatgcggaaagttagttcaaatgaggtgaaa

SEQ ID NO: 20985 - DNA, 2154 bp, Enterococcus faecalis
atgatagaaatcggcaagaagctgaatggtcgatatcacattattggcagcatcggaagcggcggcatggccaacgtctatttagcacacgatttaattttagaccgagacgttgcagtaaaagtcttgcgctttgacttccaaaacgatcaagccgccatccgacgttttcagcgtgaagcactagccgcaactgagctggttcacccgaatatcgtcagtgtgtacgatgtaggcgaagaagatggactacaatatttagtcatggaatatgtgaaaggaatggacttaaaacgttacatccaaacgcatttcccaattccttattccacagttgtagacattacgcaacaaattttatctgctgtcgcaatggcacatgaacatagaattattcaccgagatttaaaaccgcaaaacattctgattgacgaacacggcacagtcaaaattactgactttgggattgcgattgccttgtcagaaacgtcaattacgcaaacgaacacaatgttaggttcggtgcattacttatcgccagaacaagcgcgcggaagcatggcgaccaaccaatcagatatttacgctgtgggaattattctctatgaaatgctaacagggaatgtaccttttgatggtgaatcagccgtaacgattgccttaaaacattttcaagaagaaattccctctgtcaaaatgtttgatccagggattcctcaatcattggaaaatgtggttcgtcatgcaaccgcaaaagacccaagcgatcgctacaaaacagcgaatgagatggcagaagacttatacacgtccttgtcagccagtcgtttaaacgaacctgcgtgggaaccaacggctttattaggagaaacgaaagtattaactccgattcccgaagacatcgctgaaccggaagagacaacgcctgtcgaagtcccagaagatatcgcagatgacattttagctgaacaaccgccgaagaaaaaccgtaaaaaattgtggattggcttagcaattgcggcattaatttctttagcaataggtggcttagcctttgcaatgtcgggcggtaaagacgttgaagttcctgatgttacaaatgaaacgaaagcggacgcttcacaagcgctaaaaagtgccgggctgaaagtcgatagtgaaaccaaaaaaattcccgacgataagattgaagaaggcaaggtggtcaaaacagaccccgaagcaaaatcatctgtgaaaaaaggccgatctgttactttatacatcagctctggaacagaaaaaattgagatggccgattatacaaaggaatcgtatgaatctgctgtcgaagccttgaaaaaactagggttttcagaagaccaaattacaacgaaaaaagaatacagtgattctgtgtctacggatagcattattaaacaaaaaccagctgcaggtaaaaaagttgatccgaaaaaagacaacgtcactttaacggtcagtcaaggaccagaaacggttactttgcctagttacgccggttattcttacgaaaatgcagtaaatgcactggcacaattaggcatttctgactctcaaattacgcgtgtcgaccaagcaagcgatacggtagaaccaggtttagtcattacgcaagaccccgcaccaggtggcaccgtgacacctaaaaatggccaagtgacgttatatgtaagtaaaggtagcgacaaagtgacactttctgattatagcggaatttcttacgataatgcggtaagtcgcttaattgctttaggtatcccagaatctcaaattaaacgagtggacgaagaaagcgacaaagttgaaaaagataccgtgattagtcaagaaccagcttctggtaccgctgttgatccgaaaaatgacacgattactttacatgtcagcaaaggcagtgactcagtaactgttcctgatatttcaggttattcgccaaaagctgcagaagacagcatcaataacgctggccttaaaatcaatgaacaaggattatctggctctggcgatggccaagtcgttgaacgaactagcccatccgctggcagcaaagtcaaaaaaggcgactctgttacagtttattattcaaaagcaaatgattcaaaaagcaccactagtgaaagtagtacgagtaat

SEQ ID NO: 20986 - DNA, 1071 bp, Enterococcus faecalis
atgaaaaaattacagtcactttttattggaattatcgctattattgtcatcttgttttttggcgtgcgccaattggagaaagcaagtggcatggcaggagcagataccttgaccatttacaattggggggactatatagatccggccttgattaagaaatttgaaaaagaaacaggctataaagtcaattacgaaacctttgattctaatgaagctatgtatacaaaaattcagcaaggtggcacagcctatgatattgccattccttctgaatatatgattcaaaaaatgatgaaagcgaagatgcttttaccacttgatcacagcaaattaaaaggcttagaaaacattgatgcacgctttttagatcaatcctttgatcccaaaaataagttttccgttccgtacttctggggcacgttggggattatttataatgataaatttattgacggccgtcagatccaacattgggatgatttatggcgcccggaattaaaaaataatgtcatgctgattgatggcgctcgcgaagtgttaggattatctttgaacagtttaggctattcgttaaacagtaaaaacgaccaacaattacgtcaggctaccgataagttaaaccgattaacgaacaatgtcaaagcaattgttgccgatgaaatcaaaatgtacatggctaatgaagaaagtgcagttgctgtaactttctctggtgaagctgctgaaatgctagaaaacaatgaacatctacattatgtgattcccagtgaaggctctaatctctggtttgataacattgtgatgcctaagacagccaaaaataaagagggtgcctatgcatttatgaactttatgttacgaccagaaaatgcggcacaaaatgcagaatatattggttattccacaccaaataaagaagctaaaaaactattaccaaaagaagttgccgaagataaacaattttatccagatgatgaaactatcaaacatttagaagtttaccaagacttaggtcaagaatacttaggaatttataacgatctgttcttggagtttaagatgtatcggaaa

SEQ ID NO: 20987 - DNA, 1011 bp, Enterococcus faecalis
atgttaaaattagacaaaatccaagcaaataaaattgttgaaaagttgatggcagatattccttataacatcaatattatggatgaacgaggaaaaattattgcgagtggagattctgctcgaattggggagcgccatcgtggtgcagaaagagccatcaatgaacgaaaaaatattgaaatttataaagatacttctttagagaaaaaaggcaccaatgaaccgattattttgaataatcacattttaggtgtcgtaggcatttcaggagaaccagacgaggtgcgcaaatttaccaagcttgtgcgctcgattgttcttttactgacagaagaattaaatacacaacaagaacgcgaaaaaaagaagaaacaaaaaaatcagtttatccagcacttaatgcatgttgattcttcttactcagaagccttaaaacttgaagcgttggaactatataaccttcaattagatgaccagaatcattgtgtactgaccaaggacaagcgcttattatccagttattatcctggacatgaaatatttgaatgggaaaattgttatctggtgattacttctgaaccacctcagataacaaagccagtaacagaataccttgtgataagttcggaaaaagccacgattcaacaaatggtccaagaggcacaaaacacgtatttacttctatcgtttctccaattagaaaaggctaagttttaccaagcagaagattttttcattcaaggaatttttaattttccttttcatattgaattggatttttttgaaaccatccagacgatttatgatgaatactatgaaaccgttatttttttcgccaatcataacttaaacatcaatgaaacctcacaagtattacatatccatcgaaatacattgaattaccgtttgaaacgaattcatgaattgacggggatggatccaaaagtttggcaagatttttggaaattgttctattattttgcctattgctttaaagaacgttttgaaaag

SEQ ID NO: 20988 - DNA, 186 bp, Enterococcus faecalis
atggcaaaagtatgttacttcactggtcgtaagacttcaagtggtaataaccgttcacatgcgatgaactcaacaaaacgcactgtgaaacctaacttacaaaaagttcgcgtattaatcgatggtaaacctaaaaaagtttgggtgtcaactcgtgctttgaaatctggtaaaatcgaacgtgtt

SEQ ID NO: 20989 - DNA, 1928 bp, Enterococcus faecalis
aatgaacaattactagaggtttcaggattagaaacagcatttagaatcaaagatgattattataatgccgtcgatgatgtttcatttgaattgaagaaaaatgagattctggcaatcgtcggagaatctggttgtggaaaaagtaccttagcaacaacgattatgggcttacatgatcccaatcataccaaaattactggggaaattttatacaacaatttaaacttaactacgtttaatgaaacattgtacaacaaagtcagaggaaacgatattgggatgattttccaagatccgttatctgcactgaatccgctcatgcgaattgaagaccaaattaaagaaagtctcacgtatcataccaaaatgaccgcacaacaaaaacaagcacgggccattgaactgttagatcaagtggggattcccaacccagagcgtgtcgggaaacagtatcctcatgaattgtctggcggcatgcgccaacgggtgattattgccattgcaatcgcgtgtaaaccaccgattttaattgcagatgaaccaacaacggccttagacgttaccattcaggcacaaattctcgatttgttaaaagatttacaagaagaaacagggagcggcattattttaattacccatgacttaggtgtagttgcggaaatggctgatcgtgtagcggttatgtatgcgggtcagtttgtagaagtagccactgctgaagaattgtttagtcatccgaaacatccatatacacgttccttacttcagtccattccccaagagaattcagatgaagaagaacttcatgtgattgaagggattgttccttcgttaaccaaattacctagaaaaggttgtcggtttgccccacgaattccttggattgatgcatcggaacatgaagaaaatccaacattacatgaagttgcaccgaatcattatgttcgttgtacatgttataaacattttcattttagagacggggaaggggaagcgtaatgacagaaattattcaaattaaagatttaaaagttcattatccaattcgcagcggcttcttcaatcgaatcactgatcatgttttggcggttgatggtgtggatttcatgattgaacaaggtaaaacgtatgggttagttggtgaatcgggttctggaaaatcaacgacaggaaaagcaattattggtttagaaaaaattacaaatggtgaaattatttatcaaggacaagatgtaaccaagccgcgaagtcgaaaagcgattggatacaacaaagatgtccaaatgattttccaagattcgatgtcaagtttaaaccctaaaaaacgagtactagatattatcgccgaaccaattcgaaattttgaacggttaagtgaccaagaagaaaagaaaaaagtcaaaagtttgttggatattgtggggatgccagaagatgcgttgtacaaatatcctcatgaattttctggtggacaacgccaacgtttaggcgtcgcccgagcggtggctaccagccccaaattaattattgcagatgaacctgtttcagcactggacttatctgtgcaagcacaggtattgaattttatgaaaaacattcaacaggaatatgggttaagttacttatttatttcccatgatttgggcgtagttaaacatatgtgtgacaacattgccattatgtacaaaggccgttttgttgaaatcggtacacgccaagatatttacactaatccacaacacatttataccaaacgcttactttcagcaattcctaaaattgacgtagcgaaccgagaagctcacaaagaagaacgaagaagagttgagcaagagtatcgggaaaatcataaagactattatgatgaaaatgggcgggtttataacttacatgcgattagtccaacccaccaagtagcgttaaaaaat

SEQ ID NO: 20990 - DNA, 1944 bp, Enterococcus faecalis
atgattttattacaagcaaatcaagttgcccggcattttggctcggaaacattgtttgaaaacatacatttagaaattgcaacaaaaagtcggattgccttagttggtcgtaatggtgctggaaaatcgacttttttaaaaatcattgcaggcattgatgctcccgatagcggaaccattgccaaaaataaaactgctacgttaggttatttagctcaaaataccggcttagaatcagataaaaccgtttgggaagaaatgacaaaagcctttgctgacatcctagaaatggaacagcgtatgcgagaattagaaactaaaattagtgaaatggagccaaccacttccgtttatgaaggaattttaaaagagtacgatcaattgcaacatacgttttctgaaaaaaatggctacggctatgaaaatgaaattcgctcagtccttcacggctttggctttgatgaatccttttacacgaaagatattcaaaccttatctggtggtcaaaaaacccggcttgcattagcgagaatgcttttacaaaaaccagacattttaattctggacgagcctacaaaccacttagatatcgagacgctttcttggctggaatcttatttgccaagttatgccggcgccctattaattgtttcccacgatcgttattttttagataaggtagttaatgaagtttatgaactgagtcgcaaaaaaatgactcactacaaaggaaactattccaaatacttagagttaaaagcagaacaattagccagtgaatggaaagcgtatgaaaagcaacaagaagaaatcaataagttagaagatttcgttgccaaaaatctggttcgtgcatctacaacgaaacgtgcacaaagtcgccgaaaagtattagaaaaaatggaccgtttagaccgacctcaaggagatgaaaaatcggcgcattttcttttcgatagtgaaaaagtctcgggaaatgttgttttacaagtcgaagatgccgccattggttacgaccaagaacatattttatccgaacctattcacttggatattcgtcgcaaagaagccattgccttagtcggaccgaacggaattggtaaatccactctcttgaaatcaattattgaccgcattcctttcattaaaggaagtaaaacttttggcaccaatgtttctgtaggttactatgaccaagagcaagccaatttacatggcaataaaacggtcttagcggaattatgggatgaacacccaaccacacctgaaaaagagattcgaagtattttaggcggctttctcttcagtggagacgatgttgaaaaaacgattcctttattaagcggtggcgaaaaagcccgtgtggcattagcaaaactagcgatggatcgtgacaatttcttgattctcgatgagccaaccaatcacttggatatcgataataaagaagttttagaaaatgcgctgattgattatgaaggaaccatcctcttcgtttcccatgaccgttactttatcaatcgaattgcaacaaaagttgttgagctttctgaaaaaggcagcaaactttatttaggcgactatgattattatttagaaaagaaacaagaggaagaagaaatcgctgccctcttagctaatgaagaagcggcgaaaaaacccgaaccagttacagccaaaaataccttttatcaaaacaaggagcaacaaaaattactccgtactttgcaaagaaaaataacacaagtcgaagaaaatcttgctcagttagatacgacaattgcacaattagaagcacaaatgagtcaaccagacattctagaaaatcatgttgaattgctggctttaaaccaacaattagatgaagttcgtcagcaacaagatgaactacttgagcaatgggaaaatttcagtttagaattagaagaaatggaaaataacaat

SEQ ID NO: 20991 - DNA, 1623 bp, Enterococcus faecalis
atggcaaaagagattaaatttgcagaagatgcacgtgcagcaatgctacgcggagtagatgtattagcagatacagtgaaagtgacattaggccctaaaggtcgtaacgttgttttagaaaaatcatttggttcaccattgattactaacgatggagtaacaattgctaaggaaattgaattggaagatcattttgaaaacatgggcgcaaaattagtttcagaagttgcttctaaaacgaatgatattgctggtgacggaacaacaacagcgactgttttgacacaagccattgttcgtgaaggcttaaaaaacgtaactgctggagccaacccattaggtattcgtcgtgggattgaattagcaacaaaaacagcagtagaagaattacacaatatttcatctgtagttgattcaaaagaagcgattgcacaagtcgctgctgtttcatcaggttctgaaaaagtcggccaattaattgccgatgcaatggaaaaagttggtaacgacggcgtaattaccattgaagaatcaaaagggattgaaacagaattagatgtggttgaaggaatgcaattcgaccgcggttatttatctcaatacatggttactgacaacgataaaatggaagctgttttagaaaatccatatatcttaattaccgacaaaaaaatctcaaatattcaagatatcttacctttattagaacaaattctacaacaaagccgtccactattgattattgcggatgatgttgatggggaagctctaccaacattagtattgaacaaaatccgtggtacatttaatgttgtcgcagtaaaagcgccaggatttggtgaccgccgcaaagcgatgcttgaagatattgctattttaacaggtggtacagtaatcactgacgacttagggttagagttaaaagacacaactattgaaaacttaggaaatgctagcaaagtagttgtcgacaaagataacacaacaattgtcgaaggtgctggttcaaaagaagccattgatgcccgcgttcatttaattaaaaaccaaatcggcgaaacaacgtctgattttgatcgtgaaaaattacaagaacgtttagctaaattagctggtggggttgctgtcgttaaagtcggtgctgcaactgaaacagaattaaaagaattaaaattacgaattgaagatgcattaaacgcaacacgtgccgctgtagaagaaggcatggtttctggtggtggtaccgcactggtcaatgtaattggtaaagtcgctgcgctagaagctgaaggcgatgtggcaacagggatcaagattgtcgttcgtgcattagaagaaccaatccgtcaaatcgctgaaaatgctggttatgaaggatcagtgattgttgacaaactaaaaaatgttgacttaggtatcggattcaatgcagctaacggtgaatgggtaaacatggttgaagccggtattgttgacccaacaaaagtaactcgttctgccttacaaaatgcagcttctgtgtcagctttattattaacaactgaagcagttgttgcagacaaaccagaaccagctgcaccagctcctatgatggatccatcaatgggcatgggcggtatgatg

SEQ ID NO: 20992 - DNA, 1482 bp, Enterococcus faecalis
atggactatacatatgcagatgatagtttgacattgcatacagatatgtatcaaatcaatatgatgcaaacatactgggaattagggagagcagatttacatgctgtttttgaatgttactttagagagatgccctttaatcatggctacgcaatttttgcaggtttagaacgtttagtcaattatctcgaaaatttaacgttcacagaatctgatattgcatatctccgagaagttgaagaatatccagaagatttcttgacgtatttagcaaattttgaatttaaatgtactgtacgctctgctttagaaggggatttggtttttaataacgaaccgttaattcaaattgaaggtcctttggcacaatgtcaattggtagaaactgccttgctaaatatggtgaatttccaaacattaattgcgacaaaagcggctcgaattaaatccgtgataggcgatgatcctttattggaatttggaacacgccgggcacaagaattagatgctgccatttggggcacaagagccgcctatattggtggggcggacgcgacaagtaatgttcgtgctggtaaaatttttggtattccggttagtgggactcacgcccattcattggttcagtcgtatggaaatgattatgaagcattcatggcgtatgccaaaacacatcgggattgtgttttccttgttgatacgtatgatactttgaaagcgggagtgccaagcgcaattcgagtagctcgagaaatgggggataaaattaatttcctaggtgtgcggattgatagtggcgatatggcttatatttctaaacgagttcgtgaacaactggacgaagcaggctttactgaagcaaaaatttatgcatcgaatgatttagatgaaaatacgattttgaatctaaaaatgcaaaaatcaaaaattgatgtatggggcgtgggtaccaagctgattaccgcctatgatcaaccggctttaggagcggtgtttaaattagtttcaattgaaggtgaagatggtcaaatgaaagataccattaaactatctagcaatgctgaaaaagtgacaacaccaggaaaaaaacaagtctggcgcattacacgtaaatctgataaaaagtcagaaggggactatgtgacactttggaacgaagatcctcgccaagaagaagaaatttatatgttccatcccgttcatacctttattaataagtatgtccgtgattttgaagcacggccagtactccaagatattttcgttgaaggaaaacgtgtgtacgaattaccaactttagatgaaattaaacaatatgcaaaagaaaatttagattcactttgggaagaatacaagcgggacttgaatccgcagaaatatccagtggacctttcaacagattgttggaaccacaaaatgaatttattggaaaaagtgcgtaaagacgttaaacatttaacggaaacggtgaataaggaggcc

SEQ ID NO: 20993 - DNA, 825 bp, Enterococcus faecalis
atgacaacacttcaagaaaaaatcattcaagagttaggtgtgttaccgacaattgatccaaaagaagaagttcgtaaaagtattgattttctgaaagcttatttaactaaacatccttttttaaaaacctttgtcttgggaattagtggcggacaagattcaacattagctgggcgcttagcacaattagcgatgactgaaatgcgcgaagaaacaggagatatgtcgtatcaatttattgcgattcgccttccttacggtgagcaagcagatgaagctgatgcacaagccgcgctagcctttatccagccagatgtttctttacgagtggatattaaaccagcagtggatgcaatggttggttcgctagaaaacgctggcgttcaaattagcgattttaataaagggaacatgaaagcacgtcaacgtatgattacacaatatgcagtagctggcgaaaatgctggcgcagtaattggcacagaccacgcagccgaaaatgtgacagctttcttcaccaaatatggcgatggcggagcggatattttaccgttatttcgtttaaataagcgccaaggaaaagctttgctgaaagaacttggggcaccagaagccttgtatctaaaaataccaacagctgatctagaagatgacaaaccgttagttgcagatgaagttgccttaggtgtcacgtatgatgccattgatgactatttggaaggcaaaaaagtctcggaaacagatcaacaaacaattgaaaactggtataaaaaaggacaacacaaacggcatttacccattacaatttttgatgatttttggaaa

SEQ ID NO: 20994 - DNA, 3576 bp, Enterococcus faecalis
gtgtatttaaaacgaattgaaattacaggatttaaatcatttgcagataaaaccattattgaatttgaagatgatgtgacagcagtggttggtccgaatggaagtgggaaaagtaatatcacggaagccgttcgctgggtattaggtgaacaatctgcgaaaaaccttcgcggtggcaaaatgaacgacattatctttgccggttcggaaggtcgtaagccgctaaatattgcggaagttaccgtgacgttagacaacagcgaccattatttagcattggattatagtgagattagtgtcacccgtcgtttaaaacgaacgggcgaaagtgacttttttattaataaacaagcgtgccgtttaaaagacattcaagatttatttatggattcagggttaggcaaagaatctttttcaattatttcacaagggaaagttgaagcgatttttaatagtaaacctgaagaccgtcgagggatttttgaagaagcagcgggcgttttaaaatacaaacaacgaaagaaaaaggctgaacaaaagctttttgaaaccgaggacaacttaagccgtgtccaagatatcatttacgagttggaagaccaattagttcctctagccgcccaagcagatgcggctaaaaagtatttagctttgaaagaagaacttaccgaaattgatgtcaatttaactgtgaccgaaattcaagaagcaaaagctatttgggaaacgaaaacgcaagaattaacagccattgaagaaaagttagctggcgcaagtaagcaagtccatgacttagaaggcaaattggtacgtttacgcagcaagcgcaatcgtttagatgaacaaattgaaacggaacaacaacaattattacaagtgacagaagcgttgaaacaagcagaaggacaaaaaaatgttttaattgaacgttccaaacacacctcccaaacggcaagcgaatacgaagagacattggcagaaacggccgaaaaaattgttcgttatcgagaagaattgcagacgctggaaacagcaatcgcagaaaaaacggcacaacgtcagacgttaaaagaagcattggctttggcaacgaaagatgtggaaaaatatagtaagtcttctaaagaattaatggaagaattgcgcagtcagtatgtggaagtcatgcaagaacaagccaatacagccaatgacttaaaatatttagaacgacaatatcaacaagaaacagctaaaaatcaacaatcgttagcaaaacacgaagcgctagaagaacagatggttgaagctctcgcaatgaaagagacgctagaaaaagagcaaaaagttgcaaaacaaggcttacaagaacagttggaagaatacactgcgttgaaagcaacgcttgaagctaagcgtgaacgattagcacagcgtcaaaacgatatgtaccaagcgatgaatcaagtgcaacaagcgaaggcacgccaaaaaagtttgcaagaaattcaagaaaattacgctggcttctatcaaggcgtgaaagctgtattgcgtcacaaaaaccaattaactgggattgttggcgcagtggctgagttaattgaagtgcctaaagaatatacgttggcgattgaaacggccctaggtggtgcggcgcaacatattgttgtggaaaatgagaaagatggtcgagcaggcatcaccttcttaaaacaacaacacagtggccgagcaacctttttaccattgactaccattaagccacgctctgtatcggcgatggttcagaatcgtttggctggtgcaccgggcttcgtggggattgccagtgaactagttcgttatccagaacaagtacaaaccgttattcaaaatctcttaggcgtcacgattttagcggcagatttaacgagtgccaaccagttagcaaaattagtcaattaccaatatcgcgttgtctcattggaaggcgatgtgatgaatcctggcggttcgatgactgggggagccaataaacgtggcaaccaaggaagcctattttcacaagcgcaagaacttcaaacaattactgaacaaatgactcaattagaaacacaactgagaagtgtagaacaagaagtccaagcgctctcgcaagaagtgaaaacagccacggaacgtgcagaaatgttgcgctctgctggtgaacaaaatcgcttaaaacaacaagaaattgacaataaattagccaatcaaacagaaacgattactcgtttaacaaaagaaaaacgcttgtttgaatatgaatcacgggaattgcatcaattcttaaccgaatatcaaacgaaaaaagccacattgacagagcaacaagcaaacttaacggcaacgaaagaacgtttagatgctgaaatgaaacaagtggaacaagaagctagccaaatggaaacctttaaagcccaagcgcaagaacgcttgacgacagttcaagcagaacaagcagtagcggcggaacaatgtgcccattttgctcgtcaaaagcaagacaaacaagaacaattggacgaattgttgattcgagaaacggccatccgtcaacagctacaacaattaagtagccattctagcgatcaccagttaaccgaagaaggcttagcggcacaagtcgctcaattagcggagaaacaaacagcgttgcaaacctctttacaaacggcacgtagtcaacgacaagcgttgcaagaagaagtagacgagttagatacaaaattagcggaagaaaacaaacgccaacaacagtatttagcagataaaacacaaatcgaagtcctaaaaaatcgtgcagaaatgcaattagatagctcgttaagttacttacaggaagaatacagcttaacctttgaagctgcctatgaagcgtatttcccaatcgatgatttagcgcaagcgcagcaaacagtgaaacgcctaaaacaagaaattgagcggttaggacctgttaacttaagtgccatcgagcaatttgaacaagtcgatgagcgccatcaatttttagtcagtcaacgagatgatttattaaatgcgaaagaacaattatttgaaaccatggatgaaatggaccaagaagtgaaagaacggtttaaagaagtctttgaagcaattcgtggccagtttaaagtggtatttcctaatatgtttggtggcggacgggcagaactggtgctaaccaacccagaggatctcttgaatacagggattgagattgaggcgcaaccaccagggaaaaaattacaacatttaagcttgttgtctggaggcgaacgggcattaacggcgattgcgttactcttttcaattattcgtgttcgaccagttccgttctgtattttagatgaagtagaagcagctttagatgaagccaacgttgctcgttttggccattatttaagcgaatttgaagatggtacacagtttattgtggtgacgcatcgtaaagggacaatggaagccgcagatgttttatatggcgtgactatgcaagaatctggggtttcaaaaatcgtttcagttcgcttggaagaggtcaaagaaggtggcgcaattgaaaaaagcaat

SEQ ID NO: 20995 - DNA, 462 bp, Enterococcus faecalis
atgccaaaaggggaaggaaaattaatcgcacaaaaccgcaaagctagacatgattattcaattatcgatacggttgaagctgggcttgttttacaaggaacagaaatcaaatctattcgaaatggtcgtatcaatttaaaagatggttttgcacgaattcgaaacggagaagcctttttgtataatgttcatattagtccatatgaacaaggcaatatttttaatcatgacccattacgtaccagaaaattattattacacaaaaaacaaattaataagttaatcggcgaaaccaaaaatacaggtatcacattagtacctttgaaggtctatattaaagacggctatgccaaagttttgattggtttagctaaagggaaaaagcagtacgacaagcgtgaagacttgaaacgtaaggaagttgaccgacaaatcagccgaacattaaaaaataaccgacgt

SEQ ID NO: 20996 - DNA, 1554 bp, Enterococcus faecalis
atggctatcaaagcagaagaaatcagtgccttgattaaagaacaaatcgaaaactatcaacaacagcttgctgttgaagaagttggaacagtcacttacgtcggtgacggaattgcccgcgcccacggtttagaaaatgccatgagtggagaacttgttgagttttcaaacggttcatacggaatggcacaaaacttagaaacaaatgatgtagggattattatccttggcgattttgaaaccattcgtgaaggagataaagtacaacgcacaggcaaaatcatggaagtacccgttggggaagctttgattggccgtgttgttaatccattaggtcaaccattagatggtttaggcgaaattaaaacagacaaaacacgtcctgtggaagcaacagctcccggtgttatgcaacgtcaatctgttgctgaaccaatgcaaactggcttaaaagccattgatgccctcgtaccaattggtcgtggacaacgggaattagttattggagaccgtaaaacagggaaaacatcgattgcaattgatacaattattaaccaaaaaggacaagatgtaatttgtatttatgtagcgattggtcaaaaagaatctactgttcgtaaccaagtagaaacacttcgtaaatttggtgccttagattatacaatcgttgtgactgcaggggcttcacaaccagcaccattactttacattgcaccatatgcaggaactgcaatgggtgaagaattcatgtataacggcaaacatgtcttaattatttttgatgacttatcaaaacaagccgtggcttatcgtgaactttctctactattacgccgtccaccaggtcgtgaagcttatccaggggatgtcttctatttacactcacgtttattagaacgtgcagctaaattaagtgatgaattaggtggcggttcaatgacagccttaccattcgttgaaacacaagcaggcgatatttctgcttatattccaacaaacgttatttcaatcactgatggacaaattttcttagaaagcgacttgttctatgcaggcactcgtccagccgttgatgctgggttatctgtttctcgggtcggaggatcagcgcaaatcaaagcaatgaaaaaagttgccggaacgcttcgtttagacttagctagttaccgtgagttagaagcctttacacaatttggctctgatttagatgcggcaacacaagctaaattaaaccgtggtcgtcgtacggtagaaattttaaaacaaaaactacatgcgccactgcctgtagaaaaacaagtcttaattttatatgcgttaacacacggctttttagatagcgtgagcgtagataaaattttacactttgaacaagatttattcgattattttgatggcaaacatgcagacttattggaaaccattcgtacaacgaaagacttaccagatactgatgcattagatgcagcgattacagagttttctgaaatgtttgcagcggcaaacaatagcggagattcagccaaagaagctttagaaaaaatcgataacgca

SEQ ID NO: 20997 - DNA, 969 bp, Enterococcus faecalis
atgcaagaaccattatttttacaacctgtttttcaagaaaaaatttggggcggcaatcgtctacacacgctatttggtttcgatttaccgagcgataaaattggtgaagattgggcaatcagtgcacatccacatggcgttagtactgttttaaatggcgaatttaaaggaaaaaaattagatgaattgtgggcagaccatcaagagttattcggccatgcaggtggcgctgtctttccattattaacgaaaattttagatgctgaagatgatttatccgtgcaagttcatcctgatgatgcatatggccaaaaacatgaaggcgagctaggcaaaactgaatgttggtacattattgatgcagaacctggcgctgaaatcatttatggacatcacgcgaaaacaaaagaagaacttgcagaaatgattgaagaaggtcgttgggacaatcttttaagaaaagtaccagtgaaaaaaggcgatttttattatgtaccaagcggcactattcatgccatcggctcgggtattttaattttagaaacgcaacaaagcagtgatactacgtatcgggtttatgattatgatcgaacagatgatcaaggaaagacccgggaattgcatattcaacaatccattgatgtgacaaccgttccggcgaaggatcctgacctctctattcaacaagaaaatcaaggacaatcaagcattgttacttatgtaaaaacagatttctttaatgtctatgagtggcgtgtcagtgggattctaaaagtcaaaaaacaagcaccttatacattagcaacagttattgaaggtgtgggtcgattgattacagaagatgctgcaaaagcagatgtggctacttttgatttgaaaaaaggcgatagctttatctttccgacagatattccgagctggcgttttgaaggtgatctaacgattatagcttcagaacctggcagtcgc

SEQ ID NO: 20998 - DNA, 972 bp, Enterococcus faecalis
atgcaaaaagtaattattgattgtgatcctggaattgatgacacgcttgctctcttgtatgcacttgcttcaccagagctagatgtccaagcgattaccgttgtttgtggaaatgtccctgtggagattggcgtggaaaatgtttttaaatgtttggaaaaagttaatcgcttagatattcctgtctaccaaggggctgctagccctttaaaacggccatttgttagtgcacaagatacacatggcatggatggtttaggtgaaacatatttccccagaactagcaaaatccaagcacaagcgctttccgctgctgactatttagcacaaacctttcaacaagctaccgattgctcaatcattgcccttggtcctttaacaaatattgctttgggtttaaaaaaagaacctcttctggggcgaaatcttcaacgttttgtctcaatgggtggtacctttaaaagccacggcaattgctctcctgttgcagaatttaattattggtgtgatcctgatgcagcagcttgggtttttgagaaattaggtgcaaaaatcgagatggtcggcttagatgtcacacgagaaattgtttttacaccaacaattctcaattattgtcaacgactcaaccccaaaatggggaattacctcgctgagattactcaattttattttgattttcattggaaatatgaacgtattttagggtgtgttatcaacgatcccttagcggttgcttattttattgatcctacgctctgccaaggcttttccagttacggacaaattgttcctgacggcattgctatggggcaatcaatgatcgatcaatatcatttccagcagcaaccagctaattgtcatgtcttgactacggttgatagtcaacagtttttcgtgaagtttctatccattcttttaaatgtacaaatagatgagatcgaaagagatttcaaaaatttaaggatggga

SEQ ID NO: 20999 - DNA, 690 bp, Enterococcus faecalis
atggtgtctaaagaattagtcgtttgtcatttatatggcaacttattaaatacttacggagataacggaaatttattgatgcttaaatatttaaccgaaaaaatgggcgttaccttccgatcagaaattattagtatctacgaaccgtttgatcccgaaaaatatgatttagtctttgttggtggcggtcaagacttcgagcaactgatcatctcagaagacattcagaataaaaaagaagctttgacttcttatattgaaaatgacggcgtcttgttagctatctgtggtggttatcaacttctaggacattactatgtcggcgcacaaggcgaaaaaattaaaggaatcggtgcattagatcattacactttgagccaagacaacaatcgtttcattggtgatattgaaatttataatgaagaatttgatgaaacgtattatggttttgagaatcataacggcatgacttttttaggcgaaggggaacgacctttaggaacagtcaaacaaggcaaaggcaataacggtcaagataatggcgaaggcgttgtctataaaaatgtgtttggctcctacttccacggtccaatcttagcacgcaacaaaaatctagggattcggttaattcggaccgctttagagaaaaaatatggtgaaccgatcgctattcctgaaacgctttataaa

SEQ ID NO: 21000 - DNA, 1350 bp, Enterococcus faecalis
atggggattcgaagtcatttagcaattgctgcaggaaaaacttcgcaatgggttttacaaacattttttaaaggcggcagtagctacccagggaaattagccctaaaaatcgatcctaaaattttagatacattggcaaaagactatgaaattgtcgtagtcactggaacgaacggcaaaacattgacaactgctttaactgttaacattttacgccaagaatttgatgaggtattaacaaatccaactggtgctaacatggagcaaggaattgtctctacttttttaaatgccaaggcgaaaaaaggacaaaagaaatttgcggtgttagaaattgatgaagcaagtttaagccgtgtcactaaatatattcaaccaaaattatttgtttttacgaatattttccgcgaccaaatggatcgctatggtgaaatttatacgacgtatcgcttaattatggaaggcgccgctgctgctcctgaagcaactattttatgcaatggtgattcgccaatttttaattcaaaagaaactgtaaatcctcgcaaatactatggatttaatcatttaccaccgaaagagcaattggctcattacaatacagatggggttttatgtccaaaatgtaatcatattcttcattataaaatgattacgtatgctaatttaggtgattactattgcccaaattgtggcttcaaacgccctgaattggatgtgcagttaacggaaatggtccggatggataatacatctgctgattttgtgattgatggcgaagaatacggcattgctgttggtgggatgtataatgtttataatgcgctagcggccacagcggtagcagaatattatcaggtggcaccagataaaatccgagcaggcttagcttatgatgaaaaagtttttgggcgtcaagaaaccattaaagttggcgataaagaatgtacgttagttttagtaaaaaatcccgttggtttaaatcaggtcattgatatgatgggcttagccccttactctttctcgctggtttcattattaaatgctaattatgcagatggaattgatgtcagttggatttgggatggtaatcatgaagcctttgctgatatggacattccaaaagtaattgctggcggtgatcgccatgaagatatggccttgcgtttaaaagttgcgggtattcctgaagaaaaattactagaaattgctgatttagagcaagtaatttcagaaattaaaacgttgccgacagatcatgtctatattttggcaacctatactgctgttttgcaattaagaaaatcattaacagcccaagggtatattcaagggggaatgaatggtgtc

SEQ ID NO: 21001 - DNA, 1332 bp, Enterococcus faecalis
atgttattaattggaaatgggcgtttaatcactcgggatgcgcagaatcatttttttgaaaatgggtgtgtggcgattgatggtcaagttgtgaaacaagtcggaacaacagaagaattaaaacaagcttatccagaagcgacatttattgatgctaaaggtggagtgattatgccaggctttattaacatgcacaatcatatttatagtacctttgcacgtgggttaagtttaacgaattatcatcctaaaaatttcatggatattttggtagatcaatggtggcgaattgatcgtgccttgacattagaagacacttatcaaagtggtaaggttgcttatttagatagtattcgcaacggcgttacaactgtctttgatcatcatgctagttacggagaaattacagggagtttaacccaattatctaatgcagcggacgagttagggattcggacctgcctttgttatgaagtttctgatcgcgatggtgagcagaaaatgcgggaagcagttcaagaaaatgccgcctttattaaagccagttccttaagaaatgatgatatgcaaaaagcgatgatggggatgcatgcagcatttactttatcagatgcttctttagaattatgtgcagccaatacgccagatgggattggttatcatattcatattgcagaggatttagccgatgttcatgattctttgaaaaaatatgggaagccgattgtgaaccgattatttgatttagggattttaggaaaacagacaatggcaggccattgcatccatattggacctcatgagatggaattactaagagatacagacacaatggtggtcacgaatccagagtcgaatatggggaatgcggtcggttgcccacctgcgatgcgcatgtttaatgagtatggtattttgatgggtcttggcacagatggttatacgaatgatgtgacggaatcctataaggtaggaaatgttatccacaaacatcatttagctgatccaaatgcggcttgggcagaaattcccacaatgctgtttgataataatccgcaaatggctaatcgctattttaaaacaaagctaggcgttttagaacctaatgcagcagcagacgtcattattgttgattatcatggcccgacaccaatgacaaaagagaattataacatgcacattttattcggcatgaatggtgggatggtcactgacacggtgattaatggagaaattcggatgcgtaatcgtgaagttcaaggaattgatgaagagaaagtttggcatgatgcgcaaacgcaagcacaatctttctggaaacgagtaaatcaa

SEQ ID NO: 21002 - DNA, 3003 bp, Enterococcus faecalis
atgagtgatattatgcatcccatctcaattgaggctttattaaattggatttttagtgagtatcaacaagatggcacaatttttggcattcgtaaattttatcatgcggatcctacaaaaacgatttcgttatttggagaaaaaatggaaaccccttgtggtccagcagcaggtcctcatacacaattagcacaaaatattattgcggcctatttaacaggttctcgtttttttgaagttaagacagtccagatactggatggagaagatttacctgtgagtaaaccatgtatcgcagcagcagatgaatgttacaacgttgagtggtccacagaattgcgcgttccccaagcttatgatgaatacgtcaaagcatggttcgttttgaagttacttagtaaagagttcgagctaggtgacccgaatggtttcatttttaatatgagtgttggctatgatttggcagggattcaatcaccaaaaattgatcgttatattaacgaaatgcagaacgcagaaggaacgccgatttgggcggaatgccaagcagctgccaaaaaatatctatcttattttaaaaaagtagatgacttatatatcgaagcaattagtcctaaagtctgtcattctattacgctgtcgactttacacggttgtccatcagacgaaattgaacgaattgcggcctatttattaagtgaaaaagggctccattcctttattaaatgtaatccaaccatgttaggttatgaatatgcgcgtcaaacgatggatgagctagggtttgattatatggtttttgacgatcaccattttaaagaagatttacaatttgaagaagcagtaccgatgttacaacgtctgcaattattagctaatagtaaaaatctaagcttcggagttaaaattacgaacactttcccggtaacgattgcagcaaatgaattacctggtgatgaaatgtacatgtcaggacgttcgctatttcctcttagtatttcattggcacaaaaattatcagaagcatttgatgggaaactacaaatttcttattctggcggtgcagatattttcaatagtaaagaaatattcgatgctgggatttggccaatcactatggcaacgactctgttgaaacctggtggctatcaacgaatgaatcaagttgctaatgtattaagcgcagcagaatatcctcagatggtccatgtcaacttggataaattagctcaagttgttgagaaagctaaaacacaagcgcgttaccaaaaatcaattaaattaccagaaagtaccaaactaagaaaaacagttccgttaacagattgttatattgctccttgtcgaagtgacggtggttgtccaatcaatcaggatattcctgcttaccttcgttatgtcagtgaaggtaattatttaaaggccttgcaagtaattgtcgataagaatccgttgccttttattactggaaccatttgtgcacatccttgtatgactaaatgtacacgtcaattttatgaagaatctattcatattcgggaagtgaagttagaagcagctgaacatgcttatgatgaattattgacgacactagaaaagccacagccaaaagaaaatgcacctaaaacagctgttgtgggtggaggccctgcagggatctctgctgggtatttattagcacgtgaaggcatgcctgttactgtgtttgaaaaatccgagacaattgggggcgtttgtagccagattgtaccagaatttcgaatttctatggaatctgttcaaaaagacgttcagttagcggaatttatgggagccgaattccgtacaggacaagaggcgccatcattggcggaattgaaaaaccaaggctatacgaatgttatttatgccattggtgcatggaaacatggggtccttcgtttagaatctggtcgagcattgaactcgttagaatttttaaaagcaaatcgagaaaatccaacgattaatccttacggagaacaaattgtcgtcgttggtggcggaaatacagccatggactgtgctcgtgcagccacaacattacctggtgttaaaaaagtctcagtggtttatcgtcggaataaacgcaatatgccagcagatgaagaagaactttatttagctttagaagatggtgttgactttttagaattactttcgccaattaaacatgaaaatcaacaattaacttgtgaaaaaatggtcctaggtgaacgagatgcctctggacgccgtcgaccaattggtacaggagaaatgattgatattcctgctgatacagtgattgccgctgttggtgaaaaagtagatacagaattttaccaagcattaggcattcacacagacaactatgggaaagtcgtttcaaatcaagaaacattggaaacaaatataccaggtgtctatgtcattggtgacgctaatttaggaccagccacaattgttgaagcaatcgctgatgcaaccaaagcggccaataatatttgtcttgtccacaatcatcactatgaaaaagataatttaaatagtgatgtcgcatttgttagaaacaaacggggtatccttgtgacagacgagatgtcttgtagtcaagctagtcgttgcttagaatgctccacaatttgtgaatcttgtatggatgtctgtccaaaccgagcaaatattgttgtgtatgtcgaaggaaaaccacaaattgtccatgttgatcggatgtgtaacgaatgtggcaactgtgaaacattttgcccttatgcaagtgccccttacaaagacaaatttaccttatttaacagtgaagctgatttttatgacagtactaattcaggtttctatgttcaaaatcctgtggataaaatttgtttactgcgtctatggggaacggtgtcaacaattcaattaacagatcaaggattagatgtaccagaagatttaattgcattaatggtaactatgattgaagaatatgcttattgtatgcaagca

SEQ ID NO: 21003 - DNA, 942 bp, Enterococcus faecalis
atgggcaaacgcgtcgtagtagctttaggtggcaatgctttaggaaataatttgacggagcagatgactgccgtaaaacagacctccaaagcgattgcagatttgattgaagcaggatatgaagttattttatctcatggcaatggtcctcaagtggggatgattcaattagctatggaagaattttcctttaataatccacaatatccagttgttccgttatccatgtgcgtagccatgagtcaaagttacattggctatgatttagagaatgcgctacaagaagagttgcgtcaacgaaatataagtaaagccgtcaccaccgtagtcactcaagtggtcgtggatgaaaatgatccggcgttcaaaaaaccaacgaaaccaattggtcgcttcatgacaaaagaagaagcagaacaattagtcaaagaaaaaaatatacaagtgatggaagatgctggccgtggttatcgccaagtcgtcgcttctcctaaaccaaaaaatattgtcgaacttctcacgattcaaacattggttgatgctggccaaacagtcattgctggcggcggtggtggcatcccagtcattcaagaagggaaccgactaaaaggtgtcaatgcagtcatcgacaaagatttttgtagtgaacgactggctgaacaagtggatgctgatctgctcgtgattttaacagcagttgaaaaagtttgtattaattttggtaaagaaaatcaagaagccttagggaatgtttcaacagaaaaaatgaaacaatatgcgcaagaaggtcagtttgctccaggttcaatgttaccaaaagttgaagcagcgattaagtttgctgaatctaagccaggtcgaaaaacattgattacgttattagaaaaagccaaagaaggattatctggaaaaacagggactttaattgaaaataaagaatca

SEQ ID NO: 21004 - DNA, 1413 bp, Enterococcus faecalis
gtgaaccatacacgtttgctgtggctggcacagcgaaaaagcgatcgatttattcgcaaaaatttttcatctattcaaatcatcgtcgcttattacatattaatgacggttatttcttatttattgttttgcctccctattttcagagaacctgactcgcatgttccttttattgatttatttttcttagcaatcagtacagtcagtgttactggactcaccacagtcgatattaattcggtttttaatgatcgtgggatcgtcttattggaggttcttttccaagttggtggcttagggattatgatgatttcaacggtcttttttattttatcaaaacggcgaatcacattaaagcaacgtcagttaattatgactgacatgaatcagccgcgactgagcggaattgttcgactgatccgcaccacttttttgattttaatttggttccaagtaatcttcggctcgctcttttcgctttatttttatataagtggttattatacgaactggcgagatgcgatattttatggattttatcaagctatttctgcagtgactaattcaggctttgatatttcaggtgattcaattattccttttgctcatgattatctctttttactggcaattatgttcttgatttttatcggcgggattggatttcccgttttactggaaattcatgagtggttacattttaagaaaaagaactttcgtaagaagaaacgaggcttgcctttccgcttctcattgtttagtaaaattgctttgctagcgtttattgttctgtttattggtgggactattttgatttacttattagaaaaagatcacctatttttgacaatgaatgaaagtggccgttgggtaagttcgatgttttattcgatgactacacgaaacgctggcctccaaattaatgatttaggggacttccaaattacaacgttgattattttctctgtgttaatgtttattggttgtagtcctagctctgttggtggtggtgttcgaacaacgactgttgcgattattggcttgtatttgttagcctttttaaaaagtgaagatgatattagcgtctttagccgtaaaatagatgacgatgatgtcaaaaaatcgattgtcgtcttcatgttatctttgattatgtgctttttcgctgtcgtctttttgtcagccactgaaaatctgcccttgatttcaatcattgtggaagtcgcttctgcctttgggacaaccggtctttctttgggtattacagacgatttaacaacagtaggtaaattaatgattgccttattaatgtttattggacgtattggtatgctttataccttaatgatttttgtaccaaaagaaacacgtgacttaggctacgaatacccttcagaaaaaattattattgga

SEQ ID NO: 21005 - DNA, 582 bp, Enterococcus faecalis
atggctcaattatttttcaagtatggcgcaatgaacagtggtaaaaccattgaaatcttaaaagtagcacacaattacgaagaacaagacaaaccagttgttttgatgaccagtggactagatacacgtgatggtgttgggaaagtatccagtcgcatcggattacgcagagatgctattccaatttttgaagaaaccaatgtctttgacttgattaatgatttgtcttacaaacctttttgcgtattagtcgatgaatgtcaatttttaaacaagcatcatgtcattgaatttgcacgaattgttgacgaattagatattccagtaatggcatttgggctaaagaatgattttagaaatgaattatttgaaggctcaaagtatttacttttatatgcagacaaattagaagaattaaaaacgatttgctggttctgtcataaaaaagcaactatgaacttgcactatattgatggcaaccccgtttatgaaggggatcaagtccaaattggtgggaatgaagcctactatcctgtttgtcgcaaacattattttcatccaaaaacagtgaatgaagaacag

SEQ ID NO: 21006 - DNA, 1071 bp, Enterococcus faecalis
atgtacgatcaattacaatctattgaagatcgctatgaggaattgggcgaattattaagtgacccagcagtcattagtgatacaaaacgtttcatggaattatcgaaggaagaagctaatacacgtgagacggttgaggtttatcgccgatataaacaagttgttgaagggattagcgatgccgaagaacttttaagtgaaaacttagatgcggaaatggccgaaatggcgaaagaagaactttctgatttgaaaaaagaaaaagaagtgttagaagaccgcattaaaattttattattaccaaaagatccaaatgatgataaaaacatcatcatggaaatccgtggtgcagccggtggcgatgaagccgcactttttgctggcgacttatttaatatgtaccaaaaatatgcagaagcacaagggtggaaagcggaagttttagaagcgaacgtcactggaatcggtggatataaagaagtaattatgatgatttcaggagataacgtcttttcaaaattaaaatatgaaagtggcgctcaccgcgtgcaacgagttccttcaacagaatcacaaggacggattcatacatcgacagcaaccgttgtagttatgccggaagcggaagaagtcgaaatcgaattagctgataaagatatccgtgtcgatatttatcatgcaagtggcgctggtggacagcacgtcaataaaaccgcttcggctgttcgattaacccatttaccaacaggaatcgtagtcgcaatgcaagatgaacgttcacagctaaaaaaccgtgaaaaagcaatgaaagttttgcgtgctcgtgtgtatgaccaaattcaacaagaagcacaaagtgaatatgatgctaaccgtaaatcggcggtggggaccggagatcgttcagaacgaatcagaacgtataacttcccgcaaaatcgagtaacggatcatcgtatcggtttaaccatccaaaaactagaccagattcttgctggcaaattagatgaaatcattgatgcattagtcttatatgatcaaacatcgaaattagaagagatgcaaaatggc

SEQ ID NO: 21007 - DNA, 831 bp, Enterococcus faecalis
atggctaaacgttactttgaagtccttaactgggcttcttcttttttagaggcgcaaggcaaagaaggctacgctattcactatgtttttttagaacgtaaaggttgggataaaacgcagtggctcctgcatatgcaagaagaaatgccccaagaagaagaggaacaattaaaaacggatttagcccaattattgacagattacccagcacaatatttactaggacaagctgaattttatggacattcctttattgttaatgaacatactttgattcctaggccagaaacagaagaattagtcgagcgttgcttaaaagccaatccagatactcctttgacggtcgtggatgtcggaacagggacaggtgccattgcggttagcttgaaactggcacggcccaactggcgagttattgccattgatctttcagaggaagcgttgactgtcgctaaacaaaacgcgcaagcattaggtgctggcatcgaattttatcatgggaatggcttacagccagttgcttctgaaaaaattgatctgcttatttctaatccgccctatattagtgaacaagaatggtatttaatggatgcaagtgtccgaacgtatgaacctaaaaccgctttattcgctgaaaataacggtttggctttataccaacaattaattcatgaaagtcaaacgatgcttaaagcagacggtaaaatttattttgaaatagggtttcaacaaggcgcggccctccaagaattattgagcgccgcctatccacaaaaaacaattaaaattgaaaaagatttatctggcaacgatcgcctcgcgatagccgag

SEQ ID NO: 21008 - DNA, 1236 bp, Enterococcus faecalis
atggattacaaaacgtatgacccagatttatggaatgcaattgcaagagaagaagagcgccaagaaaataacttggaactaatcgcatctgagaatgtcgtgtcaaaagcagttatggctgcccaaggaagtattttaacgaataaatacgcagaaggttaccctggcaaacggtactatggtggttgtgaatttatcgatatcgtagaaaatttagctatcgatcgtgccaaagaattatttggtgcaaaattcgcgaatgtacaagcccattcaggttctcaagccaatacagcggcatacctttcattggttgaaccaggtgataccattttggggatggatttatcagctggtggtcacttaacacatggttcgcccgttaactttagtggaaaaacctataattttgtcagttatggagtggatccttcaacagaagtaatcgattacgatgtcgtgcgaattttagcaagagaacatcgtccaaaactaatcgttgcaggcgcaagtgcgtattcacgaacgattgacttcaaacgtttccgtgaaatcgctgatgaagtagatgccaagttaatggttgatatggcgcatattgcaggcttggtagcttcagggttgcacccaaatccagttccgtatgctgatatcgtaacaagtacgacccataaaacattgcgtggtcctcgtggcggtttaattttgacaaatagcgaagaattggcgaaaaaagtaaatagtagtattttcccaggcattcaaggtggcccattggaacatgtgattgccggaaaagccgcagcttttaaagaagcattggatccaagttttgctgaatatagtcagcaagtgattgcaaatgcgcaagcgatgacgaaagttttcaatcaagcgccagaagctcgtttaattagtggggcaacagataaccacttattactgattgaagtgacaggttttggtttaaatggaaaagaagcagaagctattttagatagtgtaaatattactgtcaataaaaattcaattccgtttgaacaattaagtccatttaaaacaagtggtatccgtattggaacgcctgcaattacttcacgtggttttaaagaagaagatgcggtagaagttgctaaattaatcgttcaagtcttaaaagatccagaaaatacagcagttcatgatgaagtcaaagcagctgtagcagcgctaactaaaaaatatccattatataac

SEQ ID NO: 21009 - DNA, 627 bp, Enterococcus faecalis
atgggaaaatttcaagtaattgatcatccgctaattcaacacaaactaacaatgattcgcgaaaagaactgtgggacaaaggttttccgcgaagttgtcaacgaaattgctatgttaatggcttatgaagtatcacgggatatgcctttagaggatgttgtcatcgaaacaccgatgggtaaatcaacacaaaaaacactttcagggaaaaaagtagcaatcattcctattttacgtgccggcattggcatggttgatgggattttagaattaattccagcagcgaaagttggacacgttggactttatcgtgatgaagaaacattgcaaccgcatgaatacttcgtgaaattacctgaagacattgcaagtcgtcaattatttgttgttgacccaatgctagcaacaggtggttccgcaattatggccatcgattcattaaaagaacgtggtgctagcaacattaaatttgtatgtctagtggccgttccagaaggtgtgaaagctttacaagaagcgcacccagatgtagatatttatacagcagctttagatgagcgcttaaacgaagacggctatatcgttcctggtttaggggatgctggtgaccgtttattcggaacaaaa

SEQ ID NO: 21010 - DNA, 1146 bp, Enterococcus faecalis
gtgggttcgactatgtcactatttatttatgaagttttgatacgtttatttatgacatttatcttatctttgctattaacaccacttgttaagcttctagcgtttcggattggcgcctatgatgcaccaggagagcgacgaatcaataccaaaaatatgcctacagcaggaggacttgcaatctacattgcttttgctagttcatgtttattgatttttcgttcgattatcccacaagattatatttggccgattattttggctggtggaatggttgttttgacaggcctcattgatgatattaaagaaattactccaatgaaaaaaacaatcggtattttgttagcagcattagttatttattttgttgctggaattcggatagattttgtgacgttgccagttgttggaatgattgatttgcgctggtttagtttaccactaactttattgtggattttagcgattacgaatgcagtaaatttaattgatggtttggatggtttagcatcaggcgtatccattattggattaaccacgattggtattacagggtattttttcctacatgctaaaacggtctatatcccaattgttatttttattttagttgcgagcattgcgggatttttcccatacaatttttatccggctaaaatatttctaggagataccggggcgttattcctcgggtttatgattgcagtaatgtcgttacagggcttgaaaaatgctacgtttattacggtaattacgccaatggtgattttaggtgtgccaattacggatacggtttatgcaattattcgacggctattgaacaagaagcccatttcctcagcagataaaatgcatttgcatcaccgcttgttatctttaggttttacccataaaggggcggtcatgactatttatgcattagcgttagttttttcctttgtctctttattgttcagctattcaagtacagtagcatcaattttattaattgtcttttgtttaattggcttagaactattcattgaactaatcggtctagttggcgaaggacatcaaccgttgatgtatttgttacggattttagggaatcgtgaatatcgtcaggagcaaatgaaaaagcgacttggcaagcattctaagagaaag

SEQ ID NO: 21011 - DNA, 684 bp, Enterococcus faecalis
atgaataatcgtggcttagcaagtttctttgatttttcccaaattgatataagtaaactacaagaaaaaacgattgaaacactttatatgacagggatttcaatcatagtggtcgccattttagggctgattttaggactactactttttgaaacgtcaggcagaaaagggattttgagccgattactgtattggctagtggccatttttgtaaatattttccgttcgattccgtttattatcttaatcgttctgttaattccttttacaaaaattattttagggagtatgtctggtgtcaaaggctccttaccagcattgattatttccgcagcacctttttatgctcgcatggtcgaaatcgcttttcgtgaagtcgataaaggcgtgattgaagcagccaaagcaatgggggccaatcgtttccaaataatttggaaagttctattaccagaaagtctgccagcgcttgtttctggcttaaccgttacaaccatttctttagtgggctacactgcaatggcagctgctattggagcgggtggtttaggaagtttggcgtatcaagatggcttccaacgtggtcaaaatacagttaccttagtagcaacgatttgtatcttaattattgtctttgcgattcaatggcttggggatacagtcgctaaaaaaatagataaacga

SEQ ID NO: 21012 - DNA, 816 bp, Enterococcus faecalis
atgaaaaaacgtacattatggtcagtaattactgtagcagtagctgtcttagttttaggggcttgcggcaataaaaagagtgatgactcggtcttgaaagttggagcttcaccagttccacatgcagagattttagaacatgtaaaacctttattagaaaaagaaggcgtaaaattagaagtgacgacttatacagattacgtgctacctaacaaggcgttggaaagtggcgatatcgatgccaactatttccaacatgtgccgttctttaatgaagcggttaaagaaaatgattatgactttgtgaatgcaggtgcgattcatttagaaccagttgggctttactcgaaaaaatacaaatcgttacaagaaattcctgatggttcaacgatttacgttagctcttccgtttcagattggccacgcgtattaactatcttagaagatgctggtttaatcacgctgaaagaaggggtagaccggacaactgctactttcgatgatattgataaaaatactaaaaagttgaaattcaatcatgaaagtgatccagcaatcatgaccactctttatgacaatgaagaaggggctgcggttttaattaactcaaactttgccgtggatcaaggattaaatccgaaaaaagatgcgattgccttagaaaaagaaagttcaccttatgccaatattattgcggttcgtaaagaagacgaaaacaacgaaaatgtaaaaaaattagtcaaagtgttacgtagcaaagaagtccaagattggattacgaaaaaatggaacggcgctattgttccagtcaatgaa

SEQ ID NO: 21013 - DNA, 813 bp, Enterococcus faecalis
atgttacgtttttttccgcaaaaaaataaatatgtagaagaagcaagccagtacgcctttgataaagaaggccaaattccgcagcacattgccattattatggacggaaatggccggtgggcacagaatcgaagactgccgagaattgctggacataaagaaggcatggatacggtcaaaaaaataacgaagcatgctagtcatttaggcgttaaagttttaacactttatgcattttcaacggaaaattggaagagaccaacagatgaagtcaatttcttaatgcaattgcctgttgatttttttgatacattcgtgcctgaattaattaaggaaaatgttaaagtcaatgtaatgggctaccaagagtttctaccaagccatacgcaagatgctgttaagcgcgccattgagcaaaccaaggacaatacgggcatggttttgaactttgctttgaattatggggcgcgtgcggagctactaactgccatgaaacagattgctgcagaggtttcagaaaaagcatatacggcagatgagattacagaagaaacgatcgcagatcacttaatgactggctttttacccacggaacttcgtgatccagaattgttgattcgaacaagtggggaagagagaattagtaatttcttgctatggcaaattgcttatagcgagttgttttttacaaaagcattatggcctgatttttcaggagacactttagaaaccgcgattgcttctttccaaaatcgtaatcgtcgttttggtggtctaaaagaaactacagaaacagaagggagcgatccgcag

SEQ ID NO: 21014 - DNA, 798 bp, Enterococcus faecalis
gtgagacaacgtgtcatcacagctatcgtcgcattaatcatctttattccaattatctggtatggtggttttgcaattgagattgccgctgttgctttggcagtagtcggcgtgtacgagttattccgtatgaaaggattaacgttattaagttttgaaggcgttttatcagcattaggggccgtttttttagttatcccgacaattaaatggttaaactttttgccggaaatgcaaacaaatttcattttattttatgtcactgtaatgttgttgttaggtgcttcggtaatttctaaaaatacatatacgattgaagaagctggctttccagttattgtcagtttatatgtagggatggggttccagaactttattagtgcccgttccgcaggttttgaagtcttgttatttgctttattcattgtctgggcaacggatattggtgcatatctatttggacgccgatttggtcgtcataaattgatgccagatgtttcacccaacaagacaatagaaggtgcacttggtggtattttatcagccgtcgttgtagcagcgttgtttttagttttcacagctaataaagggctatttccttatccaatgccggtgatgctcgtattgacggttctgttttctatagtagggcaattcggtgatttggttgaatcttctatcaaacgtcattatggcgtgaaagactctggtaacatcttgccaggacatggtggtattttagatcgttttgatagtttattatttgttttcccaattatgcacttatgtggattattt

SEQ ID NO: 21015 - DNA, 1167 bp, Enterococcus faecalis
atgaaaaaatttttagagaatagtatacatcaagccataaaagcttgttttttctttttaggtaaactgcctaaaaagaagttatttatttttgaaagttttcatggaaaacagtatagtgataatccacgtgcaatttttgagtacataagagataactgtcctgaatatcaatgtatttgggcagtcaaaaaaggatatgagatgccttttgtggaagagaatgttcctttcgtcaaacgattaagttggagatggctatggttgatgccaagagctcagtattgggtttttaacacacggatgccagcctggatgtataagaatcaaacaacaatctatatacagacgtggcatgggacccctctaaagaaactgggcttagatattgaaacagtcaaaatgccagagcatgaaacagagagctataaactagaagtcattcaagaagcaaagcgttgggattatctcatctcacctaatgcatacagtacaagagtgtttcgacaagcctttcattatgaaggggaaatattagaaataggttatccaagaaatgatttgttagtttgtgaaaataaggacaaaatagctttttctgttcgcaatcagctaggtcttgcagctaacaaaaaaattattctctatgcgccaacctggcgcgatgatgagtctatccgaaaaggagcctatcgttttaccaatcatttgccagttgaacaacttttagaaattgattcttctattgtaatacttacacgattacattatttaattgcagaaagttttgatataagtgcatttggttcacgtgtaatcgatgtttcttcttatccagatatcaatcaactttatttaatcgctgacttattaattacagattattcatcggttatgtttgattttgcattaacaaaaaaaccgatgctattttttatgtatgataaggaaaagtatcaaaatagtacaaggggattctattttgacccaacagcaattttgcctgggaaaattgtgacagatacggatagcctagtaacgtctgtaaaaaacgtattgttttctaaaacggaacaggaacaacgtttatatgtgcagttttttcgtgaattttgccttgaaaatcaggatgccactagacagctgatttcagaaattttaaagaga

SEQ ID NO: 21016 - DNA, 1464 bp, Enterococcus faecalis
ttggaaaaacaaaaagaagtccaaaaagaatatgaagagtatcaatatatgttagatactgaaacgtggaaaaaggagttaagtcaatttaagctgtcctcttcagaaaaaatatcaaaaaatcctaaagtctcaatcattattgctaattacaataatgcaccatatcttaaaaagatgatggattctcttgttcaacaaaccattgggattgagcaattgcaagtgatgtttattgatgattgttccacagatcattcgttaaaagtaatagagccatatcttgaaagatatccgaatattgaaatttatcagctgcttgaaaacactggaggagctcacggcccaagaaacgtagggattgtaaatgcacgtggtgagtatagtgtcttcttagatgcagatgattggtatgatttaaatgcattgaaatatttatcagacctactagatgactctcacgatgattttgctgtttctggtctaatacagagtacggacggccacttaatgttaaaaagtaagccatattatgtggatgggtcatttaaaaatcggtctatccaagaattgccagctgaattttatggttggttaggaccgcaagctatcatgttaagaacttcactgatacacaataataatttacactttgttaatcaacgggtggctgatgatgtgctgttcttttatgaagccatgcgattttcaaaaaccattacacaaggggaaaggttaacgacttatttaaatcgagatgcagataatgaaagtttaagcaaatcaattaatcggacatttatgctttcttggttgcgtgcgttaagttatatcaatcaacagtttccagatgatttgtctaaagaacggatgttagcacgccgtttagaatggctaatttatgacttttgtattcggaggaatactgggtatccattcagtaaaaggcgattacaagattttaaagtacagatggatcagtatttaggtgaattaaattttgatcctagcccgtattttagaagtgatgtgcgccaaatcatttggacatttttacaaactaacgatattgatggtttgtattggtttattcaatgtcagtccattcgttgggtgttagtcaatcgctttggttatgtttcaaaaacagagagaagctattattatcccagattattgaaacgattcccagcagttcgcatgaatgcttatgcagaagcaacgcaacgtgaaggcaatacgctttctttaaatgtgtatacacaccaaaaaattacaggatttgaaataaaagagctgaaaaatccttttgaaacaagacagaggctggcgtttaaaaaaattagtgaaactagttatcaggtagagttgccagaaaaattttcaaataaagaaagtagatttacgatagtttttgataattatttagaaattggggttaaagattttagtaagttttttgct

SEQ ID NO: 21017 - DNA, 702 bp, Enterococcus faecalis
atgattacagctttaattattgccggtggggtcggtaaacgaatggggcaggagattcctaaacaatttattatggtagaggaaaaaccgataattatctacacattggaatcttttcaaaagcatccactcattgatcgaatcttagttgtgtgtaaaaaaggttgggaacaaacactagatgcctatgcaaaagagtaccatattgacaaattacaatggattattccaggaggaaattctggtcaagaatcaattaacaatggggttaatttcttaaaagaacattcaaacccagaagatactattgttatccatgacgggattcgtccattagttgatgaattagttttatctgatgtaattgttaagtgtcaagaatacggaaatgcagtgacttcgttgccatataatgaacaaatttttgtaaaagaaactgaggaaacaacacgacaatatattaatcgtgaaacattacgtcgcgtgtcaaccccacaagcctataaatttgaaaaattaacttgggcttacgaaaaagcattccgtgagaatattggtatttctgaatcgtcatacacgaatactatgatggtggatttaggcgaaacactgcattttgctttaggctcagataaaaacattaagttaaccacacaagatgacttacagttatttaaaggcttcttgaaaatgaaagaagag

SEQ ID NO: 21018 - DNA, 744 bp, Enterococcus faecalis
atgacagatattattgcacatcgaggaagtaaaggcacccatcctgaaaatacgtgtattgctttcagagaggctgttcgtgttggtgctgaaggaattgaattagacgttcacctatctaaagatggttatttaatcgttatgcatgatgaaacagtggatcgtacgacagatggtcatggtgaaatccaacagttaacattaaacgaattaaaacaactagatgctggaagctggtttcagaaaaatccttctgttcaatgtgttccaacattggaagatgttttaaattgtcttgtagaagaacaattcaatggttttttgaatattgaacttaaaaccgatattatccattatgaaggaattgagaaaaaaatcgtccaacaaatgaagcaaaaaaactggccgtttcgttatttatattccagtttttattttccaagtttagttaaattaaaaaaagctgatcctaagacagaaattgcctttatttatgaatctgcagaggatttaagtcaagcgggaccggcattcgcgcttgtcgatagtttacatccaaaaatgtcttgggtgttggctcatgaaaaagaacttatcacaattggcaaaccgctgcggccgtggactgttaatcggatggaagaaatggaaaattgttttcagctaaaattggcgggtgttcatactgattttcctgaggaagcaaaatttgctcgtcaaaattggcaagaagaaggagaaaca

SEQ ID NO: 21019 - DNA, 1338 bp, Enterococcus faecalis
atgacaagaaaagccaaaacggcagaagagattaaacatattgcagaagaggaaaacgtacgttttttacgactaatgtttaccgacattatgggaacaattaaaaatgttgaagttcctgtgagtcagctagataaagtattagataataaaatgatgtttgatgggtcatccattgaaggattcgttcgtatcgaagaaagtgacatgtatttataccctgacctatctacatggatgatttttccgtgggaaagcgaccatggaaaagttgcgcgcttaatttgtgatatttacaatcctgatggtaccccttttgccggagatccccgcggtaatttaaaacgcgccttagcagatatgaaagaattaggctttacttcttttaacttaggaccagaaccagaatttttcctatttaaattagatgagaatggtgaaattaccactgacttgaatgataaaggtggctattttgattttgcaccaaccgatttaggtgaaaattgtcgccgtgatattgttttagagttagaaagtttaggctttgaagtggaagcttcacatcatgaagtagcacctggtcaacatgaaattgactttaaatatgctgatgtagttgatgcttgtgacaatattcaaacgttcaaattagttgtgaaaactattgcgcgtaaacatggcttgcatgcaacatttatgccaaaacctttgtttggaattaatggttctggtatgcactgcaatatgtcattatttaatgaagaaggtaatgttttttatgacgagtcaggagagatgggcttaagccaaactgcgtatcatttcttaggtggtttattaaaacatgcccgtgcctatactgcggtatgtaacccaacagtgaactcttataaacgcttggtaccaggttatgaagcacctgtttatgtagcttggagcggcagaaatcgttcaccactcattcgagttcctgaatctcgtggtttatcgactcgtttagaattacgttctgtcgatccttcagcgaatccgtatttaacaatggctgtcttattacaagcaggtttggatggtattcgtaatgaacttacaccaccgccagcagttgatcgtaacatttatgtgatgaatgaggaagaacgtcaacatgcacaaattgaagatttgccatcaaccttacacaatgccatcaaagaattacgtaaagatcaagtaatgattgatgcattaggtcgtcatatttttgccaattttgtagaagcgaaacgaatggaatgggcagccttccgtcaaaccgtttctgaatgggaaagagaacaatatttggagttgtac

SEQ ID NO: 21020 - DNA, 1161 bp, Enterococcus faecalis
atgagaaaagcctcccaaaaaagctggtttaatggtttgctttcattgctgtttgcattgttgttattttttaatgccaatgcaacaggcaataatccctccaattcaggttcaagccaaacgtatagtgagacattgaataatattcctgtccaagtccaatacgataaagacaaatattatgtctctggatttgaagagagtgtaaatgttcatttacgtagtgcgaaccgcattcaattaaacatggaatcaaatgctgacacacgaaatttccaagtggtcgcagacttaaccaaattgccattaggaacttcggaagtgcctttgacagttcggggactaagttctgctgttacagctgaaattgaaccgaaaacagtgactgtaacgattgaaaagagagtaacaaaaaaattcgatgtagaagcacaactttctgataacattgaaaaagaaggttataaagtaaaaaatatttctgtagatccaaaaactgtagaagtaacaactggagaagaaacagcaaaagcaattgacaaagtgattgcgccagtctcaagtgccaaacaaacaattgatacgattaaacaaacggtaaatgtccaagcgctagatgccaaaggtcaagtcctaagtatcgaaaatccagcaccacaagtcaaagtaacagtaggcttaactgcgccaacaaaagatgtaccactgaatgttagtatgacaggtacgccacctgctgggatcgctcattacaattatagtttatcaacgtaccaagttagggtcagtggcccgcaatcaattttagatacgctagaatcaattgaagtaccggtagatatttctgatattcgcaaagaaacaaaacaatcagtgactattcctgttaatggagaatacgtagttacaccagatgaggttgacgtttctttgacccccgtgtacaatcaacaacagtcatcaaatacaaatgaaacttcaggggaacctgcaagttcaacaacggttggctcaggtagccaagcagtacaaccaagtacatccagtcaagtagaatcaaatacttctgaaacaacaagtgagggatcaacagtagaaagtacaactgctggttcaactgaaaatacagagaatcaagtgactaaggagaatcaaaatggg

SEQ ID NO: 21021 - DNA, 966 bp, Enterococcus faecalis
atggtagaaagtgcgaaaaaattcttgcggaaagtcccgattcccatttgcggactaattttagggatggtttctttggggaatttactttattccttgggatatgcaacaattgggaccatttattgtgtacttggcagtctcttaatgattttagttattttaaaaattatttttacaatgaaacatgcattaagcaccttagatgatccaattattgcttcggtatcaccaacatttacaatggctttaatggttatctgtgttttcttagatcggatatttaccaatgctgcttggattaacgtgttgtggattggcgcagtgattttacattttattttaatgatttattttgtagcggtgcatatttttccaacaaaaatcgaactggaacatatttatccaagctggtttattacgtttgtcggcattggcgttattcctaatacttctcaattgtttatcaatgagttgggaaaaattgttttttgggtagcgttgttcttttatttactcttgttaccaattttaatcaagagaattacgaagtcgaaagaaatgcctgaatcgaccattcctttattgacgattatgacagcgccaggttcgttatgtttagctggctatatttcaatgggtggtcatttgtatatgccattagttgttttcttgctaattttatctcaatgtatttatgggattgtagtagtgaatctatataaaattatgcaagtgacattctatccaagttatgctgcctttacattcccattagtaatttctgcgacagcattagtcaaagttaaacctttatttgcagaaaaggtaggcctaacgagtctgttaaatattttgtctacttttgaactcttattagctgtggctattgtaagttatgtgttcattcgatattgcatttttttattccaaagagaaaataacacgaaaaaagtggaattaaat

SEQ ID NO: 21022 - DNA, 1354 bp, Enterococcus faecalis
atgggtaaatattttggaacagatggtgtaagaggaattgcaaataaggagttaacacctgaattagcttttaaattagggcgttacggtggttatgtattgagtcaacatgaagatagttcaagaaaacctcgtgttctcgtaggccgcgatacacgtatttcaggtgagatgttggaacaagcattgattgctgggttattatcagtcgggattgaagttttccaattaggggtgatttcaacacctggtgtagcatatcttactcgtttacaaaaagcatccgctggcgtaatgatttcagcttcacataatcctgcggaagacaatgggattaagttttttggggcagacggcttcaaattagtagacgatcaagaagcagaaattgaagcattgttagacgcagaagaagacaccttaccaagaccttctgctgaaggcttaggctcattagatgaatttccagaaggcttactaaaatattcacaatttttagttcaaagtattcctggcgatttagcagatatgactgtttgtttagatgcggccaacggagcaactgcaacagcagtcaatcgtgtcttcgcggatttagagacagatttctatacaatgggaacaagtcctaatggattgaatatcaatgatggtgtgggttccactcatcctgaagctttggcagaaatggttgttgaaaaaggcgcagatgctggtttggctttcgatggcgacggcgatagaattattgcggtagatgaattaggacgaattatcgatggtgataaaatcatgtatatttgtgccaagtatttagctgagaaaaaacgtttgaaaaaagatacaatcgttacaacggtgatgagtaatctaggtttccataaagctgtagaagaaattggcttaaaagatgtggtaacgcaagtgggtgatcgttatgttgtagaagaaatgcgtaaaaatgattacaattggtggcgaacaatctggtcacatgatctttttagattacaacacaacaggtgatggcatgctttcagggattcaattgttgaatgttatgaagcaaacgggcaaaaaattatctgaattagcggatgaagtgacgatttatccacaaaaattagtcaatattcgtgtcacagataaaaatggtgcaatggaagttccggcaatcaaagcagttgtcgaacaagcagaagcagaaatgaatggcgaaggtcgtattttagttcgtccttctggaacagaaccattgttacgtgtgatggccgaagcgccaacacaagaaaaagttgattattacgttgataaaattgctgaagtagtacgtgcagaaatcggcgttgaataa

SEQ ID NO: 21023 - DNA, 1278 bp, Enterococcus faecalis
gtgctaatttatttaacaaaaaaagattgtgagttgtttgatatggatcagtttagtacattaactgaacaagaatttactacctttgcaatgacacatcctgcaggtaactttttagaaacacccgaaatgaaacatttattggaacgacgtggctggcattgtgaatacgttggcgtcaaacgagaaggccaactaattgctgcgtgtatcctaagcaagaaaaaagtcaaaattggttatgctttcgacattgacggcggaattttgatggattatacagataaaaaatgtgtagaagcctttttcacaggcttaaaaaaatatgtgaaaaaaaatgatggcctttatttaacctttactccaaataaacaaatttgtttacgtgattttaatggcggtgaagttgaaaaggtcaatcaagaaacatttgactatttcacatcaattggttttgaacaccaagggtttgatgtgcacaattttgatggtgcgccacgttggctgtttgtcaaagatatggctggattaacagaagaagatctttggaaatcttatggaaaagatgctaaatatgacatcaagaaaacatgggaatatggagtaacaatccgagaacttcgttacgaagagctacctctctttaagaaattaacggaagaaacaagtgcacggcgtaattttgaagataaggatttagcttattaccaagctgtttatgaagagtttggcgaacgagcgaaatttatggtggcggaactaaactttgctacttatttagaaaatcttcatgagaaattacgcaaattacaagagacgctcaacgaagtcaatgaagcgttaattgccaatcctaaaagccgtaaaaaaaataaccagaaacgtgaatttgaagatgaagttcgtaccgtgcgcaaacggattgacgaggctaaagaaatgaaaacatcagatgaacctgaaattttagcaggtgccttattcattgttcatccacaagaagttgtttacttgtttagtggtacgtatgaaaaatataaacaatactatgcaccgtatttaattcaacataaaatgttaacttacacagtagaaaataacattcccaaatataatttttatggcgttgacggtatctttgatggaagtgatggggttcttaaattcaaacaatcctttggcggtcatgtcgaagaattaatgggcaatttccaatggaaagccaaaccaatgaaatatgccttatatcacgcattaaaaacaattaaagaaaaagtc

SEQ ID NO: 21024 - DNA, 990 bp, Enterococcus faecalis
atgacattgaacggaattgatatttctagttggcaatcaaatattaacgtaggtaaagaaggtgtccctgcagattttgttatagttaaagctacaggaggaacaggatatataaatcctgactgtgatagagcattccaacaagccattagcagtgggaaaaaagtagctgtatatcattttgcgaatgaggtaggacttgaagggacagcggaacaagaagctgagttctttttaaaaaatattaaaggttatatcggtaaggccgtcttggttttagactgggaaagtactaataaaggagacgttgcttgggctaaacgttggttagattatgttcaaggtaaaacaggggtaaaacctatgttttatacttataccaatgttttacaatcatataattttagctctattgcaaaagctgattatggtttgtggttagctgattacggagcaaataatccacaaggatattcccaacctactccgccaccagtcccttattggaattttatttcaatgtatcaatatacgtcaaatggtcaattgcctggctggaatggtcgattagatttaaacgtattctttggtgatagaagcatgtgggacaaatacgctaatcccaaaagtaatccaacacccgctcctccagttcctcctaaacctaagcgccgttacggatatagagtagacgatttacaatttgtaaacggtatttggcaagtaagaaatgatgtattggggcagccggactttgattggacagaaaacggaattaatgttgcttatattgataagatcgatccggcaacaggagagaatatgccagatcaagaattaaaagtcggagactattttgcttttcaaccatcttctgtagggatcattaccgaacaatactctttaaatgggaaaacaatctcgcatgttcaattcccagatgaatttatttggttgtacacagaaagtgttgggaaattaatctatggg

SEQ ID NO: 21025 - DNA, 831 bp, Enterococcus faecalis
atgaaaaaatttagtaaattaattggacttattggggtattagcttttacgattgcaggttgtgcatcggggtctgtgaaggatactaagacagaaaccgttaaactaggggttgtaggaacaaaaaatgatgaatgggaatcggtcaaagaccgtttgaaaaagaaaaatattgatttacaattggtagaatttacagactatacgcaaccaaacgcagcattagcagaaaaagaaattgatttaaatgcctttcagcatcaaatctttttagacaattacaataaagagcatggaacgaaattagtatcaattggcaatacagtcaatgcaccattgggaatttacgctaataaattgaaagatatcacgaaaattaaagacggcggagaaattgctattcctaatgacccaacgaatggcgggcgggcgttaattttattacaaactgcaggactgataaaagtagatcctgcgaaacagcaactaccgactgtcagtgatattactgaaaataaacgccaattgaaaataactgaattagatgctacgcaaacagcgcgcgctttacaagatgtcgatgcttcagtgattaatagcggcatggctgtcgatgctgggtatacaccagataaagatgctattttcttagaacctgtaaacgaaaaagcgaaaccttatgtgaacattgtcgtggcccgagaagaagatcaagagaataaactttatcaaaaagttgtagaagaatatcaacaagaagaaacgaaaaaggtcattgcagaaacatcaaaaggcgccaatgttccagcctgggaaacatttggtaaaaaa

SEQ ID NO: 21026 - DNA, 1098 bp, Enterococcus faecalis
atgagcattaatgaaattattatgtatattatggttcttttcatgattattggaggaatcgataaatgtattggcaacaaactaggtttaggggagcaatttgaggaagggattatggctatgggttctctagcgctttctatggtagggattatcactttagcgcctgtcttagccaatcttttaagtccgattgtcgttcctgtctatgaattactaggggctgatccagcaatgtttgccacaaccttattggccaatgatatgggcggctttgcgttagcgcaacaattagccaatgatccgcaagctggtttatttgcgggggcaatcttaggtgcaatgatgggaccaacgttagtctttacaattccagtagcgcttggcattatccaaaaagacgaccaacaattcttagcaacaggtgttttgagcgggattattacaattccttttggtttattagcaggtggtttaacagctggcatgccattgtcattgattattcctaacttaattccaattattattgttgccgctttaattattttaggtttatggttagcgccaaagggcatgattaaaggcttccaaatttttggtcaaggcgtagtgattgtcgctatctttggtttagttgtgggggcgattcaactattattaggaattacagtgattcctggcattgcaccagttactgaaggaattgaagtcgttggcgggattgctttaactttagctggcgctttctgtttagtagctgtgattacgaaagtctttaataaaccattgatgaaactaggaaaagttttaggaatgaatgaagtagcggctgcaggaatggttgctacattagctaacaatattcccatgttccaaatgttaaaagacatggataatcgagggaaaattattaatatcgcttttgctgtttcggcttctttcgttttaggtgaccaccttggttttactgcaggcgtagcaaaagaaatgatttttccaatgattgttggcaaattagttggagggattaccgccatttttgtggctatctttatggcaaatcgaatgctagggaaacccgaaacagaagtgaaa

SEQ ID NO: 21027 - DNA, 2055 bp, Enterococcus faecalis
ttggctaaaaaaattaacaatgagtacaatgatgcctctatccaagtcctagaaggattggaagcagtgaggaaaagacctggtatgtatatcggttcaaccgatagccgtggactccatcacttagtctatgaaattgtcgataacgcagtcgatgaagcgttatctggctacgggaatgaaatcaacgtaactatccaaaaagataatagtatttgtgttgcagactctggccgcggaatgccaacagggatgcatgcttctggtatcccaacagtagaagtaatttttactgtcttacatgcgggtggtaagtttggccaaggtggctataaaacttcaggcggactccatggggtaggtgccagtgttgttaatgccttatctaagtggttagaagttcatattgttcgtgatggcgtagaatacatggaacgatttgaggacggcggtaaaccagttggtaccttaaaaaaaatcggcaaaacaaaaaaacgcaacggtacctccgttacttttttacctgacgacaccattttctctacgacaaatttttcttacgaaattttagcagaacgtttgagagaatcagctttcttattaaaaggcgtcaaaattactttaacagatgaacgtggggaagaacccaaagaagaagtcttccactacgaagaaggtattaaagaatttgttgcctatctaaatgaagaaaaagatacattaacacccgttgtttatttttcaggagccaaagaaggtattgaagttgaattagcttaccaatacaacgatggctattctgaaaatgttttatctttcgttaacaatgtccgcacaaaagatggcggtacccacgaagtcggtatgaaaacgtcaatgacgaaggcgtacaatgaatatgcacggaaagtgggactattaaaagaaaaagataaaaatttagaaggtagcgacttccgtgaaggcttagcagccgtcctttctattcgagtaccagaaaacttactacagtttgagggccaaaccaaaggaaaattaggtacacctttagcaagaaccgttgtcgataacgtcgtaggcgaacaaatgggcttctatttacaagaaaacagtgaaatgagtcaatcattaattcggaaagcgattaaagcccgtgaagcccgtgaagcggctcgtaaagcccgtgaagaaagccggaacggtaaaaaacggaaaaaaggtgaatcgttactttctggaaaattaacaccggctcaatccagaaatcctaagaaaaatgaactatatcttgtcgaaggagactcggccggtggctcagcaaaacaagggcgcgaccggaaattccaagccattttaccgctacgaggaaaagtcattaatacggaaaaagcgaaaatgcaagacatcttgaaaaacgaagaaatcaatactatgatctatacgattggcgcaggcgttggtcctgaattttcaattgaagattgtaattatgataaaatcatcatcatgaccgatgcggataccgatggtgcccatattcaagtgttgctattaacgttcttctatcgttatatgaaaccattaattgaagccggcaaagtctacattgccttaccaccactttataaagtctctaaaggaactggaaaaaaatcagtcattgagtatgcttggaccgatggtgaattggcagaagtgattgataaagttggtaaaggctatatgctccaacgctataaaggtctgggggaaatgaatgcagaacaactttgggaaacaacgatggatcctgaaactagaaccttaattcgtgttcggattgatgatgcagctcaagcagaacgccgtgtgaccacattaatgggcgacaaagtcgaacctcgtcgaaaatggattgaacaacatgttcaatttacgttggaagaagatggcagtattttagatcgttcagaagaagacacttctgcaccaacaggagaaagtcttttagatgcggaaaaaacaaaagaagcagaacaaaccgatgacactgaaatcagtttgtttgacatagag

SEQ ID NO: 21028 - DNA, 1122 bp, Enterococcus faecalis
atggcagataacagcaaaacgcgtgtcgtggtaggcatgagtggcggtgtcgattcatctgtcacagcgttgcttttaaaagagcaaggctatgatgtaattgggatctttatgaaaaattgggacgatacagacgaaaatggtgtctgtaccgcaactgaggattataaagatgtcgcaaaagtagcggatcaaattgggattccgtattattcggtcaattttgaaaaagaatattgggaccgtgtgtttgaatattttttagcagaatatcggttaggacggacaccaaatccagatgtcatgtgtaataaagaaattaaatttaaagcattcctagattatgctatgcaactaggcgctgactatgttgcaactggccactatgcgcaagtagaaacagatgaaaatggcgtagtgcatatgttacgtggaattgacaataataaagaccaaacctattttttaagccaattatcacaagcccaattggcaaaaacaatgtttccattgggtggcatggaaaaatcagaagttcgtgcaattgctgaacgtgctggattagccacagccaagaaaaaagactcaacgggcgtttgttttattggtgaaaagaatttcaaagaatttttgagtaattatttaccagctaaaaaaggcaacatggtgacagaagatggcgaaatcaaaggacaacatgatggtctgatgtattatactatcggtcaacgccaaggcttaggaattggtggcggcggtaaaacacaagaaccatggtttgtgattgggaaagatttaactaccaatacattatatgtgggacaaggatttcaccatgaaaaactatatgcaacacatttagaagctagtgaggttcattttactgttgatacaccaatgccaaaagagtttgactgtacggctaaattccgttatcgtcaagcagatattccagtgcatgtttccttatctgaagatggcacaaaagcaaccgttacgtttaaggaaccagcgcgtgcagtcactccaggtcaagctgttgttttttatgatgggatggaatgcttagggggcggcttaattgatcgcgcctaccaagatgaaaaagaactacaatacgtc

SEQ ID NO: 21029 - DNA, 1236 bp, Enterococcus faecalis
atgtatgaattaattaaaagtaaaattttccgtccaagacaaccttgggaaaaaaatctgctcgttttatggtttggcacatttatggctggtattggctttagcttagtgatgccatttatgcctctttatatcaacacattaggtacttttacccaccaacaattgaatttttggagcggaatcacgttctcttccacttttttagtcacaaccattgtttcaccttggtggggccgtttagccgaccgaaaaggacgcaagttaatgttattacgcgcttcattagggatggctatcgtcattagtttaatgggcgcagtcacaagtgtttatcaattgattggcttacgcttattacaaggtgttttttctggttatatcagtaatgcgactgcgttagttgctacaggcacacctaaggaaaaaagcggtcaagtgcttggtactttagccactggttctgttaccggcacgttgcttggtcctcttttgggcggtgtcactgcgtctattttcggttatcggccaacctttttcattactggtacgattttattactcgtttttgttttgagtctcgtctttgtccatgaagagtttgtgccaattgaaaaaaatcaagccgcatctgggaaacaaattttaaaaaaactagaacatccccacgtgattcttggaatgtttattacgacattaatcattcaagcttccaataattcaattagtcccatcatcagtttatatattcaacaattgttgggtggtcacggaaatgtcaccttaattagcggagtcattgcttctattccagggattgcaacgttaatagccgcccctcgtttcggccggttaggcgatcgtattggcagtgaacgcatcttgacaattggcttaattttagccatttttgtttacctaccaatggcctttgttcaaaatgtctggcagcttgccatgcttcgtttcttagttgggatttccgatgcctgtttactaccagctgttcaaacgttgatcactcgttattccccaagtgacgctgcaggtcgtattttcagttacaatcaatctttccaagcgacaggaaatgtgattggtcctatgattggttcaagcgtatctgccgctttcggttatcgtggggtctttatttccacttcttgtctggttctccttaaccttctatgggttcgtcgaagcaccgccgaattaaaaaaagagaaaaatgatgac

SEQ ID NO: 21030 - DNA, 762 bp, Enterococcus faecalis
atgacaacaccagttacaggtagaattcattcaacagaaaattttggtaccgttgatggcccaggtgtccgttttatcgtatttacacaagggtgtcgcatgagatgtcaattctgtcataatccagatacttggaaaattggttccggtggtcgtgtggtgacgactgacgaagtattagaggaagcattacgttttcgctcttattggggcgaaaagggtggtatcactgtcagtggtggtgagccgctattgcaaatggactttttgatcgatttatttaaaaaagccaaagcacaaggcattcatacaaccttagatacgtgtggcaagccttttactcgggaagaacccttcattagtcaatttgatgaattgatgaagtatacagatttactcttatttgacatcaaacatattgataacgagcaacataaactgttaacaacgcaatcaaatgataatattttagagatggctacctatttatctgaaattgacaaacctgtttggattcgccacgtattggtgcctcaacgtagtgattacgacgaatatttaatccgtctggatgccttcataaaaacattaaacaatgtagataaagttgaagtgcttccttaccatacgatgggcaagtacaaatgggaagaactaggtattccttatccattagaaggaattgagcctcctaaaaatgatcgtgttgaaaatgcgaaaaaactactacatgtcgaggactatcaaggttatctagcacgt

SEQ ID NO: 21031 - DNA, 924 bp, Enterococcus faecalis
atgtcaaaaattttagtttttggacaccaaaatcctgatacagatgctatcggagcagcaattagttttgcttacttacaaaaagaattaggaaaagagacagaagctgtcgctttaggaacaccaagtgaagaaactcaatatgccttagattattttaatattgaagcaccacgtgttgtcactgaagcagctagcgaaacaaaccaagtcatgttagtggatcataacgaattccaacaaagcatttcagatatcgctgaagtaaacattttagcagtagtggatcatcaccggattgccaacttcgaaacagcagatccattgtattatcgtgcagaaccagtagggtgtaccagtacaatcatctataaaatgtttaaagaaaataacgtgacaattccagctcaaattgctggtatgatggtctcagcgattatttctgatacattattatttaaatcaccaacttgcacacaagaagacatcgatgcagcgcacgccctagctgatattgctgaaatcaatttagaaggctatggtcttgacttattaaaagcaggaacaaatttaagcgataaatcagctgaagtccttttagatttagatgctaagagcttcccaatgaacggcaaaacagttcgcgttgcccaagtaaataccgtcgatttagcagaagttttagatcgtcaagctgaattagaagcagctatggccgcagaaaatgcagccaataattatgacttgtttgtcttaattattacgaatatcctagacagtgattctgaattattagcgattggtgcggaacaagccaaaattgaagcagcgttcaatgtaacattagttaacaatcgtgcgttcttacccggcgttgtttctcgtaaaaaacaagtagtaccacaattaacagaagtctttaac

SEQ ID NO: 21032 - DNA, 2079 bp, Enterococcus faecalis
gtggttgcaaaacaattaattattgctgaaaaacctagcgtagcaaaagatttaagccgcgttttaggagcaaatcaaaaaaataagaattattatgaaggacccaacgtgattgtcacatgggctttaggccatctcttaggactaaaaatgccagaagatttaaacaaagaatggcaaacgtggcaaatggaaactttaccgatgattcctaagaatttagggattaagccgttaccgaaaacgggacatcaattaaaagcgattaaacaattagccaatcgtaaagatgtttctgaagccgtgattgccactgatgctggtcgtgaaggtgaattggtggcccgctggattttagaatatgtccgttttaacaaaccagtcaaacgcttatggatttcatctcaaacagacaaagccattaaagacgggtttaagaaaattcgcccagcgaaagactacgataatttgtattactctgccttggcgcgcgcaaaagctgactggttagtggggctaaacgtcacacgggccttgacagtgaaatatcaagataacttatccgcaggtcgtgttcaaacaccaactttagcaatggtacgccaacaagaaaaaacgattgaacaatttaagcctcaaacttattttactatctcgttatctgttgaatcagaaaaagcaaagatgacccaaaaaaatccatacgctttaaaagaacggcaggaagcagaacaattagtcaaagaactctcaaaacaaaagggcttagttaccgatatccaagaaaaagttaaaacagaaaacgcgccgttaccgtatgatttaaccgaaatccagcgtgaagccaaccagcgattccaattttctgcaaagaaaacgttgtctcttgtacaaagtttatacgaaacccataaaattgtttcctatcctcgaactgacagcaaatatctaacgacggatatgaaaggaacgatgaaagagcgccttcaagctattgctgatttttcaccagaagtgaaaggctaccttaaaaatggggctgttgttaaacaacaaaaagttttccaaaatgcaaaagtcacggatcaccatgggttgattccaactgaacaacgtcctcgttatgaaaagctaagtaatgatgaacaaaaaatctatcaaatgattgttcaacgattcttaggtttgtttgctgagccaaatcaaaccaaacaaacaaaagttacagtcgcttttggaaaagaaacatttgtctttcatcaaaataaagtagttgttgctggctggaaaacaacagccgaacagccgctatccactgtccaatggcaaaaaggcatgaccgttgcgccaaactttaccattaacaaagaattaacgtcgccgccaaaaccattaaccgaaggaacgttgttaggaaaaatggagaaacacagtttaggcacaccggcaacgcgagctgaaatcattgaaaaactgattaaatcagaattgatggaacgaaccaatagcggtttaagtgtctctgccaaaggaaagcaactattagacttggtgaatccatcacttgtgacacctgaactaacggaaaaatgggaaaagtcgctcgaagcaatcgcttcgggtcaacaaaagagtcaacttttcttaaaggatattgaagaggatacgaaaaaattagtccgtgaaattaaacaaagcgagaaaaaatatcaagatttttccattacgcaaaaaaaatgtccagattgtggctcaaacttacgggaaaaaaatacgaaagatgggaagatttacgtttgtacaaaccaagaatgttcttatcgtcggcgaaaagatcctaaagtatccaatcaccgttgcccacaatgccataaaaaaatggtcatcatagaaggaaaaaatggtcgttctttcaaatgtaaattctgttcgattactgaaaaaattcccgataaaaaagaacgaaaacaaaaaatgactaaacatgaagaacgtcgtttgatgaaaaaatattcacaaccagacgaaccagaagaaagtgctttagcgcaggccttaaaagccgctatgaatcaagag

SEQ ID NO: 21033 - DNA, 978 bp, Enterococcus faecalis
atgaacacattttggaagtcgtttcctgacgttgaacgttctttaacggaaacatgtgaattaattgaacaaacgttgcatacacgcaacgaagacattgaagaagccttagtaactttggctcgttctggcggcaaattattacgccccgcttttttctttctttttgctcaactgggtgatgaagaaaaacaagagaaacaacaactattaaaaatagctgcatctttggaaatcctacatatggctacgttgattcacgatgacattattgacgattctccattgcgccgaggcgctgtgactattcaatcacaatatggtaaagacgtggctgtttacacaggtgatttactattcactgaattctttactttgattgcagatgccatgaatggctctgaatttatgaaaatcaatgcacaaggaatgaaacggttattacttggtgaactcgatcaaatgagtcatcgatttgaccgccgcatgtcgattcctgcttatttaagaagtgtcaacggcaaaacagccgaacttttttcactaagctgtcttgaaggggcctatttcggtcatagttcaaaagaagtccaacgtttagctaaacgaattggccgtcatattggcattgcttttcaagtctatgacgatattttagattatactgccgacacggaaaccttgaaaaagcccgctttagaagacttgtcacaaggtgtttatacgttacctcttctcttcgcttatcaagcagcacctgacgtattcagcccttatttggataaaggacgcgccattaccttagaagaggcagctgaagttgcggcgctagtcaatgactatcatggcgttacagaagcacaagcttttgctaaaaaagtaaccaacaaagcaatcactgatattcaacaattgcctgatggcacagcaaaagaaaccttactttccttaactgagctcttattacatcgttcattt

SEQ ID NO: 21034 - DNA, 1434 bp, Enterococcus faecalis
gtgaaaaatcaacatttaactacgtcacaaggaagtccagttggcgataatcaaaattcgctaactgcaggagaatttggtcctgtcctaatccaagacgttcatttattagaaaaattagctcattttaatcgtgagcgcgtaccagaacgggttgttcatgccaaaggtgctggtgctcatgggattttcaaggtgagccaatcaatggcacaatatactaaagccgattttttatctgaagttggcaaagaaacacctttattcgctcgtttttcaactgtagctggagagttaggttcatcagatacattgcgtgatcctcgcggttttgcgcttaaattctatacagacgaaggaaattacgacttagttggcaataatacgcccatttttttcattcgtgatgcaattaagtttccagattttattcatagccaaaaaagaaatccgcggacgcatttgaaaagtccagaagctgtttgggatttttggtctcattcaccggaaagtcttcatcaagtaacaattttaatgagtgatcgtggcattccgttgtcgttccgtcatatgcatggttttggtagccatacattcaaatgggtcaatgctgctggagaagtattttttgttaaatatcacttcaagacgaatcaaggaatcaaaaatctagagagtcaattagcagaagaaattgctgggaaaaacccagatttccatattgaagatttgcataatgcaattgaaaatcaagaatttccttcttggacattatctgtgcaaattatcccgtatgcagatgcgttaacaatgaaagaaacactttttgatgtaacaaaaacggtttctcaaaaagagtatccgctgattgaagttggcacgatgactttaaatagaaatccagagaattattttgcagaggttgaacaagtaaccttttcaccagggaatttcgttcctggtattgaagcttctccggataaattattgcaaggacgtttgttcgcttatggggacgcacatcgtcatcgcgtgggcgctaatagtcaccaattgccaatcaaccaagcaaaagcgcctgtaaataactaccaaaaagacggcaatatgcgttttaacaatggcaatagcgaaattaattatgaaccaaatagttatactgaaacaccaaaagaagatcctacagcgaaaattagttcctttgaagttgaaggaaatgttggtaattatagctataatcaagatcactttacacaagcaaacgctttgtataatttgctgccaagcgaagaaaaagaaaacttaattaacaatatagcggcatctttaggtcaagtgaaaaatcaagaaatcatcgcgcgtcaaattgatttgttcactagagtaaatccagaatatggagcacgtgtcgcacaagccatcaagcaacaagca

SEQ ID NO: 21035 - DNA, 930 bp, Enterococcus faecalis
atgactaaaggttatgtaaaatcagtaacagagttaattggtcaaagcccagttgtgaaattaaaacggatggtaccagaaggagctgcagatgtttttgttaaactagagttctttaatcctggtggcagtgtgaaagatcgaattgctttaagcatgatccaacaagccgaagcagatggtcgcctaaaacctggacaaacgattattgagccgactagtggtaatacaggcattgggttagcaatggtaggtgctgcgttgggatatccagttaagattgtgatgccagatactatgagtattgaacgccgcaaattaatgcaagcatatggggctgatctattattaacccctggtgccgaaggaatgaaaggggcaattgcaaaagctacagcattagcagaagaacacgggtacttcatgcctttgcaatttaataatccagctaatccaatggtacatgaacaaaaaacaggaaaagaaattgttgatgtctttggtaaacgtggcttagatgcgtttgtttctggtgttggcactggaggaaccgttacaggagttggccatgaattgaaacggatttttccagatattgaaattgttgcagtagaaccaacagagtcgcctgttttagaaggtggcgaaccaggtccacataaaatccaaggaataggcgctggttttgtcccagaagttttagacaccaccgtttatcaaaaagttgccgctgtttctagtgaagacgcattagaaactgctcgtttaatggggccaaaagaaggtatccttgtggggatttcagcaggggcagcaattaaagctgccattgatttggcagtcgaattaggcgcaggcaaacgtgtcttagcgctggttccggataacggtgaacgttatctttcgacagctctttacgaatttccagaa

SEQ ID NO: 21036 - DNA, 1972 bp, Enterococcus faecalis
aagacagatcaattgggcgttaatacaatccggacattaagtattgaagccgtacaaaaagcgaactcaggacatcctggtttaccaatgggtgctgccccaatggcgtatgcactttggacaaaacatttaaaggtgaacccaacaacttctagaaactgggttgatcgtgatcgttttgtactttcagcaggccacggctctgcaatgttgtacagcttattacatctatcaggatacaacgtaacaattgacgatttgaaaaatttccgtcaatgggatagtaaaacaccagggcatccagaagtgcaccacacagatggtgttgaagcaacaacaggacctctaggacaagggattgctatggctgttggtatggcaatggctgaagcgcatttagctgcaacttataatcgtgatagtttccctattatggatcattatacgtacgcaatttgtggtgatggtgatttaatggaaggtgtttctcaagaagcaagttcaatggctggtcatatgaaattaggtaaattaattgtcttgtacgattcaaatgacatctcattagatggaccaacttctaaagcctttactgaaaatgttggggctcgttatgaagcatacggatggcaacatattttagttaaagatggcaatgatttagatgaaatagaggctgcgattgaagcggctaaagctgaaacggataaaccaacattgattgaagttaaaacagtcatcggttacggagcaccaaaagaaggaacatcttccgttcacggcgcgccaattggtgaagagggcattacagcggctaaagctgtttatggttgggaataccctgactttactgtgccagaggaagtcgctgctcgttttaaagaaacgatgattggcgaaggccaaaaagctgaagaggcttggaatgagatgtttaagaactatgaacatgcgcatccagaattagccaaacaatttaaagaagcttttgccaaccaattacctgaaggttgggaacaagaattacctaaatatgaactaggaacaagtgccgcaagtcgtgtaacaagtaaagaaacgattcaagctatttcaaaagttgttccaagtttctggggcggttcagctgatttatctgcctcaaataatacaatggttgctgcagaaaaagatttcgaacctggtcaatacgaaggccgtaatatttggtttggtgttcgcgaatttgcaatggctgcagcaatgaacgggattcaattacatggtggtagccatgtttatggcgggacattcttcgtctttactgactacttacgtccagcaatccgtttagccgctttacaaaaagttcctgtaacttacgtcttaacgcatgactctgttgcggtgggtgaagatgggccaacacacgaaccaattgagcaattagcaagtgttcgttgcattccaaatgttcatgtgattcgtccagcagacggcaatgaaactgttgctgcttggagaattgctatgacttctacggaaacaccaactattttagttctaagtcgtcaaaacttacctgttttagaaggaacgttagaacacgcttctgattctgttcaaaaaggtgcttatgtattgtcaccacaaaaaggtgaacaaccagcagggattttaattgcgactggttctgaagtaaatctagcggtggaagcacaagcgaaattagcggaagaaggcatcgatgtatctgtcgtgtcaatgccaagttttgatttaatttgaaaaacaatctgctgaatataaagaaagtgtgttacctaaagctgtgacaaaacgtgtggcgattgaagctgcagcaagctttggttgggaacgctatgtagggacggaaggcaaaacaattacaattgatcacttcggcgcttctgcacctggcggtctagttcttgaaaaattcggctttactcctgaaaatgtggttaatacc

SEQ ID NO: 21037 - DNA, 492 bp, Enterococcus faecalis
atgttagcagccatttgggcccaagatgaacaaggagtgattggtaaagaaggcaaattgccttggcatttacccaacgacttgaaatttttcaaggaaaaaacaattcataatacattggttttaggacgtgcaactttcgaaggtatgggatgtcgtccgttaccaaatcgaacaacgattgttcttaccagtaatccggattaccaagctgaaggcgttttggttatgcattccgtagaggaaattcttgcgtatgctgacaagtatgaaggcgtgaccgttattggtggaggttctgtcgtttttaaagaattgattcccgcatgcgatgtcttatatcggacgatgattcatgaaacgtttgaaggcgacaccttctttccagaaatcgactggtctgtttgggaaaaagttgccactgttcccggcgtcgtggacgagaaaaatctctatgcacatgactatgaaacgtatcatcgaaacgataaa

SEQ ID NO: 21038 - DNA, 945 bp, Enterococcus faecalis
atggaagaagcatacttagcgctaggaaaaaagattttagaagaaggtcattttaaagaagaccgtacaggaactgggacgtatagtttatttggctatcaaatgcgttttgatttggccaaaggatttcccttactaacaaccaaacgagtaccgtttggcttgattaaaagtgagttattgtggtttttaaaaggcgacacgaatattcgctatttgttagagcgaaataatcatatttgggatgaatgggcgttcgaacgttacgtaaaaagcgcagattatcaaggaccagacatgacggattttgggcatcgtgtcttacaagatccagcgtttgcagaacaatacaaagaagaacatcaaaaattctgtgatgccattttaaatgatgcagagtttgcagaaaaatatggtgaattagggaatatttatggtgcacaatggcgtcactgggaaaccaaagatggtagctttatcgatcaattagctaatgtgattgaaatgattaaaaccaatcctgattctcgccgtttaattgtttccgcttggaatccagaagatgtgccttcaatggcgttgccgccttgtcacactatgtttcaattttatgtaaatgaaggaaaattaagctgtcaactttatcagcgcagtgccgatgtttttttaggtgttccttttaacattgcaagctatgctttattgacacatctgattgcgcatgaaacaggtttagaagtgggggagtttgtacacacgctaggagatgcccacttatatcaaaatcatgtggaacaaatgcaagaacaattatcacgagaagttcgttctttcccaacgctcgttttgaatccagacaaggcttctgtttttgattttgatatggaagatattaaagtagaaggctatgacccacatccaacgattaaagcgccgattgccgta

SEQ ID NO: 21039 - DNA, 1893 bp, Enterococcus faecalis
gtgtcggtgaaagaattaaaagtaacagatttaaccaaaacatatggggaaaaaacactatttgatcatctttcttttttgattcatgaaaaagatcgcattggtttaattgggattaacggcacagggaaaaccagtttattaaatattattgctggcgtagatagcggtgatggtgatcttgctgcgattcagcagccaagtgattatcaaattgggtacctttcccagaatcaaacatttgacgagaatattacgattgcagaagccgtgtttcagggagacagcccgatcataaaagcggtcaaaaattatgaattagcgttagctgctttaagtgagaatggtttagacgaaggggttcaaagacgttacacgcaagcagaagaagccatgaataaacaagatgcttggacagcagataccaatgcaaaaattattttacaaaaattaggcattccaacattggaaaagaaaataggtgagctttctggtgggcagttaaaacgagtaagcttggcgcaagtcttaattgaagcgcctgatttactgttattggatgaaccaacgaaccatctggattatgaaacgattgaatggctggaaaactttttaaataactatcgtggcgcggttttaatggtgacccatgaccgctactttttagatcgagtaaccaatcggattttcgaactttcttttggaaaactgtatgaatacaaaggaaactatgaaacgtatgtgatggaaaaagccgaacgtgaacgtgtcgctgtagaacaagaagaaaaaagaaaacgcctcttcaaacaagaacttgcgtggatgcgagcaggcgttcaagcacgaggaacgaaacaacaagcaagaattgatcggtttcaggatttaaaagaaaacttgcatcaggtacaaaccaatggcaccttagaagcagactttgccacgcagcgtttagggaaaaaagttctggaaatcaaggaaggaaattatgccattgatcataaacagcttttgaaagactttaatttactcattcaagcaaacgatcgaattggcattactggtaaaaacggtgcaggcaaatccacattattaaatattttagctggacgcattcctttagagagtggtctatatagtatcggtgaaaccgtccgaattggctattatacccagcaaaacgaagaaatggatcctaatcaacggatgattgcttatttgcaagaagcagcagaagaagtgaaacgcagtgatggaagcagcgttggggtcgctgaaatgttagagcgctttttatttcctcgttttatgcatggcacactgattggcaaactgtctggtggagaaaaacgccggttatatctcttaaaattattaattagtcagcctaacgtgttattattggatgagccaaccaatgatttggacattgatacgttgaccattttagaagattatatccaaacgtttaaaggagcggtaattgcggtttctcatgaccgttatttcttggataaaacaatggataaattgttagtttttcaaggaaatggtcagatcctatcattttatggcacgatgagtgaatatttggcgaaccaaaaagaacaagaaaaggtcaaagaaaaaccgctcaataaaccagtaaaagaagcatcgacagaaaagaaagaaaaaacaaagctgacttatatggaacaaaaagagtgggcaacaattgaagaagacatcacacaattagaaacgaaattagaaacattaactgaagaaatgaatcatcagggtgatgattttgttcgtttacaagaattgcaagaagcagtaacagcaacggaacaattgttagaagaaaaaatgaatcgttgggaatacttgagtgaatacgcggat

SEQ ID NO: 21040 - DNA, 2052 bp, Enterococcus faecalis
atggaatttacctttctaatcattgtttttgcactgtctattaccttctcaaacatattcaaccggattgttcccgtaattccgctgccaattgtgcaaattattgtaggcgttctaattggtttaactaaaatggggcaggaaattgaatttgagcctgaagtgtttttagtaatgattattgcaccgcttttatttagagaaggggagctaatcaatctgaaagcaatgatgaaaaatttcgggatgattcttttcttggccttttttggtgtgttaattaccttagttggagtcggctggaccctgcatatgattttgcctactttaccattagctgcttgcttcgcttttggagcggctttagggccaacggatgcggtggcggtaggttcgttatcaggtcgaattgacattcctgaacgttcgatgaacattttatctggtgaaggactcattaatgatgcatcaggcgttacagcctttcaatttgcattagcggctttattaacggggtcattttcgccggtggaagcggcagggaccttggttatttccagcattggtggagcggtagtcggaatcgtgttagttctattaaaacagcaaattgttcatttacttgaaactgcagtggcaaaagatgttacaggctacttgttgattgaattactcttgccatttattgcttatttaatttcagagttgattggcgtttctggaattattgctgctgtgattgctggaattatgcaagcgtctagtttgaaaaaagtttcgctttttgaagctgagctgtcaaatgttggcgaaagtatttggagtttgattgagttcactttaaatgccttagttttcttattcttaggaattgaactttctcaagtgttttcgccaatttggattgaccaacaatattcaaactggttcctactactggttgttctaattattagcgccgttgtctttttgattcgtttcttagccattttcagtgtttacacgcttcaacatggacttaagaaagttaaaaacgcaatgaatgaaatgctgattttaacttttggcggtgttaaaggaacagtgagtttagccaccatctttattttgccaacagcgattaacggcgagcattttaaagaacgaccgttattactatttattacggcttgtgttattttggtgactctgattggcgggattctagttttaccatttttaactgattcagagacggaagtggaaaatgaagagtcagtcgaaattgatttattacgtgatgtcattgatgtcttaaaacagcaaaatgaagagaatcctcgtggtgaaatgaatgcggtcattgaaaattatcaagatcgtttaaaagaattgtataccgagcagctaagtgcagaacgaaaacaagaagtgcaagagttgcggacgttaattgtgtccattgaacgagacggcttagaagaaagtctgaaacaaggagaaattagtgtcagaagttatcgtatgtatcaacgcttgattacacggatgcaacggtcgattgccaaacaattattatcgattgtaggcttttggttattatttgctcgacaaatcatttcgattcttttacatcctaagctatttttcaatcgtggtgaagcttctgaagaagaaaaagaattacgaaatgaagaactagaaaatattcgccaagtttttctaagaaattctcaagttattctgaagagtttagataatttgcgcggtgtctatgatgatgatttaattgatttcttcattgacggacgcttggatttagcccataagtttgaaaaaggcgaatttattgattcgtatattgttcatacggagacagactatgtcaaagacctattattaggcttccaagaagaacgacggatgattgatcattacgaacaatctgaacgcatttcaattatcgaagcgaacgagttacgaaaaaatgtcaatttattagagagttattcgattagcggcgaagtgaataatgttccgctgaaacgatttgttaaaaattttaataaagaa

SEQ ID NO: 21041 - DNA, 1170 bp, Enterococcus faecalis
atgagtcgtgtagatcgttataaacatattcatgaaaaatcgagaccagcagagcataaaaagacctttaatccccgaaaatcaatgggtgaacatagagaagaagaaccagaagaactagctgaaagccttcaagagccagtttacgaagacagctatactgaggacagtcgcagaagtgagaggcgacatcaaacagattcaggtggtggcaacggttctgaccaaccaccccgcggaaaaaaagacaagaaaccaaaaaagaaacgtaaaaaatcaaaaacaaaacgctttttcaaatggctagtgatcctattgattctgttatttgcctatagtacagtcatgtttttaaaaggaaaatctgcagcagaacatgatgactcgttgcctcaagaaaaagtagaaacatttaatggtgtcaaaagtagcaacggggctaagaatattttaattcttggcagcgatacacgtggggaagatgctggacgagccgacacaataatggttctccaactaaatggaccatcaaaaaaaccgaaattaatttcatttatgcgtgatacattcgtggacattcctggtgtcgggccgaataaaattaatgccgcatacgcttatggcggtgctgaattggttcgtgaaacgttaaaacaaaactttaatttagatacgaaatattatgctaaggtagatttccaatcatttgaaaaaattgttgactctatgtttccaaaaggtgtcaaaatcgatgcagaaaaatcactgaatttagatggtgttgatattgaaaaagggcaacaggtcatggatggacatgtcttacttcaatacgctcgctttaggatggatgaagaaggcgactttggtcgggttcgtcgccaacaacaagttatgtcagctgtaatgagccaaatgaaaaacccaatgactttattaagaaccccagaatcacttgggaaattagtcggctatatgtcgacagatgtgcctgttagtttcatgttaacgaatggaccatcattgttgattaaaggaaaagcaggggttgagtcattatcggttccggtaccagattcttggaattttggtgaatcctcttatgcaggcagtattttagaagtagatgaacaaaaaaatgctgacgccatcgaaaaattcctgaacgaa

SEQ ID NO: 21042 - DNA, 2484 bp, Enterococcus faecalis
atggaaagtaaaacgtttgatattgaagggatgagctgtgcttcctgtgcccaaacgattgaaaaggctacggcgaagttacctgggatggcaaaggcaagtgtcaatttagctacggaaaaattaagtgtcacgtatgatcagacggaagtcacagaagaagaaattaaggaagctgtgtcagatgctggctacaaggcgattagcccagcccagcaacgaacgtttgcgattgaaggaatgagttgtgcttcctgtgcccaaacgattgaaaaagctgtgaaccaattatctggtgttcaacaagcgattgttaatttagccacggaaaaactggtggttagttatgacgaccatcaagtaacgagtgctgaaattatcaaagcagttacggatgcaggttatcaagcgacagaagaagtcgctgcaggtgcaacagcggaccaagatcgtgaaaagaaacaaaaacatattgctgagatgtggcaacgtttttggatctcagcggtgtttacagtgccccttctttatattgcgatgggacatatggtaggcttaccattgccggattttttgaatccaatgacacatgcgatgacctttgcaatggttcaattgattttgactttacccgttctatatgtcggcagagaatttttcacagttggttttaaagcattgtttaaagggcatccgaatatgttttctttggtggctttaggaaccagcgctgcttttgtgtatagtttatatggcacagtcatgatatttttaggagacacaagttttacaatggctctttattatgaatcagcgggtgttattttaaccttaattacattaggaaaatatttcgaagctgtttcaaaagggaaaacctcagatgcgataaaaaaattaatgggtttagcgccgaaaactgctcatattttacgtgatggcgtagaaattgaagtgccagttgatgctgttcagttggatgacattgtgattgttcgcccaggagataaaatccctgttgatggagtgattgtttcaggcagtagttctgtggatgaagccatgttaacgggcgaaagtttgcctgttgaaaagaaagtcggtgatgcagtaattggtgctagcatcaataaaaatggcagctttcaattcaaggcgacaaaagtgggaaaagagacggcccttgcccaaatcattcaattagtggaagatgcgcaaggctcaaaagcgccgattgcacaattagctgataaaatttcgggtgtttttgtcccaatcgtcattggtttggctgttctttctggcttggcttggttctttttaggacaagagtcatggattttcgctttgacaattactatttctgtgttagtgattgcttgtccttgtgcgctcggcttggcaacgccgactgcgattatggtggggacaggtaagggcgctgaaaatggcgttttaattaaaagtggggatgctttagaaaccactcacaaaattcaaacaatcgtgtttgataaaacagggactattacagaaggcaaaccggtggttacagatattttagttgctgattcagcactttcagaagctgagttactaacattagcagcttctgcagaacaaggatcagaacatcctctaggtgaagcaattgtgggagcggctaaagaacgtcaattgccattagcagaaggaagcgatttttcagcgattccaggtcacggcatccgtgtgacagtcaacgaacgagtcctacttttgggcaatataaaattaatgaaagaagaagcaatcgagctatcaacgtttgttcaacaagcggatcgtttggcagaagaagggaaaaccccaatgtttgtggcaaaagatggttcgtttgcgggtatcattgcggtagcagatactgtgaaggatagcagtcaaacagccattgcacgtttgcataaaatggggatcgaagccgtaatgattacgggagacaacaagcgtactgcagaggcgattgcgaaacaagtaggtatcgatcgtgtcttaagtgaagttttaccagaagataaagcgttagaagtgaaaaaactacaagcagaaggcaaaaaagttgcgatggtgggtgacgggattaatgatgcaccagcacttgcccaagcagatgtggggattgctattggttcaggcacagatgttgcaatggaatcggccgacattgtgctaatgcgtagtgatttaatggatgtgcctacagcagttgaattaagtaaagcgaccatcaaaaacatcaaagaaaatcttttctgggcatttgcctataatacattaggtattccagtggctatgggtgtgttacacttatttggtggacctttgttaagtccgatgattgcagcagcagctatgagttttagttcagtctctgtcttactaaacgccttacgattgaaaggatttaaaccttcgacggtgaaaagaactagtggaagtcaaaaa

SEQ ID NO: 21043 - DNA, 1164 bp, Enterococcus faecalis
atgcgctttattacagcaggcgaatcacatggacctgaattaactgctattattgaaggcttaccagccggcttgcctttaagtagcgaagagattaaccgagaattagcaagacgtcaaggcggttacggtcgtgggggacggatgaaaattgaaaaagaccaagtacgtattacttcgggtattcggcatggtaaaacacttggctcaccagtaacgttgattgtcgaaaacaaagactggaaaaattggacctccgtgatgtcagtagagccagttcctgaaaaacaaaagaaaatccgccgcgtcagcaaaccacgtccaggacatgctgatttagtcggtggcatgaaatatcaacatgatgatttacggaatgttttagaacggtcttcggcacgagaaacaacgatgcgtgtggcgattggtgcggttgctaaaaaactcttagctgaactggatatccaagtcgctgggcatgtcgcggtattaggtgggattgaagctacgatccctgaaaatttaacgattcgtgaaattcaagaacgatctgaacaatctgccgttcgcgtattagatccttccgtagaagaaaaaatgaaagaactaattgaccaaaccaagaaaaatggcgatacaattggtggggtagtagaagtacttgtgggtggcgttccagctggcttaggtagctatgtccaatgggatcgtaaactagatgccaaaattgcgcaagcagttgtaagcatcaacgcttttaaaggtgctgagtttggcattggatttgaaatggcacaacgccctggtagtcaagtgatggacgagattgtttgggacgaaagtactggttataccagaacttccaacaatttaggcggttttgaaggaggaatgaccaacggaatgccaatcatcgttcgtggtgtcatgaaacctattccaaccctttataaaccattacaaagcgtgaatattgatacaaaagagccttataaggccagtgttgagcgctctgatagcacggcggtaccggccgctagcgttgtttgtgaagccgttgttgcaacggaagtagcaaaggctatgctcgaaaaatttgatagtgactcatttgaacaaatgaaagaagcagtgaaacgttatcgtctatatactcaaaacttt

SEQ ID NO: 21044 - DNA, 1023 bp, Enterococcus faecalis
atgatcgtaattatgaaagaaaatgcaaccgaaaagcaaatgaaacaagtcattgatttagtaacaggtgcaggcttaactactcaaacaagtcaagataatggaaaaacagtgataggcttgattggtgatacagaaaaattagttgaagcagagttaacagcattagaaggcgtggagaaaagtgtccgcatttcgttgtcttacaaactaacgagtcgtttatttcatccagagaatacagtggttgatgtgaacggtgttaaaatcggtgacggcagtatgaccatgatggcgggcccttgttcaatcgaaagcttagatcagattcgcgaatgtgcgcgaattgctaaagctggaggtgcaacaattttacgaggtggtgcattcaaacctagaacgtcgccatacgctttccaaggactagaagaagaaggactaaaatacattcgccaagcggctgatgaattagatatgcaagtcattacagaagtgatggatgaagcgaatttagaacttgtcgcaaaatacagtgacattttacaaatcggtgcgcgcaacatgcaaaatttcaagttattacaagcggttggtaaaactggaaaacctattggcttaaaacgcgggattgctggtacgattgatgaatggctaaacgcagctgaatacattgctgcgcaaggaaatttcaatgtgatcttcattgaacgtgggattcgtacgtacgaaaccgctacgcgcaatacacttgatttaagtgcggtgcctttaattaaaaaattaagtcattttccaattattgttgatccgagtcatggtgttggtatctgggatttagtaccgccaatggcccgagcaggtgttgcttcaggtgcggacggcttgattgtagaaattcatccagatccagcgaatgcgtggtcagatgggccacaatccttgaatgaaaaaacttacctacgtatgatgaaagaagttcatatcatcgaaaaagcaatgaaagaaattaatgctttagaagat

SEQ ID NO: 21045 - DNA, 864 bp, Enterococcus faecalis
atgaaagaaataactggagccactcgtttagctgggctattcgcgaaacccagccaacacagtatttcaccgttgattcataatacagcatttcaaaatttaggagttgatgctcggtatctggcgtttgacgttggacaagagacattgccacaagcaattgaagcgattcgaacgtttcacatgttaggggccaacttatcaatgcccaataaagtggcggctgtaagttatatggatgaactaagtcctaccgctcaactggttggcgcaattaatacgattgtcaacaaagatggaaaactttacggagacagcacggatggtactggttttatgtggagtttgaaagagaaaaaggttgacgtttttcagaataaaatgaccatcttaggaacaggtggtgcagccttatcaatcattgcccaagctgctttagatggcgtgaaagaaatcgccgtttacaacaggaaaagcgcgggctttaacgacagtcaaaaaaaactggcaaatttcactgaacgaaccaactgtgtaattcatttaaacgatttagcggatactgaaaaactagcaaaagatgttgctgaaagcgtcttgttagttaatgcaacgagtgtgggtatgcatccacatgcgcatagtagtcctatagaaaattatgcaatgattcaaccgaagttatttgtgtatgatgctatttataatcccagagaaacacagttattaaaagaagcccgtttacgtggtgcagaaacaagcaacggcttggacatgctactttatcaaggcgctgctgcttttgaacaatggacaggacaaaaaatgcctgtatcagtcgtaaaacgtaaaattgaaaataga

SEQ ID NO: 21046 - DNA, 1428 bp, Enterococcus faecalis
atgtcaattttgaaaaatgattttctttggggcggcgctgtcgctgctcatcaattagaaggaggctgggaccaaggcggtaaaggggtgagcgtggcggatgtaatgactgccggtgcacatggcgtccctcgtaaaattaccgcaggcgttttaccagatgaacactatcctaaccatgaagcgattgatttttaccatcgctatcaagaagatattcaactattcaaagaacttggtttaaattgtttccgaacctctattgcttggacacgaatttttcctaacggagatgaagaaacgcccaatgaagaaggccttcgtttttatgatgcactttttgacgagtgtttgaaaaatggcattgagccagtcgtgacactgtctcactttgaaatgccttatcatttagtcacaaaatatggcggctttcgcaatcgccaggtcattgatttttttgtcaaatttgctgaagtctgtttcactcgttaccagaaaaaagtaaaatattggatgacctttaacgaaattaacaaccaagccaattatgaagaagattttgcaccttttactaactctggtattgcttaccaggaaggagaagaccgcgaagcaattatgtatcaggctgctcattatgaactagtcgctagcgcacgtgcagtgaaaattggccacgctatcaatcccgacttccaaattggctgtatgattgcgatggtgcctatttatccttattcttgtaatcctgaggatatgatgatgagtgttagcgcaatgcaaaaacgttattggtttaccgatgttcatgtccgcggtcattatccaagtgcaattcaatgctatttgaaacgaaaaaacatttcattagatgtcacagaagaagatttaactgatttagctaatggctgtgttgattatattggctttagctattacatgtcgtttgctgtaaaaggtgcagaaaaggcccctacttttgactacaatgaagcaaaagacttggtgcgaaatccttatgtagcaacatctgattggggctggcaaatcgatcctatgggcttacgctatgcaatgaattggttcaatgatcggtatgaattaccactttttattgtcgaaaatggctttggtgctattgatgagttagaaccagacggaacgattaacgacacttaccgaatcgcttatttacgtgaacatattgagatgatgaaagaagccgttgcgtatgacggcattgatttgatgggctacacaccttggggattcatcgatttagtgagcgctagtacaggcgaaatgaagaaacggtatggcttcatttatgtagataaagacaacgatggtcacggaacgttggagcggcgaaagaaaaaatcgtttgcttggtatcaacaagtgattgctacgaatggagaagaatta

SEQ ID NO: 21047 - DNA, 1209 bp, Enterococcus faecalis
atgacagattttgaagacaaacaagtagcaaacaacgaaacaatggaagatgcaatgaacagcgttcaagaagtcagtgttggcgatattgttaaaggcgaagttttagccattgaagacaaacaagttgttgtcggcattgaaggagcgggcgttgaaggcgttgttcctgcaaaggaattatcgactttaccagttgaagatgtacacgaacttgtgaaagtcggtgatgtgttagatttagttgttatcacatcaattggcaaagataaagaaaacggcagttatttactgtcaaaacgccgtttagatgctaaaaaagtttgggaagaaattgaacaagatttccaagcgggcaaagtaatcgaagcacctgttacaaatgttgttaaaggtggtttggttgttgatgtcggtgttcgcggatttgttcctgcctcaatggttgaagatcattttgttgcagatttttctgaatataaaggtcaaacactagcatttaaaattattgaaatcgaaccttcagaaaaccgcttaattctttcacataaagcagttgttgaagctgaaaaagaatcgaaaaaagaagaattactttcttctttacatgacggagacgttgttgaagggaaagtagctcgtttaacagatttcggcgcattcattgatttaggtggcgtggatggtttagttcatgtttctgaaatcgctcatcagcatgtgggcaaaccaagtgatgcgttaactgttggcgaagacgttcaagtaaaaattctttcaattaatccagaagaaggacgtatttctttatctattaaagaaacattgcctggaccatggacagatatcgaaacaaaagcagccgctgggactgttttagatggcacagtaaaacgcctaacaagcttcggtgcctttgtggaagttttccctggtgtggaaggattagtgcatatttctcaaatttctcacaagcacattgcaacgcctcatgaagttcttcatgaaggggatcaagtacaagtgaaagttttagaagttaatccagaggaacatcgtattgctttaagtatcaaagcgttagaaccaaaacctgagtctcaagaagaaccaaaagaagaacaggaatatgaattgcctgaagaaaatactggctttaccatgggcgatattttaggtgacgctttatctgatgcgaaagaagaggaa

SEQ ID NO: 21048 - DNA, 678 bp, Enterococcus faecalis
atggggaaaatcagtattgctattgacggaccagcttcgtcaggcaaaagtacagttgcaaaaattttagcaaaacaattgaattatgtgtattgtgacacgggtgccatgtaccgagcgattacgtatctggccttgcaaaatcaaatcgacattcaagcggaagagccattagtagcgctttgtgtcaaccacactatttcttttcagcaagcagagaatggccaacgtgtttttatcgacggtcatgaagtgaccgaagcgattcgccagccagatgtaacgaatgctgtttcagctgtttcaaaacatgcaaaagttagagaagaaatggtggcgttacaacagaaaattggtcaagccggcggagttgtcatggatggtcgagatattggtactgcagttttaccaaaggccgaagtaaagatattcttggtggctagcgttgaagaacgtgcagaacgtcgttttaaagaaaatcaagaaaaagggattgagacggattttgaaaccttgaaggcggagattgaacgtcgggattatttagattcaaccagagaagtatcaccccttgtccaagcaagtgatgctgtgaaaatcgatacaacaggcttgacgattgaagaagtcgtcgccgccatacaaaatgtgattaaacaaaaaggttttgaacttttt

SEQ ID NO: 21049 - DNA, 750 bp, Enterococcus faecalis
atgtttttacaaaataagaatgtcgtcgtaatgggtgttgccaacaaaaaaagtattgcttggggctgtgcaaaagcattaaaagatcaaggggccaatgttatttatacgtatcaaaatgaacgcatgaaaaagcaagtggttaaattagcagatgaaaatgatttgttggtggaatgcgatgttgcttctgatgcgtccattcaagcagcctttgaaacaattaaaaatgaagtgggcacgatcgatggactagtccatgcgattgcttttgccaaaaaagaagaattgtctggaaacgttagtgacatcactcgtgatggtttcctattagcacaagatattagtagctactctcttttagcagtcactcattatgcgaaacctttgttaaatcctggttcaggaattgtcacattgacgtatttaggttccgaacgtgcgattcctaactacaatatgatggggattgctaaagcttctttagaaactgccgtgaaatatttagcttttgaattagctgcagataaaattcgtgtcaacggaatctccgcaggagcgattaaaacattggctgtgactggtgtaaaagactacgatcaattgattagtatttctaatgagcggacaccagataaaacaggtgtaaccattgaagaagtcggaaacacttgtgcctttttagtcagtgacctagctagtggcgtggtcggtgacatcatttatgtcgataaaggcgttcacttaact

SEQ ID NO: 21050 - DNA, 489 bp, Enterococcus faecalis
atggcaaaaaaaatttattatgcgcaacaagaatggcagaacgatcactattatcttggtgtgacagatgctggactagcttttgtaggttcagccaatcaatcgatagaagagctgaaaaactggtaccctcaagcacaattagaagcttctgaaaagaaaactgcgccttataaagaagcactaataagttatcttaaccaacactcgacaacgtttgcttgccccatagacatcgaaggaacgccctttcaaaaagaagtttggcaagcgttgcaagaaatcccttatggtgtgacaatgacctatcaggaaatttcagaaaaaattgggcgtccacgtgcggttcgagcagttggcacagcgattgggaaaaatcctttattaatggtcattccttgccatcgagtcatcggcagcaagggacaattaaccggttaccgtggtggtttagcaatgaaacaagcattattaacatttgaacagtct

SEQ ID NO: 21051 - DNA, 741 bp, Enterococcus faecalis
atgaaaaatagaacaaaatcacgttggaaaaaaattgtcctaggaatcgggctttttttagcggtattagtcatcggtctgactatttttattaaaaatagtacgtatcaagcaaccgattcagccttaaaaataagccaaagtgccacgcaagaaaaaaactatgattattatacaaacgggcaaaaaaatgatacagcactgattttttatccaggtgcattggttgcgcccgctagttatagtgaatgggcgcaagaagttgctacgaaaggttatgatgtctatgttgttcattttcctttgaatttagcggttcttgcaccaaatgctgcagaacaaattataaaggatcatccacaacaaaacttcgttttggctggacattctctgggtggtgtgatggctagccgttttgtagcggaaaatgagcaacgaatcaaaggcatgatttatttagctagctatcctgacgaaaaaggtgcactaaacaagaaaaatctgccggttctgtcaataacagccacaaacgatggtgttttaaattggactagctaccaaaaagccaaacagtttttgccaaaagatacgcagtatgtatctatcgaaggtgggaatcatgcagggtttggtaattacggtgtccaaaaaggagatagcaaagcgacaatttctaatgagcaacagcaaacagaaatcagtcaattgattgtagcatggctacaatcacgccccaataaa

SEQ ID NO: 21052 - DNA, 216 bp, Enterococcus faecalis
atgcaatcacgtttagttcctgaaaaatgtattgcttgtggactttgtcaagtttatgcgcctaatatatttgattatgatgatcatgggattgtcctttttaaagacgagccgcatgctcgacaacaatttattccagaaaacgaacgcgagaatgtgttaaaagcgtaccgcaaatgtcccacgcgtgcaatagaaataagcaaaaatgagtgc

SEQ ID NO: 21053 - DNA, 714 bp, Enterococcus faecalis
atggaaagattacaaaaagcaattgctcatgctggggtgacttcgcgtcgcaaagcagaggaattaattgtcaaaggtcgcgtaaaagtcaatggccaagtggtcaaagaattaggaacacaagtaagtaaacaagatactgttgaggttgatggtgtaccaatttatcaagaagaatatggttattatttattctataaaccaagaggggttatttctgcggtgtctgacgataaaggccgtaaagtagtaacggattattttacagatgttactgagcgaatttatccagtcggtcgtctggattatgatacttctgggttgttacttttaacgaatgatggaagtttttcacaaaaattaacccatcctaaacatgaagtagataaagtctacgtagcaaaaattaaaggtgttccaactaaacgggatctattgccattagccaaaggcattcgcattgatggcaaacgcacagcaccagccaattttcaaattctttcagcggacattaaaacaggtagcagtgtcgtggaattaacgattcatgaaggacgtaatcatcaagtgaagaaaatgtttcaagctgttggtttccctgttcaaaaattaaaacgtgaacgttacggtgagttgaccttacaaggtttgcgaccagggcaatatcgtgatttaactaaaaaagaaatcagtcaattattaaatcaagctaaa

SEQ ID NO: 21054 - DNA, 1296 bp, Enterococcus faecalis
atgttagataaactgactgtttggattgaaaatcatctagctggaccaatggctaaaattgccaatcagcgccatttacgtgcggtgcgggatgggattattgcgacattacctttaattattgtcggttctttttttctaattattgcgtttccgccgttaccagaatcttggggcattactcaatttttaacaagtaatgctgctacaatcttattgccttaccgaatgacaatgtacattatggcgttatatgcgacttttggcattggcgctagtttagcgaaatcatataatcttgatcaagtctctggagggattttggctacgattgcttttttattaacattagtacctgtagcgattcctgaagaagccagtaaagcagctggcgtttctgggtttgttttaccaatggctaatttgggtggtgcagggatgtttgtcgggattgtgacgtcaattattgctgtcgaaatctatcgagtgacagataagtctaagttcaaaattacaatgcctgataacgttccacctgctgttgctcgttcatttgaatcattgactccgactttaattgtcatgttattgattggttcaatcacttattatttaggctttgattggcacacatttgtagggaacttagtgggaccactagttcaagcagcggactctttattgagtgtcttgctgttagtctttttaaccacatttttctggttctttgggattcacggcgcttcaatcgtaggatcgttggcgcgtcctctatggctacaactattagaggaaaacacgactgctaaagcagctggcgaagcattacctcggattgcggcagaacctttttaccaatggtttatttggattggtggtgctggagccacaattggtttagctatattattagccttccgggcaaaatcagaatatggttcaaaactaggaaaagctattttagcaccgtctatttttaatattaatgagccagttattttcggtgtaccgattgtcttaaatccgattttaatgattccttttatctttgcaccaatggttttagcaacgattgcttggtttgccacaaaattaggtttagtaagtgaagttgtctttaccgctccttggaccttaccaggaccaattggcgcctttatggcgacaggcggcgattggcgtgctgctgttttgaatattgttttaattctagtggcaattttgatttactatccgttctttgtagcttatgataaaaatgagcttgccaaagaacaaggcaaacaaatagaagaa

SEQ ID NO: 21055 - DNA, 1104 bp, Enterococcus faecalis
atggaaaaagaaacaagtaaaaaatatgaagctgcagtggcagcatttatcaaagaaaacaagcctaaaggaacagtggtttatgatgatttagcgaatcaattagccacaccgtatactttggatgcagaagctatggaaaaattgatccaaaaagttgaagatgctggtatcagcgtggtcgatgaaaatggagacccaagtgaacatagcttgaaaaaagatgaaaaagaagcggaaaaggcccaagcagaagacttatctgcgccaacaggtgttaaaattaatgatcccgtgcgtatgtacctaaaagaaattgggcgcgttcaattattaactgccgcagaagaagttgaattggcacttaaaattgaagaaggcgatcaagaagcaaaacaacgtttagcagaagctaacttacgtttggttgtttcaattgccaaacgatatgtaggtcgtggtatgcaattcttggatttaattcaagaaggtaatatgggcttaatgaaagctgttgaaaaatttgactaccgtaaaggattcaaattctctacgtatgctacttggtggattcgtcaagcgattacgcgggcaattgcggaccaagctagaacgattcgaattcctgttcacatggttgaaacaatcaataaattgattcggattcaacgccaactattgcaagatttaggtagagaaccaacgccagaagaaattggtgcggaaatggatttaccaacagaaaaagttcgtgaaatcctaaaaatcgcacaagagccagtctctttagaaacaccaattggtgaagaagatgattcacatttaggtgatttcattgaagaccaagatgctaccagtcctgctgaacatgcagcttacgaattgttaaaagaacaactagaagatgttctggatactttaacagaccgtgaagaaaatgttttacgtttacgttttggtttagatgatggtcggacacgtacgctagaagaagtcggaaaagttttcggtgtcactcgcgaacgtattcgtcaaattgaagcaaaagcgttaagaaaactaagacatccttctcgttcaaaacaattaaaagactttttagaa

SEQ ID NO: 21056 - DNA, 1893 bp, Enterococcus faecalis
gtgaggacaatggcacaacgcattcctcaggaagtcattgaggaagttcgtcaccgaacgaatatagtagatattattgggcagtatgtccagttaaaaaaatccggtaaaaattatatgggtttatgtccgtttcacgaagaacgttccccttcattttcagtagcagaagacaaacaaatttttcactgttttggctgcgggaaaggtggaactgtttttaatttcttgcaagaaattgaaggcattagttttccagaatccgtgaaacgtgttgcagatttggaacatttatctgtggactttgattggtcagagccgcgtgaagtagcggataccccagaaaaccaacaaagacggagtttgttacaactgcatagtaaagccgcagaactttaccatcatattttagtgaatactaaaattggcgaacccgcattaaactatttattagagcgggggttaacacaagaactaattgagacctttcaaattggatttgcgccgcaaaaacgtgatttcttaagtcaagtttttaaaaacgaacaactggatgaaacgctttttgagccttctgggctgtttgtccaaagagataacggtacgtttttggatcgtttctatcaacgaatcatgtttccaattaatgatccccaaggcaatgtcatcgccttttctggtcgcttgttaaaaacagctgattttccaggggatgagatgcctaaatacttgaatagtcctgaaacaacactttttaataagcgagaaacgctgtttaactttgatagagccagaaaagaaattcgtaaagaaaatacggtcttgctttttgaaggattcatggatgttatcgctgcttggcaatcaggcgtaaaaagtggggtggcttcaatggggactagcttgaccaatgaacaaattcggcgtttggaacgggtcgctaaggaagtagttatttgttacgatggcgataatgccggtgttcaagccacaaaccgtgcgattcaattattgcaagaaaacagtcattttgacttgagtattgtcagcatccctgaaaagctggatcctgatgaatatgtgcggaaatatggcgcagaagcttttcaaaatttagccaatcatggccgagaaacagtttttagttttaaaatgaattatcatcggttaactagaaacatgaataacgaaaaagaacaattggattatgtgaacgaattgttacgggagttaaccaatgttcaatctcccttggaacgtgatcgttatttaaaccaaattgctcaggaatttcaactttctgttcatagtttggaagagcaattcaatcaattgaagcaagagcaacgttcagtccaacggcaagaaaggcaacaattttatcaagatgaaatgatgccaccaccaatggaagaacctgtttttgaagagaatcacgtccagaacaagttaccgttaacccaagttcaaaaagcagaacgttctttattatttcgtttaatgaatgaacaaggagtacggcaaaccattcaacaattgccagatttttcattcgctcatgatgaataccaagaattatatttcttgctagaaagttatgcgacactgcatcaaagtttcgacattgccgattttattaatttcttgcaagataatcaaaccaaacaattagcaattgaaattgcgtatcagaatttatcggaagaaagctctgagcgagaagttgccgatttattacatgtaattgccttatcaagtattgcagaggcaattgagcagaaaaagattcaacagcaagaagcaaaacgagtgggcaaccaacagcttgaagccgaattaacaatggagattatccaattggctcgacagcttaaagctcaacgaacatttact

SEQ ID NO: 21057 - DNA, 894 bp, Enterococcus faecalis
atggaagattatttagtaaaagccctttgttataaaggttcaatacgagcatatgccatcagtgccactgaaactgttagcgaagcgcaaagaagacatgatacatggagttcttctactgcagcgttaggacgcacattgattggagcccttttactaggagcgactttaaaaggtgacgataaattaactgtaaaagtacaaggaaatggcccagctggcgctattattgtcgatagtaatggccgcggagaaacaaaaggctacattaaaaatccacatgtcagcttaaagttgaatgcaacaggtaaaattgatgtacgtggtgctgtcggtaacgaaggaattttcacagtcattaaagatttaggattaaaagaaaccttttctggacaaacacctattgtttctggtgaaatcggtgaagactttacatattttatggcggtctctgaacaagttccttcagctatcggtttaggtgtattggtggacacggatgaatctgtgaaagcagccggtggttttatgattcaagtaatgccaggtgccgatgaaagtaccattgattttattgaacagcgtctagcggaagtgccaccaatttcacaattactagaaaatggagaaacacctgaacaagtcttgtatcgcttattgggagaagacgaagtagaaattttagaaaaaatgcctgtacaatttaaatgtgactgttccaaagaaaaatttgcgaccgctttgattgctgttgggatcgatgaattaaatgcgatgattgatgaagatcatggagcagaagcagtttgtcaattctgtaacaataaatatcactatagtgaagaagaattaattgaacttcgcgatgaagcgattcgcaatacgaaacaaaag

SEQ ID NO: 21058 - DNA, 2178 bp, Enterococcus faecalis
atgatgagcataaggaggacaggcatgaacaaaaagaataatggcatgaaaaatggtttatactacgtcttagtagtacttgccatggtcatggttgtctatttcatttttggaaataacaaccaacaatcgccagacatcgattactcaaccttccaacaacaattggaagacggaaaagtcaaagacatgaccattcaaccaactaatggggtttaccggattgaaggtcagtataaagaaaaacaagaagtgaaagacacaggtggtctgtcattgtggggctcaacgcaagcgtcgtcaaaaggcttcacaacaaccgttttacctagtgatacaaccttagctggcattcaagatgcggcacaaaataacaaggtgaagctagttgtcaaagaacaatcaacaagtggtgcttggttgtcactgttgtttagtttcttaccattagtgattattttcttcttcttctacatgatgatgagccaacaaggcggtggcggtggcggcggtggccgtgtgatgaacttcggtaaatcaaaagccaaagaagccgataaaaaagctaaccgtgtccgcttctcagatgtagctggtgcggaagaagaaaaacaagaattagttgaagtagtggaattcttaaaagatccacgtcgtttcgctgaattaggcgcacggattcctgcgggcgtactattagagggacctccagggactggtaaaacgttacttgctaaagccgtagcaggtgaagcaggtgtgccattttactcaatctcaggttcagatttcgttgaaatgtttgtcggggtcggtgctagccgtgtccgggatttatttgaaacagcgaagaaaaacgcgcctgcaattatctttatcgatgaaatcgatgcagttggtcgtcaacgtggtgctggtatgggtggcggacacgacgaacgtgaacaaacccttaaccaattattagttgagatggatggttttgatggcaatgaaggagttatcgtaattgctgcaacgaaccgttcagacgtgttagacccagcgttgttacgtccaggtcgttttgaccgccaaatcttggtaggacgtccagatgtcaaaggtcgtgaagcgattttacgtgttcatgcgaaaaacaaaccgttagctgatgacgttgatttgaaagttgttgcacaacaaacaccaggttttgctggtgctgatttagaaaatgtcttaaacgaagcagccttagttgccgctcgtcgtaacaagaaaaaaattgatgcttctgatgtggatgaagccgaagaccgcgtaattgctggtccagctaaaaaagatcgcgtgattaataaaaaagaacgcgaaatggtggcttaccatgaagcaggacacacaattgttggtttagtcttaagccgtgctcgtgttgtccacaaagtaacaattatccctcgtggtcgcgcaggcggttatatgattgctttaccaaaagaagatcaattcttaatgactaaagaagatatgtttgaacaaatcgttggcttacttggtggacgtacagcagaagaaattatctttggcgttcaatcaacaggggcttcaaatgactttgaacaagcaacagggattgctcgtagcatggtaactgaatatggaatgagcgacaaattaggacctgttcaatatgaaggaaaccatcaagtctttgtcggtcgtgattatggtcaaacaaaagcttactcagaacaagtggcgtttgaaatcgatcaggaagttcgtcgtatcttaatggatgctcatacgaaagcgcatgaaattatcgaagcgcaccgtgaacaacataaactaatcgctgaaaaactattagaatatgaaacattagatgcaaaagcaatcaaatcattatttgaaacaggtaaaatgcctgaaggtgctgacagcgactatcctagtgaaaaagaagcgcaaacattcgaagaagcaaaacgtgctttagaagaaaaagaagcgcaaaaacaagttgaagaaaaacaagactttgaagaagcgaaaaaagaattacatgatgaagcagaagaagtcaaagtagaaagcgaacaaacagaaaaagaagtccaatctgaagagaaaaaagattcagattccaattctgaatatgatcgcaataactacgaagatcgttataaa

SEQ ID NO: 21059 - DNA, 1500 bp, Enterococcus faecalis
gtggcggacgtggcggacgtcgcggctaagcacaaacaaatagggggactggggataacgaatgggttatttctcggttcctcttttattctaaggaagaaagaagggcgaacaatgttttggcagttttataaacgaggaaaagaacaaggattttggcaaccgcatcaaacaatcgtggtcgccgtttctggtggtgtagactccatggcccttttgacgttaatggaacaggtggcagaaaaagaacaattacaattggttgttgcacatgtcaatcatcaattgcgagaagcgtcggcacaggaagcgcaatatctcgctacctattgtcagcagcgagagctaacgtattatgaaacacgttgggaagaccctgaaaagcaacgaaatttagaagcaaaagcgcgcacatttcgttatgaattttttaaagaagtcatggaaattgaaggtgcggcggtcttaatgacggcacatcatctagacgatcaagcggaaacgattttaatgaagctgattcgaggaactaatttttcccattccgcaggcattaaagagagacgtccttttgcgacaggggaattgattcgtccgttactcatttatccaaaagaagaattgtatcaatttgcacagcgccaagcattcgtttattttgaggacgaaacgaaccaaaccaatgaatatttgagaaatcggctccgtaatcaggttttgccgctattaaagcaggaaaatccgcaattcttagatcagattgcttcttttagtaatgaacaacgttttgcccaagaatttattcaagaacaaattgagcctcaattatctgaagccgtagaaccaaccaaacaaggctggcgcattcctttgaagagattattaaaagaaacgcctgcgtaccagcacttctttttaaccgcgtttttccaaaaaacattagtgccattaggggtttcgttaaaccaacgccagatgacacaaattttaaaagttttgaatgatgaacggcaaccgcaaggctcggttatgttagaacagcaatggcaactagctaaaagttatgattggctatgcttagaacaaaaacaggctgcactgcgagaagaagttacacatttattagtacctggtgcggggatttatctatcggaaaccgagtggctaggattaattgcgacagacaaaccgtttcctcttcctgaagagattaatcagtggacgggtcagttgttagcgatcccgttgaccacagccacacctttgaccgttcgtcatcgccaaagtggtgatcggattacattaaaaccagggtttacgaaaaaattaagcagagtttttattgatcaaaaagtgccaaatgaagcgagagagagtgcttgggtcattacggatgagcaagaggaaatcatttgggtaccaaaatttgcaaattcctatttgagtattcctttagaaactgataaaatacactacagactcctttttaagacaaaggag

SEQ ID NO: 21060 - DNA, 261 bp, Enterococcus faecalis
atgcggttagataaatttttaaaagtttctcgcattattaaaagaagaacagttgccaaagaagtcgctgataaaggccggattcaaatcaacggagtcttagccaaatcttctagtactgtgaagattggtgaccttgtcaaaattcaatttgggaacagaattttagaagtagaagtcctgcaactgaatgactctacgaaaaaagaagatgccacaaaaatgtatgaaataaaatcagaaacacgtgtctctgaagaa

SEQ ID NO: 21061 - DNA, 1995 bp, Enterococcus faecalis
atgaaagcgtatatgcaaagaatgggacgttcgttaatgttaccagttgctgtattaccggcggcttctttattagtcggtattgctaactggatcgtgggaacaatcggtgctagtccagccacaacttttctaatgaatggtggtttggctatcttaaacaacttagcattattatttgcggttggtttagcgttaggaatgtcaaaagataaagatggatcggcagcattagctggtttagtcgcttatttagtgccaaaaactgttttagcgcctgcttctatccaagccattaaaggcttcaaggatattgctgaagtaaacccagccttcaacagcatggacaacaatgtctttgtcgggattgtcgctggtttagttgccgcggcaatgtataatcgtttctctggtgtgaaattgccaatggctttatcattctttagtggaaaacgtttagttcctattatgtcagctatttcgatgttagcaatctcagctgtcttattcttcttctggccagttgtttataacggattagttgcatttggtaaaggaatctctagcttaggtttcgtaggagctggcttgtatggtttctttaaccgactattaattccaacaggattacaccatgccttgaattctgttttctggtttgatgttgctggtatcaatgatattgggaactttttagctggtcaacaagcgttagatactggtaaagcaattgtaggacaaacagggatgtaccaagctggtttcttcccagtaatgatgttcggtttaccagcaggtgcttttgctatttatcaatgtgcacgtcctgagaagaaaaaagttacagcttcattaatgttagctgctggttttgcggctttctttacaggcgttactgaacctttagaattctcatttatgttcgttgcttggcctttatatgttttacatgcggtctttacaggtatttctttagcattcgctgcgtttatgcattggacagctggctttgcctttagtgcaggttttgtagacttcttcttaagtttgaaaaacccagtcgcgaatcatccaatgatgttggtggttcaaggacttgtctttgcagcaatttactacttcggtttccgttttgcaatcactaagtttaacttaatgacaccaggacgtgaagaaggcgatggcgaagaaacgccagatgttgcagaaggtgacaacaaatttgcttctctagctcgtcgtatttatgatggtttaggcgctgatgctaatgtaacttctattgataactgtacaactcgtttacgcttaacagtgaaagatacaggcaaagtggatcaagcaaaaattaaagcaactggggttcctggtgtgaaagtcattgatgacaccaatatccaagtgatcgttggtacggaagtacaatttgttgctgacgaaatgcaacgattatataaccaccaagcgccagcaacaccagtcaaagaaacacctgtttctcaatcagttgttgaagaaaaagcaccagtttcaacgaaagaaactgaattatattctgtagcgaatgggaaagttattcctatttctgaagtaccagatgatgttttctcagcaaaaatgatgggtgacggttttgctgtcgtaccaacagacggcgaagtttcaacacccgttgctggtaaaattactagcattttcccaacaaaacatgcgttaggtatccaaacagattcaggcattgaagtattattacacatgggtctagatactgttgagttacaaggtggaccatttacattacatgttgaagaaggccaagttgtaaaacaaggcgataaaattgcaaccattgatttagcggcattagaacaagctggcaaaaaatcagatttaattgttgttttcacaaatcaagatattgttgctcaatacgatttacaaaaagcaggtcaaacgacttcaatgaatgatgtaatcggaaatgttaccgtaaaa

SEQ ID NO: 21062 - DNA, 582 bp, Enterococcus faecalis
atggagggtatgtttgtgaaaaaaatggcagtatattgtggcgccagtctggggaatgagccaatctatcagcaagctgcagtagcgttagccgcttggatgaaagaaaatcactatgatctagtttatggcggtggcaatgttggtctaatgggtacggtggctgacacgcttttagcagaaggtggagaggtaattggtgtcatgcccacttttttaatggaacgagagattgcacataatggcattacaaagatgcatacagtcagtgatatgcatgcgcgtaagaaaaagatgattgaattggcagatgtgtatttagctttacccggtggtcccggcacgctagaagaaattagcgaggtgatctcttggggccgagtcggtgaacatatgaatccttgtattttatacaacgtgaatggttactatgatttactagctgctttttttgataaaatggtagaaactaatttcttaacagaagcggatcgagctaaaattttcatttcagattccttagaagaaattggtgcatttattgattcctatgaaccgccaatgattcgtcaatacaaaaaa

SEQ ID NO: 21063 - DNA, 1353 bp, Enterococcus faecalis
atgcaaaaaaagttagtttggcgtgattatctatacgttggttcaatgttattcggtttgtttttcggtgctggaaatttaattttccctgtacatatgggacaagaagcgggggcttccgtctttttagcaaacttgggcttcttagccactggaattggcttaccttttcttggtgtcattgctatgggtgtttctaaaagttcaggtgtttttgacttagcttctcggattaatcgtcgttatgctcttatttttaccttactattatatttaacgattggtcctttctttgctttaccaaggttagcaactacttcttttgagattggtcttgcaccatttgttccgaaagacttgcaatggctggttcttgctggtttttccgcattatttttcttagctgtttggctcttctctagaaagccaagtaaaatcttagattatgtgggtaaatttttaaatccgttatttttagcattgctaggaattttgattgttttagcctttgtaaaaccattaggtcatgtggccagtgccgctgttggtgaaaattatatttcaagtcctttctttaaaggatttacagaaggttataatacgctggatgctttagcttcattagcttttgggattgttgtcgtttccactttacgaaatatgggcgtcgaaaaaccaggagatatcgctaaaggaatgattaaatcaggtgctttcagtgttgtattgatggggattatctataccttacttgcttatatgggaacaatgagtatcggggcttttccaatcagtgaaaacggcgggattgccttagcccaaattgccaattactatttaggcctaccagggagtattttactggcttttatcgtagttcttgcttgtttaaaaaccggtatcggcttaagcacagccttttctgagacttttgaagaaatgtttccgaaagtttcctatcaaaaattcttggcaattgttgttattttaccagctatttttgcaaatgtcggcttaaccaacatcattcaatttgccgttccagtcttgatgttcctttatccattggcgattactttaatgcttttggtaatcatcagtcctattttcaaacatcgacgggaagtctatcaagcaacgacctatatcacattgattgctgctgttttagatgcattaaatagcgcgcctgcctttatcaaagatacggcgtttgtaacaacgcttttagaaaaagccggccaatacttaccattgttcactattggtatgggctgggtcgttccagcaacggttgcttttctaattagttgggtttgggtcatgatttctaaaaaagatcctattcttgat

SEQ ID NO: 21064 - DNA, 867 bp, Enterococcus faecalis
atggacatccgttttaaacaagtagattttacttaccaacccaatactccttttgagcaacgggcattattcgatattaatttaacgattcaagacggctcttatacagcgattgtcggacatactggcagtggcaaatcaacgctattacaacatttaaatgctttggtgaaaccaactaaaggccaagtgacaattggagagcgtgtaattacgccagaaactgataataagaatttaaaaccaattcgtaaaaaagttgggatcgtttttcaatttccagaagcacaattgtttgaagaaacagtggagcgagacatcgctttcggaccgaaaaactttggtgtttcagacgaagaagcgaaaaaattagctaagaaaatgcttgatttagtcggcttagatgaaaaatacttacaacattctccgtttgagttatcaggtggtcaaatgcgccgtgtcgcaattgctggtgtgctagcgatggaaccagaagtcttagtattagacgaaccgactgctggtttggatcctaagggtcgtaaagaaatgatggagatgtttagtcgtctgcataaggaacataatatgaccatcgttttagtgacacatttgatggatgacgtggctaattacgcagatcacgtgattgttttagaaaaaggacaaatcgtccgagcgggagcaccacaagaagtgtttcaagagacacaatggctgaaagaaaaacaattaggcgtgccaactgcagccgaatttgctgaaaaattagtggcaaaaggcttttcttttgagcaattaccattaacggccgatcaattagccgatcagcttctgaaaaaaatgcaggaagcaggtgaggcaaaa

SEQ ID NO: 21065 - DNA, 837 bp, Enterococcus faecalis
atgcaaccaatcattgaactaaataatatccaatttaattatcaaccagaagatgcttctcccgctttaaaagatgtgtctttttccattcaacaaggcgaatgggtcgctattattggccataatggttctggtaaatcaacgttagccaaaacgatcaatgggctgttactgccagctgctgggactatcaaagttggcggcaaagaattaaatgaagcaaacgtctgggatatccggcgtatggtaggaatggtttttcagaatccagataaccaatttgtcggttcaacagtcgaagacgatgtggcttttggtttagaaaatcaaggtattccgcgtgatgaaatggtcgaacgtgttcacgatgcattagaacgggttcgtatgttagattttgccaagcgagaacctgctcggctatctggcggccaaaaacaacgagtagctatcgctggtgtggttgctttgcgaccagatattattattttagacgaagcgacaagtatgttagatccagaaggtcgtgcagaagtaattgctaccattcaaaagattaaagaagaaagtaatttaacagttatttctattacccacgatattgatgaagcggctaatgcgaatcgtattttagtgatgcgccaaggacaattgacaaacgaaggaacaccagaaaagattttttctgcaggagaagcgcttgttgaaatgggcttggatttaccgtttcctgaaaaattaaaagtagctttgaaagagcgtggcgttgttgtgccaacgaattatttaacagaagaagggatggtggattggttatggacatccgttttaaacaag

SEQ ID NO: 21066 - DNA, 945 bp, Enterococcus faecalis
atgaaaaagattggtttgtttgttctactattacttttcagtttattgtcattagtgataggggtgaaggacattgcactttctcagttgtttcaattagatgcgcagcaacaatttgttttatttaccacccgtgttccccgcacgttgagtttaatcattgctggtagtacgatgagtatttctggattgattatgcagcaactcacacaaaataaatttgtcgctcctagtgtcgctggaacaaccgatagtgcaaggttgggtattttagtcgcaatgttatttttcccaacagctccgtttctctatcgaacggcaattgcttttatttttgcgctaagcgggaccttattattcttagcgctcattcgattattaccaagtaagaatcaagtgatggtccctttggtgggcgtgatgtttggtaacattctaggctcaattgccacattttttgcctatcaataccaattggttcaaaatatgtctgcttggttacaaggaaatttttccacagttatgaaagggaattatgaatggttattcttaatgattcctttgtggtttgttatttatttatttgcttatcatttcactgtcgttggtatgggtgaagcatttgcaaatagtcttggcgtccattaccagcgaattcagtttttaggtttgacgctggttgctttagcaagtgccatcgttttattgatggtggggaatattccgtttttaggggttgtgattcccaatctcgtgtctttacgttatggcgatcatatgaaaaataccttgtggttaactgggatttgcgggagtttgttcttgttaatctgtgatattttagcacgagtattgattgccccctatgaaattcctgtcagcgtggttgtcggaacattagggagcattttgttcattttattattactaagggggcgcaaacaa

SEQ ID NO: 21067 - DNA, 351 bp, Enterococcus faecalis
atgcaaatgtcagaacaaattacatcagctaaagcaactgcaaaaacagttcgcacttcacctcgtaaagcacgtttagtaatcgatcttatcagagggaaaagcgttgcggatgcaatttcaatcttgaaattcacaccgaacaagtctgctggaatcattgaaaaagttttaatgtcagcagttgctaacgcagaaaacaactttgacttagacgttgaaagcttagtcgtatctgaagcatttgttaacgaaggaccaacaatgaaacgtttccgtcctcgtgcaaaaggttcagcttcaccaatcaacaaacgtactagtcacatcacagtagttgtaacagagaaa

SEQ ID NO: 21068 - DNA, 753 bp, Enterococcus faecalis
atgatccagatgagtgatgtatcaaaaaaatatggcgataaatttgtcgtttcagacattgatttacctatttctgaaggcaaattaacggcctttattggaccaaatggcgctgggaaaagcacgctgctagccatgatgagtcgcttaattcccaaagataccggggaaatttatctggacaagcaagaagtaaaaacctggaagcaatcggctttttcacaaaaaattgcccttttaaaacaagccaacggtgtacaacttaaattaactgtgcgagaactggtcaattttggtcgttttccttattccaaaggtcgcttaaaaagcgctgaccacgaaaaagtaacagaagcactggaacaattgggcttaactgaaatggcggaagaatacattgataccctttctgggggccaattacaacgggcgtatattgccatgattttagcccaagataccgattatattttattggatgagcccttaaataacctcgacatgaattatgcggttcaaatgatgcagattcttaaacgcttagtggatgaactaggaaaaacgattctgattgttctacatgatattaattttgccgcaagctatgcagatgaaattgtcgccatgaaaggcggaaagctctatgcgcatggcgcaacagaagaagttattcaaacaagtattttaaatgatctttatgaaatgaatatccggatttgtgaaattgaaggaaaacgcttttgtctttatcac

SEQ ID NO: 21069 - DNA, 1218 bp, Enterococcus faecalis
atggaaaaattagtcgaacgatttttaacttacgtgaaagttaacacccgttcagatgccaacagtcaaaccacaccgacgacggtcggtcaagtggttttagccaaaatgattgaaacagaacttcatgaattaggcttggccgatgtgcattataacgaacaaaacggctttttaacggcacggttgcctggtaaccaacctgcagcgaagagtatcggcttgattgcacatctggatacggcggatttttcagcagaaaacatccgtccccaagtcatcactaattatgatggtcaagatgtcctcttgaatcaagaacaaggcatcgttttatcagttgctgaatttcccaatttaaaagagtatcaaggggaaacgttgattactacagacggaaccacacttttaggagcagatgacaaagcgggaattgtcgagatattagctgctgttgagtattttttggcacatccagaagtagcgcggggggatgtttggctcgccttcggtccagatgaagagattggacgcggggccgatcaatttgatgcgccgaacttcccagtcgcttttgcgtatacgattgacagtggccgcgtggggcatttcgagtatgaaacgtttaacgctgcccaagctgtgataacaattgagggaaccagtgtccatccgggaacggcctatggttcgttagtaaatgccattaaattaggcgaacaacttgatcaatcactaccgcaaaaggaagtgccagaacaaacacgtggaaatgaaggattttatttactcaataaatttacaggaagtattgaaaaagcagaacttgtctatatcattcgggatcatgatcaagaaaactttcaagcgagaaagcaatttttggaaaaacaagtccaacgtttaaatgcgctggcggataaacccagactaacaattactttccaagaccaatactataatatgaaggaaatcatcgaaaaagattggactcctgtagaattggccgtccaagcaatggaaagttgtgacattgaaccaatcatcacaccatttcgtggcgggacagatggttctaagatttctttcatgggcattcccacgcctaatctatttacaggtggcgagaattttcatgggcaatatgaattcattaccgttgaatcaatggccaaagctgttcagacgatcattgccatcattcgcttaaacgctaat

SEQ ID NO: 21070 - DNA, 503 bp, Enterococcus faecalis
tggttttgttagtcgtcgctgtcttgctgattcgacactatgttttctcccctgctgcggtgaacggctcttcaatggaaccaacacttcataacaacgaccgtttatgggtgacctcgattaaaaaaccacagcgctttgatattatcgctttccctagtcctcgcaacggccaacgagtagccaaacgtttaattggtttacctggcgaaacagtcgagtatcgcgatgataccctttatattaatggtgtatcactcagtgaagattacttagcaagtgctaaacgaaatgtctctaaaaatgaaaattatacccaagattttacgctagagaccttagaagccacccaatccctgaccgttccagaaggcatgtattttgtcttgggggataatcgcccgcgctcagacgacagtcgttattttggctttgttaaacaagcgagtgtggaaggtgttttgacttttcgttattatccattagataaaattggctttcca

SEQ ID NO: 21071 - DNA, 801 bp, Enterococcus faecalis
atgaagtctggttcaccattgtttgaacaaattgataaatccatcgacaagaaagtgaatttattctcaaacagcttttcccgctacgctgttcgtgcaatgcttgcttgtctatttttaacgttgggaacagccgttgcttttgcaatcgcaattaaaggagaaggaatttctcatagtttagggaaaatgctttacgccttcatgttcagttggtcacttgtgatgattttatatatgaatgccgaacttggtacctcgaatatgttgtacatgactgttggggtctatcgtaaaaaagtcaacttttccttagctgcaaaaattttatttacctgtatcttattcaatttaattggtggcgtcttgtttggcttcttggtatcacttacggtgccgttccaagatttgccaaaagatagtttcttctttacatcgattgctggaaaattagaaaaaaccaccctacagattttagttgaagctatgttcgccaatattgtagttaatacagccgtattagtgagtatgcgaatgaaagatgacgccggcaaagtcgcggccattattttcattatctttatctttgcgttccttggttttgaacacgtgattgccaacttcccagccttaagtttagcttactttgcttcgaacggcgcaattgaagctttcacagctggtaatgttgttcataatctgttctgggcctttatcggtaactttatcggtggtggcttaattatgggtctcggctatgcctggttagataaagacaacaaaaacttaacgtattttgat

SEQ ID NO: 21072 - DNA, 1008 bp, Enterococcus faecalis
atgaaaggcataagcggattttatagacaccaatggcaagtgttgcttgtctgtctttttttgctactggggacaatgcttctgtcattgatgtttggtgcgacgtcggtttcgattcaaacgattattgattcatttacgcacttcgatgcgaccaatcaagcgcatcaagtcatccaaacggttcggttgccgcggattttaggggccgcttttgtgggggcaagtttagcggtgagtggggcgttagcgcaagggattacacaaaatccattggcagattctggcttgctgggtatcaatgctggggctggcttgggcttggcgcttgtttttgctttcctccctcaggcaagttattggtggcttttagttgtttcttttcttggtgccggcgtgagtgtggcactgatttattatctttctaatcattcaattcgaggagcaagccccatgcgtctgaccttagtgggagctggtattagtgccctttttttatcatttagtcaattcttagccattcagttcaatttgagtcaagagttaacgttttggtttcttggcggtgtcagcgttatttcttgggcacaattaaaaatagtcgtccctatctttctgggcgcatttgcattagcaattctgattagtccgtcggtgactattttacggtttggcgatgatgcaacaattggtttggggcgaaatccgcagcgtattcggttgtttgccagtataacgattttgcttttatcaggattgtctgtggcgctagttggctcggtcagttttgttggtttggtggtgcctcatgtgatgcgaacagtttctggagaaaattaccggcgcttgattccgttctcggcgttaggtggtgcgctcctcgttttggtggcagatttaatcgctcgaatggtgaatccgccttttgaaacaccatttgggattatcacggccttaattggcatcccattctttctttatttatttcgtaaaggagggaaactagga

SEQ ID NO: 21073 - DNA, 798 bp, Enterococcus faecalis
atgaattatttagaggcagaggacttaactacaggatatggtcgtcaagtgattagtgaagcgctgaactgttcatttgaagcgggaactattacaagtattattggaccaaatggttgtggcaaatcgaccttgttaaaaacacttgcacgtattttgccagctgagaaaggcaaggtgttcattaagaaccaagaacttcaacatttttcttcaaaagaagtagcgcaagaactagcgatcttatcacaaacgccagaaaatacaatcgatttatctgtttttgacctcgtctctttcgggcgatatccttatcaatcgggctggaaaagtgtcaccacagaagatcaagagtacatacaatgggcattagaattaacaggcttaactgagttagctagagagtctgtggcaattttatcaggtggacaacggcaacgggtttggattgctatggcgctagtgcaggatacagatattttaattttagatgaaccgaccacctatttggatccagcgcatcagctagaaattttaaatgtgttaaaacgaattaatcaagaacatcagaaaaccatcgtgatgacgattcatgatattaatttagcttctcgtttttctgatcgcgtgattgcgatgaaagagggaaagattatcaatgagggaacaccgcaagaagtgattactgttactggcttagcagatgttttcgctattcaagcagaaattagttatcatagtcagacacagcggccactagtgctttcttatgagttgatggaaatggagctggatgga

SEQ ID NO: 21074 - DNA, 507 bp, Enterococcus faecalis
atgattcggaaagagtatttaaaatacgtcacacctattctcttgtttttcttaatgttaattgatgctcatttaacaaagtcttttgaaacgtggacaagcaatgtttacttcgccagttctcatctgttattacttgcgtttatgtttgccgttcctaatttttctaaacgttatttattaattacttcgttaattttaggctttatttgcgatagctactacattggtattatcgggatttatacagttgcactgacgatttcggttatgttgatgtatacatttaaagaagtaattcaaacaaatttactaactggtttttttgggatcgtcatttttaccacgttgtatgaactgattgcggtactgattcaagtggcctttcatttagcagatgtcagcccgattttatttattacgcgtgtgttgggccctacattgctattgaacatggtgtggtatgttattttatcttatccactgaaaaaactgttttccgtaaaa

SEQ ID NO: 21075 - DNA, 468 bp, Enterococcus faecalis
gtggtaactgtgttatttgtttgtttaggcaatatttgtcgctcgccaatggcagaagcgatttttcgtcagaaagtccaacaagccggtttagaatcgactattcaagtgttttcagcagctactagccactgggaagttggcagtcagccacataagggaaccagaaaaattttggagcaacaaggaatttcctatcaaggaatgcgggcgacacaaatccagccaagtgattttaaaaaatatgactatatcattgggatggatacgaataatgtggccgatttaaaagcattagctcctcaagaagagcaaccgcggattcatttatttatggaagttgtggctggtaaagaaaccatggacgtacctgatccttattatactggagattttgaggaaacttaccgcttagtggaagcaggtacctcagaatggttgaaaaaaataaaagcacagctgaaagat

SEQ ID NO: 21076 - DNA, 732 bp, Enterococcus faecalis
atgcgcccaaaagagaaaaaaagaggaaaaaattggttaatcaacagtttattagttttactatttatcattggcttagccttaatttttaacaatcagatacgtagttgggtggttcaacaaaatagccgctcgtacgccgttagcaagttgaaaccagctgatgtgaagaaaaatatggctcgtgaaacaacgtttgactttgattcagttgagtccttgagcacagaagcggtgatgaaagcccaatttgaaaacaaaaacttacctgtgattggtgccattgcgataccaagtgtcgaaattaatttgcccatttttaaaggattgtccaatgtcgctttattaactggtgccgggaccatgaaagaagatcaagtcatggggaaaaacaattatgccttggctagtcatcgaacggaagatggcgtttccttattttcacctttagaaagaaccaaaaaagacgaactcatttatatcactgatttatctactgtttatacatacaaaataacttctgtagaaaaaatcgaaccaacccgtgttgagttaattgatgacgttcctggtcaaaatatgattaccttaattacctgtggcgatttacaagcaacgacgcgaattgctgttcaaggaacattagcagcaacgacgcctattaaagacgccaacgacgatatgttgaaggctttccaattggagcaaaaaactttagccgattgggtggct

SEQ ID NO: 21077 - DNA, 768 bp, Enterococcus faecalis
atggaagtgacatttatcaaggttctattaatgtttttaattgccttttttgcctacatgcatagctggtttggttcaacgatgtggaaccgtccaattgttgtcgctccgctagtagggttagctttaggagacttagatacgggaattaagcttggcgcaacattagagttggtatttatgggtgcatttcctgttggcgcaagtaatccaccagattttgtttcaggaacgattattgcaacagcttatgtaattatgagtgggcaatcaatttctagtgcggttgttttagctgttccaatcgctacattagtacttttaatcgataatcttcagatgacatttttacttacaggcgctagccatttagctgataaggaagcaaaacgaggcaatattcaaggggtagagcgaattcaactaattgcaggagttggcaataaagttttgttagctctaattgtggcattaggcttttacttaggcgtgccgtttattgaaaaggtattgtcttatgtcccagactttattacgcatggattagatattgcggcaggtattattccagcaattggttttgcgatgttagcaagaatgatggtaacaaaaaagatgattccatttctattattaggctttttattcgctgcttatttaaaaatttcagtagtggggattgctttgtttggcatcgtgattgtcctactatatatgaatatgagtgatggtcaaacaagggaggctgttgtcgatgacaatgaattc

SEQ ID NO: 21078 - DNA, 618 bp, Enterococcus faecalis
atgatttttgcatataacaaagaacacgttggcgatgtcttacttgtcatcgttgcggacgatcaaggggcggaaaaccaagtaaaacgtgtcggcgatgtggcacgtgtaagtttagttgaggcgccagaaacagtggtagcttggaatattttcaatgcttcagcgcttctaggtgacattaatggcaccggccaagtgactttaacagacgaacaaatcgaaaaagtcaatacagcgattaaagatgcgggattttcagaaacccttgaaaaagacgacacccctaaaattgtggttggctttgtcaaatcatgtaaaaaacacccagattcagatcatttatctatcacacaaacagaagtagacaacggcgaaatcttacaaattgtttgtggcgcaccgaacatcaaagcaggacaaaaagtagttgtggccaaaccaggcgcaatgatgcctgatggtttaatgatttggccaggggttttacgtggtgaagaaagttttggaatgatttgttcagcaaaagaattacgtttaccaaatgcaccagctaaaaaaggaatcttagaattgccttttgatgcagaagttggttctgcatttgcggtaggagaa

SEQ ID NO: 21079 - DNA, 1320 bp, Enterococcus faecalis
atgcacttattgggaggttattttatgcaacgaaaagatgttacacctaattcagataaaaaaagtttattgcaaaaatttgggattggtttagctggcggcttacttggtggcgcccttattctaggaggcgcttattctgggattattcccacacccaacggcggaaataatgcggcgacgacgacatccactaatcacggcgacacaaaagtcagcaatgtaagttacaatgtgtctagcgatgtcacaaaagccgtgaaaaaagttcaaaattctgtggtttctgtcattaatatgcaaagtgctagcaacaattcttcggcagatgatccttttgggggattgttcggtgggaatgaaggtactcaagactcttccggcaacaatggtaacgatttagaagcagccagtgaaggtagtggggttatttataagaaagatggtaaaacggcttatgtcgtgacaaataaccacgtcgtagataaagcgcaaggattggaagttgttttatctgatggtaccaaagtgaaaggcgaattagtcggaaccgatgcttacacggatttagccgtgattaaaatttcttccgacaaagttgatcaagtcgctgagtttggaaattctagtaaaatcacagtcggtgagcctgctattgcaattggttcccctctaggctctgattatgctaactctgtcacacaaggaatcatctcttctgtgaatagaaatattaccaataaaaacgagtctggtgaaaccatcaatattaatgctattcaaaccgatgctgccatcaatccaggaaactctggtggtccactaatcaatattgaaggacaagtcattggaattaactcagtaaaaattgtgcaatcaactagtcaagtgagcgttgaagggatgggctttgccattccaagtaatgacgtagtcaacattatcaaccaattagaaaaagatggtaaagtgacgcggccagctctcgggattacgatgtctgatttaacaggtatctcttcacaacaacaagaacaaattttaaaaattccaacttctgtaaaaactggcgtagtggttcgtggtgttgaagcagcgacccctgctgaaaaggctggattggaaaaatacgatgttatcacgaaagttgacggccaagacgtaagctctactacagatttacaaagcgcgctttacaagaaaaaagttggcgacaaaatggaagtgacttattatcgtggttctaaagaaatgaaagcaactatcgatttaaccattgataaatcagctttaacacaacaaaataatcgcagcaatcaa

SEQ ID NO: 21080 - DNA, 477 bp, Enterococcus faecalis
gtgaaaattaaactagtaacagtcggaaaactgaaagaaaaatacctgattcaaggcattaatgaatatctgaaacgtttaaatagctatgccaagatggaaatcattgaagtaccagatgaaaaagccccagaaaaactcagtgacgctgaaatgcttcaagtcaaagaaaaagaaggccaacgtattttggggaaaattaatgacaacgaatacgtctttgttttagccattaatggcaaacaattatctagtgaagaattttcaaaagaaattgaacaattagggattagtggcaaaagtaatctaacctttgtcattggtggctccttaggtctcagtgattcagtccttcagcgaagtaaccaacaaatttcttttggccgcttgacttatccacatcagttaatgcgtttggtattagtggaacaaatttatcgcggttttcggattatgaaaggggaaccgtatcataaa

SEQ ID NO: 21081 - DNA, 1617 bp, Enterococcus faecalis
atgtttaaaaagtacacacaaatgataagggatgaatttaaagggtataatcaaaaaaaaatgaaaaaagatttcttggcaggtttgactgtcgcagccgtcgcgttgccattagcgttagcgtttggggtctctagcggtgctactgcagcagctggcatgatcacggcgattatcgctggaattgtgattgggagcctttcgggtgggttttatcaaatttcaggaccaacaggtgcgatggcagctattttaatgtcaattgcggcagtgcatggcatgcaagggattttgttggccacctttttggcggggattttcttgcttttggcagggattttgcgcttagggagcttgacttcttttattccgtcaccggtcattaccgggtttacttcaggaattgctattattattgcgttggggcagcttgataatttctttggggttcgttcagaaggacacaatttaattgagaaaatcagcagttatcgttcattgggctttgatttaagtataccaacgacggttatgtcgattttagtggtgcttggattagtgttctttccgaaaaagtggaatgcgatgataccagcttcattggtgatgattattttagctactttagcaacagtggtttttcaactgccagtggccactgtagggaaaattccgacaagtatttttagtgatacacgtttggaacttggttcacttcaattaagtgcgtttcaggatattttggtgccttcgattagcattgctatgttaggtatgattgaaagtttgctttgtggcgcttcggctggtcgcatgacagggaaaccattagacagtaatcaggaactagtggcacaaggaattggcaacttaattttgccatttttcggtggcgtgcctgcgacggcagcgattgcccggacgagcgtagtgattaaatctggtgcgcaaacacgtttagcgggtatttttcatgcagtctttttattgttatcgatgttgcttttatcgccagtcatgtctaaaattcccatgcctgcgttagctggtgttttagtggtgacagcgtggcgaatgaatgaatggtcggtgattaaagaattcttccagaaacgtttccacacagctttatgtttattcttcttaacgatggtagcgaccgttatttttgacttgagtttagcgattgttttaggggtcttagcgggttgcctgtttttcattgcgaaaagtgccgtgattacgattaatgtcgaggaagttgattggtcaagaatggggctagtaccgaccgattgtacggaaaattgggtggtagtttatttgagtggcccgttatttttcatgtcttctgaacgattgaaacaaacgttactgcaattggaaacaaaaagtggtgtagtattttcaatgcgaggagttcctagcattgatagtacggcgttagatattttagaagaattttgtctcgcagcagaaggtcgtggacaacaagttcaatttgccgctctgcaaccagaagttgaaaaaatgattcgaaccattcaaggaaatcaagagaaagaataccatttctcagtcgcagaatttttacaaacggtgcatgttgcagaacaa

SEQ ID NO: 21082 - DNA, 450 bp, Enterococcus faecalis
gtgacagatattttaagagaaattggcatgattgcgcgggccttagattcaatcagtaatattgaatttaaggaattatctttaacacgaggacaatatctttatttggtcagggtctgtgaaaatcctgggattatccaagaaaagatcgccgaactgattaaagttgatcgaaccacagcggcgcgggcgattaagcgtttggaagaacaaggctttatttatcgtcaagaagatgcaagtaacaaaaaaattaagcggatttatgccacagaaaaagggaaaaacgtttatccaatcattgtgcgcgaaaatcaacactcgaatcaagttgctttgcaaggcttgtcagaagtggaaatttcacaattggcagattacttagtccggatgcgtaaaaatgtcagcgaagattgggaatttgtcaaaaaagggaacactcgaaattat

SEQ ID NO: 21083 - DNA, 510 bp, Enterococcus faecalis
atgggagaaataaaacaattaacaatagaagatgcaccagcgttacaagaaatcagcattgaaacttatacagatactttcggaccatataataccccagaaaatatgcaagcctatttagtagaagcctacaatttagaaaaattacaaaaggaattggctaatccccactctgacttttattttatctttgtcgataatcaattagctggctacatgaaattaaatcgtgagacggcacaaacggaaccgatggggccagaaaagctcgaggttgagcgattgtatattttgcctgcgtttaaaggaaagaagctggggacacaattattagaactggcggaagagaaagctcgtgaatttggtaaaaaagcactgtggctaggtgtctgggaacacaatgatgcggcgcgggcattttataaaacgattggctaccgttattatagtcaacattcgttttttatgggagacgatgaacagacggattttattttgttaaaggaattg

SEQ ID NO: 21084 - DNA, 1494 bp, Enterococcus faecalis
gtggagaaaaatgtgtctcaagtaacagctcaagaagaaacagcgctgaaagcacgtggctacaatgaggatttgttgccaagtagcccgaaacaacggacgatgggcgcgcgcaatttttttacattatggatgggttcgattcataatatcccgaattatgcagcagtgggcggctttattttcttaggtttatcgccgctgcaagttatgctggcagttgtgttaagctcattcattgtagcaactttcatgaatttgaatggcgtggctggctctaaatatggcattccttttgcgatgcacttacagtctacttacggcagtctcggggcaaaactgccagggttcttaagaggttgtgtggccgcgattgcttggtttggtctgcaaacatttacaggatcgctggctttattaattattctcgggaaattttggccgaactttttagaaattggtggatcattccagttttttggtctcaggctacctgaattaatggcgtttactcttttctggctcttaaatgtggcaataggtttcggtggtagcaaaattttgaaccggtttaccgccattttaagtccgttgatttatgtcgttattattggattaacgatttgggccattcgagctgggggcggtttaacaccaattttgtcctatcaagtttctggtgcgattcgttcagtcaatccactggtggcgtatctgattatttttaactcggttgtggccgtttggtcagcgcctggtgcgagtgtggcggattttactaagaatgcgcgctcgacacgtgctcaggttgtggggcaaacaacaggtttagttgttggttatgggattttcgctttttccagtgtggttattctgttaggtggttcgctgtattttgggattcaagaatggaatattttaaacattattgatcgtttagataatgtggcagtggtggtcttagccatgtcggttttcttattaacgactatttcaacgaatgcaacggggaacatcattccggcaggttatcaattggcggcgctatttcctaaaaaaatgacgtataaaaaaggcgtcatgattgccagtgttatcagctttctcattatgccttggaaactgatggaaaacgccgatagtatttttatttttctgaacgcaattggggctgttttaggaccagtcgctggtgtgatgattgcgaattattattttgttcaaaagcaacaaattgatttaaatgctttatacgtagataaacacaaaaaagaggaagccaatcctttttacggattaaacaagccggcgtatgttgctactattctggcgttggttctttccttaagtggtcaatttattccacaggttaaaatcattgctgatatttcgtggtttgtgggctttgccacaggttttgtgctgtacttagtgttaaaaaaatggacttgggattcaaaaaaagtgaaagaaacagcttatcaggagggaaaa

SEQ ID NO: 21085 - DNA, 1206 bp, Enterococcus faecalis
atgtatcaacaaccaaattttgtacggcgaacaatcatgacgccgggaccagtcgaagcccatccatcggtacttcgtcaaatgggtcaaccaattttagggcaatttgatccagaatttctacagattatggacgaagttcgggaaatgattaaagtaccttttgccacaaagaatcaacaagcctttgccattgatggcacgtcacgttcaggcttggaagcggggttatttgcgttgattgagccaggcgacaaagtgcttgtgcctacgtatggccggtttgcttatttattaggtgaaatttgcgaacgcgcccgggccgaagtcatttatttagaaaaggactggctcgcaccgtttgaacaaacaacggtgattgaagcgattaaagaacatcaaccaaaaattgttgcgatggtccatggcgaaacggcgaatgcacaaatgcaaccactggatcaaattggcgccttttgtcgggaaaatgaaattttctttgtagtagatatggtggcgacttacggcggtgttgaaacaaaggtcgatgattggaagattgatattgcggtagcaggcactcaaaaatgtgtcagcgtaccttcaggcctttctttaattacctacaaccaacgtgtagccgattatctggcgggccgttaccaaaaagagttagggcttggcgcggatgcgcggaatgaacggttcattcaaagtaactacttggatttatcgcaattagaaaaatattggggaccagagcgcttaaatcaccatacagaagcgactacaatgatttatgggctacatgaagggctgcgcttgttacttcaagaaggcatggaaaatgtctatgcacgccatcggaaaaacaatcgtattttagttgaaagtctgcaaaaaatgggcttagaaattttcgggaagttagacacaaaaacaccaacagtcattcctgtggtcattccagaaggaattgatggtgaaaaagtgcggagcttattactggatcattttaaagttgaaattgcctcttccttcggtgatttaaaaggaaaaatttggcgggtcggtaatatgggttacagcagtcgcgaagacaatgtgttgcatttcttaagtgcctttgagactgtattgaaacaccaaggctatcaatttgaaggcggtagcggtagtactcatgcattggctgagtatttaaac

SEQ ID NO: 21086 - DNA, 1164 bp, Enterococcus faecalis
atgaaaaagtcaggccagaagaagcgaaataaaaaagtgtggttcggtattggtgccgcagtggtcgtcgtcggatttatcggagcaaaaacagttttttcttcaaaagaagttgaacctgaatacacaacgtataccattacagaaatggcctcattaaaattagatggtcaagtgagttttctagatactcgggatattttctttgatccttctttaggaaaaattgccgaaataaatgttgaaaatggtaaagaagtcaagaaagatagtccattgttaacgtacaataactcagacatccaagccacagaaacagaacaagcgaatgctgttaatcggaacaatcttcaagttcaacaagcacaagagaacgttaacttagccactcaaaaatacaatgaagcgttaaacaaagttgctgcagccaagcaaaaattaaacaccgcaaaagaggctgaagagaaagaaacactaaatgcggaaattcagcaattgaatgaagccgttagtgctgcgaatagtgaagtcgcccaagctaaccaagcccttcaattagccaacagtgatgccgtcggagcagcaaacacgcttgaacaaacacgtggcaaagtcaacacagtcgttacagcaccaattgatggccaagtcactgttgatgctagtgccatgagtagtaccgacaaaccagtcattaaaattgcaacacaaaagaaaaatattcaaggaaaagtaaccgagtatgattacgataaattacagacaggggaagaagtaacagtgacgaccgttggttcaggtaaatcagcaccaggcaaaattgtttccattgcgcaaaccccaatagctaaaaatgaaggcaatccagtagtgagttatcaatttacagtagaaggtgattttccttgggcagaaggcttgtctactagtatcgctgtgccacaaaagcaaatgattataccgacagcagcaatccaaaaagaaggccaaaaagaatttgtctatgtttacaaagcgggcaaagcgaaaaaaacaccgattgaaacagaaacaaatttaggtcgtaaagttgtcaaaagtggcttgaattggaaagaccaagtgattgccaatcccaataaagaattaaaagataatcaagatgttcaggtagctgccaatgat

SEQ ID NO: 21087 - DNA, 1413 bp, Enterococcus faecalis
atgaagaaaagagctttgctaggggttaccttattaacattcacaacattagcgggttgtacaaatttatctgaacagaaaagcggcgaaaaacaaacagaggttgctgaagcgaaggcaactgaatctgaaaaagcatcagtaaaaaatgttatttttatgattggagatggcatggggaatccgtatacaacgggctatcgctatttcaaagccaatcactcagacaagcgtgttccccaaacagcttttgatacctatttggtcggacagcaagccacttatccagaagatgaagaagagaatgtcaccgattcagcttccgcagcgacagcgatggctgccggagtgaaaacctataataatgctattgcactcgataatgacaagtccaaaacagaaacagtgctcgaacgtgcgaaaaaagtggggaaatcaacgggtcttgtagcaacatctgaaataacacatgcaacccctgctgcatatggcgcacataatgtttcacgcaaaaatatggcagaaatcgccgatgactattttgatgatcaaatcgacggacaacacaaagtcgatgtgttacttggcggcggctccgaattatttgcccggaaagatcgtgatttagtcaaagaattttcccaagcgggttatggtcatgtcacagacaaaaagtcgttaaatgagaaccaagacgacaaaattttaggcttgtttgcaccaggcgggctacctaaaatgattgaccgaacggaagaagtcccttcattagctgatatgacagaagcggctcttcaacggttagataaaaatgaaaaaggtttctttttaatggttgaaggtagtcaaattgattgggccgggcatagcaatgatattgttggcgcgatgagcgaaatgcaagacttcgaagcggcgtttgaaaaggccatcgattttgccaaaaaagatggtgaaacattggtggttacaactgcagatcattcaacagggggcttgtctttaggcaaaggagatcaatacaactggttgacggagcctttacatgcggcaaaacgcacgcctgatttcatggcagaagaaattattaaaaatggtaatgtggaaaaaacagtgactgagtatattgattttcaattaagtgaggctgaattgaaagcagtgaaaacagcgtcggagtcaaaagatgttgaaaaaatcgctcaggcattaagaaagatttttgatgaacgttcgaatactggttggactactggcggacacacaggagaagatgtaaatgtctatgcttatggcccacaagcagaagctttttcaggacaaattgataatacagaccaagcgaagattatttttggcttagtagatggcaccgggcaaaaagctgagattaaagataaaggtattggcaaa

SEQ ID NO: 21088 - DNA, 1908 bp, Enterococcus faecalis
ttagtgacgcaactttcgacaataggcggagtagttcaacagaataccgtcagcattccaaacctttccgcaaatgaatggggaaaacaactttttcaacaacgtcaagtgatctatagcgaaacagaaagacaagcacttatttttttgctcacttattcagaaatcgaagaactatcggtgtatcattatcaaaattttttagacgtttcgaaaggcactattttagcggacatcaaaaaagtacgacaccaactagcaactgaaaacattgctttatcctacgaacgaaaacgagggttttacctagaaggagatgaatttcggattcgtcgtttcgggaaaaattggcttgcccgcctcttacaacaaaagtcgggcaccttcgctttattttgctggctcagtcagcatcaaatgagccaatacgcaaaaatacgtgacggcattcaattagccgtccaggaagcacagcttcaactggtacccagcagattggatgaaattagttactttcttgctttttctcaaaaaagattaggcaaatatggaacagtcgtctggcctgagaaccagttaattcagtccttacgcgcttatcccgtcagtcatcgtattttaagtgatttagttgggccagtggcgaatgtagaaactgagagtctttttttcacgatttgtttaatgacagccttgcaaggagaattgcgagatacgaagttagagtttttattagatatttctggtgaaattattcggaaaatggaattgttggccgttgttcaatttgaacagcctcgtgaattgctcatgaatgtgtattatcatctggttcctgcctattttcggattagctatggcttttacttgccgaatgttttaatcaaggatattcgacaatcgtatcggtcgctttatcatctttgtgaacaagcgttagctcctttagaaaaattaacgaaacggtcaatcccgtcagaggaaatcggtttttttaccatattatttggtggagaaattttcgggcaaaaaaatgaacagcggcaagaaaagctaaaagcgctaattgtttgtcccagtggtatcagttcttcgttgattttgcaatcggaattgcgtcggctatttccaatgattgaatttaaagaaacgaatgcggtgagggaaatagagaatgtatctgaaaaaagctatgacatcattttctcaacggtccctattgaaacagccaaaaaggtttatcttaccaagcccattatgagctctttggagaaaaatcaattgatgcaccaagttcaatcagattggctattgccaggtatttccatgccagatgttaaagatattttagatgcgttaaaaccttatatttccttaaaaaaaggagtcacagaagcgcagttatatcgtgttttacatcgtaaaatgaacaaaattttagaaaaagaggaggatctgcgtccaatgttatcggaattattaacaacagaaacagtccaagtcctgcctgaagttgcagactggcgagcgggaatcacagaagctgccaagccgttattaaaaaatggcagtattacggaaaagtacattgatgcaatgattcaaaaagtcgaatcgtttgggccatttatccatatctgtccagacgtagcattgcctcacgcgcgaccagaagatggcgttaatcagttaggcatgtcattactaaaaatccaaaaaagtgtcgatttattagaagatcctaagcatgaaattcacctttttatttgtttagctgcttcagataacgaaacacatttacgggccttatctagtctgacaaaaattctatcaaaaaaagaatcattacatcgcttagtggcggctgaaaccgtcccagaaatactatcaattatccaagaaggagag

SEQ ID NO: 21089 - DNA, 1365 bp, Enterococcus faecalis
atggaaactttattgaatttatttgtttcaattgttagccagccagcgattctggtttcattaattgctttgttgggattagttttacagaaaaagaaattttctgatgttgttcaaggaacgttgaaaacattcgtcggctttttagttttaattggtggcgcagggctattagcgaactcgttaacgccctttgcggagatgttccaaaccgcgttaaatacacaaggcgtggttcctagtaatgaagcggttgtagcgattgccttgcaacaatatgggacaccaactgctctgattatgttggtgggcatggttgttaatattctgttggcgcgttttacacgttttaaatatatctttttgacaggtcaagcgatgatgtacgtttcgtgtttgacagccgttattttagtgggggccggttttagcgttagtttgccaatgattcttttaggtggtttatttgaaggaactttattaacagtgacacctgctctttgtcagccctttatgaaacaaattactggaaatgataaagtagcaatggggcatacagggaatattggttatgcggcaagtggctttattggaaaagtctttgggaataaagaaaagtcaacggaagatattaaaattcctaaaagttttggttttttaagagactcaaccatctcaattatgattttgatgtcgattgtctatgtgattttggctttgctggctgggacaggctatgtcgagcatgagttaagcaatggcgaaaatgcgattatcttttcattaattcaagcaggaacctttacggctggtttcgtagtggttttacagggtgtgcggatggttttaggagaaattgtgccagctttccaaggaattgctaaaaaattagtgcctaattctaaaccagcacttgatgttcccattatctttccttatgcgccaaatgctgtcttgattgggttctttgtgagctttattgtgggaactatttcaatgttagcgatggttggtctgaataccaccgtgattataccaggcgttgtcgggcactttttctgtggtgccgcggcaggtgtttttggaaattccacagggggaagtcggggagcgattttaggggctgcgtttaatggcttattaattagttggttaccgttatttattttaccagtcttgggtgatttacagttagcatcctcaacgtttgcggatacagattatttaatcccaggcctatttttaggcaaattaggtgaggcaggtccgagtcttttagtaggaggaatcattgcttttgtagtggttgttcttttggctagcgctgttttgactatgcgggagaaaaaagtcgccgaagaaaac

SEQ ID NO: 21090 - DNA, 393 bp, Enterococcus faecalis
atgaaaaaaacaaaagttattaattcagatatttcccgcgtcatcgcacaaatgggtcattttgataaattaagtattggtgatgcaggcatgccagtgcctcggactacagaaaaaattgatttagcagttaccaatggcgtccctagttttatggaagttttaaacaatgtccttgaggaattggcagttcaacgaatttatttagcagaagaaattaaaacagaaaatcctgacatgttggcagcaattgaaactcgtttaccagaaactcccatcagttttattcctcatacagaaatgaaacaagaattaaacaactgccatgcatttattcggacaggggaaatgactccttacgcaaatattttattagaaagtaacgttgtcttt

SEQ ID NO: 21091 - DNA, 1755 bp, Enterococcus faecalis
atgaaaaaaacgaaaatcgtatgtacgattggaccagctagtgaatccgttgatatgctagtaaacttaattaatgcaggtatgaatgtttgccgtttgaacttttcacatggtgactacgaagagcatggtgctcgtattaaaaacattcgtgaagctgtaaaaattacagggaaacgcgtagcgatcttactagatacaaaaggtcctgaaatccgcacaaatgacatggaaaatggcgcaatcacaatgaaaattggtgactcagtacgtatttctatgacagaagttttaggaacaaatgaaaaattctcaatcacttatccagaattaatcaatgatgtaaacgtaggttcacacattcttttagatgatggtttaatcgatttagaagtaactgatatcgaccgtgatgcaaacgaaatcgtaacagttgttaaaaacgaaggcgtcttgaaaaacaaaaaaggcgttaacgtaccaggcgtttctgtaaacttaccagggatcactgaaaaagatgctaacgatatccgtttcggaattggtcaaggaattgactttatcgcagctagcttcgttcgtcgtgcttctgacgttttagaaatcactaaaattttagaagaagaaaacgcaacacacatccaaatcattcctaaaatcgaaaaccaagaaggtatcgataatatcgatgaaatcttaaaagtttctgatggtttaatggttgctcgtggtgacatgggtgttgaaattccaacagaagatgttccagttgtccaaaaagctttaattaaaaaatgtaatgctttaggtaaaccagttatcactgcaacacaaatgttagattcaatgcaacgtaacccacgtccaacacgtgcggaagcaaatgacgtagcaaacgcaatctacgatggaacagatgcagtaatgttatcaggcgaaactgcagcaggggattacccattagaagctgttcaaacaatggctcgtattgcagttcgtacagaagaaacattagttaaccaagattcattcgcattgaaattatatagcaaaacagatatgactgaagcaatcggacaatctgttggccatacagcacgtaacttgggtatccaaacaatcgttgcggcaacagaatcaggccatacagcacgtatgatctctaaataccgtccaaaagcacatatcgttgcaattacgttctcagaacaaaaagcacgtagcttgtcattatcatggggtgtttacgcaacagttgctgacaaaccatcaagcacagatgaaatgtttaatttagcttcaaaagtatcacaagaagaaggttatgcttcagaaggtgatttaatcattatcactgctggtgttccagttggcgaaaaagggacaacaaacttaatgaaaattcaaatgatcggttctaaattagttcaaggtcaaggtgtcggcgaagaagcaattattgcaaaagccgttgtggcagcaactgctgaagaagcagttgctaaagcgactgaaggagctattttagttacaaaaacaacagataaagaatacatgccagcaattgaaaaagcatcagcattagttgttgaagaaggtggtttaacttctcatgcagctgttgtagcgattgcgcaaaatattccagttatcgtaggtgctgcagatgcaacatcattaattaataatgacgaagtgattactgttgatcctcgtcgtggtattgtttaccgcggagcaacaacagctatc

SEQ ID NO: 21092 - DNA, 960 bp, Enterococcus faecalis
atgaaacgcattggtattttaaccagcgggggagatgcccctggaatgaacgctgcaattcgtgcagtcgtacgcaaaagtatttttgatggaatcgaagtttacggtattaactatggatttgccggtttagtcgcaggcgacatccgtcgtttagatgttgctgacgttggcgataagattcaacgtggtggaacattcttgtattctgctcgttatcctgaatttgctactgaagaagggcaattaaaaggaatcgaacaattgaaaaaattcggtattgaaggcttagttgttattggtggagacggttcttatcatggcgcaatggctttgacaaaacgtggtttccccgctgttggaattcctggaacgattgataatgatattcctggaacagatttcacaatcggttttgatacagcgattaacactgttttggaatcaattgaccgaattcgtgatacagcgacttctcatgttcgtacattcgttatcgaagtaatgggacgtaacgctggtgatatcgcattgtggtcaggcgtggcaggcggagcagatgaaatcattattcctgaacatgattttgatatgaaaaacgttgccaaacgtattcaagaaggccgcgaccgcgggaaaaaacattgcttaatcattttagcagaaggcgtaatgggcggaaatgaatttgctgataaactttctgaatacggtgatttccatacgcgtgtatcaattttaggacacgtggttcgtgggggctcgccaagtgctcgtgaccgtgtattagcaagtaaatttgggtcatatgctgttgaacttctaaaagaaggcaaaggcggtttatgtatcggtatgttagataaccaagtagttgcagctgatattattgacacgttagaaaacaataaacataaaccagatttatctctttatgagttaaatcatgaaatttctttt

SEQ ID NO: 21093 - DNA, 801 bp, Enterococcus faecalis
ttgaaaaaattaattgctattgatttagacggcacaacattaaatgcacagtctttaatcagtccaaaaaccgaacaaacactaaaaaaagcgattgacaacggtcattacgtcagtattgccactggacgtccctatagaatgagtcatcaattttaccaacaacttggcctaacgacccctatggttaactttaacggtgctttagtccacattccagagaaaaaatgggacttggaaagcgaagccaatattgagcgtgacctagtctttgacattttggcacagaaaaaagaattacaattagattttgttgctgctgaaaacaaagaaacattttatatcgatacgttagatgggttcgatccgaaattttttgcttccaaagcaaccttagataatttacttactgctaaaaatttacgaacaaatcctacctcaatgatggttcggaccacaccaaaccaagctgaaaaagttgctgatacattgacaaaacaatatggtgattatattgatgtccgcacttggggcggtccaatgcctattttagaaatggtcgcaaaaggaattcaaaaggcccatggcgttgatcaagtggcgaactttttatctgtcaaaccagctgatatcattgcttttggcgatgaacataatgacgaagaaatgttaagttatgctggttggggtgttgctatgaacaatgccacggataaaattaaatccgtagccaacgatgtcactgaaaaaacaaatgatcaagatggtttagcagattacttagaaaattatttagatcta

SEQ ID NO: 21094 - DNA, 810 bp, Enterococcus faecalis
atgaaaaaagagatcattgtttatactatttccgattcacttggagaaacatcacaaaaattgttagctgcagcaagcgcacaatatccagatatttcttttcttaatcgatacaatttttcttttgtcacaacagaagaagaattattagagattttaaaagatgccttaaaagataaagccttagttgtcagtacattagtcagtaaacaactaatcacagcggcgaaagaatttagtgaacgaacagggttgttatatttagatttaatggcgccattttttgaattaattcaagcgaaagccggagtagatcctattgaagagcctggacgacgccaccaactagatcgtgcctattttgataaaatctcagcgattgaatttgctgtaaaatatgatgatggcaaaaatcctcaagggtttcttgattctgatatattgttgttaggcgtttcgcggacctcaaagacgccagtcagtatgtatttagcgaatcaaggctaccgcgtttctaacttaccattaattccagaagttccattgccgccaattttggaagaaatggatccacaaaaaatgattggtttagtttgttcgccagaaacattaggacagattcgtagcagtcggttggcttccttaggtttaggtaatgagaccagttataccaatgttgaacggattgaacaagaattagcttatgccgaagagatttttgcgaagtatggcatcccagtgattgatgtaaccgcaaaatctgtcgaagaaacagcctttttaattaaagaaaaactagatgaaagaaat

SEQ ID NO: 21095 - DNA, 318 bp, Enterococcus faecalis
atggacggacaacagaacttagaagcaatcatgggtttaatcatgtatggcggaaatgctaaaagcgatgcaatggaagcgattgccgcagcaaaatcgggggattttgaattagcagacaaaaaaattgcagatgcagaagaatcacttgtacatgcacatcattcgcaaacaggaatgttaacagaagaagcaaaaggcaataacatgcaagtaacattgttaacagtgcacagtcaagatcatttaatgactgcgattgcatttacagatttagcaaaagaaattatcgatctttatcgccgtattgataacgag

SEQ ID NO: 21096 - DNA, 1326 bp, Enterococcus faecalis
atggagaaaaagcaattaaaaagagagataacaacgtttggtgcgttatccacggtaatgggtacggtgattggcgctggtgttttctttaaagctgcgagtgtcgttggacacgcacagtcagctagtttagctatctttgcttgggtgttaggtggtgccttaaccatttgtgcaggattaaccagcgccgaacttgctacagcaatccctgaaacaggtggcgcagtgaagtatattgaatatacatatggtaaattagctggttttcttttagggtgggcacaaagtatcatttattatcctgccaacatttcggcgttatccattatttttagtacacaactaatcaatttgtttcatctatcggcaaatttattgattccaattgccattcttgcgggaaccagtatcacgataattaatttattaggaacaaaaattgcttctttggtccaatcaacgacattggtagtaaaactgattccaattgccttgatttctttagtaggattatttactcccggacaagtagctgtttcactttttcctgttgaaacaacagcgaatactggctttttagttgcttttagtggcgccttagtcgccaccatgtttgcttatgatggctggctgggtgtgggtaacgtggctggtgaaatgaagcgaccagaaagagacttgcctaaagccattatttttggtttgttattgattactttaatttatgccttaattaattttgtgtttctaaaaacattaccaattgagcaaatcgctgggaatttgaatgcagcttcggatgcttctgtggctatttttggaccaattggcggcaaaatcgtaactattgggattttaatctctgtatatggtgcgttaaacggctacacaatgacagggattcggattccttatgccttagccttagataatctgatgccttttagtcgtcagtttcaaaagttgtctaaacgctttgttgttccttacgttgctggaattttccagttagctgtagccattatcatgatgtttttcggaaccttcgatttattgacggatatgttagtttttgttatgtggctgtttaatctattaattttcttagctgtttttattttaagaaaacgagaacctgaattaaaacgaccgtataaagttcctggctatccaattattccaattatcgcaagtctaggtggtatcttcatcttggttacaacgagtattacacagcctattctagcattgattggtatagggattacgcttctaggaattccagtttatttagttaataaacaaaaaacgaagccaaaaacg

SEQ ID NO: 21097 - DNA, 966 bp, Enterococcus faecalis
atgactgaaaatgtaaaaaaattggctcatcaattaattgaatggggcgtccttcatggggcgcaagacgtttattttttacccaatgataccgaaatagccatctcttttcggacagggatgcaacggacactttacacacaagtttccgcagaaataggcgaaaagttaattttccactttaaatttataggcggcatggatgtcggagaaagacgaaaagcacaattaggcgcgacaacttatctaattggcgagacgaagcaacgcttgcgtttatcatctgtgggagattttcagaatcgagagagcttggtaattcgttttttgcaccgatttggtgaacaagctgaacattttttctttccccaccagctgaatgaaattgaagcatcttgtcagaaacgaggactttatttattcagtgggccagttggttctgggaaaacaacaaccatgtatcgtgtggctaaacaaagaagtggcgaacaacaagtgatagcgattgaggatcctgttgaaattgaggaaaagcagtttttacagttgcaaacaaatgaaaaaattcagttaacgtacgaagccttgataaaagtttgcttacgccatcatcctgatattttgattattggtgaaattcgtgatggcgagacggctcaagcagttattcgagccgccttaacgggtcatactatttttgcgacaattcacgcccgtaacttattgggggtgcaacggcgtttgatagaattaggtggcccagagcatgaattggctgaatgcttgcaaggtatcatttatcaacagattttgacaaccacgattaataaggaacaagtagcgggaattctttatgattatttcttctttaaggaagccgttataaagagtagttggcaaaagaatctaagaaaggcgtgggcgtatgggtttattacagaaaaaacgtattttcaagccatcgaa

SEQ ID NO: 21098 - DNA, 996 bp, Enterococcus faecalis
atgatacatttaggcgtaattggtaccaattggattagtcatcaatttgttgcagcagctttagaaacgggtgcgtatgatttaacggctgtttattctcggaaactagcaacggcacaagaatttggttctcgctatggggatgtggaatatgcaattgatttagagacgttttttggtattgcacatatggatacggtttatattgcctcaccaaattcattacattttgaacaagcgaaacaagcaattttagcgaaaaaaaatgtaattgttgaaaaaccagctttttcaacgcctgatgagatggcagaaattattgaattagcgaataaaaatcgtgtgtatttctttgaagcggcccgtaatattcatgagcaaagtttccaaaaaattgctgaattattgccattaaaaaaccaaattttaggtgcgaattttacgtatatgaaatattcttctcgctatgatcaagtattagaaggcaaagagccaaatattttttctcctcatttttctgggggagccttagcggatttaggcgtttatttagtttatgcagccttaggctggtttggcgtaccaaacgaaagccattattttgctagtaaaattgcgacaggtgtcgatggcttaggaacaattattttacgatatgatcagtttgacgtgacgttaaacactgggaaaattagtgattcttttgcgccatccgaaatttactttgaaaacgggaccttgattttagatagtgtcaatgctatttcttcggctgagtaccatgatcgcgcacatgaagaacgtgatgtcttagatattcaagtagccgataatccaatgattgaagaagcccgtgattttgcagcagttttaaataacccaacagataagtattggggcaccaagtatgaagaatgggttgagcttgctcgaaatgtcaataaagtagtcactgatttacgtcatagtgccggcattatttttgatgctgataaa

SEQ ID NO: 21099 - DNA, 1521 bp, Enterococcus faecalis
atgaatgaaaaagtagcattatttactattttcggggggacaggtgatcttgccaaacgtaaattgtatccttccctgttccgcttatataaaaaaggattattagctgagcgttttgcggtgattggtaccgcacgtcgggaatggacagacgaatactatcgtgaaatcgtccgtgaaaccattcaagacttaaatcccacggccgaagaggcaactgaattttctagtcatttctattaccaatcacataatgtgaatgatacggaacattataataccttaaaagaattatctgatcgcctaaatgaacaataccacttagaaggcaatcatgtttactatttagctatggcccctcaattctttggaaccattgttaatcacttgaaatcacaacatattatttcggaagaaggctttgatcgtctaattatcgaaaagccatttggttctgattatgaatctgcctacgaattaaatgaagaaattcgtgctgcatttcctgaacaagatattttccgaattgaccattacttaggcaaagaaatgatccaaaatatttcagccattcgttttgccaataatatttttgaatcacaatggaacaatcgttacattgataatgtccaaatcaccttcgctgaaagcttaggtgtcgaggatcgtggcggctattatgaccacagtggcgcactaaaagatatggttcaaaatcatattttacaagtcgttgcattgctttctatggagcctcctgttgccttttctgaaaaagaaattcggactgaaaaagtaaaagctttacgtgccatccgcctttattctgaagaagaagcccttcaaaatttcgtgcgtggacaatacggcgaaggtcagctagctgatcaaacatttgcagcctatcgtgatgaaccaaatgtggcagaaacttcatccactgaaacttttgttgctggtaaatttttaattgataatttccgttggtctggcgtccctttctatgttcgcacaggtaaacgattaactgaaaaaggcacacgcattaacatcgtctttaaacaagtacctattaatgtcttcaaagatgatacgtgtgaagaatgcgataaaaccgatttaccaccgaatgttttaactatctatatccaaccaactgaaggattttcattaaccttaaatggaaaagaaatcggtcaagggttcaatacaactccagtgaaacttgatttccgtcaaagtgctgaaatgactgaaaatagtccagaagcatacgaaaaacttctattagactgcctaaatggcgatagtacaaacttctctcattgggacgaagttgcccaatcttggcgcattgttgacattattcgacatgcttgggataaaacagacgtttctttccctaattatgccgctggcacaatgggcccgcaagctgccttcgacttattagaaaaagatggctttacttgggaatggcaaccagataactggtaccgtgaccgcggtcaacttgatcaa

SEQ ID NO: 21100 - DNA, 699 bp, Enterococcus faecalis
atggcattaactccattagatattcaaaacaaagacttctcaacaaaaatgagaggctataaccaagacgatgtagatgactttttagatcaagtcacacgtgattatgaagatgcattacaaaaaaatcgtgaacttgagaaatcattaaaacacgcagaagaaaaattacaatacttcaatgaattgaaagatgcattgaatcaatcaattattgttgcacaagataccgctgataaagtgaaatcaagtgccaataaagaatcagaaatgattatcacttcggcagataaccaagccaaagaaaccttggtagaagctgaacgtaaatcaaatgcaatgattgcagatgctgaagcgaaatcaacacaaatcttagcagaagcaattgaacgtgcccgtcaattagctggggaaacagaagacttgaagaagaaaacacgtgtcttccatcaacgcttaagcttaatgcttgaaactcaattagagcaagtaaagagtgaagagtgggaagagattttaaagcctttttctagttatgtcggagacaaacatacagcagttaaggaaattcttgatgaacaagaccttgacaacgaaaatgaaactgttgtaaactctgaagagaacacagatgctgtagtagaaaaaaagcctgtaattgaagtcactgaagaaacaattgaagaagaatcaaaa

SEQ ID NO: 21101 - DNA, 1122 bp, Enterococcus faecalis
gtgtggaagattagtaacgagaacgatatattcaaaaaaagaaaaccattacctccaaaaaaatcggaagagtctcaacctgaactgacaccttggcaaaaacaaaaccaagaatatttgaagaagcaagcggaagaagctgcttcaaaaggtgaaaacgaacaagcagaagtcaccatcactttacaagaacaaagtcaagaagagcctcaacaacatcttccacaagaaacagtggaagaagaggagcattttgcagatcgtttaccgaacgttaagaaaacacggaacaagcgcttatataggcgtttagcctttattttaacttgtttagggacagccattttagtggcattgtattttgtttcgcctcttagtcgattgagtgaagtaacagtttcaggtaacaaaagtgtggagagccaagcgattattcagcagtcaaaacttgaaacgggcagtggcttatgggagcagtattcaaatagaaattatttttctgcaaatattcagaaaaagtttccaattataaaaaaggcgaacattaagttaaatggtattaattcatttaaaattgatattcaagagtatcaaattgtcgctcttgctgcgactaaaggcggctatcatccgattttagagaatggtaaaactttggcggaaaccaccaaagctgctgaaagtggcaaaccaatttttgagaatttcaaagaggataaattaatccctgaattaatggcctcttacaacaaattacctcaagaaattaaacaaggaatttcagaaattaaatatgcaccatccaaaaccaataaagacttgattaatgtctatatgaatgatggaaatcgagtgattgttaatatttctgatttaagtgaaaaaatggcttattattcacaagtagccgagcaaatggacaaacctggaatcgttgatatggaagtcggcattttttcttatccgtatgaaaaagaaagtgaagaaacgggtagtgaagtttccgaagattcagcggttgaaaatcaagaagttgtggacccaaatgcaggcgtagcaacggatgaagcgaataacggtacgccgacaaatggagaaaatcaagaagtgcaacaagcagaa

SEQ ID NO: 21102 - DNA, 966 bp, Enterococcus faecalis
atgaggcaaatgatgactgaagaatttcgccattacaccgttcttttaaaagaaacagtggatggattacaagtgaagccggatggcgtatacgtagattgcacactcggtggtgccggacatagtgaatacttactgacacaattgaatgagcacggtcatttatatgcctttgatcaagaccaaaaagcgttggcacatgctaagactcgtttgcagaaatatgtagacaaaggtcaagtgaccttcatcaaatcaaattttagaaatattaaagaagaattggcagaacacggggtgttccatgttgatgggattctatacgatttaggtgtttcttcaccacaattagatgaagcagaacgtggttttagctatcatcaagacgcgcccttagatatgcgcatggatcaagacgcacccttgacggctcgcgaagtggtgaatacgtatagctatagtgagttagtaaaaattttctttcgttatggggaagagaaattttcgaaacagattgctagagaaattgaacgtgttcgtgaaaagcaaccaattgaaacaacaggtgaactcgttgagattattaagacggcgattccagctccagcaagacgcaaaggtggacatcctgcaaaacgaattttccaagcaattcgcattgccgttaatgatgaattaggggcagttgaagagtcgctagaacaagcaattgatttgctagcgaaaaatggcagaatcagtgtgattacgttccattcgttagaagatcgtattgttaaaacaatgtttaaagaatacagtacggtacaagatttgccaccaggcattccagtggtaccagaagaatttcaaccagaattaaaagtaattaccagaaaaccaattttaccaagtgacagtgagttatctgagaataatcgttcacgaagtgcgaagttacgcattgccgaaaaaataaaatctaga

SEQ ID NO: 21103 - DNA, 429 bp, Enterococcus faecalis
atgcttatgggtgaataccaacataatatcgatgccaaaggccgcctaatcgttccatcaaagtttcgtgaggaacttggtgaaaaatttgtggtaacgagagggatggatggctgtttatttggttatcctttaaatgaatggtcacaacttgaagcaaaacttcaagaaatgcccttagctaagaaagatgcacgtacctttgtacgattcttttattccgctgcaacagaatgtgagattgataagcaaggtcgtatcaatattccggcgaatttacgaacacatgccagtttagaaaaaggctgtgttgttattggcgtctctaaccgaattgaaatttggagtgacgaacgttggcatgcattctctgatgaagctgaagaaaactttgatgaattagcagaaacaatgattgattttggattt

SEQ ID NO: 21104 - DNA, 747 bp, Enterococcus faecalis
atggaacaagcaatccagttattgcaacagtcattggatacttcttttttagatgcgtatattgaaaatggtgaaaatattttagatgattttcaagtacgagtacttgacggagtacctaatccagagacagtgaaacaattagaaacgctgtatcatacgattaaaaaaattgatttagctcctgaagatgtgcgacgcttgtcccaattacttttgctaaaaggaacgagaaaagagcagcttcaagcaaatcatcaattgacgccagacggtattggctttttgtttgtttatttagtagaacaattaacaaataaatcagagccattaaaaattttagatcctgcttcaggaatgggaaatttactgttaacggttctgctgaaccttgaaacagctggttacaaagtttctggttatggtgtggatatcgatgaaacacttttggcagtatcttctgtgaacaatgcttggtcacaagccaatattcagttgttccatcaagacggattgcaagatttgttattggatccagttgatttagcattaagtgacttgccgattggctattatccaaatgatgagcgagcaaagggatttgctgctgctgcggaggaaggccatagttatgcgcatcatttattaatggaacaagccatgaaatacgtgaagccagcagggtttggcttattcttaatcccgaccaatattttagagactgagcaaagtgaattctttaaaaat

SEQ ID NO: 21105 - DNA, 879 bp, Enterococcus faecalis
atgacgaattttagtcaacagcatttaccgttggttgaaaaagtcatggtcgattttatcgcagaatatactgaaaatgagcgtttgaaagaagcaatgctctactcaatacacgcaggtggcaaacgattacgcccgctattagtgttaacaacagtggccgcttttcaaaaagagatggaaacacaagactatcaagtggctgcctctttagagatgattcatacgtattcattaattcatgatgatttaccagcaatggacgatgatgatttacgtcgtggcaaaccaaccaatcataaagtgtttggtgaagcgactgccattttagcaggggacggcttattaacaggtgcatttcagttgctttctttgagtcaattaggcttaagtgaaaaagttttactgatgcaacaactggcaaaggcagcggggaatcaaggcatggtttccggccaaatgggtgatattgaaggagaaaaagtcagcttgactttagaagagttagcggctgttcatgaaaagaaaaccggagcgctaattgaattcgccttaattgctgggggcgtattagccaatcaaacagaagaagtcattggtttactgacacagtttgcgcatcactatggcttggcttttcaaattcgtgatgacttattagatgccacaagtacagaagcagatttaggtaaaaaagtaggccgagatgaagcgttgaataaaagtacgtatccagctcttctagggattgctggcgcgaaagatgcgctaacacatcaattagcagaaggtagcgctgttttagaaaaaatcaaagcaaatgttcccaacttttcagaagaacatttagcaaacttgttaactcagttacaattgaga

SEQ ID NO: 21106 - DNA, 1275 bp, Enterococcus faecalis
atgcaacaacctttagcctatcgaatgcgacctcgtcacttagacgaagtagttggtcaacaacatttagtcggccctggtaaaattattcgtcggatggtcgaagccaaaatgctttcatcgatgattctttatgggccgcctggcactggaaaaaccagtattgccagcgcaatcgctggttcaacaaattatgcctttcgcatgttgaacgcggccacagacacaaaaaaagatttacaaatcgttgctgaagaagccaaaatgagtggcacagtgattttactgcttgatgaaattcaccgattagataaaacaaaacaagattttttgctccctcatttagaaaacggacgaattattatgattggagccactaccgaaaatccatatatcacaattaatcctgcgattcgtagtcgtacgcaaatctttgaagtaaagcccttaacggaaacagacattcagcaagcgattcaagaagccttaaccgatagcacacgtggcttaggcgattatcctgtccacttagaagaaaaagcattacaacatttgacacgcgcaacgaacggtgacttacgtagtgcgctaaatggactagaattagctgttaaatcaacacccaaaaatgaacaaggcgaaattaagatcaccttaccgattattgaagagtgcgtgcaacgaaaagccttaacgcatgttaaagatggcgatgcccattatgacgtgatttccgctttccaaaagtcgattcgaggaagcgatgtagatgctgcacttcattatttgggtcgcttagttgaagcaggtgatttaccgattatttgtcgtcgtttaatggtcattgcttacgaggatatcggtcttgggaatcctgcggccgccgctcggacggtcaccgctgttcaagccgccgaaaagctagggtttccagaagctaggattcctctagctagtgtcgtcattgatttatgtttatcgccaaaatcaaattctgcagtcacagcgattgatgctgctttggcagatattcgacaaggctctgtgggagatgttcctgatcatttacgtgatgcccactatgctggagccaaagaattaaaccgtggcattggttatcaatacccacataattttgaaaacggttgggtcaatcagcaatacttacctgacaaattaaaagaggcacgttattacgaaccgattgatattggtaaatatgaacaagccttacatcagcaactcaagcgtatccaagaatggaaacagaaaaaa

SEQ ID NO: 21107 - DNA, 486 bp, Enterococcus faecalis
atgaattattcccagaagatgaagatggagaagagaatgagtaaaacagaattaacccgtcacgagattcgtgaaaaagcgctccaagccctttttcctttagattttaatgctgatttaaccaaacaagatgccattgattatgcattggcttatgataatcgggaaatcgtcagtgaagatggcgaagacctagtccctacgtatttagatttacttgtcggcggtgtgtgtagccgcaaagcagaactagacgaagtgattacgaaccatttaggtaataactggtctatgcaacgcttagcaaaaatagatattgttattttacgtttagctatttttgaaatgctatacgtttcagatgtgccaaacattgtggcattaaatgaagccgttgagttaagtaaaaaatacagcgacgaccgttcacgtaaatttgttaatggtgtgttatcaaatgtaatgaaagaaattgattcagaggcg

SEQ ID NO: 21108 - DNA, 750 bp, Enterococcus faecalis
atgcaacggtatttcatgaaagaagattatcaagaaaaagatttgtataaagtcgcagatgaaaactatcatcatattgtgcgagttatgcgaatgacgccgaatgatcgttgttatttagtatttcaaaataaaactgccattttagctgagattgtggaaattgattcaacatctgtttactttaaagaaattagtaaagaagaaatggacaaagaattgccaattgaagtgacgattgcgtgtgggttaccaaaaggggacaagttagaatggattgttcaaaaaggcacggagctaggtggcaatcagtttatcggctttcctgcgaaaacttccgttgtcaaatgggaccacaaaaaaagagcagccaaagaaaaaagattacaaaaaattgccacagaagcggcggagcaatcgcatcgacagcagacaccaagtgtttctttggtggaaaaaacacaagaaatcattgcgcaatttgactcatatgacacagtcttggttgcgtatgaagaatcagcaaaacaaggagaaaaaagtcaattagcacaagtattatccacttgccagccaggcgcacgtttgtgtgtgctctttggacctgaaggtggctttgcaccgcaagaaattgaacaatttctgcaggctggggcgaaactttgcgggttgggtccgagaattttacgagcagaaacagcaccgttgtatcttttaagtgtggttagctaccaaatggaacttttaaat

SEQ ID NO: 21109 - DNA, 2211 bp, Enterococcus faecalis
atgccaaaagaagaaatactgacaggcccagcggtcatcaaaattgtaagtacctatatgggaccagaacatgttgagttggttcaaaaagcattaacttatgctgaaaaagcacacgaaggtcaagtccgacaatcaggtgaaccttacatcatccatccgattcaagtggcaggcattctggctgaattacatatggatccccatactgtagcaacaggatttttacatgatgttgtcgaagatacggacgtaacactggacgatttaaaagaagaatttggcgaagacatcgcaatgttagtcgatggcgtgacgaaactaggaaaaattaaatataaatctcatgaagaacaattagctgaaaatcatcggaaaatgttattggcaatggcgcaagatttacgggtcattatggtgaaactagccgatcgtttgcacaatatgcgcacattaaaacatttacgtgaagataagcaacgacggattgcacaagaaactttagaaatttatgcgcctttagcacatcgcttagggattagtcgaattaaatgggaattagaagatactgccttacgttatattaaccccaaccaatactatcgaattgttaatttgatgcaaagcaaacgcgatgaacgtgaagcttatgtggcagaagcagtcgaagatattcgtttagctacggaagatttagaaatttacgcagaaatatatggtcgaccaaaacatatttattcaatctatcgtaaaatgaaggaccaaaagaaacagtttaatgaaatctatgacttattagccattcgtgttattgtcgattccattaaagattgctatgccgtgttaggggcgattcatacacgttggacaccaatgccaggtcgctttaaagattatattgctatgccaaaagcgaatatgtatcaatctatccatacgacagttattggaccaaaagggaatccagtagaggtccaaattcggacccatgagatgcaccaaatcgccgaatttggggtggcggctcactgggcctataaagaaggcaaagcggaaaaaattgaaacagatgaactgacgaagcaagtcgattggttccatgaaattattgaattacaagatgaaagctatgatgcttctgaatttatgcaaggtgtgaaagaagacatttttagcgacaaagtctatgtctttacgccaagtggagatgtaaccgaactgccaaaaggctccggaccactagattttgcttacagtatccatactgaaattgggaataaaacaaccggtgcgaaggtcaacggcaaaatggtacagttagactatgtcctaaaaaatggggatattattgaagtcctaacatcaccgaattctttcggacctagtcgcgactggctgaaaatggttaaaacaagtaaagccaaaaataaaatcaaacgtttctttaaagaacaagaccgtgaagataacattattaaagggcatgatgctgtcattaaatacatgacagaaatcggctttacaccgaaagaatttttaacgaagaataaaatggcggaagtgttagataaatttaaatttcaaacggaagatgatttatttgcggcagtaggttatggcgaagtaagtgcgcaagtagtgtgcaatcgtttaacagaaaaagaacgccgcgaacaagagttggaacgccaacgtcaagaagcagaagagttgttaaatcagccagctaaaaaagaatcagaaaaaatgaaagttcgtcatgaaggcggcatcgtgattcaaggggtggacaacctattgattcgtttaagccgctgttgtaatccagtgcctggtgatgaaatcgttggttacattaccaaaggacgtggcgtttcaattcatcgtgcggactgtcctaacgtacaacatcaagaagaactagcacaacgtctaattgaagttgagtgggaagataccgagcacagtcgcaaagaatacgctgccgatttggagatttacggctatgatcgtagtggcttactgagtgatgttttacaagtcattagttcgatgacaaaaaatttagtcggcgttgaagctcgtccatccaaagataagatggcccagattcatgttactgtgaaaattcaaaacctttctcatttaaaaaccatcgttgacaaaattaaaagtgtaccagatgtttatagtgttcgtcgaaccaatggg

SEQ ID NO: 21110 - DNA, 999 bp, Enterococcus faecalis
atgacagttaaagtaggtattaatggatttggacgtatcggacgcttagctttccgtcgtatccaagatgtagaaggaatcgaagtagttgcaatcaacgacttaacagatgctaaaatgttagcacacttgttaaaatatgacacaactcaaggccgtttcaacggtacagttgaagttcacgaaggttcattcaacgttaacggcaaagaaatcaaagttttagctaaccgtaaccctgaagaattaccatggggcgaattaggcgtagacatcgttttagaatgtactggtttctttacttctaaagaagctgctgaaaaacatttaactgctggtgcaaaacgtgtagttatttcagctcctggtggtaacgatgtaccaacaatcgtttacaacacaaaccatgaaacattaactggagaagaaactgtaatttcaggcgcttcttgtactacaaactgcttagctccaatggctaaagctttacatgacaactttggtgttgttgaaggtttaatgacaactatccacgcttacacaggtgaccaaatgacattagacggaccacatcctaaaggcgacttccgtcgtgcgcgcgctgctgctgcaaacatcgtacctaactcaactggtgctgctaaagcaatcggcttagtaatcccagaattgaacggtaaattagatggcgctgctcaacgtgttcctgtagcaactggttcattaactgaattagttactgtattagacaaagaagttactgttgatgaagtaaatgcagtaatggaaaaagctgctaacgaatcttatggttataacacagacgaaatcgtttcttctgatatcgtaggtatgacttacggttcattattcgatgcaactcaaacaaaagtgatgacagttggcgacaaacaattagttaaaactgttgcttggtatgacaacgaaatgtcatacactgctcaattagttcgtactttagaatacttcgctaactta

SEQ ID NO: 21111 - DNA, 1890 bp, Enterococcus faecalis
gtgtatgggaaaaataaagtagggatagaattacaaatgagcgtgggggagtatcgaaaaataaaagtaaaaagtattgtaatgaagaatttagtttatctagctgttcttttaatagggatctatttgggaatgagtttcttaaaacgatttgaaaggacttattcagctccaacagacgatgtcgtagtaaaaattaatcaaaatcatctttttgtttcagataatgcacaaattttgaacgaagaagtcattaataatgtacaaaaaattaatcaagaacttagtaagacggaaacgaaaccacaactaatggttatcacagttgagcaagttcctgaaaacgaaacgattgaaagctttaccaatcaaataggtaataaattaggtatcggaaataaactttataataatggagtgatttacttagtagctgtcaaagacaggcaagcaagacttgaagtaggctatgggcttgaagagataatcccagatagtttaaccgatgaaataacagatagtaccgtgaaagatttttataaattaaaggattttaatgcaggaatacatattgtcaccactcggattaaggaactacttactactgatactatgtccaaaacgacctcgctacctaaggttagttttttgcagaaaatttggttatatttattaggaataggaaggtcgttaaagccttggctaattatagtttttattattgttatgttgtattttttatgggaattacgtaatgcggggaaagaacttagtgcccgcttggctctagttgacatggcaaatcgctataaggaagatgtagctatgttttataatggcggtatttcctctaaggcaattgttttaggagaacaatcagttgaatttaaagctgccaaggcgcgtttggagaaaaatattttatatcctgaaaattcgaaaaaagagataataattcccgcatactatgatatggattttgcctttggcgaggtgacaccaaagaaatttatttataattatgttgcacagtggaaagatttaagaagctcttctatgtgtgcttgtttttggaaggtgaatcaaccatggatctacttaccgcgtttttggataggtgaagtatattgggaaaaagttccagaaaagaaactgcctgcgtgtcggattagtggaattaatgataacttaatatctgcttacctaaaaattattttgtttcctctttcgattttattaaaacatccttttttggtatccgtgactctgattatttatgttcaagttagtttatcagagcagtcgtttccttcgacagttttcacactaatcacagagattctgacatttttagaagacgaagactctttagtacccatggttagtctggtctattttttgattccggtctttttcttatttggttatataaaatcaataggtgttggcttacaaaatagattgcacctggattctatgatccgtaggtttttaaaagaaatccagcaagtaagttcagaaaaatcaaaatcattaaaacaattagcaaacgatttagacaaccagcaatataaaattgaaaaaaaattattgcggaaaaaaattagagaaaaaaagattaccaacaaaaaagcttcaaaatccttctacccgataagatttattaagactacgtatcctgaatactatgatatgcgttttgcttatggaaatgtgtctattgctaaatttctagcaagttcacgttctgacaggcaactaaaaaagaccagtatgtatgcgaatcgtcatgattggtgggttacaagcaacgagggttcttctgatgatggctccggtgacagtttcggaggtgggagttttggcggaggtggaggtacttcaagttgg

SEQ ID NO: 21112 - DNA, 1008 bp, Enterococcus faecalis
atggcaattacagtaaaagatgtcgctaagaaagcgggggttgcaacttcaaccgtttcgcgtgtcattaacgatcatccaagtatttctgaatcgacaaaaaagaaagttcgaaaagtcatggatgacttaggctatgtgccaaatatgacggcacggaatttgggtaaacgaatttcaagtgccattggcgtaattttacctcctttagattcgaaagaacggttagggaatccattttatttagaaattatggaagccatcaacgaggaagcccgtctttacgatatgactactgctattgcaactgccaaaagttttgatgtactattggaaaacgttaaaagaatgcatcttcaaaaacaagtggacggttttattcttgtgtattcagatagtaaggaccccgtcattgattacttagacgaaaacaacattccctttactttaatcggtcaaccttaccaacatgaaacggaaatagtttacgtggataatgataatcaattattagggaaacaagcgacggaatttttaattgaaaacggccataaaaatattttatttgtgaccaatacaacgcatgaaagtttgtactttgaacgttactttggttatcaaaaagcaatgatgatgcaaggattaactgttttaccaagcgttgcgttagaaaaacctgaagattacatggcttttgatgacattcttcatcaaaataatgccacggcgttggtggtgattgatgatatctttgctttgcggacgatgcaacttgcgcaaatctatggttatcaagttcctgaaacgttatccattattagttttaacaactcaatcttttcaacattgacacatccttatctaacaagcattgacatcgacacgtcagaattaggtcgaatggcgatgaaaaaattatatgaattaatccacgaagaattgacaaatggtgtccgtctcgttattcctcacaaattaattaagcgtgaaacagttattcctattcat

SEQ ID NO: 21113 - DNA, 1179 bp, Enterococcus faecalis
atgaaaaacacccgaaacaccgtcccatcattactaattattattttgcttgtgggatttccacaaatcagcgagtcgattttcacacccattttgccagcgcttagttctgcttttaacattcacgatagcgtggcacaattaaccatgagtatttattttgttgcctttgccgttggcgttttattctggggaattctatccgatacgattggacgtcgcccagctatgttattaggaattttatgctatttaattggaaatattggcctttttttgagtccgacatttccttggctgttattcttccgtttaattcaagcatttggtgcaagcgttggttctgtcattacccaatcgatgatgcgggaaagctttaacgatcttcaaagagggaaaatttttgctcaaacaagcgctgccctatcgctatctcctgccatcggacccttagtcggcggacttgttcaaacctattttggctatcagcatgtctttagcaccttaattgtcatggctgttctattacttttctatagtttttatcgtttaccagaaacctttcacttaggaaataccttaacgaaagcgcctttttggtccgtggcgaaacgcctttccttcgactcgaaagtttggtgctacggcttattgattgggggcattaatggtttattgtttagctactatgcagaagctccgtttattttcatcaatcactttggctttagcagtgtccaatatggctttcttggtttagttttagctgtgtctagtattcttgctgcggttcttatcaattggttgctaggatattggtcagcggaaaaaattgcctttgctggtttgctgctaagtatctttgcggcttgctgtttattaataatgacacaatttgaaacaatcattggtcttattttgtttatttttctctttttcttagggattaatattactttgcccaatgccttaagtatggccttaaaaggctatgaatctgtaattggtactgccagtgggatttttagttttgtctattacttgtttgttagtttctttacctatttgattagttactttcacaatggtaccatttgggtcttgccgctttactttttaagttttgcttgtctgttagctttcagctattatgtcattgtttatcgtaaaactttaaaa

SEQ ID NO: 21114 - DNA, 981 bp, Enterococcus faecalis
gtggaattattcgatagcttaaaatttaaagtcgtacgccgtaatatcaaaattgttttccctgaagcaacagatcctagaatcttaggtgctgctgcccgcttaaaatctgatgaattagtagaaccaatcttaattggtgatccaacagatattgcaaatgctgctatggctcgtggaatcaacacatcaaactttattattatcaacccaaatgattatgaaaaatgggatgaaatggtcgaagcatttgttgaacgccgtaatggaaaagctactaaagaagatgctgaaaaaatcttaaaagatgtcaactatttcggtactatgttaacttacatgggtattgctgatggtatggttagtggtgctatccactcaacaggtgatacagttcgccctgcgttacaaatcattaaaacaaaaccaggcgtgagccgtacaagtggtgctttcttaatgattcgtggtcgtgaccaagaaagatatttattctcagactgcgcgattaacgtgaacccaactgcacaagaattagctgaaattgctgttgatagtgccaaaacagctgaattatttgacattgaaccaaaagtttcattgttaagtttttcaacaaaaggttctgcaaaagcaccagaagtaacaaaagttgctgaagctacaaaaattgcgcaagaattagcacctgaatatgcgattgatggtgaattacaatttgatgcttcttatgtatcttctgttgcacaattaaaagcgcccaactcaaaagttgctggagaagcaacagtctttgtattcccagatttacaatcaggaaatattggctacaaaattgctcaacgtttaggtaactttgaagcaattggcccaatcttacaaggattgaacaaaccagtttctgacttatcacgtggtgcaaacgaagaagatgtttataaattatcaatcattacagctgctcaaacattaatgaacgac

SEQ ID NO: 21115 - DNA, 1503 bp, Enterococcus faecalis
atggcagaagaaaaatacattatggcgattgatcaaggaacgactagttctcgtgcaattatttttgataaaaaaggaaacaaaattggtagttcacaaaaggaatttactcaatattttcctaatgcaggctgggtggaacataatgccaatgaaatttggaattctgttcaatccgttattgcaggttctttaattgagtcaggagtgaaacctacagatattgccggaattgggattacaaaccaacgggaaacaaccgttgtttgggacaaagcaactgggttacccatttataacgcaattgtttggcaatcacgccaaacgacacctattgctgatcaactaaaagaagatggctacagcgaaatgattcatgaaaaaactgggttaatcattgatgcttatttctcagcaacgaaggttcgttggatcttagatcacgtagaaggtgcgcaagaacgtgcagaaaatggagaattgatgtttgggacaattgacacttggctcgtttggaaattaacgggagatactcatgtcactgattattcaaatgcaagtcggacgatgttgtttaatatccatgatttagattgggatcaagaaattttggatcttttaaatatcccacgagtgatgttaccgaaagtcgtttcgaactctgaagtgtatggattaacaaaaaattaccatttttacggaagtgaagttcctatcgctgggatggctggtgaccaacaagccgccttatttggtcaaatggcctttgaacctgggatggttaaaaatacctatggaacaggctcatttattgtcatgaacactggcgaagaacctcaactttctaaaaataatctgcttaccactattggctatggcattaacggcaaagtatattatgccttggaaggaagtatcttcgtggctggttcagcgattcaatggttacgagatggcttaaaaatgttgcaaacggctgctgaatctgaagcagtagccaaagcgtcaacagggcacaatgaagtttatgtggttccggcattcactggtttgggcgcaccatattgggattcacaagcgcgtggggctgtctttggattaacacgcggtaccacgagagaagattttgtcaaagcgacacttcaagcagttgcgtatcaagttcgtgacattattgacacgatgaaagaagatacaggcatagatattcccgtcttaaaagtagacggtggagcagcaaacaatgatttcttgatgcaattccaagcagatattttaaacactgctgttcaaagagcccataacttagaaacaacggccttaggcgcagctttcttggcgggcttagcggttggcttctggaaagacttagaagaaatcaaagcattccaagaagaaggacaacaatttgaaccaattatggcggaagaagaacgagaagatttatatgaaggttggcaacaagcagtagcagctacccaacaattcaaacgtaaaaataag

SEQ ID NO: 21116 - DNA, 717 bp, Enterococcus faecalis
atgggaacttcgatgatgacacaattattcggtgaatttttcggaacgatgattttagttttactaggggatggcgtctgtgccgcagttaacttgaagaaaagcaaagcctttgcttctggttgggtcgttattgctttaggttggggcgctgctgttacattagctgtttacatgtctgggtatatgagtccagcgcatttaaatcctgctgtaacagttgcgatggcaattactggaaactttgaatggggcatggttttaccttatatcgtagctcaagtcctaggcggttttattggtggtttagttgtctggttagcttatttaccccattggaacattacagaagacaaaggtgctattttaggaaccttcgccactggtccagctgtccgtaactatccagccaatgttttaacagaaattatcggcacatttgtcttggtttttggtttactagccttttctcaaaacgacttagcggctggcattaacccaatgcttgttgggattttggtcttaggactaggtctatcattaggcggacctacaggttatgcaattaaccctgcacgtgatttaggacctcgtttagcgcaccaaattattcctgtgaaaacaaaaggtgattccgattgggcttattcttgggtgccaattgtgggacctatcttaggtgcttcattagctgcagtaatttatttattcactatt

SEQ ID NO: 21117 - DNA, 885 bp, Enterococcus faecalis
gtgacagactataaagaaattgccacaccatccagaaccaaagaaatactaaaaaagcatggattttcatttaaaaagagtttaggtcaaaattttttgacagagcctaatattttaagaaaaattgtagaaacagcgggaattaatcagcagacaaatgttgtcgaagtcgggcctggaattggtgcattaacagagcaattagcgatgaacgcggcacaagttgtggcttttgagattgatgatcgcttgattcctgtcttagcagataccttaagtcgctatgataatgtgacagtggttcatcaagatgttttaaaagctgatttggttgagacaaccaaccaagtttttcaagagaagtatccgattaaagtggtggctaacctaccttactatattactacgccaattatgatgcattttttagaatcttctttagatgtagctgaaatggttgtgatgatgcaaaaagaggtcgctgatcgaattgctgctaaaccaggaacgaaagcttatggctcattatcaattgctgtccaatattttatggaagcaagtgtcgcctttattgtgccaaaaacagtttttgtgccgcagcccaatgttgactcggcgattattaaattgacgcgccgtgctacaccagcagtgacagtgaccaatgaaaaagaatttttcaaattaaccaaagccagtttccaattaagacgtaaaacattgtggaataacttaacgcatttttatgggaaagatgaacaaacggtggcttggctaaaagagagcctagctgaagcagaaattgatccttctagacgtggtgaaacattgtctttagaagaattcgctcgtttaagtaatgctttagaaaaaaataaaccagta

SEQ ID NO: 21118 - DNA, 582 bp, Enterococcus faecalis
atgaaagaaaaaatgaaagttgcagaaatcattgtcgttgaaggaaaagacgacacacgccgcattcaagaggtagttgcagcggatacgattgaaacgattgggtctgctatcaatgatgaaattttgacacaaattgaacacgcacaagaaacgagaggcgtgattatttttacagatccagactattcgggcgaaaaaattcgtaaaacaataatggaagtcgttcctgatgcaaagcatgcttttttatcaagaaaagttgcagtgcctaaaaaaaatggcggtagcctaggggttgaacatgctagtgatgaagcaattattgaagccttaaaaaaagtcgtaacacctgttcaagctgatgaagactatcaagaaattcctagacaaacactggttgaatatggtttaatagcgggagcaaatgcaaaaaaataccgtgaattattaggagatgacctaagaattggctatacaaatagcaaacagttagtcaaacggttaagcatgtttcggattacagaagcagaattgaaagaaagcatgacacgtattttaaaagaacttgcaaacgaagaa

SEQ ID NO: 21119 - DNA, 768 bp, Enterococcus faecalis
atgatttttgatacacatacacatttgaatgcagaacaatttaatgatgatattccagaaacgattgcacatgcccaagaattgggtgttacagagatggccgtggtcggttttgatgaaccaacgattgaaaaatctcttttacttagtcaggaatatgccaatatttatagtatcattggttggcatccaacagaagcgggtagctatacgccagaggttgaacgacgattacaagaacaattaacgttgccaaaaattgtagcattaggtgaaatcggtcttgattattactggatggaggatcctaaagaggtgcaagaaaaagtctttcgccgtcaaattgcgattgctcgggaaatgaatttaccgtttagtgtgcatacgagagaggcattagaagatacctatcgaattttaaaagatgaaaaaatttcagatattggtggaatcatgcatagtttcagtggtgatgccgagtggatgaagaaatttttagatttaggtttgtatatttcttttagtggagtcgtaacgtttaaaaaggcattggatgttcaagaagcggcgatggcggtaccactagaaagaatgttggtggaaacagatgcaccctatttagcccctgttccttatcgtggtaaacggaatgaaccaggctatacacgatacgtagtggaaaaaattgctgaattacgacaactaacctttgaagaagtggcagaacaaacgagagtcaacgctcatcgcttgtttcggatagataaa

SEQ ID NO: 21120 - DNA, 1251 bp, Enterococcus faecalis
atgtacgacaatacggataataacgggaccgttcgttgttcattttgtgggaaaacacaagaagaagtaaaaaaaattgttgctggtccgggtgtctatatttgtaatgaatgtattgatctatgtaaagagattattgatgaagaattttatgatgaagcagtccgagaattaacggatgtgccaaaaccccaagaaattttaaatgttttaaatgaatatgttattggacaagaacgtgcaaaacgcacactttctgttgctgtttacaatcactataaacgtgtgaatcaatcagaaacagctgcaactcaagatgacgttgaattgcaaaaaagtaacatttgtttaattggaccaacaggttcaggtaaaactttcttggctcaaacgttagcaaaaacattaaatgtaccttttgcaatcgctgatgcgaccagtttaacagaagcaggttatgtaggggaagatgttgaaaacatccttttaaaattactacaatctgctgactataatgttgaacgtgcggaaaagggcattatctatattgatgagattgataaaattgcccgtaagagtgaaaatgtttcgattactcgagatgtttcaggtgagggtgttcaacaagccttactaaaaattcttgaaggaacagttgcaagtgtaccaccacaagggggccgcaaacatccacatcaagaatttatccaaattgacacaacgaatgttctcttcatcgttggtggagcatttgatggaattgaaaccattgttaaaaaccgcttaggcgaaaaaactattggttttggtaaaactaattctgctttaaatgaagaagaaagcatcatgcaacatattattccagaagatttattgaaatttggtttaattccagaatttattggacgcttacctgtaatggctgcgcttgataaattaacgaatgatgatttggttcgaattttaacagaaccgaagaatgccttggtgaaacaatatcaaaaattattgtctcttgatgacactaaattagaatttgaaccagaagcattaaaagccatcgcagccaaagccattgaacgtaatacaggcgcacgcggacttcgttcaatcattgaagaaattatgatggacgtaatgtttgatgttccttcagatgaaagcattgaaaaagttatcattactaaaatggccgctgaaggtaccggtaaaccaacaattatttataacaaaaaagataaagaagctgta

SEQ ID NO: 21121 - DNA, 957 bp, Enterococcus faecalis
atgaaaattggtttacgaacagtcaagacagccattagcgctgcattagcaatgattattgcggaaaaactgggattactttatgccccttcggcagggattatttcagttttaagtgttactagcacgaaaaaaacatctgtcatgacaggaatttatcgtttgttatccttagctttagcaactattttagcgtatatttgttttacttttttaggttttacagcgattgcttttggtatttttttattattatttattccagcagccgtgtattttcaattatctgatgggattgttgtgagttccgttttggtaactcattatttagtcgaaaaaaatctttcttgggcgattattggaaatgagtttttattaatgagtattggtgtgggactagcgttattagctaattcttatatgcctgatacagaaaaacgtttaagagaagaccaagaagtcattgaaacaatgtttcgtaaaattttaagggaaatggcgctacatttaaacaacgctgcaggagagcgaaatttggtcatgcattgtgcagatttaaaaacctttattcgtacaggtgagacgtgggccaaaaatcatgccgagaatcaattgctgtctaccaatacgtactatttagagtactttgcgatgagaaaaatgcaaagtaatattctaaaaaacatgttggaattattagaagatattactgttgatgcgcaacaagttcgctatattcaacaattattggaatatacggcagaaacatttgcagagaataatgatggacaagaaattatgaatcgaattaagaccgtttatgaaacctatcgcacaaaaccattgccgcaaacaagaagtgaatttgaaaatcgggcgcgactctttcagtttttacaattgtttcagtcattcattcaagtcaaagcggactttgccaaattacaactagataaa

SEQ ID NO: 21122 - DNA, 1335 bp, Enterococcus faecalis
atgggaaatcaagagaacaaattataccattttgtcggaattaaaggttctggcatgagctcattagcgttggtcttacaccaaaaaggctacaacgttcaaggatcagacgtagaagagtatttctttacacaacgggatcttgaaaaatcaggtgtccctattttaccatttaatgcagataatattgataaagacatgattgttattgctggaaatgcttttccagatacccatgaggaaatcgcccgcgccatcgaattaggcgcagaagtaattcgttaccacgatttcattgctcgttttatcgaaccgtacacaagcattgctgtaacagggtcacatgggaaaacaagtacgactggtttgctagcacatgtattaagtggtatcaatccaactagttatttaataggggatggcactggccacggcgaaccagatgctgatttctttgcatttgaagcgtgtgagtatcgccgtcatttcttggcttattcaccagattatgcgattatgacgaatatcgattttgatcatccagattactacaagagcattgaggacgttttttcagcgttccaaacaatggctcatcaagtcaaaaaaggaatttttgcttatggtgatgataagtatcttcgccagttagaatcagaagtgccagtttattattatggcgtcagcgaagaggatgatatccaagcccgaaatattcaacgaacaacggaaggctcatcttttgatgtttatcacaaggatgattttgtaggtcattttgtcttaccagcatttggccatcacaatatcatgaatgcgctaggtgtgattgctgtggcttattttgaaaaacttgatatgcaaaaagtcgcagaagaaatgctaagttttaaaggtgtaaaacgtcgttttagcgagaaaaaagtcagtgacatgattattgttgatgattatgcgcaccatccagctgaaattaaagcaacgattgatggcgctcgccaaaaatatcctgacaaagaaattattgctgtcttccagccacatacatttacacgaacaattgccttaatggatgaatttgctgaagcactggatttggcagatgaagtattcttatgtaatatttttggctctgcgcgtgaaacacaaggcgaggtacgcattgaagatttaggtgaaaaaattcaaaaaggtggacaagtaattaccgaagataatgtgtcacctttactagattttgaaaatgcagtggtggtctttatgggtgctggcgacgttcagaaatttgaacaagcttacgaaacattactaagtaacacaactagaaacgtttta

SEQ ID NO: 21123 - DNA, 1359 bp, Enterococcus faecalis
atgaaagaaaagaaaacggaaaaaatgcttaattatgcaaatggacctagtttagaagagataaataataccgtcgaggtacctaaaaacgcaagcttttggcgaactttgttagcctatagcggacctggcgctttagtggctgttggttatatggatccaggaaattggattacgtcaattgctggcggagcggaatataagtacacgttacttagtgtgattttgctttctagtttagttgccatgttactacaaagtatggctgcgcgcttaggaatcgtgacaggaatggatttagctcaagcgactagagagcatacaagtaaacgaacgggcgttgccttgtgggtggtgacggagttagccataatggctacagatatcgctgaggtaattggtggtgccgttgctttgcaattattatttggttttccattattaattggtgtgttgataacaacgtttgatgttttattactgttgctactgacaaagttaggctttcgcaaaatcgaagcaattgtttcttgtttaattgcagtcatcttttttgtttttgcttatgaagtggcattagcagatccaaatgttggtgaagtattacgaggttttattccagacacaaaaatagcgacagataaatccatgttatttttagccttggggatcgttggagcgacagtcatgccccataacttatatttgcattcttccattgcgcaagcacggaaatttgatcgtaacgatgatgttgagaaagccaaagcaattcgtttcactacttgggattcaaatattcaattaactgttgctttcgtcgtaaattgtttgttgttaattttaggaggagcattattttatggaaccaacagtgaattaggtaaatttgttgatttatttgatgctctgaaaaatccagatattgttggtaatattgctagcccagtgttaagtattctttttgcaattgctttactggcttcgggtcaaaattcaacgattacaggtacgctgtcaggacaaattgtaatggaaggctttatccatttaaaaatgccgttgtgggcacgacgagtgttaactcgtttgttagcaattgtgccagtcattatctgtgtcattatttatggcggtagcgaaacggctgttgaagacttgttactttatacgcaagttttcctaagtattgctttgccagtgtcgattattcctttaacgatgtatacaagtgataaaaaattaatgggccaatttgcgaatccagcgtgggtgaaatttttagcttggattattgctattgccttgacgttattgaatttatttttaatttatggcacattaactggtttaacgaat

SEQ ID NO: 21124 - DNA, 522 bp, Enterococcus faecalis
gtgacagattatttaaatgtaggaaaaattgtgaacacacaaggaatcaaaggagaagttcgagtcatttcgaaaacggattttccagaagaacgttatcaaaaaggggctatgttactactatttcaagagaaaaaagcaccaattgaattggtcgtgaagtcccaccgcaagcataagaattttgacattttaagctttgaaggacatccaaatatcaatgatgttgaaaaatatcgtgacggtattttaaaagttgcaaaagacaatctcgctgaattggcagaggacgaattttattatcaccaaatcattggtgctactgtttacgatgaaaccggcagtgaactgggaaaaattaaagaaattttatctcctggtgcgaatgatgtgtgggtcgtccaacgaccaaagaaaaaagatttacttttaccgtatattgaaggcgttgttacaaaagtcgacgtcgaaaatcaacggattgatgtggacattccagaaggattgattgacgatgagaat

SEQ ID NO: 21125 - DNA, 1347 bp, Enterococcus faecalis
atgtcacacattcaattagattattccaaattagcaccatttgttgctgaccatgaattggaatacatgcaaacacaagtcactgcagtggacaaagcattacgtgaaggtacaggagctggtaatgattttactggctggattgatttaccagaaaactatgacaaagaagaattcgcgcgcattaaaaaagcagcagcaaaaattcaatctgactctgaggtattagtagtcattggtatcggtggttcatatttaggtgcccgtgcagcaattgaatttttgacacattcatttaataatctattatccaaagaagaacggaaagcgccacaaatcttctttgctggaaatagcatcagctcaacttatttagctgatttaatcaatgtgattggtgatcgtgatttttctgtgaacgttatttcaaaatctggaactacgacagaaccagcgattgctttccgcgtctttaaagagttattaattaataaatatggcaaagaagaagccaataaacgtatttatgcgacaactgaccgtgctaaaggagcagtaaaagttgaagctgatgcggaaggttgggaaacatttgtgattcctgatgatgtgggcggccgtttcactgttttaacgccagtaggtcttttaccaatcgctgttagcggtgcggatattgatcgtttaatggaaggtgcaaatgatgcccgtaaagaatacggcgcaacgagcgacttaaaagaaaaccaagcctatcaatatgctgcgttacgtaacattttatatcgcaaaggcaaaacaactgaaatgttaattaactatgagcctggcatgcactatttctctgaatggtggaaacaattatacggtgaatcagaaggaaaagatggcaaaggtattttcccagcagccgcagacttttcaactgacttacattccatgggtcaatatgttcaagaaggtatgcgtaacttatttgaaacagtggttaaaattgaaaatccacgccatagcatttcaattccagaacaaaatgaagacttagatggcctaggctatttacaaggaaaagaaattgacttcgtcaatacaaaagcgttcgaaggtacgttgcttgctcacacagatggtggtgtgccaaacatgatcgttaaagtgccaacaatggatgcttattcattaggttatgttatgtacttcttcgaaattgcagtgggcatctcaggttacttaaatggggttaatccatttgaccaaccaggtgttgaagcttacaaacgcaacatgttcgctttattaggtaaaccaggatttgaagaattagcaaaagatttaaatgcacgccta

SEQ ID NO: 21126 - DNA, 1344 bp, Enterococcus faecalis
atggacgcaaaacaatatgttaaaaatattcaagaaaaaattcaccaattagaccaaggtcaaacagaatatttacaagcagtcgatgagtttttaccaaccgtagaaggttttttagaaaaaaatcctcaatacattgaagcaaatgttttaggtgtcttgattgaacctgaacgtatttttcaatttcgtgtgccgtggcaagatgaccagggcaattggcatgtgaacagaggctatcgtgtccaatataattcagcgattggaccatacaaaggtggtttgcggtttcatccaagtgtgaatttaagtgtgatgaagtttttggcctttgaacaaatttttaaaaatagtttaactggtttgccaatcggtggcggcaaaggcggtagtgattttgatccaaaaggtaagtcagatgctgaagtgatgcgcttttgtcaaagtttcatgaccgaacttcaaaaacatattggtccaagcacagatgttccagcaggcgatattggcgtaggcgctcgtgaaattggttatttgtttggcatgtataaacgcttgcgcaactatgatgcaggagtgttgactggcaaacctttaggatactggggaagccaagcaagaacagaagcgacgggttatggaacggtttattttgttaaacatttattagcagataaaaacgatacgtttgaaggcaaaaaagtcgctgtttctggtagtgggaatgtcgcaatttatgccatggaaaaagcaactgagctaggcgccacagtaatcacatgttccgattcgtctggttttgtctatgatccagaaggaattgatgtggcgttagtaaaagaactaaaagaaaaaaatcgtgagcgcatttcaaaatatgttgaaacacgtaaaggcgcaacttattatgataaagaatctgtttggaatttcgaaacagcgtatgacattgcgttaccatgtgcaacacaaaatgaaatcaacgaaaagcaagccgctattttagtgaaaaacggagtgaaagtcgtggcagaaggcgcaaatatgccttgtacactagaagcagtcgccgtttttgctaaatcagctgtaatttattgtccaggcaaagccgctaatgcaggtggtgttgcggtttctgcattagagatgagccaaaatgctgaacgtttagcttggtcctttgaaaaagttgacggtatgctagatcaaattatgcaaaacatttatgagacttgtcgtgatacagctaacgaatatcaggcacgagataactttgttttaggtgcgaatattgctggctttgaaaaagtagcggcagcgatgctaagtcaaggactcgtt

SEQ ID NO: 21127 - DNA, 1161 bp, Enterococcus faecalis
atgaagaaatttgatgtaattattgtcggtgctgggacgagcggtatgatggccacgattgcggccgccgaagcaggcgctcaagtattattgattgaaaaaaatcgccgtgttgggaaaaaattattaatgactggtggcggccgctgtaatgtaaccaataatcggcccgcagaagaaatcatttcatttattcctgggaatggaaaatttttatacagcgcattttcacaatttgataactatgatatcatgaacttttttgaatccaatggtattcacttaaaagaagaagatcacggacgcatgttccctgttacagataaatcgaagtcaattgttgatgcgctatttaaccgcattaacgaattaggagtcactgtttttacaaaaacacaggtcacaaaattactacgaaaagacgatcaaataattggcgttgaaaccgaactggaaaaaatttatgcaccgtgtgttgtattaacaactggcggccgcacttatccttccacaggagcaactggtgatggctataaactagccaaaaaaatggggcataccatcagcccgctctaccctaccgaatcacctattatttctgaagaaccttttatcctggataaaacgttgcaaggtctctctttacaagatgttaatttaactgttttgaaccaaaaaggaaaacctttagttaatcatcaaatggatatgctgtttacacattttggcatttcaggacctgccgcgctccgctgttctagttttattaaccaagaattaactcgcaacggtaatcaacctgtcacggtagccttggatgtgtttccgacaaaatcttttgaagaagtgcctgccaaacaactaacagaaaagcaacgtctttcctttgtggaactactgaaagactttcagttcactgttacgaaaacattgcctttggaaaaatcttttgtcacaggcggtgggatttccctcaaagaagtgacccctaaaacaatggagagcaaattagtcaatggtttattttttgctggtgaacttttagatattaatggctatactggaggctacaatgttacagctgcatttgtcactggacatgttgctggctcccatgccgcagaaattgcagaatacacctatttaccaattgaagaagtc

SEQ ID NO: 21128 - DNA, 897 bp, Enterococcus faecalis
gtgttagaggtaaaagagttagtcaaaacctttggggattttaaagcagttgatcatgtatcctttacgataccggacgggaaaattttaggattaattggccaaaatggtgccgggaaaacaactacatttcgcttgattttaaattttttaacacaagatagcgggtcggttttatggaatggtcaaccattaaatgaaaaagagtacaatattattggttatttaccagaagaacggggtttatatcctaaaattacgattgaagaccaactaatttatttcgcttcgttgcggggaaaaactaaaaaagaaattgaacctaaaattgacttttggatggaaaaatttcaagttaaaggcaaaaaaacagataaagttaaatctttatcaaaaggcaatcaacaaaaagttcaattgattgcgacacttattcatgaaccgaagttaattattttagacgaaccattcagtggcttggatccagttaatgcagaattattaaaagacggcattattgaattgaaaaatcaaggttcttgtgtcattttttccagtcataatatggacaatgtggagaaaatctgtgaccatttagtcatgttaaaaaatggacgcatggttttagatggtcaggttcatgaaattcgacaacaatttggtcgaacaaaattattcttagaatcaccgttatctgttgaggaagttgctgctacagcaggtgtgaaagaagcacacttgcgacaagatggcgtcttagaagcgacattagaaaacgctgaagtgggcaaagtgttgtttgataaagcgacagccaacggctacattccaatgtttaatcaacaaccaccaacattggaagaaattttcaaaatgaaagtaggtgggcaagatgag

SEQ ID NO: 21129 - DNA, 2364 bp, Enterococcus faecalis
atgaatcagcgtattctatcaacattagggtttgataaagtaaaacaacagttgttgcaatttattgtgacagctcaggggacaaacgaagtttcggaattattaccaattgctgatgaaaataaaattcaatcatggctaaatgaaacacaggatggtttaaaagttcaacgattacgtggtggaatccccattcctaaattagaaaatatccaaccacacatgaaacggattgaaattggtgcggatttaaatggcatagaattagcacaagtaggccgtgtcttgtcgactacttcagaactgactcgtttttttgatgagttaagtgaaaatgaagttgattttgaacgtttatatatgtggcgagagcaactagaagttttgcctgaattaaatcgccaactcaaacaagccattgatgatgatggctacgtcacagatgaagcttcgccagccttaaaggcaattcggcaaaatattcgtcgtagtgagcagaccattcgagaagaactagatagtattattcgtgggaaaaacgcacgttatctgagtgatgcccttgttactatgcgaaatgaacgctacgtaattccagtcaaacaagaatataaaaatatttttggtggcgtggttcacgaccaaagtgcttcaggacaaaccttatttattgaacctaaacaaattttagaaatgaataatcgtttgcgacaacaacaaattgccgaaagaaatgagattactcgcatcttggcagaactgtcggctgagttggttccttatcgccgagaaattacgcataatgcttatgtcattggtaaacttgattttattaatgctaaggcgcgactaggaaaagaactaaaagcagttgttccagaaattagtcaagcaaatcatgtagtttttaaacaagcccggcacccactattaaatccagaaaaagctgtagccaatgacattgtgattggagaagaatatcaagcaattgtgattacagggcctaataccggcgggaaaaccattactctgaaaacgttaggtcttttacaattaatgggtcaagctggattacctattccagttgaagaagagagtaaaatggggatttttacagaagtatttgcggatatcggggatgaacaatcgattgaacaaagtttaagtactttctcttcacatatgacgaatatcgtgtctgtcttaaagaaagtcgatcatcaaagtttagtactatttgatgaattaggtgctgggacagatccgcaagaaggggccgctttagcgattgccattttagattcattgggcgctaaaggagcctatgtgatggcaacaacccattatcctgaattaaaagtgtatggctataatcgagctggaacaatcaatgccagtatggaatttgatgtagatactttgagtccaacctatcgtttattaattggcgtgcctggccgaagtaatgcttttgaaatttcgaaacgtcttggattagacaacagtattattgaggctgcaaaacaaataatggacggtgaaagtcaagatttaaacgaaatgattgaagacttggaaaaccgtcgcaaaatggccgaaactgaatatttagaagctcgccactatgtcgatgaatcggccgctttgcataaggaactgaaagaagcctatcaagtattttttgaagaacgagaaaaagaattacaaaaagcacggaaagaagcaaataaaattattgcagaagcggaagaaaacgcagaaaccattatttctgatattcgcaaaatgcaattggaaagtggccaacaaggtggtgtcaaagaacatcagttaattgatgcgaaaacacaactttctcaattacaccatgaagaaaccaagcttgctaaaaacaaagtgctgaagaaggcgaaagaacagaaaaaattaaaagctggcgatgaagtaattgtcaatacttacggccaacgagggaccttattaaaagacaacggcaaaggacaatggcaagtccaattgggcattttaaaaatgaacgtatctgaagaggatatgacgcctgtcgctccacaaaaagaagcgaaaccaagagttacaacggttcgttctgcagaaagcagtcatgttggcacacaactagacttacgtggcaaacgctacgaagaagcattggcagaagttgaccaatacattgatgctgcgattctagcgggctatccacaagtaaccattgttcacggcaaaggaacaggtgcattaagaaccggaataacggaatttttaaaaaatcaccgcagtgtgaaaagctatgaatttgcgccacaaaaccaaggtggtaatggtgcgactgtcgtaaaattccaa

SEQ ID NO: 21130 - DNA, 798 bp, Enterococcus faecalis
atgtctaaacaaaaaaaggctgtgttcctgcttagtttattcagtttagttgccctaattgctgcatgtacaaatcagccgcaaaaagaaacagtttcaacaaaaaaagaagaaataacccttgcggcagcagctagcttagaatcagtcatggagaagaaaattattccagcctttgaaaaagagcatccagatattcaggtaactggaacctatgatagttctggaaaattacagatgcaaattgaaaaaggcctaaaagccgatgtatttttctcagcttcgacaaaacaaatgaatgcattggttgcagaaaaactaattaataaaaaaagtgtcgttcctttattggaaaaccagctcgttcttattgtgcctaaccaagatcaagcaaagtggcatgatttttctgatttaaaaaaagcccaaatgatagcaattggtgatcctgcaagtgttccagctggtcaatatgccgaagaaggcttaaaagctttaggcgcttggtcttatgtagaaaaacacgcaagctttggcacgaatgtaacagaagtccttgaatgggtagctaatgcaagtgcagaagctggcttagtttatgcgacagatgcagcaaccaattcaaaagtagcgattgttgcggccatgcctgaagctgttttgaaaaagccaattatctatccagttggtaaagttgccgcctctaagaaacaaaaatcagcagatgcttttttaaattttttacagagtcaacaatgcagaaaatattttgaaaatattggctttaagttaacaaag

SEQ ID NO: 21131 - DNA, 480 bp, Enterococcus faecalis
ttgtttaaagttggcattgtaacattaagtgatcgttgctttcaaggacttgctgtcgaccaatcggggcccttgattcgtgaacagttacctgcgctctaccaggtaaccaaacaaaccattttaccagatgaagaaaatcaattagtagagctattgcaagagtggtctaagacctgtgatttgattttaacgacaggcggcacagggttgagtgaacgggatcggaccccagaagctaccttacgtgtagcagagcgaatcattcctgggatcagtgagggcttgcgtcaacttagcttggaaaaaacaccatttgctatgttaagtcgaggcgtttctgttcaaagaggacgcacgctcattgttaatttgcctggtagcccgaaaagtgtaacagaacatttgcattttttgttgcctgttttgccccacgctttggatttaatcacaaataaaaaaatcatacatgatgaggaa

SEQ ID NO: 21132 - DNA, 963 bp, Enterococcus faecalis
atgaaagatgcatttaaccgtgaaattgattatgttcgtttgtctttaacagatcgttgtgacttacgttgcacgtattgcatgccagcaacaggtctttgctttttaaaaaaagagcagcttctaacagatgatgagattatttttttattgaggatattagcgaaagaagacatcaaaaaagttaaattaacaggtggtgaaccgcttgttagaccgaatttactctctttaattaaaaggataaagcaaatctcaggcatcgaaaaagtaaccttaacgactaatggcatgaagttagctcgtgaggctcaaggattaaaagaggcgggcttggacggcattaatattagcttagacactttggatccagaagaatttcgtgaaataacaagagttggtcagttaaggaatgttctggcgggcttagaacaagcgattgatgtgggattacctaatatcaaaattaatactgtagctaggaaagagctaagtgaagcaacaattgtagaactggctgaaatcgctaagaaagagactgtgcatcttcgtttcattgaaatgatgccaattggattagggaaggagcatccaggtaagcaacaagaagaagtagaagccattttaaccaaatattatggaacgttacaaccataccaaaaaccattgggcaatggccctgctagttattacgccttaaaagattttaaagggaaaataggttttattagtgcattagggcattgtttttgcgagacgtgcaatcgaatccgaattactgcagacggccatttaaaaacgtgcctgcattctgcagacggctactcgttaaaggaagctttagctatggaacaaacagcagaattgttagggattatcaagagtggcattgcctgtaagcctgaaaaacatcttttcttggaacaacaaggagaacaacgatttatgtcacaaataggaggg

SEQ ID NO: 21133 - DNA, 1140 bp, Enterococcus faecalis
gtgaaactgttgaataatcgttctgaaaaaataagaaatattttagtccctgtgttatctgttattatgggtttcctcttaggggcaattattatggttatctttggctatgacccagtggctgggtatcaagcgatgtttgaaacagctttccaaggaaagaaaagtattggtgagatttttgtcaccgcagcaccgttgatttttaccgctttaggattctcggtggctaattcggctggattctttaatatcgggctttctggacaagccttatgtggttgggtggctagtatttgggtcgctttatccatgcctgatgcaccccggatgattgcgttgccggtggcgattattgttggggcagttgcaggagctttagcagcagccattccaggtttcttgcgtgcctattttgggacgagtgaagttattgttacgattatgttgaattatattttattatacacaggaaatcatattgctaataatgtcatgaaaccaagtattatggcgaacaaagggatcaccaaaatgattggtgcgaatgcatcattacgctcaccgtttttaacaagtatcagtgatggctctcgtttgaacatcggcattttcttggccttcattttccttattcttgtgtggttcttgatgaaaaaaacaacgcttggttttgaaattcggtcggtggggttaaacccatttgcttctgaatatgctggaatgagcagcaagcgaacgattattttatccatgatgatttcaggaacgctagctggcttaggtggtgcggtccaaggattgggaactttccaaaacttctttattcaaaacacatcgttgagcattgggttcgatggtatggccgtgtctctattaggagcaggtagctcaatcgggattttactttccgcattactgttcgggatgttaaaacttggtggacaagggatgccgttgatagctggtgtaccaaccgaattagttgatgttgttattgcagcgattattttctttgtgggaattagttatttaattcgtttcttgttagcaaaagcgtctggtagtaaaaaagaagtagcgattgtagaaacaattgaagcggcgccagacaaaaacaatcaagaggggggagacatc

SEQ ID NO: 21134 - DNA, 660 bp, Enterococcus faecalis
atggaattaaaccgcatgattgaccacactattttgaaaccagaagcgacagaagccgctgtccaaaaaattattgacgaagctaaggagtacaactttttctctgtatgtatcaatccttgttgggtcgcttttgctagcgagcaattagcagataccgacgtcgctgtgtgtaccgttattggctttcctttgggggcaaatacaccagaagttaaagcatacgaagcagctgatgcgattaaaaatggtgcgaatgaagtggatatggtgattaatattggtgcattaaaatcacaacaatacgattacgtacgtcaagacattcaaggcgtagtagatgcagccaaaggaaaagcgttagtcaaagtgattattgaaacagcattattaacagacgaagaaaaagttaaagcttgtgaattagccaaagaagcaggtgccgatttcgttaaaacatctactggcttctcaacaggcggcgctaaagtagcagacattcgtttaatgcgtgagacagttggtcctgacatgggcgttaaggcttctggtggcgtgcataatgcagaagaagcgttagcaatgattgaagcgggggcaacacgcatcggtgcaagtacgggtgtagcaattgtttctggcgcaactggcgaagggtat

SEQ ID NO: 21135 - DNA, 1299 bp, Enterococcus faecalis
atgagaatggtagacattattgaaaagaaacgtgacgggcatcaactaacaagcgaagaaattcaatttattatcaacggatacacagatggttcaattccagattatcaggtaagtgcctttttaatggctgttttttaccaagatatgacagacgaagaaattacacaaatgacgttagcaatggtccattcaggcgaaattgtggatctttcttctatagaaggaatcaaagtcgacaagcattctacaggtggcgtaggcgacactacgacgcttattttagcgccgttagttgctagtgtcggggtcaatgtagcaaaaatgtctggtcgtggcttaggctacacgggcggtacgttggataaattagaagcgattcctggttttaaagttgaattgacagaagaacgttttattcaattggtgaacgatacaaaagtggcagtaattggtcagtcaggtgatctagcaccagcagacaaaaaactttatgcgttacgcgatgtgaccgccactgttgactcaattccattaattgcaagttccattatgagtaaaaaaattgccgcaggggcagatgcgattgtcttagatgtgactactggtgaaggggcctttatgaaagacctagcaagtgctcgtcgattagcggaaacaatggttcgcattggaaaactggcaaatcgccaaacgatggcagtaatttcagacatgtcacaacctttaggggaggccatcggaaatagtttagaaatcgttgaagcaatcgagaccttgcaaggaaatgggccagaagatttagtggagatgtgttatgtcttaggaagtcagatggtcgttttagctaaaaaagccgagacgttagacgaagcacgggctttattagaagaagcattaacaagcggtcgagcgctcgcaaaatttaaagaaatgattgaaaatcaaggcggcgacagttccgttgttgaccagccagaaaaattattaaccgcaacttatcaatttgatttacctgccaaagaaacaggcgtggtacaaaaaatcgttgccaatgaaattggcgttgccgcaatgttgctgggcgctggtcgtgctacgaaagaagatacgattgattttgcagttggcttgaaacttcacaaaaaagtagggagcccagttgaaaaaggcgaatcattactaaccatttatgccaatcgtgaagacgtgacagaagtcgaacaattgctttataaaaacattgaaattggaccaaccggcgaagagcctattttgattcacgatattattacggaa

SEQ ID NO: 21136 - DNA, 1005 bp, Enterococcus faecalis
atgaaactaacgattaaagaaattgctgatatggctggtgtttctgtcacaaccgtctcacaaattctgaataataaagggagtcgtttcagtgaaaaaacccgcaacaaggtgttggcggtagtcgctgaaaatcattacaaaccagattactttgcttcgaatgtaatcaaccgtcattccaaaaccattggtatgattgtgccagatgtgacggatttctttttctcaaaagtgattgaaggtgtagaaacatatttaaattcgttaggctacatgattttgttatgcaattcaaagcatgattccgagcaagcgatgcaatatgttagcgagttgattcatcggtcggtggatggcattatttttgccacgccgaatgttttgccagaaaatcatattttaaaagaccgacgagaacatccgattcctgtcattcttgtcgatcgtgggattaatccacgagatagtggacgattaatcgttaaagagtacgaaggtgcttatcaagcggtccatcatttgattcaacaagggcatcagcatattggcatgttgcgtgaaagtgccggctattatcgtttgacggaacgagtgacggcgtatcagcatgcgttacaggacaataatttaccttttcgtccgcattatgtttgtgctggggaattgaacttgcatggcggctatgctgcggcgaaagaagttttgaaaaatgaagaaatcacagcaattttttgtggcaatgatgaaatggcgatgggggcctatcaagccattgaagaagcgggcaagaaaattcctgacgatatttcggtggttggttttgatggcttggaaatttccgaatatttggtgccgagtttaacaactgtctatcagccgagttttgatattggctattatgcagcaaaatttttggtggaagctattgcagatccaacagggaaagttccaaataaagttttcgatgcgacgtttattgctagaaaaagcacaaaaccgatt

SEQ ID NO: 21137 - DNA, 1200 bp, Enterococcus faecalis
atgatcgagttggaagaagcacgagagaaaatgacccaacatatgaagagtcaatgtgaaacagaagaagtggcgctgcttgattccttgggacggattagcggagaaaccatttttgcagagacagcgattcctcattttcctcgtgccgggatggatgggtatgccgttcgtgcagtagaaacacgaggtgcgactgctgaaagcccaagttgtttaaaagtcgtcggttctttagtggcaggggattccatgttttattgtaatcagacgaataactgtgcgattaaaataacaacaggtgcttttattccaaccgattttgatgctgtagtgccacaagaatggacggattttgggcaagaccatgttaaaatttttcgctctgtcactgcgggccaaaactatgcggaaattggagaagatattgcttttcagcaaaaaattttagcaaaacatcaacagattaatagtcgcatgattggtttgttggcaatgcaagggattgataaagttgttgttttgaagcgcatgaaggtggggattttagcgaccggtagtgagttagtttctttggaagaaccactgtcagttgggaaaatttataatagtaatctctacatgttagcagcttttgtcaaagcgagtggtaatgaagtaatccacctagaccattgttcagatgaccctgaagaattagcgaagaggctgattgagatttcaccaaaacttgatgtattaattacttgtggtggtgtttcggtaggtgaaaaggacaatttacctttagcaattaaacgtatcggaggaacagagttgtttcattttgtaaatatgaaacctggaaccccagttatgggaagtcaatttcaagaaacactcattttaagcgtttcaggcaatccgtttgcggcaatggttaatttacatcttttttactggacattattagctactttttttaattgtgtcgagttaaatctcaaggaacgaacagtaattttagcgcatgaattaacccctagtagactacgtcgattttaccgagcgaaagaaatagatggcacagtaaatttagtgacaaaaagtcatctttcatccaatttatcaaatactttagaaacaaattgcctgctagaacaaccagctggtgtactactcaaaaaaggcgcgcttgtaaaagtctattattggcaaact

SEQ ID NO: 21138 - DNA, 2718 bp, Enterococcus faecalis
atgaaaacaaagttgcatacgcaaacagttacgttgtctattgataaccaagaagtaactgtgcctaaagggactaccattctcgaagcagcgaaagggctaggtgttgaaatcccaacgctctgtcatttaaaggaattagcacctgatggttcttgtcggatgtgcgtggttgaggtggaaggtggccgacgtggtggcttaacaactgcttgtacggcacattgtcaagaggacatggttgtggcaacacattctgaaaaagttgctgattccagacgttttattcttgatttattattgagtaatcataaattagaatgtttttcttgtggaaaaaacggggattgtcaattacaacagtatgcgctagattatgggattgatgtcactagctttaccgagggaaaaagaatgccttgccatcaagaagataccagtaatccatttttctcttatgatccagaaaagtgtatcatgtgtcgtcgttgtgcccgtgtctgtcaattgcggcagggaagagatgtacttagtattgctaatcgtggctttgaaacaaaaatgatgccgagttatgggcaggcgtttgatcaatctatctgtgaatcatgtggcaattgtgtctcttcctgtcctacaggtgcgttaacagcaaaagatacgaaagagtaccgcaaatgggaaacccagaaaattcctacaacttgtccgcattgtgggacaggctgtcagatgaatttactcgttaaaaataatcgtttggtgggtgttgaacccctggatggaccagctaataaaaatttactttgtgtgaaaggaaaatttgcttcatataaatttgttgggtcaggagatcgcttaacggagccattaattaaacggaatggcatttttgaacctgcttcttgggaagaagccttaacgcttgtttcgtcaaaatttaacgaaattaaagcagaaaacggtccggatgctcttgctggtttttcgtgctctagagcgacaaatgaagataattatgtctttcaaaaaatggtgcgtgctgcttttggtaccaataatgttgataactgtgcccgtgtttgtcattcggcttcggtccatggtttagcccaaaccttaggctctggtgcgatgactaatcctattgctgatatcactgaagatgtcgacatgattttattagtaggttccaatccagaagaagctcatccagttattggtgcgcaaattcgccaagccatccaaagaggaacgcaagttgttgttgttgatccgcggaaaattaacttagtgaaggatagtgcgctgcatttacaagttcaggcgggaacgaatgtcgcatttgctaatggcatgatgcatgtgattttgaaagaaggtttagcagatcgccattttattgaagaacggacagaaggatttttagatttagaaaaaatggtggctgattatacgccggaaaaagtcgcagaaatttgtcatattcatccagaagatttaattcaagcagcacgcatgtatgcaaaagcagagaaagcaccaatcatttattgtttaggtgtaacggaacattcgacaggaactgagggtgttatgagtatgtctaatttggcaatgttggttggtaaagttggaaaaccaggctgtggtgtcaatcctttgcgaggtcaaaataatgttcaaggtgcttgcgatatgggctgtatgccttatgatttcccaggctatcaaaaagtcaataatccagaagtgatcgacaaatttgaaaaagcttggcatgtgccgttaaatcgaaacacaggtttaacttctactaaagtcttaccagcagcaacggcaggaagcgtcaaaggcctttatatttttggagaagatccaattgttacggatccagacacaggacatgttcgtcaagctttagaaagtttagactttttagttgttcaagaattatttatgaccgaaacggctgcttatgcagatgtcgttttaccaggcatcagttatgcagaaaaagacgggacatttacaaatacagaacggcgcgtgcaaagagtccgtaaagctgttgaaccaagaggacaagcgcgagaagactatgaaattttttgtgaagtcatgacacgaatgggctatccttgtgcgtatgaatctgcaaaagaaattatggaagaaatttcagctgtgacgccttcgtttggtggaattaattatgaacgattagagaaggagagcttacaatggccttgtcggagcttgacagatccaggtacgccgattatgcatgtgggtagttttgctcgtgggaaaggtttatttaaagcaattccgtataagcaagcacaagaattaccagatgaagagtacccgtatttaatgtcgacaggccgaatgctttaccattacaatacccgagcaatgacaggacgaacggaagggattaaccaaatagcgaatcactcttatattgagataaatgcagtcgatgcacaagctctgggaatccaagaaggtgacaaagttgaagttcattctcgacgtggcaaaatcgaaacctatgcggctgtcggaaatcgagtatttccgcaagaagtctttatgacattccactttccagatgggaatgttaacgaaatcaccaatgctgtatttgatgatatcgccacaattcctgaatataaagtttgtgccgttgcgattaaaccagtgaataaa

SEQ ID NO: 21139 - DNA, 1296 bp, Enterococcus faecalis
atgcttaagagaaaccaaccaatgttattagagagaatggggaaaatgcaatctgcgaccgatgttgctgaatattgtaaatacgatggatttgatggtttaaaaagagcaatttcactatcggatgaagaaattttaaacgaactggatattgcgcacttaagaggtcgcggtggagcagcctatcctttaggaaaaaaatggcgccatctttatcatgcaaaaggaaccacaaagtacattgtttgtaatgctgatgaaggcgaaccagggacctttaaggataaagtacttttatctgaagatccattgagtgtgattgaaggaatgattattgctggctatttattttcagcaaaagcaggttatatttatatgcgaggagaatatcgcagaatccaaaaaacatttcaagaagcactcgataatgcacgacaagctggctttttaggggaaaacattttaggaattgaaggattcaattatgatattacgattatttctggtgctggcgcctatatttgtggggaaaattcagcacttttaaattcaattgaaggaaaaacggggcggccgcgtgtcaaaccaccacacttagcagatgttggtttatatttgcaaccaacattagtaaataatgttgaatcatttgcaagtgttcctgtaattttaagagaaggtggacaagcctttttagagatgggtactgccgatggtggcggaacaaagctaatttgtttgtctggacatattaaaaatcggggcttatacgaggtcaaccttggaacaccattagaagaaataatttatggcgagcaatacggcggaggctctgcaactggtcgagcattgaaatttattcacttcggtggacaatccggtccaattggtgctgtcgcaacgttaagggattgtttgtattcctacgaagatttatgggcccatgacttatctgtcggctctggtgcaattgtagtaatggatgattcagttaatgttgtggactatttagtacacgtggcggccttttttgctcatgagtcctgtggtaaatgcaccccttgtcgattgggaacaactaggattttggaattattgagtaaattcaatcggaacgaggcaacagctagtgatttgccgcgattggaaaagatgctcacacatgtcacgcgattatcagcttgtggtttgggccaatccgtcgcaaatccaatgaagagtgcattggctttgtttccagaagaatttgaaacgactgctgaaacagaaatctatgccaccagcaaaggaggttgg

SEQ ID NO: 21140 - DNA, 486 bp, Enterococcus faecalis
atgtgtgcattaagcttaattgaaaaagaagcgattattctagaaaacgatgctgatccacaacgaattttaaatattttaattgaattacaatttgcttcagaggaagggtatatcgatcaggagacagctcaattagttgcagagcatctacatttaacggaagcgcgagtctatgaaatcgtcagtttttatgccattttaaagacggaaccgcaagcgaagtatgtcttgaagatttgtaacagcacaccgtgtcattatactggtggggcgatggttgccgaagttttagaaaccattttagaagtgccagagaatcagccgacaccagatggcttatttatgtatcatagtattccttgtatcggggcttgtgatttaggtccagtaattaaaattaaggacaccgtttttagtcaactaacagaagagaaaatttatcaattaattcaacatttacaaaatgattgctatgaaggactg

SEQ ID NO: 21141 - DNA, 1227 bp, Enterococcus faecalis
atgtatgaaaatctattacctcgttttttacggtatgtgaaaacagaaacacgctcggatgcaactagcacaacgacaccatcaacacaaacacaagtagcctttgcacaaaccttaaaaaaagaattagaagaattagggatgagcgatgttatttataacgaaacaaatggttttgtgattgctacgttacctagtaacgtggagaaagacgttcgttcaatcggctttattgcccatatggataccgctgattttaatgcagtgaatgtttctccgcaaattgttgagaactatgacggagaatcaacgattcctttagataaagaaggcaaattcactttaaacacgaaagactttcctaacttaaaaaattatcgtggtgaaacacttattacaaccgatggtaccactttattaggagctgatgataaatcaggtattgcggaaataatgacagccatggaatatttaattaatcacccagaaattaaacatggcaccattcgtgtggctttcggtcctgacgaagaaattggtgtaggtgccgacaaatttgatgtcgctcaatttaacgtggattttgcttatacaatggatggtgggccagtaggcgaattacaatttgaaacgtttaatgcggcgcaagcagaaattacaattcaagggaaaaacgttcatccaggaacagccaaaaatacaatgattaatgcgttacaattaggaattgatttccataatgccttacctgctgacgaagttccagaaaaaacagcaggtgaagaaggcttttatcatttagcagcgtttgctggaacgccagaagaagctacaatgacgtatattattcgcgatcacaatcgcgagatttttgaagcacgtaaagctaaaattaaagaaattcagcaaacattgaatgcaccatttgatgaagaacgaatcaaagttgatttatttgatcaatactataatatgcgagaagtgattgaaaaagatatgtccattgtcgaaattgctaaacaagcaatggaagaattgtcaattcaaccaattattgaacctgttcgcggtggaacggatggctcaaaaatttcttatttagggattcccacaccaaatatctttgctggtggcgaaaatatgcatggccgttttgaatttgtttcattacaagccatggaaaaagcgaccaatgtgattattaaaattgctgaattaaatgcaaaa

SEQ ID NO: 21142 - DNA, 606 bp, Enterococcus faecalis
atggcgaatcattattatacagaaaatccagaattagcacatgatttagaaagctggtcttttccattacgtggtcggacctttcagtttacgaccgatagcggggtcttctcaagaggaacagtggattatggttctcgtgtgttgattgatgcctttgaatgggaaaatttaccagcaggccgtttgttagatgttggttgtggctatggaccaattgggttgtccttagcagcggcgactggtcgactggtggaaatggtggatgtcaaccaacgggcagttgggctagctcaaatgaacgcccaacgtaaccaaattactactgtggatatccattcttccaatgtgtatgaaaccttaaacgaaacgacctacgcggcgattgttagcaacccgcccattcgtgcaggcaaaaaagttgtccatggcattttaacaggggctcttccgttgttgaaagttggtggcacactaacggtggttattcaaaagaaacaaggtgcacctagtgcagaaaagaaaatggctgaagtatttggcaatgttgaaattgtgacaaaagacaaaggctattatattttacgaagtgttaaagaagcagag

SEQ ID NO: 21143 - DNA, 585 bp, Enterococcus faecalis
atgagaaaaattgtattatttggtgatagcattactgctggttatttagacgaagctgtctcacctgttcttgttgacttagtaaaacgggatattgctgcgatgggtctagaagaagtggctgtcattaatgctggaatgcctggcgatacaacagaggatggtttaaaacgattaaataaagaagtactaattgagaaacctgatgaggtggtgattttctttggcgccaatgatgcgtcactggatcgaaatataacagtagccacgtttagagaaaaccttgaaacaatgattcacgaaattggttcagaaaaggtgattttaattacgccaccatatgcggatagtggcagacgtccagaacgtccacaaacgcgtatcaaggaattggtcaaggttgcacaagaagtcggagcggcacataacttgccagttattgatttgtataaagcgatgactgtttatcctggaacggatgaatttttacaagcggatggtttgcatttttcacaagtgggctatgaattattaggtgccttgattgttcgagaaataaaaggtagactaaaaccaaaacaagca

SEQ ID NO: 21144 - DNA, 1560 bp, Enterococcus faecalis
gtgactaacgttgccgatttgacatctgtcgaaaaaattattgttttagactttggtagtcagtttaaccaattgattactcgtcgtattcgtgaatttggcgtattctctgagttattaagccaccgaactacggcagaagaaattcgcaaaatcgcgcctaaaggaatcatcttctcaggtggaccaaacagcgtgtatgacaaagatgcttttagcattgatccagaaatttatgagttaggaattcccattcttggcatctgctacggtatgcaattaatgactcataacttaggcggaaaagtagaacctgccgcaaaccgtgaatacggaaaagcagaattagaaatccttggtgatgcgacattattccaaggaacacctgcgaaacaaaccgtttggatgagccacggtgatttagtaacagaaatcgctcctggattcgaaaaagttgggacaagcaacgattgtccaatcgcttctatcgaagatgccaaccgcaaattctacggcgtacaatttcacccagaagttcgtcattcagaatatggtaacgacttattacgtcattttgcttttgatgtgtgtggctgtactggtgactggagcatggaaaacttcatcgatatggaagtcgctaaaatccgtgaacaagtaggcgataaaaaagtcttacttggtttatcaggtggcgttgactcaagtgttgtcggcgtgcttttacaaaaagccattggcgaccaattaacttgtatcttcgttgaccatggattattacgtaaaggtgaagcagaacaagtaatggaaagtttaggcggtaaatttggcttaaacattattaaagtagatgcgaaagaacgcttcttaagcaaattagcaggcgtttctgaccctgaacaaaaacgtaaaatcatcggtaacgaatttgtgtatgtttttgatgacgaagcaactaaacttgctggggaagaaggcgtttcattcctagcacaaggaactctttacacagatgtcatcgaatctggtacagaaactgcgcaaacaattaaatcacatcacaacgttggtggtcttcctgaagacatgcaatttgaattaattgaacctttaaatacattattcaaagacgaagttcgtgccttaggaactgaacttggcatgcctgatgcaatcgtttggcgccaaccattcccaggaccaggattaggtattcgtgtgcttggtgaaattacagaagataagttacaaatcgttcgtgattcagatgctatcctacgtgaagaaatcgcagcagctggcttagatcgtgacatttggcagtactttactgtcttacctggcatccgctcagtaggcgttatgggcgatggccgtacctacgattacacagtcggtatccgtgctgtgacttctatcgacggcatgaccgctgactttgcccgtatcccttgggatgttttacaaaaaatctctgtgcgcatcgtgaacgaagttgcacatgtaaaccgtatcgtgtacgatattacttcaaaaccacctgcaactgtggagtgggaa

SEQ ID NO: 21145 - DNA, 1356 bp, Enterococcus faecalis
gtgaggcaagtgccttcatttaaacaatttcaatttcaaccttttatcaacgaagcactcgcagaaaaagggtttgaagaaccaacagaagtccaagaaaaattaatcccaatcattaagaaagggaaaagtgttattggacaatcgcaaacaggaagtggaaagacgcatacttttttacttccattaatggataaagttaagccaactatcgacgaagtacaaattgtgattactgcgcctagtcgtgaattagccaatcaaatttatcaagaagcgcagcaactggctcgtttcagtcaaccagaaattcgagtgtcaaattttgttggcggaacagataaacaacgtcaattaaataaattaaagcatcagcaacctcatgtggtgattggtacaccagggcgtattttagatatgatgaatgaacaagccttgaaagtgcatacggcttttgcctttgttgtcgatgaagcagacatgacattagatatgggctttttagcagaagtcgatcaaattgcgggtcgtttgccagaaaaattacaaatgctcgttttttctgcaaccattccagaaaaattacgaccatttttaaaaaaatatttagaaaatccagtgattgaacatatcaaaccaaaagcagttatttcagaaacaattgacaattggttgatttccaccaaaggaaaaaacagcaataaaataatttatcaattattgactatcgggcatccttatttagcgattgtttttgcaaatactaaacaaagagttgatgaaatcaccgattacttaaaagatcagggcctaaaagttgccaaaattcatggagacattacaccacgcgaaagaaaacgtgtgatgcgtcaagttcaaaatcttgactaccaatatgtagtagctactgatttagccgcacgtgggattgatattgaaggggtttcacatgtcatcaatgcagaagttccacatgaattggacttctttatccatcgggttggccgcacaggacgtaatggattgaatgggactgccataacattatattcaccagcagatgatgaagcgattactcagattgagcagttaggtgtttctttcaaaccaaaagaaattaaaaatggtgagattgtagagacgtatgatcgtaatcgtcgaacaaaacgagaaaaatctcgagaagaattagacccaacgttaattggtttagtgaaaaagaaaaagaaaaaaattaaaccaggatacaagaaaaaaattaattgggcaattgaagacagcaataagaaaaaacgtaaaattgaacgtcgtcaaaaagatcgttctgctaggaaagcaaaaaagaattcttctaac

SEQ ID NO: 21146 - DNA, 1431 bp, Enterococcus faecalis
atggagaaaattaaaagttaccaagaggattctgaagtgcagaaaaatcgttggtggatcttagtttctgtggctatgtttaccttcatgtctacattagattccagcattgtaaatattgctttaccgactatttcaaaagaaatgtccgtacccatgaatcaagcggaatgggtcgtatctatttatttaatggttgtctgtgcttgtttattattatttggaaaaattggcgacagttttggaaaaataaaagtttatcgaattggcacggttatttttacgattggttcgttactttgtggctttaatcaatcgctgagctttctattatttgcgcgagtcgttcaaagtattggtgctagcatgaccatggcgaccaattcaggaattattacggaagtattccctttaaatgaaagagggcgggcgcttggtgcagtaggtgcctttgtctctttaggcgcgattgctggtcctgggattggtggattgatcttatcaaacttttcttggtcgtatattttttggattaatgttcccgtggggctagttacaattttaattggcgaaaagttcctaccaaaagatattacaaaaacaaaagaaaaaatcgatttttcaggatttgcttgtattgccattgcgattatgacgttcttcggcgggattttcctcggacaagagagcgggtttggctcgttacaatcctatttattgttcattattgcagtaatcgcattaggattatttataatggttgaacgaaaaagaaaaagcccacttattaagttcgcaatttttaaaaacaaaatttttactttaagtttattgtccgccgttttaatttttgcctcaaacttttttgtaaatgttgtcattccattttatttgcaggatgcacgcaaactaagtgctagttatgctggtctattaatgatggtatttccgttattaatggtggttggggctcctctgagtggctatttgacggataaaattggcccaggtattttaacatttggcggattgttgctcttgtgctgtacgtcgttaatgtatatgtttttagatatgaattcgcctatctggtattatgtgattgcaacggccattatgggcttgggaaatgcacttttccagtctccaaacaatacaatggttatgagcagtgttgaaaagcaagatttaggtgtagcaggaagtatgaattcttttgctagaaacttaggaatggtcattgggattgcgttgtcaacgaccattttatatcgtggcatgagcgaagcctatggtgaacgagtaaccacgtatctggctaatcgcccagatatatttattgtgggaatgcgtgaaaccttttttgtcgcctttctattatgtgtggcggcctttatattaacgattttacgttttcggaaaacaaccaaa

SEQ ID NO: 21147 - DNA, 198 bp, Enterococcus faecalis
atggaaacaggtacagtaaaatggtttaactcagacaaaggctttggcttcatcactgcagaaaacggaaacgatgtattcgtacatttctcagctatccaaggtgacggcttcaaaactttagaagaaggtcaagcagtaactttcgaaatcgaagaaggtcaacgtggccctcaagcaactaacgttactaaagct

SEQ ID NO: 21148 - DNA, 846 bp, Enterococcus faecalis
atgaaaaaaatgattattattgccttattcagtacaagccttttagcagggggaagcagtgtttctgcttatgcgcaagaatcagaaggaaatcttggtgaaacaacagggagtgttttaccagatgaaccgaatgtaccaactgacccaataacgccaagtgagccagagcaaccaacagagccaagtacaccagagcaaccatcggaaccgtcaacaccaaccgaacctagtgagccttcaaaaccgacggatccttcgttaccagacgaaccgagcgtaccaacagagccaacaacgccaagtaagccagagcaaccaacagagccaacaacgccaagtgtaccagagcaaccaacagagccaagtgtaccagaaaaaccagtagaaccaaataaaccaaccgagccagaaaagcctgtgccagttgttcctgaaaaaccagttgtaccacaacaaccagagcaaccaacagatgtggtggtaaagccaaatggagaaattgcaacaggagaatctacacaacagccaactgttccaattgaaacgaataacctttcagaagtaacacatgtcccaactgtgacgacaccgattgaaacagcaagcggagaagcaattgtcgcagtggataagggcgttcctttaacacaaacggctgatggattaaaaccgattaaaagtgaatataaagtattaccaagtggcaatgtacaagtgaaaagtgctgacggaaaaatgaaagtacttccttacactggtgaaaaaatgggcataattgggtcaatcgctggtgtatgtttgactgttttatcaggaatcttaatttataaaaaacgtaaagtg

SEQ ID NO: 21149 - DNA, 2409 bp, Enterococcus faecalis
ttgaaaacagtagttattattgatgcattacgaacaccaattggaaaatataaaggcagcttaagtcaagtaagtgccgtagacttaggaacacatgttacaacacaacttttaaaaagacattccactatttctgaagaaattgatcaagtaatctttggaaatgttttacaagctggaaatggccaaaatcccgcacgacaaatagcaataaacagcggtttgtctcatgaaattcccgcaatgacggttaatgaggtctgcggatcaggaatgaaggccgttattttggcgaaacaattgattcaattaggagaagcggaagttttaattgctggcgggattgagaatatgtcccaagcacctaaattacaacgttttaattacgaaacagaaagctacgatgcgcctttttctagtatgatgtatgatggattaacggatgcctttagtggtcaggcaatgggcttaactgctgaaaatgtggccgaaaagtatcatgtaactagagaagagcaagatcaattttctgtacattcacaattaaaagcagctcaagcacaagcagaagggatattcgctgacgaaatagccccattagaagtatcaggaacgcttgtggagaaagatgaagggattcgccctaattcgagcgttgagaagctaggaacgcttaaaacagtttttaaagaagacggtactgtaacagcagggaatgcatcaaccattaatgatggggcttctgctttgattattgcttcacaagaatatgccgaagcacacggtcttccttatttagctattattcgagacagtgtggaagtcggtattgatccagcctatatgggaatttcgccgattaaagccattcaaaaactgttagcgcgcaatcaacttactacggaagaaattgatctgtatgaaatcaacgaagcatttgcagcaacttcaatcgtggtccaaagagaactggctttaccagaggaaaaggtcaacatttatggtggcggtatttcattaggtcatgcgattggtgccacaggtgctcgtttattaacgagtttaagttatcaattaaatcaaaaagaaaagaaatatggagtggcttctttatgtatcggcggtggcttaggactcgctatgctactagagagacctcagcaaaaaaaaaacagccgattttatcaaatgagtcctgaggaacgcctggcttctcttcttaatgaaggccagatttctgctgatacaaaaaaagaatttgaaaatacggctttatcttcgcagattgccaatcatatgattgaaaatcaaatcagtgaaacagaagtgccgatgggcgttggcttacatttaacagtggacgaaactgattatttggtaccaatggcgacagaagagccctcagttattgcggctttgagtaatggtgcaaaaatagcacaaggatttaaaacagtgaatcaacaacgcttaatgcgtggacaaatcgttttttacgatgttgcagatcccgagtcattgattgataaactacaagtaagagaagcggaagtttttcaacaagcagagttaagttatccatctatcgttaaacggggcggcggcttaagagatttgcaatatcgtacttttgatgaatcatttgtatctgtcgactttttagtagatgttaaggatgcaatgggggcaaatatcgttaacgctatgttggaaggtgtggccgagttgttccgtgaatggtttgcggagcaaaagattttattcagtattttaagtaattatgccacggagtcggttgttacgatgaaaacggctattccagtttcacgtttaagtaaggggagcaatggccgggaaattgctgaaaaaattgttttagcttcacgctatgcttcattagatccttatcgggcagtcacgcataacaaaggaatcatgaatggcattgaagctgtagttttagctacaggaaatgatacacgcgctgttagcgcttcttgtcatgcttttgcggtgaaggaaggtcgctaccaaggcttgactagttggacgctggatggcgaacaactaattggtgaaatttcagttccgcttgctttagccacggttggcggtgccacaaaagtcttacctaaatctcaagcagctgctgatttgttagcagtgacggatgcaaaagaactaagtcgagtagtagcggctgttggtttggcacaaaatttagcggcgttacgggccttagtctctgaaggaattcaaaaaggacacatggctctacaagcacgttctttagcgatgacggtcggagctactggtaaagaagttgaggcagtcgctcaacaattaaaacgtcaaaaaacgatgaaccaagaccgagccatggctattttaaatgatttaagaaaacaa

SEQ ID NO: 21150 - DNA, 1404 bp, Enterococcus faecalis
atggtagtaggagatttcgccattgaactagatacagtcgtaatcggagctggtcctggaggatacgttgccgcaattcgtgccgcagaaatgggtcaaaaagttgcgattatcgaacgtgaatacatcggaggcgtttgtttaaacgttggatgtattccttcaaaagctttaattgctgctggacatcattaccaagaagcacaagattcttcaacttttggtgtaacagctaaaggagtcgaattagactttgcaaaaacacaagactggaaagataacacagttgtaaaatcattaacaggcggcgttggcatgttattgaaaaaacacaaagtagaaattattgaaggcgaagcattcttcgttgacgaaaatacattgcgtgttattcacccagactcagcacaaacttactcattcaataatgctattgtagcaacaggttctcgtccaattgaaatcccaggattcaaatttggcggacgcgtgttagattctacaggcggtttaaacttaaaagaagttcctaaaaaattcgttattatcggtggcggtgtcatcggtgctgaattaggtggcgcttatgctaacttaggttcagaagtaacaattttagaaggtagcccatcaattttaccaacttatgaaaaagatatggttaaagttgtcacagaccacttcaagaagaaaaacgtaacaatcgtgacttctgcaatggctaaagaagctgttgacaatggcgatagcgtcactgttaaatatgaagttaacggaaaagaagaaagtgttgaagcagattacgtaatggtcactgttggacgtcgtccaaacacagacgacttaggcttagaacaagcgggcgttgaaattggcgaacgtggtttaatcccagttgacaaccaaggacgtactaacgtgaaaaacatcttcgcaatcggcgacatcgtaccaggtgctgcgttagcgcataaagcaagctacgaagcaaaaattgctgctgaagcaatttctggtaagaaagttgcagttgattacaaagcaatgccagctgttgcctttactgatccagaattggcaagcgttggtatgactgttgcagaagcaaaagaagcgggaatcgaagcaaaaggctacaaattcccatttgctggtaacggccgtgcaatctctttagataaaactgaaggattcatgcgtttagttacaactgtagaagacaatgtcatcatcggtgcacaaattgccggtgtcggtgcaagtgacatgatttctgaattagctttagctattgaatctggcatgaatgcagaagacattgctttaacaatccacccacacccatcattgggcgaaattactatggatacagctgaattggctttaggtttaccaattcatatt

SEQ ID NO: 21151 - DNA, 1617 bp, Enterococcus faecalis
atggcttatcagtttaaattaccggatatcggtgaagggattgccgaaggcgaaatcgttaaatggtttgtaaaacctggcgatacaatcaacgaagacgatacgttattagaagtacaaaatgacaaatcagtggaagaaattccatcaccagtaacaggtactgtaaaaaatatcgttgtaccagaaggaacagttgcaaacgttggtgacgtgttaatcgaaatcgacgcacctggtcacgaagataacgatgcagcaccagcagctcctgcacaagaacaaacaccagcacaacctgctgctgtaccaacaaccgaagcagctggcggatttttccaattcaaattaccagacatcggtgaaggaattgccgaaggcgaaatcgttaaatggttcgttaaagcgggcgacacaattaatgaagatgattcattattagaagtacaaaatgacaaatcagtagaagaaattccatcaccagtaacaggtactgtaaaaaatatcgttgtaccagaaggaacagttgccaatgtgggtgacgtgttagttgaaattgacgcacctggtcataattcagcagcaccgtcagtcgcagcaccagctactgacgctcctaaagcggaagcatcagctccagccgcttcaacaggcgtagttgcagccgctgatccaaacaaacgcgttttagcaatgccatctgttcgtcagtatgcgcgtgaaaaagacgttgatattacacaagtaactgcaactggtaaaggtggccgtgtcattaaagcggatattgatgcctttgtctctggtggttctcaagcagccccagctactgaagctgccgcaacagaagcagcacctaaagcggaagcagctgcacctaaagcagcgccaaaagcctttacttctgatttaggcgaaatggaaacacgtgaaaaaatgacaccaacacgtaaagcaattgctaaagcaatggttaacagcaaacacactgctcctcacgtaacattacatgatgaagtagaagtttctaaattatgggatcaccgtaagaaatttaaagatgttgctgctgcaaatggtacaaaattaacattcttaccatacgttgtaaaagcattgacttcaactgttcaaaaattcccaatcttgaatgcatcaatcgatgacgcagcacaagaaattgtttacaaaaattactttaacattggtatcgctactgatacagatcatggcttatatgtaccaaatgttaaaaatgctaatacgaagagcatgtttgctatcgctgatgaaatcaacgaaaaagcagcattggctatcgaaggtaaattaactgcacaagatatgcgtgatggtacaatcacaattagtaacattggttcagtcggtggcggctggtttacaccagtaatcaactaccctgaagttgctattttaggcgttggtacaattgcacaagaaccagttgttaatgcagacggcgaaatcgttgtgggacgcatgatgaaattatcattaagctttgaccaccgtatcgttgacggcgcaactgctcaaaaagcaatgaacaacattaaacgcttattagctgatccagaattactattaatggaagga

SEQ ID NO: 21152 - DNA, 975 bp, Enterococcus faecalis
atggcacaaaaaactatgatccaagcaattacagatgccttagctcttgaattagagaaagacgaaaatgtcttaatcttcggtgaagacgttggtaacaacggtggggttttccgtgcaactgaaggtttacaagaaaaatttggtgaagaccgcgtcttcgatacacctttagctgaatctggtatcggtggattggctttcggtcttgccttgcaaggttaccgtccagttcctgaaatccaattctttggtttcgtttttgaagtatttgacgaaatcgttggtcaaatggctcgtacgcgttaccgtatgggtggaactcgtaatatgccaattactgttcgtgccccatttggtggtggtgttcatacaccagaacttcactcagataacttagaaggattaatcgcacaatcaccaggtgttcgtgttgttattccatcaaacccttacgatgcaaaaggactattaatttcatctattcgtagcaacgatccagttgtttacttagagcacatgaaattataccgttcattccgtgaggaagtgccagacgaagcttatgaagtgcctttagataaagcggctgtaactcgtgaaggaacagacgtatcaatcatcacttacggtgctatggttcgtgaagcgattaaagcagctgatagcttagcgaaagacaatatttcagcagaaatcattgacttacgtacagtggctcctttagatgtggaaacaattattaactctgttgaaaaaactggccgtgtggttgtcgttcaagaagcacaaaaacaagctggcgttggcgctatggttgtttctgaaatttctgaacgtgccgtattatcattagaagcaccaatcggacgtgtatctgctccagatacaatcttcccattcggacaagcagaaaatatctggttaccaaatgcgaaagatatcgaagcaaaagctagagaaatcgtcgaattt

SEQ ID NO: 21153 - DNA, 963 bp, Enterococcus faecalis
atggacattatttcttatgagagggttattcaacaattgtcgttttccgaagcaattcaagtgatgaaacgttgctttgcagagttgcaaaaaggaaaaatttcgcaaagtgagcgccatgtagaggttttaccagatgggaaaaatcaaaatctttttgcattaatgcctgcttacttaggaaaaaatcgcttttttggggcaaaaatcattacagcttttccagaaaatccacaaaaaaatttggcctcgcatcttggtcaaattttattgtttgatagttctactggaagaccagtcgcgatgatggacgccaatgcgattacgtggcttcgcacggcagctgtttctgctttggcaaccgattatttagcagctccaaaggcaaaaagtatcgctttgattggtgcaggtcaacaagcttcatctcatctcgcagcgctacaaagcgttcgggcgattgaaaaggtttttatatatgaccgcacagcagaacgtgcacgaaaattaatcgctaagcaacagcacaattaccccgaatgtacctttattggttgttcttctgtccaagaagccgtccaggaagcggaaattatctgtacactaacttccagtcaggacgcatttttagaagaaaaagacgttttgccgaatgcccatatcaatgcaattggtacattcacgccgacttccagagaattaacaagcgaccttgttaaaaacagtcaagtgtttgtagatgagtatgcggctgcattaaaagaaagcggggatcttttaattccgatttcagaaggtgccttttcagctgaaaaaattgtaggttctctcggcgaattagtcactggcaaagttaaactaaaggcggagcagaaaggccgcacgatttttgatgcggttggcttagcagttgaggatttgtgttgcgcggaatacatttatcaaaaaatacaaggagagaat

SEQ ID NO: 21154 - DNA, 441 bp, Enterococcus faecalis
atgaattcattgccaatatttgaaaaagcagtgggcacgattaccctgctttccgaagaaaaacaaaatgccgaatatgaaggctttttatgtcaagttaatgaatcgcaacaacttatccgcagtcgcttagccaaaaaaacgccgaaaaaagaaggctattttgtagccttctgggaaaaaaatcaacaaaatcagaacgaagcctttgatgcaacggaagcccctgaaatgttagcaattgtcattgctgatcaagaaaagcaaggtctctttcttctgccaaaagaatgtttaatccaacaaaaaattctcaaaacgcatcaacaaaaaggcaaaatggcggcccgtttttatccttcttggtgccaaaaccttaatcaaaccgccaaaaaaacacaaaaatggcaactaacttactttactgatttatctaaatac

SEQ ID NO: 21155 - DNA, 1113 bp, Enterococcus faecalis
atggcaaaggctaagaaacaaaaacctattgactttaaagagctaatggctaaagtcgacgctgatttcccaactttccaaatcttggatcaagatggaaaaattgtgaatgaagatttagtacctgatttatcggatgaggaattagttgaattaatgacacgcatggtttggtctcgtgtgttagaccaacgttctactgcattaaaccgtcaaggacgcttaggattcttcgcgccaacagctggacaagaagcaagccaattggcaagtcaatttgcaatggaaaaagaagactacttactaccaggttaccgtgatgtacctcaattagtacaacatggtttaccattaagagaagctttcttatggtctcgtggtcacgtagcagggaactactacgcggaagatttaaatgcattaccaccacaaattatcattggtgctcaatacatccaagcagctggtgttgctttaggattgaaaaaacgtggaaaagaaaatgttgtcttcacttatactggtgacggcggttcttcacaaggggacttctatgaagcaattaactttgctggtgcttaccaagcaaacggtgtcttcattatccaaaacaatggttttgcgatttctacacctcgtgaaaaacaaacagcggctaaaactttagctcaaaaagctgttgcagcaggaattcctggtattcaagttgatggtatggatccattagcagtttacgcaattgcaaaagaagcacgcgattggtcagctgcaggaaacggtccagttttaattgaaacattaacttatcgttatggtccacatactttatctggagacgatccaacacgttaccgttcaaaagaaatggatgacgaatgggtacaaaaagatccattgactcgtttccgtaaatatctaacagataaaggcttatggtctgaagcaaaagaagaagaaattattgaaaaaacaaaagaagaaatcaaagtagcgattgcagaagcggataaagcgccaaaacaaaaagtttctgatttcttgaaaaatatgtttgaagttcaacctcaaacaattaaagaacaaattgcattttatgaagcgaaggagtcgaaa

SEQ ID NO: 21156 - DNA, 2637 bp, Enterococcus faecalis
gtgaccacaaccttggaggaaaagaaaatgatgaacaaaaaaacaatggatatgagaaaagcaaccaaagatcaagaattacgtaaattggctttgctttctgaacgggaattaatgatggaattacggacatctgaaaaaggactctcgaatgaagatgccgaaaaaagattagaggaatttggaccaaacgaagtttctgcacaaaagccaaccccagcaattattttatttttaagtgcattcaaagatccgtttgtctatgtcttagccttattgatggtcgtttcaactttaacgaaagatttcgaagccgctatcgtgatgggcgtgatgattttagccagtgtcttgattgcttttatacaagagtatcgttctcaaaaagcgagtttggatttaaaagaattaattgaaaataccgctgcagtgacacgggaagggattacgaaagaaattccaatggacgaaattgttccaggagacattgtaactttagctacaggagacatgattcctgcagatgccgtgttgatttggaccaaagatttattcgttaatcaatcgtcgctaacaggcgaatccatgcctgtcgaaaaatttgtggatgcaggtgtggatcgtcaacaaacagaggtttctgcattagatatgcaagacctagtgtttatgggcacagatgtcttgagtggacaaggaaaagcgattattttaaaaactgggcaacatacattttttggtgatattgctaaaaatgctacaacacaacgaggaaaaactagttttgacttaggcttagcaaaagtcagtaagtttttattacgaatggtaatgattttgtttccaatcgttttcttgattaatggtttaactaaaggtgcttggggcgaagcgtttttcttcgcgattgccgttgcagttggtttgacaccagaaatgttgccaatgattgttacgagtaacttagccaagggtgcattatccttatcgaaacataaagtcattgttaaagaattagcggctatccaaaatttaggtggtatggatgtgctctgtacagataagactggaacgattaccgaagatcgtgtagttttggttcaacatttgaatccattaggtgatttgagtgacgaggttctaaatttagcctacttaaattcttcttatcaaacaggttggaaaaatttaatggatattgccgttattaatttttatgaagagcatcaatggaaaacgccgtttaaaaatgtcactaaaattgatgaaattccttttgatttttctagacgccgcttaacggttgtcgtgaatgcagatgatcatcaattgatgattacgaaaggcgccgtggaagaaatggaagaagtgtgcacgcatgcgcaaattaatggcgaaattgtaccattaagcactgctgtacgagaagaactacgccgagtgaatgttcaaatgaacaaacaagggatgcgtgtgttagcggtagctgtaaaaaaagatgtccataaagaagcagtttattcagttgaagatgaaaaagagatgacattgattgggtttatgggttttcttgatccagcaaaagagtcagccgtcagcgctatccgctccttacatgaacatggtgtcaacgtgaaagtgctaacgggcgataatgacattgtcgccaaaaaagtctgtaaagatgtaggcattgaagtttcccatgtgttattaggttctcaaattgaagcaatgacagatgaagagttgcgggcgcaagtagaagaaactaatttatttgccaaattaaatccgatgcaaaaatctaaaattattgaattgctacaagcaaaaggtcatacggttggttttatgggggatggcattaatgatgcaccggcattacgaaaagctgatgtgggcatttcagtagatactgcagctgatattactaaagatgctagctcgattattttactggaaaaaagtttaaatgtactggaatctggtgtgattgaaggacgaaaagtatttagcaatatgatgaaatatattaaaattaccatcagttctaattttgggaatgtcttttcaattttagtagccagtgcctttttaccatttctaccaatgctttccttacaactcttgattcaaaatttgatttatgatgtggctcagttgacaattccttgggataatgtcgatgaagaagagttattaagccctgttcggtgggaaacgaacggactagcgaaatttacggtatgtattggcccggtaagtagtattttcgatattctaacgtatcttgtcatgtggtttgtgtttagtgccaatagtttggcaactcaacatttattccaaacaggttggtttatggtgggacttgttagtcaaacgttagttgttcatatggtccggacgcggaaaataccatttattcaaagtcgtgcgtcaatgcctgtgatgctaagtagtttaggcgcaatcttactcggtttcttgattgtagcaacgcctataagagaggtttttgactttgtgaaacttccggctaactactggccatggttctttggaatcatcattgcgtacatgttaactgttgaagtagctaaacgtttatatattaaaattaccaaggaatggatt

SEQ ID NO: 21157 - DNA, 1611 bp, Enterococcus faecalis
atggaccaatggtggaaaaatgctgtcggttatcaaatttatcctcggagttttaaagatagcaacggggatggcattggtgatttgcagggaattattgagaaattaccgtatttaaaagaactaggggtcgattttttatggttaaatccgatttacacttcgccaaacgttgacaatggttatgatattgcggattatcaagggattcagccagagtttggtacgatggaagattttcaagaacttttggaccaagcgcatcaattaggtttgaagattattcttgatttagtggtcaatcataccagtgatcaacatccgtggtttgttgaagcgaaaaaaagtttagataatccgtatcgtgagtattatttatgggccgatgcgacaccagatcgtatgccgaatgaatggcaaagcttttttggtggctcgacttggacgtatgacgaaggtacaaagcaagcatattttcatgtgtttgcaaaagagcaacctgatttgaactggaaaaatcctaaagttcgtgaagagatttatgcgatgattcgctggtggttagatttgggaattgatggtttccgattggatgcgattagtcatatccaaaaagaaccttgggattttaaaattaccacgaatccgtgggctccatttatgaatgtaaaaggcattgaagactatatgctggatttgaaagttatttttgctgagtatgacatcatgacagtgggggaagctagtggcgtttcaagtaaaaaagcggtggaatggaccaatgatgcgggctatctgaatatgatttttgaattagagcacaatgttcgagaaggaaagccaggagaagaacggttaaatattttaggctataaaaaagtaatggctcgctggcaaaagcatttagggacagaaggctggaatgcattatatgtagaaaatcatgataatcccagaatcaattcaattttaggcaatgaaacctctcattctgctaaggcgattggaacaatcgccttgctcttgcgaggaacaccgtttatttatcaaggacaggaaatcggcatggttaattatccgtttcaacagattgacgagttagatgctaaagattctcataaccattatcgtttgcttatagaaagtggctacgatgcgaaacaagcattaaaagaagtggcgcattggacgcgggaccattcgcgtacgcctatgcagtggacgagtcaagaggcaagttcattcacctcggggcatccgtggttagcaattcatcccaatttcaaagaaataaatgtggctgaccaagaaacggatgcgcaatccgtattgaattattataaaaagttaattgcgttgcggaaagacaatccggtctttacagatggacagtttgaactattagcgcccaatcatccgtctgtttttgcttttttaagaaaaacaactgaggcaacagcgttagtgattgtcaatttaagtggagaaaagtgccaatttgacttgccgaataaattactaggcagaaagtggcaacaattattagggaatcaagattttacggtgaagaaacggatgcagttagcaccttatcaggcaggcgtcttccaa

SEQ ID NO: 21158 - DNA, 1764 bp, Enterococcus faecalis
atgaacactgctgcaatctaccatcgtccagaaagtgaatttgcttatctttatacagaagaaaccatgcatattcgtttgcgtacggcaaaaggcgacattgcctctgtccaattagtgcaaggagatccttatcttttagggaaagaaaagtggtaccaacagtcgttaaccatggagaagttagtatctacggagttatatgattactggtttattgcattaagtgcaaaatttaaacgcctttcatatgcttttactttagtaggggcggatggtttgagggcgttttatggcgaacacggcatttatcctttagaagaaaagtatttagagatggcgaataattattttcggatgccgtattttcatgaaatcgatcgttttaaagcacctgaatgggtaaaagaaacggtttggtatcaaatatttccagagcgttttgcaaatggtgatctcgccaatgatcctgaagggacgttgccgtggggatctaaaagaccagatcgacaagatttttttggtggggatttgcaaggggtgctagatcatcttgattacattgaagatttaggtgttaacggcttatatttttgcccaatttttgaagcgttttctaatcacaaatatgatacgattgattatttaaaaattgacccagcttttggtgatggtgctacctttaagcgtttagtcgaagagtgtcatcgacggggcatcaagattatgttggacgccgtttttaaccatatgggggacacttcgcctcaatggcaagatgtgttaaaaaatggccaggactcaatttatgccgattggttccacgtaaatgagtttccagctagctatgaagaaagtgctgattttgaagaagcaagcaacattacctatgatacttttgcattcactccgcatatgcctaaattaaatacagcaaatccagaagtgcaagcctatcttttagaaattgctcgttattggattgaggaatatgatattgacgcctggcgtttagatgtggcaaacgaagtggatcatgcgttctggaaaaaattccggcaaacatgtgatgacgcaaaagaagatttttatattttaggagaaatttggcactcgtcgcaaagctggctccaaggagacgaatttcatgcagtgatgaattatgcatacacagatgcgattatgggctactttgtcaagcaagaactgtccttggaaaagatgctttctgaaatgaacaaccagttaatgctctatcgacaacaaacgaatcaaatgcagtttaatgttttagattcccacgatacaccacgcttattgcatgaaacgaaagaggataaagagctgatgcgccaagtattagcgtttacgtatattcaaccaggtgtcccttgtctttactatggtgatgaaattggtatgacaggtgatatggatcctgattgtcgtcgttgtatggtttgggaggaaaatcagcaagatttggatttgaaggaatttgtaaaatcattgattgcccttcgcaaaaagtatgcggctgttttttctggtggaacaatcgattggacaggaacttcttttgaaacggggttgattagactcgcttgtcgtttggaggaacagacgatttatgggatttttaatactggccaagagacacaatttgtcgatagaactgatcgagaagttttgctaagttcttctatcgaaattgcttcagaacagataatggttttaccaaaaggttttcttttatatcaagca

SEQ ID NO: 21159 - DNA, 1248 bp, Enterococcus faecalis
atgaaagcgaattggaaaaagattttaatgggcggtatccttttaagtgcttccgcggttttacttactgcctgtggtggcgcagaaaaaacgaaagctgaaaatgaaagcggttcagcaaataaagcagctggtgacgtaaaattatgggttgatactgaatatatgggcgtctttaaaaaagttgtcgccgattttgaaaaagaaaaccccgatattaaagttaacttaactgctggaaattcggcagatgctaaaaaagacattgcaaaagatcctaaagctgccgcagatgttttcatgatgccacatgatcaaattggtcaaatggcagaagctggtctgatttaccctaacacaaaatatgaaaaagaagtcaaagaaaacaatatcgactcggcagtcgcaggagtcacttggaaagacaaagtctatgcctacccttatgccgtagagtcacaagttctttattataacaaagatacgtattctccagaggaaattaaaacttggaagtctttaactgaaaaaggcaaaatcggtaccaattttggcgaagatggcgcaaattatatcttcggtcctctatttatgagtaacggcgattacttatatggtgaaaatggcgaagatccgaaaggtaccaactttaacaaccaacaaggtatagaagtattacaatggattgccgatcaaaaaaataatcctggtgtgatccaatcaaatacagaagcattgtctaatctaggttctggcaaaacggatgccttcctttctggtccttggtctaaaaacgatgtagaaaaagctcttggcgacaaaatgggggccgctgcctacccaaccattgattttggcaatggagaaaaacaaatgaaagctttcttgggcgttcgtagttttgctgtcaaccaacaaacacaagcaccattggccgcaatgacattagcaaactatttaacaagtgaaaaagcacaaatgacttacttcaaagaaatcggttttgtcccctcaaacaaaaaattacaaacaaacgaagaaattacacaagatactgttgcaaaagctatcttagaaatggcgcaaccaacccactctgtggtaatgccaaaaatcccagaaatcgtttcattctggcctgcgatggatgcagtgatcaatgatacgtacaaaggcaatatcaaacctgcggattatcaagcaaaattagataaattagtccaagacacatcaaaagaagcaaaagaa

SEQ ID NO: 21160 - DNA, 1020 bp, Enterococcus faecalis
atgatgaaagccgctttaattcataaatacggacaaaaagaattagcaatcgaggaggtgcccttacccaccattcatgacaatgatgttttggtcaaaattatcgctgccagtatcaacccgattgatttaaaaacaaaagatggcaaagtaaagatgcttttagattatcaaatgccactgattttaggcagtgattttgctgggattgttgtctctgttggaaaaaatgttcaaaattttaggctgggcgatgcagtttacgggcgagtacccaaaaatcgcgtgggaacttttgctgaatatattgcagtggatcaagcggctgtagctatgaagccgaaaaatttaacgtttgaagaagctgcggccattccgttagtcggtttgacaagttatcaagcgctacatgatattatgaatgtacagccaggccagaaagtcctgattcaagcaggttcaggagggattggaaccattgcgattcaattagcaaaactagcaggcgcttacgttgccaccacaacgagtagtaaaaataaagaatgggttcaagcgttgggagcagatgaagtgattgactatcggacacaaaattttgaagaagttttatccgactatgattatgtgtttgatacaatgggggggacaatcttagaaaaagctttctcagtggttaaacctcagggaaaagttgttacattgtcaggcattcccaacgaacgttttgctaaagagtatggcttgccgctttggaaacaatgggcctttaaaatagctacccgcaagattcatcgattggagcaagccacagatgttagttatcattttttgtttatgcgtccagatggcgagcaattagctttactcactgagtttattgaacagggaaaattacagccgataattgaccgagtcgttccttttagccaaattcaagaagcggtagattattcattgacaggacgagcgcaagggaaaattgttgtgaaaatcgccgaattaataaacatggatggt

SEQ ID NO: 21161 - DNA, 678 bp, Enterococcus faecalis
atgaaaaaaattctcgtggtcctcacaaacgtctcccgttatcacggcaccgaagaaccaacgggcctctggctaggtgaagccacggagttcgtggaagaagtaaccaaagcaggattttcagttgactatgttagtccccaaggaggctatgtccctttggatccccggagtatgaaatatgtagattcatccattatggcagtttatgaaagtgctgattttcaagaacgagcgctagcacattccctctctcttgaagaaattgagccagatgaatacgcagcaatttactttacaggaggccatggcgttatgtgggactttcctgataatcctcagttgcaagcaatcactcgtagcctttacgaacagggcaaatacctaacttctgtttgtcacggaattgctggccttttaaatgtcaaagatgcgtcaggaaattatttgattgcagataaaaccattactggcttcactactgcagaagaaattttagccatgaaaaaagcagttgttcctttcttaaacgaaacaattgccaaagaacatggtgctacttttgcgaaaaagcgtccctataaagaatttgcgtatcaagatgaccgtataatcactgggcaaaatcctttttctgtccgcgctgtcgcaagattgttaattcaacaactatcaaaa

SEQ ID NO: 21162 - DNA, 1449 bp, Enterococcus faecalis
atggcagaaaaaaagaagaaaaacaaaaaacagctttcgtcttttagtattttatttattattttaattgttttaggtatcgtaacggtcttgctaaatggccagccatttaccccaagagaaattgatggcaaaatggttgaccacgtggtaggggccaaattatcggatattatcatggctccattcaatgggtttaaagatgccattgaaattaatatttttattttagtactcggtggctttttaaatattgtgacgcaaactggggctcttgaagcagggattcaatcagtcgttaaaaagttaaaagggaacgaattgaaaatcattccgattttaatgattttattttctattggtgggtcgacttatggaatggcagaagaaacaattcctttttatggtttattgagtgctaccatggtcgccgctgggtttgatacgtttgtcgcagtgggtactgtgctattgggtgcaggatcaggtgttatcggttcaacggttaaccctttctccacaggggtagcgatggatgcgttgcgaggtattggcattcagccgaatacaggaattattttaattgtcggtgctattttgtgggcggcctctactagctattctattttcattgtgatgcgttatgcgaaaaaagtgaaggctgacaaaggttcaacaattttatctttacaagaacaagaggatatggaaaaaacgtatggacaagcagcgtcgaaagaaatgccatttacgaatcgtcataaaaaaatcttaatggtattcgctttctgttttgtcattatgattgtttccttaattccatggaacgactttggagtgacgattttcaaaggctggacgtctgttttaacaggcaacagtttcggtgactggtactttggcgacttagcgatgtggttcttccttttagggatcattgctgccttgattggtcgctttactgaaaaagaaaccattgaagcatttatcgacggtgccaaagatatgttatccgttgttttaattatcgtagttgctcgcggggcatctgttttgatgtctaaaacgtatttagattcatttatccttgataaagcggcaggcttattacaaggactctccccagtcttatttgtcatcggtgcctttgttttatacttaggtttatctttcctaattccttcaacttctggtttagcgtacgtttctattcctgtaatgggtgcgttagctaaaaacattggtttaagtccagaagtgatggttatgatttttgcttcaggttgtggcttgattaatttgatcacgccaacatctggtgtcgtaatgggtggtttggaaatttccaaagttcaatatgccacttggacaaaattcatggccaaaccaatgattgtcttaggcttaattaacctaattatcttaattggcgcgatgttactctttagc

SEQ ID NO: 21163 - DNA, 930 bp, Enterococcus faecalis
atggggaaaaaaatggtcgttgcactaggcggaaatgccatcctttcaaatgatgctagcgcacatgcacaacagcaagcattagttcaaacatctgcctatttagttcatttaattaaacaagggcatcggttgattgtttcacatggcaatggtccacaagttggaaatctattattgcaacaacaagcagctgattctgaaaaaaatccagcgatgccgctagatacgtgtgttgctatgacacaaggaagtatcggctactggttgtccaatgcgcttaatcaagaattaaacaaagcaggaatcaagaaacaagtggctactgttttaacacaggtggtcgtagatccagcagatgaggcattcaaaaatccaacaaaaccgatcggtccatttttaacagaagctgaagccaaagaagcaatgcaagcaggtgctatttttaaagaagatgcaggacgtggctggcgcaaagtcgttccaagtcctaagccaattgacatccacgaggctgagactattaataccttaataaaaaatgatataattaccatttcatgtggtggtggcggcatccctgtcgtaggacaagaattaaaaggtgtcgaagcagtaatcgataaagattttgcttctgaaaaactggcagaattagtggatgcggatgcactagttattttaactggcgtggattatgtgtgtattaattatggcaaaccagatgaaaaacaattaaccaatgtcactgtagcagagttggaagaatacaaacaagcgggtcattttgcaccaggtagtatgttaccgaaaattgaagccgccattcagtttgtagaaagccaacccaataaacaagcaattatcacttctttggaaaacttaggaagtatgagcggcgatgaaatcgtaggaacggttgtgacaaaa

SEQ ID NO: 21164 - DNA, 1017 bp, Enterococcus faecalis
atgaattcagtatttcaaggacgtagtttattagcagaaaaagatttttcaagagcagaattagagtatttggtagacttcagtattcacttaaaagaattgaagaaaaaagggattccacatcactatttagaaggaaaaaatatcgctcttttatttgaaaaaacttcgacacggacacgctctgcatttactacagcagcgattgatttaggggcacatcctgagtatttaggcgccaacgatattcaattaggtaaaaaagaatctgttgaagatacagcgattgttttaggtagtatgtttgacgggattgagttccgtgggtttagtcaagaagtagtggaagatttagcgaaatattctggtgttcctgtttggaatggtttaacggatcaatggcatccaacacaaatgattgcggactttatgacagtgaaagaaaactttggtcgtttagaaggaatcactttagtatatgtcggcgatggccgtaacaacatggcaaacagcttgttagtgacaggtgctattttaggcgtaaatgttcgcatttgtgcaccaaaagaattgttcccttctgatgaagtcgttaattatgcaaaagaatttgcgaaagaatctggtgcagaattaatgattacagacgacgttgctaaaggcgttaaaggagccaacgtgttatatacagacgtttgggtgtccatgggtgaagaagataaatttgaagaacgtgtcaatctgttgaaaccttatcaaattaatatggctatgttagaaaaaaccgaaaacatggatggcgatttaatcgtattacactgtttgccagcctttcatgatacgaaaacacaatacggtgaaatggttgctgaaaaatttggcattactgaaatggaaattacggatgaagtcttccgcagtaaatatggtcgtcaatttgaagaagcagaaaacagaatgcattctattaaagcgatcatggcagctactttaggcaacttattcattcctcgtgtg

SEQ ID NO: 21165 - DNA, 1140 bp, Enterococcus faecalis
gtgaaaaaaatgaagtataaatatcccagaataaaaccaatctatccattatatcaattaaataaagagagatttagagttggggcccaattaggaatcactattgaatttgatgatgatgaaggtcaattttggacattatctaatttactcgatggagttagatcgtttgatgaagttgtcacagaaatgaagaggaaatatccggaattaacagtaaaagatatcgaagaagggatagattttttaaatgatgaaggtctaatcgaggagacgtttcctggtagaatgattgaagatagatacttagctaatgtgaattactttagtaggtactgtaaagctgatgatgatagatttgaaatacaggaaaagataaataacttgaaaatactattattaggtcttggtggaggaggatcaaatattctaacgttactagcgggtcttggccccaagatgattagaatggtggactatgaccgagttgaagcaagtaatttaggtcgtcaattactatatagagaagcagatattggtgagaagaaaactgtagttgctaaaagagccattaatgaaatgaactcaaatattaacgttgaaactgtagataaaaaaataatagatgtgaatgatgttgttgaattgacagaaggaatagatatcattgtttgcgctattgatgaaccccctttccttatacatagaattgtgaatgaagctattgtaaaagttggtttgccgtgcgtgtttggtgcctcacaggttagccgaggaagagtatacactgtaataccccagaaaacaggatgctttgattgcatgaatttgaacttcagtaaaaatgaccctaaatttgttgaacaatttgtaggttttagaaatattcaatttgctcccccatccatagcttatggtcctggtatctttcaattaacagcatcaattgtagatgagttaataagagtggtaacaagatatgctgagccaaaaagtttgggaacgcaatatgaaattaactatgaggacggaaactcgttcacgcataaaacttggccaaggtttgagagtgaatgtccaacttgtggtaaaggagatgtctcccaatgggaaatatttcaatattatcaagagaagaaa

SEQ ID NO: 21166 - DNA, 705 bp, Enterococcus faecalis
atggttcaaaatataccaatttatattcaaattcacgataaaatcaaagaagatattgaaaaaggtgtctggagtatcggggatcgtttgccctctgagcgagaattagccttgaaatttgatgttagtcgaatgaccttacgccaagccatccagactttagcagacgaagggattttagaacgaaaaattggttcaggaacgtatgtagcacgtaagaaagttcaagaaacaatgacaggtaccactagttttacagaaattaccttgtctcaaaatcgcgttccttctagtcggacggtgtcttattttgtagcgaaacctagttctagtgagatggaaaaattacaactaggtccagaagattcaattttacgaatggaaagaattcgttttgcggatgacattccgatttgttttgaggtggcgagcattccttattcattggtctcgcaatatggcaaatctgaaatcacgaactctttttataaaacacttgaagccaaatctggccacaaaattggccattctaaccaaacaatctctgctgttcaagcatcggaacagatcgcagaatatttagagattaaacgaggcgatgcgattctgcgtgtgcgccaagtatcctattttgaaaacggactaccttttgaatatgttcgtacgcagtatgcaggaagtcgatttgagttttatttagagaag

SEQ ID NO: 21167 - DNA, 912 bp, Enterococcus faecalis
atgactgaacaattcatactcacttcaaacgatcaacaaactcagctcaatgtacgtcattggccctgtccttcacccaaagccgtagttcaattgattcacggcatggcagagcatatccaacgttatgatgaatttgctcgttttttaaatcaattaggatttaccgtaattggtcatgatcatctaggtcatggcgaatctgtacaaccaaacgcaccgatctatggtttttttggagaacaagggcctgaaaatgtcgttacagatattcatcaagtgaaacaatgggctgtgaatcgatatccacaattgccctattttatgatgggtcacagcatggggtctttcgccttgcgcaactatctgcaagactatcctgtgactgtgcaaggagtcattttcatgggcactggaacaagtccgttacctttaaccgcagcattgccttttattaaaaaaatggccgagaaacagccgaaaaaaccagctccgttcattgataagctggcatttggttcttttagcaaaaaatttcctgaagcaagttcctttaattggctttctaaaaatcaagccaatgtggctgactatgaaaatgacccattaatgggcttcgtatttaccaacaatggttttgctacccttttttcgcttgttaaacgagccaatcaaaggaattggtaccaagcgatcccaaaagaattacctattttaatcattagtggcgctgaagacccagttggtgatttcagcaaggggccagcgaaaattcaaaagcaattaaagcatgcaggttttcagcacgtgacgttacgactatttcccacattgcgtcatgaaattttattagaaacggaaaaagctacagtttttcaagaaattgggcattggttaacggatttaacgaat

SEQ ID NO: 21168 - DNA, 4245 bp, Enterococcus faecalis
atggttatgagagcagggattgatgttgggtcaacgacagtaaaattagtatttttaaataagcaaaatcagtctatttttacaaaatatgaacgccatttttcagatgtcaaagcagcaacggaacgcattttaaaagaagggctagcaaggatcggtgcagaccaacctgtgacaatgagcataactggctctggtggtatggggctggctgaggtattagggattccctttgttcaagaggttatcgcgtgtacacgaactgttgaaacaataataccagaaacggatgttgctattgaacttggcggagaagatgcaaaaatcactttttttgatggtgctttagagcaacgaatgaatggtagttgtgcaggtgggacaggcgccttcatcgatcaaatggctgttttacttaaaacggatgccaatggagtgaatgaattggcgaagaattatcaaactatttatccgattgcttcccgctgtggggtttttgccaaaacggatgttcaacctttaatcaatgaaggagcagcgaaagaagatatcgcggcgagtatttttcaagcggtagttaatcaaacaatcgccgggttagctgctggtcgaaaaattaaaggtaaagtagcatttttagggggacctttatttttcatgtcagaattgagaaaacggtttgttgaaaccttagcaattcagacagaagatgttatttttccagaacaaccgcaactgtttgtagcaatgggtgcagcactttattcagaagatgcagccgaatgtacattggaagaattaattcagcgcttagtgaacagccaggctactgatttacagccgagcgacacgttaccaccgttatttaacagcgcagaagatttggcagattttcgagaaagacatgcgcaagcccaagcaacggagaaacctttatctcaacatactggcgtgacctttttagggattgatgcaggctccacaacgacaaaagtcacattgattgatgaagatggtcatttgttgttttctttttatggtaataaccaagggcaacctttagaaaccaccatgacagtactgaaatcactttatcaacaactgcctgaagaagtttttatcggaaaagcggctgttacaggatatggagaacagctaataaaaaatgcgttaaaagtcgatattggtgaagttgaaacgatggcccattacaaagcagccaaccattttcagccaggtgtggattttattttggatatcggaggacaagatatgaaagcgatgaccattaaaaatggcgtgctttcctcgatacaattaaatgaagcttgttcttctgggtgcggttcctttatcgaaacctttgcgcaatctttaaaatataatgtgaaggattttgctttggcggctttagaatcgcaagcgcctgttgatttaggttctcggtgtactgtttttatgaactcaaaagtgaaacaggttcaaaaagaaggggcctccgtcggcgatatttctgctggactatcttattcagtcatcaaaaatgccatttataaagtcattaaggttcgccgacctgaagagttgggagaaaagattgtctgccagggaggaacattttacaatgaagctgtcttgagagcttttgaaaaaattagcggtcgtgaagtggttcgtccttctattgctggtttgatgggggcctatggagcagcgctgattgctttggacgcttatgaaattggggaagaaaccacgcttctttctttagaagagttagcggcatttacctctgaaaaggaatttactcattgcggcttgtgtgaaaacaattgtcaattaacggtcacagtgttttcagatgggcgccaatttattacgggaaatcgctgtgaacgtggtgcacgaattaaaattaaacgagaagaacgcaaagtaaatttggttgattataagtaccgcaagttatttaagtaccgacctttgcgggaaaataaagcgtttcgtgggcgcttgggtatccctagagtcctaaacatgtatgaaaattatcctttgtggcatacattttttactgacttaggctttcgggtcgaattatcgccacgttctaataagcaaatctatgaacaaggccttgaaacgattcccagtgatacggtttgttacccagcgaaaatggcgcatggacatattcaagcattaattgatgcgcaagtgccaattatcttttatcctggtgttgtttttgaacagcaagaaacagtggaagcagataatcattttaattgtccaattgtgcaaagctacccagatgttattcgaaataatgtggatgccatcagagagggccaagtggattatcgaaatccctatcttaatttagcgaatgaagctgcagttgccaaagttttagctgaaaattttgctgatttagggatttccttagaagaaattcaaacagcgctgcatcatggttatcaagaattagcagcttttaaaaaagaaattcaagaaaaaggcgaagaaacgttagccatgttaactgaaaaaggccagagagggattgtcttatcggggcgaccgtatcacttggatccagagattaatcacggcattgccgaagtcattacacaggaaggattccatgtcttgacagaagacagtatctcgcatcttggagacgtgcagaatttacgtgtggtgaatcaatgggtctatcattctcgcttatatgcggcggctaaagtagtggctaagacgaaaaatttagaacttgtccaactgaattcctttggttgcggcttagatgctgtgacaaccgatcaagtagaagaaatcatggatcggtctggcaaaatttatacagtcctcaaaatcgatgaaggtgcgaatttgggcgcaattcgtattcggttgcgctccttgaaagcggctgtcaatgagcgggagaagcaacagtttgttccgcatatgcaaatggaagagccagagaaaattgtgtttacaaaacaaatgaaaaaaacacataccttactgttaccaatgcttagcccgattcatcaatctggattagtcgatgtagcattacaagcttctggctatcatgttgtctgtttgcctgcgcaggataaagaagccgtgaatgtcgggttaaaatatgtcaataatgatgcgtgttacccagcaattatttctatcggacaactagtcgaagctttggaaagtggtcaatatgatttggataatgtcagtgtcttaatgacgcaaacagggggcggttgtcgcgcaacgaattacattcccttattacgaaaagccttaaatgatgctggtttttctcaagttcctgtagtttcagtttcgatgggcaataaaggggtcgaatccaatccaggatttaaatttacgttgccaatgatcaaacgcttagtggttgcctttttatatggtgacttattcgaacgagtagtttatcgaacaagaccttatgaaacagaaaaaggaatggtggatcaactgcaccaagattggctaaaaagagtggaagccaatgtccggaatggttcgctgacacaatttaatcacttcatgaaaaaaattattcggacgtttgatgaaattcctttacaagagataaaaaaaccaaaagtcggtgtggtcggggaaattttagtgaaatattcgccgacagcgaataatgatattgtgcgtttgctagaagaagaaggtgctgaagcagttgtgccagatattgttggctttatgaactattctttgtacaatcaaatttggaaatacgaaaatatgggcatgtcaaaacaaagcaaacgtttagcagaatttgcgataaaaatcattgaattggtagaaaaaccaatggataaggcattgagaaaatcggtccgttttgatggtattcattccatttatgatatggcagcagacgcaagtaaaattttatcaattggcaatcatacgggtgaaggttggtttttaacagctgaaatgattgagctcttaaaacacgaggtgaataacatcgtttgtatgcagccgtttggatgtttaccaaaccatattgttggaaaaggggtcgtgaaagagctacgacgtcaatatccgcaagcaaatattgcggcggtggattatgatccaggggtatctttggttaatcagttgaaccgaatccgtttgatgatggccacagcgaacaagttgttgaaagaagaaaatgtaaaaaga

SEQ ID NO: 21169 - DNA, 1269 bp, Enterococcus faecalis
atgctggatatgaaaaaaattcgccaaaatgtagaagtggtacagaaaaagttaaaaacacgtggtgtggacgaggaagttttattacgctttttggctttagatgaaggacggagagcgttacttgttaaagttgaagaactgaaaaaacaccgtaatcaggtgtcaggagaaattgcacaattaaagcgtgcacaaaaagatgcttcacaacaattgctaaatatgcaagaagttagcgagcaaattaaagttttagatcaagaagttgttcatttgcaagaacaatgcacagccattgcagaacgtttgcctaacttacctcatgagagcgtacctgttggcgcagacgaagccgccaacgtagaagttcggcggtggagtacgccgaaaactttttcatttgaaccaaaaccacattgggaaatcggtgaagccttaggaattttagattttgaaagaggcgcgaaagtatctggtagccgttttctttattacaaaggcttaggggctcgtttagaacgagcggtctataattttatgttagatcaacatgttaatgaacatggttataccgaagtgattcctccttatttggtcaatagcaaagcaatgtttggcaccggtcagtttcctaagttcaaagaagatgttttccaagttgcagaaagtgatttgacgctgatccccacagcggaagtcccgttaactaactactataataatgaaattttagatgcgcaagagttaccgatttattttactgctttaagtccttcttttcgctcggaagcgggtagtgcaggtcgtgatacccgaggattaattcgtttacaccagtttcataaagtagaaatggttaaatttagtgatgcagaacactcctatgaagaattagaaaaaatgaccaacaatgctggagacattttagaaaaattgggcctcccttatcgagtgattactctttcgacaggtgacatgggcttctcggcagcgaaaacctatgatttagaagtttggattccggcacagaaaacgtatcgagaaattagttcttgttcaaactgtgaagacttccaagcacgtcgggcgttgattcgttatcgtgataaaacgggtcatgttcaatatgcccatactcttaatgggtcaggacttgctgttggtcgaacagtggctgccattttggaaaattatcaaaatgaagatggcaccgtaacgattccagaagttctacgtccttatatgggcggtttaacgaaaatagat

SEQ ID NO: 21170 - DNA, 891 bp, Enterococcus faecalis
atgtatctttcgattgaagaatttatcgataaagctgaaaaaacaggaaaaaaaatctctgatttaatgattgagcaagaaatggaacgtagccaaaaaagctatgaagaaatttggacacagatgggtcaaaatttggatgtcatggatgctgctgtcaaacgctcgcaagaaggagcaggcgttttttctcctactgggttaacgggcggtgatgcggctcgtttaaaaaaataccgcgcagctggcaaaacgttatcaggtgatttaatgatgtctgcagttcaagccgcactaggtactaatgaagtcaatgcagcaatgggcgttgtttgcgcaacgccaaccgctggtgcaagtggcaccttaccaggggttttaacagcgattaaaaataccttgaatttaacgcgtgatcaacaaattcgtttcttgtttaccagttctttatttggaatggtcacagccaacaatgcgatgattgctggtgctgttggtggatgtcaagccgaagtaggcagtgcttcagcgatggccgccgctgcagctgttgaagcggctggcggaacaccacgccaatcttctgaagcttttgctatggctttagggaatttattaggtttagtttgtgacccagtggctgggttagtcgaaattccttgtgtcaaacgaaatacagtaggtgcaggcaatgcgttaatcgctgcagatatggctttagctggaattgtaaataaaataccagcagatgaagtggtggaagccatgaataaagtcggccgtcaattaccacgagaattgagagaaacgggtttaggtggcttagctggcacagcgactggccaacgaatgaagaatgaaatttttgaaaaagtaaaattcaccattgtt

SEQ ID NO: 21171 - DNA, 147 bp, Enterococcus faecalis
atgcgtcaaaatattattttagaatgtgtcgaaactggagaacgtctgtatctcactagcaaaaataaacggaataaccctgaacggatagaattaaaaaagtattctccaaaattgcgcagacgggcaattttcaaagaagtgaaa

SEQ ID NO: 21172 - DNA, 558 bp, Enterococcus faecalis
atgcgaaaaagattaaaattattattaatccttgttttattttttttattttttcctttagcacacacattaataacaatgcaaggtgttgttagtttaccattttacctacttccatttacaaactatccgtacattggtaatagtatggcacagtttttgttttggattagtggatgtttgctaacattattgtttattattctaattattgtattgttttatcctaaagcacataattgtatagaaaaaaagactgatagtggaaaaatagcagtccaaaaaaaagcaattgaaaactttgtattaattgctgcaaaagaagaaccttttattgttgatccaacagtaaaatctgtaattaagaaaaagaaaatcaaaatctatatacaaggaaaaatacgcaaagcttttcaaacgggagagcgacaaacagcctttataagaaaggtaaatactaatttaaatgaattatttggtgcagagcaaataatattaaccgaaataatttttaaggattatcatgaaaaaaatacaaagactaaatcaaaagtttta

SEQ ID NO: 21173 - DNA, 516 bp, Enterococcus faecalis
gtgaataagctacctttacttattttattgttaggcggagtgttgcttgttagtggctgtcaaagccataaggaagaaaacaagtctagtaaagtatcgacagaagaaacgacagtgattgaaacagtagcaagggaacaatcgaaggaatcgtttacgagtgaagcaactaaaaaacagacagaaacaacgaaattagaagaaccagatcatgtaaaacttctagaagcttatggaaatgcgtatgcgaactttacaagtattaatgatcgcaatgaaaagctaaagcccctcatgactgaaaaatgtatcaaaaaaaatggaattgatgttaaaactggagtagcgttagtttccgtaggaaaggttacaacgatttataaaaatgatcaacatgaatatgctttacttttggattgtgaacaaaatggaacgcagacacgagtgttacttttggctaaggtgaagaacaataaaatttctgaaatgacctataattcagttaagcaagagtat

SEQ ID NO: 21174 - DNA, 4278 bp, Enterococcus faecalis
atgaagcaaactaagtggcaacgattagcaaccattggcttgtgtagttctttagtgattaacgccttttctggcgcgaccgcagttgcggaaacaatcacgattgaaagtagtccgacagtagcaagtagcgctaaggaagcaacatcagcaagtagcgcaacgccagaaagtacggaaagcagtcaagaaacgactgaaacgagtcgggaagaagtgacacaggaaacagtggaacaagaagatacaacggaaatagctcaagaagaaaatctgctggaaccatctggtattcaagcgaaaattatgcctagagcatttgtctgggcagctacaggaaccacgaatagaaccacggttcgtcttaacgatgtagttgattatcgaatgaaactggaaaatattacaacagatgatacaaattcagatattgttggtccgattcgaattgaatcaaaattggcagctggaatgactagaccaacgtcagttattatcaaagttggccccgaggaacaaaatgtagttataggagaaggctctcataatgccaatagtggtggcgaatattttgtttggacagagtcgactaggacggtcactgcatttatcaatcgtctacacgggcgaacttctggaaatactgggtatatcaaaacattgtattttcagacaagaattacttcgggtacacacaacgaaaaaaaatatatcgattccacgattcgatttaatggatttggcgcagtgaatagacgaaatgaaatgacgtatgtggatagattttctggtaacttaggtttgaaagggaatttaaaattttacgatgaggatggagtggctagtaaggaacaaatgagtctttccataaacccagtattatttaaatcaaccaattcgagagtagaagggacgctgttaagatatcctttaactatgacaaatgctggtagtgggctttataggtttgatacaggactaaaaaatataggtactagtaacgggggttcgtggtttttctttagtaacgatattgcgattaattttgctacagctaccaccaatagaattgataaaattgtgttagcaccacctaaagcaacacttccagacagccgaacaggtgtgatgacttccagagcgtacacatcaacaacttatacgagaagtaactatgatatttcaacatataactttactaaagcgactggtaagacatggcgtataacgaatcgtagttctaatagcggagtaagcaccaatattatgtttagtaacaatcttgtaggaacaacaggacagttcaataaagggaattctggtgctactattaattattatatttattacaaaaagctttatgagaattttgttaatagtaacggacaaaaaattacaccaccatcaggattcacacaaggaaagcgaacggttattaatagtgaagcgtacacttttaaacaaagtggcaccttgccagatacctatcaagcagacggcaaaacctataagttcaaaggttggtacaaaggcaaaaccaagccaaacaccttgaccaccaccaaagcaccaagctatgcggtgacttataacaatgatgatgatttgacggtggtgtatgaggagattgagttttttgacttcccagcgctgacctatcaattcgggttcgtggacgagtctggcaaacgagtagatgcttcaacaattgggttgacttatgacaaatggcgtggggagttgttaacaaataatgtcaatgactggaaaacagtcagtcttgaaaaaggtcaagttgcaccaaccaaaaacaatttgaaggaaattgcttatcctgcgcaatctcttgaaatactgagtgatcgaagtacacaatatagtgcggctaatttaacctttacactgcccaaatactatgggaaaatcagtgtttataacaagagtggtacttttgatgcaggctacctgtttccaaatatccaaaataataatagttcagaaccatctgttgaaggcttacacaaaaatctttctagctggtttgaactaaagaaaagtgggaaccaatcgtttgtttttaacaaaccgattccagcagcaccaatcgatgttcaggtgcctgcttacttgcgagagattgtctataatcccgatctgatatcaaatacagccgtctattatgtaatagataaacctgtctactactatttaaccaaccgcaaagtcaccgaaaacttcgtagacacaagcggtgccaaaattacaccaccaacaggtttcacccaaggaaaacaaacagcgattaccagtgacccatacaccttcaaacaagcaggtaccttacctgatacctacacaacaggcggtaagacctacaagttcaaaggctggtacaaagggaaaaccaaaaccgagcctttaaccacgacgaaagcaccaagttatggggtaacctataatgataatgatgatttgaatgtggtgtatgaagaagtaacagctatttatccagggttctatgcgcaatttgttgatgaacaaggcaaagcttttactaattcgctaactctttctgaaaattatactgagtttctcagaaagacaggcactactgtttttgaaacgaagggcgccttttacccaatggtaggtaagcgcgatgcaacagtgacaaataagtataagattgaaacaacgagtagtgttgcagtaccaaataattattggacagccatgcctgctgacattgctaatagagggtacgcattaaataacttggatattaccaatcaaatgaaatatgttgacaagatagaaactactgacacgcacactacaatgtacgattatactggagtttcggacattgggggcaaaccaaacaatgcttctcagacagaattaaatcctattgataaaacatttgttaagcaaacagataacacttttgcgataaaatcaatttggggaaatggaacgttttcgcatatagttcccaaaatgttattgttagcagaaagtggcagtttttcaagattattcgggtttgatggtactccagactacaagcaaaccgtaaactacaaagtcacccgtaaacaagtcaccgaaaactttgttgatgccaacggtgccaaaatcaccgcaccaacaggcttcacccaaggcaacaaaatacccatgactagcaacaccttcaagtacacagccgcaaaagccttgccagcaacttataccgcaggtggcaagacctatactttccaaggctggtacaaaggcaaaacgaagcctaatactttaacaaccagcactacgccaacatataacacaacttttgatggcaatgacgacatgacggcgatttataaggaagaagtgcccaaagcaagtgtcgctttaacgcgcactaccgctgaaaccgtgactagcggcggcaatgtcacctggcgcgccacaattaccaatacaagccaagcaccactaaccacggcgaccatcaagaaatcaaccgcttggacaactggcttagcagcaccaaccgccatgattgtcacgccagctggcggaaccgcaaaaacagttcccgtcacagcgactacgtggaccaacggtgttagcttaggcactgacattcccgtaggaaaatctgccacggttcagttcactacgaaagcgacggggacagcggggcaagtcttgcgcgctgggattaccaccagtgggaattacagtggtgtttctacttcggccaccgtacgtgtgaaagacaatgatcaagcaattgtaacaccaacggctgaaggcttcatcagtgttccaaccttcaattttggtcaagttggggtagcgggaagcacgcaacagcacagcttgaaaaaagccgctgattattatggcaacggcacacgcaatccctatctgcggatcaagaaaacccaagcgaattggagcttaacggcgcaactgtcgcaaccgaaatcagcgacagacagcttgccaacagcgacccgcttattattaggggcggctcctgtttcgagtttctcaaattacaaccaacctaccgagttgaaaaatgcggtcggtactacgagtgccattagtttgaatgccaacaacacggccactaggattattgccaatcaacaattcactgggagtaatatctatcagttggacttcaccttcaacaatgtcaaacttgaagtgccagccaaccaaggggtcaaggggcaacaataccaagccgcaattacgtggaacctagttacaggtcct

SEQ ID NO: 21175 - DNA, 132 bp, Enterococcus faecalis
atgaaaagaacgtatcaaccaaacaaacgtaaacgccaaaaagttcacggattccgtaaacgtatgagcactaaaaatggccgtcgcgtattagcaagccgtcgtcgtaaaggtagaaaagttatttctgct

SEQ ID NO: 21176 - DNA, 381 bp, Enterococcus faecalis
ttgctatctttacttatttctgtcaaaaaattattttcatcttttttaggtatcttaaaaaaagaagacactcgtgccttgttctttttactggcaaccacgttgttgagtgggactattttttattcaacagtggaaaaattgtcgccattagattcgttatatttaagtttcatgacgttaaccacgattggttatggagatgtgcatccagttactgacttgggaaaaattttcaccatgatttatgctacagtaggcttggggattatggctatgtttatttcggtcgtagcaaaatcctacttgtattctaaacaaagtcatcaccaccatcaccataaaaacaaagaacattcagcggaaaagtcttcagaaaaa

SEQ ID NO: 21177 - DNA, 168 bp, Enterococcus faecalis
atgaaatttttccgcagcgttgctgatgagatgaagcaagtaacttggccaacaaaaaaacaattgcgtaaagatacattagttgtaattgaaacatctattttatttgcagcattgttctttatcatggatactgttatccaaacggcatttggctggattttaaaa

SEQ ID NO: 21178 - DNA, 591 bp, Enterococcus faecalis
atgaataagctatttgcatatgaaggttggtattatcggattttttcttttattgccaacttgatcattattaattttctctttttaattacctgtataacaggcatctttagcggtgtcggcttaattgcgttgtatcgaacgatctatcgtttgtatcgtgaaaaagatattcctgttttgcgaacgttttggacagcgttaaaaaataatatcatgcgaggttttattttaacaggtgtcttgttcgctgcttttttactgggcggtattgtcgtaacaagtttatttaaaatagccactagtttaggtttcttagctatttttctattaagttttgttgcattatttttgacgagttttctttttctcttttccgtttttaattggtccgttaaaaagacactaggtgagacggtttatgtggtcttaagtaatagtgcaaatgcgattattttgtttattttacctcttttaacgtttgtttttttctataagcttaatttgtttttatatattgcgttaggatttgggacaacggcttttcttcaagttgcgttttttcagaaagtgttaggtgtggaacatgaa

SEQ ID NO: 21179 - DNA, 366 bp, Enterococcus faecalis; identical to SEQ ID NO: 20981

SEQ ID NO: 21180 - DNA, 531 bp, Enterococcus faecalis
atggaaatgtaccaagtaattagatattttttaaatgaaatggagaaaaagatttggcatgccttgttaacattagtacttttttgtctttatatttccatttttgatgtgccttttacaattaaaaatacattcatcggcagactacttttcccgaaagcttttatgaatgcaggaagtgcgaatctgattttttatttgattagtttttttggttttttatggtcaattttcatttttgcttatctattgaataagacacgcctcaaattattaaataaaacatttccttatcttttggaaatattagaagtctgtattttgcctttagtgattctttttgcttacatttatatttatttgcgggtccatggcgaaggtttcagctatatacgagaatctcttttacagcaagagttaacttattcaatgaaatggtttctttgccttggtagtttggcgccgttatttttctttttaagcactttaaatttaactaaacgagtcagacaaaaaaaagacatggaatca

SEQ ID NO: 21181 - DNA, 411 bp, Enterococcus faecalis; identical to SEQ ID NO: 20982

SEQ ID NO: 21182 - DNA, 457 bp, Enterococcus faecalis; identical to SEQ ID NO: 20708

SEQ ID NO: 21183 - DNA, 147 bp, Enterococcus faecalis
atgcgccaaaccattacgttagcttgcgctgaaactggcgagcgcctttacttaacaagtaaaaacaaacgaaatacaccagaaaaattacagctgaaaaaatattcaccaaaactacggcgccgcgcacttttcactgaagtcaaa

SEQ ID NO: 21184 - DNA, 189 bp, Enterococcus faecalis
atggttgaatggataaaacaatatgccgttccgttaattggtggcctagtcggcttggtttttgcaatcttgtttctgtcaatcggcttctttaaaacattgttagtggtactcctgacaggactaggtatttggctaggtttgtatttggaacagacaggcattgtcaaaaattattttcatcataaa

SEQ ID NO: 21185 - DNA, 1296 bp, Enterococcus faecalis
ttggatgtgatgatagtgttacaaaagaaagcaaatatgctcttggaaagctatgttagagaaatttattccgataaattatacacattgatccataaattaaataagaacttaacttcagaaacactagaaaatgatttaagaaaagttgcagataaagttattatttctgattttgatattgataaaaatcatggtcaggggccgatattattatggaatagtaataaagaagaactgtttctgggtgttgttgaactaaccagagatggaaaagtcattctagatgaaaaaaaacgaaaagtcgatttaaaaacaaatataaaaaaaatattactgtttagaatcaaagttattgaaatgtgtaaaaaagagtcattaataacattttttagtgtaaataacaatagtcaaactttaaaaaaaaatatacaaacttccttaaatataatattaatatttatagctctacttgcactatctacagttttagaactattaaaaaaatttgtaatagattttaatcaaactaactatttagctattgcaattcttttaatttttgcattgctaagtatagtatcaatcttaagtattaaaatctgtgtgaaatacaaaaatatcgtaagtgatggtttttatggaatagtgatatcgtctttgtgtatatcaattttttcaatctatagcatagctatcatagattataaaacagtgttaatggtagttttagtgggtacttttttactaataaaagagattttctcgtctgtagggaggatttatgaagataagaaaaaatctggaaagatgttaaaagctatattgttttcagtaattactagtattttcttatttataaatagcgttttaattataaaaggaattactacgtatagtgctgttttaacttttattgtatttcagatggcaattttgaatatttttttcatagtaaagagcttaatacacctgtacaaaatgtatcgtatccaatcaatatctcccgcattaactaatatgcagccgcaactagttagcaattacaagagaatactagatctaaattatgtaaaagtcactggaaacaatagttcatttaaaagtatcaatgcaaaatttatttataattacttagttaatcaaacttcaggtgtatatctttcaaatgatttaaacactgaaaaatataattttgttataaataaagggttaaagggagaagatattttagtcaagtccagactcctgtgtaaaatgctatacaatgtttttaccatttctacttatcaaaat

SEQ ID NO: 21186 - DNA, 366 bp, Enterococcus faecalis; identical to SEQ ID NO: 20981

SEQ ID NO: 21187 - DNA, 330 bp, Enterococcus faecalis
atgaaagcgcaaatggaatcttggcaagatatacaagagtatgtaaagaacaacaagaaaaaacataaacgtagaatggctaacgatgcaatgaaaaacgtcaacgagttaggatttcctttcacctatttcgaagatacttaccaatttgcaattaaaacatctatcgggatggtcgactattttggaacaactggcacatgggttgtgcgtaagaatcaagatcgtggtagagggctaaaaaaattaaagaagtatttggaacatccagttccaacaaaagaaataaaaaaaacaaagggtaatcagtcatggatgaaaaataataga

SEQ ID NO: 21188 - DNA, 366 bp, Enterococcus faecalis; identical to SEQ ID NO: 20981

SEQ ID NO: 21189 - DNA, 120 bp, Enterococcus faecalis; identical to SEQ ID NO: 6388

SEQ ID NO: 21190 - DNA, 783 bp, Enterococcus faecalis
atgaaaaaaattgctttgttcagtatgttaacgttcagtgtattgtctttaagtctagcaggatgtggaaacaaaaaaacagcaagcacaaatgattctaagccaaagcaagaaacaaagaaagccacgcagaaatcctctagccaacaagaaatgaaaagtagtcattcgtctgtcacgggtcaaaattctaatgtgacaggggaaaatccgtcagaaaatgccacgcagccttctgcaggaactgatgaaacgaatgaagtccctcaaaaccaagcacctgatacaaacattacaattaccaatgttgttttcaatcctgaaagaaatgaaattaatggtactacattacctaatgcaaccattacagcaacggtagtcggtgatgcttctgcacaagcaggtgttttttatgcggatgccaatggcaattttacagtaattagtcccagagcgggagcgactactcaattaatcgcaaccgttgatcaacggaatagtgcacctgtccaaattgatattccaagttcaggacaagaagcagcgctttcttttagcaatattacgattgatccgaaacaagggacaatttctggtaaaacagcaccgaatgcaactattttagtgtcacgtgcagatgatgcgcgggtgattttagcaagttttactgcggatgcccaagggaatttcacagccagtaatttagttcccggcacaaaaaatcgcttagatgttacgttaaatggagaaatagggacaccttacttgtttgatttaccaaat

SEQ ID NO: 21191 - DNA, 3183 bp, Enterococcus faecalis
atgaaaagagggaaacacatgaagaaaacaatgctcattcttctatttggtttattgacagtggttggtctgccaatggtgaccgaagcggttgaaccagttaacgcaacagatacaacgatttttggtgcgcaagcgatggtgcctaatagcacagaagatcaaacagataagttacagacgttgctgagtcagacagcaaaggaaggacgggcattatttttaccacagggaagttatgctctgtcaaaagatattgcgatttcttcaaattatcaattaattggcgatacaacaggagccactattttacataatgctacaggtgcaccgattcagctaacagacacaacgtacgggacgaaaaccaatgtacgacttcaaaatattgcttttgacggcatcaatgtgaccttaaaattgacgaatcaattaacgctagcaaacaatatcttttataatccattaaaaggattcgtggtcaatttaaatgcagacattggcgttaagatttcaggcaatattttcatgcgagacacggcacatatgcaatcgggaggtgattttaaccgagcgatttacattggtggttattcaacgccaagtcgcttccagtatatgtcagatgtagacatcgtggacaatctatttggtttaaaagtgacagaattagatgcgattaaaagtaccagtcgttcagacttagcagcgactattacacgtttgcaaacagccattgaagccggtgctatttcagtacctaatgaacaaaattatctatccaccggggttaattcttttaatatgctgaaggatgtaactgttcaacataattttttctattcaccctatgataatgaaaacttgaatggtctagtgggagatcatgcaatttatttccgtggcgcccaaaacatcacggtagtagggaatcatttacgcggactacaaaatggtccagctggcggatttaagtttaaatcaggccgtaatattacgattatgaataattatttgcgaaatacaggtctcattatgtatggaacaccagagatcggtttggcagaaacacaagcagagggggctatttcagaactctctaactggttagtggctaataacatttttgattggaagtattgggacaatcaatatgcaattgggatggaatacaatcgacatacaggaaataacaatgtgttcaatggcgtatttatcaacaatcagtttgttaactaccataatattccgcaaaaccgacgtcgggaattgttaatcgctagtggcggtgggttccgaccagaaacgagttttgtgaaagacaatactcgagatgatggccttaaaaacggccaattattggtagaaaattggacagaggcggactatcgcttaatgccagcaacatgggaatcattaatttcaccaacactttatgagcaatataaaaatacgccaattccggttagaaatactttagcaacccctgtggctacaacgattgtgcaaggacaatcaatcgatccgcagcaactggttgctaatacaaatgacgcggatgaagcagtcccagccgctaaaatcgtcaatccagaggtcttaaatgaaatcggccaacaaaaagtgactgttcaattaacttatgaaacagggtcattggtaacagtgaacgtaccggtgacggtagaggcccctgcaaaaaagcttgatttgtcccagctacaaaccgtttatgcttcgattggtgaagcaaaccaatatacagtttactcttggcagctattcactgccattgggcctaaaacaattgttccttcctattatcagcaggcgacacaattgttagcagaaggtcaggagagtcaggacaaaacccaagagcaagtggatcagttaacaagtaatttgcaatctgcaatgaaagtattagtcaaaaaagccgatatcacgctagagcgtacagaagcagaaaatgaactggcaagcgttcataaattagacgaatctgtatataccaaagactcttggcaagccatgcaagaagccttaatagatacaacaactggcgaaggaagctctaagcagttacaacaactgcttgcttggtcagatgaagaattattagagccaacacttggtggctttaaaacgcctgcagatgcacaaaagcgtattaatcaattaacacaaaccataaaaacggcgttacttctgttagttgaaaaatcaacagagacaactagtaacacaagcgaaagcagcacctcaagcacaaccagtgaaaccagtaatacaagcgaaagcagcacctcaagtacaacaagtgaaacaagcaatacaaatgaaagcaatacaccaagtacaaccagtaaaaccagtaatacaagcgaaagcagcacctcaagcacgacaagtgaaacaagcaatacaaatgaaagcaacacaccaagtacaactagcgaaaccagtaatacaagcgaaagtagtacctcaagcacgacaagtgaaagcagtagtaccagcgaaagcagcacgccaagcacgacaagtgagagcagtagtaccagcgaaagcagcacctcaagcacgacaagtgaaaccagtaatacaagcgaaagcagcacgccaagcacgacaagtgagagcagtagtacgagtgaaagcaacacgccaagcacaaccagcgaaaccagtagtaccagcgaaagtagtacctcaagtacgacaagtgaaacaagcaatacaaatgaaagcaacacaccaagtacaaccagtaaaacaagtagtaccagcgaaagtagtgcttcaagtacaaccagcgcaaccaacaatacaagtgagagtagcaccccaagcactgtaaacgaaagtagccaaagcaaaggccagaattctgtcatttacgcggtagagtctaatcaagatcctaatgacgctcaaagtaattcaaagccctctgccaaggctagtcaaacaaaggaatcagtagcagaaaaccaagcaactaaacagatacagacaaatcaagaatcgtcaggaacagtcaaaaaagcggataatacgaccaaaattgccaagaaaaaattccccaaaacaggggaacaatcttcagcagttgggagcttcctaggcctgagctttttatcgttagccatagcaacctattgttttaaagtgaaaaga

SEQ ID NO: 21192 - DNA, 351 bp, Enterococcus faecalis
atgataaagggaattggtattgacgcagtagaattaagtcggataaaaccgattgttgaaaaacaaggatcgtttattcaacgggttttaacacctaacgaattgaccctttttgaaaagttatctacaaaacgtcaaatagaatttttagctggtcgttttgcttgtaaagaagcgttttctaaagcatggggcacagggattggcaaggttggtttacaagatattgaggtgctgactgaaaaaacaggtgcaccatacgtagcaaactcgccccataatggtaaagtgtttgtctcgattacgcacacagaaactatggcgattgcacaaattgttttagaaagcgaa

SEQ ID NO: 21193 - DNA, 411 bp, Enterococcus faecalis; identical to SEQ ID NO: 20982

SEQ ID NO: 21194 - DNA, 457 bp, Enterococcus faecalis; identical to SEQ ID NO: 20708

SEQ ID NO: 21195 - DNA, 717 bp, Enterococcus faecalis
ttggaagagaagaaattactcttcaatatcggaccaatttggtttgatggaaccattgttttgatggtgctgttgacgtgtatcattgttttcgcctttgtctatgcttgtacgagaaatatgaagctacgacctaaaggcaaacaaacggtcatcgaatggttagtggattttattcgtggaatcattacagacaatttacctcgtaaagaagtgagcaattttcatttaatggcgtttaccctcttcatgtttgtacttgtttcaaacatcttgggtctcgttacaaaaatcgttgtgggcgacgatctcagcgtttggaaaagtccaaccgccgatccaatcgtaaccttaacgttagcgatgatgatgattgtcttaacacacttctttggtatgaaacgctttggttttaaaggctatctagttaatagttatttaagacccgttggtttcttactaccggtaaaattaatggaagaattcacgaatctattaacattaggcttgcgtttgtacggaaacatttttgccggcgaagttctattgggcttaattgctggaaccgtagcaagcgtcggattatgggttatcccactagcaattccgctagaaatgatttgggtagcattctcaatctttattggatgtatccaagcgtttatctttgtgacactttcaatggtttatatgtcacacaaaattgaaacagaagaa

SEQ ID NO: 21196 - DNA, 219 bp, Enterococcus faecalis
atggaaggattaaattttatcgcagcagcaattgcaattttcggttcagctatcggagccgctatcggtaacggacaagttatttcaaaaacaatcgagtcaatgactcgtcaaccagaaatgtctggtcaattaagaacaacaatgtttatcggggtcgctttaatcgaagctgtgccaattttaggtgtcgttgtttctttattacttttattcaga

SEQ ID NO: 21197 - DNA, 528 bp, Enterococcus faecalis
atgctacttactacattggtagtcggtgaaacggctcctagtaccacactaggcacgatgattgttgtcagtggtgcatttttaatcttgatgctcttattaaagaaatatgcatggggagcaatcgtagatattttgacacaacgtgaagaaaaaattgccaacgatttagactctgcagaacaatctcgcgtagcagcagcgaaaatggaaaaagaacgtcaacaacaattactttcttccagatcagaagcagctgaaattattaaaaacgcgaaagaaagtggagaacagactcgccaaaaaacattaaaagaaacaactgcggaagttactcgcttacgcgaaaaagctcggacagatatttctcaagaacgtgaagaagcattgtcttcagtaaaaaatgaagtggcagatctttctcttcaaattgcagccaaaattttaaataaagaattaacaccagatgcacatgaagcattgattgattcttatattgaaagtttaggtaaagcaaatgaaactaga

SEQ ID NO: 21198 - DNA, 540 bp, Enterococcus faecalis
atgaaactagataaatatacagttggtaaacgctacggcaaggctttgtttgagttggcagttgaaaagaaccaagctgaagcaatttatcaagaattattgacgcttcgcgaagtctatcaccaagtacctggtattggcgatattttaagtgatgatcgcttagagccttatgaaaaagacagcatcatggaaaaactagtaacaggttttagtgaaatgatgcaaaactttttgcgagtggtttacgaatatcgtcgcatgtacgatctgctcttgatgattgatgaatatgaacgacgttatgatgagcaccaaggactaattttgggttcagtgacaacagccattcctttatcaaaagaacaacatcaagcaatggaagaaaaagctgcccaattattagggtatgaacaagcgcatttagtcaatttaattgacccgtcaattgtcggcggagtggttattgaagcaaaccatcaagtaatcgatggcagcatccgcaaacaattagaacatatgcagcagaagttattaaaa

SEQ ID NO: 21199 - DNA, 423 bp, Enterococcus faecalis
atgaaattaacaattacagaaattcaagaaattttaccacatcgctatccctttttattattagatagtgttgaagaagtcattcccggggaacgcgttgtagcgaaaaagaatgtaacggttaatgagcaagtttttcaaggtcattttcctgggaatcctgttttgccaggagttttaattattgaatcgttggctcaagcaggcgccgtggcattactttcaatgcctgaattcaaagggaaaacggcatactttggtggattagataaagcaaaatttagacaaaaggtaacaccaggcgacacattaattttagaggttgaacttttaaaagtccgcgcttctgctggaatgggtaaaggtgtggcaaaagttaatggaaaaaaagttgccgaggctgaattaacctttatgattgga

SEQ ID NO: 21200 - DNA, 1884 bp, Enterococcus faecalis
atgaaaaaaagaagttttgtctattggggaatgtttttcattcttttgtcgacgctgataacgccttttctgaaacttgaaacaggatatgcgcaaacggaaccaactagtaccagtgaaaccaatcaaatttctgctacgccaaatgtagtgccgcgtaaacaagtgggcaacattgtgacagcgattcaactaacggacaaagagggaaacccacttgggaccattaatcaatatacagacatctacctccgaattgagttcaacttaccggataataccgttaatagtggggatacgagtgtgattactttacccgaagagctacgtctcgagaaaaatatgacctttaatgtagtagatgatacaggtactgtggttgcaatcgcacagaccgatgtagcaaataaaacggtcacgttaacgtatacagattacgtagaaaaccatgccaatattagtgggtctttatattttacaagtttgattgatttcgaaaatgtcgaaaatgaatccaagattcctatttacgtcacggttgaaggggaaaaaatatttgctggcgatcttgattaccaaggtgaaggcgatgatgttaacgaaaaatttagcaagtattcgtggtttatcgaagacgatccaaccgaaatttacaatgtactacggattaatccaacagggcaaacgtatactgatttagaagtggaagatgtgctaaaaacagaaagtttaagttatatgaaagacactatgaaaattgaacgaggacaatggacactggatggaaatgctatttggcaattcacgccagaggaagatataactgatcagttggctgtccagtatggtcctgatgaccgtaatttttcggtgcattttggcaatattgggactaacgaatatcgtatcacctataaaaccaaaatcgatcatcttcccgaaaaaggtgaaaccttcacaaattatgcaaagttaacagaaaatcaaacggtggtggaagaagtcgaagtgagtcgtgtctcacaaacaggtggtggagaagctaatggtgaacaatatgttgttgaaattcataaagaagatgaagcaggccagcgtttagcaggtgcagaatttgaactcattcgaaactcaaccaatcaaacagtggctaaaatcacaacagatcaaaacggaacagcgattgttaaaggcttgttaaaagataactatactttagtagaaaccaaagcacctaccggttaccaactttcgcaaaacaagattccaataacacctgaagactttggtaaaaacttagttgcactgaaaactgttgtgaatcataagatttcatatcaaccagtcgctgcttcatttttagctggaaaagttcttttaggaaaaccactgaaggatgctgaatttcaatttgaattgttagatgagaaaggcacagtactagaaacggttagtaacgatactttagggaaaattcaattttcaccattaacctttgaaactcctggaaactatcaatacaccattcgggaagtaaacacgcaacagacaggtgtttcctacgatacgcacaaccttcaagttcaagtaaccgtcgaggcgcttttaggaaatcttgtagcaactactcagtatgatggaggtcaagtatttactaatcactatacgccagaaaaacctatagaaagtaccacaccaccaacgagtgggacaacagatactaccacgaattcaaccacagaaactacttcaataaccattgaaaaacaggcgattcgtaataaggaattgccaaaaacaggagaaacaaaagaaaacgcgtttcttttcttaggtagccttcttttgattcaaggattatttatctattttaaaacgaaaaaa

SEQ ID NO: 21201 - DNA, 267 bp, Enterococcus faecalis
atggcaaaaaagtcgaaaattgctaaagcaaagaaacaaatggcgatgattgaaaagtatgcagataaacgtcaggaattaaaagccgcaggagatcgcaccgctctcgctaaattgccaagagattcaaatccgaatcgtctgaggcttcgtgatcagacggatggtcgtccaagagggtatatgcgaaagttcggtatgtcccgtattaagtttagagaacttgcccatcaagggttgattcctggagtaaaaaaagcaagttgg

SEQ ID NO: 21202 - DNA, 417 bp, Enterococcus faecalis
atggataagataaaaatatggattacaatggacgaaaatcaaatgcttacggactattcgtttattgctaagaaaaactatattgaaattgaagtaaatgaagagccaaaagattatttgaactggggtttacgcaatggcaaattagttcattatcctgatgatttaaatggcctaacaaataatagaacaacttcttttgttgggaatgtaatgttgaactttgcggttatttcttgggcattgtcttatataccactaatcggcaaagttattttagattatcctaaatatgcagatattaaagctgaatacggcttacttggattgacagatgacaatatgaaaacatttgttagttacaaacgaattacagaaaaacaatatgaagaaataacaggaaactcctacaaaaaa

SEQ ID NO: 21203 - DNA, 678 bp, Enterococcus faecalis
atgtatcaattatttgagaaatattttccgaatgttgtccaattaaaacaagagtttcttcaaagtacatgggaaacattatacatggttttttggacagcattgattgctggcgtgttaggagtcttgttgggtgtcgtgcttgttagtactggccccagtggtgttttgaaaaatccacccctgtacagtgtcttagaaaaaattattaatgtttgccgctctattcctttcattattatgctcgcactgattcaaccattaacacgaattttggcaggaacgacaattggtacaaccgcagcgttagtcccattagttattggcgtaatcccgttcttcgcgcgccaaattgaaaatgcgttattagaagtggatcctggcgttattgaagcggcagaagccatggggacgagtcccttagggattatttttagggtttatctaattgaagggttaccaagtattattcgtgtttcagcggtgacaattattaatttgattggattaacagccatggcaggagcgattggagccggtggtctgggcaacttagcgattactcgaggatacaatcggtttcaaaccgatgtgacatttatggccacgttaattattttaattatggtatttatcagtcaagccattagtaatcaattaatcaaaaaaacatcacat

SEQ ID NO: 21204 - DNA, 405 bp, Enterococcus faecalis
atgaaaaaagaattttcgcgagtacttcttaaaaatcaatctgatgaaattcttattttaaaagatcggccagacacatggaatttccctggcggaaaacaagaacttggtgaatcagcgctggaatgtgcgattcgtgaaatgaaagaagaattagcagtggaaattactgaacttgaagaaatttttactggaccacttgtttttgattcaatcgtttggcaaggacatttttattttgccaaacaagcccaaggaaaagtgaccctgaacgaaccaaataaaattaaaggcgtacaatttattaagcggtttgaggaagtaaatttttcaccaggattagctccgctatttgattatttggcgcgtagtgattatttaaagttaaacaaaactaactggaaa

SEQ ID NO: 21205 - DNA, 591 bp, Enterococcus faecalis
atggaaatcattgttggcacgaataaccaaggtaagttaaaagaaatgcaatcaggacttaaggaccccgctattcgacttgtctcttatcgaaagtatacaaccagtcaagaacaacctgcagaaactggcactacgtatgctgaaaatgcttatctaaaagctcgctttttccaacaattaattggccgcccagtgttaggtgatgatggcggcttaacgttaactgcttttcctgatttattaggtattcatacaagccgctttttccattcagccaatccggaagaacagaaccgcgaactgttgcacttatttgaagggcaacagtcgacccgagagttaaccttatcagccacgttggtctatgtactcaatgacgacaaactgttgcaaacggaagccactttgactggtgaattagttgaaccgcgcggtacaggcggttatggctttgatccgattatttatttaccagaccgaggcaaaaccttagcggagttgtccacgagtgaacgaatgaagataagtcctagaatacgggctttacgaaagatgattcagcagataaaggagcaatgtgacaatgat

SEQ ID NO: 21206 - DNA, 3795 bp, Enterococcus faecalis
atgaagcaaactaagtggcaacgattagcaaccattggcttgtgtagttctttagtaattaacgccttttctggtgtgacggcagttgcggaaaccgtgacgattgaaagtagtccgaccgccgaaagtagtgccaaggaagagacgcaagcaagtagcgtgaaggaagaaacaacgaaagccagtacggaaaatagtcaagtaacaactgacacgagtcaggaagaagcaacgaaagaagcggagaaagaagaaccgcaagcagaagtggaacaagcagaaacaccaatcattcctaaaccaaaaaaaatcaatatgaaggcaacttattcattttctgcagaaacttatcagtttggatttgtgaatgaatcaggtcaattaataaatccagatattataccaattacgtatagctatgccaaaggatcatggaagacagatggttataatcgaaagtggactagtatggttcaagggagtgcttcaaccgtaggaaacttaaagaatgtaataatgccagcaacttctgtagttatgccaccaggaccgtcatatgaaggaactcaagaggtgtacacaaacttttcaattcgcataccaaaatattatgcatcagcgagtctctacaatagagaaggtaaaattgattctacttatccgttacctgctattgcactagcaggtactagaccgctatctttgactcaaagtagtgtaattagtgcattggcgctgaccagtaaaggagacaatgtttatacaccacgggaaacattttttggaggagatcctgcaggtgtaaagtttactaattttttgtatcgtataaatgactttgatgtgaaaggtaataacataggttataagactgtgagtagcccaatctattaccatctgaccaaccgccgtgtcaccgaaaacttcgtagatacaagtggcgccaaaatcacgccaccaagtaatttcacccaagggaaacaaacggtcattaacagtgatccttacacgttccaacaaagtggttttttacccgagacctacaaagttggcacgaaatcttaccgattcaaaggctggtacaaagggaaaaccaaaaccgagcctttggccaccactaaaacacctagctataaagtcacgtatgatgacaatgatgatttgacggtggtctatgaggagttttcagggtacgagctgcctgcttcgaccaatcaatttggctttgtggatgaagcgacgaacaaattaattgcccccgaccaagtgcagatgaagtataatcttactttaaatgaaaataataaaaaaacagtaatgagcagtaacttaacggggacagatacagcgacactgaaaaacttgtccgtgcctgtcaactattttgaacaatatcgcgtcaatacgttttatggcgcgagtgacattacgtttacattgcccaaacggtacaaatcaatcaatattaccaaatcagatggcaaaaccgacccagcttttcctcttcctaaaatctataatatagatcaagtagaaatgtcacacatgcctgtgaccacttataacaagttgaaacagctgtcgggccaaacgtttggctttaatgctttagccgatcaacctgaattttatacgaaaacgttatttgggacagagtctggcatcgatgacccagtcaattattatacaatgagtggccctgtttactattatttagaaaaccgcaaagtcaccgagaacttcgtagacaccaacggcgctaaaatcacaccgccaacaggtttcacccaaggtaaaaaaacggtgattacaagcgacgcctacactttcaaacaagcaggcaccttaccagacacttacacaacaggcggtaagacctacaagttcaaaggttggtacaaaggcaagtccatactcaacacattgacaactaccaaagcgccaagttatcaagtgacctacgatgacaatgatgatttgaatgtggtgtatgaagaagaaacagttacgacagtgtatccatcagtcgatatgaactttgtgaatgaaaaaggcggggctttcacaccggcgttaacttttagtggtaagtactatgcgcaaagtacgagtgcgtacttaagaaccgatttatatgacgtgacctcaaaaaataatggtaatgggcaatatacggtaagtattaataatggtagtatgccattgtcccaagaattattgaaaaaatataataatggacaaccaatcagtgctaccaacagattacagtttaatgttgataaattagccatcgaccaacaactaaaatatgttgacagcattcaattagacacagctcaaagtagcaatctgaaatcctatagatatgtgtacacgaacaatagctcactggttttcgacccaaatgtagcaccagcagaggttgaccttagttcagaatctcttaacttgcttaattttgattcagatggcacctatttttctaatgcaaataatagacttttttacacgcatttaggatatagtggcacaccaggagttaactatcttctcgtaatgtttctttttaacgccaaacctgcggataagtcaaaacttgtctacaaagtcactcgcaaacaagtcaccgaaaacttcgtggatgtcaacggtgccaaaatcactgcaccaacaggcttcacccaaggtaaccaagtaccaatgaacagtaacaccttcaagtacacagcggcaaaagctttaccagcgacgtatactacaggtggcaaagtctatacgttccaagggtggtataaagggaaaaccaagccaagtacgttgaacaaaacaacaactccaacgttcaatgcgacctttgatggcaatgacgatatgaccgccatgtataaggaagaaataccaacagctagtgtcacattaactcgaccaaaagaagtgattgatacgaataccaatgtaatctggacaacaacgatcacgaatactagcaaagcacccttacaaaatctcaccttgaaaaaagggcccaattggtcagctggtctgacgatcccgacctttatggaagtgacaccagaaggagaaacgacaaaatcaatcccagtaaatagtacactttggacagagggggttcctttaccaaatgccgttcctatcggcaaaaaagtttcagttgctttcacaactcgcgcaacagggaaaccaaacactgttttgaaagcagaagttgtagtatttggtggtattaaagatagtacagtggataacttcgtgagaattcgtccaaatgatcaagaagtagtcacaccaacgaccgaaggcttcatcagtgtgccaaccttcgacttcggccaagtgggcgttgcaggaactaagcaacaacacagcttgaaacaagccgcggattactacggtaacggcacacggaatccgtatctgcggattaagaaaacgcaacccaattggagcttaacagcgcaactgtcacaaccaaaatcagcgacagacagcttgcctacagcgacccgcttattattaggggcggcgcctgtctctagctttaccaattacaatcaaccaaccgagttgaaaaatacggtcggtaccacgagtgccattagcttaacagccaacaacacagcaacgagtattattgccaacaagcaattcacaggtagtaatgtttatcagttggacttcaccttcaataatgtcaaacttgaagtgccagccaatcaaggtgttaaagggcaacaatacaaggccgcagttacatggaacctagttacaggtcct

SEQ ID NO: 21207 - DNA, 933 bp, Enterococcus faecalis
atgaagcgagtaaattggaaaagatggctagttgttgggttaagttgttctttgttcatggattcagtggttggtgtgactgtgttagcggaaacgattactggggcgacggagcaaggagtagcaacatctcagtcgagtgacgaagcgagccagacgacgcaaacaaccgaagagtcacaggcaacggtcgctagtgaagcgaaaacagtaccgccacaggaaacggcaagaattgcttctcgagcgattggttattcttctgtggaagggcgcgagattccctttttctttgtggaggaagacgggacgttgtttgatcccgaccgaattacgatggcggtcaatctttccacgttttcgttttatgaagagaaattacaacgaaccccccttgagcccaccactgtgaatggcggaaagttactgtctattccaacgtcaccagcttttaaatatgatacaaataaccagaatccaagtaatatttatggcgtttctgaagtgtcgtttactattcctaaggagtatcaaagcctggacattcgaccaagtacgttttatacaggagacactacgcaatatccagtgccaacggtttttgcgaacgttgggggcaaagtgacgaactatgtgggcgccaatgcggagacggaattagagttaaccaatgaaaaaatgcccaataagctgacgtttggtcctaaaaagacgtttaaatatacggtagctacggcaccaggaggcgttacgtatgcgctgacctatttttatggagatgtcggcggtccaactagttcgcaccaaagacgaggaacagcgggtcctgtgtattattatttaacaaagcggcgtgtcacggaaaaatttgagaatcccgcagcggggcgattcctgcgccagaaggttatacgcaggataagaaaaccattg

SEQ ID NO: 21208 - DNA, 1935 bp, Enterococcus faecalis
ttgcctgaacgttacacaggcagtgatgggaagacgtatttatttaaaggttggtacaaagggaatgcgaaacctagcacgttggaaaccaccaaaacgcctagttatgcggtgacctatgatgacaatgacgatttgcatgtggtctatgaagaagcagtgatgaaaacctatacgttgccagcgagagaagctttgttcggctatgttgatgagcaaggaaacttgattaatcccgccaagtttaagctaagtgcgaccatgggtgaaagtgacggagccacaggggaaatgacgacttttcccacaattgatggaatcgatatgccagcaagtcaattaaagaaattagccatcccgcaaaaagtctacacacgcccagacgatgggacaatcgtaacttatggcccgcaagaagtgagtgttgaaattcctaagtattaccagacgatttcgatttcaccaactactgcgtatacaggggataaaaccaagtatccagtaccaaatgaagtgcgccgtggcatcgaaaaccccgacaacattgttagtagtttagtgggaaccactgcgtataacttgacccaaaaaagtgccacacgctatactgcccgccgttcttactggacgtggggccccacgaagacactttactcaatgagtatctattcaggaactgctgggggcaactataatttatcgacccctgatggcaccatttattattacttagaaaatcggcgggtcactgaacattttgtagacgaaagtggcgcaaaaatcacgccaccaactggctttacacaaggaaatcagctagtggtggacagtgaaaactatgtctacactgtcgcaaaagctttgccgaagatctaccaagctggtgaaaaaacctatatcttccaaggctggtttaaaggcaaaaccaagccagcaacattaaagacgacaacgaccccaagttttacaccaacttttaatgatgaggacgacatgaccgctgtgtaccaagaagcgattcccaccgcggaactaacgttaacaggtgccgttgacataatcgaaaatggcgccacaatggattactgggaggcgctactgaagaacacaggcgaagcgccgttaaccaccattaaaatcaagccaacggcaacttgggcggctggcatcggcgcacccaacacgatatttgtacaaggaacgggtcaaaacaccaaagcttttcctgtcaccaaagaacaatggacgaccggtgcaggagtgtccatcacgttggatcagcctttaccagctggcggtcaattaaaaatgaacttattaggaaccgccgttacaggaaatcctggtcaagttttaaccgctgatgttgaagtaacgggcaactttggcagtttaactgccaaagatacggtccgtattaaagacttagatcaagaaattacgagtcctgacggcgacggctttattagtaccccgacatttgattttggtaaactagcaatttcaggaagtaagcaacaatatggtttgaagaaggccgcagattactacggcaatggcactcgcaacccttatttacgcctgaatactagccaagccaattggagtttaacggcccagctatcgcaaccaaaatcagccacagacagcttgccaacaacgacccgcttgttgctaggaacggccgctgctgccagctttaccgattacaaccaaccaacagaaaccaggacaccacttggcaagaccagcaccgtgactttaaccgccgacaataccgcaacagcggtggtcgcaaaccaacagttcacaggcagtgacgtctatcagttggacttcacgtttgctaacatcaaactagaagtgccagccaaccaaggtatggctggccaacaataccaagccgccgtcacgtggaatttagtgactggcccc

SEQ ID NO: 21209 - DNA, 3756 bp, Enterococcus faecalis
atgaatcaaaaaagaaaccgtttatttgcaatcgctttgtgtggttctttactaatcagttcattaaatggcatcccagcaattgctgaaaccatggcggccccagatgttcaaggggaggaccgccaaacagtagtcccgtcagagggggttcaaggacgggcgcccgtttcttttccagaggcagatacggaagtaggcgtaccgccagctgatgaagagctaccagaacagactgaacaagtagtcgggcaagttgaagcgtcagtgacgagtccaataatagttaatacaccagaatcactgcgtgcgcagcgagcagtgcagacattcgatattccagagaagacgtacaaaatgtcgtttttagatgaaagtggtcgttttattgatccagcgaaagtttcgattactggggatattatgaagtttactatgcaaggcgctttgacgaaagtcggggccgtggccactaataatgtgggaaccacgaagcaattgacggtgccgaaagtagctttgtctggggatacagccataaagagttatgatttttccggcatccaaaatgaaaagattactttgccgcggttctataatgttccgaaaatcacgcccagtgcgaattacactggacaaatctatccaatggcagtgacgaaacaggtgaatgttacaggagaagtatcgaatgaggaaaccacaggcgcgaggctgaatatgtttgtatcaggtatccctaaccagtttgtcttttctcgtgctagttgggacaatgatccagcgggaaatatgtttgcgcgtggctttaacatggctactgcaggcggcacaccagcttatctgactacggatgatcacatttactattatgtgcctaacaaacgggttaacatttattataatgacatgaccccgaatggcttaccagcgtatcctccagggtataatgccagtctttcaaaaacagtagttgattcagaaaattttcactataaagcgccaaaagcttttccagaattctttagttctgggaatcgtcacttccagtttaaaggctggtataaagggcctgcaagaccagcggatccaaaagccgttaagttagaaacctcattgacgccagagttcgatgtcacttacgatggtgccgataatttatatgttttttatgatgaagtgaaagaaatgaccactactattccagaagttacctataagtttggctttgttgatgaaaaaggggcgcttgttgcgccaacgaatgtagacattcaggcgaacttaacaactgtcgaggataaggtggtccagaaggtgggggctattacaggcgctaatgtaggcaatttaaaacagttaaccgttcctagccaaacactaacctatgtacctaaaattaaagttgcttcttctggggtaaccgattttcggttgactattcccaagcgctataaaattccaacagtcacacctggttcattctacactggctcaacgaccgcctatcctttggcgacaacgctgttaaggcatattagtggtcaggcagatgaacggataacaacggatggcactcgctatagtttatataatttaccgacgcctcatagctatcgtatgtacagaagtagttggcaacctgacgttaccaacacgggatttagtgcaactttaaacatggcgacgaccgagatttatccagcttatttcacgaccgataacacgatgtactatttcttagaaaaccgccgcgtcactgaacactatgttaatgaagcaggtgctgaggtaccgatgcctacaggcttcacgcaagggaatcaaacggtgattgacagtgatacttatcattttaaattggcaaaggaattgccgtttagttattttttaaacaataaagcataccgatttaaaggctggtataaaggcaaaaccaaacctaaggtattggaaacgagtcgaacgcctgagtatgatacaactttcgatgataacgatgatttaaccgttgtttacgaagaaattaaatacggcggaaatgcggtgacatttggttttgttggggaagatgggcaattgcttcagccgacagggtttcaggtgactacggatattgttgaaacaatcgatgggctgagtacggttttaagtaatgtttcagctgtcgacagtacaggcaacgttaaaactttgacgatcccgcaaaaggaatatgtattgactccccagatgaatttctatggaacaaaaaattcattgattacgattccaagacaataccaagaaatttcttttaccaaacctgccaactaccaaggactagattatccagttgcagggcgtgttgagaatatgtttagtggtaatctgtatgttgagggggcacaaccaccttacttttctgcttcgaaagtcaaagccaatcaatacaaaataattgagtttcattggaaagaagagcctacacaaagtttctctagtttgtacaaagctacgttaattcgaagtagcgtggcaccaacaggcgtagaaatgtatcctaataagccaatctattactatgcgaccaatcgccgagtgactgaaaactttgtagataaatctggcgcaaaaatcacgccacctcaaggatttacgcaagggaatcaagtcacagtcaccagtgatccttttacttatactgcttcaaaagctttaccaagcgtttatgcggctggggcaaaaacctataagtttgttggttggtataaaggaaccaccaagccaacgaccttaaaaacaacggctactcctaattatttggtggattttgatgataatgacgatatgacggcggtctatgaagaagaaacgccgactgctgctttaactttgaccagcaccaaccgtgtcgtgaataatgacgatagtgtagattgggtggcaacactgaaaaatactagcctggcaccacttaaaacgctgacagtgaaaccagcgactacttggcctgcaggaattggtacgccgacgtcactttctgtccaattggacggacaagcaccgaaaatttatccagtaacggcgactacttggtctgaaggaatcagcttaacaggtcttgaaataccggcaggtcaaacagccaacgtgacgcttgttggcaccaaaatttcaggaacatcagaccaacgcttgacggcaacccttgatgttacaggaaattttgcgacagtgagcgccgcggatgcggtacgtctgacagatacaacccaaggaacaattacaccaacagaaggctttatcagcgtgccaacctttgattttggaaaaatgaatattgctagtaaaacgcaacaatcaggcttgaaaaaagcggccgattactacgaaaatggtacacgcaatccttacttgcgaattaagaaaaatcaaccgaattggcagatgacagcgcaactatctcaaccgaaagcaaccacagatagtctgccaacagcgactcgtttattgttaggtccagcgaatgtttcaagttttacaaattataacgaagcaaccgaacaaatcaaagcagttggtaagactagttctttgagcttaacggcgaataatgtggcaaccagtgttgtcgcaaaccaacagttcacaggtagtgacgtctaccaactggattttacgtttgagaacattaaattagaagtaccagccaaccaaggaaccaaaggacaacagtacaatgctgcggtcacttggaatttggtgactggtccc

SEQ ID NO: 21210 - DNA, 246 bp, Enterococcus faecalis
atggcagatttaaaaggacgttttgacgatgcaaaagataaagtagaaggtactgcaaaagaagcgcaaggcaaagttacggatgataaaggcaaagaacttgaaggaaaagctcaatcaacctttgctgacgtaaaagacaaagcacgtgatgccggcgacgaccttaaagaaggcgctgaaaaattaactgataaagttaaagaaggctttgaagacttaaaagacaaatttagtaaagataaa

SEQ ID NO: 21211 - DNA, 1035 bp, Enterococcus faecalis
atgttaaaagaatttaaaatgattgaagcagttgctccagatatgctcgatgtattacaagaaagattccaaattcttcgcaatatttattggatgcaacctattggacgtagaagtttatcagaaacgatgggaattacagagcgagtcttgcgtacagaaacagatgttttaaagcaactcaacctgattgaaccttcaaaaagcgggatgacattaacagaacgcggtttggaagtctaccaaggcttagaattagtcatgaatcaattgcttggcatgcaccaaatcgaaaaagaaatgacacagtactttggcattcaacgttgtatcgttgttgcaggagatagtgatatccaaaagaaagttctttcggactttggagatgtcttaaccaatacgctgaatttactcttaccaaatggtgagaatacaattgcggttatgggtgggacaacaatggccatggtggccgaaaatatgggatcactagaaactgaaaaacgtcataatttgtttgttccagccagaggagggattggtgaagcagtttctgtccaagccaattcaattagtgctgtaatggccaacaaaacgggtggtaactaccgggcgttatatgtcccagaacaattgagtcgtgaaacgtataatagtttattacaagaaccctcgattcaagaagttcttacgttaattagtcatgccaactgtgtggtgcacagtattggtcgagcgttgcacatggcggcacgccgaaaaatgtctgatgacgaaatggttatgctcaaacaaaaaaatgccgtggcagaatcgtttggttatttctttgatgaagaaggaaaagtggtctataaaattccacgaattggccttcaattaaaaaacttacaagaaattccctatgtcgtcgcaattgcgggcggcaaaacgaaagccaaagccattcgcgcatatatgaaaaatgcaccaaaacaaacgtggctcatcacagatgaagctgccgcaaacgagattttaaaaggggtaaccctt

SEQ ID NO: 21212 - DNA, 387 bp, Enterococcus faecalis
atgcttttagaaatagatgaacaaagcgaacagcccatctatcagcaactcattgatcaaatcattgtaggcattgccaaaggtgaactggttcccaatgaaagtttgccttctatccgacaattggcggacgaaatcggggtcaatatgatgactgtttcaaaagcttataataagttaaagcaatcaggttatattgtgactgaccgtcgtaacggcaccaaaattgccgcaaagttacctgctaccgctgtttggcaacagcaattgcatgagcgtttagaacttctgttggctgaaagttttttacatcagcaatccgaagcagaaatccaagcacttattcagaaaatttatcaaaattttgattcgaaagggcgtgcatta

SEQ ID NO: 21213 - DNA, 843 bp, Enterococcus faecalis
atggaagaatttaaatcagaaaaagaaaaaatgatcgcaggtgcactatattttgcctcagatcctgaattagtggctgatcgcaaaaaagcccgtgaacaaatggcgttaattaaccaacaaccagacacttatattcgtcgtcaattaatagaagaaacgtttggaaaagtgggtgtcgggacgtacatcgaaccgatgattcaatttgattatggctacaacatttctgtgggaaaaaatttctatgccaattttaataacgtttttttagatgtttgtccaatcgaaattggcgataactgtatgtttggacccaatgtgcaactttatacagccgagcatccattacaagcggccaagcgtaatagcggaatggaatcagggaaacgaattatcattggcaacaatgtttggattggcggtggagcgattgtccttcctggcgtaacattaggcgataatgtagtggtggcagcaggtgctgttgtgaccaaatcgtttccagaaaactgtgtgatcgcaggtaatccagcacggataattaaagaattgactgaagatgacgccccaacaacttctttagaacaacaacgagcaaagattaaccaaatcgataaggaactggtccgtttattagaacagcggatggacgtcgtcgcagagattgctgcagtgaaaaagaaagcaggtcatgcggtttttgattctgaaagagaacaacaagtattagaaactattctgaatcatgttgaaaatgccgagtatgaagaaacattatctgagactttccagggaattatggacgcctctaaacgtttccaagaaaaacatttaggagag

SEQ ID NO: 21214 - DNA, 1449 bp, Enterococcus faecalis
atgatgtttttaaataaagtggataaaagaaaaatcgccttatttcagttactggaaaatgcaccgatgttaacagagtcaaaagaaaccgtaatgcaggagttagaattatctgaatttattgtgaacaaaacggtcgctgaattaaatgccgattttattgaatttggtttatcagaggattttcaaattgtgagcgatggtattttcttaactcttaatgaatcaggaacggaaacttccgctaccttgattgattgctatattaaagagtcgttacgttttgctatgtttcaagatttcttttttcagcgttttgattctgtgaatgagtttgcgttagaacactttgttagtcacacattggcttataaggagttcaaggaattaaagaaaatgctggaaaattatcaaattacaattaataaagaatttcacttagtgggaaatgaaaccaatttacgcgaagtaacaacactggtttttttacaattataccaacgtgatttttcattgtacggtaaaaaagttttagagcagattcggaactttgagctatttttttctgagaaggttcatcttaatcagcgtgcgggctatgcacaagctaaatgttttcattttttggcggtttctttagtacgaacgcagcaacagttttatgtagagaaaaaagtagattcgcaagtgttaaaacaattagccggtgacaatcagcagaatgttttcaattggttagagagtcttcaaatcccagaaccacaacgaacaaacgaaggcaattatttactcttatttttaattgctgaagagtggcttcaagtagcttcagcagcactttgccaaagatttgcagaaattcaacaattgaatcgtgacttgttaagctatttaaaaatacaatttcagctttccgaggaagtcctgcaaggttttgaacaaaaagtaacaatcgtacattttaaattgttccattttccaatagaagcaaactatagttatctcaaaatggatataacctactttgcagaaacgtatacagagtatttttctgctagtcgacaatttattcaagaacaaaaaacgaatcccgctgtttgggatgccagacggtttttattttatcggtatctgttgttaatggtggatgcgttaccattgaaaaaagttttggctccgattacattgtgtgtcgacttttcctttggtgaagcctataatcgtatgatacaaaaaaatattgaaaaaattacggaatggaatatcattttcaaagcacatgtagatgaaagtgtacaattaattttatcggatattcattttgtcgattggcctgagattactcaaattatttggctagcgccaccacgtcctgttgattggtcgcattttattaaaacgctgagtgcactaagaccgcactcgggagaagagaaaaagaaatcatcg

SEQ ID NO: 21215 - DNA, 237 bp, Enterococcus faecalis
ttgactcgtgaagaagtacttcaaaaagtagcgaagattatctcaaaccactttgatattgaagcggatcaagtaacagatcaattaaacattaaagatgatttgaacgctgactcaattagcgtaatggagtttgttttagaacttgaagatgaatttggaacagagatttcagatgaagatgcagaaaaaattgaaacagttggtgccgctgtagattatattgtgagtaattca

SEQ ID NO: 21216 - DNA, 1083 bp, Enterococcus faecalis
atgaaacatattaaaggaatgttggtttttatcggattatttattttggttggttgtgcgccagatcaagagccaacgaaacaaacaacaagtggtccgcaagagacaaagcaagtgaagcaagttaccgtcaccaatcaaacgacttctgcggtggaaaaacaagcgccgactaaaaatgacgaactgattgctaatcaattgacttttgattctcatgaatacacgtacgaagtggttacaggggccacacaaacgacatttggaacaaccccaccagcaaaatatacaccggaagaaaaaaagaaaaaaatgttttggtccaatcaaccgcctttgggattaatgacgggtaactattataaaaatgaaggtgtatttactggcggaaattacggcattgtagagattattacggaacctgaaacgcaaaggattctgaatgttgagtttacagagtttgctagtgatccttattatgatacacgctattcgggtgtcaacaaacgcctgtcggattatcctgaatttcaagcaagcaacacgcgtacagacgatacgttagtcaccgttgttaatggtattacttatgtagaaaaacaaatgcgtgacgaaaatcgtgttacaggtaatttttatacggtacgcggttcatcaacttctgcgcgtgaaggattaatgcctttagcagcagagatggacacttggctaaaagagccatcgaaagaaacgtatatcggttacgcagaagatttaggcaatggcctaatcgctcgacttcaagtgataacagaagagcagaaaataaaacatgtcagctatgatgaatacttttcagatgaacaggaaaaaatcacagaaacagccctgcggcctttttatcgtcaatcgaaatattattcaccaggatacaataaacaaaccaacaattcttttattcattttgtagatgcactaacaaaggccattacgacacaacaaactttatccgttaacgaagaacaagagctacagcatccgtcttttacgacttatcaaagattggctgaaaaaatcagcacgtttcaaaattcattgaaggaa

SEQ ID NO: 21217 - DNA, 936 bp, Enterococcus faecalis
atgaaacttttaaaaaagacggtcctaattggtacaacccttcttcttggttcattcttactcgcagcttgtggtaatacgaataaagaagccaacaacgctgacaaaacacatgaagtaacagataccttaggcaataaagtaaccgtccccgcgaaacccaaacggattattgcgagttatttagaagattatctagttgcattaggagaaaaaccagtggcacaatggacagttggacaaggcagcattcaagattatttagcgaaagaattgaaagatgtccccactatttcctatgacttgccatatgaagcggttctaaaatttgaacctgacttattattaatcagttcatctgctctagttgaaggcggtaaatacaaagaatacagtaaaattgcgccaacttatgtagtcaaaaacggcgaaaatgtcacctggcgtgatcaattggaagatattgccactgttttagataaaaaagaacaagcgaaaaaagtgttagaagattatgataccttaaccaaaggcgtccaagaatatcttggcaaaaaagatgctggcaaatctgcggcagtcttatgggtaaccaacaaccaagtctttatggttagcgataatcgctcaagcggaaccgtgctctatcaggacttaggcctccaagttccaaaattagtggaagaaatttctaaaaacgctactgcggattggaatcaagtttctttagaaaaattagctgagcttgacgcagaccacattttccttgtaaacagcgatgaatcagcacctcttttccaagaagcaatttggaagaacttacctgctgtgaaaaataaccaagttcatacctatgataaaaaaagtagttggttatacaacggacctattgcgaatactcaaattgttgaagatgtaaaaaaagcgctcttaaat

SEQ ID NO: 21218 - DNA, 279 bp, Enterococcus faecium
atgatcctcgaagcatatagtccattaggcactggtaaaatcttcgatgtgcctgaaatgaaacaaatcgctgaagcacatgacaagacgattgcacaagttgctttgcgttggtcgctgcaacacgaattccttcctcttcctaagtcagtgacaccaagcagaatcaaagaaaatactgaattatttgattttgaattaacagaagaagaaatgaaacaaatcgatcagttagatggtgtagtcggcaaagcaaaagacccagatactacccaattt

SEQ ID NO: 21219 - DNA, 471 bp, Enterococcus faecium
atggaacaagcgtatcttgacttaggaagaaaattgttggaagaagggcatcgtaaagaagacagaacaggcacaggcacattaagcttattcggataccaaatgcggtttgatctgcaaaaagggtttcctttgttaacaacgaaacgagtaccttttggattgatcaaaagcgaattgctttggtttttaaaaggagatacgaatatccgctatctattacaaaataaaaaccatatttgggatgaatgggcatttgaacgctacatcaaaagtccagactataatggaccagatatgactgattttggccatagatgtttgacagatcctgaattcaatgaagaatataaaaagcagagcaagcttttttgcgagaagatcctaaccgatgattcctttgctgaaacatacggcgatcttggacacatctacggctatcaatggcgtcactgggaaacaaaagacggt

SEQ ID NO: 21220 - DNA, 863 bp, Enterococcus faecium
ttattggaagaaccgcctgcagaatttttggatttagtagcgataggaacgatcgccgatttagtttcattgactgatgagaatcgaatccttgtttcattaggaatcgatgccattcatcattcagaacggataggacttcaggcgctatttgaagaaagcggcgtaaaaatgagggacgcagacgaaacaacgatcggtttttcgattgctcccagactaaatgcaatcggtcggatgggcgatccacgtcctgccgtctcgttacttgcgacgtttgatgaagaggaagcatccgttcaagcaaaaaaattgaatgagatcaatgaagaaagaaaagcaatcgtagagcagataacacaagaagcattagcgatggtcaataaggagaatcatatccatctattggtaaaccgaggatggcatgaaggcgttttgggcattgttgctgggaacataatgaatgaaacgggtaaaccaacgcttgtccttactttaaaagaagatggatcagctaaaggatctggacgtatattgaagccttgaatctttttgaaatgcttgaccagatgcgagatttatttacttacttcggaggacatcatgcagcagtcggtttaacgatgccaagtgaaaatgtcactatactacaggagaagatgaaccaatatatagtcgatcatcaaattgacttgatgagagggcctgagttgagaattgatgaagtattgctgccaaatgaagtaacagtagagcgaattgatgagctgaaactattggcgccatttggtacggataatcctttgcctcagtttttatttcgacaagtccaagcagaaaatatcaaaagaatcggagcaaac

SEQ ID NO: 21221 - DNA, 704 bp, Enterococcus faecium
ctctttcgacctgaacaaaatagtcgacggatgaatcaaagtgctagacgattgctgatgccaatggtccctgaaaagatgttcgttgatgctgtcaagcaagtggtaaaagcaaatgaagattttgtgccgccctatggaacaggcgctacattatacttgcgccctttactgattggggtcggtgaaaacattggtgtccatccagctccagaatatttatttgtcgtcttctgtacgccagtaggagcgtatttcaaaggtggactaaaaccaacgaattttattgtatctgattacgatcgtgctgctcctaaggggactggtgcagcaaaagtcggcggaaattacgcagcgagtttacttccaggaacagaagcaaaagaactggattactcagattgtgtttatcttgatccagccacacatacgaaaatcgaagaagtaggtgcagcaaatttctttggaattacaaaagacggaaaattcatcactccgcaatcgccctctatcttaccaagtatcacgaaatattccttgttgcagttagctgaagaacgactaggactgcaagcaattgaaggagatattttcattgatgatctagatcaatttgcagaagctggtgcatgtggtacagcggctgttatttctccaatcggtgggatttatcacaataacaatcttcatgtattttatagtga

SEQ ID NO: 21222 - DNA, 497 bp, Enterococcus faecium
aaacacctgaaagtaaatccaacgacatcaaaaaactgggctgaccgcgaccgtttcgttctttcggcaggacatgggtcagcaatgttgtatagcttgcttcatttagctggctatcaagtgacaatcgatgatttgaaacaattccgtcaatgggattctaaaacaccaggacatcctgaagtacatcatacagatggtgtagaagccactacagggccattaggacaagggattgcaatggctgtcggtatggcaatggcagaagcgcaccttgcagcaacgtataacaaagaaaactttaatgtgatggatcactatacgtatgccatatgtggtgacggagacttgatggaaggggtatctcaagaagcaagttcgatggcaggtcatatgaaactagggaaattgatcgttttatacgattcaaacgatatttcactagacggtccaacttcaaaagctttcacagaaaacgttggtgctcgctatgaagc

SEQ ID NO: 21223 - DNA, 774 bp, Enterococcus faecium
gtcttatggtttggaacatttatggctggtatcggatttagtttagtcatgccttttatgtcactttacatagatacgttaggtaattatagtacgtcacaattgaacttttggagcggattgactttttcatctactttcttggtgactacgctgatctctccttggtggggaaaattagccgaccaaaaaggaagaaaattgatgctgttgcgtgcttcattaggaatggcaatcgtcatttctttgatgggttgcgtgactagtgtgtatcaattagtcgcattgcgtctgcttcaagggattttttctggttatatcagtaatgccactgcccttgtcgcaactgggacgccaaaagaaaaaagtggtcaagttcttggaaccttagcaactggttctgttacaggaacattacttggaccgcttcttggcgggatctctgcttcagcgtttggctatcgccctacctttttcattacagggatcatcttatttttcgtcttcttgttgagtctgtttttcgtccatgaaaaatttgtcccagtgaaaaaagaaaacatggtttctgccaaacagattttcaaagacttgaaatatccacacgtcgtcatcggtatgttcgtcacaacgatgatcatccaagcatccaacaattccattagtccaatcatcagtctgtacattcgccaattgctgcatggacatggggatgttacgttgatcagcggaatcatcgcttcgatacctgggattgccactttgatagccgct

SEQ ID NO: 21224 - DNA, 264 bp, Enterococcus faecium
acttcaattcgaacattagaaacgattggaacgaaatttaatggagaaatcaaagcagacagcggatggactgatattttcattacgcctggctatgaattcaaagtggtagaagctttctcaactaatttccatttgccaaaatcgactttagtcatgttagttagtgcctttgcaggaagagaattgactttatctgcttaccagcatgcgattgaagagcgctatcgtttctttagttttggagatgcgatgttcgtgaaa

SEQ ID NO: 21225 - DNA, 1218 bp, Enterococcus faecium
gtgattccagtcaaagatgaccttatacaccgaagattccagtttcagaagatgaaatatcagatttgagtacacaaaagcaaaacaaatgtacggagatccgttacctgagatcattcaaaaacgattagaaaaagagttgaattctattaatggtaatggcttctcggttatttatctgatcgcccaaaaactagtgcataaaagtaatgaagatggctatctagtaggttcacgtggctctgttggctctagctttgttgcgacgatgacaggaatcactgaagttaatccgttagcccctcattattattgtccagagtgccaatattccgagttttttgaagatggtacgtatggttctggatttgacatgccagaaaaacaatgtccaaaatgtggtgcacgcttaaacaaagacggtcatgatattccatttgagacatttttaggattccatggagacaaagtgcccgatattgatttgaacttctcaggtgattatcaagcagaagcccataactatacgaaagtattgtttggcgaagactatgtttaccgtgccggaacgattggtacagtcgccgacaaaacagcatatggctatgtaaaaggatacgaaagggacaataatctgcagtttcgaagtgcagaagtcgacagattagcaaaaggcgctactggagtcaaacggacaaccggccagcatccaggggggatcatcgttattcccgattatatggatgtctatgattttacgccgatccaatatccagcagacgatcaaaattcggaatggaaaacgactcattttgatttccactcgattcacgataatgtattgaaattagatattctagggcatgatgacccaactgttattcggatgcttcaagatttatcagggatcgatccacaaacgatccctacggatgacccggaagtgatgcggatatttgccggtcctgaagtacttggagtaagtcaggaacaaatttattccaaaacagggacattaggtattccagaattcggcactcgttttgttcgagggatgctagaagaaacgcatcctacaacttttgcagaactactgcaaatttccggactatctcatggtacagacgtatggttaggaaatgcggaagaattgattcgacgaggagatgcgacactggcggaagtaatcggctgtcgtgatgatattatggtttattt

SEQ ID NO: 21226 - DNA, 846 bp, Enterococcus faecium
gtgaaaaacatgattacaggggcagcacaaatggatggtgcaatcttagttgtttctgcaactgacggtccgatgcctcaaacacgtgaacacattttattgtcacgccaagttggtgtaaaatacctgattgttttcttgaacaaagttgatttagtcgatgatgaagaattgatcgatttggtagaaatggaagttcgcgagttattgagcgaatatggtttcccaggcgatgacactcctgtgatcaaaggttccgcattaaaagcattgcaaggcgatccagatgctgaagctgctattatggaattgatggatacagtagatgaatatatcccaacaccagaacgtgatacagataaaccattactattgccagtggaagacgtcttctcaattacaggtcgaggaactgttgcctcaggtcgtattgatcgtggtgctgttcgtgtcggtgatgaggtagagatcgtagggatcaaacctgaaacacaaaaagcagttgtaacaggtgtagaaatgttccgtaaaacgttagattacggggaagctggggataacgtaggcgtgttgttacgggggatccaacgtgacgatatcgaacgtggacaagtgcttgctaaaccaggttccattactccacatacaaaattcaaagcagaagtgtacgtgttgacaaaagaagaaggtggacgtcatactccattcttcaacaactatcgtccacaattctacttccgcacaactgatgttacaggaacaatcacattgccagaagatacagaaatggtcatgcctggtgacaacgtgacgattgatgttgacttgatccatccaatcgctgtt

SEQ ID NO: 21227 - DNA, 294 bp, Enterococcus faecium
gtggaggaggtgaatctatccatggcaaacaaagcagaattaatcgaaaaagttgcttcagctactgatttaactaaaaaagatgcaactgcagcagtagatgctgtattttcaactattcaagatgctttagctaacggcgaaaaagttcaattaatcggttttggtaactttgaagttcgcgaacgcgcagctcgcaaaggtcgcaacccacaaactggtgaagaaatcgaaattccagctagcaaagtacctgcattcaaaccaggtaaagcattaaaagacgctgttaaa

SEQ ID NO: 21228 - DNA, 264 bp, Enterococcus faecium
atggaaaagaaagaatttcacgtagtagcagaaactgggatccacgctcgtccagctacactattagtacaaacagcaagcaaatttaactctgatgtaaacttagagtataaaggtaaatcagtaaacttgaaatcaatcatgggcgttatgtctttaggtgtaggtcaaggttctgatgttactattactgcagaaggtgctgacgaagctgatgcaatggcagcaatcgttgaaacaatgaagaaagaaggcttatctgaa

SEQ ID NO: 21229 - DNA, 246 bp, Enterococcus faecium
aaaagaaaacagttacttgaagctattcgctacgttgatttagttattcctgaagaaaattgggaacaaaaagtaaaagatataaaagaataccatgcagattatttcgtgatgggcgatgattgggctggacaatttgatgaacttgaacaactaacagatgcacaagtaatttatttaccaagaacacctgagatctctacaactcaaataaagaacgaacttaattctttaaatagtgataaa

SEQ ID NO: 21230 - DNA, 601 bp, Enterococcus faecium
aacatagaaagccgcggctattcagtggctttattcaatcgtacaggggctaaaacaaccgctgtagtagaagaacacccagataaaaatttcaaagcaacatatacaatcgaagaatttgtagaatctatcgagaaaccacgtcggatcttgctaatggtcaaagcaggaccggcaacagatgcaacgatccaagagttgcttcctcaccttgataaaggcgatattttgattgacggaggaaatacattctttaaagatacgatgcgtcgtaatgaagagttagccaactctggcatcaactttatcggtacaggcgtttccggtggtgaagaaggagctttaaaaggaccttcaatcatgcctggtggacaaaaagaagcctatgcgctagttgcaccaatcttagagcaaatttctgcaaaagcagaagacgaagcaccatgtgtcacatatattggcccaaatggagccggacattatgtgaaaatggtacacaacggtattgagtatggagatatgcaactgattgctgaatcttatgacttaatgaagaatattttaaacctttcagtagaagaaatggctgatatctttaaag

SEQ ID NO: 21231 - DNA, 540 bp, Enterococcus faecium
ttggaccaattgaaagtaagattacgccggaaaggaatcgaaaagctgaaaaatctggccaaaagtggcaagaaaaaggaaaaagaacagcgaatctataaacagctattcgccagcgagtactggaagtcagcaaaagtgatagggacgactttatcgaatgaatttgaactggatacacagccggttatccaacgagcagaaaaagaacaaaagaaaatagttgtacctaaaactttgccgaaacgtcagatggcgttttatgaaatggatgaacagtccgttcttgtacgttcgagttttggtgttcttgagccacaatcagagaagctctatttgccggagatgatcgatctcctcattgtaccaggtattatctacaatagagccggttatcgaatcggttttggcggtggttattacgaccggtatttaaataattttcataaaaaaacatgtagccttgtttttcgtgaacaattgaatgaacaatggcaaccggagagctttgatcagaagatccaacaattgtttattgac

SEQ ID NO: 21232 - DNA, 669 bp, Enterococcus faecium
atggccaatttgattcgttcacttatcgaaaacgataagaaagaactaaaacgtttagatagcattgcaaaaaaagttgaagcatacgctgaccaaatggcagcattaactgatgaacaattacaggcaaaaactgctgaattcaagggcagataccaaaaaggagaaacattagatcaattacttccggaagcttttgcagtcgtccgagaagcagcaaaacgtgtattaggtttatatccataccacgtacaattgatgggtggaatcgtgcttcacgatggaaatatccctgaaatgcgtactggtgaaggtaaaaccttgaccgcaacgatgccagtatatctaaatgctctgactggcgaaggggtacacgtagttaccgtcaatgaatatttagcaacccgtgactcgacggaaatgggcgaactttataatttcttaggattaacagtggggttgaatatcaactcaaaatcttcggatgaaaaacgcgaggcttataattgtgatatcacttatagtacgaataatgaattaggatttgactacttgagagacaatatggtcgtttaccgccatcaaatggtacaacgtccgctgaattatgccattgtcgatgaagttgactcaatcttgattgatgaagcggagacgccgctgatcatt

SEQ ID NO: 21233 - DNA, 803 bp, Enterococcus faecium
tttgaagccagcgcctatgccactacaccagaacctgattcagccaagaatgaagcacgcagagttgcagaactaggttttgatctagtagtggcagctgggggcgacggaacgatcaacgaagtggtcaatgggaccgtccgcttgaacaccgtcctaaaatggccattatcccagccggtacgacgaacgactatgctcgagcattaaaaattcctagagataatattaaagcagcagcagaagtaataaaaaaacaccaaaccgtaaaaatggacatcggtctttctgatagcagttacttcatcaatatcgctgcaggcggctatttgacagaattgacttatgaagttccatcagaactaaagagtatttttggttatcttgcctaccttgcgaaaggagcagagatgctacctcgagtaaagccaatcaaaatgcgcttgaagtatgatgaaggggaatatatcggaaatgcttcgatgtttttcctagggctgacgaactctgttggaggattcgaacagatcgcgccagatgccaaattggatgatggcaagttttctttgatcattgtgaagacagcaaatatctttgagatcttgcatattgcggcactcatgctgaatggcggtcgacatgtcgatgatccaagagtaatctataccaaaacaagcagtttgttcgtcgaaacagaagatgatatcaatcgaccagtaatgatcaacttagatggtgaatatggcggggaagcaccgatgcatttccaaaatcttcatcaacacattgagttctttgccggt

SEQ ID NO: 21234 - DNA, 886 bp, Enterococcus faecium
atgcagtcaatcaaaaatacgcttcgattatatttgcttgactggaaacggattttcaaaaacccgattgcaacacttctgatcatcgcgatcatgatcatcccttcgctatatgcgtggtttaacatcaaagcattatgggatccatatggaaatactggagagctgccaattgctgtttacagtgcagacgagccagcagagtttcaaggtaaagaagtggccattggggagcaagtcatcgaatcgcttcataaaaataaacaattaggatggcaattcgttgattcaaaagaacaattagaagacggagtccgttccggaaagtattacgcaggtatttacttgccaaaggatttctcagaagatctgctgagttttactagtggtgatatcaagaaaccaaaaatcgaatatacggtaaatgaaaaaatcaatgcgattgcaccgaaaatcaccgataaaggagcaagttcgatccaatcgcaaatcacaaatgaatttatcaaaacagccagttcgactttattgaaagtattcaatgagataggttacgacatcgatacgaacctagtaagtatcaataaagtcaaagatatgattttatcaacagatgaaaatttggacacgatcgacggctacacaaagcaagtcctcgaattacaaagtcaactacctgacatcaaggaaaaactgaataaagcaaatgaattcgtggattacatccctaaagtagatgagatgggcgaaaaagtcgttgcatttaatgacaaaatgcctgagttgaaagaccaagcaaaaatcatccttgatttgcaagaaaaaatcccagagatccaaaatgccggtaaacaactagcagagatcgacggtgattttgcttcga

SEQ ID NO: 21235 - DNA, 1001 bp, Enterococcus faecium
aaaacgtatgaagcagcagtagcagctttcatcaaagaaaacaaacccaaacgacaagttgtatatgatgatttatccaatcagcttgctacaccattcactttgaatgcagatgaaatggacaaattgatccaaaagattgaagacgcaggtatcagtgtggtggatgaaaatggtgatccatcaattcacagcttgaagagtgctgagaaaaaagctgaacaagcaaaaacagaagatctatctgcgccaaccggtgtaaaaatcaatgacccggttcgtatgtatctgaaagaaattggccgtgtctcccttttaactgcggaagaagaagtagcgttagcattgaaaatcgaagaaggcgaccaagaagcgaaacagcgtctggcagaagcaaaccttcgtttagtagtaagtatcgctaaacgttatgtaggacgaggcatgcagttccttgacttgatccaagaaggaaacatgggactgatgaaggcagttgaaaaatttgactaccgcaaaggatttaagttttcaacctatgctacatggtggattcgtcaagccatcactcgagcaatcgctgaccaagcacgtacgatccgtattccagttcatatggttgaaacaattaataaattgatacgtatccaacgtcaattgctgcaagaccttggaagagaacctacgccagaagaaatcggtgcggaaatggatcttccaacagaaaaagtccgagaaatcttgaaaatcgcgcaagaacctgtttcacttgaaacgccaatcggtgaagaagatgactctcacttaggtgatttcatagaagatcaggaagcaacaagtccagcagaacacgcagcttatgagttactaaaagaacaattggaagatgtactagatacattgactgaccgggaggaaaatgtccttcgcttacgttttggtttagatgatggccggacgagaacattggaagaagtaggtgaaagtatttggtgttactc

SEQ ID NO: 21236 - DNA, 939 bp, Enterococcus faecium
atgatgggaagaatatccaaagcaatgctagctgtttattcggggattgcggctttccttattattctattttcacttttcacttatttttatgccagtaaccaaagtcattggtggggagaattgctgcgtgcgcgtttattatacgttccgcttatcttccatttgatggcaatttcattaggtgtaggattgatcgtatttctattgttatcacttattcaaaaggcaaaatacgggaaaatcgaagaaaagcttcgtgcactttcttctggcaattatgaatccaaacttttgcatcagccgatcccaagcgcgtcggatgatctgtacatcaaagatattgatatggaaattactaaaataaaagaaaaaatgatcgaagtatccagtgaattacagattatgactagccgtcctcaatatgtagatggacaaaccaaagaagagattttagaattagaaaggcatcgattagctcgtgagcttcatgattcagtttcacagcaattatttgcagcgatgatgatgatgtcggcattgacggagcaagcagaaaaaagtgagacaccagaaatgttccgtaagcagttgaaaatggtggcagagatcatcaacgcttcccagtctgagatgcgtgcgctgcttcttcatctgcgtccagtcaatttagaagaaaaaagtttaaaacaaggcattgagcagttattgaaggaattgcagaataaaatccagatttcgctaaaatgggaggtagaagatgtaaaattaactagttccattgaggatcacttgttccgaatcgttcaagaattgttatcaaacacattaagacatgctaaggctaatgaattagaagtctatttgcataaaatagataacaatcttttattacgtatcattgacgacgggacaggatttaatatgaatgacaccaaa

SEQ ID NO: 21237 - DNA, 958 bp, Enterococcus faecium
aaaattgaaaagagctatggtaaaggctctattatgaaattgggcgaaaaaatcgaccagcaaatctctacaattccaagtggctctcttgcgttagatgtcgctttaggtgtcggcggttatccccgtggacgtattatcgaagtatacggacctgaaagttcaggtaaaacaacagtggcgctacatgctattgcagaagtacaaaaaaatggcggaactgccgcttttatcgatgctgagcatgcgttagatccgcaatatgcacaaaaattaggtgtgaatatcgatgaactacttctttcacagcctgatacaggagaacaaggtctggagatcgctgatgctttagtatcaagtggagctgtagacatcgtagtagtcgattcagttgccgctttagttccacgagcagaaatcgacggcgaaatgggcgactcacatgtcgggttacaagcacgtttgatgtctcaagcattgcgtaaactctctggttcgattaacaaaacaaaaacaatcgctattttcatcaaccaaatccgtgaaaaagtaggcgtgatgtttgggaatccagaaatcacgcctggaggacgcgcattgaaattttacgcaacgatccgtttagaagtacgccgtgcagaacaattgaaacaaggaacagatattgttggtaaccgtacaaagatcaaagtcgtgaaaaacaaagtagcacctcctttcaaaatcgctgaagtagatgtcatgtatggcttaggtatctcacaagaaggagaacttctagacatggcagtagaaaaagacatcgttgataaaagtggtgcttggtattcttataaagaagatcggattggccaaggacgggaaaacgctaaaatctatatggctaatcatcctgaaatgatggcagaagtttctgctctagttagagcagcttatggtattggcggagacgtcgctg

SEQ ID NO: 21238 - DNA, 297 bp, Enterococcus faecium
atggaaaacacgagatatgacatcatgtacattattcgtccaaacattgatgaagaagcaaaaactgctttaatcgaacgtttcgatgcaatcttgaaagataacggagcagaagttatcgaatcaaaagattgggaaaaacgccgtttcgcttatgaaatgaacggttaccgtgaaggtatctatcacatcgttaaagtatcttctccatcatcagcaaatgctgtcaatgaatttgaccgtcttgctaaaatcaacgacgatatcattcgtcacatgattgttaaagaagaagct

SEQ ID NO: 21239 - DNA, 234 bp, Enterococcus faecium
atggcacaacaaagaagaggcggacgtaaacgtcgtaaagtagactacattgctgctaaccatattgaatatatcgattataaagatatcgaattactaaaaagatttatttcagaacgcggtaaaatcttgccacgtcgtgtaactggtacaggcgctaaaaaccaacgtaaaattactgttgcaatcaaacgcgctcgtatcatgggcttgctacctttcgttagtgaagac

SEQ ID NO: 21240 - DNA, 1056 bp, Enterococcus faecium
ccatttcgttttgttagcgcttcggtcattctattgatgaatttatggggtgttcgctattggttgaaaatgaaacgttggcttattttaaataaacgtgaaaaaatccagcaggcttcgactgtagctgaaaccaatctagcttatgtctcagaagtcatgcctgtaggagtgattgcttatcagccatcaagccaaaaaatcgaatggctcaatccattagcattgaaaatcaaagatcaaagtggattaacagaggaagaattgctagatactttttttactgcaaaagaaaaaaagaaaaaccaagtctatctagcagataaaacatttcagtttgatatggatacagtaaagggtgttgtttattttaatgatattacccaaaaccagttgttaaaactccatcagacgaacagtcagccggtgattggtattttatctattgataactatgcagatgccattgataaattagatgacaaagagatttcttatttgaactctttcgtcactacactagtttctgactggatgaatgaataccatgtctttttcaaaagaatcaacgcagaacggtttttcttcgtcgcacagatgatcgatctgaaaaagatgatggataaaaaatttgatttgctggatcgctttcgagcagaagctgaaaaacagagctcgcctatcacccttagtatggggattgcttatggctcaagaaccctcgatgaaatcggtggagaagctcagaataatttagatgttgctttagtccgtggaggcgaccaagttgtcgtgaaagaggtaaaagaaggagcaaaacctgtttattatggggggaaatctgctaagaatgtcaaacgcacgcgtgttcgttctcgagcgatgagtaccgctttgcgtcggatttttgatgaaacaggcgatgtgtttatcatggggcacaagtttccggatatggatgctttaggctctgcttttggtgtcagttgtctggcacgcttcaaccagaaaaaagcttacatcgttatcaacgagaacgagatcattccagatgta

SEQ ID NO: 21241 - DNA, 1471 bp, Enterococcus faecium
gtgagtttgcacttttcagaccgcaaactatttgatgatgtgaatattaaatttacccccggaaactgctatggcttgattggtgcaaatggtgcaggtaaatcaacgttccttaaagtgttatcaggggatctgcagccttccacaggttccgttactatgggaccagatgaaaggatggccgtattgaagcagaaccattacgactatgaagactatactgtacttgaaacagtcatcatgggacacaagcgtctgtatgaagtgatgaaagaaaaagatgcgatttacatgaaagaggatttcactgacgaagatggtattcgagcagctgaattagaaggagaatttgctgagcttaatggatgggaagctgaaccagaagcagctgttttactgcaaggtctgaacatccctgaagaattgcaccatcagcaaatgagtgaattaactggtggacaaaaggtaaaagtgttattagcacaaacactatttggtaaacctgatgttcttttgctagacgaaccaacaaacggtctggatatccaatcgatcaattggctggaagaatttttgatcaattttgaaaatactgtgatcgttgtatcccatgaccgtcactttttgaacaaagtatgtacacatatggcggatctagattttggtaaaatcaaactttatgtaggaaattatgatttttggttggaatctagtcaactagcggctaaacttcaagcaaacgcaaatgccaaaaaagaagaacaaatcaaagaactccaagaatttattgcccgctttagtgcgaatgcatcaaaatcaaaacaagcaacttcacgtaaaaaaatgcttgaaaaaattactttagacgatatccaaccttcttctagacgttatccattcgttggattcaaacctgaacgtgagattggaaacgacttattgcaggtagaaaatgtaagtgtaacgattgatggaaagaaaattttagatgatatatcttttaatttgagcaaagaagacaaggtcgctttcgtcgcagaaaatgatataacaacaacaacgctattcaaagttatcatgggtgaaattacgccagatactggaacagtacgttggggtgtgacaacaagtaattcttatttaccaaaggatacaacgaaagaattcgatactgatctaacaattttagactggttgcgtcaatatgcaagtaaagaagaagatgataacaccttcttaagaagcttcttaggaagaatgttgttttctggtgaagaagtattgaaaccagtgaatgttttatctggtggagagaaagtccgttgcatgctttcaaaaatgatgctttcgaaagctaacgtacttgtattagatgatccaacgaaccatttagacttagaatcaatcacagcattgaatgacggcttgatggcatttactggctcaatcttatttgcgtcacatgaccatc

SEQ ID NO: 21242 - DNA, 1133 bp, Enterococcus faecium
atggaatttgctgagttagttattgtatttgcagtaacgatcaccttatcgaacatagctagccgcattttgccaatgattccagctccactgatccaaattttccttggagtggtattaggtctgacagagtggggacaatcaatcgattttgaacctgaattgttcttagttatgattattgcaccattgttatttagagaaggagaaaaagcagatatttcttcgattctcaaaaatttcgggacaattttgttcttggcatttggaggagtcattttgacccttgtcggggtaggtgcgacgttatcattcctgttgccaagtgtcccacttgctgcctgctttgcttttggagcagcgttaggtccgacagatgcggtagcagtcagttctctttctggacgagtgaatatccctaaaaaggcgatgcatattttggaaggagaaggtcttttgaatgatgcatctggtgttactgccttccagtttgctcttggtgcgctgatcaccggatctttttcagcagtaaacgcggggatgagtctagtagtttctagtattgggggagctttgatcggctttttgcttgtctggttcaaacaaaaaataattcatttgatcgaaaaagcatcagcacaagatgtcacagggtatctgctgatcgaacttttgcttccttttctagcctatgtattggcagaggcatttgatgtatctggaatcattgctgcagtggcagcaggtattctccaagcttctggttttaggaaaatctctgtgtttgatgcagaattgtcgagcttgtcccacagtacatggacaactattgcttttacactgaatgcattagtatttatatttttaggaatcgaattgacgcaagtgttctcgccagtatggggagacggtttatatccaaacggtcttttattagcgattatcgtattaatctctgtcatgctttttgtgatcagattcatttctatcagtcttttttatgtattcaaagatggcagtaaaaagttcaaaaaacagttgaacgagatcttgatcttaacatttggcggtgtaaagggaacagtcagtttggctacgatttttattttgccattttcaatcaataatatgat

SEQ ID NO: 21243 - DNA, 303 bp, Enterococcus faecium
atggcgattagtgaagaacaagtgaaacacgttgccaaattagcaaaacttgcgttcgcagatgaagaacttgcaagttttaccgaccaattaggtaaaatcatcgatatggtggaaatgctggaagaagtagatacggaaggtgttccatttacgtcgaatgttgtcgaaacagtaaacgtgatgcgacaagatcgggcgcaagctggatggaaccgtgatgaattattgaaaaatgtgccggaaacagaagacggctttatcaaagtacccgcaatcatcgataatggggaggctggcgca

SEQ ID NO: 21244 - DNA, 1450 bp, Enterococcus faecium
cacaatcgttctctagaggaactacatcatatgcttgtatcaaaagaaatcactgtacaagatttgacaaaagcaacatttgaacgaatcaaagaaacagagcctgagatcgaagcattcatcacattgaatgaagaaaaagcattggaacaggcaaaagctttagatgaaaaagggattgatgaaagcaacatccttgctggaattccgattgggatcaaggataatatcgtaacaaaagatatcttgacaaccgctgcatctaagattctttacaattttgaaccaatttatgatgcaacggtcatggataaaatctatcaagcagatatgatccctgttggaaaactaaacatggatgaatttgctatgggcggaagtacggaaacttcttatttcaagaaaacaaaaaatgcttgggaccaaacaaaagtacctggtggctcttccggtggttctgcagcagcagtagcagctggacaaatcccagtttctttaggtagtgatacggggggaagtatccgccagccagcagctttcaacggcattgtaggaatgaaacctacttatggccgtgtctcacgttttggtttgattgcctttgcttcatctcttgaccaaatcggaccaatgacccgtacggtgaaagataacgcattagcattgacagctatcagtggttatgacgaaaaagacggtacttcttcaggcgtttcagttcctgactttgcagagggactgaccggtgacatcaaaggaaatgaagattgctttacctaaagaatacttaggcgaaggtgtggcccctggcgtaaaagaagctgtattgaaagcagcagaaacattccgttcattaggtgctgttgtggaagaagtcagcttacctcattcaaaatacggtgtggctgtttattatatcattgcctcatcagaagcaagttccaacttgcaacgtttcgatggtattcgctatggttatcgctctgaaaacgtgaaatcattggatgatgtatatgtcaactcacgttcagaaggattcggtgaagaagtaaaacgccgtatcatgttaggtacattctcattaagtgcgggttattatgacgcttacttcaaaaaagcaggacaagtccgtacattgatcaaacgagattttgaaaaagtctttgcagattatgacttgatcatcggaccatcttcaccaacagtggcattcggaatcggtgagaacatcaacgatccaatcacgatgtacatgagtgacatcttaacgatccctgtcaacttggctggacttccaggtatgtctgtaccggcaggattgtcagaaggtttaccagttggattgcagatcatcggtaattattttgatgaaaaaacgatgtatcaagcggcatatgcgtttgaacaagcaacagaattccacacacaacaaccagctattttaggaggg

SEQ ID NO: 21245 - DNA, 327 bp, Enterococcus faecium
atgaattttgaaacagtcattggactagaagtccacgtcgagttgaaaaccaactcaaaaattttctctccagcgccagctcattttggtgcagaaccaaacagcaatacaaacgtgatcgactggggttatccaggcgtgctgccagtaatgaacaaagctgcgctggaattcgggatgaaagccgctttggcattaaactgcgaaatctctaaagatactcattttgaccggaaaaattacttttacccagataatccgacagcatatcaaatttcccaatttgatcaaccaatcggtcatgacggatggatcgatatcgaagta

SEQ ID NO: 21246 - DNA, 1523 bp, Enterococcus faecium
ttaattgtcggtcttggtttagggtttatggtcgcaaagtcacgtcacgagaaagaaatagctggtgcacaatcatcagctgctggaatcatcgatagtgcaaaaaaagaagcagaaactctaaaaaaagaagcattgttagaagctaaggaagaaaatcagaaataccgttctgaagttgaaagtgagctgagagaaagtaagttagaattaaaatctcaagagaatcgtttgattcaacgcgaacaaacgctgaatcgtaaagatgactcgttagaaaaacgcgagaactcacttgaaagtaaagaagaagcacttagttcaaaacagcaattaattgaagagcgagaaaaagacgttgaaaaaatgattgaagatcaacaaaaagaactagaaaaaattgctggtttatcaaaagaggacgcacgagatgtcatcatgaaatcgactgaagaagagctgaatcatgagttaactctaatggtaaaagaatctgaacagcgtgccaaagaagaagcagatcgcaaagcgaaaaacttattatcattagcgattcaacgctgcgcacagatcaagtttcagaaacgactgtttcagtcgttacccttccgaatgatgaaatgaaaggtcgtatcattggacgagaaggtcgtaatattcgaacgcttgagacgctgactggtatcgatttaatcatcgatgatacaccggaagcagttgttctttccggattcgatccaatccgaagagaaatcgcacggatgaccttggaaaaactgatacaagatggacgaatccatccagcgcgtatcgaagaaatggtcgagaaatctcgtaaagaaatggatgaacgtattcgcgaatacggggaagaggcagcgtttgaagtcggtgctcatacacttcatccagatctaatcaagatcatcggacgtctgcgattcagaactagttatggacaaaacgtcttgaagcattcggtcgaggttgcaaaattagctggtatcttagcagcagagcttggcgaagatatccaattagcaaaacgtgccgggttgctccatgatattgggaaagcacttgaccatgagattgaaggatctcacgttgagatcggtgcggaattagctgccaagtacaaagaaaacccagtagtaatcaacgcgatcgcttctcatcatggagatgtggaagctacttctgttatctctgtccttgtagctgcagcagatgcgctctcagcagcaagacctggtgcgcgaagtgaatcattagaaaactatatccgtcgtttaagaagtctggaaaatatttcgaacagcttcgccggtgtagaatcaagttacgcagttcaagctggacgcgaagttcgggtaatggtcaagccagaagaaatctcggatttagacgctgttcgtttagtacgtgatattcgtaaacgaatcgaagaagaactggattatcctggacacatcaaagtaatcgttattcgggaaactcgtgcaactgattatgctaaataa

SEQ ID NO: 21247 - DNA, 1567 bp, Enterococcus faecium
agctctatctgttcaaatcaatggaacgaatatcgggcaaacaaatgagttgtctattcaaaaagcagtagatttcttctcaaacttaacgttatctgaacaagagaaagtaattgccaaaccgattttaaaagaagtaaatgacagactttcattcttggaaaatgtgggactagactatctaactttgagtcgcgcttccggaacattatctgggggagaagcgcagcgaatcagattggctacacaaattggatcgaatctttctggagttttgtatattttagatgaaccatcgatcggattgcatcaacgcgacaacgatcgactgattggctcattaaagaaaatgcgtgatcttggcaacaccctcgttgtagtcgaacatgatgaagatacgatgtgggcagcagattatttgattgacgtcggacctggggccggagaacaaggcggacaaatcgtggctgcaggcactcctgaagaagtagctaatgatgaaaattctttgacagggaaatatctttcagggaaaaaatcaatccctgtaccaaaagaacgccgtaaaggtaatgggaaagcaatcaagatcactggtgcttcagaaaacaatctgaaaaatattagtgttgaatttccattaggagaatttgtagcagtcacaggtgtgtctggttctggaaagagtacattggtcaatagtatcttaaagaaatcgttagcgcaaaaattaaataagaattctgctaagccaggtaaattcaagacaatttccggctacgaaagtatcgaaaagatcatcgatatcgatcaaagcccaatcggccggacgccgagaagtaatccagcgacttatacaagtgtatttgatgatatccgtgtgttatttgctcaaacgaacgaggcaaaaatgcggggttataagaaagggcgttttagtttcaacgtaaaaggcggtcgttgtgaagcttgtcgcggggatggaattattaagatcgaaatgcactttttgcctgatgtctatgttccttgtgaagtatgtcatggtaaacgatataattctgaaacattagaagtgcattacaaaggaaaaagcattgctgatattttggaaatgacagtagaggatgctgtagaattcttcaagcatattccaaagattcatcgcaaactgcaaacgattgttgatgttggcttaggttatgtgacgatggggcaaccagcaacgacattgtccggtggtgaggcacaacggatgaaacttgccagtgaattgcacaaaatctctaatggaaagaatttctatatactagatgaaccaacgacaggacttcatagcgatgacatcgcccgcttgttgcatgtattacaaagattagtagatgctggtaacacagttttagtgattgaacacaatctagatgtaatcaaaacagcagattatatcattgatttaggaccagaaggtggagaaggtggaggaacgatccttacgactggaacaccagaagaaatcattaacgtaaaagaaagttatacaggtcactatttgaaaaaaataatggta

SEQ ID NO: 21248 - DNA, 651 bp, Enterococcus faecium
atggaaaaaacgatatttaatcgaacgtatgaaatattaaatgaagtgtttaatgcagtcacccatggaattgggactggattgagtatcgcgggactagtggttcttttagtaaaaggtgcccacttgcattcctccctccatattgtctcttatgctatctatggatcgatgatgattcttttatttttaacgtctactttgtttcattcattgatttttacaaaagcaaaaaaggtgttccaagtattcgatcatagttcgatttttcttttgattgcaggaagttatactcctttttgtttgctgagtatccgaggatggctaggttggactttatttgtattaatctggttgtttgcgattcttggcattatatataaagcgttgacgttgcataaacgggagagagtatcaaaagtatctacgatcatctatatttttatggggtggctctgtgtcgtggctgctgttcctctttatcactctcttggaatgactggtgttattttgatggtagcaggcgggctttcttacacgataggcgcattcttttatagcttgaattctatccgctatatgcatgttgtttggcatttgtttgttatgttaggtgcaggttttatgtacttctctgttttattctttact

SEQ ID NO: 21249 - DNA, 525 bp, Enterococcus faecium
atgttagctgcaatttgggcacaggatgaaaacggattgattggaaaagaagaccgtcttccttggcgtttgccaaatgatctgaaattcttcaaacaaatgacagaagcaaatacactagtgatgggacgaaaaactttcgaagggatgggtagccgtccgttgccgaatcgtcagacgattgttttgacgagagattcttcctataaagcagaaggcgtgcatgtcatgcatagtgtggaagacgtgcttgctctggaaaaagaaacagacggtatctttttcatcgctggagggtcagctgtttatcaagaatttctgccattttgtacgatattataccgtacagtcatccatcatgtattcgatggagatgcttattttccacctgttgactggtctgattggtcactgatcaatactagtcaaggagaaatagatgaaaaaaatcgttatccgcatcaatttgaaacgtatcagcgtaatgagaatcctgtaaaaagcgggacaggcgaattgacgata

SEQ ID NO: 21250 - DNA, 1149 bp, Enterococcus faecium
gaattacgtgacggagacaaagctcgttatggcggtaaaggtgtaactaaagctgtcgacaacgtaaacaacatcattgctgaagcaatcattggctacgatgttcgtgaccaaatggctatcgacaaagctatgatcgctttagacggaactcctaacaaaggtaaattaggtgcgaacgctattttaggtgtttctatcgctgttgcacgtgcagctgctgactacctagaagtacctttataccactacctaggcggattcaacacaaaagtattgccaacaccaatgatgaacatcatcaacggcggatcacatgctgataactcaatcgacttccaagaattcatgatcatgcctgttggcgctccaacattcaaagaagctctacgtatgggtgctgaagtattccacgcattagcttcaatcttgaaagctcgcggattagcaacttctgttggtgacgaaggtggatttgctccaaaccttggttcaaacgaagaaggttttgaagtaatcatcgaagcaatcgaaaaagctggctatgtacctggtaaagacgttgttcttgctatggatgctgcttcttcagaattctacgacaaagaaaaaggtgtttacgtactagctgactcaggcgaaggcgaaaaaacaactgacgaaatgatcaaattctacgaagaattagtttctaaatatccaatcatctcaatcgaagatggattagacgaaaacgactgggacggattcaagaaattaactgacgtattaggcgacaaagttcaattagttggtgacgacttgttcgtaacaaacactcaaaaattatctgaaggtatcgaaaaaggaattgctaactcaatccttatcaaagtgaaccaaatcggtacattaacagaaactttcgaagctatcgaaatggctaaagaagctggctacacagcagttgtatctcaccgttctggtgaaacagaagattcaacaatctctgatatcgctgttgcaacaaacgctggccaaatcaaaactggttctctatcacgtactgaccgtattgctaaatacaaccaattactacgtatcgaagaccaacttggtgaagttgcagaatacaaaggtttgaaatctttctacaacttaaaaaacaaa

SEQ ID NO: 21251 - DNA, 444 bp, Enterococcus faecium
atgccatggaacatgaaggactttcctgcatcaatgaaaaacttagataaattgacaagaaaaaaagcaatcgacatcgcaaatgcattattagatgaagggtaccctgataaccgtgcgatcccaattgccattgatcaagcaaaaaaatggtatgaagatgctagtgaatcagaaaaacgaactttcgaaaaagaaaaaaatccaagcaagacggatgaacacgatacgaatcctcgtgctggaaaactgcttgattcagatgtgatcgtagaatatgaggaagaacaatggatcgtgaaatctaaaggggcaaaaaaggcaagcaaccattttgatacaaaaaaagaagcaatcgaaaaaggaaagcaagtagcacaaaacaaagaatcaactttgttcatttataaaaaagatgggacaaaagaaaaagaaatcgattat

SEQ ID NO: 21252 - DNA, 1311 bp, Enterococcus faecium
aatatagaacgaggtgttcacatgtcatctgtagtagtagtaggtacgcaatggggcgatgaagggaaaggaaaaatcacagactttctcagtgaaaatgctgaagtgattgcacggtaccaaggtggcgacaatgcagggcacacaattaagtttaacggtgtgacttataaactgcatttgattccttctgggattttttataaagacaagatcagtgtgatcggaaacggcgttgtagtcaatcctaaatcattggttaaagaattagcttatttacatgaaaaaggtgtagaaacaagtaatttgcgtatttctgaccgcgcgcacgtaatcttgccttatcatatcaaattggaccaattacaagaagatgctaagggcgaaaacaagattggtacaacgattaaaggaatcggacctgcctatatggataaagcagctcgtgtaggtatccgtattgcagacttattagataaagaaatttttgaagaacgtcttcgtttgaatctagatgacaaaaaccgtcaatttgtaaaaatgtttgattcagaaccacttgattttgacgatatttttgaagaatattatgaatacggacaacaaatcaaacaatacgtcacagatacttccgttatcttgaatgatgccttggatgcaggcaaacgcgtgttgtttgaaggcgcacaaggtgtaatgctggatatcgaccagggaacttatccttttgttacttcttctaacccagtagccggtggggtaacaatcggaagcggtgtagggccttcaaaaatcaataaagttgtcggcgtctgcaaagcctatacgtcacgtgtcggtgatggaccatttccaactgaattatttgatgaaacaggagaacaaatccgcgaagtaggacgagaatacggtacgacaactggtcgtccgcgtcgtgtaggctggtttgattctgtagttatgcgccattctaaacgagtttcaggtattaccaacctatctttaaactcgatcgatgtattaagtggattggaaacagtaaaaatttgtacggcttatgaattagatggcgaactaatctaccactatccagcaagcttgaaagagttgaaccgctgcaaaccaatctatgaagaattgccaggctggtcagaagacattacaggatgcaaaacactagcagaactgccagaaaacgcacgtaactatgtacgtcgtatctcagagcttgttggtgtacgtatctcaacattttctgtcggacctgatagaacacaaacaaacatcttagaaagcgtctgggcgcaaatc

SEQ ID NO: 21253 - DNA, 315 bp, Enterococcus faecium
atggaagtggacgatgccgtcaaagccgctgatgtggtcatgatcttgctgcccgacgaaaacattcctgacgtgtacaaaaacaacgtcgaacccaacatcaagcaaggtgccaccttggcctttgcccacggttttaacgtgcactacaaccaagtcgtgccccgcgccgacctggacgtgatcatggttgcccccaaaggccccggccacaccgtgcgctcggaatacctgaaaggcggcggcgtgccttcgctgatcgccatctaccaggacaagagcggcaaagcgcgtgacgtggccctgtcctacgcc

SEQ ID NO: 21254 - DNA, 447 bp, Enterococcus faecium
atgaataaagaattatcaagacacgagattcgggaaatggcattgcaggctttatttccattagacttcaatgcagacctaacaaaagaagatgcgattttcaacgcaatcgaattagaccaccgcgacatgatcaacgaagatgaatcagagtttgttcctgtttatcttgatacgctagttggcggtgtctgtgcaaaaaaagatgaattggataaagtgattgaaaaacatttgaaaaacaattggcacatcaatcggatctcaaaaatggatttggtgatcttgcgtatcgcgatttttgaaatgacttatgtgacagatgtaccagcggctgttgctttaaatgaagcaatcgagttggcaaaaacatttagtgatgaccgttcacgtaaattcgtcaacggtgttttatccaatgtattgaaagaattagaagctggggcg

SEQ ID NO: 21255 - DNA, 723 bp, Enterococcus faecium
atgaataattttatacaaacattaagtgaaagaaaaggcgagttgctggaagctgcatttcaacatctgtccatttctctcatttctttgctgattgcagcactgattgctattcctttagcgatttgggcagccaatcataaaaaaatggcagaagtcttattgcagatcacgggtgtgctccaaacgattccttcacttgccttattaggtttacttatcccatttgtagggatcggaactgttccagcattgattgcacttgttatttacgctttgcttccgattttccaaaacacgtatattggtctagctgaaattgacccgtctattgaagaagcagcggtagcatttggtatgtccagaatgagacgcttgctgaaagtagagcttcccatcgcattacctgtcattatctcaggtatccgaactgccttagttttaatcatcggtacggctactttggcagcattgatcggagcaggtggattagggacatttattttgttaggtattgaccgaaatacacctgttttgacattgattggtgcgatcagttctgccttgcttgcaattatattcagcggactggttcgctgggtgcagcataagaaacctcgatattccatcattactttagcagcagtggtgtgtttatttggcggcgtttctttatatcagtctgccttgtttaaaaatgaaaccatcacggttgctgggaaa

SEQ ID NO: 21256 - DNA, 1763 bp, Enterococcus faecium
  misc_feature (1738)..(1738): n=g, a, t or c
atgttgaaagaattaaaagtaactgacctcaaaaaaacttatggtgaaaaagatttgtttgaccagatttcttttttggtccacgaaaaagaccgtatcgggttgattgggacgaacgggacgggtaaaacaagtctcttaaatattattgccggtatcgatagcggcgacggtgatcggcaaacagtgttttatccaactgattaccgtattggttatctttctcaagcagctgaattttccgatgaattaactgttctccaagcagtctttcaaggaaacagccccttgatccaaactgttcgagcatatgaggaagcattgatcgaactaggggaaaacggagaagaccctgatgtgcaaaaacgttatgctaaagcagaagaacaaatgaataaagaagatgcttggactacagataccaacgcaaagattattttgcaaaaattaggaatcagtgaattagataaaaaaatcagtactttatcaggtggtcagaaaaaacgagttagtctggcgcaagtgttgattgatgaacccgatttactattactagacgaaccaacaaaccatttagattatgaagcgatcgagtggttggaaaactatttgaaacaataccgtggcgcactattgatggttacccacgatcgttattttctagatagagtagcaaaccgaatcttcgaactttcatttggaaaattatacgagtataaaggaaattatgaagcttacgtcttagaaaaagcagaacgtgatcgtgtagaagtagaacaagaagaaaagcgcaacgttctttataaacaggaattagcttggatgagggctggcgtacaggcacgtggcaccaagcagcaagcacggatcaaccgtttcgaagatctaaaggagaacttgtaccaagtaaaccaagaagatgatttagagctgaacctagcgacacaacgtttagggaaaaaagtactggaaatcaaagatggcagttaccgtataaatgaccaaacactgctagaacatttagatttactgattcaatctcgggaaagactaggtattactggtaaaaatggtgcgggaaaatcgacattgcttaatattctagctggcagaattcccctggatagcggtacaatgtctatcggtgaaacggttcatcttgcgtattatacacaagacaatgaagaaatggcaccagataaacggatgattgcttacttacaagaagctgctgaagaagcaaaaacagcagatggcagtcaaatcggagtagcagaattacttgaacgatttttatttccaagatttatgcatgggacactgataggcaaactttcaggcggagaaaaacgccggttatttttgttgaaactgctgatccagcaacctaatgttttattattggatgaaccgaccaatgatttggacatagcaacattgacgattttggaagattattttagaagttttccaggtgctgtgatcactgtttcccatgaccgttatttcttggacaaggtagcagataagttattagtattccaaggaaacggaaaacaagaactttattacggaaacatgtccagttatttactgaagcaaaaagagacccagcagcctgctgaaaaagcgaaaccaaaaatacagagcaaggaacctgctgaaaagaagacattatcttacatggaacaaaaagaatgggaaacgattgaagatgagattgcagaacttgaagaanaaatctcattgctcccagagagatg

SEQ ID NO: 21257 - DNA, 1584 bp, Enterococcus faecium
atgtcaaaaatcaatgcaggaatcgcaatggtaaaagttcttgaaagctggggtatcgaccatatttatggcattcccggaggatctttcaattcaattatggatgcgctatatcaagaaaaaaccgaaatcaactacattcaagttcgtcatgaagaagtcggcgcactcgcagccgctgcagatgcaaaattaacggggaaagtcggcgctgtcttcggctctgcaggacctggtgcgacacatttgatcaatggtttgtatgatgcacagatggaccatgtgcctctagtagcgttcttaggacaagttgcttctacatccatgaactataactctttccaggaactaaatgaaaatcctattttcgcagatgtcagcgtatacaatcgtacagtcatgacaccacaaagtcttccgcatgtagtagatgaagccattaaagccgcctatgagcataaaggcgtggctatcgtgactatccctgttgatcttggttttgaagaaattgacgaacaacctttctccaccgctcacactcacaaaacaagtgtgatattaccagaagaaaaagatttgctagctgctttgccttatcttgaaaaagcaaaaaaaccagttctttatgttggtcaaggaacgcgaaacggatttccgcaaatcaaagaattctcagaacatttttcagttcctattgtcgcttccgttctagcaaaaggaattattcctgatgattatgaaaactttcttggttttgctggacgtgtcgctactaaacccggaaatgaagcattggcagaagccgatctgatcttatttgtcggtagcgacttcccatttggacgtgcattttttaatccaactgctgaatttatccaaatcgatatcgatgcgtcaaaatttggacgacgccatgaaacatctttgtcgatcctcggtgatgcaaacacagctttgcaaagacttgtcgagttaggggatgctcgccctgctgatagctggtacctagcaaatcaagaaaataaagaaaaatgggtaaattggttgaaatcttttgaagatcgagaggaagaaccgattcgttcagaggctgtctataaagaaatcaatcgtattgctgaagacgatgcgattttcgtcacagatgtcggtaacacgactatccattctattcgtttattgaatatgaacggtaaacaaaaacatacgacatctggatggttcgcaactatgggtaatggtgtgccaggaggaattgccgcacaactaagctacccagaaaaacaagtatttaccttaagtggtgatggcggatttgctatggtcatgcaagatatcattacacaagtcaaatatcagcttccaattattaatgttgtcttttcgaatgattcttttggtttcatcgaagcagaacaagaagatacggaacaaaagaaatttggtgtatttttagaagatgcagatttcggtaaagttggagaagcgctcggggcaaatagctttacagtcacagaatactcgcaacttcgattttgctttgatgcagctgcaaaatcagatcgtcctgtagtaatcgatgtg

SEQ ID NO: 21258 - DNA, 1335 bp, Enterococcus faecium
atggcacaagaatatttaactgtcactacattaacgaggtatttgaaacgtaaatttgatgccgatccttatttagaacgcgtatatttaacaggcgaaatatcgaatttccgtttacgtgccaatgcccatcaatatttcagcttaaaagatgaccatgcaaaaatatctgctattatgttcaaaggagcattccaaaaattacgattccagccaaaagaaggaatgaaagtccttgtcgttgggcgtatttcattatatgaagcgggaggttcttatcaaatctatgtagagcacatggagcctgatggaataggtgctttatatcaagaattggaagaacgaaaagaaaagctgatgaaggaaggcctttttcaagggcctaaaaaaatgctgccacgtttcccgaagcgaatcgcagtccttaccagtccaagcggacgggttatccgcgatatcatcacgacggtgaaaagaagatatccaattgtccaattggttttgttcccaacagttgtacaaggaaaccaagcagcggacaatgttgtcaggaatatccagagagtagaagagatgggcaatttcgatacaatgatcatcggtcgtgggggtggttcgattgaggatttatggccgtttaatgaagagcgggttgctcgggcgatttatcaagctaatacgccggtgatttcatctgtaggacatgaaacagataccacgatcgctgatttagtagcagatgttcgggctgccactccaacagcagctgcagaattagctgttcctgttttgtcagaagagttgatgcgcattcaagaacggcaagctagattgcagcaggcgtttgtacgccagatccagcgcaaacaagaacggttcgagcgtgctcgacgttcctatgtatttcggcagcctgaaagattgtatgaaggtcagaccatcaaattagaccagttgaaacagcgattatatcaagctacacagcaaatttatcatgcgaaagaaaaacaaacgatcgcattaagccaccaattggaacaagtggctccgctttatcgagttaaagcagctcgccaagaaactgcttatctagaaaaacgcttagaagagaaaatccaacaatatatgaaacaacagcagcagcgttttgctcaagctgttcaatctcttgatttgttgagtccattgaaaatcatgggaagaggctacagctatacgacgttaaatgatcaagtagtaaaaagtgtctccgagattcatcaaggggatttgctgacgatccattatcaagatggaatcgttaaaggacaagtacaagagatagacaaaggagaa

SEQ ID NO: 21259 - DNA, 795 bp, Enterococcus faecium
  misc_feature (764)..(764): n=g, a, t or c
gctgagatgagattaactgacttttcagctattcatctacctgctgtagaaaaagaaatcttgtcttttttagatgagcatacaacggatagaggactctatgatgcgatgagttattcagtgaaagcaggcgggaaaagaatacgtcccttattacttttaacggccgttgcttcctttgatgagcctattgatgttcccgtctatcaagtagcagctgctttagaaatggtgcatacgtattccttgatccacgatgatttgcctgcgatggacaatgatgatcttcgtagaggaaaacctaccaatcataaagtattcggcgaacattagctatattggccggagatggtttgcttacaggagcattccagctaatcagtatggcacacttaggtaattctcctaagcttctgctgcttcagcaattagctgtttgtgcgggatcacaaggtatggttgctgggcaagctgcagatatcgagggcgaatcgaaaaagctttctttagaagaattagcatttattcatgaaagaaagacagggcatttgattcgttatgccttgctggctggtggcatattagcgaacatacctgaagaaatcttattgctacttcaacgattagccgaacatttaggtttagcttttcagataagagatgatctactcgatgtgattggtacaacgaaaacattagggaaaacagctggtaaagatgaacgtatggaaaaaaatacttacccgcgtttattaggcctaganaagacccgtgaggcgttggagattgagctgt

SEQ ID NO: 21260 - DNA, 972 bp, Enterococcus faecium
atgcgaaaagtaattattgattgcgatccagggatcgacgacactttagctttatcattagctgtcaaatcccctgatatcgaagtagttgctattaccgtagtttgtgggaatgtccctgcagatataggtacgcagaatgtgctgaaatgcctggaacgctgtgatcgtttagacattcctgtttatcaaggaatggaaaaacctttgaagcaacctttcatcagtgcacaagacactcatggtatggatggtttaggggaaacaaatttcccgatgatcttgagaaaacaggcagaacctctccatgccgttgattttttggctgattatttcaaagaaaagacaaatacatcagtcattgctttgggtcctttgaccaatatcgcttttgctttgaaagtcaacccaaatattgggaaacatatggatcgttttgtctcgatgggtggaacttacaaaagccatggtaactgttcgccagttgctgaatacaattactggtgtgatcctgaagcagcttcttatgtattcgagaatctcaaacaaacgatagaaatggttgggttagatgtgacaagagaaatcgtcttgacaccgactatcctcgaatactgctgtcaaatgaatcctgaagagggagagtatctaaaagcgatcactcgtttttattttgacttccactggaaacaagaaagaattttaggatgtgtcatcaacgatccgttagctgttgcttatttcatcgagggggccatctgtgaaggtttcaaaagcttcaccgctgtggaaactcagggaataagtcgtggacaaacattggttgatcgttatgaattttggcagaaacctgctaacagtaaaattatgacaaaagtagatactcgtctttttttccgaaagtttttaaccgttcttttaaatgcacaagaagaaacgattatgaaagatttggaaaggttaaagatgggc

SEQ ID NO: 21261 - DNA, 1623 bp, Enterococcus faecium
atggcaaaagaattgaaatttgcagaagacgcacgcgcactgatgttacgcggggtagataaattagcagatacagtgaaagtaacattaggacctaaaggccgaaatgtcgtactagaaaaatcttacggctctccattgatcacaaatgatggtgtgacgatcgcaaaagaaatcgaattagaagatcattttgaaaacatgggtgcaaaacttgtatcagaagtagcatcaaaaacaaatgatattgcaggagacggtacaacgacagcaactgttctgacacaagcaatcgttcgcgaaggtttaaaaaacgtaactgcaggtgctaatcctctaggcattcgtcgcgggatcgaattggcaacaaaagcagcagtcgaagaattgcataatatctcaactgttgttgattcaaaagaagccattgcacaagtagcagctgtttcttcgggttctgataaagttggacatttgattgctgatgcaatggaaaaagttggaaacgacggtgtcatcacaatcgaagaatcaaaagggatcgaaacagaactagatgttgtagaaggtatgcagtttgatcgtggttacttatcacaatatatggtaacagataacgacaaaatggaagctgttctagaaaacccatatatcttgatcacagacaaaaaaatctctaacatccaagatattctgccattgttagaacaaatcttgcaacaatcacgtccattgttgattattgctgacgatgtagatggtgaagcattgccaactcttgtattgaacaaaatccgtggaacattcaacgtagtagctgtaaaagctcctggtttcggcgatcgtcgtaaagcaatgcttgaagatatcgctattttgacaggtggtacagtaattactgacgatctaggtttagaattgaaagatgcaacaatcgaaaacttaggaaatgcttctaaagttgttgtagataaagacaatacaacgatcgtagaaggttctggagaaaaagaagcaatcgaagctcgtgtgcaattgatcaaaaaccaaattgctgaaacaacttctgattttgaccgcgaaaaattacaagaacgcttagctaaattagcaggtggtgtagctgttgttaaagttggtgcagctactgaaacagaattgaaagaattaaaattacgcattgaagatgcattgaatgctacacgtgccgcagtagaagaaggaatggtctcaggtggtggtacagctctagtgaacgttatcagcaaagtttctgctgtagaagcagaaggagacgtggcaacaggtatcaagatcgttgttcgtgctttagaagaaccaattcgtcaaatcgctgaaaacgctggttatgaaggatcagtgattgttgataaattgaagaacgtggaactaggcactggtttcaatgctgctactggagaatgggtaaacatggttgaagcaggtatcgtagacccaactaaagtaacacgttctgccttgcaaaatgccgcttccgtttctgccttgttattaacgacagaagcagtcgttgcagataaaccagaaccagcagcgccagcagctcctgcaatggatccatcaatgatgggcggtatgatg

SEQ ID NO: 21262 - DNA, 899 bp, Enterococcus faecium
atggctaacgataaaattacgattcatggtgcacgtgcccataacttgaaaaatatagatgtaacgattccacgagataaattcgtggtcgttacaggtttgtccggttctggaaaaagttccctagcatttgatacgctgtacgctgaagggcagcggagatacgtagagagcctttctgcttatgctcgtcagtttttaggacaaatggataagccggacgtagatagcatcgacggattgagtccggcgatttctattgatcagaaaacaacaagtaaaaatcctcggtcgacagtaggtactgtgacggaaatcaatgactatttacgcttgttgtttgcacgtgtaggacatccgatttgtcccaacgatcatatcgagattaccagtcaatcagtagatcaaatggcagatcaagtaatggctttgcctgagcgcacaaagatccaagtgttggcaccgatcgtggtaaagaaaaaaggacaacataaaaaaatattcgaacgaatccaaaaagagggatacgtccgcgttcgagtcgatggtgagatctatgatttaagtgaagtgcctgagctggagaaaaacaaaaaacatgatatcgcgatcgtcatcgaccggatcattgtgaaagaagggattcgttctcgcctatttgattctttagaggcggccctgcgattagcagacggctatgctctggttgacgtgatcggtgaagaagacatgttgtttagcgaacactatgcctgtccttattgcggatttactgttggcgaactagaaccaagactgttctcattcaatgcgccttttggagcttgtccagactgtgatggtttaggtgtcaaattagaagtcgatcaagatttagtgattccagatagaacgaagac

SEQ ID NO: 21263 - DNA, 339 bp, Enterococcus faecium
gtgggacatatcggtctttatcgagatgaagaaacattggaaccacatgaatatttcgtcaaacttccagaagacattgatgcacgtcagttgtttgtagtagatccaatgttggcaacaggcggatcagcaatcatggcaatcgatgcattgaaagaacgtggcgcgtcgaacattaaatttgtttgtttggtagcagcacctgagggagtaaaagctttgcaagaagcgcatcctgatattgacatctatacagcttctctagatgaaaaattgaatgaacatggttatatcgttcctggactaggggatgcgggtgaccgtttgtttggtacaaaa

SEQ ID NO: 21264 - DNA, 815 bp, Enterococcus faecium
agctatgaacgtgatttggaacagtacttgcattttctacaggagcagaaaattgcttcatggcaggatgtcgatcgctttttagtcatccgttttctggagaagttgcatgaagaaaaaaaagcgacacaactgttactcggatgatctcaagtctcagaagattccatcagtttttacggcaagagcgtatcactgatcatgatccgatgcaacatatcgatacgccgaagaaagcacagaaattaccaagtacattgactctgacagaagtagaaaagctgattgaagcacctgatacgacaaaaacgttagggataagagatcgtgcaatcttggaagtcatgtatgctacagggatgcgcgtcagtgaattgattggattgaaattgggagatcttcatctttctcttggactggtacagacagttggaaaaggagataaagagcggatcattcctttaggtgattatgcgatccaatggctggaacgctacttagacgaagcacgtccattacttgtaaaggacgcatctgaaatgcatgtatttgtcaataatcatgggaaaggtctttctcggcaaggaatctggaaaaatctgaagcagctagtacgagaggctgggatttacaaagaagtaacaccacatacgctgcggcatagctttgccacacatctgctagaaaatggagctgatttgcggacagtacaggaattgttaggtcacgcggatatctctacgactcagatttatacacatatcacgaagaaaagaatgacggatgtttataagcagcattttccaagggcttag

SEQ ID NO: 21265 - DNA, 501 bp, Enterococcus faecium
atgagtgaagcaattatcgcaaaaaaagcagcaatcgttgatgaagtaagcgaaaaatttacagcagctgcatcagtagtagtcgttgactaccgcggattaacagttgatgaagtaacacgtttacgtaaacaacttcgtgatgctaacgtagaaatgaaagttatcaaaaattctattctttcacgtgcagctaaaaaagctggccttgaaggcatggacgaagtattcactggacctacagctgttgcattcagtaacgaagatgtagtcgcaccagcgaaaatcatggacgaatttgctaaagaagcaaaagcattagaaatcaaaggcggtatcatcgaaggtaaagtctcttcattggaagaaatcacagcattggcaaaattgccaaatcgcgaaggacttctatctatgttgctatctgtactacaagcgccagtccgcaacgtggcttacgctgtcaaagcagtggcagacaaagaagatggagatgcagct

SEQ ID NO: 21266 - DNA, 366 bp, Enterococcus faecium
atggcattgaacattgaaaacatcgttgctgagttaaaagaagcaactatcctagaacttaacgacctagttaaagctattgaagaagaatttggcgtatctgctgctgctcctgtagctgtagctgctgctggtggcgctgctgctgctgaagaacaaacagaattcactgtagaattaactgcagctggagaccaaaaagttaaagttatcaaagcagttcgtgaagcaactggcttaggcttgaaagaagctaaagctgtagttgatggcgctcctgcaccagttaaagaaggcgtatctaaagaagaagctgaagaattgaaagctaaacttgaagaagttggcgcatctgtaactgttaaa

SEQ ID NO: 21267 - DNA, 762 bp, Enterococcus faecium
aatgagaaaagagaagtaacaaaagaagtaaaagaagcgattgccgctgctgttgcaaaaggtgtttcgatcgttttatgcactggccgtcccttaccaggtgtccaggaacagttaaacgagttgaacctttttcaagataatgattacgttattacttataacggggcactcgtacaacaaacgaaatcaggtaaaatcatcgcccgtcacggactgactcatgaagatttcctagagatcgaagtgatggcacgccgtgtcggcagtcatctccattcgatcgatgacaaagcgatctacacgcctaatcgagatatcagcgcttatacgatccacgaagcaagtttagtcaagatgccgctaaaatatcgaacacctgaagaaatgacaccagacatgaacatcgtcaaaatgatgatgatcgacgaaccagaaattttagatgcagcaattgcgcgtttaccgcaaactttccgtgataaatacacaacggtcaaaagtgcgccctattacttcgaagtactaaataaagaagcaagtaaaggtgcggcagttgcgaatctcgcacagcaccttggtattgatcaagatgaaatcatggctatcggagataacgagaacgacttatccatgattgaatatgctggtctaggagtagcaatgggaaatgccgtttctcttgtcaaagaagcagcaaatgtcatcacttcatcaaacgacgagcacggtgtagctgaagcaatcaaaaaatatgtactg

SEQ ID NO: 21268 - DNA, 204 bp, Enterococcus faecium
ttgattattgatttatttattgtgcttgcagtgattatcccagcagctcagtttcctttccaaagttggttgatagaatctgttgcggcacctacacctgtatcagcaattatgcatgcaggcatagtaaatgctggtggcattatattaactcgattctccccggtatttgataacccaattgctacgagattgaaaaagaca

SEQ ID NO: 21269 - DNA, 474 bp, Enterococcus faecium
atgaatggtatagaagctgtagtggcagctacaggaaatgatacacgtgcggttagcgcttcgattcacgcctacgcggcaagaaatggattataccaaggattaacagactggcagatcaaaggggataaactagttggaaaactaacggtgcctttggctgttgccacagtaggcggagcttccaatatcctgccaaaagcaaaagcatctttagctatgttagatattgattcagccaaggaactagcacaagtaattgctgcagtagggttagctcaaaacctggctgctttgcgtgcattagttacagaaggaatccaaaaaggccacatgggacttcaagctcgttcattagcgatctcaattggggctattggtgaggaaatcgagcaagttgcgaaaaaattacgtgaagcagaaaagatgaaccagcagacagctatacaaatattggaaaaaatccgggaaaaa

SEQ ID NO: 21270 - DNA, 450 bp, Enterococcus faecium
atgaaagtaatttttttacaagatgtaaaaggaaaaggtaaaaaaggggacatcaaagaagttccagcaggttatgcacaaaattatctaatcaaaaataacttggcaaaagaagcaacgaaaagcagtatcagtcagttagcaggacaaaagaaagcgcaagaaaaacacgaagctgaaatcttggaagaagctaaaaagttaaaagaattcttggaaaaagaagatactgtagtcgaattgaaggcgaaagcaggggaagacagccgtttgtttggttcgatcccttcaaaacaaattgctgaagggttaaacaaacaatacaaaatcaaattagataaacgaaaaatcgaattagaaaatccgatccgttcactaggctacacaaacgtacctgttaagcttcatcatgaggtgacggctacgatcaaagttcatgtcgtacaagaa

SEQ ID NO: 21271 - DNA, 1386 bp, Enterococcus faecium
atgaatgaagtgtggcaggatcgaatcccaccgcaaaatattgaagctgaacaagcggttttaggctctgtttttcttgacgcagaaacgatcattgatgccatggagtacatagagccaaaagacttttatcgtcgcggccatcaaattatttttgagacaatgatcgagttaaatgatcgtaatgaagcgattgacgtggttactgtcaaagaccggctggaacaagccaatttgttagaagatgccggtggtttaagttatctctcagacttggcattagcagttccgacagcagcaaatatcgtctactatgcgaaaatcgttgaagaaaaatcattgctgcgtacattgatccagacagcaacaggaatcgttacgaaaggattcgagcaaggagaagaagttcaaacaattttagatgatgccgaacgcagtatcttggaggtttcggaaaaaagaaatcgaagcggctttttatctattgctgaagtactgaactccacgattgaaaatatcgatcgactagctcaaaacaatgaagaaatcacaggtctaccaactggctatcaaggtctggataaaatgacagcaggtttccagcccgaagaactaatcattcttgctgcacgtccagcggtaggtaaaacagcgttcgcattgaatattgctcaaaatgtaggaacaaaaacagatcgttctgttgcgatattcagtttggaaatgggggcagaatctcttgtaaatcggatgctttgtgcagaaggttcgattgaggccagccatttacgtacaggtcagctttcggaagaagaatggtcgaatctgatcgttgcgatggggagtctttctcgagcaaatatttttatcgatgatacaccagggatcaaaatctctgaaatccgtgcgaaatgtcggaaactagctcaagaaaaaggcaatctaggcttgatattgatcgattatttgcagttgattgaaggtaacggtaaagagaaccgtcaacaagaagtatcagatatctctcgccaactgaaaaaactggcgaaagagctgaaagtacctgtcattgctctttcacagttatctcgtggagtagaacagcgacaagacaaacgaccagtgctaagtgatattcgtgaatccggatcaattgaacaagatgcggacatcgtagccttcttgtatcgagatgattattatgaaagagaaggcggagatgacgatgatggaaacgagccaaaaaatgacaacgtcatcgaagtcatcatcgagaagaaccgaagcggtgcacgaggaacagttgaactactgtttatcaaagaatacaataagttttcgtcgctttcgccaagagaagaattttcaagaagaggttgtgagcct

SEQ ID NO: 21272 - DNA, 195 bp, Enterococcus faecium
atgactgaaaaaatcttataccagcacgggacattaggagctttgatggccggcttgatggatggaacagaaacgattgctcatatattagaaaaaggaactctgggattgggaacattgcatgggcttgatggtgaagtcatctttttagatggcgtacttatcaaggaagatcagatggctcagttgcccaat

SEQ ID NO: 21273 - DNA, 747 bp, Enterococcus faecium
ttggcagtgaagataactggattattcaaaaatatgcacatccgtatcatgccgaagcaagaaaaaccttacagaagactagcaaaaatttcagagtctcaaccagaattccaacaaagcaatgtccaaggaacattagtcgggttctttacgcctgagttaggcaattcttggcagatggcaagctggcgggtgataggcagcttttttgttgcccttgtgattggtgtctggcttgcctattttcaaaaagactctgtattgaaagaaaaaatcacgtataaagtagcagaaaatcaccatcatcatgtccatgaagaagaacaaagtgagaataatgaaccaaaaaatcagctgatccatcaaactgggcatgtgttgacacattcaatcgacgaattttttgatacaggtcgttatttgatcattggcggattaatcgcagctgcgatgcagacttatttaccaactagaattatgctaacgctcggctcaacaaagattttagccattatcatcatgctgttattggcctttacgatgtctctttgctcagaagcagatgcgtttataggatcttctttgttaagtctgttcggcacagcacctgtagctgcctttttggtctttggcccaatggtcgatatcaaaaatctactgatgatgaaacgatattttacaggacgctttattttatcgctgatcggactgattgcccttagcgttattggattcacattatttatt

SEQ ID NO: 21274 - DNA, 1803 bp, Enterococcus faecium
atgtgcggaattgttggaatgattggattaaaaaatgtaacaccaggattgattggcgggctagaaaaattggaataccgcggttatgattcagctggcatctttgtctcagatggcacgacagatcatttagtcaaagcacaaggcagaatccaaaatttaaaagatagaataacttctgatactacaggaaatataggcatcggccatacacgttgggcaacccacggacaaccatctgaggaaaatgcccatccacatacttcacaaagcggacgtttcgtgctcgtccataatggcgtgatcgaaaactttgaagaacttaaaaatgcttatttaacagatgatcactttatcggtgagacagatactgagattatcgctcatctgattgaaacttttgcgaaggatatgacggcaaaagaggcatttttaaaagctttgcgcgtcatcaaaggttcttatgcttttgctttgattgatcgtacaacacctgatgtgatttatgtagcgaaaaacaaaagcccattgttagttggacttggtgatggattcaatgtgatcgctagcgatgcaatggctatgcttgctcatacgaagaaattcgtcgaggtcgaagatgaagagatggttaccgttacatcagacaaaattattatccaaaattttgcgggcgacattatggaacgttcttcatttgaagcgcaagtagatgcttcagatatcgagaaaggcacctatcctttttatatgctgaaagaaatcgacgaacagcctataatcatgcgccgtattgctcaaaaatacgtaacagaagacaatcgggtccctcttgatccaaaactgatcgatacattatctgacagcgatcgaatctacatcgttgcttgcggaactagttaccatgcgggattagctggtaaacagactttggaagaattgacacagattcctgtcgaggttcatttagccagtgaattcggctataacacacctcttctttcaaaaaaaccattctttattttcttgagtcaaagtggcgaaacagcggacagtcggcaagtgctggtaaaaatcaaccgtcttggctatccttcacttacgattacaaatgttgctggctctactctttcgcgagaagcgtccttcaccctattgttgcatgccggacctgagattgcagtagcatcaacgaaagcttatactgcacaaatagcagtactgactttattagccaaagctatcggtgacaaaaaagaagtagaaatttctctttcgttcgatatcactcatgaattgagtttagtcgcaaatgcgatggaatcggtcattgcccagaaagtttatttagaggagctggctgcagaatacctcagtgacacaagaaatgctttttatatcggacgcggggcagactacaacgtttctcttgaagccgctttgaaattgaaagaaatcagttacatccaggcagaaggttttgctgctggtgaattgaaacacggaacaattgctttgattgaagaaggaacgcccgtgatcggaatcatcagtgaagaagtgactggcgcgcatactcgaggtaatctgaaagaagtcgaaagccgtggcgctaaaacattagttatcgtctcagaaggattagaaaaggaaaatgaccaactagtactgccagcagtccacccttatctgtctactcttgccacagtcgtaccgactcaattacttgcctattacgctacactgttacgagggtttgacgttgacaagccacgtaatctggcgaaatcagtgacagttgag

SEQ ID NO: 21275 - DNA, 561 bp, Enterococcus faecium
atgatcactgttgttcataaagaacgacaagaaaaatcatctagcgatgttcgactatgggtttatttaggaagtatttctactaagattcaatatggctatacagattcggcgaaaaaacaaggcaatgttaagtttttgagaatcacagatatacaagagggacgtgtaaattggtccagtgtgccttactgtgatattagtaattctaaactaattgatttaagattagaagaaaatgacattttgatagcaaggacaggaggaactatgggaaaaagtttcttggttaaggaaataagtgaggaatctgtttttgcttcttacttgattcgaattaggttagttgagaaattattatcagaatatgtagactgcttcttagactcgccattatattggaagttattagaaaaaatttcttacggaactgggcaaccaaatgtaaatggtacaaatttatctaaactacttataccattaccacctttagaagaacaacaacgcatgactactaaaatagaaatgataagaagatctattcgtagaatcaattttgag

SEQ ID NO: 21276 - DNA, 987 bp, Enterococcus faecium
tttatgaagctacatccaatgtgggaaaactatcctgctttaagtaaagaattgacagaaacactaaaacggatggaagaaactgtccgcctgaaaaacaaacctgtcgaacaagcaatcaaagaaacgatccatgccggcggaaagctgttgcgtcctgcctatcagctattgttctcacaatttggaccagagcaagatcgagacaaagccatcgctttggcagcttctatcgaaatgctccatacggccacactgatccatgatgatatcgttgatgaagcggatctgcgacgtggtcagcctaatatccgtagtcagtttggtaatgtcgtttctgtctatgcaggagactatttatttgtctgctgttttaaactattgtctgattactccacttccttgaaaagtctccaattgaattctcgcagtatggaaaaagtattgaatggcgaattagggcagatggatgatcgctataattatgaactttctgtaaaagaatatttggaaaatatttcaggtaagacagctgaactgttccaattaagttgttctgttggcgcttttgaaagtggaacaagcgagcgcttcgcaaaaaaagcaggagatatcggactttctatcgggatggcctttcagattatcgatgatattttagattatacaaaagagagccaggaaatcggcaaacctgtactagaagacatgcgtcaaggggtctattctttaccgttgatctactctttgcaaaaaaacaaaccaaagctactaccttatttagagaagaaagcggcaatgacagaagaagatgtcgacgccgtacgcaaaatcgttgaacatacaggaggcgtggaagaagctaggaagttagcggcctcttacacagaaaaggctttgaaggaaataaagaaattacctgccacctctcttcgaacaaaagagaatctcttttcccttacccaactgattttggatcgcaaagac

SEQ ID NO: 21277 - DNA, 1893 bp, Enterococcus faecium
atgaaaattattaatattggagttttagctcatgttgatgcaggaaaaactaccttaacagaaagcttattatataacagtggagcgattacagaattaggaagcgtggacaaaggtacaacgaggacggataatacgcttttagaacgtcagagaggaattacaattcagacaggaataacctcttttcagtgggaaaatacgaaggtgaacatcatagacacgccaggacatatggatttcttagcagaagtatatcgttcattatcagttttagatggggcaattctactgatttctgcaaaagatggcgtacaagcacaaactcgtatattatttcatgcacttaggaaaatggggattcccacaatcttttttatcaataagattgaccaaaatggaattgatttatcaacggtttatcaggatattaaagagaaactttctgccgaaattgtaatcaaacagaaggtagaactgtatcctaatgtgtgtgtgacgaactttaccgaatctgaacaatgggatacggtaatagagggaaacgatgaccttttagagaaatatatgtccggtaaatcattagaagcattggaactcgaacaagaggaaagcataagatttcagaattgttctctgttccctctttatcatggaagtgcaaaaagtaatatagggattgataaccttatagaagttattactaataaattttattcatcaacacatcgaggtccgtctgaactttgcggaaatgttttcaaaattgaatatacaaaaaaaagacaacgtcttgcatatatacgcctttatagtggagtactacatttacgagattcggttagagtatcagaaaaagaaaaaataaaagttacagaaatgtatacttcaataaatggtgaattatgtaagattgatagagcttattctggagaaattgttattttgcaaaatgagtttttgaagttaaatagtgttcttggagatacaaaactattgccacagagaaaaaagattgaaaatccgcaccctctactacaaacaactgttgaaccgagtaaacctgaacagagagaaatgttgcttgatgcccttttggaaatctcagatagtgatccgcttctacgatattacgtggattctacgacacatgaaattatactttctttcttagggaaagtacaaatggaagtgattagtgcactgttgcaagaaaagtatcatgtggagatagaactaaaagagcctacagtcatttatatggagagaccgttaaaaaatgcagaatataccattcacatcgaagtgccgccaaatcctttctgggcttccattggtttatctgtatcaccgcttccgttgggaagtggaatgcagtatgagagctcggtttctcttggatacttaaatcaatcatttcaaaatgcagttatggaagggatacgctatggttgtgaacaaggattgtatggttggaatgtgacggactgtaaaatctgttttaagtatggcttatactatagccctgttagtaccccagcagattttcggatgcttgctcctattgtattggaacaagtcttaaaaaaagctggaacagaattgttagagccatatcttagttttaaaatttatgcgccacaggaatatctttcacgagcatacaacgatgctcctaaatattgtgcgaacatcgtagacactcaattgaaaaataatgaggtcattcttagtggagaaatccctgctcggtgtattcaagaatatcgtagtgatttaactttctttacaaatggacgtagtgtttgtttaacagagttaaaagggtaccatgttactaccggtgaatttttcttgacgtccattcctcagatttttccattgatcagctgt

SEQ ID NO: 21278 - DNA, 2178 bp, Enterococcus faecium
cttcacactgacggaccattattgctgatggcaggtgcgggaagtggaaagacgagagtgttgacgcatcgcattgcctatttgattgaggaaaaagaagtcaatccttggaacatcctagcgattacttttaccaataaagctgcaaaagaaatgaaagaacgtgtcaatgcgattctcgtatccggaggcgaagatgtctgggtatcgacttttcactcaatgtgtgtgcgtattttaagaagagatgttgattttatcgggtataaccggaactttacgatcatcgactcttctgaacagctgaccttgatgaaacggatactgaaagaactgaacattgacccgaaaaaatatgatcctcgcagcatattaggaacaatctcccaagcaaaaaatagcttgcagacccctcaggattttgcaaaaatgcaaggtagttattacgaagagattgcggcaaaatgttacgctgcttatcaaaaagagcttcaatacaatcaatgtatggactttgacgacctgatcatgaatacgatccggttatttgaagaacatcctgattcactcacatattaccaaaacaaattccattatattcatgtagatgagtatcaagatacaaaccacgcacagtatacgttggtcaatttattggcaggtagatttagaaatctatgcgtagtgggagatgcagatcaaagtatctacggctggcgcggtgcagatatgcagaacatcttggatttcgaaaaagattatccagatgctgcagtgattttgctggaacaaaactatcgctccacgaaaaacattcttagcgcggcaaaccaagtcattgaaaacaatagcaatcgaaaaccaaaaaacttgtggacagaaaacaaagaaggaaacaagatcacttactatcgtgcagataatgaacgagacgaaactcgttttatcgtagaccggatgcaagaagagattcgaaacaatcatcgaaattacggcgactttgccattttgtaccggacgaacgcacaatctcgtgtaatggaagaaaccctgttgaaagcaaatattccttataaaatggttggagggcacaaattctacgatcgtaaagaaatcaaagatattttagcgtatttaaatgtgctggcaaatcctcaagactcaatcaattttgagcgtatcgttaattcgcccaaacgaggcatcggaccaggatctatcgaaaaactacgcagttttgcttctctccatgaatggccgctgcttgaagcagcccaaaatgtggatctggcaaatatcggtggaaaagcaggccagcaattaggtgcatttggagagatgattcaagaagtcacgcagatgatcccatacttgacagtgacagaattgacgaaagaggttttggatcgtagcggttacctggaagatttaaaaatccaaaatacattagaagcacaagcgcgcatcgaaaacttggaggaatttttaacggtcacacaagaattcgataagcagttcgaacagcaaaatgaagaagatgctgatgcaccagaagaaaaactaacggtcttcttgaacgatctggcacttgtttctgacattgacaatttagaagaagacgcttcgcaagtgacattgatgacattgcatgcagccaaaggattagaatttccagttgtattcctgattggtctagaagaaggtgtttttcctttatctcgagcattgatggaagaaagcgaactggaagaagaacgtcgtctcgcttatgtgggaatcacgcgagcagaagaagcgttgtatttaaccaatgctttctccagaacattatatggacggacgcaatataaccgaccttctcgttttgtagaagaaatcgatcaagaattgctagaaatcgagggcatgcgtcctacgcctaaaaaaacacctgtattcgctaaaaaaacagcagcatatagctataaacagccagagacagcggttgtttcctctaaaagtgccactggaggggaaaagaacagctggaaacctggagataaagtcaaacataaaaaatggggactaggaacagtcgtccgagtaagtgggacgtcgaaggatctagaactagatgtggctttcccaagtcaaggagtaaaacgtcttttggctgcctttgcgccaattgaaaaagct

SEQ ID NO: 21279 - DNA, 643 bp, Enterococcus faecium
atgatggaacatgaaatgacgattgacgaagctgctaaacgagcagaagaacttcgtacaagattgaaccaatggtctcgcgaatactacgtagaagataaaccaacagtggaagactatgtttatgataaagaatacgcagaattagtagcaatcgaagaacaatatcctgatttgatcacgtcggattctcccactcaacgagtaggcggaaaagtattagaagggtttgaaaaagtcattcatgatattccgctttacagtttgaacgacgttttcagcaaagaagagctgatagcttttgatcaacgtgtacaaaaagcagtgggacgtgtagtcgattattgctgcgaactaaaaatagatggtctttccgtctctttgcgttatgaagatgggaatttcgttagaggagcgactcgtggggatgggactgtaggagaaaacatcactgaaaacctaaagactgtccgatcagtcccaatcaaattaaaagaaccgatgaacatcgaagtaagaggcgaatgtttcatgccaaaacgttcatttgttcaattgaatcaagacagagaagcagagggaaaagatatctttgcgaatcctcggaatgccgcagccggttccttgcgtcagttagattcta

SEQ ID NO: 21280 - DNA, 2448 bp, Enterococcus faecium
atggaaaatcgacaagaagtacaagaattaactttagaagaagtgatgggtgaccgcttcggacgttattccaaatatattatccaagaacgtgcactgcctgatatccgtgatggattgaagccagtgcaacgccggatattatttgccatgaacaaagatggcaatacgtatgacaaaggattccgtaaatcagcaaaatctgtcggaaatatcatggggaattatcatcctcatggtgacagcagtatttatgaagcgatggtccgcatgagccaagactggaagttgcgggaagtactgatcgaaatgcacgggaataacgggagtatggacggtgatccacctgctgcgatgcgttatactgaagccagattatccaagttaagtggagagatgctagcagatatcgaaaaagaaacagtcgatctcgtgtggaattttgatgatacagaaaaagaaccaacagtccttccagctcgatacccaaaccttctcgtcaatggatcgacaggtatatctgctggatatgcaacagaaatcccgactcataacttagctgaagtgattgatggcacaatctatatgatcgatcatccacaagcgagccttgaaaaattgatggaatatattcctggacctgactttccaacaggagggatcttgcaaggcaaagatgaaatcaaaaaagcttatgaaacagggcgaggaaaagttattcttcgttcgaaaacaaagatagaggcaatgaagggtaataaacagcaaatcgtgatcacagaaatcccatatgaagtaaataaagcgaccttggtgaaaaaaatggatgagatccgtttgaataagaaaatcgatggaatagctgaagtacgagatgaaagtgatagaacaggtctgcaaattgtcgtcgaattgaaaaaagacgccaatgctcaaggaattttgaattatttgttcaaaaacactgagctacagatcaattacaatttcaatatggtcgctatcgaccatatgactccgcatcaagttggactgaaagacattttaagaagttatatcgagcatcgaaagcaagtcataacaaaacgtagtcaattcgatttagccaaagctcaaaaaagacagcatatcgtagaaggattgatgaaagctttatcgattctggatgaagtaatcgtaacgattcgtgaaagtaaagacaaaaaagacgccaaaaagaatttagtcgacgtctttcaatttacagaagaacaagcagaagcaattgtcacattgcaattataccgtttgacgaacacggatatcacagagcttcaaaaggaatccgaaagcttgattgcgcaaatcacagagttgaataaaatcctttcaaatgacaaagagcttttctctgttatgaaaaaagaattgcgagaagtgaaaaaaaattattcttccgctcgtctaacgacaatcgaagacgaaatcgaagaaatcaaaattgatacgcaagtcttagtggcacaagaagacgtaattgtcagtgtgacgcgagaaggctatgtgaagcgaacaagccttcgttcttatagtgcttccaaaccagaagaaatcgggatgcgagaaggcgactacttgctatactcaggtgaattgagtacattggaccatgttcttctgatcacaaataaagcaaatgtgatctaccgccctgtccatgaactacccgatttgaaatggaaagatgctggtgagcacatttctcaaacaatctccaatctgtctgtagacgaatcgattttagctgttttcccatatcaaaaaattcaagcagagaaaacatttgtattcatcagcaagaatggattgatcaagcaaacacgaatgacagagttcgaaccatggcgcacctataagagccgtccgctcagctgtatgaagctaaaggcggaagaagatgaactgattgctgtgtatctgaaagaagatcagccaggcttagatgttttcttagtaacgcatcaaggaatgggtttgcgctatcctttaacagatgttcccgttgttggagcaaaggcagctggagtgaagtctatgaatttgaaagatggagataggattatcaacgggctgcttgtgttagcagaaggtgatacgccgatcgtaatcgttactcagcgaggagctgttaaacgcatgcttgctcaagaaatcagccaaacttcacgtgcgaacgggcgagtgacggtcatgcgtgagctgaaaaaaaatccgcaccgtattatctatatgtcggaaggaagatcaaaagaaataaccttgatgaatcaaaaagggcagcagttaacgattgacccaactgatttccctataggtgatcgaacatcgaatggatcatttgcgatggatgagaaaaaaggtggagaagtcatcgaagttatcgatgctcctgagattttcatcgagtcg

SEQ ID NO: 21281 - DNA, 1140 bp, Enterococcus faecium
atgaagaatataaaaaaatttttttcaaggaatattttcccggtttttattaaaatattacctattcaaaaaaatttaattgtattttcaagttttggcgggcgtaactattctggaaatccaagagttatttcagagaaaattcatgaaaaaaaattgaattacagaattatttggttaatcaaaaaagaagcgattataactgatttaccagattatattaaaagaattgactccgattcttttttagctgccttttatttatatacagctaagtattggatagacgatagtcggaaaacgattaagtatgcaaaaaggaaaaaacaactttattttcaaacatggcacggaacgcctttaaaaaaaattgaatttgatgcaaaagataagttacctaaacgttacctaagctatgcgaaaaaagatagtgagtcaattacatatttattatctggtaatcgctatagttctaagaagtatgtttcagcattcaatatcgttccttctaaaatattagaagtaggaactcctagaaacgatgaattagcctctagtaaagagcaagtgtttgacttgaaaaagaaacaaatcaatgtcttatttgctccaacttttcgaaataatattgaggacaacggaattacgcaactagaatggttaggtgtggataacttacgtgaattttttaaaaagcaacaacaagaattaaattttatgactaaatttcatcctaatgttcatagtaaattagcaactgattctaaaagtatagaatatatgaaaaaacatcaaattactttaattaatgatgggattcctcttgaaatgctttttgaagagatagatgttttaatcacagattattcatctatttttttcgattttgcgctaacaaaaaaaccaattattctttttaactatgatgaaaaagaatatagcttagaaagaggtttttatatacagttaagtgagttaccaattataagcgtacaagatagttatggccttgttgatgtttttaaaaaccaacaagaaaagcttttgaaaagttctcaagagttacttgattatattggaaattatgaaacaggagcaagtacagaaaaggttcttgagttgatagagagggatataaag

SEQ ID NO: 21282 - DNA, 2664 bp, Enterococcus faecium
ttggaaaacaaggaacaagcacaacaagcggtctataaagaaacgatcgactcgttgatgcagcaaacgcagagctcaaccgatggattgagcaccacgcaagcgaaggaaaaattagaaagagatggcttgaaccagctaaaagaaaagccgaagaagccaacttggaaattgttcttagaaactttcaaagatgcaatggttatcgtattgctgattgtcgcactgattcagatggtcatgggtgactacatcgaattcttagttatttttgcagtattgatgttgaattctataatcagtgttgtccaaacaaaaaaagcagaaggttctttagaagcgttgaaaaacctttcagcgcccgatgctcgagtgattcgtgatggtaaggaaaaaacgattccggcaaacgaacttgtggtaggagatatcgtgttgttagacgcaggcgattatgtacctgctgatggacgtttactagatgcgggatcattaaaagtagatgaaggtatgctgacaggagagtcgacttctgcagaaaaagaagtaacggatatcacaagtacggtaccaatcggagatcgtacaaatatggtattcagtggaacgatcgtaacttacggacgcggtaaattcttagtgacttcaactgggaataatacggagatcggacaagttgctggccttttggaatcaacaactgagcaagtcactccgttacaacgaggtctggataaattcagtaaaaaactaagtctggctattttggcattgtctttattgattttaggtatccaactgtttcgtatttatcttggagaaggtacaggagatatgactgcagatatcgtcagcgcagtgatgtttgccgtagccgtagccgtagctgctattccagaagcattacagtctatcgtaacaatcgtgttatctttgggaacgaataaaatggcaaaacgtcatgccattattcggaagcttccagcagttgaaacacttggttcgacaagtatcatctgtacagataagactggtacattgacacaaaacaaaatgacagttgttgactactttttaggtaatggcgatactggggatttcacaaatgacccttcaaaatggacagctgacgaacgtcgcttgatcgaaatcagtgttttagcgaatgatgcatcgatcagtgaagacggtactaaattgggcgaccctacggaagtagcgtttatcgactttagtgaaaaattaaaccagccttatcaggaaatccgaaacaactacccaagacaagcagaacttcctttcgattctgatcgaaaattaatgtctactggacacacgatcgataacgaaaattacttgtttgtcaaaggcggaccagatatcgtcttccaacgcagtaaaaaagtattgctaaatggtgaagtcgttccgatgacggatgaattgatgaaaaaattccaagagcaaaatgaagctttttcaacacgcgcattacgtgtactagcttttgcttaccgtccacttgataattttgatttatcatttgaagatgaagacgatttgatccttgttggtttgcttgctatgatcgatcctccacgtgctgaagtgactcaggcggtaacagaagcaagaagtgcaggaatcaaaacaatcatgattactggtgaccacaaaacaacagctgttgctatcgcaaaacaaatcgggatttttgaagaaggaaacctggctttgaccgggacggaactagatgaattgacagaagatcaactaaacgaagttttagaaaaagtcactgtttatgcacgtgtttcacctgagaataaaattcgtatcgttcgtgcttggcaaaataaaggtcatatctcagctatgacaggtgatggtgtaaatgacgcaccagcattgaaacaagcagacatcggaattgctatgggaacgggtacagatgtggcaaaagatgcagcagcgatggtattgacggatgataactttgcttctattgtcagcgcagtagaagtaggacgtaatgtgtttgataatatcaagaaagctatttcttatctatttgcaggaaatttaggtgcgatcattgcgatcatctttgccttagttgctgactggtccaatccatttacagcattacaactgttgttcatcaatttagtcaatgattcactgccagcaattgcattaggtacagaaaaagctgaacctgctacgatgaaccgcccgccaagagatccaaattcaggaatctttacggacaaaacattgatttctgtaacgtatcgtggtgtgctgattgggattgctgttatctttgctcaatggcttggcatgcagcattcacctgaattcggtgtagccatgtcattttcaacattgatttggtgtcggacattgcaaacattcccagcacgttcaaacacacaaacagctatccaagcagggttcttctctaacagaagtgtcttactagctgtagttgtatgtagcgcgctttactgcttaacaatgatcccaggactgaaagaagtcttctctatcccatcagcatttggattgacagaagtctttacatgtatgggaatcgcacttgtgacaattgttttgatggaaatcactaaattgatcattgtacgagtacaaggaaataaa

SEQ ID NO: 21283 - DNA, 675 bp, Enterococcus faecium
atgatcgaaatctatttatttgttaatcctttaggggaatactgtttcgaaatggaacaacagttattacaatttatcgaagaagagtacgggacaccatcaaaagaaaagatgcaatttcgctttcttcctttggtcaatttgcagacaattggggatgtcatgcaacaaaaaggaatttctcagaacaatcttgaggaacgtaatcacttattctcaatgacttattctgcagcattagactgcaaagcggcgcagtttcaaggaaagaaaaaaggccgccgttttttgatcaaattgcaagaagcagtcggctgtaatgacataccatattctcaagaacttgctgaatccatatttgaagaaatcggcggcgatttgaatatgtttaaagaagatcggcagtctgacttcgttaaagaagtattcttttctgatcaaaaaattgctcgggaaatgggcatcacaaaacacccttctgcagtcgtttacaattatgcctgcgaccgtgattttggtgttttagtagaagtaaaaggtacaagtagcctttggagaatcacagagctgtgtaaaacaacagataactcatatcaagtttttaatggtgaacatttacatacaaatgattctcagttccattcaagaactagccatttacacttgctttctaat

SEQ ID NO: 21284 - DNA, 888 bp, Enterococcus faecium
atgagatcattcgtatctgggggtaaggaaatggctcaaattgggatttatgaaaaagcgttacccaaagatatttcatggaaagaacgtttttcccttataaaagaaatggacttcgattttatcgagatgtcgattgatgagacggatgagcggttagcacgattagattggtctgaagaaaagatagctgagctgagagaagagatgttcagctccggtgtacgtatccattcgatttgtttaagtgcgcatcggcgatttccgtttggttctgctgatccagaaaagaaaaaagcagcgaaacaactaatgaaaaaagcaattcgattggcacataatttaagtattaaagtgatccaaatcgctggatatgatgtttattatgaagaaaaatcaatgaattccagagaagactttatcgaaggaataaaagaaagtgtaaaggaagcttctaaatatggcatcattctttccgtggaaatcatggatgatctatttatgaactccatttcaaaatttttagaaatcaaagaacagattcattcaccttttctacaagtatatccagacctaggcaatttgtccgcatggccggaaaataatccggctcgagaacttgagaaagggatcgattatatcactgctatccacttaaaagatacttaccctgtaacaaaagaatattcaggccagtttcgtgatgttccttttggtagcggttgtgttgattttcttggattattaagacatttgaaacgtctagattatgatggaacatttctgattgaaatgtggagtgaaaaaagccaagactttcgaagagaaatccagcaggcaaaagactacttaagttctaaattgaaggaggctggctatgatgtcttg

SEQ ID NO: 21285 - DNA, 2073 bp, Enterococcus faecium
atggcaaaagacttattacttgaaatcgggctggaagaaatgcctgctcatgttgtcacaccaagcatgaaacaattagaagaaaaaacagcaaaatttttagatgaaaaccaattgacttatgatacgattgagacattttctacaccgcgccgtttagcaatcaaagtaacaaacattccagaacgtcaagcagacagtgaagaagaagtcaaaggaccagccaaaaaaattgctttggacgcagatggaaactggacgaaagcagcggaaggatttgtccgcggacaaggtctgacgacagatgctatcacttttagagaattaaaaggcgtggaatatgtctatgtaacgaaatacactcacggcaaagaagcaaaagaagtattgacaggtttagcagatgtcattaaaagcctcactttcccagtaacgatgcattgggcagaatacgattttgaatatatccgccctattcactggatcgtggcattgttagatgacgaagtaatcccgtttgagatcttggatatcaaaacagacagagcttcaagaggtcatcgtttcttaggcgaagatgtgacatttgcgcatgcgaaagaatacgaagaaaaattaaatgaacaatttgttattgcttcaccacaaaaaagaaaagaaatgatcatcacacaagcaaacgaattagcagaaaaaaatcactggatcattgatctagacgaagatttactagaagaagtcaacaatctagtcgaatatccaactgtcttttctggcgacttcgaagaaaaatatctatctgttcctgaagaagtactagtcacttctatgaaagaacatcaacgttatttcgaagtacggaacgatcaaggtatgttgcttcctcattttatttctgctcgtaatggcgatcgggtaaaattggaaaatgtggtacgaggcaatcaaaaagtattgactgctcgtttagaagatgcggaattcttttataatgaagacaagaaagcttcaatcgaccaatacgttgaaaaattaaaaactgttactttccatgaaaaaatcggtagcatctacgagaaaatgcaacgggtacaagttatcgcccgcattataggcgaacaagtaggattatctgaggaagaattgatggatctgcaacgcgctgctgaaatctataaatttgatctagtaaccaacatggtaggagaattccctgaactacaagggatcatgggagaaaaatatgctctgcttaaaggcgagaaaccagccgtagcaacagcaatccgtgaacattacatgcctatatccagtgaaggagatctacctgagactacagtaggttctattttagcgattgctgataaattagatagtatcttttctttctttgcagttgggatgatcccaagtggctcaaacgatccatatgctttgcgccgtcaagcatatggtgtcgttcgaatcatcgaatcgaaaaaatgggcctttcctttgtctgttctgcaagaaacgattagtgaagttatcagtaaagatgcggatcgttttggcattggcttgtcagcgggacaacaacaggtgatcgactttatcaaaggccgtctgcgccaattattgacaacgaagaatattcgtcatgatgtcatcgaagctgttttgaatgcagaacaaaaagatctgacaaaagtatttgcagcagcacaattgttcaagcagcatcttgcagatgaagacttcaaaccatcgatggaagctttgacacgtgtcgtgaacttagcgaaaaaagcggagcttgaaaaacaatcagaagtagaccctgaactgttcgaaaacgaagcggagaaagaactgcacaaagcagtagaggcaatgaaaacaagctttgctgaccaaacgatcaacgaaaattatgatcagcttgtaagccttcgcccactgatcgaaaattattttgatcagacgatggtcatggcagaagaaccagcagtacgtgagaaccgattaacgcaattaaatcaaattgctgccatggctttgtcactagcaagtttggatcaaatcatcacaaaa

SEQ ID NO: 21286 - DNA, 444 bp, Enterococcus faecium
gtgtcactactaagtagactaaacgatgacatgaaagcagcgatgaaagcgaaagataaggaatctttacaagtcatccgaatgatcaagtcatctatacaaaacgagcagattaaagaaggtcacgacttgacagaagaagaagaactaacggtgttgtctcgcgaaatgaaacagcgacgtgattctttgcatgagtttgaagaagcaggacgtgacgatttagctgaaaaagtaaaaagtgaaattgtaatagtcgaaaaatatatgccggaacaactttccgacgaagaaattcgacaacttgttcaagaagcaatcactcaaactggtgcttcatcaatgaaagaatttggcaaagttatgggtgcaattatgcctaaagtcaaaggaaaagcagatggaaaccaagtgaatgcgattgtgaaagaactattacaatct

SEQ ID NO: 21287 - DNA, 1983 bp, Enterococcus faecium
atgataatgaaacagaaggaaaaattgctgttgagatatttgattgatcacaagaaggagtatgtcaccagtcaacgtttagcttctgaattgttattatctgatcggacaatccgtaattacttgcagcggatcaaagagttagtagaaaaaaacggaggtaagatcattgctaaaccaggttatggctaccaactgcatattttacaaagactgacatttgacttgtttttgagtcggcaagaaatagtacctggatatgctagagaaccgcaaggattttatgagtccgaagatcgacaaaagtatatattgaaccaattgcttttggaagatgccattctttttatggatgatttggcagaagagctttatatcagtcgttccagtttgacaaaggacatgcaagaaatcaaggagcgattgattccatattcactaaaaatcgtttctaagcatggtcaagggacatggatcgaaggggaagaaagaaatcgacggcattttatcatggatactttttttggaaaccattatggaaattcattgaaagaatatttaggacaaagccgttttttcccagacatcagttttgaagagctagtcattatcattctcgatgaaacaagagaagctaagttaaaagtttcggattttatcatacagaatctgactttacacttggctttggggatcaaacggctccgagaagggtttgaaatcaaggaattaggcatcgaacaagaagtttctaagcgagtagagtatcaagtggcgcagcggatcgttcaacgtattgaggtaatcgcaggtgtatcgtttcccgaagaagaagttgcttatttgacattacatctcatggctaagtcgaatcacaaagaaaatcaaaataatcaggaactatcaaaggaattagcgaaagttctgaaaagattgtctcaggaatttcatttttcattagtagaggatctccagcttttcaatggactactcgatcatttgtcaccgatgatgattcgattgagccgaggtattcgcattgagaacccattgactgaggagataaagaaagaaaatctcaaagtctttgacgcagtaaaaaggcatttcagcaacatgccggctttgaaaaactataccatcaatgaagatgaatgggcctatttggctttgcatctcatggcggcattggaaaaagaaagagctgcgcataaactacatgcattgattatctgtgcaacgggttacggcagtgcccaactattaaagaatcgtgtagtcagtgaattcggtaaaaatattacagtggtaagtgtaaaaggctattatgagatcaatgaaacaactttaaaaggaatcgacctgattatttcttctattgatctttcgacaatgtttttcaaaattccagttttacatgtcagtatttttttgaatgaagatgatgttcgtaaaatacgaaaggtaattggagaatctataccctatcattcctcagatagaccgataccagcattttctctacagcaaaaaaagcagatttacaccgaacagttgtctgaaaaatttttcaagacttatacgtacgaaccgaaaaaggaagaaattcttcatgatttgctgcaaaagctgagcataaatgaagaagaaggatatataagagaaatgcgaaagcagatccagcaacgtgaaaatatgggacaaatcatattcagtgatacagtggcagtcccacatcccgctgttccagttggaatcgaaacaaaggtagccgttgcattgattccttctgggatgcagtgggatcagtatcaagaaattcattttgtttttttagtttcgccttcttatatcgaaaatgaaggaattacggtcgtgactaaagcaatcgttaggttagttgaccagctaaaagtacagcaggaaatcttagctgaacctatttttgagaatttcagcagtaaatttatcaaactgatcgaa

SEQ ID NO: 21288 - DNA, 1315 bp, Enterococcus faecium
atgaagaaaacgatttttggatttgcagcgctgatgtctgctgtcgttcttgcagcatgcgggggcggaggtacagatacctctggaaacaactctggaggcaacggcaataacaaagaggaattaacttttccaattgcaacaaaaaataatgatgatgcaatcgaagacggcgaattagaagctgcggtcgcaacggacagtcagtttaaaggattgttccagtgggagttttaccaagattcatatgatgcagcttttatggctccttctcatgaaccgctatttgcaaacgatgacgatttcagaatcacagacgacggagctgcaacgcttgatctagatgaagatacgaaaaaagcgacaatcaaagtaaaagacaacgtcaaatggtcagatggtgaagatgtaacggcggacgatgtgattttcccttacgaaatcattgggaataaagactacactggtatccgttatgacgacactttccgtaacatcgtaggtatggaagaatatcatgatggaagtgccgacacaatctccggaatcaaaaaaatagacgacaaaacagttgaaatcgaatataaagaagtaaacccaagcatgcttcaatcgggtggtggtatctggtcgtatgcagcaccaaagcatacgttagaaggtgtagcaatcaaagatatggaatcaagcgatcaagtacgtaaaaatccagtgacttttggcccttattacatgagtaatatcgttgcaggagaatcagtagaatacttgccaaacgagcactactggaatggtacgcctaaattgaaaaagatcacgatgaaatctgtaccgatggcaagtgcaactgaagcattgaactctaaattatatgatatgattttccaaatgccaacagatacttacgatacctataaagaaattgctggctatacaaacttaggccgtgaacaaacttcttatacttatctaggattcaagttaggtaaatggaatgcagatacaaagagtgtggaatacaatccagattcaaaaatggctgataaatcattacgtcaagcaatgggctatgcactagataatgatgcagtaggtgaacgtttctatgcaggtttgagaagcaatgcgacttcattgattcctccagtattccagtcataccatgatgatgagatgaaaggattcacacaagatctagacaaagcgaaaaaactattagatgatgctggctacaaagatgtggatgacgatggtttaagagaagacaaagatggaaataaactaacaatcaactttgcttcgatgtccggtgggg

SEQ ID NO: 21289 - DNA, 2061 bp, Enterococcus faecium
atgaaaacaagaacaattgaaatacttcacagaatcatgacagcccaatatccagtaaaagcaaaacatctagcaagtgagttcaatgtcagtcagcggacgattcgtcaggaagttcttgaagcgaatatctggttgagcagtaaaaagcttccggagatccgtacaattcgcaacaaaggttttttgttgaagctggaaaaggaaaagcaagctcgattagaaactgaaataaaagatgtgaaagacggctttttgaatcggcgcgaacgtatttttgatctagttttagcccttgtttacagccgaatcccgatccatctaaacaaaaaagaagaagaatttcaaatctctaaaagtacattagatgaagatatgagacggttacgagcaacactggtcagttatgggatagagatcgtcagttatggaaagcaaggactggtttataaaggttcagaacgatctatccgtacgatgatctatgattttatcaatcagaatctgggaatgaccgacttctttatgaatcaagatgcacaattaacaccggctcaaaaaatctttctccattattttcctttggaggaaatcaaaaaaatacaggagatctattccaataagttgttgaaacaagaagatgatatttataaaaaacaaatcctgctttttacattgatctggatccagcgaatcaggaaacatgaatttatctctgccattaattggaaaaatacagaaataaaagacagtagcttttctgcatttattgaccacatgatcgaggaatttcaattggacaatgtcccgcaagtagaaagaaattatcttcgtttcactattgagacgttcaatgctagagatatctccaattcaatcgagtgggtacaagctcaattactaacgatccaattgatccaatttgtagagaacgagacacacgtacctttccatctaaaggaagaagctttattcgaaaatctctataagcacatggctgcactgattgtaagaatcaagaatcatatccaagtcatgaatccattgaaagaaaacatccgaacaaattatttcccaatctaccgcgcagtcactcattttgttcctacgatcgaagaagtaattggtggcaagatactggaggacgagatagcttttcttgtcatccacttttcgacgatcgccagtgtaatcaagcgagacttgaattatgtttataaatcagtcgttgtctgtaaccatgggatggctactggaaatctgttagcagagaatctgaaagaaaagtttcctcagatcgagattactgcagttttaagttcaaaagaaatcgaattagtagataaattggatgtcaatctggttttcagcacctttcaattgaattatcgaaataagccgcttttagttgtcgatccgattttaactgagacgaatatcttggttatagaagactttttgaaaagaaatgaagaactacagcggttagagcctaacagtcatgaatcgacggagttattcactcaaataatagatgtcatgaaagaaagtggtggccgagtagatcgaatcatctatggcaagttagaaaaattattcgaaacaaacaatttagaaatcaacaaaagggagatccagcctatgttaaaagatattttgacggacagcaatatcatgatcaaagaaaaagccactacttgggaggaatcgattgaactagctgctagaccattggttaaagaaaacattgtcgaagagcgctatgtcgaagcgatgattcgtgcagtgaatgattacggaccgtatatcgtgattggcaaacacatggcactagcccatgcccgaccagaagatggggtcaataaattaggagtcagcgtagctacgattgagcaaccaatcgatttcggtaatcctgaaatggatccagtaaagattattttttgtttggcagcagtagactcctactccctatggcggaaccgccgaaactcatcagcggcaaggtcagccctttggtgggcagcgccgctcaggttcacgcccatattgataaaggcc

SEQ ID NO: 21290 - DNA, 1191 bp, Enterococcus faecium
ttggtaaaagtagaagtaaaacatttaacaaagatatttggtaaaaagacacaagccgctttagatatgatgaatgatcaccagccgaaaacggagattttaaagaaaaccggtgcaacggttggtgtgtatgacgtgaattttgacgtaaaagaaggagaaatcttcgtgatcatggggctttccgggagtgggaaatccacattgatccgtctattgaatcgtctgattgagccaacttcgggcagtatctatattgatggagaagatgtatcgaagttaagcaaagaagaattgcgagaagtccgtcgtcataaaatcaatatggttttccaaaacttcggtctgtttccacatcgaacgatcttggaaaatacagaatacgggttagaagtccgtggtgtacctaaagaagaacgacaagaaaaagcagaaaaagcattagaaaattctagtttgctttcatttaaagaccaatatcctagtcagttatctggtgggatgcaacaacgggttggcctagccagagctttagcaaatgatcctgagatcttgctgatggacgaagcgttctcggctcttgatccgctgatccggcgagaaatgcaagacgaattactggacctgcaagccaatgttcaaaaaacgattattttcattacccatgatttgaatgaagctttacggattggggacagaatcgccttgatgaaagacggcgaaatcatgcagatcggaacaggtgaagaaatattgaccaatccagcaaatgattatgtacgtgaatttgtggaagaagtcgatcgttccaaagtgcttacggctcaaaacatcatggtacctgcattgacgacgaatatcgaatctgatggaccaaacgttgcattgacaaggatgcgtaatgaagaagtcagcatgctgatggctgttgacagaaagagacacctgaaagggatcatcactgcagatcaagcgttagaagctaggaagcaaaaacgtccattgatcgacttcctagatgaaaatgtgacggtggtcgggaaagacatggtggtaagtgatattttcaatattatttatgactcaccgactccacttgcagttgtagaggatggaaaattaaaaggtgtcgtcatccgaggtagtgtgattgaagcattagcagaaacaagcgaggtgagtgaacatgaa

SEQ ID NO: 21291 - DNA, 1167 bp, Enterococcus faecium
atgatctcaaaagagaaacggacaagcattctttacagttttattgcattgctgttcagtattgcgctgtacttcaatgcaaatggccagtccgttccaaatacgctttctggaaatgaagcgtataatcaaacagttactggggtgcctatcaagatttcttatgattcaaagcgctactatatccatggatatgaaaatgcagtgactgtcaaactttccagtgcaaaccgagttcagttgaatgcagaggcaaacgaagatacacggatgttccgcgtcacagcagatatcactaagctgggcgaaggaacacatgaagttccgctaaaaattcaaaatttgagcagtgctgtcacagcaaagatcgaaccatcgactattacagtaacggttgagaaaaaggtaataaaagatttcgatgtggaaacgttgattccttcaacgttcacaccatctggatatgaacttgatgatacttccgttagtcctaaaaaagtctctatcactacaggtgacaaaacattggcagaaatcaaacgagtagtagctgatgtggacgcttcgatggtcacagatgatgggattaatagtgaggtcccaatacaggcgctgaatgcagcaggggaagtattaagtatcgtctctgatccagtgcaagtaacagtgaaagctgattcaatcaagccaagcaagtcggtacgactttatgggatacagcaaggaacaccagctgccggggtagaaagctatgatttcagtttttcaaaactggaagcagaagtaagcggctctagcgatttgcttgcatcgatcggtgacagtattgctgtaccgatcaatgtctcaggtatcaatcatcgaacaactcgtaaaattgaaataccagtagaagaggggttaagtatcaagcccgaatcagttagtgtggagattacacccgtattgcaaacgtcaagcagtagctctgcttcgacgagcagtcggacacaagaaaatacaagtacgagtagaagtatttcatctgctgattcaggaacggaaccatcgacaacaaccatttcttccagttcggaatctgggacaagcagctcgaccacaagtacagaagaaacatcagaaacaagcgaatcaacgcaaatgagcagaacaaattcctcagaaaat

SEQ ID NO: 21292 - DNA, 501 bp, Enterococcus faecium
atgaatcatatcgttttatttgaaccattaatccctgcaaacactggaaatattgcccgtacgtgtgcagccacgaatactccgcttcatttaatcgagccactaggtttttcaactgatgacaaacatctaaaacgggcagggttggattattggaatgatgtaaatattacttaccacagtaatttagaagcttttttaacatttttaggtaatcgtaaactacatttgatctcaaaatttgcccataaagtatatagtgacgaaaattttgctgatggagaagagcacttctttttatttggaaaagaaacaaccggtttgccagaaacatttatgcgtgaaaacgaagaaaagtgtttacgcatccctatgaatgatgagcatgtccgctcattgaatttatcgaatacagctgcaatgatagtgtatgaagcacttcgccagcaaggattccctaatttagaattgacgcatcactatgaaaatgacaagctggat

SEQ ID NO: 21293 - DNA, 2586 bp, Enterococcus faecium
atgcagccagaagaaatgccttatttcgttggtacagttgccgcgattttttttcaaaatcctagtaatttttacaaagtgcttttggtacacatcagtgaaaccacagctgattaccgtgaaaaagagattgtagtcaccggaagtttcggcgatattcaagaaaatgagacttatcgtttttatggagaattagtggatcatcctaaatacggaaggcagcttaaactcgaaagatatgagcaagaaaagccaacaactgcaaatgggatcgtagcgtatctttccagcgaaaaattcccaggaatcgggaagaaaacagcagaaaaaattgtagaattgctgggagaagatgctatcgaaaaaatcattgctgatccttcggtattaaaacaaatctccggtttgacgaagccaaaaagagaaatgcttgctgagacgattcggctaaaccacgggatggatcaagtgatcatgggactgaatcgttacgggttcggtagtcagttagctttcagtatctaccaggcctataagaacgagtctttggatatcatcgaagaaaatccgtaccagctagtcgaagacatagaaggaatcgggttcaaacgtgcagataatctagccgaacaaatcggtattgcagcagattcaccgagaagaattcgagcagctatcttgcatcagatttttcagcatgcagttcaaacaggagatacatacgtaccggcggagacattgcttcagcaaacgatccgtattttagaaacaagtcgcccaattgaaatccagcctgatcaggttgctactgtaattatccaacttgttgaagaaggaaagatacaacaagaagagactaatctttacgaaaacagtttgtacttttctgaatgggggatcagtaattcgatccagcgccttctcagtcgtaaaaaagaaatccattatcctgaaaaagaagtgcagaagaatattcggcgtatcgaaaaaatattcggcatacagtatggaccttcgcaagaacaagctatcgctgaagcaatccgttcccctctatttattttaacaggaggaccaggtacggggaaaactactgtgatcaacggaatcgtcaatctttttgcagagttgaacggactggaattggatccttcaaaatatacccaagaaatttttcctattctacttgcagcaccaactggccgagcagctaaacgaatgaacgaaacgacaggtctgcctgccagtacgatccatcgtcttctggggctgaatggacgggaaaaaacaccttcagtcagtacgaaagaattagaaggcggacttttgattgttgatgagatgtctatggtcgatacatggctggctaacacattattcaaagcgattccgacgaatatgcaagttatcttagtaggagacaaagatcagcttccctctgtcggtcctggtcaagtactccatgatcttttggaaatcgaacaaattcccaaaatggaactcaatcagatttatcggcaaggtgatggttctagtattattcctcttgctcatgagatcaaagaaggacgtctgccaaaagatttcacaaagaatcaaaaagatcgttcctatttccgaagtgatgcttatcaaattgaacccttgatctctaaaattgtggaaaaagcgaaaaataagggattccgtgcacaagatatccaagtattagcaccaatgtatcggggacctgcagggatcgatgcgttaaataaaatgatgcaggagatattcaatccagggaaacctggaaaaaaggaagtacattggaacgacaccatttatcggataggagacaaagtcctccaattagtcaatactcccgaattgaatgtattcaatggagatatgggagaaatcacgggtatcatcttggcaaaagattctgaagataaagtggatgaattagttatccagtttgatgcaaatgaggtcacttataaaagaaacgaatggaataaaatcactctttcttattgttgctcaatccataaatcacaaggcagtgaattcaagatggttattttgcccatggtccatcaatatcagcgaatgcttcagcgtaatttgctctacacggcagtgacccgcagtaaggaactgttgattttgttaggggaagagcaagcctatgtcacttgtgtagcgaatgaatcagcaagccggatgactacgttgaaatcaaggatcatagataatgataaaatgaatatcactctgcggacaaaactagcagcttatgaagattctttggtcggaaatgatccatttgaagatgggaactatacaaaagagccacgggttgtaaaagaaaagctacctgtagaagatgacagtgggacgaatgaatcgaaaaaacaagtaatggaaacagtggaaccagatctgttttcttcatttgttggagaagaaaagaaagaagaggtagaacctgctgtttctaaagatttcgttcttacagcagaagtgatcgataaccagttagtagatccgatgattggtatggaaaacagttctccctacgattttataccggcaaaaaatgct

SEQ ID NO: 21294 - DNA, 993 bp, Enterococcus faecium
atgcaagttatctatttattgatcgccgttttattcactggtgtcagttatttactgcctacaaagccaaattggattttccaagttattctatttcttttatgtgcctttttacctgatcttgtcctgtttctgccagcgacgatgcgagtgatcgcccctgaagaaagccaccttgattacttgtttttgttaggttttttgttgatttcgacggttggtaatcatccccccatcaaggtcgcctttgtcgtaattttgctgtttttttccttttacttacgaaaaaaagatcaacgaacgaccgatcttgagaaaaagtacattgtctccaaagatactcattgggaaaaacaacaagagttatcggaacaaaataaagcattggccctgtcacaagaaacacaattagccttgcaaattgtggaagaacggaaccgaattgcccgagacatccatgacaatgtcggtcatctgctgtcaagtgcgattttacaaattggtgcgcttgaaatgatcaatcaagaaccaaaactaaaagaaccattagaaaatttaagtgccaccgttcacactgggatggatcggattcgtcaaagtgtccatgacctccatgagacatcgatctcttttcaacactccttagagtttctgatcgctgattttccttcttctgttacgattgaaggaaacttgtttgaaggattgaatgaaacgcagcaaaactgcttcttaatggtcatcaaagaagccttaaccaacagtatcaaacatagtcatgccaaaaccgttgttttacattttcgaacgttgccggccttttatcgcttgcaaatcacgaatgatggcaccagcccacaaaaaaattctgctcccggtattggtttgaaaacgatgcgtcaacgtgttcaagaacaaaagggacaagtccatattttccaagaaaaccagcaatttcagttaacgatcattttaccaagggagggacaccaa

SEQ ID NO: 21295 - DNA, 693 bp, Enterococcus faecium
atcattgccgcagtttccgagatgcggggaagcacttatgaggcgattcaattattagcaaaaatgatgcatgtagatggacatgtttatccttcttcagaaactcctttgaccttgcatgctgtctttaaagacggaacgactgcagtaggagaatctaaaatcgcgatcgaccgtaaaaccattgaccgtgtgtatgtctgcaacacaaatgataaaagtgaagccaaagcggctcgaaaagtcgtttcagcaattatggacgccgacatggtcgttttgggacccggaagtttattcaccagtatccttccaaatttagtgataccagaaatcggcgaagcaatgctcaagacaactgctgaaaccgtctatatctgtaatatcatgacccaaaaaggggaaacggaacatttcacagatgccgatcatatacgtgttttacacaagcatttgaatcagccttttatcgatacagtattggtcaatacggaaaaagtgcctgaagattatatggacccagagatctatgatgagtatctagtacaagtcgcacacgacttcaacggattgagaaatgaaggatgtcgagtgatttccaccgactttttggaattgaaagatggtggtgtcttccacgatggagacaaagtagtagaagaattgttccgtttagttttcggttcaaaatat

SEQ ID NO: 21296 - DNA, 933 bp, Enterococcus faecium
atgtcatttgctgcagatgtgaagaaagaactaactggtttggaagttcatcgagaacatgcgaaagcggaattagctgctttgctgcgaatgaacggctctttaggtattgtgaaccagcagtttattttgaacgtccaaacagaaaatgctgcaattgccagacgtatctattctcttttgaaagatcactatcaggtacgaagtgagctactcgttcgtaaaaaaatgaaattaaaaaagaacaatgtctatatcgtccggttgaagcaaggcacaaaagatgtgttgatggatcttgatatcatggatggtatgatgttcaatggacacgtttcggacgagattatgggaaattcgcaaaaaatgcgttcttacttacgtggtgcttttatggcctcaggttcagtcaataatccggaaacgagccgttatcatttggaaatattttctatttatgaacagcataaccaagacatttgcgatatgttaaattattacggtctacatgctcgaacgcttgaacggcgcaatggctatatttcttatttaaaaggagcagaaaaaattgctgatttcttaacattgattggtgcaaccaactcaatgctccgatttgaagatgttcgaatcgtacgggatatgagaaattcggtcaatcgtctagtcaattgtgagacagcaaatctgaacaagacgattgatgcggcttctaaacaaatcgaaaacatcgaattgatcgaagcaaaggtcggtctacatgcccttcctgaaaaacttcaggaaatcgcagaacttcggcttcaacatccagaggtcagcttgaaagaattaggggaaatgattccctcaggtgcgatatcaaaatcgggaattaatcaccgaattcgcaaaataaatgaatttgcggaaaaactgcgtgaagaagcagtt

SEQ ID NO: 21297 - DNA, 1254 bp, Enterococcus faecium
atgaatattattgatgaattaacttggcgcgacgccattaatcagcaaacaaacgaagaaagacttcgcgagctcgttgaagaaaagagcatttcactttattgcggcgttgatccaactggtgattcgatgcatatcggacatttgattccatttatgatgatgaaaagattccaattggcaggccatcatccatatattctgattggcggcggaacaggaacgatcggcgacccaagtggccgcaaaacagaacgtgtgttgcaaacgatggaacaagtgcaacataacgtggacgcactttccaatcaaatgagaaaattgtttggtaaagatgcaaatatcacatttgtgaacaactacgactggttgtcaaaaatctctttacttgaatttttgagagactacggtaaaaacttcaacatcaacacgatgttagcaaaagatatcgttgccagccgtttggaagtaggaatctcatttacagagtttacttaccaaatcctgcaatctatcgactttttgcatctgtataaaacatacgatgtgcaattgcaaatcggtggagcagaccaatggggaaatatcacagctggattagacctaatccgaaaattagaaggaccagaagcagaagcgttcggtttaacgatcccattgatgctgaaggctgacggaacgaaattcggaaaaactgcaggcggtgccgtttggcttgatccgaagaaaacttcaccatttgagttctaccaattctggttgaatcaagatgatcgcgatgtagtgaaatacttgaaattctttactttcttgtctcaagaagaaatcgaagacttagcgaaaaaagtagagacagaacctgagaaacgtgaagcacaacgccgtttggcagaagaagttacaagatttgtgcatagtgaagaagacttgaaagaagcgcaaaaaataacgcaagcattgttctctggaaatattaaagaactaaatgcggaagaaatcgcgcaaggattcggtaaaatgccgaacgttgaaatttcaagcacacctgaaaatatcgtggaactgcttgtttccacaaaaattgaaccatctaaacgtcaagcacgtgaagatgtttcaaacggagctataagtattaacggtgaccgcgttaccgatttaaattttgtcataaatccatccgatgaattcgatggtaagtttgtggttattcgaaaaggtaagaaaaattactttttggccaaagtaattgat

SEQ ID NO: 21298 - DNA, 186 bp, Enterococcus faecium
atggcaaaagtttgttactttacaggtcgcaagacaaaaagtggaaacaaccgttcacacgctatgaactcaacaaaacgtactgttaaacctaacttacaaaaagttcgcgttatggtcgacggaaaacctaaaaaagtttgggtgtcaactcgtgctttgaaatcaggaaaagttgaacgcgtt

SEQ ID NO: 21299 - DNA, 1927 bp, Enterococcus faecium
ccattttatgaagaaccacgtatgcctaaagatctaatcacaagaactgattacgtaacggctaagaatgtattagatgcgaagggtgccgatgctttggtcgaatggatcaaaggacaggaaaatttgttgttgacggatacgacatttagagacgcccatcaaagtctgctagcaactcgtgttcggacaaaggatttcaagcagattgcacgtttgactggagaaggtcttcctgaactcttttcaagtgagatgtgggggggagcaacatttgatgtggcttaccgctttttgaatgaagacccttggcaacggttgagaaaaattcgttctttaatgcctaatacgttgctgcaaatgcttttcagaggttcaaatgccgttgggtattctaattatcctgacaatgtattggtggaatttgtcaaagaagcagcagcgcaaggaatcgatgtatttcgaatctttgatagtttgaactggactccacaaatggaaaaaagtatccaagctgtacgggatactggtaaaatcgcagaggcagctatttgctatactggcgatatcaacgatccaagtcgggcaaaatacaatgttcagtattataaagacatggcaaaggaactagaacaactgggtgcgcatatcattgcaatcaaagatatggctgggctgcttaaaccgcaggcagcttatcgtttgattagtgaattgaaagaaacgacagatctgccaatccatctgcatactcatgacaccagcgggaatggaatcatcacttattctgctgcttcaaaagcaggagtagacatcgttgacgtggcaatgagtgcaatgagtgggaatactagtcagcctagcatgagcagcttgtattatgcactggtcaatggtccacggctgccagaaatcacgattgaaaatgcacagaaattaaaccattattgggaagatgtgcgcatgtattacaaaccgtttgaaaacggcttgaatgctcctgaaacagaagtatatatgcatgaaatgccaggaggacagtattcgaatctacagcaacaggcaaaagctgtcggattaggtcatcgctgggatgaaatcaaacaaatgtatcatactgtcaacttgatgtttggcgatatcgttaaagtaactccatcatctaaagtagttggagatatggcactatttatggtccaaaatgatcttacagaagaagatatttatgaaaaaggcgaaacactaagtttccctgaatctgttgtgactttcttccaaggagaactagggcaacccgttggcggatttcctaaaaaattgcaaaagattattcttaaaggcagacctgcattgaatgaacgtccaggtcttttggctgaatcagtcgacttcaacgaagtaaaaaaagaattggcagaaaaaattggctatgaaccaaaacaagacgaagtattaagctatttgatgtatccgcaagtctttttggactatcaaaaagcatataatcaatttggcgatgttacattactggacacaccaacatttttccaaggtatacgtttgggtgaaacaatcaatgtacaaatcgaacgcggaaaaacgcttatcattcgtttagatgaaatcggagaacccgatatcgaagggaatcgcgtactgttcttcaatttgaatggacaaagacgtgaaatcactatcaaagataattcgatcatcagtacggtccaaacccgattgaaagctgaaccgacaaaccgagaacaaattggagcaacgatgtctggttctgttttggatgtattagtgaaaaaaggcgataacgttaaaaaaggtgatacgttgatgattactgaagcgatgaagatggaaacggccatcgaagcacgttttgacggagaagtcgcacatgtatatgtgtcttcaggag

SEQ ID NO: 21300 - DNA, 1248 bp, Enterococcus faecium
atgtatgacaatccaagtagcaatgagaccgtacgctgttctttttgtgggaaaacccaagaagaagtgaaaaaaatcgtagctggtccaggggtctacatctgtaatgaatgtatcgacctatgtaaagaaatcattgatgaagaattttatgaagaagctgtacgcgaattcactgaagtccctaaaccactagaaattcttgaagtattgaataactacgtgattggacaagatcgcgcaaaacgctcgttagctgttgccgtatacaatcactacaaacgtgtcaatcagcaagcacaagagaacacagatgatgttgaactacaaaaaagcaatatctgcttgatcggacctacagggtctgggaaaacgtttttagcacaaacattagcaaaaacgttgaatgtaccttttgcaatcgcagatgcgacaagtttgacagaggctggttatgtgggtgaagatgtagaaaacattttgcttaaattgctccagtctgctgattacaatgtggaacgtgcagaaaaagggatcatctatattgatgagatcgataaaatcgcgcgtaaaagcgaaaatgtatccatcactcgtgatgtttccggcgaaggtgtccaacaagccttgctgaagattctagaaggaactgttgcaagtgttccgcctcagggaggacgtaaacatccacatcaagaatttatccagatcgatacgacgaatatcttgttcatcgtaggtggggcgtttgatggtatcgaaacaatcgtgaagaaccgcatgggcgaaaaaacgattggatttggtacgcaaaaccaaaaactttctgaagacgaaagcgtcatgcagcatatcattcctgaagatttgctgaaattcggattgattcctgagtttatcggacgattacctgttatggcagctttagagaaattgacaacagatgatctggtacggatcttgactgagccaaaaaatgcgttagtcaaacaatatcaaaaacttctttctctagatgataccgaacttgaatttgaacctgaagcattgagagctattgcgaaaaaagcaatcgaacgcaacactggtgctcgaggtcttcgttctatcatcgaagaaatcatgatggatgtgatgtttgatatcccttcaaatgaaaacatcgaaaaagtgattatcaccaaagaagcagctgaattgtctggtgagccaacagtgatctataaagattcagagaaaaaagcgggt

SEQ ID NO: 21301 - DNA, 912 bp, Enterococcus faecium
atgatttacacagtaacacttaatccatcaattgattatattgtacgcgtagatgggttaaaactaggtgatttgaaccggatgaaagaagacttcaaattgcctggaggaaaagggatcaatgtttcccgtattttgaaacggatcgattctcaatctacagcactagggtttttaggaggattcactggcgaatttatttcgaagtggcttgaaaaagaacaaatcaactctttgttcacacacgtgcaagaagatacaagaatcaatatcaaactaaaatcagatactgaaactgaaattaacggtttaggtccagctatttcagacgaagaaatcaatgaattgaagcaagcgctagggacagtagaacaaggagatatcgtcgtattgtcaggaagcgcgccagccagcctacgaaaaggattttatcaagaactgattgatatcattcgagaaaaaggtgcagatttcgtaatcgatacaacaggtgatgatctaaaaaatgcacttgttaagaaaccgttgttgatcaaaccaaacaatcacgaattagctgagctttacaatacaaccttccaatctgtagaagaaatcattccgtatggaaaaaaattactagctgaaggggcacagaatgtgctgatctcaatggctggagacggcgctttgctctttacagaacaaggaacttataaaacgaatgtattggttcgcccgttgaaaaattcagtaggtgcaggggattcaatgatcgccggttttattggtgcttacagtcggacaaaagatccgatcgaagcctttaaatggggagttgcttgtggaagcgcaacggctttttctgatgacttggcagctcgcgaactgattgatgagttattgccagaagttgaaatcacaaaaattgat

SEQ ID NO: 21302 - DNA, 1467 bp, Enterococcus faecium
gtggttagcctgtttcgtttatcgatcgaaaagttaggcgattttgttcgaagcatctatgaaataagtcgggaacagccgatttacttagttggcatggccatttgctgcatccttgcagcattttttgtgggttatctggtcaaaaatgaaccggatatcaaaggaagcgggattccacaagtagaaggacagcttcgaggggaattatcaatgaactggttctctgttttatggaaaaagttcattggtggtgtactttcagttggcgcaggactttttctaggtcgagaaggcccttctatacagcttggtgcagctatcggacaaggagctggacaattgtttcggagtccatcttcagaagaaaagattttgatttctagcggagcaagtagcggacttgcagcagcattcaatgctcctatcgcaggattactctttgttttagaagaaatccatcactccttctctcctcttgtttggctgacatcttttgctgcggccatcacggctaactttgtctctctttatttttttggcttaagaccagttttatatctaggcgatcttccttctttgccgttgaaatattatggttctttggtggtattgggcgtacttctaggcgtcttaggttttatttatcaaaaggtcctgctggcattgccaaatttttacaaccgattgcctttaccagcttattttcatggattcgttcctttcttgctgattttgccgattggttatttatggcctagtacgctaggcggaggcaatcaaatcgttttagcttttggacatgcttcattgccaatcattattattatcggtttgtttgttcttcgattcgttttttccatgatttcttatggtggtggtcttccaggagggattttccttccgatattgacattgggtgctttaatcggtagcttttatggaaacatcatggttgatttcgggatggatccaatctacatcaaggatttcgtcgtgattgccatggctggttatttcacagcaattgggaaagcaccgctgacagcaattattttagtgacagaaatggttggctctctcaatcatctgatgcctttagggttggctgctcttgttgcttatatcgtcaatgatcttctcggagggaatccgatctacgaatcattgttggaacgtttacttggaaataatcagaccgccgctcttaaaggtgcaaggacaacttttgattttccagtaacggcagagagttctttagacggattaatggtgcgggacttcaattggcctaaaaatatgctgctaatctctatacgcagaggaaatcaggaaatcttgactcacggtgatacgatcatgaatgtaggagatattttggtaatcttgactgatgaagcaaacttaccaagaatcaagcaagaaatcgaggctaaatcttcgatcacaaatttgaagcaatcattt

SEQ ID NO: 21303 - DNA, 522 bp, Enterococcus faecium
acaccgccggatcttgaaacaagaacagcgattttacgtaaaaaagcggcggctgaacgtctagagatcccagatgacacactaagctacatcgcaggacaaattgattctaacattcgtgaattagaaggtgcgcttgttcgagtgcaagcttttgctgcgatgaatagtgaagatatttcgactagtctagctgcagacgcactgaaaacgttaaaatcaggaaaaggacatcctcaattgtcaatcctgcagatccaagaagaagtggcaaagtattatcacatccaattgaaagatctcaaaggaaagaaacgcgtcaaatctattgttgttcctagacaaatcgctatgtatttggcacgtgagctcacagataattctttaccgaaaatcggagctgaattcggtggcaaggatcatacaacggttatccatgctcatgaaaaaatccagcagctgatggattctagtgtcagtatgcaaaatgaagtatcagaaatcaaaaactttttactaaat

SEQ ID NO: 21304 - DNA, 1146 bp, Enterococcus faecium
ttgaatgattacacaccgacacattacaatgagtcgaccatcctcgaattcatcattcaaaacgccgaggtttctcgatcaaaattagcgaaattaacaaacttaacgaagtcgtctatttccgatatcacaaaaacattgattgaaaaatcactcgtctacgaattaaacactggaatggcctccgtatcaggcggtagaaaacctatttacttgagttttaacaacgaatgcgcccttgttattgcgatagagattgggaaggactatatccatagttctttgtcctacatcaatggggagttggtcaataaattgagttaccattccctcttagtaaccaaggatacacttgtcatgttgttgacaaaaataatctccgatttaacttcgaaaataccccagactccttatggtattttaggaattgggatggcaatccatggcatcgtgaaagatgatacagtcttgtttacgccttattcagacattgattccattcctttgaaagacctacttgccaaagaaattccctacccaatcgtcttaattaatgaggcaaacgcgggtgctcttggggagtatacgtttaaaaccccttcggagaatttgattaacatcaatattcaagacgggattggggctggtatagttgagaatggtaagctgtttatcggggcaaacggcacagcaggggaaattggacacactaccctttaccccgatggcattctatgtccgtgcgggaatcatgggtgtttggagcattatgcttctacccgtattctgttgaagaagctgcttgattcagatcataaaccacatccggacatctcagtaatcgttaaaaaatggcaccagggggatgcacatacccagaaaatactgaagcataatgcgaaattactcagcatcggtattaacaatattgtgctaatgtatgacccagaggttgtcatcatcaacagtgaaatttaccgaggcattcccgaattgattgacgagattaagaagcacttgactggtaaaaacacaaaaaacttagctattaagaatacatctctaaaaggtaattctacactctatggctgtgtttccatagttgcccagtcctttctgaaaatcaataatctgaaatttacagtg

SEQ ID NO: 21305 - DNA, 1305 bp, Enterococcus faecium
atgaattattttgaagcggtaccaaaaatacaatacgagggcaaacagactaaaaataaatttgcttttcgctactataatcccgaagaagaaatactaggcaagccgatgaaagagcatctccgttttgcggtagcatactggcacacaattacggcagacggctccgatccattcggtgcaggtacttaccaaagaaattgggaaggcaacaacccaatggaaacggctaaaaaccgtgtggaggctttctttgaaattttagaaaaattgggagcggaatatttctgtttccacgatgtcgatattgctcctcaaggtgattccttggaagagtttttccaaaacatcgataccattaccgatctgattaaagaaaaaatggatcaaacgggcattaaattactttggaacactgctaatatgtttacacatcctcgttttgtcaacggagcagcaacaactaataatgctgatgtctacgctattgctgcagcacaagtaaaaaaaggtttagatattagcaaaaaattaaatggtcaaaattatgttttttggggtggaagagaaggctatgaaagtttattgaataccaacatggattttgaattggataacttggctcgtttctacaaaatggcgattgcctatacgaaaaaaattggccatcaaccccaatttctgattgaaccaaaaccaaaagaaccatcaaaacaccaatatgattttgatgcagctacttcaatggcgttcatcatgaaatatggtttacaagaccactttaaacttaaccttgaagccaaccatgctacgttggcaggacatacgttcgaacacgaaatcaatgtagcccgcagttacaacgcattgggttcgttggatgctaaccaaggtgatttgttgttggggtgggatacagacgaattccctacagatatttattccacgactttggcaatgcatgaggtcttggaaaatggggggattgcaccaggtggtatcaacttcgatgctaaagtacgtcggacttccttcgaaatggaagatttgattttagcacatatcgtagggatggatacttatgcacgtggtttgcgtgccgctgctaagatgaaagaagaacgtttcttcgaagaaattatggaagaaaaatatgcaagcttcacccaaggaatcggtaaaaaaattattgatgaccaagaaacctttgaatcgcttagtgagtacgcactttccctttcagatgtgacaaaccaatcaagtcatatcgaatacatcaaatcactgattaatgattatttagta

SEQ ID NO: 21306 - DNA, 1187 bp, Enterococcus faecium
cttgctacatttatgactgcagtcgaaaccacgatcgtcatcacagctgctaatgctattgctaatagttttggtcgtgaaattccgattgccttactgttttctagttacttattttccagtgcattgtcaacgcctgtattcagccgtctggcggatcagtatggaaagaaaccgatttttataattggattgctcttgtttatgacaggtacttttctttgcgatatttcccaatcattttttattctggtattttttaggatggttcaaggaataggtgcgggaggaatcgtgcccattactttctctctgattggtaatttatttgattatgaatctcgtggaagaataatgggatcgaataattcagcatgggggattgcttcgttagctgctcctcttttaggtgggctattggtcgaaaactttagttggcactgggtgttttttataaacattcctgttggcttaataacgattttgatcttacttttattctatgatgaagaaaaacgtccgtctgtctctttttcttatcaagaactgggacaatatctctttctgattacagttttatttcttttactagttggtatccagataataccagatcattttatacttggtggtggcgtcttcctttttggcatccttgtttctttcattttgctttcctataaaaataaagtaaaggaaccagtcttacctgtcgaaacattgagatcatctgactttcttttgttcaacctcgttacttttctcatgaatggagcaatgatggggtttcaggtatatcttccgttatggatgcagacgcaactttctttatcacctagccctggtggtttagcgcttttaccttcctctatcttttttattactggatcgatgattgctgtgccattaggaaaacattttggaacgaaacgtttattaaccttttgtatgggggtgaatggtttagtttttcttattttaggatttctaccgcaaatgactccttatttcgttttccttatcttagcctctttttcaggatttggtactggcacaacggttactacaagtgtcttgtctgcacaagctttagctacagaaaaaaaatcagtacggtatctggtttcatcaccctttgcagaaatctaggtcaaagcttcatgatcactttttttggtatcgtattc

SEQ ID NO: 21307 - DNA, 459 bp, Enterococcus faecium
atgccttgcgagaatagtttgtcaactaaaaggaggagaagaatggaaaacaaaggcgaaagcaatttgaagtggttagccaaattgacccgaacttatcaaaaagaattagaccaagcactagctccgctcaaattaaattcaacgaattattactttattgtgaaaatccatgattatcaccaattgaaacaagaagaattaatcaaattgaccggattggatggaagcaatgtcaccagaacaatacagaagttgacgaagatggggttagtgacaaaagaaaaaagtacacaagatcgcagaagttttcttttagaattaacaaaaaaaggacaagaacttcacgctcaagtagtagaatctgtagaaaatgctcagaagaaatttctatcaaaattgacagctgatgagcaaggaacatttgagtatctgttaggaaaattggcacaagaagaa

SEQ ID NO: 21308 - DNA, 612 bp, Enterococcus faecium
atgtcaaaaattttagtttttggtcaccaaaatccagatacagatgcaatcggggcagccattgcgttttcacacttgcaaaatgaattaggtaaagaaacagaaagcagttgctctaggtacacctaatgaagaaacacaatacgcattagaccactttcagctatctgcaccacgagtagtagagtcagctaaagcagaaaatgcagatgtcatgcttgtggatcataatgaattccaacaaagtatttcagatatcagcgaagtaaatattttagctgtagtagaccaccatcgtattgcaaactttgaaacagctaatccattgtactatcgtgcagaaccagttggatgtacaagtacgattattttaaaactatataaagagaaccaagtaacaattcctaaagaaatcgcaggaatcatgctctcagctatcatttcagatacagtggtgttccgaatcacccacgaggtacacctgaaggatgaggcagctgcaaaagaacttgcagcaaatcgctgaaagtcgatcttaaacacttagggccttgaaatgttggaagcaggaacagatctaagtgataaatcagctgcggttcttcttgattt

SEQ ID NO: 21309 - DNA, 552 bp, Enterococcus faecium
atggctaagaaaacagtgaaagatatcgatttaaaagacaaaaaagttcttgtccgtgttgacttcaacgttcctttgaaagacggcgtgatcactgacgacactcgtatcaaagcagcattgccaacaatcaactacgttctagaacaaggcggaaaagcaatccttttctctcaccttggacgtgtaaaaacagaagaagataaagaaggaaaatctttagctccagttgcaaaacgtctaggcgaattattaggtaaagaagtaacattcgtacctgaaactcgcggagaacaattagaagaagcaatccgcaacatgaatgacggcgacgttgtcgtattcgaaaatacacgttttgaagatattgacggtaaaaaagaaagcaaaaatgatacagaactaggtaaatactgggcttcattaggcgatgtatttgttaacgatgctttcggtacagctcaccgtgcacatgcttctaacgtaggtatcgcttcaactggtatcccaacagttgctggattcttgattggaaaaggaatcaagttcatc

SEQ ID NO: 21310 - DNA, 398 bp, Enterococcus faecium
atcaaagaaaaagccactacttgggaggaatcgattgaactagctgctagaccattggttaaagaaaacattgtcgaagagcgctatgtcgaagcgatgattcgtgcagtgaatgattacggaccgtatatcgtgattggcaaacacatggcactagcccatgcccgaccagaagatggggtcaataaattaggagtcagcgtactacgattgagcaaccaatcgatttcggtaatcctgaaatggatccagtaaagattattttttgtttggcagcagtagactcctactcccatctgaacatcatgaaagaactaattgaattgatcaacaacgaagagaagttggatcgattgattgaatgcacaaatatcgaagatttcaaacaactgcttttt

SEQ ID NO: 21311 - DNA, 990 bp, Enterococcus faecium
atggtaacgatcaaagatatcgctaaagcagctggcgtttctcatacgacagtttctcgtgctttgaataacagcagtttaataaaaaatgaaacaaaacaaaaaatacgacaactagctaaggaaatgaattattcgccaaactatagtgcaaaaggtttagtgaatcaaaaaaaatatctaatcggactatttttctcaagtttgcataaaggaacttcatcaaatttcctagcagattccattgcaggcatccattcagtattagacacaaattacagtttatctgttgaaagtatcgatgttgttgatttaacagaaatcaacctgcaacgctacgatggactgatcgttatgagtcaaagtgatgatgatcagcctttcatcgactatctcaaagaaaaaaaatttcctttcgttgttgtcaatcgtcacatcaatgatccagcggttatcaacgtcactgccgatgatgcggccggtgttatgcaggcagtagattacggtattggatgcggacatacgaagatcgcttatattggcggaaagaaaaattttcgttcgacaaaagaacgggaaaaaggggtattgaaaagtctaaaaaaagcgagcatccctgtcaatccagcctattttttaacaggagattacagcttagaaagcggccttcaaaacatggaatacctattatcactttctgacctgcctactctggttttttgcggcaacgacgacatagcgattggtgcattgagagctgtacatttagctggcctccgtgttccccagaacatttctctgatcgggttcgatgattctccagtcgtctcctatctcaatccgccgcttaccaccgtacgtaagcctttgaaagaaatgtgtcaagaaggaacaaagcttttactagatttgatcgaaggcaggacgatcgaacaatctaaaattgagctctccaccttgttgatccttcgtgagtcgatcaattacttg

SEQ ID NO: 21312 - DNA, 999 bp, Enterococcus faecium
gaagcaacggaagaacaagtaaaaaaagtcgtcgatcatatcgaaaaagaaggattcaaagtctcgatcgatcaaggaacagaacgagtagtgattggactaaaaggtgatacgcgaagtttacaagaaggagcatttacacgctacgaaggagtagaaaatgctgtgcgtattttaaacacatacaaattgacttctcgagaattccatcctggcaatacagtcgtggatgtagacggagtaaaaatcggtgacggtagtttcgtgacgatggctggtccttgttctatcgaaggattagaccaaatcagagaatgtgcgcgaatggccaaagccgggggcgcaaaaatcctgcgaggtggtgccttcaaaccacgtacttctccatatgctttccaaggtttagaagaagaaggattgaaatacatccgtcaagcggctgatgaatttggaatgaaagtgattactgaagtgatggatgaagggcatatcgacatggtggctgagtacagcgatatcctacagattggcgcacgtaatatgcagaatttcaaactgctatctgctgtcggtaaaacaggtaaacctgttggattgaaacgtgggatttctggtacgatcaatgaatggcttaatgctgcagaatacattgcagtcgaagacaaatctcctgtcatttttatcgaacgtgggattcggacttacgagacagctacacgtaatacgtttgatttaagtgctgttccattgatgaaaaaattaactcatttccctgtgatcgttgatccaagtcatggtacaggtatttgggatcttgtaccaccaatggcccgtgcgggtgtggcaagcggagcagatggcatgatcgtagagatccatcctgatcctgcaaatgcttggtcagacggtccccaatcgttgaatgaaaagacttactcacgcatgatgaaagaagtgacgatcatgaaagaagcaatggaaaagattcaaacactcgat

SEQ ID NO: 21313 - DNA, 1164 bp, Enterococcus faecium
atgcgttatatgactgcgggagaatcccatggaccagaattaacagcgattattgaaggactaccagcagggttacctctatcagaagaagaaatcaatcacgaactcgctcgcagacaaactggttacggcagaggaggaaggatgaagatcgaaaaagaccgtgttcgtatcacgtctggcatccgtcacggcaaaacaattggttcacctgtcactttagtaatagaaaataaagattggaaaaattggacaactgtcatgtctgtagcagaagtacctgaaaaagaccaatcactgcggcgagttgcacgtccgcgtccaggacacgcggatttggtaggcggtatgaaataccatcatcgagatcttcggaatgtgcttgaacggtcctctgcaagagagacgaccatgcgtgtagcaatcggcgcaattgccaagaaaattctggaagaacttgacatcatcgtagccggacacgtgatttgtcttggtggaatccaagcagaaatacctggaaatatctccattcaagaaatcaaagaaatttctgaagcatcagaagtacgggttgttgattcagcagtcgagcaaagaataaaagaactgatcgatcagacaaagaaaaatggagacacgatcggaggaattgtagaagtgctcgttggaggcgttccagctggattaggaagctatgtacaatgggacacgaagctagatgccaaaatcgcgcaagctctggttagtatcaatgcctttaaaggagtagaatttggcgtcggattcactgctggatcattaccaggatcagaagtgatggatgagatcctatgggaaaaagaacgaggctacttccgacgtactaataatctaggcggcttcgaaggcgggatgaccaatggcgaaccacttattatccgcggggtcatgaaacccatccctacattgtacaagccacttcaaagtgttgatatcgatacaaaagaaccttacaaagcaagtgtagaacgttcggatagtacagcagttcctgcagctagtgtcgttgcggaaaatgttgtagccactgttgtagcgacagagctattgtcaaaattcccaagtgattcgcttgttgagttgaaagctgcagtgaaggagtaccgtgactacttgaaacattac

SEQ ID NO: 21314 - DNA, 603 bp, Enterococcus faecium
gtggacgcgatgtcaagctttggtgggataccgattcgtgtagccgaactagggattgattttttgatttccagctcaaacaaatgtattcaaggtgttccgggcttttcttttgtacttgctaataaagcggaactggaaaaacgaaaaaatgttagccgaagtttgtcacttgatctatatgaccagtaccgcgtgatggaaaacgagaatggcaaatggcgtttcacttcccctacccatacggttttggcttttcaacaagcgctgaaggaactagaggcagaaggaggaatcgaaactcgatattcacgttatctcgccaataatcatgtgctacgacaaaaaatgacagagatggggttccagcctttcattcaagaatatcaggggccattcatcacctcttttctttaccctaaggaatggcgatttgattttaatcatttttatcagtatttaaagcaaaatggatttgtgatctatcccgggaaaatcagcgatcatgaatgttttcgtatcggaaatattggcgagatctatccggaagatattttggaactgacagcaattatcaaagactataaggagaacgttaatgat

SEQ ID NO: 21315 - DNA, 3168 bp, Enterococcus faecium
atgaatcaatatgtaaaaaagctgattgcgtcgattttgtttgtcttccctctcttgatggtgacattcgtttttgccgatgtagagaaaacaagcgaatcaacgcaatcagagaatcaaagttttgacaagactactttttcagaagaatcaattacttctgaaactacagaatcccaaagtgaggcgcctacttctaatacaaggcaagaagaaaataagacaagtgagacctcagaagtagctgaacaaacgtctgatagcagtgaagaggtacaggttagagttgtttcagcggatgggtacagcgaagctgccacaacagaagaactgacgcagcttctcgcagacgaatcagtagctaagattcgtttaactcagcctttgactttagacagggaattggagatcaagcgagatatcgttatcgattttggcggacttgctcataatttcggcacacatcacatctatatcaatgagacacctcagtcgatcgagtttcagaattttaaaggaacggcagctcatccaggtgggttgataccaaataccgatggaaatgccattatcattgcttatatgtccgatttttggggaagcagatatcattttacgggagaaataaaatttaccgggacacttgacttatatgatggttctaaactaggcctgatttatgcccctcgtgcaactgtcgcattagatggtgtttccggtgtattggatgtccaaccagtgaaagaagggatgaatgccgctccgggtaaagcttatttttgtagaagctatcagctgaatgtaatcaatggtagtcagctttatggaccatatctaggaaaattctatggttttctagattcaggtgatgagacgggcagtggaaaaacagcaccaggactccatatcttgagtggttcaaaggtctctcttgactatgatcgggcagatggcgtcagcgatgaaggagaggctgtcgatacgctacccgggaatgtcacatttgaagtcagtggctcaggaagtgaatttttggtaaatacaaagatcaatattaccaacgacaacaatcgcggaattatccaaatgagaggctcaggatcaagagtcgctgtatcaaatgatgggaaaatcacaatcaatacagcgactactggcggatttcgcctgcaaggagattctagtcaaatccatgtatcaagtggtggacaaatctcggtcaaaatggctggagatggcgaccaacctggaaacaatgggatgcgttttgtagggaaaggactttctttgatcgtagaaggagccggatcagtcatcgatattgataagcaaagtggtcgttctagcgcagttcgttttgagaacggtacgcaaaaactaacagtaactaatggaggctcattgaaggtaagaaatgcaggggatggcaaatcttatgtgaacagactcaatcaaggaaaccaagcgatccaattttatgacgcttctggttttctagaaagtccagggtcagctgattttacggttactggagaaaaatcaaatatcgatatacgcgcagattccggagctactgtagatacaactggagatattgatttgaactttatggctggcgaaaaaacttatttagtcatggtcgggaaaacaggagaagataagaccggcatcatcagtggggatgtgttgaatgtagacttagaatctcctacctatttcgatttccaaaacaaacggatcggaagcgagactaatggcataggtggctgggtatttcaaggtaatggagattcttctttgaagatcgctcattcagaaattgctttatggcgaaaggcaggagcaacgttcgataactttgaaaaagatccggattatttttctgatatgacagacttatcaatcaatggaaccgacttaggtaattttgtatcaagccctagtgcaggtttaacaaatgaatttgctcagacaggtgccggaatgaaaaattataatcgaatcagtgccaataatcagctcccgatgattgaatccttgagagtaccaacgaatgcagataaaaaaatctatgggcatgtcgttgttcccgaaggtgtcgaggcaaagccaagagatgcttggacaggcgaagtagaagtgactttacgtattacttatgcagatacgactaaatcacctatagaaattactactctcacacaaggacaaacagatgaaaatgaaggggcaggatataatccgtggggagaaggcgaacaaggcggtttgtttgaagttcaagcacccaacaaagaaagactaacaatgggggatcaagtgcaagtagttgctgctaaaaaagtaagaggtggccaagaagtgacagaactggactctgccaaaacgacagtcgatgtgattcctcctgaacctgctaatttaagtaccacgttaatcaatgcagcttctcgcacgatcacaggtacaggtgaagcaggagccttggtttcattgaaaaaaaatcaagctgttttgtcagaaacaactattgatgatacaggggaatttgttctttctatcccagaaaatcaactttttgcaggagatgtattagaaattgtattaaacgaccaagcaggagaagctactgctaagggtgtgcagaacaagccaagtaccaacgatgaaattgggaatcacaatccaagtgatacgccagttgtttatcatgatgccccgccttttgcacctgctacgaagatcgtagtagaaggtggtctctcatttcttgccccttccaaactcgattttggtcagatcaaagcaactgggttgacgcaagaagcatttggccaaatggatatacaggaaaaattatggatttatgatcagcgagaaacaaaaagtccatggatcttaacgataaaattatctcagcctttcacaaacgatgcaggattttctatgcaggatgtcctatatttcaagaaaggcgaggagtatcaattagtgaatgaagaagaactggaaattgtcagaggacaaaattcaacgaatgtgcaagcagattattcagaatatttaaataacggtcgggcgtttaaacttgtcttaaccaaagaaaatcagatagctggtaattactcagcagagatgacatggacattagcagatgcgccgacagaa

SEQ ID NO: 21316 - DNA, 195 bp, Enterococcus faecium
atgaataacggtacagtaaaatggtttaactcagacaaaggttttggatttatcactggagaagatggaaatgacgtatttgcacatttctcagcgatccagggagaaggcttcaagtctttagatgaaggccaagcagttacttatgatattgaagaaggtcaacgtggccctcaagcagtaaatattgtaaaa

SEQ ID NO: 21317 - DNA, 1026 bp, Enterococcus faecium
atgaaaaaaacatcactgctgtttgcagcaagttcgcttagcctaggtctgctaggtctaagcggctgcggaaataattctagtgtggcaactgtcgcagatgcagacgtaaatgagatagttaccttgcgctttgcttatgcaagcaacagccagccagtaattgatgcaatgaatgaatttgggcgtttagtaaaagaaaaaacagatggttccgtacagatccagtatttcccagatggacaactgggtggagaacgtgaactgatcgaattgacacagtcaggagcagtagatttcacaaaagtaagtgcctcagcgttggaaagtttctctaaagattattcgattttttccgttccttatctattcaatgatgaagaacatttctttaaggtgatggataatgaagaaataatggagccaatctaccaatcgaccaaaaatttaggatttaccggattgacctattatgattctggtcagcgcagcttttatatggtagacggtccgatccatacgccggaagatttgaagggaaagaaaatccgtgtgatgcaaagcgaaaccgccatcaaaatggtagagcttttaggcggttcgcccgtacctatgggaagtgatgaagtgtacacgtctcttcaatccaatttgatcaacggatcagaaaacaatgaatttgtcttgtatacagctggacatggtggtgtggctaaatactattcctatgatgagcatacacgtgtaccagatatcatcatcatgaatgatgccatcaaagaacagctaactgatgagcaggaaaaagccattgaagaagcagcgaaagaatcaacggtttttgaaattgaagcttttgcaaaagcaattgaagaagaaaaagctttagcacaagaagaacatggagtccaattcaatgatgtagataatacaccgtttcgagaggcagttgccccacttcatgatatattcaaaaacgatcctacctacaaagacctttatcaaaagatccaagagcaaggagcg

SEQ ID NO: 21318 - DNA, 1254 bp, Enterococcus faecium
atgaacacgattgaaaaaaattacgagcaagcaaaagaaaaatatgcaactatcggtgtagatacagatgctgtactagaaaagatacaggacatcaaaatttctatgcattgctggcaaggagacgatgtcaaaggtttcttgacaccggatggcgaattgaccggtggaatcatggcgacagggaattttccaggagccgcacgaacacctgaagagcttagacaagatctggagaaggcttattcgttgataccgggcaaacacaaattgaaccttcatgctatctatttggatacagaagaatctgtcgatctaaatgaaattgagccgaaacattttgaaaaatgggtagagtgggcaaaaaaagaagaaatcggtcttgacttcaatccgactttcttttcgcatccaatgatgaaagacggctttacattggctcatccagataaagaagttcgtgaatactggatcgaacacgggaaaagaagccgcaaaatcgcggagtactttgggaaagaaactgggcaaacaagtatcaataacttttgggtacctgatgggatgaaagataatccgattgatcgttttaccccacgggaacgtttaatggaatcactcgatgaaatttttacagaagagttagatggacggtatgtacaagatgcagtagaaagcaaactatttggtttaggcgctgaagcttatacagtcggctcccatgaattttatatgggttacgggttgactcgtgacaaacttgtttgtctagatgctggacattttcatccaacagaagtgatttccaataaattatcttcattagctttattcagtaaaggaatcatgctgcatgtttcccgtccagtgcgttgggattcagaccatgtggttttgatggatgatgaattgcaggaaatcgctaaagaactagtccgtaacgaattgttggaaaaaacaaatatcggtctggatttctttgacgcaacgatcaaccgtatcgctgcttgggtcatcggtacgagaaatacacaaaaagcactgctgaaagctatgctggaaccagttgagcgattgaaagaaatggagctggcttttgactttacttcaagaatggcttatacggaagaattgaaagatttcccgtatgccgatgtatggaattatttctgttacaaaaatcaagttccagttggtttggattggctggaagaagtccaggaatatcaaaaagacgtgttggaattaagaaaa

SEQ ID NO: 21319 - DNA, 309 bp, Enterococcus faecium
atggtgaaaaaagctttttgcatgaaagtttacccagaaaaacaagaagaatacaaaaaaagacatgatgaactttggccagaaatgcgtacagcacttcgtgaacacggggtcatcgactattcgatctatcttgatccgagtataagtttgttatttggttacttagtgatcgaagatgaaaagttatgggaaaaaatggcaaatacatctatcaatcaaaaatggtggaagtacatggaagatatcatggagacaaatccagatgcctctccagtcagttgggaattgatgccagtctttgaactg

SEQ ID NO: 21320 - DNA, 90 bp, Enterococcus faecium
atgacgtcaaatcatcatgccccttatgacctgggctacacacgtgctacaatgggaagtacaacgagttgcgaagtcgcgaggctaagc

SEQ ID NO: 21321 - DNA, 726 bp, Enterococcus faecium
atgaaatacttagcaattgatataggtggtaccaatttgaagtacgggtacgtatctcaagatggccatctgttacaacattggactatccctgtaccaacgaattataatgatttgcttcagaagataacagcaatatatctttcctctgagaatatccttggggtagggataagttcacctggtatatatgatatgaaaagcaatagaattactggatcttcagctttgaaatatttaatcgggagaccactaaaagcggacatatcttgggcattaaatactacagttgctatcgaaaatgatggaaactgcgctctgctaggggagtattggcaagggaattgtcaatattcacgttcatctgcaatctatgtgattggttctgcagttggagggagtattcaaattagtgatgagattcttcgtggtgcgaataataatgctggcgaactaggttatagtttggtagataatctgcctacaacagataagtatagttcgttgggaggaaagattggatttaatgcattattgaaaaaaatcaatcaacaaggatataaatttgaaaatggaaaagacttatttttaaaatctcaaactgatagaaaattagaaaagctgataattgatgaattaaagtatctagcttcatcacttataaccttgcaatacgtcattgatcctgaggtaatattgattggcggaggagtaagtcagaatacc

SEQ ID NO: 21322 - DNA, 1332 bp, Enterococcus faecium
atggggctaacaaataatttaaaagatttatacgagagaatacctaaaggggttaaatttgtttttgccccaatttttattagattaatggtaaagaataaggaatttcagcatacatggaagcagctggattattttgaatctctctctgagagtcaaaaacgagaatttcagctgaattcactaaaaaaagttctgcaatatgcatatgataatgttccctattacagaagtttgtttgatgagtatgattttaaaccatcccaatttagagattttagtgatttaaaaattctaccgtttttggaaaaagcggaagcaattcaggctggtaaaacgatatattccactgacgaaaaattgaagtactataaaacttttactggtggcagcagcgggcaggcattaacagtgttattagacaagagttcgatatatagagaaagagcctgtgtaactcactttttgtcaaagtttggatatgatcctctaaaaactaaaactgttgctttttgggggcataatcaagatcaagatttttattattcgccactaaaaaatgaaatagtgatttcaccgttccgtttatatcagaaaaatcaattcgatgcaatttgcaaagatattgagaaatttggtgctactttcgtaatgggatacccatcagccatttacttgtttgcacagatggctgaagcgaacagtaaaaagttaaagttcgatcatgtggtttattatgctgaaaactgtagtttggaagaaaaggattacatagaaagagtatttaattgtaaagttgattcctattatggtcacactgaacgcgcatgttttgctgaaatctcagaggatggatgcaaatttaatgacttttacggatatactgaattgattccaacggaccaaccaaacgagtacagaattgtatgtacaggcttcctaagcaaaaaaatgcctttaatccggtatgccacagatgatgtggttcatattttaccagacggtaaaatggttttagtaggtcataagagaagtgaaattcatctgattagtaaaaatggtcagcatgtatttaaaggagcaatgacacttcacattgaagaattgaaaaagattaagcgttatcagtatattcagaatgaaaaaggtaaagttcaattatgtgttgttgaaaatgaaccattaactaaagatgaactcaaaattattcagaactatatcagtagaagatgcgaaggcctattagatgttgaaataaaagtcgttgatgaattaattttgaccactagaggtaaatttaattgggctgtttgtaatataaaggataaagaa

SEQ ID NO: 21323 - DNA, 1097 bp, Enterococcus faecium
tcttgggttgaggtgggcttgaagcaaattgaaaaaaatatctgatttacaaagattccataccgacacaggtcgatataatggcagttgtaaaagcgaatgcatatgggcacggagctattccggtagcaaaaactttacaaaaaataggcgtgatgaattttgcggttgcacccttgatgaaggaatacaattgcgaaataatggtatcactggtcaaatactgattttggggtatacacagattgatttaatgcagcttgtttataaatacgatttaactcaaactattgtatccgaagattatggaaaccaaattgtgaaatccaatactaacgtaaaagttcaaattgctgtagatacaggaatgcatcgtattggctttaatgaaactaagcctaagcactgtgcagagataattagaagtttctcaaaaactttaaatataacaggatgctttacgcatttgtgctgcgtggatacgaaggatatagatgataccgaatttactaatcagcagataagaagattcgaataagtggttactcatttagaagatttatgccttccatattgccactgttttaattctgcgggcggtatgaactattcatacctaaagaaaacagcgtttgttagattaggcatcatactttatggtctaaagccagattacaattttcaaatgccgaattttattaaaactgcgctcgaatggaaaagcaccatttcaatgataaagtggattgatgcaggagaaagcgttgggtacgggcgtacctttatcgcgataaaaaatgaaggtggcaaccgtatgtactaggtatgcagatggattaagtagggctttatagaatcgtggatatatactatgtaatgggaaaaaagcatctattatcgggcggatatgtatggatcaatttatgattgatgtaacagagattccgcatataaatccgtagacagttgtaactattattggtgaggatgggtcttttacaatatcagcggatgatattgccaaagaaataggaactataggttatgaagtattatgcggaatttccgaacgtgttataagaaagtatagttaggag

SEQ ID NO: 21324 - DNA, 1650 bp, Enterococcus faecium
atgagctataaagtagaatatgagcgttggtgtaatcatgccaatgcggatattgtagaggaactgcgttcctattccgagaaggacattgaggactccttctataaaaatctgtccttcggtactggtggtctgcgtggtaccatcggtgcaggcaccaaccgtatgaatgtacatactgttggtaaggcaagccagggtttggcagactatctgaacaagacttgcgaagcaccttctgtggtcgtaggctatgattcccgcatcaagtctgatgtgtttgcaaaaacagctgcggatatctttgccgcaaatggcattcaggttcacgtgtggccggaactactgccagttcctaccgtttcctttgctacacgttatttgaaggcagatgcaggcgtcatgattaccgcatctcataatccttctgagtataacggttacaaggtttatggtgcagatggctgtcagattactaccgaagctgccgcagcaattatggccgaaatcgaaaagctggacatctttgctgatgtaaagatgggtggcgatgcttctaagatcgcatctatccagccggaggttctgactgcttttatcgaagaagtcaagggtcagtctgttctgtttggcgaagaagtggacaagaatgttgctatcgtgtattctcctctgaacggcaccggtctggtgcctgttacccgcactctggcagaaatgggctacagcaatgtaaccgtcgtcgaagagcagcgtctgccggacggtaatttcccgacctgtccttatccgaatcctgaaattaaggaagcaatgtttctgggcatggagtatgccaagaagtacaatgctgatctgctgctggccaccgacccggactgcgaccgtgtgggtatcgccgtgaagaacgcagaaggggattatgtcctgctgtccggtaacgagaccggtctgctgctgctggactacatctgctctcagagaatcaagcacggcaagatgcccgctgaccctatgatggttaagactatcgttaccatggatctgggcgagcgtatcgcatccaactatggcgtgcgtactgtcgatgtgctgaccggcttcaagttcatcggtgagcagatcggtatgctggaaaatgctggtcgggctgacagctatattttcggctttgaagagtcttatggctatctgtctggcagctatgtccgtgacaaggatggtgtcaacgccgcatatctgatctgcgagatgttctcttactacaagactcatggtatcagcctgctggataagctgaacgagatctatgctaagtatggctactgtttgaacaccctgcattcctttgagtttgagggtgtggcaggttttaccaagatgcaggaaattatggttaaattccataagggtcttgacataattggtggtaagaaagtcattgaaactctggactacagcaagggtcttaatggtctgccgaagtccgatgttctcaaatatctgctggagggcaactgctctgtagtggttcggccttccggcactgagccgaagctgaaaacctatatcagcgtcagcgcagagagtaaggaagccgctgaagctatggaagctatcatggccgcagagctggctgaaatgttcaag

SEQ ID NO: 21325 - DNA, 195 bp, Enterococcus faecium
atgaataacggtacagtaaaatggtttaactcagataaaggttttggtttcatcactggtgaagatggaaatgacgtattcgctcatttctcagcaatccaaggagaaggctttaagtctttagatgaaggacaagcagttacttatgatattgaagaaggacaacgtggtcctcaagcagtaaatatcgtaaaa

SEQ ID NO: 21326 - DNA, 198 bp, Enterococcus faecium
atgaataacggtacagtaaaatggttcaacgcagacaaaggttttggctttatcactggtgaagatggaaatgatgtatttgcacatttctcagctattcaaggtgacggcttcaaaactttagaagaaggccaagcagtgtcttacgatgttgaagatggtcaacgtggccctcaagcaacaaacattgttaaagct

SEQ ID NO: 21327 - DNA, 573 bp, Enterococcus faecium
atgagtaaaaaattgaccgtccaagatatgattttaacattacaaaaattttggtcatcaaacggctgcatgctgatgcaagcttatgatacagaaaaaggagcaggtacgatgagcccatatacattcttacgggcaatcggaccggaaccatggaatgctgcttatgtagagccatcccgccgaccagctgacgggcgttatggagaaaacccaaaccgtttgtatcagcatcatcaatttcaagtcgtaatgaaaccttcacctgaaaatatccaagagctttatttagaaagcttgcgtcttttaggaattgatccattagaacacgatattcgttttgttgaagacaactgggagaacccatcgatgggttgtgccggtgtgggttgggaagtatggcttgatgggatggagattacacaattcacgtacttccagcaagtcggaggactaccttgtaaaccagttacttctgagattacttatggactagaacgtcttgcttcatatattcaagaagttgaaagtgtctatgacttggaatgggctgatggcgtgaaatatggcgag

SEQ ID NO: 21328 - DNA, 296 bp, Enterococcus faecium
aaagacattttacaacaagaattcaaaacaaaaatgcgcggctatgatcccgttgaagttgatgaattcttagacaatatcatcaaagattatgaaacttacagcaaagaactccttgctttacaagaagaaaacgatcgattgagtgcaaaagtagctcaattatctaaaactcaaggagcagctcaaacacgcgtgcaacaaacagaggcaccaaagagcgcacagtgaccaattttgatatcttaaaacgcttgtcaaatcttgaacgtgaagtatttggtaaaaagcttgat

SEQ ID NO: 21329 - DNA, 516 bp, Enterococcus faecium
ttagctgtggtgggtgttatcttctatcaccttctgccaactagtatgaaaggcggctatttgggcgttccgatttttttcgtcgtatctggttatttgatcacggatctgctgcggcaggaatgggaacaaaatggaaaaatcaatatttggcaattttatgtcagaagaatgaagagactctatccggcacttgtttttatgcttgtgacagcttcggcttatatcactttgtttcagcgagggctgttaaacaatcttcgaggagttgtggtcagcagcttactgtatgtcaacaactggtggcaaatcaataacggtttatcttatttcgatcgatttgctaatgagtcaccgtttacgcatatctggtctttagcagtagaaggtcaaaactatttgatttggccgatcttgtttgtattgttgatggtatttgttcgtaaaagaaaatggatcttttatactgtgttaggtacatccttcctctccgccatcttgatgatgatcttgtat

SEQ ID NO: 21330 - DNA, 494 bp, Enterococcus faecium
gtgagtgacgatatgttaacaacagaagattttgattttgacttgccggaagaattaatcgcacaaacaccattaaaagaccgcgatcattctcgtttacttgttttggatcggaaaactggagagatggaagataaacatttccatgaaatcattgaagagttacagcctggtgatgcgctagttatgaataatacacgagttctgcctgctcgtttatatggagaaaaaccagatactggtgcgcatttagaagtccttcttctaacgaatacacaaggagatacgtgggagacattgatcaaacctgcgaaacgtgccaaagttggggcaagaatctcttttggtgatggcagattgcaagcagtagtgaaagaagaattggaacacggcggacggatcattgactttgagtatgaaggaatttttctagagattcttgaatcattgggagaaatgccattgcctccatatatcaaagaacgtctggaaga

SEQ ID NO: 21331 - DNA, 480 bp, Enterococcus faecium
gagcgtttgatcatcatgagaagattatgtagtgaagatatgcccgcatttattatttcaagaggattaccggctccagaagaaatgatccaggcagcaaatgaaaatgggatagctgtactgcgttctcccatctcaacttctcgtttattaggagaattatccagttatttagatggtcgccttgcccctcgaacaagtgtccacggtgttttagtggatgtttacggattaggtgtactgattcaaggtgacagtgggataggaaaaagtgaaacagcgttggagttgatcaaacgcggtcatcgattgatcgcagacgatcgagtagatgtttatcagcaagatgaattaacggtgatcggagaaccgcctaaaatcctggaacatctaattggaatccgaggaatcgggatcattgatgtaatgaatctttttggggcgagtgcggtacgtggctctatgcaagtccaattggct

SEQ ID NO: 21332 - DNA, 574 bp, Enterococcus faecium
tttgctgttgggtatactatttttggcttcagtctttttttattcctgttcatcccgcttgcctctcgcttcaaattaaccgaaggactcgtagtaaattcggttttggtcactcattatttagtggaggaaaacatgtcttggcagctgatcggcaatgaagcgggattaatggcgattggattagtatttgctttgcttgcaaatgtttacatgccagatcgtacgaagcagctgaaggaaaaccaaatacagatcgaaaaagaatttcgaaatattttgagacaaatggcagaatttcttttatcagaaaataaagaagatgtgcagatcaaatgcgaacgtttactgacattcattcgcgaaagccaagaagatgccagagaacatcaagaaaactactggctcagacagccgctatactacgaaacttacttctctatgagaagagcacaggccaatgtgattaaagacatgctggaaaatctagagagaatccagcaaccagcttattatggaaaacatatctatggtttattgatttatactgcagaaacattttcagagtcaaatg

SEQ ID NO: 21333 - DNA, 559 bp, Enterococcus faecium
atgagaacttttatctatgctgacaaattctttttagcgtcaggtgtcaaacatgcaggctatcttgaaattaccgatggactttttggtgaatacaccaaagaactacctgagggagaagtcaacatcattgaccaaagcggcaaatggattgctcctggtttggtagatacacatattcacggctatatgaatcatgatgtaatggataatgatgcagaaggcatcaaagtgatgtctgaaggtctgttatcttgtggagtgacttcatttttaccaacaacattgacgtcaagcaaagaacgtttaaaagatgtagctgagacaatcggcaaaatgtatcaggaagcaccaggagctaaaatcaaaggaatctattttgaaggtcctttcttcacagaagaacacaaaggggcacaaaacccaagttatttcggggatcctgatttggatactttccatgaatggcaagaagcttcaggcggtttaatcaaaaaaattgctttagcaccggaacgtcaaggtgtagaagagtttgtcaaacaagtgactgaagaag

SEQ ID NO: 21334 - DNA, 438 bp, Enterococcus faecium
atggatgaagaagggatcgacttagaaaaactgaaagaatcgatccataaaaataaattgaaagcagtgcttatcaacccgaattttcaaaaccctacaggaaaagtgatgagtcaaaaacgacgagaaaagctagtcgaattgtgtcgaccgtatcggcttccaattattgaagacgatgtatttacggatctttcatttctaaatcaagaagaagtccttcctatacgaacgattgatccggataatgtgttatacgtcggttcgttatctagggttttaggaaaaacaacgaaaatcggttgggtgataggacctgagacttttatctcgcaactagctcaagcgcaagaaatgatggagttttcgatgaatatccttacacaaatcacagtggctaatgtatttaatgaagcaattgatttgaaaatgcaagat

SEQ ID NO: 21335 - DNA, 377 bp, Enterococcus faecium
cgcatggtctcaatcgttcaagatgcgccaacgaactttgagacagacttgtttatgcctattatccacgccgtagaaaagctaagcaaacaagtaaaatatggtgaaaacccagtaacagatatttcttacaaagtaatcgcagatcatattcgcgccctttcatttgctattggcgacggtgcattgccatcgaatgaagggagagggtatgtcttacgccgtttgcttcgtcgtgctgtcatgcatgggaaaaaattaggtattgaacaagcattcttatatcgtttagtccctgttgttggggaaatcatggtaagttattatcctgaagtacttcaacaaaaagaatttattgaaaaagttatccgtacaga

SEQ ID NO: 21336 - DNA, 444 bp, Enterococcus faecium
gtgatgggaggaactactatggctgtgttagccgaacaattgtctaatctggaaaataagaaacggcataacctgtttgtccctgcaagaggcgggattggtgaagcgataactgtacaggcaaattctgtcagtgcaagaatggctgctaaagcaaacggtaaccaccgcgcactttatgttccggaacaattaagtctggcaacttataattctttactcaatgagccatctatccaagaagtcttaaacttgattagtgaagcgaattgtgttattcatagtattgggcgtgcattacacatggcagcacgtcgtaagatgactgaaaaagaattagtcatgctgaaacaagcaaatgctgttgcggaatcttttggctactttttcaatgaaaaaggtgaagtcgtttataaggtccctagaatcggcatagaattgcaa

SEQ ID NO: 21337 - DNA, 394 bp, Enterococcus faecium
tgtttctccacattcgtttctttgattgtttctgccatattgatcaggaattttattctttcgatgaaccgatctagtgtgtcagataaaatctctatcattgctaaaatcgttgccaatgataaactcatccaaaaaaagctgcagactggtgacccgacacatgcgattcaaggaataacaaatgaaatcatgattgcatcgaatttagattttatcgtggtcatggaccctgaaggcattcgatattctcacgcagacccaagttacatcggtcttcctttctcaagtcatgaagatgtgaaaaaagtgattggaggacaagaatttttctctgaaaaagaaggaatgttagggttcggcttccgctatttcgttcctatttattacaatc

SEQ ID NO: 21338 - DNA, 359 bp, Enterococcus faecium
gccatcttcgaagagacggtagagcacatgctgctgcaacccaccttcatcaccgagtacccggcagctgtttctccgctggcgcgccgcaacgacgtgaacccggacgtgacagaccgcttcgaattcttcatcggtggccgcgaactggccaacggcttctccgagctgaacgatgcggaagaccaggccaagcgcttccaggatcaggtgaaccagaaagaagccggtgacgacgaagccatgttctacgacgccgacttcgtgaccgcgctggaacacggcctgccgcccactgccggtcagggtatcggtatcgaccgtctggtgatgctgttcaccaacagccacaccatccg

SEQ ID NO: 21339 - DNA, 150 bp, Enterococcus faecium
agcagcttgacagttgcaatcggctgtacaggcggtcaacaccgttctgtggcattgactgaacgtttggcaaatgctttagggaaaaactataaagtcaatgtgacacatcgggacaaggataaaaggaaagagacggtgaaccggtcg

SEQ ID NO: 21340 - DNA, 480 bp, Enterococcus faecium
gtgattggacaatatgtccagttgaaaaagtctggtaaaaattacttggggctgtgtccttttcatgaagaacgtacaccgtctttttctgttgcagaagacaagcagatttttcattgctttggttgtggtaagggcggaaacgtgtttacttttcttcaagaactagaaggtctaagttttccagaagcagtggtaaaagtggcagacttcgaacagataccgttagaagatcaatggcgtcagcgtactatagctgtccaaaatcctgaatctgctacggggaaactgattgctgctcatgaaaaagcagcggaaatctatcatcacatgctattgcatacaaaagctggacagccagctttagaatatttgcaaagtcgtgggttgtctttagaattaattgaagaattcaacataggttttgcacctaatgagcgttcttttcttcagcaagtattcaagaatgaatcaatttca

SEQ ID NO: 21341 - DNA, 581 bp, Enterococcus faecium
  misc_feature (191)..(191): n=g, a, t or c
ggtgtctggattggcaaattgttttcaaaaaagatatccgacaacacgggagcggtaatactggaacgaccaatacatgtcgtgtattaggcaaaacagccgggattgttgtcctgcttatggatattttaaaaggtacattggctacttgtttgccgatgatcttccacctttctgggattaaccctctntggtttggggtatgcgccattcttggccatacatttccgatttttgctgggttcaaaggaggaaaagctgttgcgacaagtgcaggaatgcttttaggatttaatcctgtattttttgtttattcttgtatcatctttatcgttagtttattttgtacaagtatggtgagtttgagcagtatgatcagtgcagtattgatcactttatctacgatcgtccttccttatgtagctcctgtgattttggctaagcccaattggttactgacgatcattgcctttttagtttcttcctttatcttttatcggcataaagacaatatcaagcgtatcagaaaccatactgaaagtcgaatcccgtttggtttgaatagcagcaagaaaaaatcc

SEQ ID NO: 21342 - DNA, 303 bp, Enterococcus faecium
ctgaacctggcgccctacagttttttcaatgccttcaactacatcccgccgatcattagtttttccagtgtcgggcgtaaagacagcctgaataacatcgaacagaccggcgaatttgtctggaacctggccacgcgcccgctggccgagcagatgagccagagctgcgccgccgtgtcaccagaggtcaacgagtttgaattggccgggctgacgccagtggcctccaaagtgatcgctgtgccgcgggtcggcgaaagcgcggtgtcgttcgagtgcaaagtcacgcagatcattcagctg

SEQ ID NO: 21343 - DNA, 433 bp, Enterococcus faecium
aaaatgggtgtcagccttgatggccgatccgccatgcacagcgttgaaagccaatggattaccgggccgtggcgcgggcagaaacccagcgctgcggctgcagtcgagtgccgtcatcaccggtgcggacacggtgctgcgggatcaggcgcggttgacgatacgtaaggccgagttgcagttggaggagtcccaggcttgcctggccatggagcgaccgcccctgcgtgtgctgattgacagccaaagacgagtgcccccgaacgctgcctttttcaccgccggcccgacgttggtggcgaccacttcgacctcgctgaccgatccgggcgagggccaggagttactgatgtttgacgcggtcgacgggcaggtgccgcttgaagcattgctcaagaccttggcaaaccgtggagccaacgaggtactgatc

SEQ ID NO: 21344 - DNA, 381 bp, Enterococcus faecium
aacaaaaagaacaacggcatgatgaaaaatgccttgtattatgtcctcgtaatcttagcgatggtaatggtcgtttattttatttttggtaataacggccagcgatcgtcagatatcgagtactcaaaattcacagaacaactacaagcaggcaagatcaaagaatttgaagtgcagcctgcaaatggtgtatataagatcactggtgaatacaaagaacagcagaccgtcgctaacagcggtgggttagctatcttaggttcaacagatacgactactaaccatttcacaacgatcattttgccaaatgatacaacattgagccgagtgacaagactggcggaagaaaacaaagttgctacaacagtaaaagaagaatca

SEQ ID NO: 21345 - DNA, 824 bp, Enterococcus faecium
atgaatatccagcagatgaaatacgtggtcgctgtagcaaacaatggtagtttcagagaagcggcaaagaaaatgtttgtctcccagccaagtctttcagctggtatcaaagaattagaaaccgagttagggatcacgctgtttactcgaacgaatcgaggggcatatttaacagaagaagggcaagacttcttaaatcgtgccgagaaaatattggtccagcttgatacattagaaactcactatctaacgagtgaaaagagagacaatttttcgatcgctgcccagcattatgatttcttaggtcctttgaccgcacagctactcgaggaattcaaagacgagatcaaacaatttcggatcatggagacgacaacagcgagagtgatcgaagaagtcaaagagcagcacagtgagatcggcattatttatatgaatgagcataatcaagctggtatcagaagatatttacaactaggagagctaagtggccgcagcattggaaaattcaaaacgcatatttttttaaggcaaggacatccattagctgaacacgcagagatcaccaaagaagaattgttatcttatcctcaagttcgttttacacaggatggaaataatttcccgtatttttatgaagaccttatcgagatccctgatcaagaaacagtgatttatacgagtgatcgaggtactttgatgaatatcgttcttgaaactgatgcttacgcttcaggatctggtattgtgattggagggattcgcgagcatttgcggttaatccctttggcagaaggcgaactaaatgaattttatatcattta

SEQ ID NO: 21346 - DNA, 219 bp, Enterococcus faecium
tctgtaggaaaaaaggtcggcaacgcggtaaaccgcaatgaagtcaaacgaaaaatccgagcagcagtttattctatagaagaagagattgatccggagttggattttattgtgattgctagaccaagtgtgaaggggttgacttatgatgaggttcgctccaatttagtccacgtcttaaaacttgcaaaaataatcgacagagaggaaaagagtaag

SEQ ID NO: 21347 - DNA, 459 bp, Enterococcus faecium
atggggtctttccgtcctgtcgcgggtaacctgcatcttcacaggtactaaaatttcaccgagtctctcgttgagacagtgcccaaatcgttacgcctttcgtgcgggtcggaacttacccgacaaggaatttcgctaccttaggaccgttatagttacggccgccgtttactggggcttcaattcgtaccttcgcttgcgctaagcactcctcttaaccttccagcaccgggcaggcgtcagcccctatacttcatcttacgattttgcagagacctgtgtttttgataaacagtcgcttgggcctattcactgcggctgatcgtatgatcagcaccccttctcccgaagttacggggtcattttgccgagttccttaacgagagttctctcgctcaccttaggattctctcctcgactacctgtgtcggtttgcggtacgggccgctgttttctcac

SEQ ID NO: 21348 - DNA, 153 bp, Enterococcus faecium
atgatgctacgtgtagaaaaattgcgcaaaaaaatgcaagaagaaaatttggattcatttttggttaccagtccgtacaatcttcgttacttaacgaactttacaggtacgacagggttagctgttattactttggaaaaagcattttttatt

SEQ ID NO: 21349 - DNA, 411 bp, Enterococcus faecium
ggtacaggaatatcaacctgttatccatcgcctacgcctgtcggcctcggcttaggtcccgactaaccctgggcggacgagccttccccaggaaaccttagtcattcggtggacaggattctcacctgtctttcgctactcataccggcattctcacttctaagcgctccagcagtcctcacgatctgccttcaacgcccttagaacgctctcctaccaatacacctaaaggtgtactccacagcttcggtaatatgtttagccccggtacattttcggcgcagggtcactcgactagtgagctattacgcactctttaaatggtggctgcttctaagccaacatcctagttgtctgtgcaaccccacatccttttccacttaacatatattttgggaccttagctggtgg

SEQ ID NO: 21350 - DNA, 1090 bp, Enterococcus faecium
aattcgtataaatcatcggttttaaatgttgcttcaattgtattgcttacaagaatgtatgttggagcagcaactcaaatttttgctattccagactttttagataaaagcttggtagttttttgcgctatactctgtgcgattcaaatttctgtgagaaaatataataaattagaatttataggtcttttcttttttggaataattatagtgatttctgcaattctttctaaagagtatacttttttatatacttttatgctggtattgttaattggtaagaatagcgtaaagagttttttgagttactattttagatattgcgccgctttgttgatttctataaatattatttatgtagcagggctagctctggggatggttgagttatctataaaaaatggccaaaattgctttaccggcggatttgctacaggaaatgcgtatgcatttatcgtattttggttagtatcgttgtatttatatattcattttgatgattgcaagattgggcatattataggatttactgtattatcttttcttatttcatatatttctttatgtaagacggtaatggtattatcaattattaatggaatagcaatcacactattaaaaaacggttggtatcctaagaaaatattggaatttttagcaagatggctttttccagttttgggagtcgcatattgtagtgcaattactatatttgcaaataaaatgggttcaaactatgcggccgtatttgccatagatcattttttaacaggtagaattcgaaatgcagcatattattatgaaaaatttggttttactttttggggaagagaaatatcaaaaggagcaattagttatgatgactattacagattgacaagtgtgactattgatgggctataccccttgttgtttctccaggttggattctgtatgtttattttgttatgcttagcgtttgtcttagtgaaaaaaaacaaagaagtcggcagggtggagttgtattttctgatagtttatgtgatatttgggttaagtgaaatgtttgttgctaacggaataatttgttttcctcttctgattcttgcgg

SEQ ID NO: 21351 - DNA, 1281 bp, Enterococcus faecium
ttgggcggcattgtagctttgtttgactttggatttaatactacatttgcaagaaatataacattttgttggagtggtgcaaaagcactttctaaagagtctgttgaatattcagattctttagaaccagatttcttgttaataaaaaaggtactagcaacatgtcggataatttatcttatgatttcccttgttgctttaatatgtattggtttattgggttcagtatatatatattatattgggaaagaactgactggatcggattatttaattgcttggttgatttattcaatagcgatttttatgaatctttattatggatattatgattcatttcttcgtggaataggtgcaattgcagaagtaaacaaaataaaaatatattcaagagtcattcaaattgtgcttgttgctgttctcttaaatttgggattcgggattattggggctagtttagcatatttgggttatggtatgtttttccgaatagttgctaaaagaaaattttttgcatcgcataatattggaaaaagactaaacagtattacagaaaaagttacaagaaaagatatccaagagatctttaatttagtgtggcataatgcatggagagatggattagtttcggtggcaaactatttatctaatcaggccacagtgttgatcggctctctttatctgacacttgcagaaacgggtgcatattctctagcggttcaattggcacaagctattgctcaaatttcatcagcactatatatggcctatcaaccaacattgcagtctgcatatgtagcaagaaataatgaaaagataaagaacacattgtcagctattttattgtcttttatctgcctatctatcgccggatttggagcactatttgtcattggtctgcccattattcgaataattaagccaaatgcaattttgaatcctatagcaattttggctgtgggtatatatcagtgtatgcttaaaggccgaaattgttatacatcatatatttctagtactaatagagtgccttatgcccgagcttttgttgtatcaggtattttatgcgttactttgtcttttatttttgaagagtttattatacgtggaatttggggattaatttttgctcaaataataagtcaggcagtttttaattcgtggtattggcctatgtttgtgcataaagaattaaaattgaagatttttgaagtttttccgcgtggatggaaagaattaagactattttacaaaaaagatgccgtaccaaggcaatttgat

SEQ ID NO: 21352 - DNA, 366 bp, Enterococcus faecium; identical to SEQ ID NO: 20981

SEQ ID NO: 21353 - DNA, 318 bp, Enterococcus faecium
ttagatgacaaagagatttcttatttgaactctttcgtcactacactagtttctgactggatgaatgaataccatgtctttttcaaaagaatcaacgcagaacggtttttcttcgtcgcacagatgatcgatctgaaaaagatgatggataaaaaatttgatttgctggatcgctttcgagcagaagctgaaaaacagagctcgcctatcacccttagtatggggattgcttatggctcaagaaccctcgatgaaatcggtggagaagctctgagatttccggtggacaaaaacaacgggtcgccgccgcacgtgcat

SEQ ID NO: 21354 - DNA, 369 bp, Enterococcus faecium
cataaaatgatggatggacctgcggataaaagctacggcatacatgtggcaaagatcgcaggattgccttccaatctactagaacgagcagcagatatcctgcatacgctagaaaatggcgataacggacaccatactgttccagctgaagtagaagagaaaactaaaacagccaaacaggagcaaataaaaccacctgcagagaaagtaaatcaagaccatatacaagaccgtgtaaaagaagaaaaccaacagctttctttattcagtgaattatccgaaaatgaaacagaagtcattgaatcactgaagcaaataaatttactaggaatgacgccaatggatgcactaaacaccttatatgaatta

SEQ ID NO: 21355 - DNA, 219 bp, Enterococcus faecium
atgtcactactatgtaaacttgtacctgaacgctgtattgcatgcggtctttgtcaaatcgaagcgccagatattttcgattatgatgaagaaggaatcgttttatttgcccaagaaccagaggctcatcaacagttcgtgatgccggaagaagaaacatatgtaaaaaaagcgtatcaaaaatgtccagttcgagcgattttattagaaaataaaata

SEQ ID NO: 21356 - DNA, 738 bp, Enterococcus faecium
ttggttctttcacaagatgatgtcagctattatgaatatatggataattccggttttcctagccgattggtcgtatcaaataacaatgaaatcaaaaatgtctataaagagaaagataaagaagaaatcggtgactttgacatggttcctctgattgatgcctttgtcaagaaacatcctgatttttcttatcgaggcgcaaaaggtaccttggccctgacaggttacaacggagttttaggttatcgaacatcaaaatctcaatatggagacaatgaaaaaacaaaaaaagagattaaagaagctaaaaaagtggcggaacagttgaagaaagacggctggagctttgcttcccatacatggggtcacttgaatatgactcaagcttcactagaagatgtaaaaaaagacaatgaattgtggcagcaagaagttgcacctatcctaggaaaaacaaatattctgatttatccatttggtgcagacatcagcgactggcagccttattcagcagaaaatcaaaaatttgcttacttgaagagtcaaggtttcgatattttctgtaatgtcgatgcttctacaccagcttggggacaattaggtacggatttctatcgaaatgctcggatcaatatcgatggcattcgttttcaatctgatttagacggaaaaaatcctattcttgatccattcatcaatgtccatgatgtctatgacaaagaagcacgcgaatctgct

SEQ ID NO: 21357 - DNA, 1089 bp, Enterococcus faecium
tcgatgaaaaaagttttagttgctaacaggggtgaaatcgctgtacgtgtatttcgtgcttgtacagaattaggaattaaaactgttggaatctatgcagaagaagatgaatattccgtacaccgtttcaaagcggatgaagcatatttagtaggacaaggaaaaaaaccgattgatgcgtatctagatattgaagggatcatttctatcgcgaaagaatgcggagctgacgctattcatccgggttacggtcttttgtcggaaaacttgaattttgcgcaacggtgcgaagaagaaggcatcatttttgttggacccaaactgcatcatttagatatttttggagataaaatcaaagcaaaagctgcagctatcgaagcggggattgcttcgattccaggcacagatggaccaatcgcttctatagacgatgccttggagtttgcgaaacaatacggttatccgattatgatcaaggcagctctaggcggcggcggacgcggcatgcgtgtagctcacgatgaaaagagtgcaagagagggctacgaacgtgcgaaaagcgaagcaaaagcagcctttggtagtgatgaagtgtatgttgaaaaatacatcgctaatcctaaacatatcgaagtacagattctcggggatacgcatggaaacgtcatccatctttttgaaagagattgttctgttcagcgccgtcaccaaaaagtagtagaagtagcgccttgtgtctctatgaatgaacagcaacgtcaaaaaatctgccaggcagctgtccaattgatgaaatatgtcgggtatgtcaacgcaggtacagtagaatttcttgttgaaggagatgatttttactttatcgaagtcaaccctcgcgtccaagtggaacatacgatcacagaaatgattacagatattgatatcgtaacaacgcaactgttgattgctcaaggtttggatctgcataaagaaatcggattgcctcagcaagaaggaatcaaattaaatggttcagccattcaatgccgaatcactacagaagacccgttgaataactttttaccagacacagggaaaatcgatacgtat

SEQ ID NO: 21358 - DNA, 477 bp, Enterococcus faecium
ctgaaaatgaaagaggaaggcaaggccagcaaggcgccgatccgcgaatccttcggcaaatgggaaaacctcaagatcgtgctgattgcgctgttcagcatcaacgccggccaggcagtgacgttctatgccgcgcagttttatgtgctgttcttcctcacgcagtttttgaagatggatccggcactggccaacatgctgctgatcatcagcgtggtgattggtgcgccgttcttcatcttcttcggctggctttcggacaagctggggcgcaagcggatgttgatggtcggcctgctgctggccaccgcgctgtacttcccgatcttcaagggcctggcgcactacaccaacccggcgatggaccacgccagccgccagtcgccgatcaccgtattggcagacccggccacctgcaccttccagttccgcccggtgggcaaggcgcgttttgacagcccctgcgacaaagtcaag

SEQ ID NO: 21359 - DNA, 534 bp, Enterococcus faecium
ttgaaagaagaccaagcagcaatcgatcaagatttagctaatcttaaaaataaagtgggaaatgaccgtgcacaacttgagaaaaagcttgccgaagcgaaagcaaaagcggaagctgtccaaacagatcttgacgggaagatccaacaagcaaaagaattcaatcagcaattaaatcaggttgctcaaacagcttctggaaagctaagtcaaactcaagcggatatcacagcggccagtcaagcaatccacggaaagatcagcgaagcacaaacagttgctaatgattttgaagcaaaaaaagctgacttagcagctagtttccaacgaataaaagatattttgcattcggcaggagaaaaatcagtgacctctggaagcacgacagaaacagttcagcaaacgacagagccatccaaatcaacaagtcagactttgccaaaaacaaatgaaaaaacagcttctgtcaattattccttcgtaggcacaggtgtgctagttgcagcagcttacggaatcatccgcaaaaagaaa

SEQ ID NO: 21360 - DNA, 168 bp, Enterococcus faecium
gtgagagaaaacttcgatcttcggccagcaggaatcatcgagatgcttgatttgcgtcgtccgatttacaaacaaacagctgcttacggtcattttggtcgtacagatgtagatttgccttgggaacatacggacaaagtagatgcgttgaaagcaagtttagcaaaa

SEQ ID NO: 21361 - DNA, 96 bp, Enterococcus faecium
ggtactttacaagaatctcgtaaacgtgaattctacgaaaaaccaagtgtaagacgcaagaaaaaatctgaagcagctagaaaacgcaaaaaattc

SEQ ID NO: 21362 - DNA, 144 bp, Enterococcus faecium
ttgaagaagggcggtacactgacaattgtgatccagaagaaacaaggcgcgccgagtgcgcaaaagaaaatggaagaaacatttggcaatgcagaaatcgtcacaaaagataaaggatattatatcatcaaaagtgtgaaagag

SEQ ID NO: 21363 - DNA, 954 bp, Enterococcus faecium
gtgttagaaatgaattattgcagtcagtgtggagagaagttagcgaaagattcgaatttttgtgaaaaatgtgacaagagcgtgaaaggcgaacaaattgttaggcagtttgaaactcaattaaatgtttttcgcttgaatcaaaggaaagttagccgctttattagttttatcaaaaataatttgattgttatatttacttttataatgattactatgcttatcctaacaattaaacccattttggggtggatgttttttgttgtgtctattatttttggttattggtatgcaaatagtaagaacagttcagaacatctattgaataaaaagatgaaagaaaaggttatgatgcttgataagcaggaaattaaagagttcacaaatggtttgcttcaaacagctacccaaaatcttacggttagaaatgaacatatagaacaatcatcaaataatagaaatgaagttttggaagataaaaatgaataccgtaacgaatcagctagaatgaattatagctgggtcgtctcgtttatcggcataatatgctattatacaggcgttttcttagcaccaatacttcagggtgagattagcggttttggttatgggatagacactaccattactttatatgattatttaacgtttctttctaagatggatggtggctatcagtttttattaattgttattctgataattccgatgatttcatttatcttgttgttcataaatcatgtgataagcaaatttttccaaatattactacttatagcgaatggattatttttgtttaaaatactttctgaaataaaaacttattcagtttcttcagagtattttgatataagcagttcaaattctgtcggatttgggattttattagtagggatgggcattattctgatgatagtaacaactatatggaaagtgatgaaggagcaagacaaa

SEQ ID NO: 21364 - DNA, 501 bp, Enterococcus faecium
ttagcaatcattttgttagtgggcctatgtttgtatgctctgccgacccaaggattcgctgtcgcgggtggtcatggtggaggtacatctagcggtcgaagttcgggcagaggttcatttggcggtcgttcatatgggggcagttattttggcagtcgttcttacggcagagattcttatgggtattatggtccaagtacaggtccttctagttatgagcaaacggggtttcttgcattagctgttttgtcagtaggaggggtttctgctttttctatcgtcaagaataaaagacaaaagaaaaggctgaaatcggagatattgtcccgcatgtcaggaacggctaaagaaaagaaagcacagtttttggaaatccaaaagatattcatgaagatccaatccgcttgggaagaagaaactcctgaaaaagccagaagctgttatacagacaagctgtttgccgaacatcagaaagttctgcaaaaaaacaaacagacggtg

SEQ ID NO: 21365 - DNA, 147 bp, Enterococcus faecium
atgttgatcgatgttcgcgagttaggtataaatggaaaagaagcagagagcattttggacagtgtgaatatcactgtaaataaaaactcgattccttttgaaacactaagtccattcaaaacaagcggtattcgaatcggcacgcca

SEQ ID NO: 21366 - DNA, 927 bp, Enterococcus faecium
gtggtatctttgtttatgtatgctacgcaatcaagtggtttgtttgtagtaatgttcgttcttctacaaaatgtatctacaggtttagatatatattttgagagttcgataatgagttggataacggctgagaaaaaagatttcggaaaatacaggatgtttggttcactggggtatgcaactagtggattttggatttccctatttttagtgttactacgaaacgtatcttatatgctcctgttagcttgtgcaataaatctcgtcttattgttttcgaatataactaaaccaattccaaatacaatcgagaaaattacaattgaaaaaatccaaggcaaaaaggtaccgagaatctattatttattttttgcattttgtaccttaataattacactaccaaattcatttggctatatactaaatagtcacttgagaaatgaatatgatcttgatctgaataaagctactttttacgcaagtattgcagtattcatcggttcctgtatatcagaaatgtttggattttttgctgtcgattctgtgattcgaagattttcaccgttaaaggtggtttttataggctttattttttcgggtcttaggtggttctttgcgcttgtaagtacttctgaagaaatgtttatttcgacatatctcctccatggaatcagttttgctttcatttttataggtagcatacattttattgctagtgtatcagatactattgaaatgggggagttatcaatgagattttctttttttgcaaatatcatgggaatcattttagcacagctatattcaattatgttgccatatattggtactcaagggataatttgggtatttttatttgtctgcattgctagcttccctatggttattttgattttaaggagacaacacaatgaaatacttagcaat

SEQ ID NO: 21367 - DNA, 996 bp, Enterococcus faecium
atgggattttttgataaaatcaagcgtgcttttactggcgaagagaaaacagaagaagttgaagtacaggagaagtacgacaagggtttagaaaagacgcgtaaaacatttggtgaacggatgaatgagttgtttgccaattttcgaacagtcgatgaagacttttttgaagaattagaagaaacacttatcggtgcagatgtaggttttgaaacagcgatacgaatcaccgaagcattacgtcaagaagtgaaactcagaaatgcgaaaaaatcggcagaagtccaaaatgcgatcatcgagaaacttgtggatctctatgaagcggaaggaatcaatgaagtaaatgaactaaatatccaagaagacggactaacagttattttgtttgtcggtgttaatggtgtagggaaaacaacaagtattggtaaacttgcccatcagttcaaaaacgaaggtaaaaaagtattgatggcagcagcagataccttccgcgctggagcaatcgaccagttagttgtctggggcgaacgcgctggtgttgaagttgttcgtggcaatgcaggaggcgatccagcagctgtcgtattcgatgctttggaaagagcaaagacagagcaggcagatgttttactagttgatactgcaggccgactgcaaaataaagtgaacttgatgaacgaattagaaaaaataaaacgagtaatccagcgggaattaccagaagcaccccaagaaacacttcttgtattagatgcaaccactggtcaaaacgcgatggttcaagcaaaacaattcaaagaaacaacagatgtgaccggtcttgttttgacaaaattagatggtacagcaaagggcggtatcgtacttgctatccgtaatgaattgcatttaccagtgaaattggtcggtcttggtgaaggaatcgatgacttggagccgtttgatccaaatgattttgtcgttggattgttcaaaggattactaaaagaagaa

SEQ ID NO: 21368 - DNA, 888 bp, Enterococcus faecium
atgaaaagtatgactggttttggcaaagccatccgcgaaacaaaagcgtatcagttagatattgaaataaaaagtgtcaaccagcgttttctagatgttcaaatacgaagtcctaaaatcctgaactttgttgaaaacgattttcgtcagcttattaaacagcagttaagccgcggtcgaatcgaagtatttgtgaatctagcttatattggcaaaaacgaaaaacagatcgtcatcaactgggaattgattgattcacttatcactcaattgacagacggaattcaacaacgatacggtagtcaaaatcaagtgtcaattagtcggatggcggaacgcttcgcgctggacgaaaacttcgtaacggtagaagaaaaaccggaagagagcatggaagaattggcacagttagctctagatacattgaaaagcgcacttgattctattgaggcgagtcgagaaaaagaaggtcaagctttagctttagtgttgaaaaagaatactgaagaattcaaagaagtactaaaaaaactcgatagttttgtagaaatctatgaaaaggaatttcaaataaggtatcaaaaaaagctggaggaatttcttggagcgaaagtcgatgagcaacggttgttgacggagctagccatcttgttggaacgcggagatattcacgaggaactggatcgtctggcgatccatgtacaaaaactagatgaacttatcgaagcacaatgtcctgtaggtcgggaattagatttcctgatccaagaaatgaatcgggaaatcaacacgatcggttccaaatcaaatgcaatcgaaattaaaaatcaagtcgtccagtctaagacgatcttagaaaaaatcagagaacaagtacaaaatattgaa

SEQ ID NO: 21369 - DNA, 1455 bp, Enterococcus faecium
atgaaaaaatttccagaaggatttttatggggcggagcgacagcggccaatcaatgtgaaggtgcatgggatgtagatgaaaaaggattatctgtgtctgatgtgtatacattcgacagcgatttacctaaagaaaaatggacagatcaatggcatatgatgacgcatcagcaagtaaaagcggcgcaggatcccaacagcaagtattattatcctaaaagacacggaaatgatttctatcatcactttaaagaagacatccgtttatttgctgaaatgggttttaaatgctatcggatgtctatcgcatggacaagaatttttcctcatggtgatgaagaaacacccaatgaagcgggattatttttttatgatcaagtgtttgacgaatgtctaaaatatgggattgagccagtcgtttctctttcccattatgaaatgccgttatatttggttacagaatatggtggatggcctaatcgaaagcttattcagttttacgttcgtttcgctgaaacagtattcaaacgctataaaaataaagtaaaatattggatgactttcaatgagatcaactgtgtaaaacatcacccttttgttagcgtaggagtaattgaagaaaaccatccccatttggaacaagcgaaataccaaggtgcacaccatcagtttatagcaagtgctttagctacaaaagcttgtcatgaaattatcaaaggttcacaagtcggttgtatgatcagctatcagcttcttgttccgtattcttgtgatccggatgatattcaaaaaacaattgagcagcaaagaacttctttgttctttagtgatgttcaagcaagaggatattatccagcgtatacgcaacgaatgtttgaagaaaaaggtgtcaacttaaaaatagaagtaggtgatgaagaaatcttagcagcctaccctgttgattttgtttcttttagctactacatgtctagtgcagtcagtgctcatccagaaaattgggaaggggtccaaggaaacttaataactggaggaattaaaaatccgtatcttccatcaagtgaatggggctggcagattgatcctaagggtttgagaattgctttgaatcaattatatgataggtatcaaaaaccactgttcatagctgaaaacggactcggagctatagacaaagtagaagaagatggaaccgttcaagacgattaccgcattgactatttgaagcagcatattgagcagatgaaggaagctatcaaagatggagtagatttatttggttatacgtcgtggggctgcattgatatcgtcagcgcttctacttcacaaatgtcaaaacgttatggatatatctatgttgatcaagatgacgaagggaatggcacaaagaaacggttaaagaaaaaatcatttgattggtacagacaagtcatccaatcaaatggcgaaatccta

SEQ ID NO: 21370 - DNA, 1293 bp, Enterococcus faecium
atgaatgattctatcaaaaaaatgctgcgattaatagagaaagatttgatgattacagaggtctcttacgagacctttcagaagaaaaagacgttgatcgtcgatgctgttttctcacctgctccccatacctgtagaaattgtggttctactgtggtagatggaaacgggaaagtaattgtagtgaaaaatgggaagaaggaaacgattgtccgctttgaacaatacaatcacatgcctttggttatgcgcttaaaaaagcagcgctatacctgtaaaaactgtcgaacccattggacggctcaaagttattttgttcaacccagacattcaatcgcgaatcatgtcagatataaaattgcttctttactgactgaaaaagtatctttatcttttattgcgaaaaattgtcaggtatctttgaccaccgttattcgtacgttgaaagagtttaaaagctacttaccaaagcaatctaagaggattctccccagagtattgatggttgatgaatttcgttcgcacgcttccatagaagataaaatgagctttatttgcgcagatggcgaaacaggacaattaattgatgtcttgcctacgcgtaaattgcctcgattaacaagctatttcttaggctgcactaatcctaaagaagtaaaatttttagtcacagacatgaacgccgcctacttccagcttaccaaacgtattctgccaaatgcgaaagtagtgattgatcggtttcatattatcaaacacatgaatcaagcctttaatgagttgcgtatccgtgaaatgaatgaacttcgtaaagtaggacagaaaagtcaggcagaaaaactgaaaaagaactggcgctttttgctaaaaaatcgtgcaaacatcaaccattatgaatacaaaacatggaaaagttttcgagcaccaaaatacccatttcttacggaagcgatgatgattgatcgattgcttggcttttctacgtccctgaaggaggcgtatccctattttcatgaattagttgaagcctttcgagacaaagaccctgacttatttttctccttattggcagaacttcccgaaacgttagatgacggctttcgggaaaagctccaaaaccttctgacctatgaagaaggcatcaccaacgcgatgatctatccttacaccaatggaaaaatagaagcgaagaatacccatataaagacaatgaaacgagtatcctacggatttaaatcatttgagaacatgagaattagaatctttttgatcaatcaattaatcaaagtaaga

SEQ ID NO: 21371 - DNA, 660 bp, Enterococcus faecium
tatgcatactatgaccataagaagggaaaggaagagactatgttttatcgatttatgcgcggggtagttcgagtactattagccttagttaatggaaatgcccgctatgagaataaagaagttttaccgcaagatgagaattacatactagttgctccccatcgtacttggtgggacccattatatctggcggtagctgcagcacccaaggaattcagctttatggcaaaagaagaactgttcaaaaatccagttctgcgatttatattaactcgatccaatgcttttccagttaaaagagaaaatccaggaccaagcgtcattaaaacacctgtaaagattttgaaatcgacaaatttgagtttgatcatgtttcccagtgggacaagacatgctacagaacttaaaggcggaatggcattgatttccagaatgtctaaagcgaaaatcgtgccagctgtatatcaaggtccgttgacacttggggatctgttcaagcgtcagagagtgacagtgcgtttcggcgaaccaatcgacttatcagatatcaagaaaacggataaagaaggtatggcggagatcgaacgacgaacacaagcagcttttgacaaattggacaaagaagtgaaccctgatttcaaatatgaagtcaaaaaaaaa

SEQ ID NO: 21372 - DNA, 1764 bp, Enterococcus faecium
atggatacagctgcaatttatcatcgaccggaaagtgaatatgcatttctatatacgaatacaagatttcgtattcggcttcgtactaggaaaaatgatatcaaaaaagtatatgtgctttgtggagatccatataccataacaactgaaaaatggtatcaaaaacaacgaccaatgaaaaaatgtctaagtaccaatgttcatgattattgggaaattgaagtgacgagcgaaacaaggcgcttacagtatgcgttccatgttgttggggaagataacacggactgtttttacggtgatcaaggaatttttccttatcgagaaaatgtgattactgaaccaaatttttattttcgaataccttattttcatcaaatcgatcgattcactattccagaatgggtaaaagaaacagtatggtatcaaatttttcccgaaagatttgcaaacggggacaaagcaaatgaccccgaacacactttaccttggggaagtaaagatccagaccgagaagacttcttcgggggagatttgcaaggtgtgagggatcatttggattacttgacggaccttggcgtcaatggcatctatttttgtcccatatttaaagccacatccaatcataaatacgatacgattgattattatgaggtggatcccgcttttggcgataaaaaacttttaaaaaacttgattgatgaagcacataaaagagggatacgtatcatgttcgatgctgtattcaatcatatgggtgtccattcaccacagtggcaagacgttctcaaaaacggagaaaaatcgatctataaagactggttccacatccgttttttcccagtagattcttatcagatgactgacttaccagaaactgctgaaaatatcccatatgatacttttgcttttactccattcatgccgaaactaaatacagcaaatccagaagtgcaaaaatatttgctggatatcgcaacttattggataaaagaattcgatattgatggatggcgtcttgatgttgctaatgaagtcgatcatcatttttggaaaaaattcagagaagcagttacagaaatcaaaccagacatctatatccttggagagatttggcattcctctcaagcttggctgcaaggggatgaattccatgcagtgatgaattatgcattcacagattcgattaaagattattttgcaaaaaagaaaatcacagcttcacaaatggtcagtggaatgaatcatcagcaaatgctttacagagatcaggtgaacgaaggaacattcaacttattagattctcatgatactgccaggatcttgaccctttgccaaggtaacaaagaattgatgaagtctgtgatggcctttatgtttcttcaaaaagggtctccttgtatctattacgggacagaaatagggatgactggtgaagatgacccggattgccgcaaatgtatgatatgggagaaggaggaacaagatctagagctattcggttttataaaagaacttgtttctctaaggaaacagttgtctaagattatttctgaaggttctactcagtggctaatagtatatgatcgtgaagataagctctatttcacacgggaactagagggacagatcatctatgtttactttaatcagtcaaaagaaccttgggtagtagaacaggaaaatgaggtgattcttagtcaaaattgtcagttgttagaagacgggaaagcagagatacgacaatacggatttttgatcatgtgt

SEQ ID NO: 21373 - DNA, 969 bp, Enterococcus faecium
atgtcaaaacattactttgacccaagattaaaaatttttgcgttaaattccaatcgcccattagcagagaaaattgcagcagcagtcggcgtcgagttaggaaaatcatctgttactcaatttagtgatggagaaattcaagtaaacattgaagaaagtattcgtggatcgcatgtctatgttattcaatcaacgagcagcccagtcaatgataacttgatggagttgctgatcatgattgacgcactgaaacgagcaagtgcaaaaacaatcaacgtagtcatgccttattatggctatgcgcgtcaagaccgtaaagcacgtgcacgggaaccaatcacagcgaaattagtagcaaacatgattcaaaaagctggtgcaacaagaatgctgactttggaccttcatgcagtccaaatccaaggtttctttgatattccagtcgatcatttgatgggtgcgccacttattgccaattatttcttagaaaaaggaatcaaaggcgatgatgttgtcgttgtttcaccagaccatggtggtgtcacacgggcacgtaaattagcggaatttttgaaatctccgattgcgatcatagacaaacgccgtccaaaagcaaatgttgcagaagtaatgaatatcattggacaagtcaaaggcaaaacttgtgtactgatcgatgatatgatcgatacagcaggtacgatcacattggctgccaatgctttgaaagaagctggtgcaactagtgtgtatgcttcatgtacacatccagtattatccggccctgctttacaaagaatagaagattcagctatcgagcgtctagttgttacagactcgatctatcttccagaagatcgtaaaatcgacaaaatcgatgaagtaagtgttggcggactaatgggagatgcaatcaaacgtatccatgaaaacaaaccagttagtccattgtttgaaacaaaaaataaa

SEQ ID NO: 21374 - DNA, 624 bp, Enterococcus faecium
gtggaattgtttgatagtttaagatttaaaattgttcgccgtgggatcaaaatcgttttcccggaagctactgatgctcgtattttaggcgcagctgcccggttgaaagcagaagaacttgtggaacccattttagtagggaacgaagaagaaataagaaatgcagcgcatgccagaggaatcaaaacatctagctttacgatcatcagccctgataattacgataagtgggatgaaatggtggatacttttgttgaacgtagaaatggaaaggcatccaaagaacaagcagaaaagattttaaaagatgtgaattactttggtacgatgcttacgtatatggggattgcagacggaatggtctctggagcgatccattcgactggcgacactgttcgcccagcacttcagatcatcaaaacaaagcctggcatcagtcggacaagcggagcgatgatcatggtacgtggaagagatcaagaaaaatatgtcttttcggattgtgcgatcaacgtgaaatccaactgcgcaagaattggctgaaatcgccgtagattctgcaaaaacagcagaattgttcgatatcgaaccaaaagtagcatgatgagcttctcgacaaaggct

SEQ ID NO: 21375 - DNA, 675 bp, Enterococcus faecium
atgattgctgacaacttgcagaaaatcaagcaagaaattcaggattcgtgtgctcttgttcatcgtgatccgaaagaagttacattagtagctgtaacaaaatctgttgaatccgctcaagctgaagaattggttagagctggcgttatgaattgtgcagaaaaccgagtagataaattattagaaaagaaacaagatttatttgattttcctgaaataaagtggcatttaattggtaatttacagcgcagaaaggtaaaattgattgtaaatgaaattgattactttcatgcgttggacagtttaagattagcagaagaaatccagaagcggttagagaaagaattatcctgttttattgaagtaaatgtttctggtgaggaatcaaaacatggaatttcaccagatgagcttttaccgtttgtggaatctttagctgcctgcacaaaaatcaaggttgttgggttgatgactatggcgcctaaagaagcttctgatgagcaaatccataaagtgtttggtacgctgaaagaattgcgtgatcttgttcaagcaaaaggttatgcccatgcaccatgtagtgaattaagtatggggatgagtcaagactttcaaattgcgattgaagaaggtgcaacatttatccgtgtaggaacagcgctattcaaagacgaa

SEQ ID NO: 21376 - DNA, 1167 bp, Enterococcus faecium
atgaaatcaagcaatgaaatagaaaaggctttatatgaaagttctaattcttcaatatcaataacaaaaaaagatggtaaatattttaatgttaatcaatttaaagatattgaaaaattaaaagaaattgaagaaaaaataattcaatatgatggattagcaaaactaaaagatgctaaagtagttagcggagaacaaagaataaatagagaagatttatctgacgaatttaagaatgttgtttcactcgaagctacaaataatactaaaagaaatattttatttagtagtggagtatttacaattaaagaaggtaaaaatatagaagaaaatgataagaattcaattattgttcatgaagaatttgctaaacaaaacaatctaaaattaggtgatgaagttgatcttgaattactagatattgaaaaaagtggaaaaataaaaagtcataaatttaaaattatagggatcttttctggtaaaaaacaggaaacatatacaggattatcttctgattttagtgaaaatatggtgtttgtagattattcaacaagccaagagatattaaacaattcagaaaataatgaaattgcaaataaaattttaatgtattctggtagtgcagaatctacagacttagccttaaacaaattgaaagagcttaaaattgatgagtcaaagtattttgttgaaaaagattctaatgcgtttgaagagtctttagagtcagtgagtggaataaaatatataataaaagtaatgacttattctattatgttaggtgggatggttgttctttcattaatcttgattctatggttaagggaaagaatttatgaaataggtatattcttatctattggaacatctaagatacaaattataatgcaatttatattcgagttaatattcatatcgataccaagtataatatcttccttatttttaggaaatgtattactaaaagtaattgtagatggattcattaactcagaggattcaatgatttccggtggaagtttaataaataatagtagttttatgtcaaatataacaacacttggacaaagttatttaatattaataagtattattgttttatcagttgtatttgcttcttcattaatgttaatcaagaagcctaaagaaatcttatcaaaaataagt

SEQ ID NO: 21377 - DNA, 975 bp, Enterococcus faecium
atggcacaaaaaacaatgatccaagcaatcacagatgccttagcacttgaactagaaaatgacgagaatgtcgttgtttttggtgaagatgttgggaaaaacggaggagttttccgggcaactgaaggattgcaggaaaagttcggagaagaccgagtattcgatactcctttagctgaatctggaatcgcaggattgagtttcggtcttgcgttagaaggatttcgtccagttcctgaaatccaattctttggttttattttcgaagcaatggacgaagtagtagctcaaatggctcgtacaagatatcgaatgagcggcactagaaatctacccatcacaattcgttcgccatttggtggcggtgttcatacaccagaattgcattcggataatttagaaggtttgatcgctcagtctcctggtattcgagtagtgattccttccaacccttatgatgcaaaaggactattgatttcttctattagaagtaacgatccggttgttttcctagaacacatgaaactatatcgctcattccgagaagaagtgccggatgaagcttacgaagttcctttggataaagcagcagttactcgtgagggaacagatgtatctattatcacatacggagcaatggtgcgtgaagcaatcaaagcagcagacaatcttgcaaaagaaaatatatctgttgaaatcattgatcttcgtacagttgcgccattagatgtagaaacgatcattcaatccgtggaaaaaactggtcgcgtagttgttgtccaagaagcacaacgacaagcgggcgttgccgcgcaagtagtttctgagatctcagaacgcgctatcctttcattagaagccccaatcggacgagtttctgcacctgatacagtcttcccatttggacaagcagaaaatgtctggttgccaaatgcaaaagatatcgaagacaaagtaaaagaaatcgcggaattt

SEQ ID NO: 21378 - DNA, 3531 bp, Enterococcus faecium
ttcgaaagtatgcaaataggtttggcttctcccgaaaaaatcagaagctggtcttacggtgaagtaaaaaaacctgagacgattaactatcgtaccttaaaacctgaacgcgaagggttgttctgtgagcggatttttggtcctacaaaagactgggaatgtgcctgcggaaaatacaaacgtatccgttataaaggaatcgtttgtgatcgatgcggagtggaagttactcgttcgaaagttcgccgtgaacgcatgggacatattgaattagcagctcctgtttcacatatctggtactttaaagggattccttcacgtatgggtcttgtattagacatgagcccacgcgctttggaagaaatcatttattttgcttcatatgtagtcatcgaaccaggaaatacgaatttagagaaaaaacaattgttgacagaacgcgaatatcgcgaaaaacgtgaacaatatggacaagaattccaagctgctatgggtgcagaagcgattaaacaattacttgataatgttgatctagatgcagaagcagccgaattgaaagaagaattgaaatctgcacaaggacaaaaacgtacacgtgcaatccgccgtttggatattttagaagcattccgcgcttcaggaaatcaaccaagctggatggttatggacgttatccctgttattccaccagatttacgcccaatggttcaattagaaggtggacgttttgcaacaagtgacttgaatgatctttaccgtcgtgtaatcaaccgtaataaccgtttgaaacgtttgttagacttgaatgcacctggaatcatcgttcaaaatgaaaaacgtatgctgcaagaagcagtagatgcattgatcgataacggtcgtcgcggacgtccagttactggaccaggtaaccgcccattgaaatctctttctcatatgttgaaagggaaacaaggtcgtttccgtcaaaacttgctaggtaaacgtgtcgactactcaggtcgttccgttatcgttgttggacctttcttgaagatgtaccaatgtggacttccaaaagaaatggccattgaattattcaaaccattcgtgatgcgtgagcttgttcaacgcgaactagcttcaaacatcaaaaatgcgaaacgtaaaatcgaacgtcaagaagacgaagtatgggatgttttagaagacgtaatcaaggaacacccagtattgctgaaccgggcacctacgcttcaccgacttggtatccaagcattcgaaccagttttagtacaaggacgcgcaatccgtttgcatccacttgtatgtgaagcttataatgccgatttcgatggagaccaaatggctgtccacgttccattgaatgaagaagcacaagcagaagcacgtatgttgatgttagctgctcaaaacatcttgaaccctaaagatggtaaaccagttgttactccttctcaagatatggttctaggtaactactacttgacaatggaagaagaaggacgcgaaggcgaaggaatggtcttcagagatcaaaacgaagccgttatcgcatggcgcaacggatatgttcatttacattcacgtatcggtgtgaaccctaactcattaggtgaaaaaccatttactgaatggcaaaaagaacgtacgatgatcacaacagttggtaagatcatcttcaacgagatcatgcctcctgaattcccttatctgaatgaaccaacagacttcaacttgaccgtccaaacaccggacaaatactttgttgaagctggtactgatattcctgcacatatcaaagagcaagaattagtattaccgttcaagaagaaaaacttaggaaacatcatcgcagaagtcttcaaacgattcaaagtaacagaaacttctaagatgcttgaccgtatgaaagacttagggtacaaacattcgacacatgccggtatcacagtagggatcgctgacatcagtgtactgaatgaaaaacaagaaatcattgaaaatgcccataaacaagttgaaactattacaaaacaattccgtcgtggtctgatcacagatgacgaacgttatgaacgtgtcattgctgtttggaatgctgcaaaagacagcatccaacaaaaactgatggaaggtttggaagcgaaaaatccaatcttcatgatgtctgattctggagctcgtggtaacatttccaactttacacagcttgccggaatgcgtggtttgatggccgctcctaatggtcgaatcatggaattgccaatcatttcgaacttccgtgaaggactatccgtcttggaaatgtttatctcaactcacggggctcgtaaagggatgaccgatacagccttgaagactgccgattcaggttacttgactcgtcgtctggttgacgtggcccaagatgtaatcatccgtgaagaagattgcggtactgaccgaggtcttgaaatccaagccatccgcgagggaaatgaaatcatcgaatcattagaagatcgtttagtgggacgttacacccgtaaagaagtacgtcatcctgaaacaaatgaattgatcattgcaggaaaccaattgatttccgaagacatcgcaaaacaaatcgttgatgcaggtgtcgaaacagtgacaatccgttctgtcttcacatgtaatacaaaacatggtgtctgcaaacattgttacggacgcaaccttgcaactggctctgacgttgaagtcggagaagcagttggtacgatcgccgctcaatcaatcggtgaacctggtactcagttgacgatgcgtacattccatacaggtggggttgccggagacgatatcactcaaggtcttcctcgtgtccaagaaatctttgaagcacgtaatccgaaagggcaagcagtgatcacagaagtaacaggggatgtcatcgatatctcagaagatcctgcaacacgtaccaaagaagtaacaatcaaaggaaaaacagatacacgtacgtatactgttccttatacagcacgtatgaaagtagcagaaggcgatatgatccaccgtggtgcaccattgacagaaggatcaatcgatccaaaacaattgttgcaagttcgcgatgtattatctgttgaaaactacttgcttcgtgaagtacaacgtgtttaccgtatgcaaggggtagaaatcggcgacaagcatatcgaagtaatggttcgtcaaatgctgcgtaaagttcgtgtaatggatccaggtgatacagatatcttaccaggtacattattagacatcgcagactttaaagatcaaaactacaatacgctagtctcaggaggcgttcctgcaacttctcgacctgtcttactaggtatcacaaaagcatcattagaaacaaatagtttcttatctgctgcatcattccaagaaacaactcgtgtcttgacggatgctgcgatccgcggtaagaaagatcctcttcttggtttgaaagaaaatgttattataggtaagatcatcccagctggtactggtatgcaacgttatcgtgac

SEQ ID NO: 21379 - DNA, 1572 bp, Enterococcus faecium
atgaaaaaacaaagaaaaatagtaatcaggtcaagtaaaatatataccaaaaaaggtttttcacctgagtcaggttatatttttattgaaggtaatataattaaatcaatcactaaagaaaaccccatatcagacgaagatgtaacttttatcgactgcaaaaacggtttagttaccgccggaaatgttgattcgcattgttttttttctggacatgctatgaacttcattggtgaagatttctctgacgtacaaacttctaatgatttatttactaaactgagtcacctgacaaatttggaagataataaagcaattattttaggtcatgatcttcctcaaaagtttactaatagtaaatatgcaaagaaactaaataagctattccccgacatacctactgtaattatggcaagtggtgctgaaacttgcttgttgaatagtgccgctgaatcaagatttaatttcactagtcaaacatgttacccagaagcatattggcggcttttgcattatgtatttagtgataaaaaattcattaaacccctgttcgtttcatatatgaagttcttaaatagccgaggcattacagcaattaaagaaatgggctttgatgatttttatggtttcactgatattttaaaagaactagaagaatcatccgatttatctctccgtgttaattttatgagtcaaccagtttccgaaaagatgaatatcgattatgcaaaaaaaatgagtgccctatttacaggtgatgctattagattttctggatttaacaaaatgaccgacggttcgattagtgaaatgaaaggtgatttgaagcagccctataccaataattctgaaattactaatattgaaaaaatcgattggaatgaaatcgaacgcgatttaaaaattgctgataatcacggatttcgtttttcgcttcacgcacaaggtgatggtgcagtttcaaaaacggtaagtttaatggaaaaatgtcaaacagatataaatgggaaacttctaaataggcattccattactgacttagaactgacagaaaaagatgatctaaaaaaaatgggggatttgggtattattgcagaaatctatccacaaattacatcactttatgataatcccctcgccaaagttaaacagattaaggaatacgttggacctcgtgcaaaatattactggaatcgcaaagagatgattaataataatattattcttagttgcggtacggatcttccattgctatatgatgatattcctgaatcaatatttaacgcatgtggtggatatttcacagacgactcattccagtttaattcaaataattgtctcaatgtgtcagaattaattgatgcctggacatctggaggtgcttataacttaggactagaagataaaataggaactttagaggcaggaaaacttgctgatattgtcatttattcagatgatttgttttccatccctataaaaaatgtaaaacaagcaaaggtcgtcaccaccatatatgatggtaaaattgtttttaaagatgacagcgtaattatcaattcaaatacaaaa

SEQ ID NO: 21380 - DNA, 300 bp, Enterococcus faecium
atggattctttgtcgaaaaaacttgcgatccaagtattaaatgatgaagcagaacggatcaaacgattaatccgaaatcaaaacaacagtctctgtatctcacaatgcaaagccttcgaagaagtggtagatacacagatgtacggcttttcccggcaagtcggttttgctgtccgtataggagtaatcggaaagaacgagggccagctgatgttaagtgagctagaacgagaattgaatcagttatatagtgaggtttaccaagaaatttatgataaaaaagaagttggcaaggaggaa

SEQ ID NO: 21381 - DNA, 1644 bp, Enterococcus faecium
atggataatcaaagaaaaccagcattagatcaattaacaccgcaagaaaaaatggcacgaggctctgcttggatgaccgccagtaatatcatttcaagattgctaggcgctgtctatatcattccctggtatgcttggatgggcgaaaatgctaaggctgccaatggattattcaatatgggatacaatatatatgcattgtttctactgatctctacagcaggaatacctgctgcgattgcaaaacaaactgcacgctataattcattgaatgaatatggcacttcacgacgattatttatccgtgcattacagatgatgggcgggttaggcctgttgtttgctttgttcatgtacatcgcctctccttggctagctcatgcttctggtggcggagaagaactgattccaacgatgcgttctttgagtatcgctgtattggtttttccttgtatgagtgtgatacgagggtattttcaaggcaatcaagaaatgatgccttatgcgctgtcgcagattgtagaacaggtggcacgtattttttatatgctattggctacattcatcatcatgaaagtcatggatggtgactatgtgacggcggtcacgcaatcaactttcgcggcatttatcggtatgctagcaagtattcttgtccttttgtattttttgaagaaacatcaagcgtatacatcggcgtttattcactacagcgaaaacaaaataaatattgcaacgaaggaattgttgttagataccgttaaagaagcgattccgtttattattgtgggttcaggggtaacgatcttcaaattagtcgatcagttcacttttatgaagatcatgtctgcatccaccgagtattccaatgcacagttactggatcttttttcgatttttagtgccaatccagataagttgacgatggtagttattgcattggcaacatcgatcgcgtctactgggttaccgttgattacagaagctgttacgttgaaagatcgagtaggtctggcaaaattgacaagcggaaatttacagttgttttcattttttatgtttccggcgacatttggtgttatgttacttgcctatccgctaaatacattattttatacaccggattctctaggaagtaatgtactgatccaagcaagttttgtaggactcttcctaggactatatatgctagtttccaacatgctgcaaggaatgtttgaaaacaaggcggcaattaattatttggttattgggtttctagtgaaactccttcttcaatacccagccattcgtttatttgaagtatacggccctttattggcgacaatgatcggatttgctgtgtcttgtaccttgatcttaaagagaatccatgaagtagcccgctttaaaccaagttttgtctggcgcaggacattgctgatctttattcttaccttgattatgcttttggcttcgtggatcacaaagatgatttttggtgcttttttaaacgaagatagcaaattccagtctctattgttgattcttgtagtagcaggtataggggctttagtgtatggttatttagctttgaaaatccgcttggcagaaagactactaggaccaggaatagcgcgtttacgacataaattaaaaataaaa

SEQ ID NO: 21382 - DNA, 585 bp, Enterococcus faecium
atggactatagtaatgaatatactgcttattctagagaaaacctgatgcaaaaaatacagatgagaatgagcgaacaacgcttcaagcatgtgcttggagtagaagaaacagccgtggctcttgccaaaaaatacggtgcttctcctgaaaaagctagtattgctgcattgacacatgattatgcaaaagaacgaccagatgaggagttcaaaatggtaatcgtaagagacggttttgatccggagttattgaattataataatgcaatctggcatggtcttgttggcgcttcgtttgtagagcgggaattaggaatcaccgatgcagagattcttcatgcaatccgggtgcatacgactggggctgctaagatgagtctccttgacaaaatcatttatgtagcagactatattgaaccaggtcgagattttcctggggtacaagatgcacgagccattgcatgggctgatctagacgaagctgtagcatttgaaacaaaacatacattggcccatttgcttgcgcaagaacaacagatttatccaaaaacaatcgaaacatataattactgggtagcaaaaaaa

SEQ ID NO: 21383 - DNA, 900 bp, Enterococcus faecium
atgttattaggctcacacgtcagcatgagcggaaagaaaatgctgttaggagcagcagaagaagcagccagttatggatcttcgacttttatgatctatacaggcgcccctcaaaacactagaagaaaagccatcgaagagatgaatattgatgccggaaaagcgtacatggcagaaaacggtctaacaaatatcgtcgttcatgccccttatatcattaatttggggaatacgatcaaaccagaaatgtttccttttgccgtccaatttctgagagaagagattgttcgtgcggaagctttaggcgctactcaaattacacttcacccaggtgctcatgtaggggcaggaacagaagccggaattgctagaattattgaaggcttgaatgaagttttgacaaaagaacagacggcacaaatcgctttggagacaatggcaggtaaaggtacggaaatcggtcgaacatttgaggaattagcgcaaatcatcgatggagtaaaattgaatgaaaaattatccgttacttttgacacctgtcatacgaatgatgccggttataatattaaagaagacttttcaggtgtaatggaagagtttgataagatcatcgggttagatcggcttaaagtactccatatcaatgattctaaaaatccgcaaggttcgcataaagaccgacacgccaatattggttttggaacaatcggattcgacacgctgaataagatcgtccatgatccaatgtttgacaatatttcgaaaatcttggaaactccctatgtcggcaaagataaaaagaaagcttacgcaccatatggaaaagaaatcgccatgttcaaagcacaaatattcgatccagaagtgtttcctgagttattagcagaagaagtgatactc

SEQ ID NO: 21384 - DNA, 867 bp, Enterococcus faecium
atgatcaaattaattgcatcagatatggacggcacattattagatgcccatatgagtgtttctcctgaaaatgccgaggcgatacgttttgcaaatgatgccggtgttgagttcatggtcgctactggtcgaaactatcaagaagctcgcgcagctttagatgaggtaggaatcgattgtgcgatgatcactttgaacggggcacaggtatttgataaagaaggaaattcattgtttaccgtgtcgattccaaataatcaagcaatctctgttttagatattctagatgctaacggtatttactatgaagtagcaaccaacgatggtctttattctgaaaatcaagcgaaacgaattgaaagttttgcttccatggtggctacccatttacctcaccttacgtataaaatggcgattgccatggcctcagctaagctggagttattgcacatcacatacgtggacagtattcgtgctattttggaagaaaagaatctggaagttttaaaaattatttgttttcatacagaagggccagctgtattaggtccagttggaaagcagatttctcttttaggcgatctagccgttacttcctctggtcaaaacaatatcgaagtgaaccataaaaacgctcaaaaaggaattgctgttgcccatgtcgctcacgagcgtgggatttctttagaagaagtcatgacgattggcgataacttcaatgatgtcagcatgctgcaagtagcaggagtcagtttcgcaatgggaaatgcagaaatcgaagtaaaagattatgccaaatatacaacggacacaaaccttgaatctggcgtaggaaaagccatattgcgcgcgattgcagaagacttg

SEQ ID NO: 21385 - DNA, 387 bp, Enterococcus faecium
atggcagcaaaaaaagtgaatcgtaaacgccgtgtgaagaagaatatagaagcaggtattgcacatatccattctacattcaataacactatcatcatgatcactgatactcacggaaatgcattagcgtggtcatcagctggttcattaggtttcaaaggaagcaaaaaatcaactccttttgccgctcaaatggcagcagaaactgctacaaaagcagcaatggaacacggattaaagactgttgaagtaacagttaaaggacctggttctggacgtgaagcagcaattcgttcattacaagctacaggtttagaagtgactgcaattcgtgacgtgactccagttcctcataatggtgcccgccctccaaaacgccgtcgtgtt

SEQ ID NO: 21386 - DNA, 1641 bp, Enterococcus faecium
atgatacaagaacaaaaatggtggaaagaagcagtaggctatcaaatctatcctgctagtttcaaagatagcaatggcgatggtcaaggagacatcaatgggatccgtgaaaaacttaattatttgaaagatcttggtatcggctttatctggatcaatccgatctatcaatctccatttgtcgataatggttatgacgtaagtgactatcaagatatagaagagagattcggaacgatggaagattttgatttattgctaaaagaagcacatgaattagggatcaaagtgattatggatcttgtcatcaaccatagttcggatcagcatcaatggtttgaagaatcgaaaaaatctaaagaaagcccgtatcgcgattattacatttgggtcgacggggtagatggcaaagaaccgaataattggacatcgattttcggcggttctgcttgggagtattctcatgaaactggacagtattatctgcatgtttttgcaaaagaacaaccagacttaaattgggaaagcgagaaattgaaagaagaactattcaatatgatccgatggtggttggataaagggatagatggatttcgtttagatgcgatttctcatgtaaaaaaagatgaatattcagtaaaagccacagagaaccctttctcaccctttcaaaatgtctcaggaatcgaagaacatttgaccgatttgaaacatgtttttgaagagtacgatatcatgactgtcggagaagcaagtggtgtcactgcagaagaaggaccacaatgggtagggaaagacggttatttcgatatgatattcgaatttgatcatatccatatctggcagcaagaaaaagaagggcaattagatgtccttaaattgaaacttgcattaagcgcttggcaaacttcattggatggtatcggatggaacgctttatatatggaaaaccatgatgttcctcgtgccgtttcagtgtttggagatactcgtcccgatttttgggctatgtctgcaaaagcaatcgctatgatgtatttctttttgcaaggtacgccatttatttatcaaggacaggaaatcggaatgacgaatatgccctttgaatcgatcgatcaagttgatgcagtagattcgaaaagactttataaaaggctgcttgcggaaggtaagacaagagaagaagcattggatatcattcgtgaaacaacgagagacaacagcaggacacccatgcaatggacttcggaacaatatgctggtttttctacacatgaaccttggctgatcactaatccaaataccaaaacgatcaatgtagaacaacaagaatatgaaccagagtcggtcctgcaattctataagaacatgatccgcattagacaaaccaataaaggtctgatatacggttcttataaagaatatcttcatgaacatccacaactttatgtctatgaaagatatttagaagatgaacaatatcttattatggtaaacttaacagaatcacttgctgactatgaacttccaaaagaagcagatcagtcctggacattactcttgtcaaattcctctagcggagaatttgaagctaaaggcatactagcaccttatgaagctcggttatataaaacaaacaag

SEQ ID NO: 21387 - DNA, 1149 bp, Enterococcus faecium
atgagagcagtacattttggtgcaggaaatatcggtcgaggatttattggagaggttttggcagctaatggatttgagattactttcgtagatgtgaatcacacgatcattgatgctttaaatgaaagaaaagaatacgaaatcgaattagcagatgaatcaaaagaaaaaatcactgtaaaaaatgtcaaaggaatcaacaatcaaacaaatccagaaaaagtaatccaagaaatcgctgaagcagatttagttactaccgccattggcccgaatatcttaccttttattgctgagttgattgcaaaaggtatccaagaaagagaaaaggaaggaagcacaacatctttagatatcattgcctgtgaaaatatgattggcggttcagcatttctagaaaaagaagtgtataaatatcttccggaaacatcatttactgacaaatatatcggctttccaaatgcagcagtcgatcgaatcgtcccattacaacaccatgaagatcctttattcgtccaagtggaacctttcaaagaatgggtcattgacgatagccaaagaaaaaataaaaaaatccaattaaaaggggttttatatgtagatgatctagaaccatatatcgaacgcaaactatttagtgtcaatactggtcatgcgactgtcgcttatacaggtgccttgttaggttaccagaccattgatgaagcaatgcaagatgcgttagttgtggcacaattaaaatcagttttgcaggaaacaggaagtttgctgattgccaaatgggggtttgatgcagagcagcatcatgcgtatattgaaaaaatcattcatcgcttccaaaacaaaaatatctctgatgcgatcacacgtgtcgctcggacaccattacgtaagttaggttatcaagaaagatttacacgtccagtgagagaactacaagaacataacttgacttgcccacatttgacggcaacaatggggattatttttaattactatgatcctgaagatgaacaaagccgtcaattgcatgaaatgaagatccatgaaaacttggaacaattgattcaagaagtcacaggaatcaatgatccgaaaacaatcgggaatatcaagcaaaacgtgaaccgttatgccaagcaagtcgct

SEQ ID NO: 21388 - DNA, 1938 bp, Enterococcus faecium
atgataaaaattacttttccagatggtgcagtcaaagaatttgagtctggaacaacaacattggcaattgctgaaagcatttcaaaaagcttagcaaaaaaagctttagctggtaaagtgaacggaaaactcgttgatttgactcgtccaatcgaggaagatgcaagtattgagatcatcacaccagaccatgaagatgcacttggcttagtccgtcattcagcagctcatttgatggcccaagccatgcgtcgcctctatccaaatatccactttggcgttggaccagctatcgattcagggttttactacgatacagataatggacaaaaccaagtaactgcagaagatttgccggcaatcgaagcagaaatgatgaaaatcgtcaaagaaaatctgccgatcgaacgccgtgttctttcaaaacaggaagcattagaaatttttgcaagtgatccgtacaaagtagaactgattagtgaattgccagaagaagaagtgattactgcttatcaacaaggcgaattcatcgatttgtgtcgtggaccacatgttccatccactggccgtatacaagtatttaaattattatcagtggcaggtgcttattggcgtggaaactcaaacaatcaaatgatgcaacgtgtatacgggacagccttttttgacaagaaagctttgaaagaatatatccgtctccgtgaagaagcaaaagaaagagaccatcgtaaactaggaaaagaacttgacttgttcatggtttccccagaagtaggttctggtttgccattctggcttccaaaaggggcaacaatccgacgcacgatcgaacgttatatcgtagacaaagaagttagtctaggttaccaacatgtatatacaccaataatgggagatgttgagttgtacaaaacatctggacactgggatcattatcaagaagacatgttcccgccaatggatatgggagatggcgaaatgcttgttcttcgcccaatgaactgccctcatcacatgatggtctacaaaaacacgatccattcttatcgtgaattaccaattcgtatcgctgaattaggaatgatgcatcgctatgaaaaatcaggtgctttgtcaggtttacaacgtgtacgagaaatgacgttgaatgatggtcatacatttgttcgtcctgatcaaatcaaagatgaatttaaacgtacgcttgaattgatggtggcagtatatgctgacttcaatattacagattatcgtttccgcttgagctatcgcgatccaaacaatacagataaatattttgatgatgacgcaatgtgggaaaaagcccaagcaatgctgaaagccgctatggatgaattagaactagattactttgaagcagaaggcgaggcagccttttacggaccaaaactagatgttcaagtcaaaacagctcttggtacagaagaaacattatcaactatacaattagacttcttattgccagagcgctttgatttgacatatgttggagaagacggggaaaatacgcatcgtccagtagttatccaccgcggaattgtttctacaatggaacgttttgtcgcttatttaacagaagtatacaaaggcgcttttccaacatggttggcacctatacaagcaacaatcatccctgtttctgttgatgcacatggcgattatgcttatgaaatcaaagaacgtttgcaaatgaaggggttgcgtgtagaagttgatgatcgtaatgaaaaaatgggctataagatacgtgcctctcaaacacaaaagatcccttaccaattagttgttggagacaaggaattggaagatgcaacagtgaacgtacgtcgttatggaagtaaagaaacagctgtagaagatttgaatatctttattgatgctatggaagcagaagtcaaaaattacagcagagaaaac

SEQ ID NO: 21389 - DNA, 1119 bp, Enterococcus faecium
atgcgttttttacatacagccgattggcatatcggaaaaaaactacaaggttatgacttgattgaagaccagcgtcatgtactatcttctatactagatatcgcgaaagaagaaaaagtagaggcaatcgtgattgccggagacttatatgataggagtgtcccagctgttgatgccgtagaattatacaatgaattgatggtcgattggaatttaaaggaaaagatcccgatttttgctatatcaggaaatcacgatagcagtacgagactttcagcgggtacgccatggttcagttattcgaactattttttgcgaacacagctagcagaagcatttgaaccagtcgagtttaaaaacgtacaatttttctttcttccttactttgaaccaattgcagcgagattatattttgaagatgacaatatccgaacgatcaagcaagcggtagccaaggtgatagataaaatgcaggagctatttgattcagaaaaaaaacaagtattgattagccatttttttgtaatgggaagtgtaaaatctgattcggaaacgaaaatcgaagtaggcgggttggattcgatccctggtgaactacttacaccgtttgattatgtagcactaggacatttgcataatcaagctgctttgagacaggataatgctcgctatagcggttccccattgaaattctctttatctgagatcaaccaaaaaaaaggcgtatggatcgttgacctgacaacaggcctggagttgaattttagggagatcgaacccctgcatgatattgaagaaataacagcgagtttcaaagaattgctggatcctgccttttatcagtccgtcaatcgggagaattacatctatatctatctcactgatagaacgatcatcccgaatatgatgaaccagcttcggcaaatatatcctcgtattttggggattgaacgggcaaacggtcgagcagaacaaacaaagcgcaaacgaaaagtactagaaatgaaagatcctcaaaaattagcagaagcattttttagtgaaatgacggaagagcagctaactgcaaaccaagaaaaatggctcggagaaacgttgcaagaaatcatggaaatggaa

SEQ ID NO: 21390 - DNA, 785 bp, Enterococcus faecium
tttataggcaaagatgaaacaaaagcagaaatacggtataatgagaaggtatgacaataatatataagaggtggctctttatgaaaaaagttttagttgtcgatgatgagaagccgatttcggatatcgtcaaattcaatttagccaaagaaggctatgatgtttatactgcatatgatggggaagaagccttggaaaaagttgctgaggtagaacctgatttgattttacttgatttgatgctacctaaaatggacggcttagaagttgctcgtgaggtacgcaaaacttatgatatgccgatcattatggtaacagccaaagattctgaaattgataaagtcctaggcttagagttaggcgccgatgattacgtgaccaagccattttccaaccgagaattagttgcacgtgtcaaagcaaatcttcgtcgcggtgccacggctgcgaaggaaccagaagaggcagcacctgcggaattgacgattggtgatttgacgatccatccagaagcttacatggtgacgaaacgaggagaaacaatcgagttaacacatcgtgaattcgaactactcttttacttggcgaagcaccttggacaagtgatgacaagagaacatttattacaaacggtttggggttatgattattttggagatgtacgaacagtggatgtaactgtacgtcgtttgcgtgaaaagatcgaagataatccaagccatccaaattatttagtgacacgtcgtggtgtcggttactatttgcgtaacccagaacaggagtaa

SEQ ID NO: 21391 - DNA, 603 bp, Enterococcus faecium
atgacctacatttttgaaaaaggaacaagtggcaagcatttgatcttacttcatggcacaggtggcgatgaacattctttactggatatcgctcactttcttgcaccaaacagtacattgctttcttttcgtggcacggtccaagaagatgggatgaatcgttttttcaagcgtaatggattgaatcaattcgacctggacagtttggaaaaagaaacagataaactccatgaaaaaatcaaagaaatcagcgaaaaagaactgataccgttaagtgactggctgcttgtcggctattcaaatggcgcaaacatcgctgctcatttattattggagcgtgagaccgagctaaataaagggttgtttttccatccgatgtctctaggtgttcatcaaagccgttccacattagaggataaaaccgtctggatttcttatggtgataacgatccaatcgtttcccctgcttcctttaaagaattggccgatcaattcgaaacacgccaagcaaatgtgactattcagctaactgtaacaggtcatcagttgacgatggacgaaatcaagcaagcgagggaatggacagaccacctcttaactaaa

SEQ ID NO: 21392 - DNA, 735 bp, Enterococcus faecium
atgttacaaatctatgcccatcgcggaagcagcggcacccacccagaaaatacgcttcctgcatttgcagaagctgtacgagtaggtgcagatggtatcgaactagatgtccatctaagcaaagatggttatttgatcgttatgcacgacgaagaagtggaccggacgactaacggtaaagggctgattcgagaaaaaacattggaagaactcaaaaaattgaatgcagggggcaaattcagcaaagaatttccagcagctaaagttcctgaattgagagaagtgttaggactgctcctccaaaaaaattaccgagggatgctaatgattgaaattaaaactgatcagtatgaatatcccggtatcgaagaaaaattagccgaaacattaaaaagtagagattggccttttcaacatgcatattgcagctttcatttggattctttggaaaaaatcgcattactggaaccggagatacagctggacttattgatgagtacttctgataaaaagatccaactagcagcagaaaccccttatatagaaggagtacatccaaaaaatacttggttgttcgaacatccagtccaggcagctgattttccaaaagcaattcgtgcatggacgattaacgatgaagaagaaatggccaaatgtcaagaactcaaaatagatggaataataactgattttccggagaaagctcttcggtggaaacaatcaacgaaaagtagg

SEQ ID NO: 21393 - DNA, 960 bp, Enterococcus faecium
atggaatggacacaagcattgattcccattgtcagcagttgtgcaatgacaattgccgcaatgccgctatttattggttattttcaaatgaaaaagcaaggtcaggcgattcgtgaggagggaccaaagtggcacaatagcaaagccggaactcctacaatgggcggcttagtgtttctgatcggctctattttgacaggaatttgggttggagcttggcaaaaacagctaactcctactcttttcatcttgctttttgtattagcgttatacggagtaatcggctttcttgatgattttataaaaatattcaagaaaagaaacatgggactgaactcgaagcagaaattgattggacagattctagggggaatcatcttttatcttgtttaccgttctgaaggttatccaggtgtattgaatttcttcggactagatctacctttaggaatcatttatggtattttcgctctcttctggcttgttggattttcaaatgcagtaaatctgacagatggcatcgatggattagttgctggcttaggaagtatctcttttgcagcttacggtctaattgcttggcatcagcatcagtatgatgtattaatcatttgcttaagtgttttaggaggtttactgggtttcttcgtctacaacagaaaacctgccaagatttttatgggagatgtcggttcattagcgttgggcggacttttagcggcaatttctataatgctaaaccaagaatggacattgcttttgattggtttgatctatgttatggaaacagcaagtgtgatgcttcaagttacttcctttaagcttacaggaaaacgaatttttaaaatgtctccaattcatcatcactttgaaatgtgcggatggtcggagtggaagattgatacagttttttggttgatcagcattgtgacttcgttgatcacattatggatcgtttgg

SEQ ID NO: 21394 - DNA, 867 bp, Enterococcus faecium
atggctctgtttaagaaaaagaaatatattcggatcaatcctaatagagagagcaaacctgctaactcgccatctgttcctgataacatgtgggcaaagtgtccaaattgcaaacatatcctttatacgaaagacatcggtgaagaaaaagtatgccctcattgcggatacgcttttcgaatcggtgcatggcagcgtctagctttgattattgatgaaaaaagttttgaagaatgggatacggatcttgtaaccaaagatccgctagcatttcccgaatatacggaaaaaattaaaaaaatgcaagataaaacaggacttcatgaagcagtcctcactggtaaagcaaccattcaggggattcccttcattattggagtgatggatcctaattttatcatgggaagtatgggaacgattgtcggagaaaagatcaccagattattcgaacgagcaacaaaggaaagtcttccagtcgtcttgttcacagcttcaggtggcgcacggatgcaagaaggaatcttttctctaatgcagatggcaaaaatctctgctgctgtcaaacggcatagcaatgaaggtcttttttatctaactgttttaacggacccgacgaccggaggagtaactgccagttttgcaatggaaggcgatattattctagcagaaccccaaagcttgatcggttttgctggaagacgcgtcatcgaacagacgatcaagcaggaacttccagaagatttccaaaaggctgaattcttattatctcatggttttgtcgatcagattgttccccgcatggaattgaaacagaaaatccatacgcttcttgaattgcatacacagaaaggatggatagatcgtgga

SEQ ID NO: 21395 - DNA, 354 bp, Enterococcus faecium
gtgattacaaaaccagataagaacaaaacacgtcaaaagagacatcgtcgtgtacgtaacaatatctctggtactgctgagcgcccacgcttgaacgtttttcgttctaacaaaaacatctacgctcaaattattgatgacgtagcgggtgtaacgctagcaagtgcctctaccttggataaagaaatttcaggtggaacaaaaacagaagcagcacaagctgtcggtaaactagttgctgaacgtgcagctgaaaaaggcattaaagtagtagtctttgaccgtggtggatacctttaccatggccgtgtgcaagctttagctgaagctgctcgcgaaaatggactagaattt

SEQ ID NO: 21396 - DNA, 462 bp, Enterococcus faecium
atgccaaaaggcgagggaaaattaattgcacaaaacaagaaagctcgccatgattattcgatcatcgacacgatggaagcagggatggtcttgcaaggaaccgagatcaagtcgatacgaaacagccggatcaatctaaaagatggatttattcgcgtccgcaacggagaagctttcttgcataatgttcatatcagtccttatgaacaaggaaatatttttaatcatgatccgttgcgcacgagaaagttattattacacaaaaaacaaatcatccggcttgaaaatgaattgaaaaatactggaatcactgttgttcctttaaaagtctatattcgtaacggctatgccaaggtattgattggtctggcgaaagggaaaaaatcttatgataaacgggaagatttgaaacgaaaagatatcgatcgacaaattgatcgaacattaaaaaatttctctaga

SEQ ID NO: 21397 - DNA, 1827 bp, Enterococcus faecium
atgtggaaatgtcatttttactgtataattcatttgattatccattttttattcatcaaaattactgaaaaaagaaaggaagaaataaatttgaagaaaacaaattcttcaggaaaaccgaaacgcgacttcactaaattatcgacaccccatacgtatgtcattatttttggtgtagtcatctttgcatggatactgacttttgtcgttccagcaggaaagttcagcacgcaagatattgaatacaaagatgcaaatggcgaaacaagtactcgtactgttttacgtcaagattccttccgttatgcttacgagctggataagtcgtatgtgtttgatcaattagaagaactgcaagatcatccagcagaacgtgaaaaactggatgttccggaaaaaggattggaaaaagtcattgctgacggagaaaaaaatcttacgcaggaaaaactagatgaaatctccttgacagatgatgtgctttacgatcagtacggcgaaaatatctatgatacttctaaaaaattgcataaaacagccaaaatatggggaacagatgattttggcggctttggtttcttaaattttgtttttgaaggactagtatctggagataagtatggatctgctgtagggatcgctgcattgatccttgttgttggaggtgcttttggtattattatgcgtaccggagcgatcgacgcaggtatctatgcgtttatcagtaaaactaagggactggagcgtttagctttaccgctattattctttgctttttcattcggtggcgctacattcgggatggcagaagaggtaattccattctcaatggtgatggttccatttgtcattgcgttaggatatgactcgatcgtagcagtaaccgtgacttatgtcgcatctcaagtcggaaatgcgacctcttggatgagcccgtttagcgtagcggtggctcaagggattgctggaatccccgtgttgtctggtgcgacattccgattgattatgtgggtagttgttactgcattagccgctggttatatgatgatatatgcagaaaaaatccgtaaaaaaccagaaagttcgttgacttacaaatcagatgattatttccgttctcatatcaaaaagacatctgatgaaaataaaaaattcatgcttgggcataaattgatcttattagagatgttagttgtccttgtctggatcgtttggggcgtgactcaaaaaggctattacattccagaaatcgcttctcaattctttgtgatgggattagttgctggaatcattgctgttcttttcaaattagatggaatgaaagtcaatgacatcgcttcttctttccaatctggtgcagctgatttagctggtacagcaatcgtagtaggtatggccaaagggattcttcttgtcttgggaggatctgatgcatctgttccttcagctttgaatacgattttgcatgggatcgggacggcgttgaccggtgttccagctgtcattggtgcttgggcgatgtacatcttccaaagtttgttcaacttggttgttacatcaaattcaggacaagcagctttgactatgccaatcatggctccactggcagatttagtaggtgtatccagacaagtagcagttcttgcttatcagcttggttcaggttttatggacgcttttacacccgtatcagccagcttgattggtgtgctaggtgttgcacggatcgaatgggcaaaatgggcaagattccaaatcaagatgcaaggattcctgtttgttttaggaactattttcatcatgattgccattgcaataggtctgcag

SEQ ID NO: 21398 - DNA, 702 bp, Enterococcus faecium
atgacagaaactacactttatatcgtacgacacggaaaaacgatgttcaatacaattgaacgagtacaaggctggtgtgatacacccctcacaaagcaaggacaagaaggcattcattatttaggtcgcgggttaaaaaatgtcgacttttcatttgcttattctagtgacagtggtcgtgcaatcgaaactgcccgtattattctaggagaacattctaagggaaaagaaattccttattttattgaaaaaaggattagagaatggtgtttcgggtctcttgaaggtggatatgacatggaaatgtggggtgtgatccctcgtgtattgaattttaaaacatatgatgaaatgtttaccacagaagtttcttttgaacaaattgctaatgctgtatacaacttagataccgctgggtgggcggaaacttatgaaacattgcgagaccgtgtatggacaggatttgaagatatcgcccatcactgcgaaaaaaatggtggtggaaatgttttagtcgtatctcatggtttgacgatcgcctttttgcttaatctgatcgatcctaaacagcctgttcgtgctgggcttttaaatggcagcgtaacaaaggtcacttatgcaaacggtcgattttctatccacggcatcaatgatacgtcttatatcgataacgggaaaacacatagtcgcgactcgtttcta

SEQ ID NO: 21399 - DNA, 783 bp, Enterococcus faecium
gtggataagacagcacatgatgtcgttcagttagcaagagctaaagaacgatggacaagcttggatttttttgaagagatcttcgattctttcgaggaatgccatggtgatcgtttatttgcagatgacgaagcgattgttggtggaatcgctcgattagatggcaaaccggtaacagtgatcggtattcaaaaaggacgggatctgcaggaaaatatccgcagaaattttggttctccccatcctgaaggctatcgaaaagctttacgactgatgaaacaagcggaaaagttcaatagaccggtgattaccttgatcaatacagcaggtgcatattgcggtgtaggagcagaagagcgcggcgaaggagaggctattgccagaaatctgctcgaaatgtctgatttaaaggtaccgatcatcgccatcatcattggtgaaggtggaagtggcggtgcccttgctctaggtttagcggatgaagtctggatgctggaagaaacgatttatgctgtgctttctccagaaggatttgcgtcgattttgtggaaagacggtagtcgcgccgcagaagcagctgagttgatgaaaattactgcgccagaactacgcgagttaggaatcgttgatcgagttattcctgaaacgttcaacggcgagcagttgccacgatataaagtcgcacacattatgaaaaaagcgttgattgaaagattgacggaacttgttcgattagatcagcataaattactggaaaaacgatacaagaggttccgccaatat

SEQ ID NO: 21400 - DNA, 534 bp, Enterococcus faecium
ttgcggaaatatacatttgtttttaagaaaaaagtagtttcagactatttaaataacgaaggcggctacaaatatcttgcacataaatatcaaataaatcgtacactggttagacattgggtaaggatttataactatcatggttgggaaggcttggttggaggtggcaaaagctacactacaaaatttaaacttgatgttatagaatatatggaaacaaatggtctttctatccaagaaactgctaaaaaatttaatatcggttcaaatagaactctaagtaaatggatagagcaatatgaagaaggcggtgcttcttcacttgagagccaaaaaaggggcagaaaaattagtatgaattccaagctaaacattcctaaaaaacttaaagatgagtctcttgaagaagaagttattcgtttaagagcagagaacgcatatttaaaaaagttagaaaccttgattcaagaacaagatttgagcaagaagaaatcaaggttaaaacaatccttcagctcaaaaaagaatttaaat

SEQ ID NO: 21401 - DNA, 3720 bp, Enterococcus faecium
gtgaatcaaattcctttaaaaccgcaaaatgaacgattcacagatgatcagtggcaagcgatttttgatcaaggagataatctattagtctctgcgtctgccggatcaggtaaaactacagtgcttgttcgaagagtgattgaaaaactaaaaatgggttttgatatcgatgaattattgattgtgacatttactgaagctgccgcaagagaaatgaaagaaagaattcaagaggcattacaagaagccgtcaatagcgaaagtgaccctgtacgtagacagcattttactaagcagttagttttattgcccacagcgaatatctcaaccttacatgctttttgcctgacagttattcgacgttattattacttaattgatattgatccagtctttcgtatgttaacagatgaaacagaaacgatcttgatgaaggaggatgtgtgggatgagctgagagaagcactttatgcagaaaatgatgaacgatttttccaattaacaatgaatttttctaatgatcgttcagatgacggcttgacgaatctggtgttttctctttatgagtttgcccgtgccaaccctgaccccaaaaaatggctagaacagttaagcgataattatcgtttgcctgaggggctagcgaaatctcgattatatcaagaacaaatccgtcctttagttttggcagatatataccaatgtgtacaattatatgaacagatgactcagttagcacaaggtgaaggattagaaaaaatgcatgagcaagtagctggagaacaacagcagatcaagaatatctatgaagcgttctcgcaagatcggttagaagaagcttatgctggtttggaacaactaactttttcaacttttaagagcagtcggaaagcagaattgaaagaaatttccaatgaagtcaagggcatgagggataaagcaaaaaaactgattcagcagataagtaaaagttattttcctgtttccccaagccaaatggaagaattaacggacaaagcactaccgttagtcgaagaaatgacaaaagtcacgcaaagcttcatggacggtttcagtatgcgtaaacgggaaaaaggtgtgctggatttcaatgatctggaacatttagcgttgcagattctcacagaaaaaacgaaagatgcatggctgccaagtgaagcttcaaaacattatcgaaaaaaattcaaagaagtaatggtagatgaatatcaagacgtgaaccaattacaagaagccattttatactggctaagagaacctgatgatacaaaaggaaatatgttcatggttggggatgtcaaacaatccatctattctttccgtttagcagatcctagtttatttatcgggaaatacgagaatttctcaaagaaagaaggcggacgtcgaatcgttttggctgagaacttccgctctagaaaagaagtcctttcttttacgaatcttatttttgaacaactaatggatccagcagtgggtcaaatcaattatgacgaagcagccaaactgatccaaggattttcagactttccagagaatgaacagtttgagccggaaatcatgatctatgaaaaagaacaggaagaatcagagattgagattccgacggatgatatactggaagacaaaacagaaggcgaactttttatgacaggactaaaaattcgtcaattaattgattcctcctttatgatttatgataaaaaatcaaaaaaaagtcgtccgatagagtacaaagacattgttctcttgacacctacaaagaagaacaacttaacgattttagagattttcaaaacattggatattccattagagatgaaagatgctcaaaactattttcaagcgacagaaattcgcacgatgatctcgctgctacaattaatcgataatccctatcaagatattccgcttgcggctgtattgcgctcaccgatcgtgggtctgattgaaccagaattagccagcattcgattagctgaccgtgcacatacttactatgatgctgtgcttgcttatcaagcatcaaacgaagatgaattagcagctaagctggaacattttggcaagcaactagagcattggcgagaacttgctcgccgttcttcgatcactgacttgttatgggatatctattatgagacgggatatctagagtatgtggtcggtctgccagcaggggcacagagacaagccaatctttatgcattggttgatcgtgccaaagcttacgagcaaagttctttcagaggattataccagttcgtgcgtttcattgaaaaaatgcaagaaaaagataaagacttagcagaaccagtcatttcaatagaagataatgctgttcgcgttatgacgatccatgcaagtaaaggcttggaattcccagttgtatttttgttagatatgacaaaggagttcaacttacaagacttgcgcaatcggtatgcttttgaagaaaaacttggagcaggaattcgctatatggatcctgaaacacgagtgttatatgatacgttaccgtttcaagccatcaaattggtaaagcaaaacaaattgttgtcggaagaaatgcgtaaattgtatgtaggattgactcgggcagaacaaaagcttttcattgtcggttcctataaaaataaagagcaaatgatccaaacgtggtctgaagcagctgatcatgaggagttggtttttgatcctgcgctacgtttgaagggcagaagcagcttgatgaattggattggttacggattgatccgtcatcctgaaatgcagaaatacttagaggaagaaatttcgacttctcttcttcaacattcaaatgcacagttttctatttcatggatgaatcagcaatcgatcattgaacaaagacagttgcttgctgaaaaagaactggttaacttagatcagcagatgaaagaagatgaaactttattagcagattcgttacaaaaacgtctggcatatgaatatccttatcaagcttcttcacaaaccacaagttatcaatctgtatctgaaatcaaacgattattcgaagatccagatgatacacaagaatcacgtttgactctggaaagcagtcagaacaaagcagcatcccgtcaatttcgttatacgcaagaacaactagcagaaccaaaatttttgcaaaaagatcggcaagtgtcagcagctgctgttggaactgctacgcatgctttgttacaattactgccattagagatgccaactacagagagtatccatcaaaaattacaggaattggtaaggaaacggttagtagacgaaaaagtcgcgaaaaaagtagatgtttcttctattatatggttctttcaaacagaacttggtcaacagctgattgccaacaaagaaaacgtaaaacgagaacaacctttttccatgctgcttcctgctgacgaagtatttcaagactatccaaatcaagaagatgaactattaatccacggaatcgtcgatggatacctagaagaaaaagatcatctcaatatctatgattttaaaacagattttattttacatccggatgatccagcagaaatagatgcaatcgtccaaaaatatcaaggacagctaagactttaccaacaagcaatgtcagaagctttgaataagccagtagaaaatgttttcctaattttgcttcgagtgaaacaaattataaacattaacaaa

SEQ ID NO: 21402 - DNA, 2926 bp, Enterococcus faecium
ttgaccgtccaagatatgattttaacattacaaaaattttggtcatcaaacggctgcatgctgatgcaagcttatgatacagaaaaaggagcaggtacgatgagcccatatacattcttacgggcaatcggaccggaaccatggaatgctgcttatgtagagccatcccgccgaccagctgacgggcgttatggagaaaacccaaaccgtttgtatcagcatcatcaatttcaagtcgtaatgaaaccttcacctgaaaatatccaagagctttatttagaaagcttgcgtcttttaggaattgatccattagaacacgatattcgttttgttgaagacaactgggagaacccatcgatgggttgtgccggtgtgggttgggaagtatggcttgatgggatggagattacacaattcacgtacttccagcaagtcggaggactaccttgtaaaccagttacttctgagattacttatggactagaacgtcttgcttcatatattcaagaagttgaaagtgtctatgacttggaatgggctgatggcgtgaaatatggcgagatcttcaaacaaccagaatatgaacattccaaatattcttttgaagtaagcgaccaagacttgctactaagcaattttgatcgttttgaaaaagaagctaaacgctgtatcgatgaaaatcttgttcatccagcgtatgattatattttgaaatgcagccatacattcaacttattagatgcccgcggtgcagtatctgtaacagaacgagcaggttatctttcccgtatccgcaacatggctcgttctgtagccaaaatctttgtggcagaacgcgaaaaattaggattccctttattgaataaaaacacagcaaatccagaaaacgtgaaggaggctgaataagatggcaaaagacttattacttgaaatcgggctggaagaaatgcctgctcatgttgtcacaccaagcatgaaacaattagaagaaaaaacagcaaaatttttagatgaaaaccaattgacttatgatacgattgaaacattttctacaccgcgccgtttagcaatcaaagtaacaaacattccagaacgtcaagcagacagtgaagaagaagtcaaaggaccagccaaaaaaattgctttggacgcagatggaaactggacgaaagcagcggaaggatttgtccgcggacaaggtctgacgacagatgctatcacttttagagaattaaaaggcgtggaatatgtctatgtaacgaaatacactcacggcaaagaagcaaaagaagtattgacaggtttagcagatgtcattaaaagcctcactttcccagtaacgatgcattgggcagaatacgattttgaatatatccgccctattcactggatcgtggcattgttagatgacgaagtaatcccgtttgagatcttggatatcaaaacagacagagcttcaagaggtcatcgtttcttaggcgaagatgtgacatttgcgcatgcgaaagaatacgaagaaaaattaaatgaacaatttgttattgcttcaccacaaaaaagaaaagaaatgatcatcacacaagcaaacgaattagcagaaaaaaatcactggatcattgatctagacgaagatttactagaagaagtcaacaatctagtcgaatatccaactgtcttttctggcgacttcgaagaaaaatatctatctgttcctgaagaagtactagtcacttctatgaaagaacatcaacgttatttcgaagtacggaacgatcaaggtatgttgcttccttattttatttctgctcgtaatggcgatcgggtaaaattggaaaatgtggtacgaggcaatcaaaaagtattgactgctcgtttagaagatgcggaattcttttataatgaagacaagaaagcttcaatcgaccaatacgttgaaaaattaaaaactgttactttccatgaaaaaatcggtagcatctacgagaaaatgcaacgggtacaagttatcgcccgcattataggcgaacaagtaggactatctgaggaagaattgatggatctgcaacgcgctgctgaaatctataaatttgatctagtaaccaacatggtaggagaattccctgaactacaagggatcatgggagaaaaatatgctctgcttaaaggcgagaaaccagccgtagcaacagcaatccgtgaacattacatgcctatatccagtgaaggagatctacctgagactacagtaggttctattttagcgattgctgataaattagatagtatcttttctttctttgcagttgggatgatcccaagtggctcaaacgatccatatgctttgcgccgtcaagcatatggtgtcgttcgaatcatcgaatcgaaaaaatgggcctttcctttgtctgttctgcaagaaacgattagtgaagttatcagtaaagatgcggatcgttttggcattggcttgtcagcgggacaacaacaggtgatcgactttatcaaaggccgtctgcgccaattattgacaacgaagaatattcgtcatgatgtcatcgaagctgttttgaatgcagaacaaaaagatctgacaaaagtatttgcagcagcacaattgttcaagcagcatcttgcagatgaagacttcaaaccatcgatggaagctttgacacgtgtcgtgaacttagcgaaaaaagcggagcttgaaaaacaatcagaagtagaccctgaactgttcgaaaacgaagcggagaaagaactgcacaaagcagtagaggcaatgaaaacaagctttgctgaccaaacgatcaacgaaaattatgatcagcttgtaagccttcgcccactgatcgaaaattattttgatcagacgatggtcatggcagaagaaccagcagtacgtgagaaccgattaacgcaattaaat

SEQ ID NO: 21403 - DNA, 1692 bp, Enterococcus faecium
atgagaaaaagtaaagcaataatgattggtgccggtattgccaatatggcagcggctgtttatttgattcaagaaggcaaatggaaaggggatcagatcaccttttattcattggatgatcacggttcaaatgatggtgcaccgaccgacactgtagtggatgaatattggaataaaaaccatccattagaaaaccaaaaaggctatattgctcgaggcggtcgcatgcttaattaccgtacctatgtagatttgatggatctgttaagtcgaataccttctgttactgagccagggatgactgctgaagaagatacgagagattttgatgcaaaacaccgaacctttgacaaagcacgtttgatggaaggtggcaaaggaatcattgatggcggaaaactgggattcaataataaagaccgtattcttctgactaaactgattgctatgcctgattcagaagaagaaaaactagacaatatcactatcgaagaatatttcaaagatgatccacacttttttgaaacaaacttctggtttatgtgggaaacaacatttgctttcagaacacgtagttctgctcaagaattgcgtcgctatatgcatcaaatgatttatgaattcactcaaatcgaacatctagtgggcgtcaatcgaacacgttacaatcaatacgaaagtattatgcttcctttgatcgagtacttgaaagaacaaggatgcaaaatcattttgaaccgccgtgtcactgactgggaattcaaagaaacaccgatgcaagatgaaatcactgtgactggtttgaaaattaccaatacactgactcaagaagaagaatacgttgtggtcgatgaagatacagcagttattttcactaatgggtccattacagattcagctactttaggagattacgaaacaccagctgtagaaaatatggattatggtgcagcttctagtctctggaaaaaagccagtgaacgtttctacaacttgggaaatcctgacaaattctttgctgatcgagatgcaagcgaatgggtcagctttaccctgacgacgaaaaaccatttgttgttgaatgaaatcacccgtatcacgactcaagaaccaggaaatgccttgaattcatttatttcaaccacaccgatcacgccgttaggccaaaaagatgtcaatatgtctatcgtcgtgcatcatcaaccgcattttacgtctcagaaaccaaatgaaacagttatttggggttatttcctttatccaagacgacgtggcgaatttgtggataaacagtatattaaaatgaatggaaaagaaatgctagaagaactgattggacaactttcaaaagtagatcctggaccagtgaatattcgtgaaaaagaaacagaaattttcgacagcgtaataaataatatccctgtctatatgccttatgcttccgcgttgttcaataatcgtgccaaaagcgatcgaccaaaagtcattcctaaacattcgaccaatctggcctttacaggagaatttgtcgagcagccttatcagatgatctttactgaacaaagtgctgtacgttctggagaaatcgctgctttccattttgcgggtattcctatgtcccgtcttgtcaaaacaccgcgttacgacaaagatattcctactctagctcgtgccgcaaaaaaaatgtttgaa

SEQ ID NO: 21404 - DNA, 1170 bp, Enterococcus faecium
atgaataaaagcagaataagaatactggacatcttcatggcaatcattttagtcgttgggatcgggatcttttcttatccttttgtagaagattcactgaatgattttcttgcccagcaaatgatcatccattatcaaaagcaagcatcgaataagaattcagaggaaataaaaaaacagcaggaaaaaatgacaaagaaaaaccaacagttggcagagcaaaacgtatcaccagggataggcagtttcaaccaagcagttgatgcaaaagcattaaaagatttacctagtaatgccttttttatggaacatatgcttggagtcatcgaaatcccaaaaatcaatgtcagcttacctatattcgatcagacaacggaaatatttttgcaaaaaggaacgtcattattggaagaaagttcttatccgactggcgggaaaaacacccatgccgttctttctgggcatcgtggactcccagaagcaaaattatttacagatttgcctaagttgaaaaaaggagaccagtttttcatccagatcaatggaaagacattggcgtatcaagtagaaaaaatccaagtggtcttacctgatgaagtagattctttgggtatccaaaaaggcagagatctcgtgactttgcttacctgtactccttatatggtcaatacacatcgactgcttgtgacggggcatcgtattccttatcaagcaaaagaggcaaaaaaagcgatccaaggaattgatcaatggaaaaaatggaaattttttatttggtttatcggtatactacttggatcaatcggcttagtttggctactcatcgcttatttagattctttggccatcgctaagcgaaactatcctttatctttttatgtaaagaacacaaacggacgaccaatcgaaggaatggtcttttctgtaaaaacgctcaacggcaaacactatattactagagaaaaagttccatttgtgaaagcttctgatgaatacggactagtgagattttctgatttaaaaggcaggaactatcgcttgcaacatgaggagctcctgcttaaaatccatgtaaaacataaacattcgaaacagttttcaatgaaattgaaaaaaggaagatataaactgcgaaaagaaaaagaggtgtactatttgattgagaaagaa

SEQ ID NO: 21405 - DNA, 293 bp, Enterococcus faecium
atgaaattccaacaaaccaaagaagtattaaatcaattagttgcagatctaagccaaatgtctgttgttgttcaccaaacacattggtacatgagaggaccaggtttccttacattgcacccaatgatggatgagttcatggatgatttgaacgctcagttagatgaagtatccgaacgcttgatcacattagacggttcaccttattctacattgcgtgatttgcagataacacaaaatcctgatgaattggccgctgggatcgtactattccagaacgtttggaaacactt

SEQ ID NO: 21406 - DNA, 519 bp, Enterococcus faecium
gtgaataaatacgaaattcgaaaaatgacgccttcagatgtagacttactacaacaaattagtatcgaaacatttacagatacatttggaaaagataattcaccggagcatttagctgattacttgacacaagcttatgcactagaaaaacttacagaagagctaaaagataaagaaaccgattttttcctagtgagtatcgatcaagagcctgcgggttacctgaaactaaatacaggaacgagtcaatctgaggaaatggctgatcattttttagaaatcgagcgaatctatgtacgaaaaaaatttaaacatcaaggtatcggtacatttttactagatacagctattgaaaaagcaaaagaaaagcaaaaaacagccatttggctcggtgtttgggaacacaacgatgttgcgctcgctttttatcgtaaaaaaggatttatcaaatacagcgaacatgttttttatatgggagatgatccccaaacagactatctattcatcaagcaattattc

SEQ ID NO: 21407 - DNA, 717 bp, Enterococcus faecium
ttggatgaacgctcgctaacgttccacattggaccaatttggtttgatggtacagtttgtataatggtgttactgacctgtttgattgttttcttcttagcttacttttttacaagaaatcttaagttgaaaccaacaggcaaacaaaatgcgatagaatgggtcattgattttagtcgaggaatcgtaacagataatctgcctagaaaagaattgagcaatttccatttgttggcatttacattgtttttatttgtttttgttgcaaacaacatcggtttagtaacaaaaatcgttttacctaacgaaacaacactttggaaaagcccgacagcagacccgtttgttactttaactttggcatttataatgatcttacttactcacttatttggggtgaaaaagttaggcttcaaaggatatttcgtaaattcgttcttgaaaccatatagttttatgtttccgatgaaactgattgaagaatttacaaacttattaacacttgctttacgtctttatgggaatatttatgcgggggaagttttgctaaccttgattgcaaaaatggtaataagcttaggctggttctcattgccgttagcaattccattagagatggtctggatcgcattctccttgtttatcggaagcatccaagcatttgtcttcgttactttatctatggtttatatgagccataagattgaagtggaagaa

SEQ ID NO: 21408 - DNA, 1245 bp, Enterococcus faecium
atggaattctcaattgataataatatcaatgacggcgcagtaatcaaagtcatcggagtcggtggtggcggtggaaatgctgtaaaccgaatgattgaagaaaacgttaaaggtgttgaattcattacagccaacacagacgtgcaagcattaaaaaattcaaaagctgaaacagttatccaattaggccccaaatatactcgtggtttaggtgctggttctcagccagaagttggacaaaaagcggcagaagaaagtgaacaatccttacgcgaagctttagacggtgcagatatgattttcatcactgcaggaatgggtggaggaaccggtacaggtgctgcaccaatcgttgcaggtatcgcgaaagaattgggcgcattgactgttggtgtcgtgacacgtccattcacttttgaaggaccgaaacgtggccgttttgctgcagaaggtatcgctcgtttgaaagaaaatgtggatacattattaattatctcaaataaccgtttattagaagttgtagataaaaagacaccgatgcttgaagctttccgtgaagcagataatgttttacgacaaggtgtacaaggtatctctgatttgatcacagcgccaggttacgttaaccttgactttgctgacgtgaaaacagtgatggaaaaccaaggtacagcattgatggggatcggtgtggctagtggagaagatcgcgtagtagaagcaacgaaaaaagcaatctcctctccattgcttgaaacatctattgatggagctgaacaagtacttcttaacatcacaggcggtttggatatgacattgttcgaagcacaagatgcttcagatatcgtagcaaatgcagcaactggcgatgtaaatatcattctaggtacatctatcaatgaagaaatgggcgatgaaatccgtgtgacggtcatcgcaacaggtatcgatgaatcaaaaaaggaacgcaagtctagccgaccagctagacaagcacaaatgcaatcacctgctcaaaagactgtattagatatggatcaagctaaaccaacttcttcagaagaagaaaacagttttggcgattgggatatcagacgtgaacaaaatgttcgtcctagagttgatgattccaattttgacaatatcgaaaaaaaagaatttgatacattcaaccgcgaagaaacaaaatctcatggcgatgatgaattaaatacgccaccgtttttccgtcgtaaaaaataaagg

SEQ ID NO: 21409 - DNA, 957 bp, Enterococcus faecium
atgactgaaacatttcaacactatacagtcatgttgaaagaaacggtagatggattgaacatcaaaccggatggcgtttatgtagactgtacactcggcggtgccggacatagtgaatatttattaagccaactaagttctaaagggcatctgtatgcgtttgaccaagatcaaaaagcaatcgatcacgccaagctgcgtttagcttcttatgtcgaacaaggtatggtcacatttatcaaagcgaacttcagagaattagaagaacgcttgagtgagcatgtagataaggtagacggcattttgtatgatctaggggtttcctctcctcagctagatgaagcagaacgtggatttagttatcatcaagatgcaccgttggatatgcgcatggatcagtcagctcctttatccgcttatcacgtaattaatgaatattcctaccatgaattagtaaagattttcttccgctatggcgaggagaaattttccaaacaaattgctcgtgaaatcgaacgagtacgaaaaacaaaaccaatccaaacaactggtgagcttgtcgaaatcattaaacaagtcatcccagctcccgcaagaagaaaaggcgggcatcctgcaaaaagaatttttcaagctgtgcggattgcagtaaatgacgaactcggtgccgaagaggcctctttagaacaggcaatccggttattgaaagtcaatggaagaatcagcgtaatcacattccattcattggaagacagaattgtcaaaagtatgtttaaagaatatagtacggtacaagatctaccaccgggacttcctgtcatacctgacgaattccaaccagaactgaaagtcattactcgtaaaccaatccttccttcagaggaagagctaacagaaaacaatcgatcacgcagtgcaaagttacgtattgcagaaaaaataagaatgaaagaggag

SEQ ID NO: 21410 - DNA, 1293 bp, Enterococcus faecium
atgtttagactattaaaagatgcttttaaagtaaaagacattagatcgaaaatcctatttactgtatttgtgttgtttgtatttcgcctaggtgcacatattactgtaccaggcgtaaatgctgcttcattgcaaaacctttcttctttgccatttttcaacatgttgaacttggtaagtggtagtgcgatgcaaaacttttccattttctcaatgggggtttcaccatacattactgcttctatcgtcattcagcttcttcaaatggacatcgtgcctcgatttgttgaatggtcgaaacaaggggaagttggtcgtaaaaaactgaatcaagcgactcgatatctgacattagtattggcatttatccaatctgtcggtatcactgctggattcaatcaatacgctcaattaggtttcgtgaataatcctaacgtagcaacttacgtaacgatcggtttgattctaacagccggtacgatgtttgttacttggctaggagaacagatcacagaaaaaggtatcggaaatggcgtatcaatgatcatttttgcaggtatcatttctagattgcctgaaagtatcagagaaatttatgaagattactttataaatattgatccttcagacatatggaaatctgctatttttgtggccattttactagtagcggtcttgttgatcgtgacattcgtaacatttttccaacaagctgaacgcaagatcccgatccaatatacgaaacgcgtagctggcgcgcctacaagcagctatctgccgttgaaagtaaatgcagctggagttattccagttatctttgctagttcgtttattgctacgccaaatgctgttttacaagcattgagcggtagattcggttctgaaaactggtacaaagtgatgatggagatctttaactataatacagcacctggtgctacgatttatacgattctgatcgttgccttcactttcttctacgcctttgttcaagtaaaccctgagaaattagcggaaaacttgcaaaagcaaggaagttatataccaagcgtacgccctggtaaggggactgaagagtatgtctcaagattactgatgcgtttaagtacagttggtgcagtcttccttggtttagtggcattgcttccaatcattgctcaaatggtttgggatcttccacaatcaatcggattaggcggtacaagcttactgatcgttatcggtgtagctttagaaactgcgaaacagttagaaggcttaatgctgaaacgtaaatatgttggattcattgag

SEQ ID NO: 21411 - DNA, 1752 bp, Enterococcus faecium
ttggaaacaacattaaggaaatatatcgaagtagcaagtaaaaaaaagcctgctgacctagtgatcaagcatgctaagatcgtcaacgtctttacgaaagaaatcatggaaaaagatgtagcaatctgcgaaggaatgatcgtaggaatcggtgaatacgaaggaaaaagcgtacataatgctaatgggcaatatctagtgccaggattcatcgatggccatgtgcatatcgaaagctcacttttatcaccaagcgaattttcaaaagtatccttgcttcatggagttactactgtagtgacagatccccatgaaataggaaacattgctgggagtacaggtcttgagtttatgatagaagatgcaagacaaacactcatgaatatcttttttatgctaccttcttgtgtacctgtaaccccttttgagaccaatggtgcaaatttaaatgcaaaaaaattagccccttttttacaaaaacccgaagttttaggcttagctgaagtcatgaactatcaagcagtagcaaataatgaaacagacatcctagaaaagatccaattgatgcaccagcataagaaaaaaattgacgggcatgcagctggtatcggcatggaagagttaaatgtttatcctgcagcaggtattcggacggatcatgaagctacaactgcaaaagaagctaaagaacgtttggatcttggtatgtatttaatggttcgagaagggaccgttgcaaaagatctggcatcgctactaccggcgatcacacctgaaaattcaagaagatgcttctttgtcaccgatgataaactgatcaatgatttagtaaaagaaggatcaatcgatcatatcgtccgtcaagctattgcacttggaatcgatccattacaagccattcagatggcaacattgaatgcagcagaatgttttgatttgaaaacactaggtgcgattgcccctgggtatcaagctgatttcttcttaacagacgatcttaccaagctgccaattcatgaagttttctataagggaacattagttgttcaatctgggcaactccaagaccatttatttgctgatcattcaaattcatatacgtgttgtctgccaaaactaaacgctcaaccattaaatccacattcgttagagctgcttctttcttcttcacaagcccatgtgatcgaaattatcccgaatagtctagtgactaaagatttggtagaaaaagtggaccgacaaggcgaacgattcattccttcaatcgaaaaagaccaattaaagattgcggtgatcgagcgtcaccatcaaacgggaaacattggattaggcatagtgaaaggatttcagctgaaacaaggagcgatagcgacaacgattgcccatgactcgcataatctagttgtcgttgggacaaacgacgaggatatgctgtatgctgctaatcttttgattcaaaaaggtggcgggatgaccgttgtcaacaaacagcaggaaatagcttgtgtttctcttcctataggcggaatcatgacacaggaacctttttcgatcgtctatgaacagttgaatgaattaataactaaagcacatcaactaggagcagctaaaacctttgatccttttttgacactttctttcttaacattatctgtcatacccgaattgaagatcaccgacaaaggattattttcattttctcgcttccaattgattccaccttgtggaaaaaccgatgaaataaatacattt

SEQ ID NO: 21412 - DNA, 240 bp, Enterococcus faecium
atgggatttatttggtcacttatcgtcggaggaattatcggagcaattgcaggagcaatcacgaataaaggttcttcgatggggattattgcaaatgtcgtagcaggtttagttggatcagcacttggtcaagcattattaggttcttggggaccaagtattgcaggaatggcaatcgtgccatcattgattggtgccatcattttagtactaatcgtatcattctttgctcgaaaatta

SEQ ID NO: 21413 - DNA, 942 bp, Enterococcus faecium
atggcttattatttcgaacatgaagaagaaccagattttggtttctcaccagatgctgaattcccaatcatcaatggtgaaaaaggaaatgtttctttagctttacgcttcaaaggcgacaatgcaggagattatgtcttgaaatcttttgtttccggacttcgcgaaaatatggtgccaggaacagcaactgcagcacttcaagtaccaagtgcagatgcagctatcgcgatggaagaagcattttaccaattcatcgaagcaaatccagtaagcggaacgattgaagcggacaatacgtatgtaaaaatcgaattagttggtaaaggcgcacatggtgcaagcccacaatctggtatcaatgcaggttctttcttggcattgttcttagataactatgaattcctaggatctgctaaacaatttatccatgtagcagctgcttatgtccatgaagatttttatggagaaaaactaggagtcgcttatgaagatgaaaaaatgggcaaattgacaatgaatgctggactatttgcttttgaagaaaatggtacagaggaagcgaacttcatcaatatgaatttccgttttccaaaaggtgtaacagtagacggattgcaaagtgacatcgaacaaacagtggggcaagaaggcgcaacagttactcgaggtgctcgcgtaatggaaccacattacgtaccaatggatgatccattggtggctacattattgcaagtctatgaagaccacactggagaaaaaggctacgaacaaatcatcggtggcggaacttacggacgtttgttgaaacgtggcgttgcttatggagcgatgttcccaggatatactgatacaatgcatcaagcaaacgaatttatgagtcttgatgacttgttcagagcaacagcaatctatgcagatgccatctatcgtttggcgaaa

SEQ ID NO: 21414 - DNA, 996 bp, Enterococcus faecium
atggaaatctatgacattacaatcatcggtgcaggtcctgtagggatgtttgccgctttttacgcaggaatgcgccaagctaaaacaaaaatcattgacagtctacctcaacttggtggtcaattagcaactttgtatcccgaaaaatatatttacgatattcctgggtatccagcaataaaagcaagtgaattaatcgatcaattagaaaaacaattaactacttttaaccatacattccatttaaaagaagaagttctctcgcttactcgtgaagacgaagttatcgagattactacaaataaaggcatccattattccaaagcagtcattttagctttaggaaatggttcattccagccaagaaaattgaatttagataatgctgaatcatttgaaaaccacggattggattatttcgtgaatgatttgatgaagtatgctggaaaaaaagtcgctattgctggaggtggtgattctgctatcgattggacgttgatgttagagcctattgcaagcgaagtttacttgattcatcgtcgcccggaatttcgtgcgcacgaacatagtgtatcacgcttgaaatcttcatctgtcaacttgcttactccctatctcatcgatggattatcaggcaataatggggaactgacagatatccggttaaaaaaagtgaaaagtgacgagacgattgatttgatgattgattctctgatcgtcaattatggattctcttctaatttagaacatctttcttcttggggacttgatagtaccagaaatgccattactgtaaaatcagatatgtctacttctattccaggcgtttatgcagctggtgacatctgtacctatgaaggaaaagtgaaactgattgctactgggctcggtgaagcacctactgcagtgaacaacgctttacactatattaatccaaaggaacgaactcagcctggtcacagcacaagcttatacgataaaaatcttcgtcctagt

SEQ ID NO: 21415 - DNA, 587 bp, Enterococcus faecium
gtgaatttaccaaataaattaactgtacttagaatttgtatgatcccgattttcattttggttgtaggtttacctttagattggggacaatttaacgtaggagacaccacactggctgtcacacagctagtaggtgcagttatttttgctttagctagtatcacagactggttagatggaaaaattgcccgtgcgcgaggccttgtcactaattttggcaagtttgcggacccgttggcagataaaatgctagttatgactgcttttatcatgttggttgaccaaggaaaggcccctggttgggtagtagcgatcattgtctgtcgtgaattagccgtcacaggcttgcgtttactacttgtcgaacatggagaagtcatggctgcagcttggccgggaaaagtcaagacggctacacaaatggttgctattatcttgctgtttatcaataatatcccattcagcctgatcggtattccagtagatcaaatcatgctttatgcttgtctgatctttactatctattcaggtgtggattacttcatcaaaagggatcctcagagtcgaccgcaagcaggcagctgctt

SEQ ID NO: 21416 - DNA, 306 bp, Enterococcus faecium
atgtacgcaattattaaaactggtggtaaacaagtaaaagttgaagtgggacaagcaatctatgttgaaaaacttgacgttgaagcaggagaaaaagttgtttttgacgaagttatcttagtaggcggagaatctacaaaagtaggcgctccaactgttgcaggtgcaactgttgaaggtactgttgaaaaacacggcaaacaaaagaaagtcgttactttcaaatacaaacctaaaaaacattcacaccgtaaacaaggtcatcgtcaaccatatacaaaagtggttatcgacgcgatcaacgct

SEQ ID NO: 21417 - DNA, 2208 bp, Enterococcus faecium
atgaaagctgctcaaaagacggctttcggcagttttcatttgtttagtagcgtcttgctttcacgagaaggaaaaggagaagttatgtcagaaaaacaagtattcaaaacgacatggggcggccgtcccttacaaatcgaagtcggtcagctagcaaaacaagcaaacggagccgttttagtccgttatggagatacagtagtcttaagtgcagctgtggcctctaaagaagcaaaagatacagactttttcccattaacgatcaattatgaagaaaaaatgtatgcagcagggaaaatccctggaggtttcatcaaacgagaaggccgtccaagtacggaagcaacattgactgcccgtttgatcgaccgtccaattcgcccgatgtttgcagaaggcttccgtaatgaagtccaagtaacgaacatcgtgatgagtgtagaaacagactgctcgccagctatggcagcaatgctaggttcttctttagcactatcaatctcagatatcccatttgacggcccaatcgcaggcgtagaagttggtcgtgtaaatggcgagtacgtcttgaatccaacagtagaacaagcagaacaaacagatatcgaattgactgttgccggaacgaaacaagccatcaatatggttgaaagcggcgcgaaagaagtttcagaagaagacatgcttggtgcattgctgtttggttttgacgctatcaaagagttagttgctttccaagaagaaatcgttcaagcagtagggaaagaaaaaatggaagtgactttactgcaagttgatgaagtattgaaaaaagaaatctttgatgcttcttacgctacaatgaaagcagcagtaatgactgaagaaaaacttgctcgcgaagataatatcgagcaggtgaagatcgatatccgcgaagcttatgctgagaaatttgcaggtcatgaagatgaagatcacttgttgaaagaagttaaacaaatcacagaagatcttgaaaaagatgtcgtacgtgaattgatcaccatcgataagatccgtcctgacgggcgtaaattggatgaaatccgtccattgtcatcagaggtcagcttattgccacgtgtacatggatcaggtttgttcacacgaggacaaacacaagctttatcagcttgtacactcgcacctctaggagagcaccaaatcattgatggtttaggggtggaagtcagcaaacgattcatccaccactacaatttccctcaattttctgttggttctacaggacgtgcaggctctccagggcgtcgggaaatcggacatggcgcattaggtgaacgtgcgttagcacaagtaatcccttcagaagaagaatttccttatacgatccgtttagtagcagaagtattggaatcaaatggttcttcttcccaagcaagtatctgtgctggcacattagcattgatggatgcaggtgtaccaatcaaagcgccagtcgccggtattgcgatgggacttgtttctgatggtgaaaactatacgatcctaactgatatccaagggctggaagatcatcttggcgatatggactttaaagttgccggtacaaaagatggtatcactgctttacagatggatatcaagattcaaggaatcacagaacaaatcctaactgaagcattaactcaagcaaaacaagcacgtatggaaatcttagaagaattgacttcaacgattgctgctccacgtgaagaattaagccaatatgcaccaaaaatcgaaatgatccagatcgaacctgctaaaatcaaagatgttatcggtaaaggcggcgatacgatcaacggaatcatcgatgaaactggtgtgaaaatcgatatcgatcaagatggaaaagtaagtattgcttcagctgatgcagaaatgatcaaaaaagctatcaagatcatcgaagatttgaccaaagaagtcaaagttggtgaagtttatctagggaaagttgtccgtatcgaaaaattcggtgcattcgtcaacttgatcaaaggaaaagatggacttgtccatatttcccaattagcaaacgatcgtgtcaataaagtcgaagatgttgttaaactaggtgatgagatccttgtgaaagtaactgaaatcgataaacaaggacgcgtaaatctgtcaagaaaagcaatgttgaacgaagatggttcaacgaaaaatgaagaaaaa

SEQ ID NO: 21418 - DNA, 2013 bp, Enterococcus faecium
gtgaactacaaaattagttatctcctgaaaacaccaagagaaatcagtctagaaaaagcagcagagatcatcgaagtaaatacaagcgaggcgatcaaacaattaactccttttgccgaatatgtggatgatacccgtatccgtataaagaaattccgagcaatcgactgggcagaaaaatttttggatattactcgatttgaagctgtgtataccgaacaagagcgaagagatcttctttatttgatggtttattcgactgcaacgtctgtttctgtttttcattttcaagattttcttcaggtttctaaagggacagtcctgtcagatatcaaaaagataagaaatgaattagaagtggaagattgtcagctgtcgtatactaggaaaactggttttaggctgctagggtcagaagcaatattaagaagagaagcaaaaaatcgcactgctcgtttgatgcagtcacttgctggaagatttgggctcacgtatttaaccgcaaccctttccattgattattacgccaaagttagagatttgctagataaaacgatttcactatcagatcttcgattcgcaccaaatcgaatggatgaattagcttattatttgagtttgacaaccattcgaattggaaaaacatccatggaactggtaaaagatgctgaactgttggcttctcttgcagtcactgacattagtcgacaagtattgactggccttggctattccgaacatcaaaattcggagattatatttttctctctttgcttagcatcgatcgttgaaggagatgtccaggagcctgcacttgattttttgctggaatgttcttcagaagtcatccatcgcatggaattcctgatggccgtagaatttgcttcgtttcgtgaattattgatgaatgtcttttatcacttggtccctgcctattttcgtatttcctattctttttatttacctaatgtgatgatcgatcaaattaagcatcaatatgcttccatctacgaaatgacaagaaaagcattacttccgttagaaagacgaatagggaagagcatccctgaagaagagattggttttttcactatactatttggcggagagatcagaaaagcggacgcagaagaaagaaatagaaaaataagagccgtgatcgtctgtccaagtggcattagctcttcattgatcttaaaaagtgaacttcagcaattattcccgatgatcttttttacagagactaattcagctgaccgcttacacgaggttgacgaaacttcttacgatattattttttctactgtacctctcacacttactgataagaaaaagtctctctatgttctgcatccaatcatgactgacttggaaaaaaatcagctgatcaatcaagtacaaagagattggctgataccaggattttcaatgccttctgcccaagaattgttgtcggcgctactgccttatatcgaattaaaagaaggcgtagacgaagaaaagctctatcaagtattaaatcgtaaaatgaacaaacttttagaaaagaaggaggatcaacgtcctatgctatctgaattattaacagaagaaatgatccaattatcggatcaaccaaaaaactggcaagaagcaatcacatttgccgcacagccgctattatcagaaaataaaatagaagaaagttatatcaaagctatgatcgagcgcgtggagcagtatggtgcgtttatccatattggcgatcacatcgcattacctcatgctcgtccagaagatggcgtaaacgaagtagggatgtctttgctgaaacttcaacaacctgtggatctgcttgataatccagcccatcccattagtttgttcatctgtttagctgctatcgataatgaggcacatcttcgggctttggcaaatttaacaaagctactttctaataaacaaaatcttcaagatttattacacgcatcaacaaaagaagaaatattagcgatcataagaaaaggagacgaa

SEQ ID NO: 21419 - DNA, 708 bp, Enterococcus faecium
atgactgaaaaaatcttataccagcacgggacattaggagctttgatggctggcttgatggatggaacagaaacgattgctcatatattagaaaaaggaactctgggattgggaacattgcatgggcttgatggtgaagtcatctttttagatggcgtagcttatcaaggaagatcagatggctcagttgcccaattagatggaagtgaacttaccccctatgcagcaattacagattttacgccagatactagtttttctgtctcaaaaactgcagatggagaacaattgaaaaaagacatattagtaagagaagccggggaaaacctatttttggcagtgaagataactggattattcaaaaatatgcacatccgtatcatgccgaagcaagaaaaaccttacagaagactagcaaaaatttcagagtctcaaccagaattccaacaaagcaatgtccaaggaacattagtcgggttctttacgcctgaattattccaaggagttgctgcagcgggatttcacttgcattttatcgatgatacacatacatttggcggacatgtaatggattttgaagtggctgaaggaaaagttgagattagccgcatctcgtcccttgtacagcattttccagttgatgatccgacttttgttcacgaaacgattgattatgctgatttagcagcagaaatccaacaagcagaa

SEQ ID NO: 21420 - DNA, 1074 bp, Enterococcus faecium
atgtttgaaaacaaaaaaatcaaaatcaacgtaagtgacttccagaaagtatcagctgtaacggctgttatgatgcaaacgatattgagctttgctttggcaaacagccacagcgcaacaaatacagcttttcttggtaccttttacgtcatcgttaaatacacagcaccaatgtttatttttgcaattgtttataatatggtaaaaacaagtcagcatttgtcttattgggaatttttgaaagaaaagttttttgaactagtcgttccgtatcttctatggacgacggcttatctttggctatttccagcagtccaacaacaaactccgtatacggatactgcaagctttttactgaaatatgtcacaggtgatggagcgcctcatttatggtataccgttatgatgctgcagatccaattgttcatgccgttttttgtttggctcggttacaaagtatttgctaataaaaaatatgtatggccagtattgattggttcaacgattttatatgtcgcatggtatctgttctatcaaacacaagtattgactgggccttatcatgacagctggtacttattagatcggtttgttgctagtttcatgatttatggggtagccgcatttgtttatcacgaaaaagtctatcaatatttggacagagtacgttatcttttcttacctgttgccttagttatcgcgttcttttctgtccgttcattgctcgcacatccaggagacttgagctttgcgaatgcaccttacttgaatacgatccaaagtttatacagtttagtcatcatctttgctgtcttcataggcgcttccaaaatgattgtaaacgattcgccaaaattgccattgttcaaatggttgtctgtttatgcttatcgtacgtatttagccaatgtatttgttttccaagtactgttattattgtttaaagatagttggctgcagttaccttcaggagtcatgattcttgtagcttatctaatgacggcaagttgtgcatttgctttaagctggttacttcatatcatttgggtagctatcaaaaaaggtttcagcaag

SEQ ID NO: 21421 - DNA, 960 bp, Enterococcus faecium
atggaacaatttggaatgattactgcaacagccagcgtccttcctgaaaagattattactaataatgatctttccaagatgatggatacctctgatgaatggatttcgtcaaggacgggtattcgtgaacgaagatgtgtaacaaatcaggagacttctgatttatgcattttagtggcggaaaaattgataaaacagaaaaatctaaaccctaaagatttggattttattttagtagcaacaatgtcgcccgattacacgacaccatctgtagcagcacaagtacaagggaaattgggagcaactcatgctatcgcttttgatatcagtgctgcgtgctcaggatttgtttatgcgttaagcatggctgaaaaaatgatccgctgcggctcaactaagggactggtgattggtggtgaaacactatctaagctaatcgattggtctgatcgtacgactgctgtgttgtttggcgatggagcaggtgggattctcttagaagcgaatccacagaaaaaattgctgaaagaaaaattagcagctgacggtaccagaagtagctcattgaccgctggctaccagcaaaataaaaatccgttctattcagaagattcagaaggttcgtattatttgcaaatgactggcagagatatttttgattttgccgtacgagacgttgcaaacaatatccaagaagtcatgaaagacaaaccagttgattatctgcttttgcatcaggcaaacctcagaattattgagaaaattgcccgaaaagtaaagatgccgcaagaaaagttcctgaccaatatggataaatatgggaatacatctgctgcaagcatccctatcttattggatgaagcagtttctagtggaaagatcaccttaggaaaacagcagaaagtaatatttacaggctatggcggaggtttaacatggggaagtattctcatggagttg

SEQ ID NO: 21422 - DNA, 1293 bp, Enterococcus faecium; identical to SEQ ID NO: 21370

SEQ ID NO: 21423 - DNA, 3312 bp, Enterococcus faecium
atgtttttcccacaactttatacaattacttcttattctcttttacaaagtacgatacgtattcgagaatatgtacaagaagcaaaaaaacaaggctacacttcattagccataacggataaagatgtcttatacggtgcacctgaattctatcgtatttgtgtagaagaaggagtacagccaatcattggattacatcttagttatacttatgaagaaaaaaattatggcttgcttgcgtacgcaaaagatgaaataggttatcagcagctgatgaaactttccagccgaaaaatgatccaagaaaaattggaacttgcagaaatgacagaaaccgaccatctagcgtttgttgttccggcaaatcattctgtttctgaggctttcaataaagaggataactttttcggtcattggcagtttttacttgaaaatgtttttactagaaatttttatatcggcttgacagaaaacacgcctgatcaattgcctgaatggtatcagtatgtgataaaagaaaattattcgctttgtgcattacatcccatcgctagtttacaacaagaagaactttttgcacttgaagtgatgaaacatatcaaagagggaagccaaatacctttagaaaatttatctgcatctttaccactaacagcaaatgtctatcttctttcagaacaagaaatgatcaaacgattcgaaaaagcgggtctttcccaagctgtaataggcgcccagcgtttagctgaatcgatttcatttgaattccagttccatcagaaattacttccgcattatccagttcctaatggaaaacaagctggagaatatttaagagagttatgctattcgcaagtggaacgccgaatcactgactatacaaaggaataccaagaacgtttggactacgagttatctgtcatccatcaaatgggattcgatgattatttcttgatcgtatgggatgtaatggcttttgctcatagaaacaaaatcgttaccggtgcaggtcgtggttctgctgcgggttcattagtagcctatgtgttagaaatcacagatgtggatccattagaatatgatttgctgttcgaacgctttttaaaccccgaacgctttacgatgccagatatcgatttggatattcctgacaatcgacgtgaagaagtattgaattatgttcgagaaaagtatggacaatatcatatggcacaaatcgcaacatttggcacaatggcagcaaaaatggttcttagagatgcagctagagtgtttggtttatcgcaaagtgaagcaaaccgctggtcaaaagcaatacccaatcaattgaaaatcacattgacccaagcttataaaacttcgcatcaattagtagaattagttcaggcaagcgaaaaaaaccaacttttattcaaaactgcagtgattttagaaggattgccaagacatgtttcgactcacgcagcaggtgtagttatcagcgataagaatctacttgaactagttccgctccaacgcggttctgatgaagcttttctgacccagtatacgatgaatgaggtagaagcaatcggtcttttgaaaatggactttttaggactacgcaacttatcgattattgattttactttgaaagctgttaagcgagtagaagggtatgagatccgattaaaagagatcccgctaaatgatgcaaaaacgctgctcttgtttcaacgaggcgaaacctcaggagtatttcaatttgaatctgctggtatccggaacgttttacgaagattagatccagaaaacatcgaagatattgccgcagtcaatgcattgtatcgaccaggccctatgcaaaatatagataccttcattgccaggaagaaaggaaaagaagccattcgctacccagatgattcactgatcccgattttgaaaaacacatatggagtgatcgtctatcaggaacaaatcatgcagatcgcctcgactatggctggatttacattagggcagtcagatattctgcgacgggcagtgagtaaaaagaaaaaagacgtattagatgaagaaaagtcgcattttgtatcaggagcattacaacagggatattcggaaaaaacagcagcgaccgtatatgaatatatcgaaaaatttgcaaactatggattcaatcggtcacatgcatttgcttattcattcgtgggattccaaatggcgtatctaaaagcccatcatccaggtgctttctttaccagcctgatgaattctgttcggcataacacatcaaaattgaaagaatatattgcagaagcacgtaaaaataaactcaaactttcctcgccgtccattaatcaaagtaattccagttttgagttggtcaataaggaagaaatcagattcggactgacagcgataaaaggtattcggcgtgattttgtagaagatatattaaacgaaagaaaacaaaatggcccgttccagtcagtggatcaattcctcatacggatcgataagcgttggctgaaattagagttactgcaatcactgacagcagtaggagtttttgatgaattatctcctaacaggaaacaattgatgcttgatctcgaaggaaaaatccaaaatatcgtttacagtggtggaagtcttgacttgctgggaatcatggcattaaaagaagaagaagtcgctgactatacactagaagaacgcttgaagctggaagaggagtacttaggtatttatttgtcaggtcatcctgcagaagggtttgatcgtcttcgtttagctaaacaagttcagctgattacagatatcgtccctaatcaaccagtcaatttattagtgatgatcaaggaagttagagaaattcggacaaaaaaaggagaactgatggcctttgttgaaggaaccgacagtagtggagaaatttctgtcacagtttttccaactctttatcgtaaatatcgtaatttgtttgccgttgatcgagtgatctttgttcaagggcggagcgaaatcagcaaatataatcaggaactgcaactaattggagaaagctttgctgatcctaaccagttagaagcccagtatccttcacaaacttgctatttgcgtattacagaagaacgggaagatcccgagataatgaaacaattacaagtgatttttcagaaacacccaggatatataccagtagttatgtatcacgaaaaaacgcaacgaaaagtagttctgtcagatgcttattgggtggatgacagcaagagtataaagcggcaacttatttatctgcttggcgaagataatgtggttttcaaa

SEQ ID NO: 21424 - DNA, 825 bp, Enterococcus faecium; identical to SEQ ID NO: 20757

SEQ ID NO: 21425 - DNA, 690 bp, Enterococcus faecium
ttgggaaaacgattgatcaaagaagtacctactagctctttaccaagggaacgtatggaaatttatggcgcggaagctttatcggatcaggagcttttggcaatcttactgcgtaccggtcaacacccttatagtgtgatgtcgattgctggaaatctgttaaaaacgtttggaggactggcctctttacgacaggctactttgcatgagttagaagagattcgagggataggacgcgtgaaagcaatcgaaatcaaagccttgatcgaattaggtcgacgaattcagacggatcatgaaagagcggctccaccggttcgtaccagctacgaattggcccagcaattgattctggaaatgaaagatcacaaacaagaacatttggtttgtatttatttggacacgaagaatcaagtgatcttaaaaaaaacagtgttcatcggttcgctgaatcagtcagtcgctcatcctagagaaattttccattatgctgtacgttattgtgcagcaaggatcgttttagcgcataatcatccttctggtaatgttattccatcgcagcaggatatgaattttaccaaaaggatacaaaagtgtggagaaatgatggggatcactgtactggaccacttgatcatcggacgcaaacgatattttagtttgagagaagaaggaatgatggaagagaag

SEQ ID NO: 21426 - DNA, 698 bp, Enterococcus faecium
cgcatcactgtacgtcataaagttgcggacacaaaacgccaatatcgcgtgatcgacttcaaacgtaacaaagattaacgttgttgcaactgttcaaacgatcgaatatgatccaaaccgttcagctaacatcgcgttagtacactatgaagatggatgtgaaagcttacatcttagcacctaaaggactagaagtgggtatgaaacttgtttcaggtccagaagcagatatcaaagtcggaaatgctcttccattagaaaacattccagttggtactgttatccacaacattgaaatgaaacctggtaaaggtggacaattgatccgttctgctggtacaagtgctcaagtacttggtaaagaaggcaaatacgtattgatccgcttgaactctggtgaagttcgtatgatcttagctgcatgccgtgctacaatcggttctgtaggtaacgaacaacacgaattaatcaacatcggtaaagctggacgctctcgttggatgcgtaaacgcccaactgtacgtggtagcgtaatgaaccctaatgatcacccacacggtggtggtgaaggtaaagctcctatcggacgtaaagcaccagtttctccttggggtcaaccagctcttggttacaaaactcgtaacaaaaaagctaaatcagacaaacttattgttcgtcgtcgcaaaaataaataatta

SEQ ID NO: 21427 - DNA, 726 bp, Enterococcus faecium
atgaaaggaatatttatgataccagaagaatttcgccaatccttggcagaaaaagggatagagcttaccgatcatcaaatgaatcaattcgctatttattatcggacattagtcgaatggaacgaaaagatgaaccttacagctattacggatgaaaaagacgtatatctgaagcatttttacgattcacttacattagcatttgaagtagactttacgcaacctttatctttatgcgatgttggttcgggggcagggtttcctagcatacctttaaaaattgcctttccagaactgcagataacgatcgttgattctctgaataaacgaataaccttcttatctgagttaacccgattattaggaatcgatgcttccttatatcatgaccgggcagaaacatttgggcaaaatcctcactttcgtgcatcatttgaccttgtcactgctcgtgcggttgctcgtttgaatgtgttagcggaattgtgtttgcccttggctaaacaagaaggctatttttatgcattgaaagcagcaaaaagtgaagaggaattgacagaagcaaaacaagcgattgctttattaggtggtaaattcctcaaagaagaggcggttaccttgccgaatgtctctgatcaacggcatatcatcgttattcaaaaaaagaaaccaaccccaaagaaatacccaagaaagcccggactgcctaataagcagccaatcaaa

SEQ ID NO: 21428 - DNA, 1377 bp, Enterococcus faecium
atgaaaacaaaacaacagaaggctgttctttctaggcatcttgctaaatatgatataattaagggacgtaaaaacaagaaggaggaaaatcctatgcaacagccattggcttatcgcatgagacctcgaacgatcgatgaagtcgttggtcagcagcatctagtcggggaaggaaaaatcatacgccgcatggtcgatgctcgcatgctctcttccatgattctatatggacctcctggtactggaaaaacgagtatcgcaagtgcgatcgccggctctactaattatgcatttcgcatgctaaacgccgctacagattcaaaaaaggatctacaagttgtagcggaagaagcaaaaatgagtggtacagtgatcctcttattggatgaagtacaccgattagataaaacaaaacaggattttctgcttcctcatttagaaagtggccgaatcatcttgatcggagcgactactgagaatccttatattaccatcaatccagcgatccgcagccgtacacagatctttgaagtcaaaccattaacagaacaagacatccagttggcagtcgaacatgctttaagggataaagaacgcggccttggacaacaagcaatccagttagacgaagatgctcttcttcacctttcgcgtgcaacgaacggcgatttgcggagtgcattgaatgggctggaactggctacactatcgactccttcagataaagaaggaaggattcatcttacactgtcgatcattgaagaatgtgtccaaagaaaagctcttacccatgacaaaaatggagatgctcattatgacgttatttcggcttttcaaaaatcgattcgtggaagtgatgtggatgctgcacttcattatctcgcccgtttagttgaggcaggtgatctggcaagtatttgccggcgtctgatggttatcggttatgaagatataggtttaggtaatcctgctgctgcggctcgtacagtgaacgctgtattagctgctgaaaaattgggattgcctgaggcacgtatcccactagcagacgtcgtcgtcgatctttgcttgtcgccaaaatccaattctgcctacatggcattagatgcagcacttgctgatattcgagagggcaaagctggagatgttcctgatcatttgagagatagccattacaaaggtgcgaaatcactcaaccgtggcgtgggttatcagtatcctcatcattttgatcaggcttgggtcaatcagcaatatttaccagataaactgaagaatgctcagtattatcagccaaaagatacagggaaatatgaacaggctctgggtcaacagtattaccgtataaaagagtggaaaaagcatcctccaaaaaac

SEQ ID NO: 21429 - DNA, 2469 bp, Enterococcus faecium
atgagtgaagaaatcagagaaaacatccatgatgtcaatctaaccagcgaaatgaaagactccttcatcgattatgcgatgagtgttattgtcgcacgtgcacttcctgatgtcagagatggtctgaaacccgttcatcgccgtattttatacggcatgaacgaattaggtgtaacaccggataaagcccataaaaaatctgccagaatcgtcggagatgtcatgggtaaataccatcctcatggagacagtgcgatctatgagtcaatggtacggatggcacagccattcagctaccgttatatgctagtggatggtcatggaaactttggttctgttgacggtgacggtgccgccgctatgcgttataccgaagcacggatgagcaaaatcgctacagaaatgctgcgtgatatcaataagaacactgttgatttccaaagcaactatgatgatacagaaaaagaaccagttgtactacctgctcgcttcccgaatcttttagtgaacggaacaacggggatcgccgtaggtatggccacgaatatcccacctcataacttgtctgaggtagtagcggctatcgatttgctgatggataatcctgatgtgacgaccaatgaattgatggaagtattacctggaccagattttccaacaggtggtttggttatggggaaatcaggaatccgaagagcgtatgaaacaggtaagggttctattaccgtacgtgcaaaagttgagattactgagatgccaaatggtaaagaacggatcatcgtgacagaattgccttatatggtcaataaagcaaaattgatcgaacggatttctgaactgcacagagacaagcgtatcgaagggatcacagatttgcgggacgaatcttcccgtgaaggtatgcggatcgtcattgacatccgtcgtgacgccagcgcatccgttatcttgaataacttatataaattgacatccttgcaaaattcatttggattcaatatgttggcgatcgaaaaaggtgtgccgaaagttttgagcttgaaacaaatccttgaaaactatatcgaacatcaacgcgaagtcatcacacgacggacggtctttgaaaaagaaaaagcagaagcaagagcacacatcttagaaggtttgcgtattgctttggatcatatcgatgaaatcattgcgattatccgcgggtctaaatcagatgacgaggcaaaagcaacaatgatcgaacggttcgatttatccgatcgccagtctcaagctattttagatatgcgtttacgccgattgaccggtttggaacgggaaaaaatcgaaaatgaataccaagaactcttaaaactgattgaagatttaactgacattctggcaagaccagaacgtgttacagaaatcatcaagaatgaattagcagacttgaatcaacgatttggtgataaacgacgcacagaattactagtcggtgaggtcttaagtctggaagatgaagatttaatcgaagaagaagaaatcgttattacattgacaaacaatggttacatcaaacgtttggcaaataatgaattcagagctcaacgaaggggtggacgtggtgtccaaggaatgggtatccacaatgacgacttcgtcaaaaatctggtttcttgttctacccatgatacattgttattctttacgaataacggaaaagtgtatcgggcaaaaggatacgaaattccagaatacgggcgtacagccaaaggaatcccaatcatcaatttactaggtatcgattcgagtgaaagcatccaggcaatcattgcggtgacgggagaagcagaagaaggccactatctcttctttacgacgcgtcaaggtacagtaaaacgtacttctgtcactgcttttgctaacatccgaagtaatggtctgatcgcaattggtttgaaagaagacgatgagctcgtcaatgtgctactgacagatggtcaatctaatatcattattggaacacataacggctactctgtcactttcaaagaagaagcagtccgcgatatgggacgtacagcttccggggtcagagggatacgcctgcgtgaggaagattatgtcgttggggcagccttaatgaaggaaaatcaagaagtattagtgatcacagaaaaaggttacggaaaacggacaaaagtatcggaatatccagtgaaaggccgcggaggtaaagggatcaaaacggcgaacatcactgaaaaaaatggtccactagctggattgaccactgtttctggagatgaagacatcatgctgattacagataaaggtgtcattatccgtttcaacgtatcgactgtttctcaaactggacgttcaacattaggcgtacgtttgatgaagatggaagctgatacgaaagttgtcacgatggcagcagtcgaaccagaagctgcagaacaaacagttgaagaacaaggatcagaagaa

SEQ ID NO: 21430 - DNA, 267 bp, Enterococcus faecium
aatgtaaaagaagttcgcttaagtcctacgatcgacttgaatgacttcaatacaaaacttcgtaatgcacgtaagttcttggaaaagggcgataaagtgaaagcttctatccgtttcaaaggccgtgccattacccataaagaaattggtcaaaaagtcttgaatcgcttagctgaagaaactgcggatattgcaacagtggaacaaaaagcgaaaatggacggacgcagcatgttcttgacgctggcaccgaaaaacgacagtaag

SEQ ID NO: 21431 - DNA, 1227 bp, Enterococcus faecium
gtggtcttagtgagtaagaaaaaagaaccaaaaaaattgtctcatccgtcttctgatgaaaacaatttgactccttggcaaaaggctaaccgaaaatatctggcagaacaagagatgaaaaaccaagagccaaaaaaagaagacataacattagatacacccctttcagattctgaagaagaaaaaacggttcaagaggaacagcaagaagaaagccagtccgagaaaaaaatcgaattttttgaagagatcaagcaaaagaaaaacggtggaccatataacggttcttttttgaaccggctgcccaatttaaaaagtcaacggcacaaagtactatttcgtcggttagctttgatcatcactgtattgggtataccgctgatttttttgatctattatgtttctccttatagcaaattacaagcagttgcagtatcaggcaataagacagtcaacagccaagaaatcatctctgatacaaaattgtcattaggagaaaatgtttggggacagtattttcatcgatctacttatatcgatcgccttaaaaaagcacagccaagaatcgaaacagcaaatatacatttcaaagggatgaatgaattcgatttggatgtaacagaatataaagagattgctttgatcgcaaaaaacaatcaatactacccagtgattgaaaatggaacagtattagatgaaaaagtagcaaatcctacaaaaaatctccctatcttggaagagttcaaagactctgcaaaaatcaaagaattaacaaagcaatacaatcagttatcatcagaattacaaaaagcaatttctgaaatcaagtacacgccaagagcaagcaataaaaatctgatccaattgaatatgaatgacggcaatcaagttattgtaaatatcaataatcttgcgaaccaaatgaaatattattcgcaagtagccaaagatatggatgaaaaaggtgtgatcgacatggaagttggtatcttctcgcatccttacggtagcactcaagaaacggaagaatcgggccaatcggaagaaacaactgaaagtgaagaaaatgcggatcaaacaaacgaatcaagtgaagaggcagaaacgcaaaaagcacaaacacctggatcgtctagcacaaacggatcatctgattcaaatgattcaagtgaaacaagtcaaatagaagataatccaagtacaactccgtcaagtttaaatgaaaat

SEQ ID NO: 21432 - DNA, 1071 bp, Enterococcus faecium
atgtacgatcaattacaagcaattgaagaccgttatgaagagcttggagaacttttaagtgacccagaagtgatttctgatacaaagcgttttatgcagctttcaaaagaagaagcaaacacgcgcgaaacagtcgaagtttatcgtcgttataaagaagtagtacaaggaatcaccgatacagaagaactgcttggtgaaaaactggatgatgaaatggctgaactagcaaaagaagaattatctgaattaaaaaaagaaaaagaagtcttagaagaaaaaatcaagatcttgcttttaccaaaagatccaaatgacgataaaaatatcatcatggaaatccgtggagcagcaggcggagacgaagcagcattattcgctggcgatcttttcaatatgtaccaaaagtatgctgaagcacaaggctggaaaacagaagtgatggaagctaacgttaccggaatcggtggatataaagaagtgatcatgatgatcaccggagacaacgtatattcgaaattaaaatatgaaagtggtgcgcaccgcgtccagcgtgttccttcaactgaatcgcaagggcgtatccatacttccaccgcaacagttgtcgtgatgccagaagctgaagaagtagagatcgatattgaagacaaagatatccgtacagatatctatcatgcttcaggtgctggcggacagcacgtcaataaaacagcatctgctgtacgtttgactcacttaccaacagggatcgttgttgctatgcaagatgaacgttctcaaatcaagaaccgtgaaaaagcaatgaaaatcttgcgtgctcgtgtgtacgataagatccagcaagaagcacaaagcgagtatgatgccaatcgaaaatcagcagtcggaactggggatcgttcagaacggatccggacgtataatttcccgcaaaatcgtgtgactgatcatcgtatcggattaactatccaaaaattagatcagattttagcagggaaattagatgagatcgttgatgcattgatcatgtatgatcaaacatcaaaactggaagctatgcaaaatggg

SEQ ID NO: 21433 - DNA, 1245 bp, Enterococcus faecium
atgactgacttgatgcaattaggacaacaggcaaaagatagcgcgcaacaactagcacttatgcctacaaaccgcaaaaatgagctacttgttcaaatggcacaaaccatcaaaaagaatcaacaagcgatcattgaagcaaatcataaagacttagaaaaagcagtcgaaaacaatatcagtgaaacgatgcaagaccgcttgcagctgacacctgagcgaatcaatgccatggctacagagatcgaaaaaattgcttcgttagacgatcctattggaaaagtagatgagatgtggacgaacaccgacggattgagaatcggcaaaaagcgcgtgccactaggcgtgaccggcatcatttacgaatctcgtccaaatgtcacgacagatgcagctagtctagcattcaaatcagggaatgccgttatccttcgcggtggcaaagaagcattcttctcgaatcaattattagtccaattattgcagcaagtactggtcagtgctggcgaatctccttatgccatccagtttgtcgatgatacttctcatgaaactgcaggacagttgatgcgattgacagaatacttagatgtgctgattcctcgaggcggagcaaaattaatccaacgagtcaaagaacaggcaacggtacctatcattgaaacaggtacaggaaataatcacgtatatatcgataaagaagcacagttatctatggcagtgaacatcatcgtcaatgcaaaagcttcccgtccatctgtctgtaacgcggcagaaacattgctgatccattctgagatcgcaccttttttcttgccagctattgaaaaagaactggtagaacacggggtctctttacgtgcggatgctcgtgcgttagaatatctagagacggctgctttagcagaagacacagattgggatactgaatatctagattatatccttgctgtcaaagtggtcgattctttggatgaagcaattgcacatatcaatcggcataatactaaacattcagaaacgatcgtgacagatagttatgcggctagtcaacgtttcttaaatgaagtggacgcggcggctgtctatgtcaatgcctccactcgttttacagacggatcggtatttggttttggtgcagagattggtatctctactcaaaagttgcatgcccgtggtccaatggggttaaatgaattaacttccacaaaatatatcatttatggcgatggacaaatccgcgaa

SEQ ID NO: 21434 - DNA, 1770 bp, Enterococcus faecium
atgaacgacttattaaaacaatactttggctatgatgagtttagacctggtcaaaaagaaattatccagaaagtcattgatcaggaaaatgtattaggaatcatgcctaccggaagtgggaaatcaatctgttaccagcttccagctttactattagatgggcttactgtggttgtgtcccctttaatctctttgatgaaggatcaggtggacgcggcgaatcaattaggtatacccgccacttttatcaatagctcgttagatggttacgaaacagctagacgcttccaagaaatcgatagacagcagtaccgtttactttatatcgctcctgaacgttttatcatgccggattttatccaagcaatgaagcgatggaacgtccgtatgatcgctattgacgaggcacattgtatctctcagtgggggcatgatttccgcccaagttatttacagatggcgaaccagctagatcaactgccaaatcgtcctgtaattgttgctttgacagctacagcgactgtgcaagtagctgctgacataaaaagacttttaaaaattccagaaaacaaccatattcagactggttttgaacgagaaaatctacgatttcaagtaattaaagatcaaaaaaaagaacaatatctaatcgaatatttaaagatcaacaaaaatcaatctggtatcatttatgcagcaacgagaaaagaagtagaccgtctctatcatttgcttaaaaaattcgatttttccgtgggtagatatcatggtggtctaaatgagaatgagcgaacagaaatgcaagaagcctttttatacgatcgcttgcagctgattgtagcgacaaatgcatttggtatgggtataaataaaagcaatgtccgttttgttatccattatcaaattcctggctctctagaagcatactatcaggaagctggtcgggcgggaagagatggtctttccagtgaagccatcctgcttttctctcctcaagatatccaagtccaaaagttttttatccagcagtcccaaagagaagaagggcaaaagcaaaaagaatatgaaaaattaaaagcgatgacagaatacgtgtatattgagtcctgtcttcagcaatacatcctaaactattttggcgagacaagcagtccgtgcaaccgttgtggtaactgtttagatgacagagaaatagtagaagtaacgacagaagcacagatggttctttcttgcttaaaacgtatgggtgagaactatggtaaacaaatgctgatgaaagtcttagcaggatcgaaagaacaaaagctgcaagctttaggttttggacatttatctacctatggactgatgaaaaaccaatcgcaaaaagaaacgatgcagttaattgaatatttgatatcgaatggctatcttctgaccatcaatggtgagtatcctgttttgaaagtaacagaaagagggatacaagtattgaaaggacaagaatctgtttatcgaaaggaacccaagaaagtccagcagctatcggatgaagaaaccgatacactatttgaagtgctgcgggaactgcgaacggatctagcatcagaagcaggcgttcccccgtatgtcgtattttcagattccacattgaaagaaatgagccgaatacgtccatcaagcagattggagatgcttcagataaaaggagttggccaaagcaagcttgataaatatggcgaagcctttttatctcggataaaaaatgcggactctaacgttctggataag

SEQ ID NO: 21435 - DNA, 987 bp, Enterococcus faecium
gtgaggagggaattgtctatgaaaattattaattttgaggaagtagtagcttcttttagttttgaagaagcgattcaagtaatgaaaaaatgtttttttgattatgaaagtggtaaaatcagccaaaatcctcgattggtggaaattttacctgacggaaaagacaaaaatatgtttgcgatgatgcctgcttatttgggggagaacagatattttggaacaaaagtcattaccgcttttccggataatcatcagtatcatttaccttctcatttaggagagattttcttgtttgatgctcaaaacggactacccaaagcattgataaacgcaaatgcagtcacctggattcgaacagctgctgtatctgcgctggcaacagattacttagcaaatccgcatgcagaaacacttgctttaattggagctggtcaacaagcattgtcgcatttgactgcgatttctaccattcgtcccatcactacagtgtttgtttacgatattttagaagaaagacgaaatacttttatcgctaaagctaaaaaacagtatcctaaaataacgtttataaatgcaatatcagtagaagatgcagtacgtccagcggaaatcatttgtacgttgacctctagtaaagaggcatttcttcaaaaagagtgggtaagggaagacgcacatatcaatgctgtgggcacatttactcctgatacaagagagataagtacatcgttgatggaaacttctcaaatctatgtagatgattactcagctaccttaacagaaagcggggacctgcttatagccatggcagaaggagatttagaggaatcttgtattgttggtacattaggcgaattagtttctgagaaaaaaacattttataaaggagaatcgaggccgacgattttcgacgcagttggtctagctattgaagatctttgttgtgcagaatatatttataacaaattagagaaaggggctttaaaa

SEQ ID NO: 21436 - DNA, 764 bp, Enterococcus faecium
  misc_feature (527)..(527): n=g, a, t or c
gtgaaagagatccaatcagcaaaaaatccaagaatcaaagaattaaaaaaactacataaaaagaaatacagagaagaaaaggcagaatatcttttggaagggttccatctgatcgaagaagctgcgtcgtctgatgcagaaataaaagaactttttgtgacacagagaggtatgaaagaatggggagactggctggctgtaaacaaagagatttctacttttctagtttcagatgaggtcatgaccgctatgtcagatctacctacaccgcaagggatcttagcagtgatgacgttaacatctgaagatacgccagatttttcaggaggctggcttttactagataatgtacaggatcctggaaatgtgggaacgatgatccgtacggcagatgcgtttggtatggctggtgttttattaggtaaaggaacggcagatatttatagtacaaaggtgctgcgaagcatgcagggaagcaattatcatttgcctgtgttacaaaaagatttggcagatgtaatccctgntaatgaaaggcaaagggtttacggtgtacggtacagaattaaatgaagaagcacatgcattagacaaagtagaaaaaacagaggatttcgctataatcatgggaaacgaaggtcaggggagtcagtcaggaaatcttgtctttgactgatcagaacgtatatatcccaatgaaaggaaatgcggaatcattgaatgtcggagtcgcagcagggatcgttctttatcatttttcttta

SEQ ID NO: 21437 - DNA, 252 bp, Enterococcus faecium
  misc_feature (216)..(239): n=g, a, t or c
atgattttagagaataaattgggattaaccaatcaagttgagttggctaaggttgaagaaaaactcagtaaacaaaaagcgaaagaattgtacgattgtggaaaaataaatgaaatcgaagttggtacatttaaaggtttatctgaaattcatgaatttctattttcggatatttacgattttgccggaaaaatccgatcccgcaacgtttatcgnnnnnnnnnnnnnnnnnnnnnnnncatgttccaaggc

SEQ ID NO: 21438 - DNA, 255 bp, Enterococcus faecium
gaaatcggttcgaaaccgccattatgttggagaaaaccttgccatcgccaagcagatatcgctaaaaaaagagaacctctgctcgaagttgaagcggaaaaagcggtcaatgaatttgccagcccgctaacgggtacagtttcttctgttaatgataaaatcggtgaagatatcaatatcttgaatgattcagatgaaatgaatgcgtggatcttaagtttcaaagatgttgatccaaaagaatttgacgaatta

SEQ ID NO: 21439 - DNA, 1230 bp, Enterococcus faecium
atgtacgaaaatcttttgccacgttttttacgatatgtcaaaacagaaacacgctccgatgcaacaagcaaaacgactccatcgactcagacacaagttgcttttgcgcaagaattgaaaaaagaattagaagagttaggcttagctgatgttttctataatgaagataacggattcgttatgggaacattaccaagcaatgttgatcatgaagtgcgttccattggatttatttcccacatggatacagcagattttaatgcagtaggagtcaatccacaaatcattgaaaactatgatggcgagtctacgatcgtactagatgcggaagaacgctatacattgaatacaaaagattttccaaatttgaaaaattatgaaggccacacattgatcacaacagatggcagtacattactgggagcagatgacaaatcagggattgcggaaatcatgactgcaatggagatcttgatcaataatccttctatccctcacggtaccatcaaagtggcttttggtcctgatgaagaaatcggtgtcggagcggataaattcgatgttgagcaattcgatgtagattttgcttatacagtcgatggtggtcctttaggtgagttgcagtatgaaacgtttagtgctgctcaagcaaatattacgatccaagggaaaaatgtacatccagggacggcaaaagatacaatgatcaatgctctacagttagcaatcgattttcataatcagcttccagccgatgaagttccagaaaaaacggaaggatacgaaggtttcttccatttgatggcattggatgggaatcctgaagaagcttctatgagttatatcattcgcgatcatgatcgtgaaaaattcgaagcacgcaaagcacaaatcacacatatccaagaagagttgaatcagcgatttgatcaagaacgaatcaaagtagatatgtatgatcaatattacaacatgaaagaaatcattgaaaaagatatgagcatcgtggaattagcgaaacaagcaatgatcgagcttggtatctctccagtgatcgaaccagttcgtggaggaacagatggttcaaaaatctcttacatgggtattccgacgccaaatctatttgccggaggagaaaatatgcacggacgattcgaatttgtttctttacaagtaatggaaaaagcaacagacgtgattgtaaaaattgcagaattgaacacaaagagt

SEQ ID NO: 21440 - DNA, 528 bp, Enterococcus faecium
atgaaaaaacagctgttgattgtagacggctacaacatgattggttcgtggccggaacttgtccagcttaaaaagcaggacaaaatggcggatgcaagagaagctcttttacatcgtttatcaaattatgcgaaatatgaaggaatggaagtcatcgttgtcttcgatgcccaactagttccgggcatccaacaaaattataagaaataccagttggatgttgtttttacgaaagaagacgaaacggctgacagttatatcgagagaatcgctggtcagctgaatgaccgtttgacacaagtgacagtggcgacaagcgatttagcagaacagtggatgatcttttcccaaggagcattacgaacttctgcttatgaattatataagacgataaaaaaaacggaaaaaacaatagcccaagaaaataaagatatgcattttattgatttccgacgtaattctccatggaatgaagagcagttaaaaaaattgtcccaaaaattggacgatttaatgagaaaaaataaa

SEQ ID NO: 21441 - DNA, 363 bp, Enterococcus faecium
atggctcgtattgcaggagtagatattcctcgtgataaacgtgtagtagtttcacttacttatatctatggtattggtaacactactgctaaaaagatcttagctgatgctggtgtatctgaagatgttcgcgttcgtgaattaacgaatgaacaaacagatgctatccgtgcagaagtagataaattaaaagttgaaggggatcttcgtcgtgaagtgaacttgaacatcaaacgtttgatggaaatcggttcttaccgtggaatccgtcatcgccgtggattgcctgttcgtggacaaaacacgaaaaacaatgcacgtactcgtaaaggcccagctcgcgctatcgctggcaagaaaaaa

SEQ ID NO: 21442 - DNA, 1278 bp, Enterococcus faecium
atgaaaacactcattaaaaacggtcagatcaatacacgaaaaaatatgacgacaccagcagaaatttggatagaagatgggcgaatcaaagcaatcggtacaggattctcagaagccgaatttgatgaagtgtttgatgcaaagggacaattgatcacacctggtttagtggacgtccatgttcatttgagagagccaggatttacatacaaggagacgatcgaagctgggactcgctcagctgctcgtggcggtttcactactgtatgcgcgatgccgaatttaaatcctgtacctgatacggcagaaaagctgagacaagtatatgacatcattagaaaagatgcagttgtgaaggtattgcagtatgcgccaatcacagaaaatctgcgaagtgagaaattagttgatcaagaagcactgattgaagaaggtgcttttgctttcacaaatgacggtgtaggtgtccaaacagctgggacgatgtatctggctatgaaagaagctgcaaaaaacaataaagccctagtagcccatacagaagatgaatctttattatttggcggcgttatgcacgctggcaagaaggcagaagaacttggtcttcccgggatcttaagcgtaaccgagtcttctcaaattgctagagatctgttgctagctgaagcaactggtgttcattaccatgtttgccatgtttctactaaagaaagtgtccgtgtaatcagagacgcaaaaaaagcaggaatccacgtaacagcagaagtttcaccccatcatcttattttgatcgacgaagatattcccgaagatttcggcttttggaaaatgaacccgccgctaagaggacgggaggacagagaagctttgatcgaaggcttgcttgacggtacgatcgattgcatcgctacagaccatgccccccatggattagaagaaaaaagccaaagtttcatgaaatcaccatttggtatcgtaggaagcgaaacagcgtttcaactgatctatactcattttgtagaaactggtcgattcacgttggaacaagtgatcaattggttggcagttaaaccggctgagatttttggtttgaatgcaggaacgctaacggttggtgcccccgctgatgtagcagtttttgatattacacaaacttgcacgatcgataaagaagactttttatcaaaaggggagaatacaccttttatcggctggaaagtaaaaggcgaaacacaaatgacttttgtcaacggaaaacttgtgtggcagaagggagaa

SEQ ID NO: 21443 - DNA, 498 bp, Enterococcus faecium
atggtttatatcgatccaaaacatttggaattagaagaccgcgttgttgcaattaaccgtgtaacaaaagttgttaaaggtggacgtcgtctacgttttgctgctttagttgttgtcggtgacaaaaacggacacgtaggatttggtacaggtaaagctcaagaagttcctgaagcaatccgtaaagcaattgaagatgcgaagaaaaacttagttgaagtacctatggttggttcaacaatcccacacgaagtaatcggtgcttttagtggtggtagaatcctaatgaaacctgctgtagaaggttctggggttgctgctggtggaccagttcgtgccgtattagaattagctggggtagcagatatcacttctaaatctttaggctcaaatacaccaatcaacgttgttcgcgcaacagttgaaggtttgaaacaattgaaacgtgcagaagaagttgcagaacttcgcggcaaatcagttgaagaattaatcgga

SEQ ID NO: 21444 - DNA, 1357 bp, Enterococcus faecium
atggggtataaagaattaggaaaagacatattagcaaatgttggtggttctgaaaatgtaagcagtttagcgcattgtgcaacacgacttcgatttaaaagatgacagtaaagcagatgaatcagctattagaaatcttaaaggtgttgtaggtgtagttaatcagggtggtcaatttcaagtcattattggtggagatgtaaaatttgtatttgccgaaatcgataaactaggagatttttccgcttctaaagaaagtagttcagaagcaaacaataaagggattgtatcaaaagttttagatacaattgcgggtatttttgttccaattgttccggcattaacaggtgcagggatgttaaaagcattattagctctattagtcatgttggaatggatgacaccagaatcgcaaacctatcaatttttaaatttcattggtgatgcagccttttattttttaccggtcttattagctagttctgctgcaaaaaaattcggatgtaatcagtacattgcaattaccttaggagcaattttgttacatccgacttttacagcaatgattgcgggtgctagagaaacaggtgagtccttagctttattcggattacctgtgacgttagctaactatggttcttctgttattccgattattttagctatttgatttatgtcatatatcgagccgattatcgataaattgatgcccaatgctgttcgaatatttatgacgcctctgttaacattgttgattgttgcaccaattaccttaattgtgattggtcctttgggtacattcttaggtaatgggttagggtcacttattgaatttgttaatacgtatgcaagttggttggttccattacttgtgggtgcatttactccattacttgtgatgacaggtatgcattacggtttaattccaatcggtattaatatgttagcaacatctggatttgatactgttgctggtccaggtatgatggtttccaatattgctcagggtggtgctgccttagcagttgcctttagaacaaaacaactttctgtcaaacaattagctgtttcttcaggtctgtctgcttttatgggaattactgaaccagctttatacggaattaatatgcgattcaaaaagccgttaattgcttcaatggtaggtggtggagcagcgggactatttattggaatcatgggtgtcggtcgatatgctcaagttgctcctggcattcttgcgttaccaagtttctttggggaaaaaggactatcaaattttatttacgcagcgattggttgtgcgattgcatttgttgtcggttttattgcttcattcattttaggtattgatgaagag

SEQ ID NO: 21445 - DNA, 186 bp, Enterococcus faecium
atgaaagaactattttcgacatacaagctccctatcatctttggggtacttggattgatattagccgttttatggatcaccgtgggctttttcaagaccttattgatcttgatcatggcagcgatcggcgtcgctatcggtttttatctgaaacaaacgaaaatcttagatcactattttaaatct

SEQ ID NO: 21446 - DNA, 1023 bp, Enterococcus faecium
ttgaaacctactatttatgacattgcgaaaaaagctaatgtctcaaaatcaactgtctccagagtattaaataaccagccaaatatctctgataaagcaaaagcaagtgtacttcaagcaatcaaagaattgaattatgaaccgagcaaaattgcaagaggactgtcaggaaatggttttgacgcgattctagcattatctcatcgtacttctcatacgacctatggcaatccttttttttcagatgttattcaatccatttctgccgtttctgaacaaaataacttcgacttgattctacaaacggcaaaaacaccagaagaagagctagaaaaatgcgcgaaaaagatccaagaaaaaatgatccgaggaattattattttaagctctacgatggatgaaacacttctttttgaattggatcaatacaatattcctattgtggtaatcggaaaagtcggaaacgactacacgaacatctactcagtggacacggataatttccaggatagttacgatttggtggaaacactgatcaagaatggacaccgtcatatcggctgtctccatgctccgacagaagtttatgtatccaatgatcgtctcaatggttaccgtcaatgcttatttgatcaccacctagatatccgtaatgaatggattatagacggcggctttcgcttagaagatagcatggcagcaatgaatgatttaatgaagctacgagaaagaccaactgcgattttttctaccgatgcattaaaatcattgagtatttacaaagtggcagaacaatctggaaagcagatacctgatgatctttcgatcgcaggattcagtgatcccttattgtcctccctattttcgccacagttgactcggatagacattccgacaaatcagttaggaatcaaagccacagaacttttattccaactaatccaccaccaataccctgaagaaaaaagaatcattctttcaaccgagattactctcacagattcgatccaacaacaagaaatg

SEQ ID NO: 21447 - DNA, 2726 bp, Enterococcus faecium
ggcaataagtggtacaaatgtgatcttcatattcattcaactgcgagtcagtgctttcaggataaaaaggttactgctaaggaatgggtagaagaatgtttaaacaaaggactcgattgtgttgcattaactgatcacaatacaggggaaaatattgatgaatataagaaagtggctatcgaaaatggcttagatttttttcctggagtggaattaacgtgtggagaaaatggaactcatttactagtcctatttgataaaagtgcatgtacaaatgatatctctgatttcttaaccaagatgggtataaaaagagaggattgggccagcgctgcagcttgctcaatgaaatcagttttagaagttattgattttgctgagcacgagggcttgctcgttattcctgcacatatagatgagtttaatggaatttcttcagcaaaatttggaaatctaggaaagatatttgaatcagaaaatatatatgcagtacagacggttcaaaaagaattttttgaaaatcgctcacaaatgattccctcatctaagcgtgacactatctatgatagtgtgaatgccagatatgatggtagagttggaaaagatactttggaatcttggtataaatcagttgttgaggcagaaaaaaataatatgacatttcttagcttttctgataacccacactcgaaaggaaattcaaaacatggactttggggaataggcacaagatattcctatataaaaatgaaggacgaacctgacttgggatcacttcgcgatgctttaatgctaggcgaaactcgagttcattctgatttttctaatttctccattaatgaaaatgaagttttattggaaaaattaagcttttctgggaccactcttagcacaaaagaagttgtagtcgaattcagcgataatttaacttcaattattggaggaagaggaacaggcaaatcttgtattacaagattcttggtctatgtccttggaaaggaagcagaacttgatcaattttctgaaatacaaagtgattatcagaactttgcacaaattgaacataatggctctggaatatttttgaaggatacaattgtgaaactgaatattttctataaggggacaaaatatcaaataataagaacacaggatagacattctatttatgaatttacacaagagaatggtctggttgaaaaagaaacagaacggttgagaatgatttccgataaggtgagtatatactctcaaaaacaaatttatgaaatttcaaaaaatcaaactagtatactagaattactagatggatataactctgatttgatttcagagtataaaaatgagattgaaacatgtgtaaacgaaataagaaaattaaattgggatattgtttctgtgaaaaaagaaatacaagataaggcgaaggtagagcttgaaattgaagatttaaaaaaacaagtagaaaagctatctcataagagttataaagatgtttatgatgagtattcaaaagagacagatatttatagggaactgaaacgtgatgtggaggcacttaaggaaattcccaaaaatctaactgatagtgttgacaaaattgactttggcaatggtataaaagttacagacgaaattgatgaacaccgcggagaattgattaagaatttagtgaccaatcgggctaagattcaaacaataattaatgaaatgtcagatgaaattgatagttatagagcagagctgaataaatcagattggaaagttaactataatgaggtttcaaagaggtatcaaagaggtatcaaaaacttagtgaagagttatctcaagatgaattaaaaatgttacaaaaccttgattctttatatcaatctttatcaaaaactgaagagcgattggaagaaattattcaacaagaaataaagcttaaagattaccaagttgaggttgactcagcaatgtcaagaatgaataaatcatatcaaaatctctattctgagagaagtagttcctcgcgcgaaattttttctgatattacaggaatagaggctactattcaaccaaatagggatttcaataattatgttaaagagctcagagcttgtattaataaggaggacacttttgacagtgagtttggatctcttattgataagctgacaaaaaattccattactaatcaagatatatataatgacatacttgatataagagttagtggggaaagtagtattttttcagataaaaaattaatcaattctataagaaaattgaatgatgcacaagttcttgaattacaaacccttaagccaaatgatttagtagttatccgacttgaactaaatggaaaaaaagttagtttatcgaatgctagtgctggtcaaaagacatctgcaattctttctatgattttggcgtatggaaattcaccactcatattggatcagcctgaagatgatttggatagtcaattaattaataacttaatcgtaagaagtatcattacaaaaaaggaaaacagacaaattttaattgtaactcataatgcaaatatcccagttaatggtgattcagaatggttgattagcatgggagattcaaaagaaatatcggctgatcagtgcgggtcggtagatgaacccaatatcaagccaagaatatgtactgtgatggaaggtggcgaggatgcttttacaaatagagcgaaacgctatggttttaaa

SEQ ID NO: 21448 - DNA, 189 bp, Enterococcus faecium
atgtacgacttgcacgatatcgttgaaatgaaaaaacctcacgcttgccagacgaatcgctgggaagtcattcgaatgggcgcagatatcaaaatcagatgtatgaattgcggacatatcgtcatgatgacccgtcgagattttgaaaagaaattaaaaaaagtaattgaaaaaaatgcagagaaagag

SEQ ID NO: 21449 - DNA, 936 bp, Enterococcus faecium
atgattgagttcgaaaaaccaagaatcgcaaaaattgatgaagaaaaagattatggcaagttcatcgttgaacctcttgaaagagggtatgggactactttagggaattccctacgtcgtattttattatcttctttgccaggtgctgccatcactaatattcaaatcgatggtgtactgcatgaattctctaccatcaaaggtgttagagaagacgtcactcaaatcatcttgaacattaaaggcttagcgctgaaaatgtatggccaagaagaaaaaacccttgaaatcgatattaccggacctgctacagtaactgctggcgatattatcgttgatagtgatgtagaaattcttaacaaagatatgtacatctgtagtgtctctgaaggagctacgttccatgctcgcttaacagtgaaacctggacgtggttatgttcaagcagatgaaaataaaaaagaagatatgccaattggcgttcttccagtcgattcaatctacacacctgttcgtcgtgtgaactatcaagttgagaacacacgtgttggacaccgtgaagattttgataaattgacgatggagatttggacagatggttcaattgaaccgttggaagcaatgagtttgtctgcgaaaatcatgactgaacatttggatatttttgtgaacttaactgatgaagcaaaaaatgctgaaatcatggtcgaaaaagaagaaacacaaaaagaaaaaatgttggaaatgacgatcgaagagttagacttgtctgttcgctcttacaattgtttgaaacgtgcaggaatcaatactgtacaagaacttacaaataaatctgagcctgaaatgatcaaagtccgtaacttaggacgtaaatcattagaagaagttaaagcaaaattgcacgacttaggtttaggtttacgtaaagaagat

SEQ ID NO: 21450 - DNA, 1767 bp, Enterococcus faecium
atgactgatctaataaaagcaagtaaatttttctatcactatttgaagcggtacaaactctcctttttctttatctttatcacagtgatcattgctacctatctacaagtaaaggcacctcaatacatcggggaagcttttcaagaattagctaattacgtaggaggcttgatgcaaggcgtagacgataaaagcaaatttgtttctgtaatatggaaactcttgctgttttatgtactagctagtgcagccaactttatctatagtattttgttcacacaagtagtagggaagtcaacgaaccgaatgcgtatcggtctattcaacaaattggaaaaattgacgatccgtttctttgattctcatcaagacggtgaaattttaagtcgttttaccagtgacttagataatattcaaaatagtttgaaccaagctttgcttcaagtcatcacgaatgctgttttacttgtcgggatcttgatcatgatgttccgccaaaatgtagagttagcttgggctacaattgcttccactccagtagccgttttgatagctgtcttgattatccgcaaagcacggaaatatgtggatcttcagcaagatgaagtggggaaactaaatggttatatggatgaaaaaatcagcggacaacgtgtcatcatcacaaatggcttacaagaagaaacgattgaaggattcttagagcataatcaaagtgttcgcgaagcaaccttcaaaggacaagcttattctggtctactatttccgatgatgcaaggaatgtcactggtcaatacagcgatagttatctttttcggcggctggttagcattaaatggtgatttggaacgttcggtggcattaggcttagttgtgacattcgtccagtattcacaacaatattaccaaccactgatgcagatttcatctggatacagcatgatccaattagcgattacaggggcaagacgattgaatgaaatatttgatgaaaaagatgaagtcaaaccagaaaacggtaaagcatttgatggtgttgaaaaaggtcttgcgttgcagcacgtagattttggttattctccagaaaaactagtcttgaaagatgtctcgatcaatgtggacaaaggagaaatggttgctcttgttggtccaacaggatcggggaaaacgacgatcatgaatctgctaaaccgtttttacgatgtcaatgatggttcagtagtcatcgatggaatagatatccgagattatgatcttgatgcattacgtagacatgtaggaatcgttttgcaagaatctgtattgttctccggaacgatcaaagacaatatcacattcggcaaaccggacgcttcagatgaagaagtcatcaatgcagcaaaacaagcgaatattcatgacttcatcatgacgttagaaaaaggttatgatacagagatatccgaagaaaataacttattcagtacaggtcaaaagcagttgatcagtattgctcgaacgatcatcacaaatccatctttattgattttggatgaagcaacaagtaatgtagacacggtaacagaagcaaggatccaaaaagcaatggatgaagcaatcaaaggaagaaccagctttgtgattgctcaccggctgaaaacaatcttgaatgcagatagaatcgttgtcttgcgtgatggggaagtcattgaagaaggcagtcatcacgagttattagcagaaaatggattttatgcggaactttatcataatcaatttgtatttgaa

SEQ ID NO: 21451 - DNA, 1134 bp, Enterococcus faecium
atgttaaaaaatgaggttcttactatgaaacatatttcagtattgatcaaacccgcatcttccctctgcaatcttcgctgcagctactgcttttatgccaatgtcagttccttgcgagaagtccgctcgtttggcaaaatgaaagaagaagtgacagagaaaatgatcgaaaatatttatgcagacttagaagacggcgatcaattaacattagcgtttcaaggtggagagccaacgatggcgggcctcaattattttcgtacagtgatccggttagtagcgcaacaacaaaagcaggtacaggtccattatgcgattcaaacgaatgggaccatgatcaatgaaaaatggtgtgcttttttgaaagaacatgattttttggtcggtctctcgatcgatggccatccgctctaccatgatctgcatcgggtcgatccgaaaggaagaggaacttttcagcgagtgctgcaaacaaaacagctgtttgactactatgagatcgactacaatgtactttgtgtcttgaccaatccgttggcaaaagaggctaagaaagtctttcgctttctaaaagagcaacaaattgattttgtccagtttattccttgtttagatgatctagatgcaaaaaaaagaaatagttatgctctcacaccaaaacgttttgcaggattttaccaccagcttttgcagttatggctgcaagaattagcggaggggcattatataagtatcaagctttttgatgatcttttgaatctattgatcaagcgacaagtcactgcctgcgggattttaggaaactgtcaggtacaatatgtcattgaagcagatggcagtgtgtatccttgtgatttttatgtgctggatgagtatcgcatggggtatattcaagaacagactttacgtcagttatttgaacaggacattgcaaaaacgtttttgtgtggacgccccgaaatgccaaagaaatgtctgagttgcccgtttcaaaaaatgtgtcgtggcggctgcaaacggatgaaagatgccatctatgtagataacacaggctattgtggttatcagcaacttttgcaggaatttgtaccgcagattaatcggattttaggtttgttacagggggtaagtgtg

SEQ ID NO: 21452 - DNA, 696 bp, Enterococcus faecium
atgctggaacaactgaaagaagaagtataccaagcaaatcttgacttgcctaaacacggactcgtcaaatatacatggggaaatgtgagcgcttttgatcctgaaacacgatatttcgttatcaaacctagcggagtcagttatgaagagatgacagcagacgacatggtcgttgtggacttggacaatcatatcattgaaggtaaactcaatccctcttcggatacgcctactcatgctgttttatatcgttcatttcctcaaatcggaggaatcgtccatactcactcgacatgggcgacgatctgggcacaagcaggattggatgttcctgcgatggggacgacgcatgcagatactttttatggatcggtaccttgtgctcgatttttgacacaacaggaaatcgacagcgggtacgaatatgaaacaggaaaagttatcatagaaacattcaaagaacgcaaaattgatcccttagcaattccaggggtacttttacacggacacggtccatttacttgggggaaagatgcgcaaagtgcggtaatgaacgcagtcgtactagatgaagtatgcaagatgaatttatttaccagacagctcaattcattttcagaagagctgcctcaacggattttagataaacattatttacgaaaacacggaaaaaatgcgtattacggacaaaacaaa

SEQ ID NO: 21453 - DNA, 693 bp, Enterococcus faecium
gtggaagctcaagaaatcatccgctacattcaaacggcatctaaaaagacgcctgtgaaagtctatctgaatgtaaccgagccaatcgaatttaaagaaagtaaagtttttggtgaaggaagcagcttcgttgtttttggtgactatgagacgattgctccggttttagaagctgaatcagaaaaaatcattgaaatcgaaatcgaaactgctgcaagatacagcgcagttcctttgctagatattaaaaaaattaatgctcgtatcgaaccaggtgctattatcagagatcaagtgtcaatcggcaacaatgccgtgatcatgatgggagcgattatcaatattggtgcagtaatcggtgaaaacacgatgattgatatgggtgctgtcttaggtggacgagcgacagtgggcaaaaactgccatattggtgcaggagctgtcttagcaggtgtgatcgaaccagcatcggccaaaccggttatcgtagaagacggcgtactggtaggtgcgaatgcagtgattgttgaaggtgtccatatcggaaaagatgcagtcgtggcagcaggagcagtggttttagaagatgtggcagcagaaactgttgtcggtggaatacctgcacgtgtattaaaaataagtgatgatcagacaaaagaaaatacagcattgattgctgcgttacgcgaatta

SEQ ID NO: 21454 - DNA, 897 bp, Enterococcus faecium
atgttagaagtcaaggatcttgttaaaacttttgggaactacacagctgtcgatcatgtctctttccaaatccccgatggaaaaatcatggggctaattggccaaaacggggctgggaagacaacgacttttcgtttgatcttggattttttgacacaagaccaaggagaagtgttatggaatggccatcatcttggggagaaagattatgatgtcatcggttatcttccggaggaacggggactttatccgaaagtaacgattcaagaccaactgctttattttgcagaacttagagggaaatcaagaaaagagattgaaccaaaaatcgatttttggatggaaaaatttcaggtaaaagggaaaaagacggataaagtaaaatctttgtctaaaggaaatcagcaaaaagtccagctgatcgccacgttaatccatgaacctaaattgatcattttggatgagccattcagcgggttagatccggtaaatgctgaattgctaaaagatggaatattggaattgaaaaaacatggttcatgtgtcattttttctagccacaatatggataatgtagaaaaaatctgcgatcatttgatcatgttgcgaaacggaaaaatggttttgaatggaaaagtacatgagattcgtgaatcatttggccgtacgaagttattcttggaatctggtttaagccaacaggaagtagaagaaatcgaaggcgtgaaaaaagtgatccttcatgaagacaatacgttagagattaccttagaagatcctgaagctgggaaagaaatctttactcgtgcgactcagttcggctacattcctatgtttaaccagcaaccgccaactttggaagagattttcaaattgaaagcaggtgaaatcgatgcg

SEQ ID NO: 21455 - DNA, 1251 bp, Enterococcus faecium
atggaaaaactgtatgatgtgatcgtagtcggcgctggaacaagcgggatgatggcagcgatcagtgcagctgaacaaggcgcacgcgtactcttgatcgaaaaaaacaaaaaagcaggaaaaaaactactgatgacaggtggtggtcggtgcaatgttacgaacaatcgtcctgttgatgatttgattgcacatattcctggaaatggaaagtttttatatagtacgtttgcgcaatggaataatttcgatatcatgaacttctttgaatcacaaggcgtacatttaaaagaagaggatcatggacggatgtttcctgtaacaaataaatcaaaaacgattatcgaagcattgctcaatcgtctgaaagaactagatgtgacgcttctattctctactcgagtagagaaattgatccacaaagaacataaaatttacggtatacgcacggaattcgaagagttccatgctcctgccattatcttaacaactggtggacggacttatccatctactggttctactggagatgggtacaagatcgtgaagcgagtgggtcacacggtgacgcctctttatgcgacagagtcccccttgatatcggatgaaccgtatattcaggagaaaacacttcaagggctttctttacaagacatcactttacgcgttttaaataaaaaaggtcgtgtattgactgaacatacgatggatttacttttcacccatttcggtatttctggtccggctgcactgcgttgttcaagttttgtcaataaagaattagagaaaacgggagaaccagtgacactttctctggattgtttccctacacaaaccaaacaagagcttattcatatattgacagaaaaaagtaaagcaaccaaaaagaacttggtcaatgcttggcatggtatattgcctgagcgattgttagttttctttcttgagcggcttgaaatggatcatctgacaggacaacaagcctctcaaaaacaaattcaagattttgttcaactatgcaaagagtttaagctatcaatcaacaaaacttttcctattgagaaatcatttgtaactggcggaggggtttctctaaaggaaatttatcctaaaacattggagagtaaaatcattgatggtctgtattttgcgggagaattactggatgtcaatggttatactggcggctttaatatcacagcggctttcgctacagggcatgtagcaggaatgaatgccgggcaaagagca

SEQ ID NO: 21456 - DNA, 558 bp, Enterococcus faecium
tactatgatgaaattgctaatagtttaacagaagctctctattccactattaggcttttagacgaagaaaaattgaatgaagccattaaaatgatcactcaatcaaaaaacatatatatatttggagtgggatctagtggaaatactagtcttgatttagaaaatatgtttcttcgcgtaggagttcaagcaaaagctgtactagaccctcattttcaagcccaagtcgcttctttattaacagttaatgatttagtaatcattttttctttatctgggaaaacgaaagatacttatgattcattgaaaatagctaaaaaaaatggcgcaaaaattattgctataactaactatattcattcacctataggaaagtctgcagacttagttttacaaacagccattgaagaatttcttaatggtggatctttagctggaaaaatatcacaactttatatttgtgatctattagttcatggttatgaacaaaacaataatattgattcagttgaattaagagaaaaagttttgcgctctattattgataaaagtattgag

SEQ ID NO: 21457 - DNA, 897 bp, Enterococcus faecium
atgccagaacataaatcagggtttgtcgcaatcgtcggccgcccgaatgtaggaaaatccacattattgaaccgaatcgtgggtcaaaaaattgccattatgagtgacaaggcacagacaactagaaataaaatccaaggagtatatactacaccagaagctcagctgatttttatcgatacaccaggaatccataaaccaaagcatcgtctaggagattttatggtagaagcagcttacagtgcgttgaaagaagtggatgcagtcttatttatgatcagtgctgatcaaaaacgcggccggggagacgattttattattgaacgtctaaaaaacgtgcattctccagtttatctgattatcaataaaatcgataagatccatccagacgagttgctgggaatcatcgaagattattcgacgcagatgccttttgcacaagtgattccgatctctgctacagaaggaaacaatgtcgaacgcttaatggatgtattagtcagtgaaatgccagagggcccacaatattttccagatgatcaagtgactgatcatcctgaatacttcatcgtttctgaattgatccgtgagaaagtcttgtttttaacacgagacgaagtgcctcattctgtcgcagtcgttgttgattcgatgaagcgaaacgagaatgataaaatccatatccaggccacgatcatcgttgaaagagatagccaaaaaggaatcattatcggcaaaggtggaaaaatgctgaagcaagtaggaacgaaagcaagaaaggatatcgaaaatcttttaggagacaaagtatttctagaactttgggtcaaagtccaaaaagactggcgagacaaaaaagtctatctgcaagacttcggctaccgaaaagacgagtac

SEQ ID NO: 21458 - DNA, 960 bp, Enterococcus faecium
atgaaacgcatcggaattttgaccagtggcggagacgcacctggaatgaatgcagctgttcgtgccgttgttcgtaaaggtatttacgaaggactggaagtatacgggatcaattatggttttgccggtttagttgctggagatattcgtcgtcttgatgtggcagatgtaggtgacaagatccaacgtggtggtacattcttgtattctgcacgttatccagaatttgcaactgaagaaggtcaattaaaaggaatcgaacaattgaaaaaattcggaatcgaaggtctagtggttatcggaggagacggctcttatcatggcgcaatggctttgacaaaacgcggtttcccagcagtaggtattcctggaacaatcgataatgatattcctgggactgatttcacaatcggttttgatacagcaatcaatacagtactagaatcaattgaccgtattcgtgacacagcgacttctcatgttcgtacattcgttatcgaagtaatgggacgcaatgcaggagacatcgctttatggtcaggtgtggctggcggagcggatgaaatcatcatcccagaacatgattttgatatggcttcagttgctaaaaaaatccaagaaggccgcgatcgcgggaagaaacattgcttgatcatcttggctgaaggtgtaatgggcggaaatgaattcgctgagaaactttcagaatttggtgactatcatacacgtgtatctatcttgggacacgttgtccgtggtggagcaccaagcgcacgcgaccgcgtgttggcaagtaaattcggtgcttacgctgtcgaattgcttcaagaaggaaaaggtggattatgtgtcggtatccatgacaacgaaatcgttgcgtctgacatcattgatacacttgaaaacaacaaacataaaccagacttatcactatatgatctaaataattcactttcattt

SEQ ID NO: 21459 - DNA, 342 bp, Enterococcus faecium
atgatcaaaggaacatttaagcgaaatgacgcaggtcagatcgtttcattcactttgaccgggcatgctgatgctggtccttatggaagtgatatcgtttgtgcgggtgtttctgcgttagcgatcagcactgtcaacgggattgcctcattagccggttttgagccgattgttgaaatgaatgaagaagaaggcggttatctttataccgaagtcacttcaggaatgacacaagaacaaaacaatattgctgagattctattagaaaatcttttattaggattacaatcgatagaagctgaaaactcagaatatatccaaattaaaacaattaatgataaa

SEQ ID NO: 21460 - DNA, 838 bp, Enterococcus faecium
gttaaaacaatccttcagctcaaaaaagaatttaaattgaatctattactttcaattgcacaattagcgaagtcaacttattattactgggtaaaaaaattagataagccagataaatatagcaagataaagcaagaaattacagcgattgtaaaagaatcaagaaactcttatggttatcgtagagtcactttagcgttaaagatgaaaggatatacaatcaatcataaaacagttagaaaaattaatgtcccaaatgggacttacctgtcaaatccgaataaagcgatataaatcttataaaggaacagtaggaaaaattgccaagaatgtgttaaaacgaaatttttcagtagatacacccaataaaaaatgggtgacagacgtcactgaattcaagataaaaggaagaaaaatctatctatctcctatacttgatttatttaacggagaaataattagttatagtatatcaactagtccaacatataaactgattgaagaaatgcttcaacaagcaattaaaaaaaagggaactgagggttcactgattctacattcagatcaaggatggcagtatcagatgccacaatatcaaaaaaaattaaaagagaataacattattcaaagcatgtctagaaaaggaaattgcttagataattctgtaatagaaaatttttttggtgtgcttaaatcagagtttttttatcgagaaaaattccgatcaattgagatatttcaaagtaaattaaatgagtatattaggtggtataataacaaaaggataaaactaaagttaaatggactatctccagtagaatatcggaaacagtccatt

SEQ ID NO: 21461 - DNA, 1944 bp, Enterococcus faecium
atgacagaagaaagaagtttagtagaacgcgctaaagagtatgatgccagtcagattcaagtacttgaaggacttgaagccgttcgtaaacgacctggcatgtatatcggttcgactagttctgagggtctgcatcaccttgtttgggaaattgtcgataattcgatcgatgaagtattagcaggttttgcaacgaaaatccatgtgattattgaaaaagacaacagtatcaccgttattgacgacggtcgggggatacctgtagatatccaggcaaaaactggacgtcctgcagttgaaacggtctttactgttttacatgctggaggaaaattcggcggtggtgggtacaaagtttctggtggacttcacggagtaggatcttctgttgtaaacgcgctttctacacagcttgatgtcaaagtatacaaagaaggaaatgtgtactatcaagaatatcgtcgtggagctgtagtggacgacttaaagattatcgaacaaacggatcgccatggaacaacggttcactttacgccagaccctgaaatttttacagagacaactgagtttgatttttcaaaattggctacccggatccgtgaacttgctttcttgaaccgcgggatgcgtatatcgattgaagacaaacgagaagaagaaccagtcatcaatgaataccattatgacggcgggatcaaaagttatgtcgaatacttgaatgcaaacaaaaccgtgatttttccagaacctgtatatttggaaggtgaacagcaagatatcgcagttgaagtctctatgcaatatacagacggctaccattccaatatcatgagttttgccaacaatatccatacgtatgaaggtggaacacatgaatcaggattcaagactgctttaactcgtgtgataaatgattatgcccgaaaacaaaagctgatgaaagaaaatgacgacaacttgaccggtgaagacgtgcgagaaggattgacagctgttatttctatcaagcatcctgaccctcaattcgaaggacaaacaaaaacaaaattgggcaattccgaagtacggacagtcactgatcggttatttagcgaacatttcatgaaattcttgctggaaaacccaagtgtgggccggcaaattgttgaaaaaggattactagcttccagagctcgtctagcagcgaaacgtgcgcgtgaagtaacgagacgtaaaggtgctttagagattagtaatctgccaggaaaattagcggactgctctagcaacgatcctgaaaaatgcgaattgttcatcgtcgaaggagattcggccggcggatcagctaagcaaggtcgtaatcgagagtttcaagccatcttgcctattcgtgggaaaatcttgaatgttgaaaaagcaagcatggacaagatcttggcaaatgaagagatccggtctttatttactgctatgggtacagggtttggagaagattttgatgtatcgaaagctcgctaccacaaattagttatcatgactgatgccgatgtcgacggcgcgcatatccgtacattgctgctgactcttttttatcgttacatgcgtcctattgttgaagctggatacgtctatattgctcagccacctttatacggggtaaaacaagggaagaatattacgtatgtacaaccaggaaaaaatgcagaagaagagttgaaacaagtcgttgcttcacttcctgcctcaccaaaaccaagcgttcagcgttataaaggacttggagaaatggatgatcatcaactatgggaaacaactatggacccaagcaatcggatgatggcccgcgtcagtgtggacgatgctattgcagcagatcagatatttgaaatgttgatgggggatcgagtagaaccccgtcgtgcattcatcgaggaaaatgcacactatgtgaagaacttagatatt

SEQ ID NO: 21462 - DNA, 186 bp, Enterococcus faecium
atgaaggttaaagaaatcagagaattaaccactgccgaaatgcttgatcaagaaaaacaattaaaagaagaattgtttaatcttagattccaattagcaacaggtcaattagaaaacactgcacgtattaaagaagtacgtaaatcgattgcacgcatcaaaactgtgttgcgtgaacaagctaag

SEQ ID NO: 21463 - DNA, 393 bp, Enterococcus faecium
atgaaaaaaggaaaagtaatcaattcagatatttcacgagtaatcgcacaaatggggcactttgataaattaagtatcggggatgcaggcatgcctgtcccctttggtactgaaaaaatagatttggctgtctcaaacggtcttccaagttttttatctgttttagaaaacgttttagaagaacttgaggtacaatcgattgaattggcggaagaaataaagacaatgaacccggaaatattggaaaaaatcaaattattgttaccagatacaccgattagctttatcccacatgaagaaatgaaaaaagagttgaataactgtcatgcatttattcgtacaggcgaaatgacaccttacgccaatattatattagtgagtggagtggtcttc

SEQ ID NO: 21464 - DNA, 507 bp, Enterococcus faecium
atgttgaagaaagaaacaatgaagtactatctgccaatcgttttgttctttttgatgttgatagatggtcatttaacaagaatgctaggggagtggtcgaaaggcacctatatgtcaaatgcccactttctgatattggcattattatgttgcagtatggcgtttgaaaaacgttatttactgattaccacgattgttctcggggctatctatgacgcttactatattggcgttatcggtatctatgcagtagctctccctttaattgtatggttgatgtatgtaatgaaagacgttatccatgtcaacatctttactgaatttttcagtatgatcatctttgtcacgggttatgaattgtttacgatggtggtccagttgatttttaaattagcagtagtaaataacacgtattttattacaaggtttttaggacctacactgctgttgaacatgattatatttgtattattcatttttccctttaagaaattattcagtgatgaa

SEQ ID NO: 21465 - DNA, 837 bp, Enterococcus faecium
atggagccaattattgaattagaaaagataaattataaataccagccagatgatcttcgccccgcattgaaagatgtctcctttacaattgataaaggtgagtggatcgctattattggacacaatggttcaggaaaatcgacacttgccaaaacgatcaatggattgcttctgccagaatcagggatcgtgaaagtgggaaatcaaatattggatgaagaaaatatttggacgatccgacagatggttggaatggtttttcaaaatccagacaatcagtttgttggttcgacagtagaagatgacgttgcttttggtcttgaaaatcaagggattcccagagaagaaatgctagtgcgtgtgaaagatgcacttgagaaagttagaatggctgagtttgcttcacgcgagcctgctcgtttatcaggagggcaaaaacaacgtgttgccattgccggcgtggttgccttacgacctgatatcattattttagatgaagcaaccagtatgctagatccagaaggtcgtgaagaagtgatctctacgatcaagaagatcaaagaagaaagtcaattgaccgttatatctatcactcatgatattgatgaagcagctaatgccaatcggatactagtgatgagacaaggcgaacttgtccgtgaaggtacaccaaaagaaattttttctgctggtcctgaactgatcgacttaggtctagatctaccatttcctgaaaaactgaagagcgcactgaaagaacgtggggttgatgtgcccagtgaatatatgacagaagaaaggatggtggattggttatggacatccgttttgaacaag

SEQ ID NO: 21466 - DNA, 881 bp, Enterococcus faecium
atgaatggttctatcaaaaaaattctgagatcaatagacaaaaatttgatgattacagaggtctcttacgaaaccttacagaagaaaaaaacattgatcgttgctgcagttctcttccctgctccatgtgtctgtagaaattgtggttctgctgtggtagatggaaataggaaattaatggtggtgaaaaacaagaagaaggaaaccattgtccactttgaataatataatcatatgccaatggttatacgcctaaaaaagcagcgctatacctgtaaaaactgtcgaagccattggaacgctcaaagttattttatccgtccaaggcactcgatttcaaatcatgtcagacataaaatcacttctttactgactgaaaaagtgtcgttattttttatttcgaaaagttgttaggtatctttgacaaccgttattcgcacattgaaagagttgagaagctatttaccaaagtcttccaaaagaattctgtcttgagtgttgagggttgtgaatttcgttctcacgtttccgttgaggataaactgagttttatttccgcggatggcgagacagaaaaattaatcgagaaaatttacctacacaaaaaattcctcgattaacaaactatttccttagctgcactaatcctaaagaaatagaattcttagttacagacatgaacgccacctactttcagctcaccaaacatgttctaccaaatgcgaaattggtgattgatcgattacttggtttttccacgcctttcaaggaggcgtaacctttattcacgagttggttgaagctttccgagacaaaagacccgacttgtttttctccttattgacaaagagccattaaaactagagaaaaaattacaactg

SEQ ID NO: 21467 - DNA, 1332 bp, Enterococcus faecium
atggaaaatcaaaataaattgtatcattttgttggtatcaaaggttcaggaatgagctccttggctcttgttttacatgaacaaggtctaaatgtccaaggatcagacattgaaaaatatttctttacacaaagagatttagaaaaagcaaatatcacgattctgccatttaacgcagataatgtaaaaccagggatgacgatcattgcaggaaatgcatttcctgattcacatgaagaaatccagcgagcaaaagaattaggtttggaagtgattcgctatcacgactttattggtcattttatccaaaattatacgagtatcgctgtaacaggctctcacggaaaaacaagtacgactggactgctctctcatgtattgagtggtgtccgtccaacaagttatctaattggagatggaacaggacatggtgatccgcaagcggaattcttttcatttgaggcctgtgaatatcgccgtcatttccttgcctattcaccagactatgcaatcatgaccaatatcgattttgatcatccggattattatacaagtatcgacgatgtatttacagctttccaaacaatggctggacaagtgaaaaaagctatttttgcgtatggtgacgatgcttatttacgcaaattaaaagcaaatgtgccgatttattattatggtgtcacagaaaacgatgatatccaagcacgaaacatcgaacgcacaacttctggttctgcttttgatgtctatcatggggatgaatttgttgggcacttcactgtaccagcattcggtaaacacaatatcttaaatgctttaggtgttattgcagtagcttatttcgaaaaactggatctgaaagaagttgcagaagaaatgctgactttcccaggagtaaaacgtcgattcagtgaaaagatcgtagcagacatgaccgtagtcgatgattatgcgcatcaccctgcagagatcaaagcaacgattgatggcgcacgccaaaaatatccagataaagaaataattgcagttttccaaccccatacgtttacgcgtacgattgcattgatggatgaatttgcagaagcacttgatttagctgataaagtttacttatgcgatatttttggttcggctcgggaagaacaaggaaacgttaagattgaagaccttggagcgaaaatcaaaaaaggtggagaagtcatcaaagaaaataatgtatctccattgttagattatcatgatgcagtagtaatcttcatgggtgctggagatgttcaaaaatttgaacaagcgtatgaaaaacttttaagcagcacgacgaaaaatgtactg

SEQ ID NO: 21468 - DNA, 3183 bp, Enterococcus faecium
atgccgaaacgtacagatatcaagaaaattatggtgattggatctggtccgatcatcattggtcaagccgcagaatttgactacgcaggaacacaagcctgccttgccttaaaagaagaaggatatgaagtggttttagtaaattctaatcctgcgacgatcatgacggataaagaagtggcagatcaagtatatatcgaaccgatcacacttgaatttgtatcaaggattcttcgaaaagagcgtccagatgctctccttccaactttaggcggacagacaggcctcaatatggcaatggagctggcagcatcaggtattttagaagaattgaacatagaacttctaggaacaaagctttctgcgatcgatcaagcagaagatcgtgatctattcaaacagttgatgaaagaattgaatcagccaatccccgagtctgaaatcgtcaatacagtagaagaagctgtagattttgcaaataaaatcggctatcctgtcatcgttcgtccagcctttactttaggcggaactggtggaggtatgtgtgaaaatgaagaagaattacgtatcgtatcagaaaatggattaagtctttcccccgctacccaatgtttgattgaacgaagtattgcaggttttaaagaaattgaatatgaagtgatgagagattcggctgataatgcaatcgttgtctgcaatatggaaaattttgacccggtgggtatccatacaggtgattctatcgtatttgcccctagtcaaacattgtctgaccatgaatatcaaatgcttcgtgatgcttctctttcgattattcgagcacttaagatcgagggaggctgtaatgtccaactcgctcttgatccacatagttttaattattatgtgattgaagtcaatccgcgtgtttctcgttcatctgcgttagcaagtaaggcgactggctatccgatcgctaagctagctgctaaaatagcgcttggattaacattagacgaaatgaaaaatcctgttacaggaacgacttttgcagaatttgaacctgcattagattatgttgtagctaaaattcctcgctggccgtttgataagtttgaaaacggagaacggcttttaggcacgcagatgaaagcaactggtgaagtgatggctatcggtcggaatatcgaagagtctttattgaaagctgtgcgttctttagaaatcggtacacaccatatcgaacttcctgagttggcagacatcacggacgatgacctaatccaaaaagtggttcgagcacaagatgatcgcctgttttatgtagctgaagctattagaagagggtacaccatagaagaattagcggatttgacaaaaatcgatttattctttttagataaactgttgcatatcgtagaaatcgaacagcagttgaaacagcagccgttggatgacaagatattgaaaacagcgaaacaaaacggttttacagacaaaaaagtggcggagctgtgggaaataaacgaagaagccgttcgccagatgagaaaagaaaatgatttgattcctgtatataagatggttgacacttgtgcagcggaattcgaatcaaaaacaccttatttttatagttcctatgaatatgaaaatgaaagttcacgatcagaaaagccctcaattctagtactgggatctggtcctatccgtatcggacaaggggttgaatttgactatgcgactgtgcattctgtcaaagcaatccagcaggcaggatacgaagcaatcatcatgaacagcaatcctgaaacagtttcgactgacttttctatttcggataaattatattttgagccattgaccttcgaagatgtgatgaatgtgatcgagctagaacagccgataggagtaatcgttcaatttggtggtcagacagcaatcaacttagccgaacctttgactgctgctggtgtaaaaatcttagggacaacgatcgaagacttggatcgtgcggaaaatcgtgatttattcgagcaagcgctgaaagagttggatattcctcaacctttaggggatactgctacaagtaaagaagaagccgtggttatcgcttcgagaattggttatccagttcttgttcgtccaagctatgtattaggcggacgtgcgatggaaatcgttgaaaaccagcgagatttagaagattacatggaacatgctgtgaaagcatctccagaacatccagtactagtggaccgttacttgcttggtggtgaatgcgaagtggatgcgatttgtgacggtgaaacagtactcatcccagggatcatggagcatattgagcgtgctggtgtccattcaggggattcaatggctgtgtatccacctcaaacattatctgaatcgatcaagaaaacgatcgaagattacacgatccgcttagcattaggtttgaattgtgtcgggatgatgaatatccagtttgtcatccatgaaaatgaggtttatgtgatcgaagtcaatcctcgagcaagtcggactgttccattcttaagtaaggtgacaggaattccaatggcacaaattgcgacgaaagctattttgggagagaaactaaagacacttggttatgaaaacggactttatccagaaacaaaagaagttcatgttaaagcacctgtcttttcttttacgaaattgcagaaagttgatacttacttagggcctgaaatgaaatcgactggagaagtaatgggatctgacagacaattagacaaagctttgtacaaggcattcgaagcttctggattacacttgcctgaatatggagccgtattatttacgattgcggacgaaacaaaagaagaagcactagaattagctaaacgttttacagaaattggctatagtctgataggaacgaaacatacagctgcttatttcgaaaaaaatggtctggtcgttgaaacagtagcgaaaatttctgaggaagcagcagaaaaaaatgtagtcgacttaataagagatggtaaaacacaagtggttgtcaatacgattgataaagatcggggaaatgcttctaaagacggtttcatcatccgaagagaagcagttgaacatggtattccattgtttacttctttagacacagcagatgcgatcgttcgagtgatggaatcccgtgctttttcaactaaccctatt

SEQ ID NO: 21469 - DNA, 501 bp, Enterococcus faecium
gtgcatgaaacgctgggaggaataattttggatatcaatgaaatcagagaattagtcagtcaatttgatcaatcctcgctaacggaattcgatttgcgtgaaggtcaatttgaattgtatatgaataaaaataaaacaagtcgaggcatgaatatggttcaaacaaacgaaacgttgccagtttcggagccagtcaatgtcatatctgaacaagcaacaactgctccagaaataatgaaagaaaaagaatcggcagtatttgatggaatcgaggttgtttcgccaatcgtgggaatcgtttatctgcaaccagcgcccgacaaaccagctttcaaaaaagtaggtgatcaagttgccaaaggagaagttatctgcattattgaagcgatgaaactgatgaatgagataactagtgaggccgacggagtgatcacagaaatccttgtagaaaacgagtcagttgtcgaatatggacagccactctttaggattcagcaaaaa

SEQ ID NO: 21470 - DNA, 963 bp, Enterococcus faecium
atgtcagaaacatattatgaagcaataaactggaatgaaattgaagatatcattgataaatccacttgggagaagctgacagagcaattttggctagatacacgtatcccactttcaaatgacctagatgattggcgtacattgtctcaattggaaaaagatacagtaggacatgtatttggcggtttgacactgctagatactgtccaatctgaaagtggcatggatcagttgcgtaaagatgtccgcactccccatgaagaagccgttttgaacaatattcaattcatggaatccgttcatgccaaaagttattcttctatttttagtacactgaatacgaaaaaagaaatcgaagaaatttttgactggacaaatacgaatccttatctgcaaaaaaaagctgagcgtatcaatgaaatctacaaacacggtacaccgctagaaaagaaaattgccagcgtctttttagaaacattcttgttctattcaggtttttatactcctctttattatttaggaaacaacaaattggctaacgtagcagagatcatcaaactaatcatccgagatgaatctgtacatggaacctacatcggttacaaattccaattaggattcaacgagttacctgaagcagaacaagaaacgttaaaagactggatgtacaatcttctttatgagctttacgaaaacgaagaacgttatacagaagaattatacgatccaatcggctggacagaagaagtcaagacattcctacgctataatgccaacaaagcattgatgaacctagggatggatccactctttccagatactgccaatgatgtcaacccaatcgtaatgaacgggatttcaacaggcacaagcaaccatgacttcttctcacaagtcggaaacggctatttgttaggtcatgtagaagcgatgaaagacgacgattatttgattggattggaa

SEQ ID NO: 21471 - DNA, 339 bp, Enterococcus faecium
atggaaaaagaactttccactctagatcaatatttgattgatcctgattggggcaagccgaaaattgaggaaacaagtggtcgaaaaatcagacgaaatcttttgacgaatgaagaactagcttgggatcaagatgatttaggcaaccatgtaactatttgggatcatgtttatcttatccatctatcgaagcattcgaataaacctgaatatatttacgtcatcgaagatggcttgattgatgcgctagaagagtacgacagagataacttgattgatatctcttattacggaccaggtaagaaatacattgctgaaatggaggcagaatttgatgag

SEQ ID NO: 21472 - DNA, 819 bp, Enterococcus faecium
atgaaccgttttgcttctaaagaagaagaaaaattatattatgaacataaagcaagtgaagaagaatttcttaactggtatcaaaaacaggaacgtccagaatatgacaagccctctttgactgtcgatatcgtactgatgtgctataacaaagaagaagatcagctgaaagttttgttgatccaaagaaaagggcatccttatcgaaattcatgggcattgcctggtggctttgtccaaaaggatgagtcaactggagaaagcgtcttaagagaaacaaaggaagaaactggtgtggttatttcaaaagaaaatattgagcaactgcatacattcagtacgcctaatcgagatccgcgaggctgggtcgtcacagtcagctacttagcctttattggagaagaaccgctaatcgccggagatgatgccaaggaagtacgctggttcacactagaacgtcatagtaacaagatccatttatctagcggagaagtggctatctcgcttgatttagtcactggagagtcttctggcaaagatactttggcttttgaccatagtcaaatcatcttgaaagcattcaaccgtgtagtcaataaaatggaacacgagccgcaagttctacaagttttaggtaaagatttcacgattacggaagctcgaaaagtatttgctaaattcttagggatcgattataaaacgatcgatcattccaattttaagaaagctatgctccaatatttcgatgagatcggtgaacgtcctgtaggaatcggccgtccttcaaaaatctatcagctcaagccggggcaccatgaa

SEQ ID NO: 21473 - DNA, 267 bp, Enterococcus faecium
atgcgattagataaatttttaaaaatttcccgaatcatcaaaagacgatcagtagcaaaagaagtagctgataaaggaagaattcaaatcaacggtaaattggcgaaatcttccagtgatgtcaaagtaggcgatattttgaaagtccagtttggcaacaaaacgttggaagtgaaaattacggaattacatgaatcaaccaaaaaagaagatgcacaaaaaatgtacgaaattatttctgaaaatcgcacagaaacactagagaaa

SEQ ID NO: 21474 - DNA, 1572 bp, Enterococcus faecium
gtgaaaaagagtttaatatcagcagtaatggtatgttcaatgaccttgactgccgtagcatcaccgatcgctgccgcggcggacgattttgattctcagatacaacagcaagatcaaaagattgcagacttgaaaaatcaacaagcagatgcacaatcacaaatcgatgccttagaaagccaagtttctgaaatcaacacacaagcacaagacctattagcaaaacaagatacattgcgtcaagaatctgcacaattagtaaaagacattgcagatttacaagaacgtattgaaaaacgtgaagatacaatccaaaaacaagcacgcgaagcacaagtaagcaacacaagctcaaactacatcgatgctgtattgaatgctgattcattagcagatgctattggacgcgttcaagcaatgacaacgatggtaaaagcaaacaacgacttgatggaacaacaaaaacaagataaaaaagctgtagaagacaaaaaagctgaaaacgatgctaaactaaaagaattagctgaaaaccaagctgctttggaatctcaaaaaggcgatcttttatctaaacaagctgatttgaacgtactgaaaacttcattagctgctgaacaagcaactgctgaagacaagaaagctgacttgaaccgtcaaaaagcagaagctgaagcagagcaagctcgtattcgtgaacaacaacgtctagcagaacaagctcgtcaacaagctgcacaagaaaaagctgaaaaagaagcacgcgaacaagcagaggctgaagcacaagctactcaagcttcatctactgcacaaagctcagcaacagaagaatcatcagctacacaatcttcaatgactgaagaatcatcatcagctacacaatcttcagcaacagaagaatcaacaacacctgaatcttcaacagaagaatcaacagcgcctgaatcttcagcaacagaagaatcaacaacagcgcctgaatcttcagcaacagaagaatcaacaacagtgcctgaatcttcagcaacagaagaatcaacaacagtgcctgaatcttcaacaacagaagaatcaacaacacctgcgcctacaacaccatcaacagatcaaagtgttgatacaggaaacggcacaggaagtagtactccggctccaacgccaacaccaacacctgaacaaccaaaacctgtaacacctgctccagctccttctggaagtgtgaatggtgcagcaatcgtagcagaagcttacaaatatattggtactccatatgtttggggcggtaaagatccaagtggctttgactgctcagggttcacacgctatgtttacatgcaagtaactggtcgtgacatcggtggttggacagttcctcaagaatcagctggaacaaaaatttcagtttctcaagcaaaagctggagacttgttattctgggggtcacaaggcggaacttaccacgtagcgattgctttaggcggaggacaatatatccatgctcctcaaccaggcgaaagcgtaaaagttggttcagttcaatggtttgcccctgactttgctgtcagcatg

SEQ ID NO: 21475 - DNA, 867 bp, Enterococcus faecium
atggacatccgttttgaacaagtagacttcacttatcagccgaatacaccatttgaacaaagagccttatttgacatcaatatgacgatcaaagaaaacagttatactgcattagtagggcataccggaagcgggaaatcaaccttacttcagcatttgaatgcgcttgttaagccaacaagcggtacagtccatattggagaacgagatattcagccggatacggataataagaatttaaagcccatccgaaaaaaagttggcatcgtctttcagtttccagaagcacagctattcgaagaaacggtagcaaaagacattgctttcggtcctaaaaactttggtgtcagcgaagaagaagcactagtcctagcaaaagaaacattagaacaagttgggctggatgaaagctatttggaacgttcgccatttgaactttcaggagggcaaatgcgtagagtagcaatcgctggtgtgcttgccatgaggccggaagtacttgtattggatgaaccaacggcaggacttgatccccagggcagaaaagaaatgatggagatgttttggcgtcttcataaggaacagcagatcactattgtattagttacgcatttaatggatgatgtagccaattttgcagattatgtctatgtgttggaaaagggacgaatcgttaatagcggggagccgcaagaggtctttcaaaacattgaatggctaaaagaaaaacaactaggcgtacctactgccaccgagtttgcagaagaattaatggctaaagggatgaactttgctaccttgcctttgacagctgaagaattagcagacgctatcgtccattatgctggaggaaatgcccatgatgaa

SEQ ID NO: 21476 - DNA, 1218 bp, Enterococcus faecium
atgacagaatatgcaattagactaaaagatatcacaaaatcttataatatgtacgcaaaaccttcggatcgatttcgtgaagccctcaatccttttaagaaatcctatcatgatgtattttatgcgttgaaaaacgtgaatgtagaaataaaaaaaggtgagatgatcggtttcgtgggagaaaacggatcgggaaaatctacaatgttgaaaatcattacgggagtactgacaccaacatccggcacgatggaaatcgaaggaaaaatctcagctttgctagaactaggatcaggattcaatcctgagtattctggctatgaaaatatctatttaaatggaatggttctaggattttcaagagaagaagtcgatgaaatggtcgatgatatcattgaatttgctgacatcggagaccatatttatcaacctgtaaaaacttattcaagcgggatgttcgttcgtctagcttttgctgtagcaatcaatgtgaatcccgatattttgattgtggatgaagcattggcagtaggcgatcttgaatttcaactaaaatgtatggaaaaatttacagaaatcaagaactcgggaaagacgattttattcgtttctcatgatatcagttcgattcgtcgtttttgtgatcgttcctattggttgaaaaacggagaagtcgtcgaatatggcgatacgatggaagtaacgacgaattatgaaaactttttaaagaaaaaatcagttaaaacagtggatcggaataaaaaccaagtagaacggttcgccgctccagatatcgtcgacgtgacgaaagcggaattgttggataaagacaaaaatccggtggatatgctggaacaaggagaaaaactatacgttaaagtaacttatgaagtaaaagatgatacaatcaaaaatccggttttaggaattgcgctacgaacagtcgacaatttttatgtatgcggacttaatactctactagatggtatcaagattccttggaaaaaaggagagaatatcttttatctggagtatgaaaagttaggtttgttagctggtgaatattattttgacgttgcggtctttgaagaaaatgcaacggttcctttggtatataagacaaagtacatgaacttgtttgtcagcggttcttatatcggagaaggcatcgtggtcttagaccataaatgggaagaagggactcatagcaatgaaata

SEQ ID NO: 21477 - DNA, 2412 bp, Enterococcus faecium
atgagttacaatcataaagaaattgagaaaaaatggcaaaaatactgggcaaaaacgaatactttcaacacccatgatgatcctgaaaagccaaaattttacgcactggatatgtttccctatccatccggtcaagggctacatgtagggcatcctgaaggttatacggcaacggatatcctttcacgtgtgaaaagaagtcaaggatacaacgtgctgcatccaatggggtgggatgcattcggtctgcctgctgaacaatatgcgctagatacaggaaacgatccagctgagtttacccaaaaaaatatcgaaacattccgacgccaaatcaattctttaggatttagttatgactggaatcgcgaagtgaatacaactgatccggagtattataaatggacacaatggatctttacgaagctttatgaaaaaggtctagcttatgaagcagaagtagcggtaaactgggtacctgaattaggaacagttatttcaaatgaagaagtgatcgatgggaaaagtgaacgtggtggctatgatgtagtcagaaaaccaatgcgccaatggatgctgaaaatcactgcttatgctgatcgcttattggatgatctagaattagttgattggccagaaagcattaaagaaatgcaaagaaattggatcggtcgttcagtaggagcaaatattgaatttaaagtggctggtacggataaatcctataccgtatttacgacacgaccagatactctattcggtgcaacttactcggttcttgcacctgaactagatcttgttagagaaattacgacccctgaacaaaaagctgctgtagaagcttatatcgaagagacagctaaaaaatcagatctaaagagaacggatcttgcaaaagaaaaaacaggagtatttactggtgcttatgcaatcaatccagttaatggcaaggaaatcccaatctggatcgccgattatgtattatcttcatacggcacaggagccatcatggctgttccagcacatgatgaacgtgactttgaattcgctcaaactttcggactagaaattcttccagttatcgaaggtggagatgttgaaaaagctgcttacacagaagatggtacgcacatcaactctgaatttctagacggcatgaacaaacaagaagcaatcgataaaatgaatgaatggctagaagaaaatggcgtagggaaaaaagaagtcagctatcgcttacgtgactggctattctcccgtcaacgttactggggtgaaccaatcccaatcatccattgggaggacggaacagtcacagctgtcccagaagaagagctaccattacggttgcctaagacaaaaaacatcaagccaagcggtactggagaatctccattagcaaatatcgaggagtgggtcaatgtcgttgatcctgtaacaggtaaaaaaggccgtcgcgaaacgaatacaatgccacaatgggcaggaagctcatggtattacctgcgttatatcgaccctcataacaaaaaagaactagcagattatgaaaagttgaagcgttggctaccagttgacatctacattggtggagcagaacatgcggtacttcatttactatatgcacgattctggcataaattcttatacgatatcggtgttgttcctacaaaagaaccattccaaaaactatacaatcaaggaatgatcttaggcgaaaacaacgaaaaaatgtcaaaatctcgtggtaatgtagtcaatcctgatgatgtggtcgaaacttacggtgcagatacactgcgcatgtacgaaatgttcatggggccattagatgcttcgattgcttggagcgaaaatggcttagaaggaagccgtaaattcttggatcgtgtatggcgtttgatcgttgatgagaacaataaaatgcgtgaccgtatcactacattgaatgatggcaagcttgataaagtgtatcatcaaacagtgaaaaaagtgacagaagactatgaaaatcttcatttcaatacagcaatctcccaattgatggtctttatcaatgaagcctataaagtggacgctctgccttatgaatatatcgaaggatttgttcaactactcgcaccgattgctcctcacatgggtgaagaactatgggcaatccttggaaatgatggtggtatttcttacgcaccatggccaacatacgatgaagcagcacttgttgaagacgaagtagaagttgttttccaagtaaacggtaaagttcgtgcgaaaagcaatgttccccgagacttaggaaaagatgagctagaaaaagcagcattagccaatgaaatagtgcaagaatatattgaaggcaaaacagtcagaaaagttattgcggtaccaaacaagttagtcaatatcgttgctaat

SEQ ID NO: 21478 - DNA, 1608 bp, Enterococcus faecium
atgacaaaatatatttttgtgaccggcggtgtcgtttcatcaatcggaaaagggattgttgcagcttctttaggacgcttattgaaaaaccgcggcttaaaagtaactatccaaaaatttgatccatacatcaacgtggatccggggacgatgagcccatatcagcacggagaagtattcgtaacagatgatggtgctgaaacagatttggatctgggccactacgaacgttttattgacatcaatttgaacaaatactccaacgtgacgacaggaaaaatctattctgaagttttgcgtaaagaacgtaagggcgaatacttgggagcaactgttcaagttattcctcatattacaaatgagatcaaagaaaaaatcatgcgagcagctaaaatgactgattcagatgtgatcattacagaagtagggggaacagtaggggatatagaatctttgccattccttgaagcacttcgtcaaatgaaagcagatgtcggtacagataatgttatgtatatccatacaacattgattccttacttgaaagctgctggagaaatgaaaactaaaccaacgcagcacagtgtaaaagagctacgtggtttaggtatccaaccgaatattttggtggtacgtacagagcaacctgtttctcaaagcgtgaaaaacaaattggcacaattttgtgatgtcgaaccagaagcagttatcgagtcgccagatgtagatacactttactccatcccattagttttacaagcacaaggaatggatcaaattgtttgcgaccatttaaaactagatacaccagaagcagacatgacagaatggaaagaattagaagaacgtgtcttgaacttgaagaaaaaagtacggattgcgcttgtcggtaaatatgtcgagttaccagatgcatatatctcagtagttgaagcattgaaacattctggtttcgcctataattcagacatcgagatcgattggatcaaagcacaagaattaacgagagaaaatgtagaagaacgtttgaaagacgcagatggaatcttggttcctggtggatttggtgatcgcggagtagaagggaaaatcgaagcgattcgttatgctcgcgaaaatgacgttccgtttttaggtatttgtcttggtatgcagatggcttgtgtcgaatttgcacgtaacgtcgttggattagaagatgcgtcatcagctgaaacgaatccagatacagcaaacaatattattgatttaatggctgatcaggaaaacatcgagaatttgggtggaactttacgccttggattatacccatgtaaaatcaaaaaaggaacgaagacggctgaagcatatgatggagccgatgttgtgcaagaacgtcaccgtcaccgctatgagttcaataacaaatatcgtcaattgtttgaagaacaagggctagtcttttcaggtgtctcaccagataaccgtttagtagaaatcgtagagctgccagagaaaaaattctttgtgggatgccaattccacccagaattgatttctcgtccaaatcgcccgcaaaaattaatcaaagcatttgtcggagcatcattagcagatcacgaaacaaaa

SEQ ID NO: 21479 - DNA, 645 bp, Enterococcus faecium
atgaacctcattttaatggggctgccaggcgcaggtaaaggaacacaagctgaaaaaatcattgatgcttatggtattccgcacatctcaacaggagatatgttccgcgcagcgatgcaaaacgaaacagctcttggcctggaagcaaagtcttatatggataaaggtgcattagttcctgatgaagtaacaaatggaatcgtgaaagagcgactagctgaaccagatacagagaaaggcttcttattagatggctttccacgtacgctagatcaagcaaaagctctggacgcaatgctaaaagatttgaataaaaaaattgatgctgtcatcgatatccatgttggtgaagaaatcttggtcgaacgtctagccggccgatttatctgcagcaattgtggagcaacttaccataaaattttcaaccctacaaaagttgaagacacatgtgatcgttgcggtgggcatgaattctatcaaagagaagatgataaacctgagacggttaaaaatcgtctggctatcaacatcaaaaatagtgaaccaatcttggcttattataaagaacaaggtttgctaaacactattgatggtgctcgtgaaatcgatgctgtatttgcagatgtacaaaaaatcattgaaaaa

SEQ ID NO: 21480 - DNA, 1284 bp, Enterococcus faecium
atgaataaaacagaatatgagcaaatcaatgaaacactttatcatgaagtactgccaaacggtttgaccgtgtatttgttgcctaaaaatgactatcacaagacatatggtttgttcagtacgaattatggttcgatcgataacgaatttattccctatggtgaaaaagaaaaggtgaaagttccagatggaattgcccattttttagaacataagttgtttgaaaaagaagatggtgatgtctttcaattatttgggaaacaaggagcttccgccaatgctttcacaagttttacgaaaaccagctatctgttttctacgacggatcaggtagaaaagaatctgacgactctgatcgattttgtacaagcaccttacttcacagaagaaactgtaaacaaggaaaaaggaatcatcggtcaggaaatccaaatgtatgaagacgaccctaactggcggatgttttttggcatactaaataacttgtatcctacacacccattgcatatcgatattgcgggcacggttgaaagtatcgacaaaatcacagctcaagacttgtatacgtgctatcggacgttttatcagccaagcaatatggttttatttgtagttggtaagatggagcctgagaaattgatgaaacttattcgggaaaaccaagaagcaaaaaatttccctccaaagcaagaaattgtacgttatttccctgaaaacacaaaagaaatcatcaaacaaagtgcattggaagcagccattacacgagataaatttgtacttggtattaaaggattagacacattgccgcaagaaggaacagaactgttacgctataaaacagcaatcaatctgttgttccaaatgattttaggcaatacttctcgaaactatctagcgatgtacaatcaaggaattatcgatgacagctttggttttgaattcagcttggatcgtgaatttcactttgcggacttcagcggagatacggacgaaccagagaaagcagcagaaaaagtcaaagaaatcattcttggattcgctgatgatccggaagtgtcagaaacaaatctcgatttgctgaagaagaaaatgcttggacaatatttccaatcattaaattcgatcgaatatattgccaatcaatttacgcaaagtttatttggcgatcgaactttatttgatcttcctgaaatcatcgattcgatccaaatgaaagacgtactggcagctggggaagcatttataagtgaagaggccttcagcgagttttacatgagaccaaaa

SEQ ID NO: 21481 - DNA, 1017 bp, Enterococcus faecium
atgaaagaatcagtattccaaggaagaagcttattagcagaaaaagactttacaaaagaagaattacaatatttgatcgatttttcagaacacttgaaagacttgaaaaaacgtggtatcccacatcactatctagaaggaaaaaatattgcgcttttatttgaaaaaacatctacacgtactcgttctgcatttactactgcagcgatcgatctaggtgcacatcctgaatatctaggtgcaaatgatatccaattaggtaaaaaagaatccacagaagatacagctaaagtactaggacgtatgtttgacggaatcgaattccgtggattcagtcaaaaaatggtagaggaactagcagaattctctggtgttccagtttggaatggcttgactgatgaatggcatccaacacaaatgatcgctgactttttaactatccaagaaaactttggaacagtagaaggtatcactgttgcttactgcggagatggtcgaaacaatatggctaactctttattagtcacaggtgcaattttaggagcgaatatgcgtatcgttgcaccaaaagaattacaacctgaagaagaaatcgtcaaaatggcagaaggctttgctgaaaaatccggtgcacaattgatgattaccgacgatgttgataaaggtgtagacggagcagacgtcctttattctgatgtatgggtatcaatgggtgaagaagataaattcgaagaacgtatcaaattgttgaaaccttaccaaatcaatatggaaatggtagaaaaaacacacaacacagatcgtttgatcttcttgcactgcttgccagctttccatgatacaaacactgtttacggtgaacaaatgaaagaacgctttggcatcactgaaatggaagtaacagatgaagtcttccgcagcaaatatgctcgtcaatttgaccaagcagaaaatcgtatgcactcaatcaaagcgatcatggcagcaacattaggtaacttgtttatccctcgcgtt

SEQ ID NO: 21482 - DNA, 1704 bp, Enterococcus faecium
atgtcctttgatggtgtatttacccacgcgatggtcaacgaattgcgtgaaacgttactatctggccggatctcgaaaatccatcagccttatgaaaatgaaatcgtgctggtgattcgttcacgcggcaaaaaccatcgattattattatctgcgcacccaagttatgctcgtgtacagattacccaaatcgattatcagaatcctgataatccgcctaacttcgtgatgatgcttcgaaaatatttggatggcgctattttagaagacatcgaacaaatcgaaaatgatcgagtgatccatttccactttgctaaacgaaacgagttgggtgatctacaaaatatcatattgatcgttgaattaatgggacgtcatagtacgatcgtcttagttaatcgagaaactggaaaaatactggatgcgatcaaacacattggaagctctcaaaacacttatcgttctttgcttcctggtgtagaatatgttgctccgccaaaacaagaggtcttgaacccatttagctccgagaaagaaaaaatctttcagcggctttcccaaactgaactagatccaaaagcaatccaacgtcagtttcagggaatcggtttcgatatcgctcaagagctgaccaaaagattactggaacgtcctaatgaaaagatggttgtatgggacgaatttttctcagccatcagccatcagcctattcctactttttacgaaacggaaaataaagattttttcacaccgattgcttatcaggtattgtccgaacaggcatctgctgtaacagcttatccaacactcagtcaattattagatagctattatcacgaaaaagcagagaaagatcgggcaaaacaacaaggcggagaactgattcgaaaaatcgaaaatgaactaaaacgaaataaaaataaattgaaaaaacgtgaacaaacactcaaagaatccgaaaacgctgagaattaccgtagaaatggcgaactacttactacttttctgacacaagtaccacgcggcgcaaaagaagttgttttacctaattattatgaagaagatcggccaatcaaaatagcactagatccggcattgacaccaaatcaaaatgcacagaaatatttccatcgataccaaaagctgaagaacgctgttaagctgattggcgaacaaatccaagaagccaaagatgaaatccaatatcttgaatctgtcttatctcaactggaaattgccggcccaatggatatcgaagcaattaaagaagaattgacttcagaaggatacctgaaaaagaagaacttaaaaaaacaaaaacgtaagaaaccatctcagcctgatcaatacttttcttctgacggaacgctcattcttgttggtaaaaacaatcttcaaaatgaccagctgacaatgaagacagctaaaaaaaccgactattggcttcatgcaaaaaatatacccggttcgcacgtcatcattaaaagtgacaagccctcagatgaaacaattacagaagctgccgagttagctgcctatttttcaaaataccgatactctgcccaagtgccggttgatcttgtacaggtaaagcatatccgaaaaccaaatggcgccaagcctggttatgttatttatgaaaaccaaaagacgattatcgtgacaccagaagaagaaaaaattacagctatgaaacaaaacagg

SEQ ID NO: 21483 - DNA, 1554 bp, Enterococcus faecium
atggccatcaaagcagaagaaattagtgccttgattaaagaacaaattgaaaattatcaaaacgtgctttcagtcgaagaaatcggtaccgtaacttatgtaggtgacgggatcgctcgtgcacatggtttagaaaacgcgatgagtggtgagttgcttgaattttcaaatggctcatacggaatggcgcaaaacttagaatcaaatgatgtaggtatcattatccttggcgatttcgagtccattcgtgaaggagataaagtaaaacgaacaggaaagatcatggaagttccagttggagaggccttgatcggacgggtagttaatccgctaggtcagccaatcgacggactaggtgaaatcgttactgacaaagctcgtccagtagaagcaatggcaccaggcgttatgcaacgtaaatctgttaacgaaccaatgcaaacaggtctaaaagcaatcgacgctcttgtaccaatcggacgtggccaacgtgaattagttatcggtgaccgtaaaacagggaaaacttctattgcgatcgatacgatcatcaaccaaaaaggtcaagatatgatctgtatctatgtagcaatcggacaaaaagattctacagttcgtacacaagttgaaacattgaaaaaatatggcgcaatggattacacaatcgttgtgaatgccggtgcgtctcaaccagcgccgttgctttatatcgcaccatatgctggtactgcaatgggtgaagagttcatgtacaacggtaaacatgtcttgatcatttttgatgatctttcaaaacaagctgttgcttatcgtgaactttccttgctacttcgccgtccaccaggtcgtgaagcttatccaggggatgttttctacttacactcacgcttattggaacgtgcagcaaaattaagtgatgatttaggtggcggttcaatgactgccttaccatttgttgaaacacaagctggagatatctctgcttatatcccaacaaacgttatttcgatcactgatggacaaatcttcttagaaagcgacttgttctacgcaggtactcgtccagcggttgatgccggactatctgtatctcgtgtagggggttctgcgcaaatcaaagcaatgaaaaaagttgctgggactttacgtctagacttagcaagttaccgtgaattagaagcatttacacaattcggttctgacttggatgcagcaacacaagcaaaactaaatcgtggacgccgtacagtagaaatcttgaaacaaaaattgcatgcaccgctagctgttgaaaaacaagtagtgattttgtatgctttgacacatggattcttagatagtatccctgtagacagtattttagacttcgaacatgaattattcgaatatctggataccaatcattcagatatctttgaaacaatccgtacaacaaaagatcttccagaagaagaagcgttgaacagtgcgattcaggaatataaagacatgttcttagctacaaaaggaaataattcctctacagaagataaattgaaatccattcaaaatgca

SEQ ID NO: 21484 - DNA, 948 bp, Enterococcus faecium
atgcaggaacctatgtttttaaaaccagtttttcaagaaaaaatttggggaggaagtcgtttacgttcagtctttggttttgatatccctaacgataaaatcggagaagattgggcgatcagtgcgcatcctcatggtgtcagtgtagtagaaaatggcgaattcaaagggaaaagattagatgaactatggtcagaacacaaggaattgtttggccatccttcagaaccagtgtttccattattgatcaagatcttagacgcagaagatgatctatctgtacaagtacatccagatgatgcctatgggatgaaacatgaaggtgaattaggaaaaactgaatgctggtatatcatcgatgctgaacctggtgcagaaatcatctatggtcatcatgcaaagacaagagaagaactagctgagatgatcaaagatgggcgctgggatgaccttttgaagaaagtaccagttaaaaaaggtgatttcttttatgtaccaagcggaacgatccatgctattggtaaaggaatcatgattttagaaacacagcaaagttctgacacgacttaccgcgtgtatgactacgacagaaaagatgcgcaaggacaaacaagagagctgcatatccaacaatcgatcgatgtaacaactgtccctgcgaaaacaccagaattacaaatcaaagaagtccgaaaagggaattcatcgatcgtcacttatttagaaactgagtttttcaatgtatatgagtgggatattaaaggaatcacatctttcaaaaaacaagccccttatacattgatgacggtaatcgaaggagcaggagaccttgtcgttgacggaaaaacatatccattagaaaaaggaacaagctgtattattccaaatggcgtttctgagtgggcggtccaaggtgaactagcaatcattgcgtctgaaccaggcaaa

SEQ ID NO: 21485 - DNA, 822 bp, Enterococcus faecium
atgagcctgcagacagaaattatcaatgaattaggtgtcaaaccaacaattgatccaaaagaagaaatacgtaaaagtattgactttatgaaagcatatttgaaaaaatatccgtttcttaaaacttttgtactaggtatcagcggcggccaagattctactttagcaggccgtttggcgcaactaacgatggaagaaatgcgtgaagaaacaaaagatgaaaactatcaatttatcgctgttcgtcttccttatggtgaacaagcagatgaagaagatgcaaaagctgctcttgactttatccagcccgatgttagtctgcgagtaaatatcaaaccagctgttgatgcacaagtacaagtattaagcgaagcaggtgtgggaatcagcgattttaacaaaggaaatatcaaagcacgtcaacgtatgattacgcaatatgccgtagctggagaaagagcaggagccgtattagggacagatcatgctgcagaaaacattactggattcttcacgaaatttggtgatggtggagccgacattttgccattattccgtttggacaaacgacaagggaaacaattgcttcaagcattgaatgcaccggaaaaattatacacaaaaattccgactgcagatcttgaagatgggaaaccaatgattgcagatgaagtcgcactaggtgtcacatataatgaaattgatgattatctagaaggaaaagaagttcccgctcaagcacaagaaaaaatcgaagcatggtggaacaagacacaacataaacgacatttgccaatttccgttttggatgatttctggaaa

SEQ ID NO: 21486 - DNA, 1038 bp, Enterococcus faecium
atgactgattttaatttttttaaggcggatagagtttacaacgaattattttatcaatttccaaaagtctttattgtttctgacgaatacaaaaaaatgaaagattcaactaagattgcctatatgcttttaaaagcaagattagagatcgcaatcagcaaacggcaaatcgatgaagaaggtaatgtttattttacttatacgacaaatgaactatgtagcgtattaaactgccaaaaacaaaaagcgatagcaatcaaaaaagagttggaatcctttggtttattattacaaaagcagatgggatttaacaaacagttagggaaaaataatcctaatagactatatctagcagaattaaaagtctcagaaaatgatatctacttactcgaaaaatttgatagagagaatagggaaaacgttgataaatcagagggtatgaaaatcatacccaccctcgacgaaaaatcagacgctgaatcccttggggctcaagagggtatgaaaatcataccgtgccaaaacgttgataaatcagagggtatgaaaatcataccagaacttaataataatatattagacactaatagacacaatatagacactgaaaaagaccgcctacaagatcaattgttgttagacaattttgagacaattatgacaaacgacagcattgctacgtttatccctgaacgagtattaaatttaataaaaacattttcttcaagttacagtgaagctcaaaaaactgtccagactattcataatgcaaagaaaaaagccgaaacagaaagtggtatttcaataatttttgaagaactcgatagttattatgtcaatgcagaacaagaattatacacgacactgttaaaagcctatcaaaaattaaaaaccgaaaaagttgaaaatatccagaacctgatttttgtctatgtaaaaaattggtttatcgaaaaaccaatagctgctaaagtatcaagtgaaaaacgtttgaattctgaaagcttcccaaaaactattacgaaagactggttagag

SEQ ID NO: 21487 - DNA, 1011 bp, Enterococcus faecium
atgatcaacttaggtattatcggaacaaattggattactcatcaatttgtccaagcagctttaagcacaaaaaaatatgaattgacagcggtatattctagacatttggaaaaagcacaggaatttggttctcattatgaaggggatatcgaattcgcaacagatttgaagacttttttcaatattactcatatggacaccatttatattgcttctccgaatagtcttcactttagtcaagctaagcaagcaattttggcaggaaaaaatgtgatagttgaaaagccagctttttcgacgccaaaagaaatggatgaaatcatccatttggcaaatgaacacaatgtgtatttttttgaagcagcaagaaatatccatgaatcaggttttaaaaagattgccgattacttaccattaaaagacgagataatcggtgcaaatttcagctatatgaaatattcttcgcgctatgaccaagtattagatggagaagaaccgaatatcttctcgactcatttctcaggtggtgcattgatggatttaggtgtttaccttgtatatgcagctgttgcttggtttggaatgccaaaagaagtccattatttcccaagaaagatttctactggtgtagatggtcttggatgggggatcttacgttatgagaattttgatgtatcgatccagccaggtaaaatcggtgattcttatttaccgtcagagatttattttgactcaggaacgctagtgatgaatggagtcaatgcaattgaacaagcacaatttcatgatcgcgcgcataaagaaatcattgatttggcggtaacagctgcagaaaatccaatggcagatgaagcagaggattttgccaatgtcatggctcatccgaaagatccagcttggggattgttgtatgaagagtggatcgagctagctagaaatgtgaaccaagtgatttatgatttaagaaaaaatggcggcatcaaattcgatgcagataatgaggaagatttt

SEQ ID NO: 21488 - DNA, 216 bp, Enterococcus faecium
gtggcaaaagaagatatgattgaagtcgaaggtacagtcgtcgaaactttgccgaatgcaatgtttaaagttgaactagaaaacggacaccaagttcttgctactgtttcaggtaaaattcgtatgcattacatccgtatcttacctggtgacaaagtaacggttgaattgtctccatacgatcttaaccgtggccgtattacttatcgctttaaa

SEQ ID NO: 21489 - DNA, 1083 bp, Enterococcus faecium
atgattgaagtatctgcaccaggcaaactctatattgccggagaatatgcagttgttgaaacaggccatccagcagttatcgctgcagtcgatcaattcgtgacagtcactgtagaatctgcacgaaaagtcggaagtatccaatctgcacaatatagtgggatgcctgtacgttggacaagacgcaacggagaattagttttagatattcgggaaaatccttttcattatatccttgctgctattcgcttgactgaaaagtatgcacaagaaaaaaacattcttttatccttttatgatctgaaagtaacaagtgagttagacagttcaaatggccggaaatatggattgggttctagcggtgccgtgaccgttgcaacggtcaaagccttgaatgttttttacgcgttgaatttatctcagttggagattttcaagattgcatcactagccaatttagcagttcaagataatggttcctgcggcgacatcgctgctagctgttatggtggctggatcgctttctcaaccttcgaccatccttggctccaagaacaagaaactcagcattctatcagtgagttacttgccctggattggccaggtctatccattgagccattgattgctcctgaagatttacgtttattgattggttggacgggtagccctgcctctacttctgatttggtcgatcaagttcaccgttcgagagaagataaaatggtggcttatcagcttttcttaaaaaatagtacagaatgtgtcaacgaaatgatcaaagggtttaaagaaaataatgtaacgttgatccaacagatgattcgaaaaaaccgacaattactgcatgatttatctgcaatcactggggtcgtcatcgaaacgcctgctttgaacaaattgtgtaatttagctgaacagtatgaaggagccgcaaaatcttctggtgcaggtgggggcgattgcggaatcgtaattgttgaccagaaatctggcattcttcctttaatgagtgcatgggaaaaagcagaaatcactccactgccgttacatgtctatagcgatcaaagaaaggaaaaccga

SEQ ID NO: 21490 - DNA, 2136 bp, Enterococcus faecium
gtgcaaaaaaaagaaattgccgtatttatcgatcaaatcactcgtgaacgggccactggcgatttgcttattgtgggctgggcaattgatgaagtgaccaaagaaatccctacgataaaggtagaaaaagaaaatgtgattgctgaagcaacacatgtcgtaagattggatatcaatcatttatataatcttgatgttaagacccaaagcggtttcaaggtacgtttatcagggaaaatgagaggaaaagccatcttagacttccaaacagcgagacatcaaaatggcatagctgtgaaattaaacggtaaatacccttatgatgacggcattgaatcttcatgggaaagaaaaaaaagattactgaaaaaagggataaattatgcaaggactcatggcgtaaaaaaagcgatccgtcgggtcaaattggaattgaagccaggatcgatcgactatgcagagtggatcagtcgtcatgagaaaccagatttgaaagagcaaaggaaagaagcacaaggatttgcgtaccgtccattgatttccatacttatgcctgtctataacgttgaaatcaaatggctcgaaaaatgcattgattcggtactggatcaaacgtatgatcattgggaactatgtatcagtgatgatgcttctactgatccagctatccgaaagtgtctggaatcctatcaagcaaaagatgatagaatcaaagtcgttttccgaaaagaaaatggacacatcagtctggcaactaattctgcattggaaatagcagaaggagaatttatagcactcttagataatgatgatgaattaccgccatttgcattatatgaagtggcaaaagtgctaaacgtacatccagaactggatgtgatctacagtgacgaagataaaatcgatgcagatggcaatcgctttgatccgcatttcaaagcagactggtcgcctgatacattgatgggaaataattatatctctcacttaggcgtatatcgaacaagcattgttaaagaacttggcggtttccgtaaaggctatgaaggttctcaagattatgatttggtccttcgtgtgacagaacaaatccctgcagatcatatttaccacattgaccgagtcttgtatcattggcggacgatcccaggatcaactgcaagtaatggcgaagccaaaagttatatctatgattccggagtgaaagcattgacagatgccctgtctagaagaaacatcaaaggaagcgtacgtcctggcagaatttctggattttatgagattgcttatgacgtcttgcaagaggatttggtcagtgtgatcattccaacgaagaatggctatgaagatctaaaaacttgtgtggattcgatcatcgaaaaaacgtcttattcaaattatgaaatcattattgcggataacggaagtacagatccaaaaatgcaagaattatttgcagaatacaagcatcagctgaaagaccgctttatcgtagaattgattgacattccattcaattattctcgaattaacaatttagcagcagaaaaagcaaacggcaaatactttttattcttgaataacgatacagaagtgattgagccagattggatgacggtgatggtttcttatgcacagtttgatcgaatcggctgtgtaggagcaaaactgttttatccagatgatacaacgcagcatgcaggagtattattaggaatcggtggtgttgcagggcatgcattgaataactatgatcgaacacattgtggttatttcggccgattggtcattgacgtcaattacttagcagtcactgcagcttgtatgatggtcaaggcagctgacttcaatgctgttaacgggtttgatgaaacattagaagtagcattcaacgatgttgacttgtgcttgaaagtttatgaactgggtcgttacaatgtctatgcacatcaagcagaattgtaccatttcgaatctaaatcaagaggttatgaagatactccagaaaaacaaagacgttttgctggtgaaatcaaaaaaatgcaagataaatggccagcatatattgcgcatgatccattttacaatgataatttaacaaaagaaggaatcggcgacttttcgttgagaccagat

SEQ ID NO: 21491 - DNA, 915 bp, Enterococcus faecium
atgaaaacagcattcttatttagtggccaaggtgcacaatatcaaggtatgggaaaagatttatatgaagaagccgttgtaaagcagacatttgatgaagcaagtgagattctcggctacgatatggctgaactttgctttacagaaaatgaacgtttggatcagacgcaatatacacagccagctattctaacagtcagcatcgcgtattatcgcttattgaaggagcatggaatcatcccagatgcagctttaggactgagtttaggagaatattcggcattagtagctagtaatgcgctatccttcactgaagcagttgcgttagtagcaaaaagaggcgcttatatgacagaagctgccccagctggaagcgggaaaatggttgcagtgatgaatgcgccgattgaaacgatcgaggaaagctgtcatgaagctagcaagtacggcatcgtatctcctgcaaattataatacacctcagcagatcgtgattggtggcgaagaaaaagcagtagacgaagctgttttactattaaaagaaaaagggttcaaaagaatgatccctctaaatgtcagcgggccttttcatacagctattttagaaccggcagcaaaaaaactggcgaaggacctaagtcagattcaattctctgaaccttcttttcctatcataagcaacacaacaacggaaataatgaagaaagaaacaatcgcgggactacttgaacagcaagtcatgcaacctgttcgtttctatgagagtatccataagttaaaaacaatcggcatcgaacaagtcatcgaagtcggccccggaaaagtattaagcggatttatgaaaaaaatcgataaaacaataccagttctgcgtgttgagaataagcagacatttgatgaaacaatagcaatacta

SEQ ID NO: 21492 - DNA, 942 bp, Enterococcus faecium
atggcaagacgaagaagaaaatcaagagggaaaaaaatatttctgattattttagcagttcttatcgtattagtattagcaattgtaggagtaggagcaaaattatatctggatctctcacattctattgagaaaacttacgaatcagtggaacgaacccaaggagaacgaacgaaaccagttgatctggacaaacaagaatctttctctgttctattgatggggattgatactggagatttgggtcgggtcgatcaaggaagatcagatacgatgatggttgccacagtcagtcctgaagacaaacagacaacgatcgtcagcattcctcgagatacgtatgtcgacattgtaggtcatgacacaaaagacaagatcaatcattcttacgcattcggcggagctgctatggcgatggataccgtacaaaagtatgtagacatcccaatcgatcactatgtctctatcaatatgaaagggctaaaagaactcgttgatgctgttggtggtatcgaagtcaataatgatttcactttctcccaagatggctatgactttccaatcggtaaaattacattgaatggagatcaagcattatcttattctcgtatgcgttatgaagatccaaacggtgattacggtagacaagggcgccaaagaaaaatcgtagaaggtatagcgaaaaaagtattgagtctgaacggtgtaagcaactatcaatccattttgaatgctctagagtcgaatatgaaaacagacatgagctttgatgaaatgaaaaagatcgctttagattatcgggaggcatttggtacgatcaagcaagatcagctgcaaggagaaggcttcatgcaagataatatctcatatcaaaaagttagtgatcaagaactggaccgtgtgaaaaaagaattaaaagatcaaatgaatctagagaataaa

SEQ ID NO: 21493 - DNA, 1470 bp, Enterococcus faecium
atgaataatacttacccagacgacagtttgacgctgcatacggatctatatcaaatcaatatgatgcagacatactgggaattaggtcgagctgatttacatgctgtttttgaatgttactttcgagaaatgccttttaaccacggatacgcggtttttgcaggattggaacggttagtcaattatttagagaatctgacgttcaatgattccgatattgcttacttgcgtggattagaagtctatcctgaaggttttttggagtatttacaaaattttgaatttaaagcaacagttcgttctgctcgtgaaggagaactagtttttgcaaatgaaccattaatccaagtggaagggcctttagcgcactgccaattagtagaaacagcactgttgaatatggtcaatttccaaacgttgatcgcgacaaaagcagctcgtatcaaatctgtcatcggagaagatccactattggaatttggaactagacgggcacaagaactggatgcagcagtctggggaactagagcggcatatatcggcggagcagatgcaacaagcaatgtacgtgctgggaagatatttgggataccagctagcgggacccatgctcattcgttagtccaatcttatggaaatgattatgaagcatttatggcctacgctaaaacccataaagactgcgtgttcttagtcgacacttatgatacgttgaaatcaggtgtgccaagtgcgattcgcgtggcgaaagaattaggtgacaaaatcaacttccaaggcgtacgcatcgacagtggagatatggcctatatatctaagcgtgttcgggaacaattagatgcagccggatttacggaagcaaaaatctatgcttcgaatgacttggatgaagcaacgattttgaatttaaagatgcaaaaagctaaaattgatgtatggggtgttgggacaaaattgatcacagcctatgatcagccagcccttggtgcagtattcaagctagtatcgatcgaagatgatgaaggaaaaatgatggatacgatcaagttatcaagcaatgcagaaaaagtaactactccagggaaaaaacaagtgtggcgcatcactcgaaattttgatgggaaatctgaaggagactacgtgacattatgggatgaagaccctcgagaagaagaagctatcttcatgttccatccagtgcatacgtttatcaataaaactgttcgagactttacagctcgcccagttttacaagatatctttatcgaaggaaaaagagtttacgaattacctgcactaaacgaaatcaaagaatatacaaaagaaaatctagattcactatgggaagagtataaacgagacttgaatccgcaaaaatacccagtcgatctgtctactgaatgctggaaccataaaatggctatcatggaacgaatgaaaaaaagcgtagcagaacttcatacagaagca

SEQ ID NO: 21494 - DNA, 600 bp, Enterococcus faecium
atgagaaatccaaaaccaaaagaatggttagcaaaagactacagccaaaactatattgctgactacaaaccgtttaattttgtcgatggtgaaggtgtccgcaacagtctttacgttagtggctgcttatttgcctgcgaaggctgcttcaacaaagctgcacaaaatttccgatatggcaaaccattcacacctgaattagaagaacaaatcatcgctgacttgcgcaacgattacgtgcaaggattaactttacttggtggcgaaccttttttgaatacagatgtttgtctgcaagtcgtacgacgtatccgaaaagagttcggtacgacaaaagatatctggtcatggacaggctatacctttgatgaattgctacaagattcagaagataaattagaactcctttcgcaaatcgatatccttgttgacggacgctttgaattaagcaaacgtgacctaaaactacaatttcgcggaagtagcaaccagcggatcattgacgtccaaaaatctttagaatccaatcaagttgtgatttgggaaaaatgtacggatgcaacagaaacctatgaacaaatcaaaaagcaagacttgata

SEQ ID NO: 21495 - DNA, 1938 bp, Enterococcus faecium
atgaaaaaaattattgcaatcacatcctgtccagttggtattgcccatacatacatggcagcagaaaacttagagaaagcggggaaagcagttggcgccgaggtaaaagtcgaaacacatggttccatcggtattgaaaatgaattgactgcaagagatatcgaagaagcagctggtgtaatcatcgcagcagatactaaaatagataaatcacgattcggcggtaaacctttgataaccgtaggtgtgcaagaaggaatccaccatgcagatgagttggtgagagatattttagcaggaaaagcgccagtctataaaagtacggaggcaattatttcttccgaaaataaaagtgaatcagaaaatttaggtaaaaaaatctataagagtttgatgaatggcgtttcgtacatggtacctttcgtagttacaggagggttattgatcgcgatttctttaacattaggaggaacagctacacctgaagggatcaagataccagaaggaacgatttgggcaacgatgaatagtatcggaagtatcgctatggggttgatggttccaattctatctgcatttattgcgcaaagtattgcagatcgtccaggacttgttcctggatttgttggtgggatgttagcggcaaacggagcattatatggtagtgatgcgaatgcgggattcttaggcgggatcatcactggatttttagcaggattcattgctttaggaatcaagaaagtgcgagtaccgaaagctttacaatcgatcatgccaattattgttatcccaattttaggatcattggcagttggttttgtgtttatctatgttattggagaaccagtagctcttctatttagttcattgactcactttttagcagggatgcaaggaggaagtgaaattgttctagctatgatcttaggagcgatgattgcttttgatatgggggggccgttcaataaagtagcctttttgttcggatctggcttgattgcagaaggcaattattccattatggggccaattgctgtagctatctgtatccctccattagcattggggctggcatcattgattttaaaaaccaaatttacgaaaacagaacgagaagctggtaaggcgtccttagcaatgggactgtttgggattacagaaggcgctattccgtttgcttcaacagatccactacgggtgattccaagcattgtaatcggggcaatgacaggaagtgtgatcgcgatgctttcaggagtgacagatcatgtagctcatggcggtccgatcgtagcggttttaggagcagtggatcacgtagccatgttttttgtagcagtgattgctggtattgctgtaaccgtgctaatgttaagaatccttaaaccgacattacaacaaactgcggttgctgcagcaaatggtgtgacagtagcagatctatcagagactgaaacaagtgatgtttatacgaaaactgaaacttttgattctatcacggatattatgtcagatgaagcaatcgttttaggtgaaacagcaacaacaaaagacggagtaatcgaagatttagtccaacgtttagaaaaaacagcggcgatcacagataaaaccagatttaaagaagtcatctatgatagagaacatgaaagtacaacgggaatcggtatggggattgctattccacatggaaaatcagcttatgttcttaaaccaacagtggcatttgccagaagtcaatctggggtagattggcattctttagatggaaaacctgcacatatgatctttatgattgctgtacctgaaaacagccaaggtgatatgcacttgaaaatactgcaacgtctatcacgtaaattgatggatgatgacttccgtcaagcactgatggaagcgccagataaaacaacagttcaccaattattaagcgaaatg

SEQ ID NO: 21496 - DNA, 1425 bp, Enterococcus faecium
atggaaatggaaaagaaatcgacgggtattagcaaatggggactggttgctctggttgtcagttcgtcaatcggaagcggtgtgtttgggatcacaagtgatctggctagttctgcagctccagggccagcgatcctttcatggataatcgttgggattggtattttagctttggtattatcgctgaatcatttaggagaaaagcgtccagatctagatggtggtattttcggttacgcggaagcttcatttggtaaattaggtggcttcatcagtggttggggttactggttgtctgcgtggctgggaaatgttgcttttgcaacgatgctgatgagcgccatgggagaatttttcccgatattcaaaggtggacaaaatgttccttctattttatttgcaagtatttttatttggggtctgactttattagtaaacaatggagttgaaggagcgagcgtcatcaatacaatcgtgacgatctgtaaattagtgccattattcctatttttaatatttgtatttatcgcatttaaagtgaatatattcactgctgatttttggggtaacgtatctgataatctagtgaatggaacagggcagcaaggaacgatctggttgcagattaaaggttgtttgatggttatgatgtgggtctttgtagggatcgaaggcgcaagtgttttagccaaccgcgcgaagaaacgttcagaagcccagcaagcatcgatcattggtctgctttgtttattgtttatctatatccttgcttcgatcttgccatacggcgtcttatctcaagaagagttagcaactatttcacaacctgctatggcaaatattttaaaaggaatcgtgggaaattggggagcagcgctgatcaatatcggcttgattatttcgatcattggttcttggttgtcttggacgatgctcccagcagaaacaacgatgttgatggctcgagacggtctgttgccgaaaggttggggaaaaacgaataaaaaaaatgccccaacttattcgttagttgttactgcaatcttgactaatctattcttattgactttcttagttactgattatgcctatcaatttgcctattctttatgtacagcggcaattttgatttgttatctacttgtcgggatctatcaagtccagttttctttaaaagaaggaatcaaaaaacaagtagtgatcggtgggattgctgtagtttttgaattgatgggcatcattttagcaggattttcttatgtccttttatgtagtattgcctatcttcctggtttttgcttctactggatcgcttgtcgtgaaaccaaacatcaaattacgggaaaagaaaaagtaatgattgggctgatttgtgtggccgcactgctttcaatcgggttgcttgctgtaggctggatcaagata

SEQ ID NO: 21497 - DNA, 264 bp, Enterococcus faecium
atgggttttacagatgaaaccgtacgttttggttttgacgatagtcgcaaaaaagaagtgagcgaaacattagcgattgtttatcgggctttggaagaaaaaggctacaatccaatcaatcagattgtcggctacttgctttctggagacccggcctacattcctcgttatcgtgatgctcgaaatttgattcgccgtcacgaacgcgatgagatcatggaagtaattgtcaaggactacctctcaaatcatggagtgaattta

SEQ ID NO: 21498 - DNA, 993 bp, Enterococcus faecium
atgttagaatggtcggaaaataaaagacaagcaatggaacgtctatcgacgccagaaggcattattaccgctttggcgatcgatcagcgaggcgcgctgaagaaaatgatgtcggctttagggatggaagcgacaaaggaaaaaattgagcagtttaaaacactaatttcccaagaattgactccttatgcctcagcaattttattggatcctgaatacggactgcctgctgcacagaagcgtgcagcagcgagcggtctgctgttggcatatgaaaaaactggttatgatcaaaccgtacccggccgcttgccggatctgctgtcggactgttcagttctgcgattgaaagagttaggtgcggatgcggtgaaatttttactgtattacgattatgaagaagcagaggaaatcaatcggcaaaagcaagtttttgttgaacgaattggaagcgaatgcatggctgaaggactgccattttatttagagttattgtcatatgatgctaaaaatgtagatacgaaatcgctttcctatgccaaagcaaaaccgcgcaaagtgatcgaaatgatgaaagaattctcgaaaacccagtataaagtagatgtcttaaaggttgaagtaccagtaaacatgtcatttgttgaaggaaatgcaacaggggagatcgcctatacacgtcaagaagctgccgcttattttaaagaacaaagcgatgcaacagatttgccgtatatcttcttaagtgctggggtatcagcggcattattcatggagacattgcgttttgccaaacatgctggggcacgattcaacggtgtactctgtggcagagcaacttggaaagatgcagtcgctccttttgttgaaaaaggagaagcggcaactttagaatggctgacagaacaagggacacaaaacattcgtcaattgaatgaagtgataagagaaactgccatcccatggtatgagaaagtaagtgaaagcacttgt

SEQ ID NO: 21499 - DNA, 918 bp, Enterococcus faecium
atgaagattggtgtaatcggtgtagggaatatcgcagaaaaagcatatttaccaacttatgcgaaaaaacaaggaacacttgatttttattttgcaacaagaaataaagaaacaaaagaaagaattcaaaaagagtacgggttccaacatctatatgaaacgatcgatgagcttttagaagaaaaaatcgaagcatgtatgatccacgcagcaacaaaagtacattatgaattagccaaaaaatgtctagaaaatggtatccatgtttatattgacaaaccactgagtgtccatctaaatgaagttcgtgaattgcaagaattagctgataagaaccaaataattttgatgatcggtttcaaccggcgctttgctcctatggtagaagaattgaaacgtatcccagataagcggttgatccacctgcaaaaaaatcgaatagcggcaaaagaaacgacagagttcgtcctttatgatttgtttttacatcttattgatacagctgtgtatttattagatgaacccattttgagaacaaaataccagataagagaaacaaaggaatttttggaatatgccattttacaattagaaacacaaaatcaaacggctattttaacgatggatttagcaagtggcgctaatatagaaaaatatcaagtaacaagtaaaaatggtacttatgaagtaaacgatctgacccagcttgtcattcaagatgctgatggaaaaaaagtgaaagaatttggcgactggacaaacacgctagtcaaacgcgggtttgagccaatggtagaggccttcttttctcagatccgtttaggtaaatcggaaacagaattgcttaaacaaaaagaagttgtaagaagtcatgaattatgtgaggaagtgcttaaagatcactaccgtcatcaactt

SEQ ID NO: 21500 - DNA, 771 bp, Enterococcus faecium
atgtctgtcttagaaataaaaaatctacatgtgtcgatcgaggaaaaagaaatccttaaaggcgtaaacctaacaatgaaaaccggagaaatccatgccatcatgggacctaacggcacaggaaaatctaccttatctgccgctatcatgggcaatccaaactatgaagtaacagaaggcgaaattttgtttgacgggaaaaatgttttagacttggaagtagatgaacgtgcgcgacttggcttatttttagctatgcaatatccaagtgagataccaggtatcacgaatgcggaattcatgcgtgcagcgatcaatgcgaaacgtgatgaaaacgacaaaatttctgttatggcatttttgaaaaagttagatgaaaaaatggctttactaaatatgccagaagaaatggctgaacgttatctgaacgaaggtttttctggcggagaaaagaaacggaatgagatcctgcaattgttgatgttagaacctacatttgcaattttagacgaaatcgattcaggtctggatatcgatgctttgaaagtcgttgctaaaggagtaaatgaaatgcgcggagacaatttcggtgcattgatcatcacccactatcaacgattattgaactatatcacacctgatgtcgttcacatcatgatggaaggccgagtagtcatgacagggaatgctgacctagctaaacgtctggaagcagaaggctacgctggtatcagtaaagaattaggaatcgactataaagaagaagaagcg

SEQ ID NO: 21501 - DNA, 2184 bp, Enterococcus faecium
ttgaatgaaaaagaaattctccgattacaaaaagaattgaaacgctgggagaacaagtataaaaagcttcaacaagtctttcggctacaagaagaaatcattgctacctatgaagcggcttatggcgaagcacccggacttattgaggaagaagtacaagtaaaagaaagtgaaggaaacagctctttctttaaaatgatggagaaacgttcctataatcgcttcaatcaagaacaaaaagcagctatcacatatgatatgaagaaacatcttcgaatcatagcaggagctgggagcggcaaaacgcaaacaatctgtgcaaaagctgtttatctgatgacgcaaaaacaagtagacgaagaacgcatactaatgatcacttttacaaggaacgctgcaaatgaactaaaaaaacgagtagataatttcagccagagaaaaaccgctgtccatatcggaacattccatagtatcttttttaggatatacaatgaaatttgtcgaaaatttcctgaagtagcaatgcaaggaatacaaggagacttttcaaaggatactgcacaaaaagtgaatgctgttttgcaacagctgatacgtaaatataatctttatatatttgatcaatatggagaaaaaacgattgcttctcggttagactattggcagaatatgaacctttcagtagaagaaatggttcagttagttaaagaaaaatatgattccattgataagaatgcacgacagccgatatcagaacgactgtatggattgctcacggaactccaagaacaaaaaagaagccagcaattgctagagttcaatgatgtactccaaaatctgaaaagcgctttggagaatgaggagatccagcattatatcggccaaaaatatgattatctattcattgatgaatttcaagatactaatccacttcaatgggaaatcgtgaaacggatgacaaaggaaaacaggatcaagttgattgttgttggagatgatgatcagagtatctatggattcagaggatcagagccagcatacatcaagaactttgaaaaagaatatcctaccaaaactcttttcttattaactaattatcgttctcgggcagctattgtccaaggagcaaatagattgatcagctataataaaaatgatcggataccaaaggcgatgattccagcacaaaaagaagcaggtgttatggaagcctatttgttttctgatactaaagcagaaagtcagtggctaatcaaacaaattcagacatttattcaaaaaaatgggaaatataaggaatcaatcatattataccgatcagcttcacaaacgcagcagcttgtccaatctctgctgaaaacgaatattccttttgtactggaagcagatagtccatatgaaggtatctttggtatcaagtctttccaacatttctatcaaaaaattgttcattggcaaacagcactgaatctgcaaaagaaaaatcaggcctaccagcaattgctccggcagctgatggcagactgctacctgaaaaaaagtgaatgcgatcaatacttttctcctaaatatcaaaatatagccgttgcagattatattttgtcgataagccccaatttaaaatcgaaatctgcagaaatccgagagtttgaggaagcgttgcgtaaaacagaccagcatcaagaaatctattcgcttgttcaaagctatcttcatctgccacgtatagctaaggaaatcgaccagagtgatcaagaatggatacgagaagaagtaaagcagcatgctactttcagaagactccaagccttatcgcaagaaacccaagcgacagctaaagaattaaaaacccgcttgattgcttacagacaaggaaaacttgatgcactatgtatccagagcattcacaaaagtaaaggtcttagttaccgaaatgtctttttgattggttgtaacgaaggaagtttgccttataacggagcgacagaaaagaaagtaatcgactttaatgaaataaaagcagaaccagtaacgacgatagaagaagaacgaagactattttatgttgcgatgactagagcaagaaatcgtctgtatctatgtgtacctcaaatgaaaaattcaagaaaattgaaagtatcgagatttatcaaagaaaccgggagtcgtgtgaaaaaaggaaag

SEQ ID NO: 21502 - DNA, 2043 bp, Enterococcus faecium
ttgaaaacgatttttgcctatttagttgatttccatctcggaatcgaaagtggcattcaatactttatcttgtttatcaaccctattgcaactacattgttattacttggaattgctctttatatcagacgccctagagttgcttatatcacgatgatggtcatttattttcttttgacattgcttgttttttcgaatgtcacttattatcgagaattcacggacttcattacgatcaacacgattttaggtgctgggaaagtagcgagtggtctgggagaaagtgccattcgactgtttcgcccatatgatgtgatctattggatcgattttattatcttgactgttctgctgattgcaaaaaaaatcaagttggaccctcgcccgatccgagcaagaatggcttttgcgatctctacattagcagttatgattttctcaggaaatctttttatggcggaagctgatcgtccagaattgctgactcgaacattctctcgtgattatttggtcaaatatcttggcttgaatgctttcatggtttatgacggtgttcaaacttaccagacaaaccaagtgcgggcagaagcaagtcccaatgatatgaaagaagtagaaaattatgtaaaagaacattatgcagcaccaaatgacgatttgttcgggctcgctagaggaaaaaatgtgatttatatccatttagaaagcttccagcaattcctgatcgattataaattgacagatgagaatggtctccagcatgaagttacacctttcatcaatagtctttaccacagcaacagcacgttcagttttgacaactttttccatcaagtaaaagcaggaaaaacaagcgatgcggaaacgctgatggaaaattcattgtttggcttgaatcaaggctccttgttcacacaattaggcggaaaaaatactttccaagctgcacctgatattttaagtcaaacacaaggttacactagtgcggtattccatgggaacgctggtacattctggaatcgaaacgagacatacaagaatttaggatatgattatttctttgattcttcttattatgatgttaatgatgacaattcgttccaatacgggttgcatgataaaccatttttccaacaatccgtacaatacttggaacgtctgcaacaaccattttattcaaaattcattgctgtatctaaccattatccttattcaaaattcaccaatgacgaagcaggattcccgttagccaatacaaatgatgaaacgatcaacggttactttgcgacagccaattatttagataccgccgtacaagaattcttcaattatttgaaagaaagcggcttgtatgataattcagtcatcgtcctttacggtgaccattacggtgtctcgaattcaagaaataaaaatctagctgaattagttggaaaaacaagttctacttggacaaactacgacaatgcacaaatgcagcgtgtcccttatatgatccatatccctggacaaacacagggcggaatcaatcacacttacggcggacaagttgatgccttgcctacattacttcacttactaggtgtagatacaaaaaattatattcagttaggacaagatctattctcgaaagatcatgaacagcttgtttctttccgtgatggtgattttgttacaccaaaatatacttactacggtggtacgatctatagtaacgaaactggtgaagctattactgaacctactgaggaagtacagaatgaaattgattcactgaaagaaaaagttgataaacagttagctgtttctgaccaaatcaataatggtgatcttcttcggttctatacgaatagtggattagacccaattgataccagtgattatgactacaagaatggcttagagaaattaaaagaagctgaaaaatctcttggtgacaagtcaactagtgtctttagtgaacacaacggacaatcaactgttgatctttataaaacgcaaacgtaccaagaacttcacggaacgaccacaagttcttccgaa

SEQ ID NO: 21503 - DNA, 1218 bp, Enterococcus faecium
atggtgaaatttatccatgcggcagatttacatatggatcggtcatttgaaggactgacaactcttgataaaactgtacaggaaaaactattgaagacgaatctgaccgttttatcaaatatcattgaacaggcaataataaataacgttgattttgttttacttgcaggagataattttcatcaaaatcgtccttcattaaaaatacagaaacatttttcagaacagatgaaacggttagaaaagaaccatatacctgtatttataatattcggaaatcatgatttctatcaaaaagagcggtattggttctcctttcctaaaaatgtccatttatttacatccgaaacggtagagacaaaaaaaataacgataaaaagtggagaaactgtctctctcagtggatttagttatcgtcaaccgtggattcaaaaagacaaagtgatggaatttccttctagagaactcacagattaccatattgggttgtaccacggggaacctggcgtctctcaaaaaggaaactatgctcctttccaaccctcaaagatgcaagaaaagggatacgattattgggctttagggcatatccatgtgccaacggtcttaaatgaaaagcaaacaattgtttatccaggtgcgcctcaaggtcatactaaaaaggaacaagcttctacatctattctactagttgaattaagtaaaggaagttgccaaatacatccgattaaagtagcagaggtctattggaagacaaaggaaatatcattgaggaaagcaagaacgacaaaagaggtcattgttcacattcgtcagcagctttcaaaagtagaggatggatttagtttaattgagataaaattaaaagattatgaccatctcaatacagatgttttggaacggatacaatcaggagagctattagactatttgttagaggaattctcagataggataaatgatttctttatttggcgtatttctctcatagagaatactttttatacgaagaccccacttgctgcttctgctaaattgatggaacagttatttcaatactatcagacacctcaagatttccaacaaattttaaatgaagtatatagtcatcaagaagcggctagaatattgagcgaactgccggaatatcaagaagaaacacttgaaaaagccaagcagctgcttaatcaagattttttatttgaggaggatcaggaa

SEQ ID NO: 21504 - DNA, 2445 bp, Enterococcus faecium
atggcacaaaagaaacggcctactaaaaaaaggaaaaagacgaaaaaaacgaaaaagcaaaaacagcagcaggaacaaatgctgacgattggtgttgggtttgccttgattttatttgctgtcttcggctttttaaaattaggttttttaggaatattgattgcaaacggctttcggatcattgcaggaaatacttaccaaatcctctgtcttttattagccgtattaggattttggattgtcattaagaatacagagttttcaattggtaaaaaccgacgctggtttggcggcatactcttttatttcggtatcttattattgttacatgcccatttatttggcaaactccatactggggaaccaaatatcatggggacgacatgggatttgttagccagtgatataaaacaaagtcaagtagacaataacgttggtggtgggatgattggagcaatcctttatcattttacttacttcttgattgcacagcctggaagttatttagcagcagtgctattactggcaggaggagcattcctgttcagtaatctggaaggctatcagctgttaaatggtatccaatcaattggagaacgagtacaggaattattggaaggtgatcctgccaagcaagctcgaaagcaagcggcaaaggaagagagaatgaaacagcgcgcagaagcgaaagaagcaaggcgcttagctgcaaaagaagctgcagaaaaagaagctgcagaatatgagaagaaaaaagcggtgagccagcaaagggaaaatactgctgatgaatggcaggaaccagaaaatacagagccggagcagctaagttttgttccaatcgacagttttcaagaaaatatccatcctgcgaatctagagaaaccagtaccagatacaccaaaacagaccaatacagcagaaggtttttcagatgagttgccagaggatgacggtacctcattagaatttgagattgaagcagaacaggaaaatcaagactatgaattaccgacagttgatttgcttgattctataccaactgtggatcaaagtgatgagtataaaaaaattgaaaaaaatatcggcgtattagaacaaactttccaaagtttcggtgtcgatgccaaggtcgtcaaagccagcttaggaccatccgtcacaaaattcgaagtccagccggctgtaggggtaaaagtaagtaaaattgtgaacttaacagatgatatcgcgcttgctttagcggcgaaagatgtccggatggaagcaccgattccaggtaaatcactgattggtattgaagtaccaaatggaaagatcagtatggtttcctttagagaaatcatcgaagcacaaccaaaccacccagataaattactagaagtacctttaggacgtgatgtttctggacgggtacaaacggctgatctttcgaagatgcctcacttactcgtggctggttcgactggtagtgggaagtcagtagcaattaatgggattatcacaagtatattaatgcgtgctaagccccatgaagtaaaactgatgatgatcgatccgaaaatggttgaattgaatatgtacaacggcatacctcatctgttgacgccggtcgtgacgaaccctagaaaagcagcgcaagccttacaaaaagtagtacaagaaatggaagaacgatatgaaaaattcgcggcaaccggagtaagaaatatttctggttacaatgaatttgttcaacagaaaaacttggaaaacggaacgaaacatccaaccttaccattcatcgtagtgatcgtagatgaattagctgatttgatgatggtagccagcaatgaagttgaagatgcgattattcgtttagcgcaaatggctcgggcagcggggattcatatgatcctagctactcaacgtccaagtgtggatgttatcacaggaatcatcaaagcaaatgtaccttccagaatggcatttgcggtatcaagcggtacagattctcggacgatcattgattctaatggggcagaaaagctcttagggcgaggagatatgctattcttgccaatgggtgagaataaaccgatccgtgtgcaaggagcattcatttctgaccacgaagtagaacgggtcgttcaatttgttacagatcagcaagaagctcattatgaagagaaaatgatgccgacagatgaagttgaaacgacaggtgctccagaacagccacaagatgagctgtttgaagaagcaaaagcacttgtcgttgaaatgcaaacggcaagtatttcccttctccaaagaagatttcggatcggttacaaccgagcagcacgtttagtagatgaactggaagctcatggagttgttggcccgtcagaaggaagcaagcctcggaaagtattcattgagcaggaagaaacatcagaaacgttgccggacgataatgacatg

SEQ ID NO: 21505 - DNA, 705 bp, Enterococcus faecium
atggctttaactccattagatatccaaaataagacattcccgacaaaaatgcggggatataatcaagacgaagtagatgatttcttagatttagttgttcgtgactatgaggaattgactcaaagaaatcgagaattagaaaaagcagtcaaacattctgaagaaaaacttgagtacttcaatgaattaaaagatgctttgaaccaatcaatcatcgtagctcaagatacggctgataaagtaaaaacaagtgcaagcaaggaatccgaagtgatcgttacttctgcacaaaacaaagcagatgagttagttgcgaacgctgaaaaacgtgcacatcaattaacaactgatgcagaagaaaaagcaagaaaaatcttgacagatgcaacagaaaaagcaagacagcttgcgacagaaactgaagatcttaagaaaaaaacacgagtattccatcaacgtatcagcttgatgcttgagtctcaattagaacaagtgaaaagtccggaatgggatgaaattttacaaccattctccagctacgtgactgacagccatgaagtgatcaaagaagttttagcaaaacagcttgacaatgaaaatgatactgatgtaaactcagacacaggagtcatagaagcacctatgacggcatttgatacacaggctattgatatctcgatcgtgcctggtgaaaatgaaaacgag

SEQ ID NO: 21506 - DNA, 422 bp, Enterococcus faecium
atctagatcttcaactatgaacgaatggatatattactacaaaggaaccgggggatgaagaacggatgattgttaaacggatcatcggtatgcctggagatacagtcaagatggaaaatgaccagttgaccattaatggcaaaaagtatgatgaaccttatctggatgagttcaaaaaagaattttcagaagataagttacaaggagaatatgcttatagctcaggattccaagcacaagcagaaagttcatccacctttacgagtgactttgaatatactgtgccaaaaggaaagtatcttgttctaggcgataaccgcttgatttcaaaagacagccgaatgtttgggttagtcgacaaagatatgatccaaggaaaagttgttttccgttattggcctctttcagaaattaaaatcatg

SEQ ID NO: 21507 - DNA, 432 bp, Enterococcus faecium
atgttagtacctaaacgtgtaaaacaccgtcgtgaattccgcggaaaaatgcgcggggaagctaaaggcggaaaagaagtagcattcggtgaatacggtttgcaagctgttgattcacattggatcacaaaccgccaaatcgaagctgctcgtatcgcaatgactcgttacatgaaacgtggtgggaaagtatggattaaaattttccctcacaaatcttatactgccaaagcaattggggtacgtatgggttctggtaaaggggcacctgaaggatgggttgcaccagtaaaacgtggtaaaatcatgtttgaaatcgcaggcgttcctgaagaagtagctcgtgaagcgttacgtctagcttctcacaaattaccaatgaaaactaagatcgtaaaacgtgaggaaatgggtggtgaatcgaatgaaggt

SEQ ID NO: 21508 - DNA, 1497 bp, Enterococcus faecium
atgcttgaaaccctgcaaccaacaatgaaattaaatcgacgagacagtgtggtcgtcgcattaacccctattccaaaacaaacacaactgacgattgatcagcaaacgatcaccactcttgaagatatcccgcaaggtcataagattgcattgggtgatttgaaagctggagacaacgtgatcaaatatggctatccaatcggtcatgtgacgacagacgtaactgccggtcaatggctgcacactcataatgtaaaaaccaatctttctggtgaattggattatcgatatgaaaaagatgtccatccaagtcattacctttttgagaaccgaacatttcaaggttacttgcgaaaaaatggaaaagtagggattcgtaatgatttgtttttagtacctaccgttgggtgtgtgaatggcattgctgaactgatcgtcaaacagttcaaggaaaaacatccagatctgggacagtttgaccatattacgattttaaagcatccttatggctgttcgcagcttggaaaagatcatcaaaatactcgagaaattttagcggacgcagtaaatcatcccaatgccggaggagttttagtatttggattaggttgtgagaacaatacagttcctgaattcaaaaaaattttaggtgaatatgatgaagaacgagtgaaatttctagtggctcaagatgtttacgatgagatcgaacaaggtgtggctctattagaagagcttttaacagcggcggaaaatgaccagcgcatatcagtcccgctctctaagttgaatgtcggtttgaaatgcggcggttctgatggtctatcgggaataactgctaatcctttacttggtgcattttctgactacttgattgctcaaggaggcagcacgatcttaacagaagtgccagaaatgtttggcgcagaacaagtattgatggcacgagcggaaaatgaagaagtttttgactcaatcgttgacttgatcaatgacttcaaacagtatttcttgtcttacggggaaccagtttacgaaaacccatctcctggtaataaagcaggtgggatcactacattagaagataagtctttaggctgcacgcaaaaatcaggaagctctcctgtcgttgatgtgctacaatatggcgaaaaaatcagaaaaccagggcttagtttattgcaagctcccgggaatgatcttgtagctgcctctgctcttgcttcatccgattgccagttggtcttgtttaccacaggaagagggactccgtttggctcatatgtcccaacggtcaaggtatctacgaatacaactctttttgaacgcaaaggtcattggatggattttaatgcaggcgtcttattagaacaaccaatggaagtaatcttagaatcgtttgttcaaaaaatcatcgctgtagctagtggagaagaaacgaaaaatgaacaaaatgacgttcgagaaattgccatttttaaaaacggagtaacactt

SEQ ID NO: 21509 - DNA, 1524 bp, Enterococcus faecium
atgtctaatgaaaaaaatgtattgtttacgatattcggcggtacaggtgacctagcccagcgtaaattgtacccgtctttgttccgcctttacagaaaaggaaatttaggcgagcattttgctgtaatcggaaccgctcgccgtccctggagcgatgagcactaccgtgaagttgtcaaagaaacaatccgtgcattgaatccttcagatgaagaagcaactacctttgcaagccatttttactatcaatcccatgatgtaaatgattcaacgcattatcagacattaaaagaattgtctgaccgattagatggacactatcaattaaacggtaaccgtgtctattatttggctatggcacctcaattttttggaacgatcgtttctcatttgaaatcacaaaatattatgacaaaaaatggcttcaatcgtttgatcatagaaaaaccgttcggttctgattaccagtctgcttttgaattgaaccagcaaatcagagaagtattcccagaacaagatattttcaggattgatcattatttaggaaaagaaatgatccaaaacatctcagctatccgttttgccaataatatttttgaggctcaatggaacaatcgctatatcgacaatatccaaattacttttggcgaaaacctcggtgtagaagatcgcgggggctactacgatcatagtggcgcacttaaagacatggtgcaaaatcatattttacaggttgtagcattacttgcaatggaaccgccagtagcattttccgaaaaagaaatccgtacagaaaagatcaaagcattgaaagctatccgcatttataacgaagaagaagtgttagaaaacttcgttcgcgggcaatatgctcaaggtgaattggatggtgtacaattcaagggctatcgcgaagaagacaaagtggatgctcaatcagagactgaaacattcgtcgcaggcaaattcactatcgataacttccgttggtcaggtgttcctttctatgtacgtacaggcaaacgtttgactgaaaaagggactcggatcaacatcgtattcaaacaagttcctgttaatgtattcaaaacatctgtcgatgaaccatgtgacgatacgacacttccacctaatgttctaacgatctatattcagccaactgaaggattttctttatccttgaatgggaaagaagtagggcaaggatttgaaacggaaccaatcaaattggaatttagaaatagtgcagaaatggttgaaaatagcccagaagcttacgaaaaattactattagatgcgttgaatggtgatggaacgaacttctctcattgggaagaagtcgctcaatcttggcatatcgtggatgtcattcgaaaagcttgggaccaaacacaaccggattttcccaactacaaagctggatcaatgggacctaaagcagctttcgaactacttgaaaaagacggattcgaatggatctggcaaccagataactggtatcgtgaacgtggaaaattaaacgat

SEQ ID NO: 21510 - DNA, 1182 bp, Enterococcus faecium
atgtccatgaatcattttatcaaacaactctttactattaaagactcaaatatccaaattcaatcctttgaagaaactttttataaaagcagaaaaagtatcgttattgagggaactctgatccgtacctacagacgttgtccgtgttgtaaagattctacaaagcaaatcgttaaaaatggcaagaagatctctatgattctcctgaatcgtagcggtaataaacggacctatcttcggttgaagaaacagcgatacctctgccgagcatgtaaaaaatattttaccgctcggacgtatctcgttaccccattctgctttatttctaagcagattcattacaagatcttagaagaattgacagagcgtcaatctataaaagcaattggtaaacattgcgatgtttctgtgacaactgttcagcggacattgtccgccttgtcatcagatatccgtcagaatcttgagtatttacctcggtgtctattattcgatgagtttcgttctctttctacatggcacggtaaattttctttttcttgtatggacggtgagaccgggaaactgtttgagatcttacctagccgccgtaaaaaagatctcgttgcttttttcatgcgtttttctctcaaagcgaggttgggtgtacattacatcgtaacggatatgaacgctccttatttctcactagttaaagagtgttttccaaatgcacaagtgatcgtcgatcggtttcacattgttcaacatctgaaccgcttcttcgatgcggttcgaaaacgtgtgatgaaaacacttgatcaaaaagacccaatacaagctaaacagtatcgccaattgaaatccttattcaaattacttttaaaatcagaggatcgtttagattacaatacactaacgaaaagacgcaatttcaattggagactattgactgaaacagaagtagttgaccgccttctaaagatttctcctgaacttaaaacagcttatcgttactaccaagacctgcttactgcgtatcaggaaaaagatccagatacttttttccagctgcttcgagcaatgcctggagaagttccattggaactgcaccatatcaaaaaagcctttttcaaatacgagaaagggattcggctggcattactgaagaagtattcgaatgcacgactggaaaatctccat

SEQ ID NO: 21511 - DNA, 534 bp, Enterococcus faecium
atgagttggtttacccgagcgattgatgcagcaaagagaaacgatccggctgcacgttcgacagctgagatcgttttgacataccctggttttcatgccttgttttggcatcgtttctctcattttttatatcagcaccggctctttttattggcgaagatcaatgctcaattctggcgtttcctaactggtgttgagatccatccaggagcaacgattggaactggcgtgttcatcgaccatggaatgggaatcgtcattggcgaaaccgcagaaatcgaggacgatgtgattttattccatggcgtaacattaggcggcacaggaaaagaaacgggtaaaagacacccaactgttaaacaaggagccatgctctctgcgaatgcgcagatattaggaccggtaacgatcggaaaaaacgccaaaatcggtgcaggtgccgttgtgttgaaagatgttccagacgacgctacagcggtaggagtaccagcaaaagtcgttcgaatcaaaggagaaaaagtgaggagatcagaa

SEQ ID NO: 21512 - DNA, 177 bp, Enterococcus faecium
atggctgaattaaaagttactttaaaacgcagtattatcggacgtcctcaaaaccaacgcgatacagttaaagcgttaggtcttacaaagattaacagttcagtggttaagccttctaatgaagcaattaaaggcatgatcaatactgtttctcacctagtggacgttgaagaaatt

SEQ ID NO: 21513 - DNA, 717 bp, Enterococcus faecium
atgcgtttagataagtttttagcagatatgggacttggcagccgcaaagaagtcaaaggattaatcaaaaaaggaacgatcgaagtcaatggacaagtggtgaaaagcgataaagcgcaagtaaatgaattcgaagatgcggttacttatttaggagaaatcattacgtatcaaaaagatttttactacattttgcataaacctgcaggagtcatttctgctactcaggataatcatgatcaaaccgtaatcgatttattggaagaccaggattatcgggaagatctttttccagtcggccgattagataaagacacagagggcctcttgattttaacgaatgacggggtgtttgcccatcagttactatcacctaaaaaacatgtggagaaagaatatctagctgaggttagcggtataatgacagaagaagatatccgtttatttgcagaaggactgattattgatggcgatgagcagacattgccggcaaaactccaaattgatcaagtagatcaagagacagaaacttcaattatccgtctgattttgcatgaaggaaagtttcaccaagttaagcgaatggtcaaagcagtaggaaaagaagtcttatatttaaaaagaatccgtatgggaaaattttggctgcctaaagatttgaataaagggcaatatcgacccatgaccaaagaagagctagaacaagtgagagaaaaa

SEQ ID NO: 21514 - DNA, 792 bp, Enterococcus faecium
atgattacttccgatataaagaatgcagatgaatatgtccgtaaggttgataagagtcaaatcccaacctgtaatatcatgggtgtaaacattgcggccatcaatatggagtggctactggaatatttggaaaagaatattgatctcctgcatggagactatatatgtgtcagcaatgtacataccaccgttacctcatttgaggagccggattattgcgcagttcaaaatggtggcattatggcaattccagatggaggccctttgtctacggtcggtagaaaacgtggttataaaaatatggaaagaactactggaccaagccttatgggaaagatttttaaggtaacaaatgaaaaaggttatagacacttcttttatggaagcaagcaggaaactttagacctgcttgaagagaagttgaaagtgtattatccaggaatacagatcgctggtatgtatagtcctccgttcagaccgttaactgaagaggaggataaggctgttattaaaatgatcaatgctgtgaagccggactttgtatggattggcttaggtgctccaaaacaggaaaaatggatggcagagcatcagggaaaaatcgacggcttgatgataggtgttggtgcaggcttcgactactatgctggaaatatccagagagccccgcaatggatgcagaaatggaatcttgaatggatgtatagattgattcaagatccgaaaagactgttttataggtattggcacactaatacaaagtttattttgaatgctgtgattagaagaaag

SEQ ID NO: 21515 - DNA, 555 bp, Enterococcus faecium
gtgaacggactatttattacaatcgaggggcctgatggtgcaggaaaaaccagcatcttgaatgaactttaccctcttttgaaagaagtagcaaaaacagaaatcattcaaacaagagaaccaggaggcattccgattgctgaagagatccgagcagtgatccttgatccaaaaaatgatcggatggatgaacgtacggaagcactgctttatgcagcagcaagaagacaacatctagtcgaaaaggttctgcctgctctggcaaaagggaaaatcgttttatgcgatagatttgtcgacagttctcttgcttatcaaggtgcaggccgacgcatcggcgttaccgagattgctcggttgaatgagtttgctacagaaggtactacgccggattttaccctttatcttgacgtagattcagacaccggattaagaagaatcaagaaatacagacaaaatcaaatcgaccgtttagattcggaaggtttggaattccaccagcgtgtacgtcatgcttacttaaagctggcagaagagaatccggaaagaatccac

SEQ ID NO: 21516 - DNA, 291 bp, Enterococcus faecium
atgttgttatctatgaatctacaattatttgcccacaaaaaaggtggcggttctacatctaacggccgtgactcagaatcaaaacgtctaggtgctaaacgtgctgatggacaaacagttacaggtggatcaattctttaccgtcaacgcggtacaaaaatctatccaggtgtaaacgtgggtatcggtggagacgacactttatttgcaaaagttgatggcgtagtacgtttcgaacgtaaaggccgtaacaaaaaacaagtgtctgtttatccagtagctcaagaagct

SEQ ID NO: 21517 - DNA, 1605 bp, Enterococcus faecium
atggatactccaggacacgcggacttcggtggcgaagtagaacggatcatgaaaatggttgacggcgttgtgttggtcgtagatgcgtatgaaggaacaatgcctcaaacacgttttgtattgaaaaaagcactggaacaacatatcacaccaatcgttgtcgtaaacaagattgacaaaccttctgctcgtcctgagcatgtcgtagatgaagttcttgaactattcatcgaattaggagcagatgatgatcagttagactttcctgtgatttatgcatctgcactaaatggtacgtcaagcttgtcagatgatccagcagatcaagaaccaaccatggcacctatttttgatacaattattgaaaaaatccctgctcctgtcgataacagcgacgaaccattacaattccaagtttcattacttgactacaacgattatgtaggtcgtatcggaatcggacgtgtatttagaggaacaatcaaagtaggagaccaagtagcattaattaaattagacggaacagttaagaaattccgtgtaacgaaattatttggtttctttggactaaaacgtctagagattcaagaagcaaaagctggagacttgattgctgtctcaggtatggaagatatctttgtcggtgaaacagttactcctgtggatcatcaagatgcgttacctatccttcacattgacgaaccaacattgcaaatgactttcttagttaataattcaccatttgccggtcgagaaggtaaattcgtaaccgctcgtaagattgaagaacgtttgatggcagaacttcaaacagatgtatccttacgagttgaaccaacaaactctccagatgcatggacagtttctggtcgtggagaattgcatttgtctatcttgattgaaaacatgcgccgtgagggatacgaattgcaagtatctcgtccagaagttattgaaaaagaaatcgacggtgtaaaatgcgaaccgtttgaacgcgtgcaaatcgatacaccagaagaatatatgggtagtgttatcgagtccttgagcttacgtaaaggtgaaatgcaagatatggtccatacaggaaacggacaaatccgtttgacattcttaacacctgcccgcggtttgattggttattcaactgaattcctttcaatgacacgtggttacggaatcatgaaccatacttttgaccaatatctgccaatgcttcctggtcaaattggcggacgtcaccaaggggcgcttgtttcgatcgatacaggaaaagcaacgacttattctatcatgagtatcgaagaacgcggtacagtcttcgtagaaccaggtacagaagtatatgaaggaatgattatcggggaaaacagccgtgataatgatttgactgtcaacatcacgaaagcaaaacaaatgacaaacgtacggtctgctactaaagaccaaacatctgtcatcaaaaaaccaaaacaattgacgttggaagaatctttggaattcttgaatgatgatgaatattgcgaagtaacaccagaaagcattcgcttgagaaaacaaattttagagaaaaatgctcgtgaaaaagcatctaaaaagaaaaaa

SEQ ID NO: 21518 - DNA, 1336 bp, Enterococcus faecium
aatgctgaccctgagagtcagtcgctgttagcgcagattttattattgatcgttttgacattgatcaatgcttttttagcagcttccgaaattgctgttgtttcgatcaataagaatcgaatcgagcatataagctgatgaaggaagatgtggaaatgctcgatatagcctttttaaataatattcgccagaaattccattataaatgttgccgtatgcgaccagagtcccaaagttaggaatcactttggtcaacattttgtctggtgcttcactagctaatactttatcggaacggttagctccggtattaggtggcggcacagcggcaaaaaatattgcaaatatcattgtgctggctattttgacctatgtatcgattgtttttggagaattgtaccctaaacgtattgctttaaataaatcagaagaagtcgcaaagttcacttcagggctgatacgcttgattggtgtagtagctaagcccttcgtctggctgctttctgcttccacaagtttattggcgcgtatcacgccgatgacttttgatgatgaagattcaaaaatgaccagagatgaaatgcgttatatgcttgaaaacgaaggcgtattgaataatgaagaattagaaatgctccaaggggttttttctcttgatacgaaagttgcccgagaagtcatggtcccacgaacggatgcatttatgattgatatcaacgacactgtggaagaaaatgtgaatgaagttttatccgaaaactattcaagaatccctgtttataacgaagacaaagataaagtagtcggaatccttcatacaaagaatttactaaaagctgcccataaattcggctttgataatttagatatcaagaaaatcatgcaggagcctttattcgttcctgaaacggtctttattgatgatctgttatatgaaatgaaaaagacgcagaatcagatggctattttattagatgaatatggcggcgtcgttgggttagcaacactagaagaccttttagaagaaatcgtcggagaaatcgatgatgaatcagatgaagttgagaatctttatgaaaaaatcgatgaacacgaatatatcatccaaggacgtatgctgattgatgagttcaatgaagcttttgacagtgatctgcatatgagtgatgtagatacgatggctggttatttgattacagcattaggcatgattccggatgaaggcgaaaagttatcgtttgatgtcgataatattacgctggtttctgaagaaatggaaggttctcgaatccttaaaatccgtgtcatttttcatgatccggaagaaacagaagcg

SEQ ID NO: 21519 - DNA, 210 bp, Enterococcus faecium
atgacaaacgcaacagtatatgttcaagcaattcaagaaaagctacatcaaaaggatcaagggcaagaagaatttttacaagcaatcgatgaattcatgcccacggttatgtcttttttggacactcatcccgaatatatcgaaaagaatatcttagaacttttaacggaaccagaaagagttattcatatttcgagtgccttggcaaga

SEQ ID NO: 21520 - DNA, 3165 bp, Enterococcus faecium
atgaatcaatgtgtaaaaaagctgattgcgtcgattttgtttgtcttccctctcttgatggtgacatccgtttttgccgatgtagagaaaacaaacgaatcaacgcaatcagagaatcaaagttttgacaagactactttttcagaagaatcgattacttctgaaactacagaatctcaaagtgaggcttctactaataaaaggcaagaagaaaataagacaagtgagacctcagaagtagctgaacaaacgtctgatagcagtgaagcggcactggcaagagctgtttcagcggatgggtacagcgaagctgccacaacagaagaactggcgcagcttctcgcagacgaatcagtaactaagatccgactgattcagcctttgactttagacagggaattagagatcaaacgagatatcgttattgattttggtggattcgctcacaatttcggcacacaccatatttatatcaatgagatacctcagtcgatcgagttccagaattttaaaggaacagctgcacatccaggtggattgacaccaaatatcgatggaaatgccattatcattgcttatatgaccgatttttggggaagcagatatcattttacgggagaaataaaatttaccgggacacttgatttgtatgatgggtccaaattaggactgatttacgctcctcgtgcaactgtcacattagatggtgtttccggtgtgttggatgtccaaccagtgaaggaaggactgaatgccgctccgggtaaagcctatttttgtagaagctatcaattgaatgtgatcaatggtagtcaactttatggaccgtatctagggaaattctacggttttctagattcaggagatgagactggtagtggaaaaacagcgccaggaatccatatcttaagcggttcaaaggtctctcttgattatgatcgggcagatggcgttagcgatgaaggagaggcagtcgatacgctacctggtaatgtcatgtttgaagtcagtggttcgggaagcgaattttcggtaaatacaaagatcaatattaccaatgacaacaatcgcggaatcatccaaatgagaggttcaggatcgaaagtcactgtatcgaatggtgggaaaatcaccatcaatacagcaactacgggcggatttcgcttgcaaggagattctagtcaaatccatgtatcaagtggtggacaaatctcggtcaaaatggctggagatgacgatcaacccgggaacaatgggatgcgttttgtaggaaaaggcctttctttgatcgtagaaggagccggatcagttatcgacatcgataagcagagtgggcgttccagcgcagttcgttttgagaatggtacgcaaaagctgacagtaaccaatggaggctcattgagggtaagaaatacaggtgatggcaaatcttacgtgaacagactcaatcaaggaaatcaagcgatccaattttatgacgcttctggttttctagaaagtccaggttcagctgattttacagtcactggagaaaaatcaaatatcgatatacgcgcagattccggagcaactgtagatacaactggagatattgatttaaattttacggcaggtgaaaaaacttatttagtcatggtcgggaaaacaggggaagataagaccggcatcatcagtggggatgtgttgaatgtggacttagaatctcctacctattttgatttccaaaacaaacggattggaagcgagaccaatggcataggcggctgggtattccaaggaaatggagattcttctttaaagatcgcccattcagaaatcgctttatggcgaaaaacaggcgcaacattcgataactttgaaaaagacccggattatttttctgatatgacagacttatcgatcaatgggaccgacttaggcaatttcgtatcaagccctagtgcaggtttaacaaatgaatttgctcagacaggtgccggaatgaaaaattataatcgaatcagtgccaataatcagctcccgatgattgaatccttaagagtgccaacgaatgcagataaaaaaatctatgggcatgtcgttgttcccgaaggtgtcgaggcaaagccaagagatgcttggacaggcgaagtagaagtgactttacgtattacttacgcagatacgacgaaatcatctgtagaaattactgctctcacgcaaggacaaacagatgaaaatgaaggggcaggatataacccatggggagaaggcgaacaaggcggcttgttcgaagttcaagtacccaatgatgagagattaaaaacggaggatcaagtgcaagttgttgctgctaaaaaagtaagaggtggccaagaagtgacagaactggactctgccaaaacgacagtcgatgtgattcctcctgaacctgctaatttaagtaccacattgatcaatgcagcttctcgcacgatcacaggtacaggtgaagcaggagccttggtttcattgaaaaaaaatcaagctgttttgtcagaaacaactattgatgatacaggggaatttgttctttctatcccagaaaatcaactttttgcaggagatgtattagaaattgtattaaacgaccaagcaggagaagctactgctaagggtgtgcagaacaagccaagtaccaacgatgaaattgggaatcacaatccaagtgatacgccagttgtttatcatgatgccccgccttttgcacctgctacgaagatcgtagtagaaggtggtctctcatttcttgccccttccaaactcgattttggtcagatcaaagcaactggtttgacacaagaagcatttggccaaatggatatacaggaaaaattatggatttatgatcagcgagaaacgaaaaatccgtggatcttaacgataaaattatctcagcctttcacaaatgatgcaggattttctatgcaggatgtcctatatttcaagaaaggagaggagtatcaattagtgaatgaagaagaactggaaattgtcagaggacaaaattcaacgaatgtgcaagcagattattcagaatatttaaataacggtcgggcgtttaaacttgtcttaaccaaagaaaatcagatagctggtaattactcagcagagataacatggacattagcagatgcgccgacagaa

SEQ ID NO: 21521 - DNA, 795 bp, Enterococcus faecium
atgttaaccgttacgagaatcagtaaaggcaaaggccctttctatcgcgtagatttatctgaaggagaagctttacaagtatctgaagatgtattagtacgctatcgattattaaaaggacgggaattagacgaagaaactatccaagagatcaagaagagtagcggagctgatttcggttttcacctagcaatgaattacttaagttatcagttgcgatcggaaaaagaaatccgaacatacttaaaagaaaaggaaatccttcaagaagatcgaaataaaatcgtagcccgcttaaaagaattggaccttgtcgatgatttggtctatggggaaagttatgtgcgcacgaatatgcgcttaagtgacaaaggaccaaagaaattagcgcagcagatgcagcaaaaaggtttgaaacctgaaatcattgaacaagcgctcagccaatatacatttgaagaccaagttcaaaatgcacatcagacagccgaaaaagcgtttggaaaaaatcacggaaaaagccaaaaagaattattgagaaaaatccaacaaacattgatgacgaaaggcttttctcaagaagtgatccaacaagcgatagctgatcttccgcaagaagcagatcaagaaatagaatatgattatttagtcaaacaaggagataaactatggcgaagaaatttaaggtttgaacctaaaaaaagaaatctaaaagtaaagcaaagcttatatcaaaaaggatttgatttggatatgatccagcgattcattacggaaaaggaagaggaaagtgaa

SEQ ID NO: 21522 - DNA, 1671 bp, Enterococcus faecium
atggatggaatcattaaacaaatcgaaaaagggaaaccattttttgaaaaaatctcacgtaatagttatttaggagccgttcgtgacggatttttaacagcgatgccagctattttattttcaagcattttcattttgattgctgcggttcctgagatttttggttaccaatggcctgaatctgtctccacatggctatggaaagtctataattattcgatgggtgttgtagggttactcgtttcagcaaccactgctcgctgcttggctgattcgatgaatcgtcgcttaccgaaaaacaaagtaatcaacaccacctctgtgatgctggcctctgtggtaagtttcctgttgttaagcgtctctccgattgaaggtggattttcaacggaatatatggggacaaagggactactggcttcctttgtcgctgcatttttaacagttaatttatataagttttgtgtgctgaaagatattaccattaaaatgcctaaagaagttcctggaacgatttcgcaaaccttccgagatatttttcctttctctttttcagtatttgcggccgttttaattgatttaggcattcgacaaatcttccaaatctcatttgcagaagcaatcattacggtgctgcagccgctatttacagcagctgacgggtacttaggaatcgctattatctggggagcgatggcgctgttttggtttgtcggtgttcatggaccgtcgatcgtggagccggcaattgcggcaattatctatgccaatgtggaaaccaatctgcaattgttcaattccggtgaacaagcttctaaagtactgacggtgggtttagggaattttgtaggaactatgggaggaactggggcaacattggttgttccttttatcttcctactctttgctaagtctaagcagttgaaggcagttgggaaagcttcctttattccagtaagtttcgctgtcaacgaaccattgctatttgcggcacccatgattttgaacccttatttttttattccatttttgttaacacctgttgtaaacgtttgcctgttcaagttttttgtcgatgtattgggcatgaacagctttatgtacgttttgccttgggcaactccagcaccgatcggtttggttctaggaacgggcatgggtatcttagcttttgttctagcagcggttctaatcgtcgttgacttcctgatctatctaccattttgcaaagcatacgatgctgtcttagtagagaaagaagcacaaaaagcagaggtgatcgcaaccgaggaaggtgcttctgccgatgtacgtgaggaagtacctgtggcagcgagtcaagttatcagcgatgcaaataaagaaatcaatgtgttggtactttgtgctggcgcagggacaagtgcgatgttagctaatgctttaaaaaaaggtgcatctgaatcgaaagcaccgatcagtgcaatggcgggtgcttatggttctcattacgaaatgctgcaggattttgatatggtggtcttagcaccgcaagtcaattcttactatgatgatatcaaagaagacaccgatcgcttaggaatcaagctggttgcgacaaaaggagcagaatatatcggattaacgagagatcctgaaaaagctgttcagtttattctgaaccaatttcaa

SEQ ID NO: 21523 - DNA, 2418 bp, Enterococcus faecium
atgttagtttcatataaatggctcaatcgttatgtagatttatcgaatgtaacaccaaaagaattagcggataagatgtctgtgacaggaatcgaagtagagggagtaacggttccagaagaaggcttgaaaaaaatcgttgtcggtgaagtcaaggaatgcgtaccacatccagattctgatcacctttctatttgtcaagtcgatattggcgaagacgaactgtctcaaatcgtttgtggagcgcctaatgtgaaggttggaatcaaagtgattgttgcacttcctaactcacgtatcgctggtaatgtaaaaatcaaaaaaggaaaaatgcgtggccaagtatcaaatggcatgatttgctcattacaagaaattggctattcagatagtgttataccgaaagaatacgctgaaggtatctattatatgccacaagaagctgtaaatggcgatccagtttttccttatttggatatggatgattcgattattgaattatctatcacaccgaatcgtgcggatgcattgtcaatgcgtggcgtagcttatgaagttggggcaatttatcgtcagactcctacattcgatgacgaaaagctggtagaatcctcacgtcctgctagcgataaaattcaagtggaagttgaagataaagaagcagttcctgcttatcaaatcagaatcattgaaggagtaagaatccagccaagtcctcaatggctgcaaaatcttttgatgaacgaaggcattcgtccaatcaacaatgtagtagatgtgacgaactatattttgcttttattcggacaaccactacatgcatttgactacgacaagttgaaatcaaaagagatctttgtccgccgtgcaaaagaaaatgaaacattagtaacactagatggagaatctcgggaattgacaactgacaatctcgtcattactaacggcaaagaaccagttgctttagctggtgtcatgggagggttagactcagagatcacgaatgaaacaacaacagttgcactagaatctgctttatttgatccaatttcgattcgtcgtacagcaaaacaatttaatttgcgtagtgaatcctctgcacgttttgaaaaaggaatcaaccatgcgactgttggagaagccagtgaggttgctgcagcaatgatcgtttctcttgcgggtggggaagttctacaaggcgcggtcaaaggctcagagatcaaagcagaagacgtatcagtgaagatttcacttgaacgcatcaatcaatatttaggaacatctcttgtcgttaaagaagtaaatgagatttttgaagcacttggatttagctatgaagaaaaggagcatgtttattccgtagtagtaccaccaagacgctgggatatccaaatcgaagcagatattatcgaagaagttgctcgtatttatggatacgaccagttgccatctacacttccaagtggagaaacggttgctggaagcttgtcaaaagaacaagaaactactcgtaaaattcgtacaatctttgaaggaagcggattgagcgaagcaatcagttatgcattgacaacagaagaaaaatcaagacagtttgttataaatgaaagtaatattacacgtttggactggccaatgagtgaagagcgttctgtattgcgaatgaatttgatcagcggactattagatgatatcagttataacactgctcgaaaaaatacagagattgctttatatgaaattgggcgggtattcttccaagaaaatgatccgtgcacacatctgccgcaagaagtaaaacatgcagcaatcgctgtttctggtatttgggaagaaaaagattggcagacgaaagctcaaaatgtagactttttcaccatcaagggtcttttagaaaacttatttgaacaactaggcatcactgaagatgtccattatcaaacagtgacagaaatgaaggaaatgcatcctggaagaactgctgcgatttaccttggcgaaaaatttattggttttgtcggtcaagtgcatccaacgattgcaaaaagttatgatattccagaaacatatgttgctgagtttgatttatctgctgtagtggaagctgctcaaaaagggatcgttttcgaagcagtgacaaaattcccagcagtcagccgggacatcgctttgcttgtaaaagaaactgtgacaaatcaggaattaacagaagttatccgttctgctgccggaagatttttaacagatatccaattatttgatgtctatcaaggagaaaacattgaaaaaggacataaatccatggcgtatagcctgacattcgtcaacccagaagcaacattgacagatgaagaaatcaataaaggaatggaaaaagtcgaaaaagcgttggtagaaaacctagaggcaagtattcgc

SEQ ID NO: 21524 - DNA, 468 bp, Enterococcus faecium
atgggactatctaaattagacaatttataccgtcaagtgatcttggatcattcttcccatccgcatcatcgtggaagcttgactgactcgacaagcaagatcgaattgaacaaccccacatgtggagatgtgatcgaattgcaagtcgatgtaaaagacggaatcatcaaaaatatcgcctttgacggcagtggctgctccatcagtacggcaagtgcctcgatgatgacagacgccgtcatcggaaaatcaatagaagaagcagaacatttaactgtagactttctacagcttgtccaaggaaaagaagtcaaagatcccgaccaattaggcgatgctgctatgcttggtggtgtagctaaatttcccgctcggatcaaatgtgcgacacttgcctggaaagcactaggaaaagcaatggaaaacgatggtaccgcagctttccatcattaccacaaggaagaggag

SEQ ID NO: 21525 - DNA, 582 bp, Enterococcus faecium
atggcaaaaaaagttatgggtcaagacggaaaaatgtataaagttagtaaacctttttacaaaaaagtatggttttgggtattagcagtaattttaattataattattggttctgctttaaatggtggatcagatagtaataaagcaagtgataatggtggcgaaaaagtaactaaatcttcaacctctgcttcatcttctaaagaagaaaaaagcgataccttctataagattggtgacactgtaaaagttggtgatgctgaatatacactaaatagtgtagaactaactgatgaaagaaatcaatttgaagaaaaccaacctgcacaagtagtaaaaattacttataccgtaaaaaatgatggcgattcagatatccctgtaggtacagatgtggaagtatatggaccagatgacaaaaaatcagagacatatgccaacgaaaatacaatgggatctgttgctccaggaaaacaaatggatgtaactgctcatttcacgttaaaccaaaagggagaaatagaaatccacttctctcctttagtatcatttgaaaaagcagctatttttaaagcaactgta

SEQ ID NO: 21526 - DNA, 603 bp, Enterococcus faecium
atgtcagtatcattagaagtaagtaaaagagaagtacgtccccgttcattaagaaacaaacttcgtcacgaagggaaagttccagctgttgtttatgggtataaagtagaaagtacccctatctcattcgatggtttgacactaagcaaattgttgcgtgaacatggagcgaacacagtcatcacgatggacatcgatggacaaaaagtcaatacattggttcacaagatccaaacgaacacttttaccaatcatttcgaacatgcagaatttctatctgtaaacatgtcggaagaaacagaagtcgaaacagaagtcgttcttgttggcgaatcagtgggtgctaaatctggtggagtgttagctcaaaacttgtatacagtagtcgtatctgctacaccagacaaattgcctgaacgaattgaagttgacgtgacaaacttggaattaggtgattctattacagtagccgatcttccaaaaaacgacgattacaaattcgtgaccgacagtgaagagcaaatcgctgctgtagtcgctcaaagtgaagaagaaagcacaggtgaaggtggcgaaccagaagtgatcggttcaacagaagaa

SEQ ID NO: 21527 - DNA, 675 bp, Enterococcus faecium
atgtctgcaaaacaaaatgaacagcagaacgttgagcataaaacagaaattgctaagaaaaaatcatcagctgaacaggaaacaacagtcaccgaagaactgacagctgctttggaagaaatcgttgaggagcctaaagcagaaaaagtcaaaggcgagctagtgacactgttagatgacagtaattttttgataggtgaaagacattatcggcttgtgtccgattatcgtgaaggatttaatgcagaaaagcttggagaacgttacagtgatgtactagcccgatatgattatatcgtaggagattggggttatgaacaactacgcctaaaaggatttttccaagcggataatcgacgggcgcatccagatcagcgaatcgattccttggaagactatctttacgaatattgcaattttggttgtgcgtattttgtcatcgagagaatcggcggtaaaaaagaaaagacaactcagcgccgaaaaaagaaaaaaaaccataatcgtgcgtatatcgatgagaaaaaaggaccagtcgcatctaatcgcaaaaaaccggttattaaaaatcgaaaaacagagtcagcaaaaacctctgaaaaagtaaaaaaacaagaacaacctaaacaagtagaaaaaacaaaaacagcatttacgatcagaaaaagggaagag

SEQ ID NO: 21528 - DNA, 3525 bp, Enterococcus faecium
atgtctttacaatttattcttggaaacgggaaaaaagatcaccgtcaagtcttgatcgacgaagcatccgcttggctcgaccaggatgcaagtaaccaagtatttttccttgttcccaactacagcaaattcgaacaggaacaagaaattttagcggagatgcgaagaagaagcggaaaaaaagctttcagcacaacaaacgttcaagtatttagtttttatcgtctggcttggtatttgctgcaacagacaactcttcttacaggaaatgaattatcagaatcaggatctgcaatgatcttgcgacagattttagaaaaaaatgaggaagaattaacaatctttcgcggagaaatcaataaaagagggtttattcgtcaattacaagaactctacagtgaattgcgtacaggaaatattcaaccagaagacctgatgcttttatttggtgattcacctaatgcagaagaccagcaacttaaaatgaaagacttgaagctgattttttcagcttatgacagcgaattgactcaacgtgcactaacaaatgaagatgcactatctatactagcaaattatatgcagacacaagatttcaacaacgtcaaatttattgtcagtggtttttctcgaatcaatggtcaagagtatcaattactgcaggcaatgatggaaaaggggcaattggttgtcgatttattgctggatcgtccttatacagcggatcttccagaagtacttacgctctttcatgagactggaaagctttatttccgtctttttcaaagtgcaagagaacggaaagtccctatattagtggaccgatttgcaccagagcagactcgtccgacagagcttcaactgctgcaaacaatgtgggaagagacatctagccaaaagaaagcggcagtacacaaattagggggacaagagcatctccatttgtgggaagctgaaaatccaactgaagaagtccgacaattagctgttgaaatcagacgactagtcagtgaagaaaactaccgttatcgtgatatccaagtgctgacaaaaaatatgtctttatatggaaatatccttcggccgatctttcaagaaatggcaattcctttttatatcgatgaagaacaaatgatggaaaatcatccgctgatcgaatggatcaacagtctgttcgctcttgaccgctattcttatcggctaagtgatattatgcgttttttcaaaactgaattatttctgtcgacggaagcagaaaccgaacttgatgaatggaaacaagagcgagatgaattcaggaaaaaactggacatcactgaaaatgtagcacttgcttacaattatcagggaacttattggactcgtgaaaaagactggcagtttgtggcgtatgattttgaagcagaacagattgaagacgtacagtatttggaagaacagtcaaatacgattagacgattatttcagaaagctgtaccagtatttttgaaaaaaataaagaaaagcaaaacaggacaagaggccgcaaatgttttttatcaatttttgatccaaagtggcgtacagcaacaattattgttttggcgtaatcaggaagtagacagaggaaacttagaagcggcaagaaaccatgagcagacatggggagcgctgattgatctgttggatgaatatgtagtaatttatggtgaatcggcttttgactggtcactgttccaagaaatcattacgagtggtctagaaaatctaagttatggtaaaatccctaccgcaatcgaccaagtgcgaatcaatcgtttggaattagttcgaccaaatcaagctgccgtcacttttgcattagggttgaatgatcaagtgtttccagaccgaaaagagacaaaaggattgttgtccagtgaagaacgagaagtattaaatcaggccttgccagatggacagtttttattcgacccatcaaaggaaagtatctcttttgagcctttccaagcctatcttgtttttctttccggaacagatcgattatatcttagttatgcacaaagctatgacacagatggctcgctgaagatgtctccttatttgcgtagaatcacagaatatttatctgttcccgtcgagagaaaagagcatttgacgatcgaaagcgaccctaattgttatgtagggacttacagaagcggaatcaatacagtcaataggatttatcgattagctttagatgaaaaaaaacctgtaccaaagcactggcaaaagctcaaagaattagtactgaattcgtcatggcgaaattttgctttacagatttttgaaagtcaggaacatttaaatgttcctgtttcgatgccagaaaaaatggcggaagagctttatggaaaagaaatttatacttcaatttcacgtatggagaatttttataattgtgaatacaaatacttcatgcaatttggtttgaaattgaaagaacgaactgtttatggtctaactccagcagcaactggtgatttttatcatgaatcattggatcgtttcttcaagctactgttttcaaaccaattatccttagtgaatatgtccgatacgcagcgtagagactttactgaaaaagtgctgcaggaagtattcggagaacttcggtttgagatattggatagttctgcaagaatgaactatatccgctaccagttaggacagacgattcaaaaagtggcatgggctttgcaaaaacagagcaaaaatacaggcatgcatcctcttcagacagagattctatttggtcagattgctggagcaaaaggtatcacaggtctggaattaccgttgagtaatggtggaaaactccatgttcgagggaaaatcgatcgaatcgatgtagcttctgaacaagaagatacttggctaagcgtcgttgattataaatctagcggacgttcattcgatgtcacagaagcttattatggcatggctatgcaattattgacgtacctggacgtagcattgatggatgcggtacgtttgactggaaaggcggctgttaaaccagcaggatcatattatttacatgttcataatcctgtattgacggagacagatgatgtagagaagaatacattgaaaaaatttagttatgatggcgtttttgtcgatgatcccgctcttttagaagtactagatcattcactggaagcaaaagaacaatcactgatctatccagtgaaaaaaaatgcgaaagatgaataccaaaaaggtagtttcagtaaagacaaatttttcacggaagaagaactgcaactattcatggcgcataatcgggaaaatatgcggttagctggagatgcgattacttccggagaaatcaaactaaatccagcttataaagataaacagcggattgcctgcgaattttgtccattcagaagcatctgtacgtttgatgtgatgctgaaagaaaataattaccaccgtctggagaaaatagataaggaagaagcactgcgtagaatattgaaaaggagtgaagaagag

SEQ ID NO: 21529 - DNA, 1686 bp, Enterococcus faecium
gtgaagtttgtgagtaccattaaaattatcccattaggcggcgttcgtgaaaatggaaaaaacatgtatgtcgcagaagtgggcgaggatatttttattttagattgtgggctaaaatatcctgaaaatgagttgttggggatcgacgtcgtaatccctgattttacgtatttagaagaaaacattgatcgtgtagctggtgtctttttaacacatggacatgcagatgcgatcggggcacttccttacttgttgtcaaaaatttctgtaccagtattcgggacagagttgacgatcgagttagcaaaattgaatgtcagtcgtaatgaagcagccaaaggatttaaggatttccatgtggtagatgagcatacagaaatagactttggtgaaacagtagtgagctttttccgtaccactcatacgataccagattcagtggggatcaatctgaaaacaaaagaaggtagtatcgtttatacgggagattttaaatttgaccaaacggctatcccaatgtatcaaacagattatgcacgattggcggaaatcggcaaagaaggagtcttagccttactaagtgaatcggcaaatgcagaaaatcctcagcctgtagcttctgaagcccaaatagcagatgaagtatttgatacgatcaaatattgggaagggcgtatcatcgtcgcttgtgtagcaagtaatttgcaacgagtgcaacaagtattggatgcagcagaaaaagcacaacgaaaagttgtcttgactggtcaagatttcgaacgaattattcgcacagcgatgcgtttagaaaaacttcaattaccaagtgaagatctgcttgttacgttgaaagacatgaaaaactatgatccagaagaactgatcattttagaaactggccgaatgggtgaacccatcaagtctctgcaaaaaatggcaaacggtacacaccgtaatgtcaagattgaagaaggagatttggtttatatcactactacgccaagcatcgcgatggaaaccatcgtggcgaaaacggaagatatcatttatcgagctggtggaacagtgaagttgatctctgagaatatgcgcgtttctggccatgccaatcctaatgacttgcaattaatgatcaatttgatgaaaccaacatattttgtgccagttcaaggagagtatcgtgaattagctgctcatgcagatttggctcatgcagtagggatgccatacaaaaatatctatattactggacgcggagacgtgctggaatataagaacaagcgtatgagtgttgcaggaactacaagtgcagaaaatgtaatgattgatggattaggcataggtgatatcggaaacattgttttacgtgatcgaaaaatcttgtcagaagacgggattttcgtagcggttgtcactatcagtcggcgagaaaagaaaatcatttcaaaacctcaaattacttcacggggattcgtttacgtaaaagctagccgtgatctgatgaaagaaagcagcaatatgattgaaacaatcgttgagaaacatttagaaagcaatgattttgagtggagcaaattaaagcaagacatccgagatcaattaggccgttacttatttgaacaaacaaaacgccgcccagtgatcttgccagtcattatggaagctactcaacgtcgaaataaaaaa

SEQ ID NO: 21530 - DNA, 945 bp, Enterococcus faecium
atgaaaaccgttattttagcagaaaaaccgtcacaagcgaaggcttatgccgatagcttttctaaaaccacccgaaaagacgggtattttgagatccaagatcgattgttttcgggagaaactgtgatcacgtatggttttggtcatttagttgagttagattcgccagatatgtacgatgaaaattggaaacaatggtcattagagcatttgcctattttccctacacattatcgctatcatgttcctaaagataagaaaaaacaatttaacgtagtgaaacagcaacttcaatcggccgacaccattattattgcgacagatagcgatcgtgaaggggaactgatagcttggacgatcattcaacaagcaggtgcagaccagggaaaaacctataaaagactttggatcaactccttagaaaaagaagcgatttatcagggattccagcagttacgagacgctggagagacctatccaaaatttgaggaagctcaagcacgtcagatcgctgattggttgatcggcatgaacggtagtccactatatagtttactcttgcagcaaaaaggcatatcaggaagcttctccttaggcagagttcagactccaacgctttatatgatttatcagttgcaagaaaagattaggaacttcaagaaagaaccctactttgaaggaaaagcccaagtaaccgctcaaaatggcacatttgatgccaagcttgatcccaatgaaacccaagtgacgcaagaagcatttgaagcgtatttaaaagaaaaaggcgttcaagtaggacaacagccaggcatgattcttgaagtcgaaaccgagaaaaaaagcgcggcaagtccgcgtcttttttctctatcgagccttcagtctaagatgaaccaactcatgaaagctagtgcaaaggatacgttagaagcaatgcaaggacta

SEQ ID NO: 21531 - DNA, 1047 bp, Enterococcus faecium
atgtttacgatgcaagattatatctatgaagaaaaggaagtactaagtacgatcttgaaaaagaatgatttttcgacaagagaacatatgaaaaaaacagtgaatttactgatcttagcaacgggttcatcttataacgcttgtttagcagcgaagccagcattggaatcttatggtgatcttactgtcgatattcaagaacctttttattttttcaattatggaaaactttctccttcaatcgatactgtgattgctgtgtcacaaagcgggaaaagtgcttctactgttgaagcagtaaaaatgatacaaaaacaagggttacctgttgttgctatcacaaatgacgtgcaaagtccacttgctttagaagctgcacaaattattgatttaggtgccggggtagaatcagtaggcttcgttacaaaaggctattctgcgactgttttacagttactactcttagggataggaattggaataagtaaaaataaaatcagcaaaaaaatagaacaagactacatgcaacagttgcgcaaaataatcaaccatttaccagcgattattcaaaaaacggaagaattttttgatggatatcaaagtttatttcgtttagcacagcgtttcgtcaccattggatatggtccaaactggggaacagctaaagaagcagagacgaaattgactgaaacaatccgcgttccgtcacaaggatttgagttagaagcttatatgcacggcccatacctggaggcagatgcttcgcatttgctattctttattgaaggggaaagtgtaaataaggaacgttcgcaaaagttgcaaagatatatgagtcggtacgttggagagactctcaccattaccacaaaaaaagcaagaaacgagaaaacacttggattagcaatagaatgtgatgaatatctgtctgtattagcgcttgtcgttccgtttcaactattcgcttataaaaccgcagtagctaaaggtattgacttgaacaaaaagatttttgaagactttgatacagtcttgaaaagtaaatta

SEQ ID NO: 21532 - DNA, 1161 bp, Enterococcus faecium
ttgcctaagaaagtgaaaaaaaggcatctattagactatagcatcttgattccctatttaattttatgtgtattgggattgatcatggtatatagttctacgtcgtatctattattagaaaacggacaaaatccgtccgcatcagtcattaaccagagtattttttgggtgcttagcttgattgctatcgcactactttataaaatgaaaacagatgttttgaaaaaccagcgtttgatcatggcagccatcgcagttttgacgattttgctgctgattgttgtgttttttggtaaggagatcaatggggcgaaaggttggctgcaaattgcaggattctcgatccaacctgccgaatacctaaaaatcatttctatctggtacctgtctctgactttatctaaaagacaaaacagtgtacaaaaagattttcttgggactgtgaaacgtccacttgcaatggttatcggacttactgcattagtcgctattcttcccgattttggtaatgcggcagttatctttttgattattttggttctgcttttagccagcggagtcaattatgtgtatactttgattgtaggagtaggaggcttttgtctaagtacttttacgatctggctgatcaatatcacaaacggaaagatcttacccggacgtttacagtatatctataatcgatttgctatttaccaaaatcctttctcagacgaattaaataaagggcatcaactagtcaacggctactatgccatgttcaacggaggactatttggcaggggattaggtaacagtatccagaaaaaaggatttttacaagaagcacaaaccgattttatttatgcaatcgtagtggaagaactgggagtgattatggggattttgatattagcgttgctattctttatgattgtgcgcattgtccttgtaggtatccgttcaaaagatccgttcaattcgcttttgtgcattgggatcggcgcaatgtttttgatccaagtatttgtcaatcttggaggaattactggcgttattcctttgacagggatcacgttcccatttttaagtcaaggaggctccagtttgctgatgctttcgatttgtgtcggctttgtcctcaacatcagtgcggatgaaaaacgcaagagcttaggttta

SEQ ID NO: 21533 - DNA, 537 bp, Enterococcus faecium
atgaaccgcctaaaagaaaaatatcttaaagaagtaactccatcattgatggaaaaatttaactatagctctgttatgcaaacacctaaagttgaaaaaatcgtcatcaacatgggtgttggtgatgcggtatcaaacgctaaaaacttagataaagcagttgaagaattaactttgatcactggtcaaaaaccaatgattacaaaagctaaaaaatcaatcgctggattccgtttacgtgaaggaatgccaattggtgcaaaagttacattgcgcggagaaagaatgtacgaattcttagacaaattggtttctgtttcactaccacgtgtacgtgacttccatggtgtaagtaaaaaagcctttgacggtcgtggaaactatactttaggtattaaagaacaattgatcttcccagaagtagattatgatttagtagataaagtacgtggtatggacatcgttattgtaacaacagcaaactctgatgaagaatctcgtgagttgttgacacaattaggcatgccattccaaaaa

SEQ ID NO: 21534 - DNA, 1989 bp, Enterococcus faecium
gtggcaacaacgcacaataccaaaaagatatcaatggctggcctgcttgtagcgatgggagtcgtctacggagacatcgggacaagtccgctttacgttatgaaatcgattgttgaagataatggcggattgtcaggaatcaatcctgattttgttatcggatcagtctcattgattttttggacattgactctactgacaacaatcaaatatgtcgtgattgcattgaatgcagataaccatggtgaaggtggaattttctcactctacacacttgtccgaaaaggtgggaaatatttgatcattcctgcaatgatcggaggagctgccttactagcagatggggtattgacccctgctgtgacggtaacgactgcgattgaaggcttgcgaggaattccgcagttttttgaccggttcggtaataaccagaacgtgatcgtcattatcactttagttattatttttgttttattcatggtccaacgctttggtacagatattgtcggaaaagcattcggaccaatcatgttcgcttggtttacttttttaggcgtaatgggattaatgaacttcagtcaagactggacagttatccgtgcactgaatccttattatgctatccagctgctttttagtgcagataacaaattaggcttgttcattcttggaaatattttcctggctacgacaggtgcagaggcgctttattccgatcttggacatgtcggcaaacgaaatattcgtctgagctggccttacgtcaaaatttgtttggttatcaattattttgggcaggctgcgtggttgttgaatgtttatcaaaaccctgaagcacagcaaatcaagaacctgaatccattcttccaaatgatgcctcaaagttggatcgtgatcggcgttgcttttgcaacagtcgctgcagtcattgcttcgcaagcattgattacaggttcgtttacgctagtttcagaagcaatcaagttgaaactgctgcctcggttaaagatcatgtatcctgggaacagtatcgggcaaatgtatatcccagcagtcaatctgattttatggatcgcctgttctctagtggttgtcacattccgaacgtctcatcatatggaagctgcttacggtctatcgatcactgtgacgatgttgatgacaacagcactgctttacttttatcttatccaaaatgggcattctcgttggcttgcatatttagttacctttttcttcggtgcgatagaagtcgttttctttatctcaagtgttgtcaaattcttccgaggcggttttgtagccgttctgattggtttgatcatcttagtcgtgatgtttatttgggaacaagggaacattattcgcgaatcgtcaaccgaggatgtgtctttgagagattatatcccgcagcttagagaattacgtgatgatacttctttaccaatctatcagacaaatgtggtcttcttggttcctgatatggctgaagataaagttggccgacagttcatctattcgattttagataaacggcctaaaagagcacgagtctattggtttgttcatgtggaagtgacggatgagccatatacgaaagaatatcaagtagatatgatggacactgattttattgtccaagtgaatctgttcttaggtttcagggtccaacaggaaatcaacgtatatgttcgccaagtcatccatgatttgatgaaacaaggccgtttgccaaaacagccacaaagatactctctgacaccagggcgagaagttggcgatttccaatttgtcctgattgatgaagtagtttccaatgtgacaactctaggaaaatggcaacgtcaaatcatgcaggcaaaactggcaatcaaaaaaatcgctacctcgccagaaacatggtttgggctagagtacagcgaagtaaaacatgaaactgttccgcttatcattggaaatactcggaaaacatggttgaaagagcggttg

SEQ ID NO: 21535 - DNA, 1103 bp, Enterococcus faecium
gatttatatgtaatcaagaagatgaaagaaggatctactatgacttatcatacaagtaatgaagaacatccaatcgatattgtaaacattgcctaactagaaggtcgtgtaaaagagcgcatggaagcaggagcttttggctatattcgcggtggttctgaagatgagtggacgatgaaagaaaatacgacttcttttaatacaaagaaaatcatgccacggatattacgcggaatcgactcagccgatttgcatacatctgttttcggaattgaattagatacaccgattatccaagcgccatcagcggcccaaggattggcacatgaaaaaggggaagctgatacagctaaaggagtagctgctgctggatcaatcttttccatcagcacttatgcaaatacgacaatcaaagacgcagccgatgcagcgccaggcgcaccgcagtttttccaattatatatgagtaaagacgacagattcaatgagttcattttgaacaaagcagtagaagcaggggctaaagctatcattttaacggcagattcaacgctcggtggttaccgtgaagaagacgtcatcaatcaattccaatttccattaccaatgcctaacttagctgcgtatagcgaacaaagtgcaagtggtaatggcgaaggaaaaggaatcgcagaaatttatgcagctgcaaaacaaggcttgacaccagatgacatcaaaacaatcaaagaaatcacccatcttccagttatcgtaaaaggaatacaatcgccagaagatgcagtaatcgctatctctgcaggggcagatggtatctgggtatccaatcatggtggacgtcaattagatggaggtcctgcgtcctttgaagtattgccaaaaattgccgaagtagtcaacaaacgtgtaccagtgattttcgactctggtgtccgtcgaggagagcatgtcttcaaagctctggcaagtggtgctgacttagttgcgattggccgaccagtgatttatgggttgaatctagtggggcagaaggagtaacatctgtttttgaacacctgaacaaagaattgtcgatcacgaagccacttgcgggaacaaaacga

SEQ ID NO: 21536 - DNA, 4356 bp, Enterococcus faecium
ttgtcagaaaaacgagatttatttgaaaaactgttggaacaaatccaactagaggaagcagaaaaaaatcatccactgcttactgctggtgaaatggatagtgtagtggtccatcgtaaatcgcgtttatgggaatttacgctgcatttttccaaaattttgcctattatgctatatcggtcattgactcagcatctgactatcgcttttaaagatattgcacaagtcaaactgaatatcttagcagatgaccagacattcgatgaacagctcttgcaagattactgggcccaagctttggaaaatcagcaatgcgatacaccactagcacagcaagtattgaaaacgcaggtacctgtgataaaagatcgtaaagtcatcttgccaatcgacagtacaggagctatttcttatttgaagcaacaatacttgccattagtagaagagttgttcgtcagttacggattcccaaaatttcgtatcgaaccagaagtggatgagcagcaagcggaacgagtattgaaactttttgaagaacgcaaacaagaacaggcagaagcctttatgaagcaagcagctgaaagtctagttgtccacgaacaaaagaaaaaggaaagaaaagagcaatcgccagctcttgaaggacccatccacatccagctaggacgaaatattccagccgatgaaccaacgacaccaatgatcagtatcgttgaagaagaacgaagagtcacacttgaggggtacgtattcgacaaagaagtcagagaactacgttcaaaacgcaagatcttgactttgaaaatcacagattatacttcatcatttatcgtcaaaaaattctcgaacggcgaaaaagatgaacaagtatttgatgcgatcagtgtcggtagctggttaaaggtacgaggaagtattcaagaagatacgtttgtccgtgatttggtcatgaatgcgcaagatatcatagaagtcaaacatacacctcgcaaagattatgctcctgaaggggaaaaacgagtagagcttcatgttcatagcaatatgagtacgatggatgcaacaaacagcatctctgatcttgtggcacaagcagggaaatggggacaccgagctatcgccattacagaccacggtggtgcgcaagcctttccggaagcacatagtgctggaaaaaaagcaggtgtgaaaatcttatacggcgtggaagcgaatgtcgtagatgatggtgtcccaattgcttataatgatgcacatgaagcattgagtgaagccacatatgtcgtatttgacgtggaaacgacaggattgtctgcagtatatgacacgatcatcgagctagccgcagtcaaaatgtataaaggaaatgtgatcgaaagctttgatgaatttatcgatccaggacatcctttgtcacgaacaacggtagatctgactggtatcacggatggaatggttcgaggatcaaagtcggaagaagaagtattgcggatgttccttgaattttcaaaagatacaattttggtagcccacaacgcggcttttgatatggggttcttgaatactagctacgcaaggtatggtattcctgaagcggccaatccagtcattgatacgttggaattagctagatatctgtatcctcaattcaaacgtttcggattaggtgtgttatctaaaaaatttggtgtcagcttggaacagcatcaccgagcaatctatgatgctgaagcaactggtcacttagcatggatctttgtgaaagaggcaatggacaatcataacatgctttatcatgatcagctaaatgagcatatcggagaaggagattcttacaaaagggctcgacctttccatgtaacgattttagcaaaaaatcaggcaggactgaaagatttgttcaaactgatttcaatgtcgaatgtcgaatacttcgaacgcgtcccacgaataccacgctcccaattgaaaaagatgcgtgaaaatctattgatcggctcagcttgtgataagggagaaatattcgaagccatgatgcaaaaaggggtagaagaggcaagaaaccgagcaaaattctacgattatattgaagttatgccaaaagcggtctatgcgcctttgatcgagcaagaattggtaaaaaatgaacatgatttggaagaaattatccaaaatttggtagaaatcggaaaaagtttggataaaatcgttgttgcaacaggtaatgtacattatctgaacgaagaagatgccatttaccgaaaaattttgatcaattctatgggcggagcgaatccgttgaatcgtcatagtttgccggatgtccatttccgaacaaccgatgagatgctaactgcatttcactttttaggggaagaaacagcgaaagagatcgtagtagaaaatacgaataaaatcgcagatatctgcgaagaagtgattccagtcaaagatgaactttatacaccgaagattccaggttcagaagatgaaatatcagaattgagttacacaaaagcaaaacaaatgtacggagatccgttacctgagatcattcaaaaacgattaaaaaaagagttgaattctattaatggtaatggcttctcggttatttatctgatcgcccaaaaactagtgcataaaagtaatgaagatggctatctagtaggttcacgtggctctgttggctctagctttgttgcgacgatgacaggaatcactgaagttaatccgttagcccctcattattattgtccagagtgccaatattccgagttttttgaagatggtacgtatggttctggatttgacatgccagaaaaacaatgtccaaaatgtggtgcacgcttaaacaaagacggtcatgatattccatttgagacatttttaggattccatggagacaaagtgcccgatattgatttgaacttctcaggtgattatcaagcagaagcccataactatacgaaagtattgtttggcgaagactatgtttaccgtgccggaacgattggtacagtcgccgacaaaacagcatatggctatgtaaaaggatacgaaagggacaataatctgcagtttcgaagtgcagaagtcgacagattagcaaaaggcgctactggagtcaaacggacaaccggccagcatccaggggggatcatcgttattcccgattatatggatgtctatgattttacgccgatccaatatccagcagacgatcaaaattcggaatggaaaacgactcattttgattttcactcgattcacgataatgtattgaaattagatattctagggcatgatgacccaactgttattcggatgcttcaagatttatcagggatcgatccacaaacgatccctacggatgacccggaagtgatgcggatatttgccggtcctgaagtacttggagtaagtcaggaacaaatttattccaaaacagggacattaggtattccagaattcggcactcgttttgttcgagggatgctagaagaaacgcatcctacaacttttgcagaactactgcaaatttccggactatctcatggtacagacgtatggttaggaaatgcggaagaattgattcgacgaggagatgcgacactggcggaagtaatcggctgtcgtgatgatattatggtttatttgatccatgctggattagatagcgggatggcatttaaaatcatggaaactgttcgtaaaggacaatggaacaagatccctgatgaattgcgagaaacctatctatcggcgatgaaagaaaataatgtgcccgactggtatatcgattcttgttcaaaaatcaaatatatgtttccgaaagcccatgctgcagcttacgtattgatggctcttcgtgtcgcttatttcaaggtttatttccctattttgtattactgtgcatacttttctgtacgtgcagacgactttgatctagtctccatgtgcaaaggaaaagatgctgtgaaacaagcaatgaaagaaatcacggacaaaggattagatgcttccgtaaaagaaaagaatcaactgacagtgctggagttagccaatgaaatgctggaacgaggattcaaatttggaatgattgatttgtataaatcggatgccgttaactttgttattgaaggtgatacgttgatcgcaccatttagagctgtcccaagtttgggaaccaacgtggcaaaacaaatcgttgaagcaagaaaagacggtccatttttatccaaagaagatcttgccacccgcggtaaagtttcaaaaacattgatcgaatatatgaacgacaatggcgtattgaaagatctaccagatgaaaatcaattatcgttattcgatatgcta

SEQ ID NO: 21537 - DNA, 2826 bp, Enterococcus faecium
atgatttggcaagaagttaatggctacacgcttcactcaattaaacgttctgatggtagtgcagtaaatatcgcagccattgagtcaaaaatcaatcaagccattgcggattatcaaaagaaaccaagcttccataactccacagtgaaaaccgtgttaggtcaatcgactactgtgacagatacgaacggcttgaatttatcggagtttgatgaagttgtcgagaatatcgcaaatattgattatcgtgtgaacggcaatcaactagtgattactccaaatgccaattcaaaagagagtggtgaattaaccctaaagaagtcagctaatacaggaacaccggtagcttataaaatggctggtcaacaaactttgatggcgggggcaattgataagcccaatacctacacaatcaaaattgatgtggaaactgagggttctttgaagattaaaaaagtcgataaagaaacaggaaatgttgtaccgggaaccgttttccatttagactttggaaaaacattacctgcaaaagacgtgaccaccgataaagaaggcattgcgacattggatgagattcctcatggcgcgaaagtaaccattactgaaaaatcagtgccagctccttatacgattgacactacaccaatcaccgcaaccattaaatctggtgagactatttctgtgacttcaaaaaatactcgcgaaaaaggtcaaatcattttgaataaaatgggggtggaaacaggaactgatctttggaacgacaaatactcattagccggaaatacgtttgccattcgcaaagacagtccaaccggtgaaattgtccaagaaatgaccacggatgaaaaaggtcatgcggaaacaccaaaagagattgccaatgcgttggaattgggaacctattatgtgaccgaaaccaaagctagtaatggctttgtgaatacctttaaaccagtaaaagtcgaattgaactatgtcaatcaaaccgtggctcttgttaccagtaacgtaaaagggcaaaaccaagaaatcactggtgaaaccactttgacaaaagaagacaaagataccggtaatgaaactcaaggtaaagctgagtttaaaggagctgaatatactctctttactgcaaaagatggtcaagcggtcaaatggagtgaggcttttaaaccagagttagtgaagggaacgaaagcttctgatgaaacggtgactttgactttagatgaaaagaatcaagttgctgttaaacacttagcgattaatgagtattactggcaagaaaccaaagcacctgaaggatataccttggatgaaacaaagtaccctgtttccatcaaaaaggtggatgataacgaaaaaaatgccgtgattacccgagatgttacggcaaaagaacaagtcattcgctttggctttgatttctttaaatttgctggatcagctgctgggactgccgaaactggcttcaatgatctgacctttaaagtatcgccattggaaggaaccagtgagattacaggtgccgaagatgaagcaattacagcttataacgagcaactaggttttgatggctatggcaagtttgaaaatcttccttatggggattatttacttgaagaagtagaggctccagaaggatttcaaaaaattacgccattagaaatccgttctacttttaaagaaaataaagcggattacactaagagtgaatacatttttacgattaccgaaaaaggacaaaaacaaccaattaaaacggtgaccgttccttacgagaaactgacgaataaagcattttctgttagcttgaatcgtttgatgctctatgatttacctgaagaagaagatagcttaacttctcttgggacttggaaagacggaggcaaagaattgacagaccttgattctaccgagctagttgataaattgagctataacttgcatgaaatcaaagaagactggtatgtggtagcgcaagccattgatgtggaagcgacaaaagctgcccaagaaaaagatgaaaaagccaaaccagtggtaattgccgaaacaaccgcaacgttggcgaataaagagaaaacaggaacttggaaaattttgcataaattaaccgcagaacaagttttggataaaaccatcgtcttattcaactatgtgtatgaaaacaagaaaccctatgaagcaggtgatgatccagtagcgaaagatgctagcttgaacaatcaagcccaaactgtcaattgtacggtggaacgccatgtttccatccaaacaaaagcccacctagaagatggttcgcaaacctttactcatggggatgtggtggatatgttcgatgatgtgtcgattacccatgatgtactggatggctcaaaagaagcttttgaaacaattctgtatgcattacttccggataatacgaccaaagaaatttggaaatctggcaaaattgattatgaagtgaatgacaaagaattcactaaaaccgtacttgcggaaaaagtggacacaagtaaatatccagaaggtacaagttttaccttcaaagaaattaactatggcaaagacggaaacatcaatgggaaacacaatgaggatctaaaagaaaaaactcaaactttaacacctaaaaaagttccgacaacaccaagtgcaccagaacaaccggaaataccaactgttccaagtgactctcaagaatctagtcctacagtaaagacattcccacaaacaggggagaaaaattctaatgttctgctgtttattgggtttaccttgatctttgcgactgctgggtattatttctggaatcgccgaaac

SEQ ID NO: 21538 - DNA, 1956 bp, Enterococcus faecium
ttgaaagcatatctacaacgaatgggacgttcccttcaacttccagttgcggtcttacctgctgctgctttactagtagggatcggaaactggtgggcatcttatagtaacgacattgtcgctcattttttacaagctggcggtaacgcagttttaggtcaattacctttgctgtttgccgttgggttagcactagggatgtcagtggacaaatcaggtgctgctgccttggcaggtttggtcgcatttgaagttccagtaaatgttttaaaaactgattcagtagctactttattgaatatcaaaccagaatcagttgatccatcttttgctcagatcagtaacgtatttattggtattattgccggattgattgcggcagctctttataatcgtttccacgaagcaaaattaccgatggctttatctttctttagcggcaagcgtctagtgccaatcttggctgcctttgtcatgttgctgatcagtgcagtgctactgctcgtatggcctccggtttactctgctttagtttcttttgctaaattcattttgagtttaggctggggtggtgcaggtctttatggcttcttcaaccgtttactgatccctacaggattgcatcaagcaatgaactccgtgttctggtttgacgtagcaggaatcaatgatattggtaaatttttggcttctgaaggaacaaaaggcgtaacaggaatgtatcaagctggatttttcccaatcatgatgttcgggcttccagcaggagcatatgctatttacagaaatgcacgtccagaaaacaaagcaaaaacagcttccttgatgctagcagcagcttttgcttcattctttactggtgtgacagaaccacttgaattttcatttatgttcgttgcttggccattatatgtcttgcatgcaattttcactgggatttctttagcagtgagtgcattcttccattggacagcaggatttgcctttagtgccggatttgtcgattacttcctatctttgaaaaatccgattgcgaatcagccattgatgttgatcgtccaaggattagtaacagcagtgatttactactttggctttaactttgctatcaaaaaattccatctgatgactcctggccgcgaggaagcagatctttcagatgacgatactgcaacgactaattcagacaataaatatgcggcacaagcaagcaaaatctacgctgcattaggcggagccgacaatgtaacttcgatcgataactgtactacacgccttcgtttgcaagtcaaagatacaggcctgatcgatcaaaataaaatcaaagccactggcgtacctggtatgaagatcatcgacggaaaaaatgcgcaagtcatcgtaggtacagaagtacaattcgttgcagatgagatggcaaaactacatggtggtgctgcagcacgacctgcacaaacaaacaccgtggttaaaacagaaacatttgccggtgaaacgatcgaacaagatatttacgctatcgcaaatgggaaactgattccaatcactgaagtttcagatgatgtattcgcggaaaaaatgatgggtgacggctatgctgtattaccagaaaatggagaaatcttctctccaatcgctggtacgatcacaaacattttcccaacgaaacatgctgtcggaatccaaacagatgctggtatcgaagtcttgcttcatatgggcatcaacactgttgacttaaaaggcgaaccattcactttatatgtagaagaaggtcaaaaagtcgcaagaggtcaattgattgctttagttgatcttgccgctattcaatctgcaggcaaaaacacggatatggtcgttgtattcacaaatggcgacaaagtccaaagcttagaaatcgaacccgcacgtgatgtaaaagcaaatgataaaatcggctctgtttccaacaaagcc

SEQ ID NO: 21539 - DNA, 579 bp, Enterococcus faecium
atgtgtaccgcaatcacttatgcaacgaaagaccattattttggaaggaattttgattatgagatgtcttataatgaagtggtcactattactccaagaaattatcgtttcgattttagaaaggtaaaaaatttagataaacattatgcaatgataggaatagcagctggggtatccaactatccactctattatgaggctacaaatgaaaaagggttgagtatggcaggactgaattttcctggcaatgctgattataaagaattacaagaaggaaaagataacgttgcaccatttgagtttattccatggatactagggcaatgctcaaccatagacgaagctaaagaattattggctactatcaatctagtcaatatcgattttagtgaaaaactacccttgtcacctttacactggttattagctgataaagaaaaatcgatagtaattgaaagtatgaaagatggacttcatttatatgataatcctgtcggtgtgttgacaaataatccgccatttgattatcaattatttaatctgaacaattatcgctcgctatcaaatggaacgagagta

SEQ ID NO: 21540 - DNA, 750 bp, Enterococcus faecium
atgaatgaaaaagaatgggatgaatttgctgaagaatattatgaaatccagcaagaatcgcaagtaactattgctgaagatgtaaaaaattatctgaaaacggagaaagtcctgcctgctgaaacagcagcagacgttgctggaggatctggcagatttctttccttagcaaaagaaattaatcgctatgatttgatcgatttttcttcaggaatgctagaaaatgcaaaaaaagaagcagaaaaaaatgagttgccaaatgtttcctttatcaaacagtcgttagaagaatttatccaatcaaatgagacatatgaaatggtttttacagcagcaaatccagcattggtacatcttattcaattagaaaaattgatgaaaaagtcaagcaaatggtgcgtgataatcagagtagtggaatcaatcgatgatgttttttatcctatcgaaaagcaactaggaatgatagaagaagatcctaatacatcgccagttgtaatggatcaatttgaaacatacttaattgatgaaggattcaaagtgaagaaaaaagattttacttattttacacaggaatcaattactgaagaattgatgaagctatactatgacgcgtacgcaaaagatcctgttgtgaccaggtacattcgcaaactattcagtgaaaaacgagaaatccttagtacgactaagctgacctatagactgctcctttggtccgcagataaaaaaagaacctttcacgactcg

SEQ ID NO: 21541 - DNA, 396 bp, Enterococcus faecium
atggtcatgacagatccaattgcagattttctaactcgtatccgtaacgcaaacatggttaaacatgagtctttagaagtacctgcatcaaaaattaaacgtgacatcgctgaaatcttgaaacgtgaaggtttcgttcgtgatgttgaatacatcgaagatgacaaacaaggcgtgatccgtgttttcctaaaatttggtaaaaacggcgaacgtgttatcacaaacttaaaacgtatctctaaaccaggtttgcgtgcttatgtcaaagctgacgaagtaccaaaagtattgaacggtttaggtatcgcaatcatttcgacttctgaaggtgttgtcactgataaagaagctcgtgaaaaaaatatcggcggcgaagttatcgcttacgtatgg

SEQ ID NO: 21542 - DNA, 1476 bp, Enterococcus faecium
gtgcgaagttcaccgtttattgtgcataaagggtggagtgggcactttttttgtgcgcaaaatgaaaaaggaagtgaaaaaatggctgaaattactttagaatttgatacgattgcggcaatttctaccccacctggagaaggtgcaatcagtatcgttcgtttaagtggcgatcaagctgtgcaactagcagataaagtttatcaatctggaaacaaacgattatcagaagtaccaagtcatacgatccattatggacatatcgttgatcccaagagcaatcagcttgtcgatgaagtcatggtctccgtgatgagagcaccaaagacatttacgcgggaagatgtagtagaaatcaattgtcacggtgggatcgttgtagtcaatcaaattttgcagctattgttaagagaaggtgcaagattagctgagccaggcgaattcacaaaacgagcattcttgaatggtcgtgttgacctttcacaggcagaagctgtgatggatttgattcgggcaaaaacagacaaagcaatgggactagctcttaatcagttagacggcaatctgtctgctttgatccgctcattgagacaagagattttagagacattagcacaagtagaagtaaatattgattatccagaatatgatgatgtcgaagaattgactacgaagttattgcttgaaaaagcgcagatgatccaacaaagaatccaagcgctacttgctacatccaagcaagggaaggttctgcgggaagggttaagtacggcaatcatcggccggccaaatgtcggcaaatcaagtttgttaaaccatttgttaagagaagaaaaagcaatcgttacggatattgcaggaacgactcgagatgtaatcgaagagtatgtcaatgttcggggggtaccgctcaagctaatcgatacagctggaattcgggaaacagaagatgtggtggaacggatcggggtcgaaagaagccgaaaagcattagcagaagcagacttgatcttacttgttctaaaccaaagcgaaccactgacagcagaagatgaacaattattggaagcgacaagtggattgaaacggatcattcttctaaataaaacagatttgccagcacagctggaacaagaaaaattgaagaaattgatcgaaaatgaaccagttttttcaatttccgtagctaaaaacgacggactagatcgtttggaatcagctatttctgatttattcttcagcggagaaacaggagaaagagacgctacttatgtttctaatacccgccatatcgcgttgttagaaaaagcttccctctcacttgaagaagtcattgcaggtattgattcaggaatgcctgtggatctcgttcaaatagatatgacgcgttgctgggactatctaggagaagttgtcggcgacagtgtacaagatgagctaatcactcaattattcagtcaattttgtttaggaaaa

SEQ ID NO: 21543 - DNA, 462 bp, Enterococcus faecium
gacggggtccatatgtccgatcatgtaacgatgaaggggaacggccaagtaagcttaacagatgagggattagcgaaattgaatcgattgatcaaagaagcaggattcgaagaacagcttgaagctgatcatgaaccgaagatcgttgtcgggtacgtaaaaacatgcgtcccacatcctgattctgaccatttatcgattactgagacagaagtagacaatggtacagtattgcaaatcgtttgcggtgcacccaatatcgaagctggacaaaaagttgtcgttgcaaaaccaggagctatgatgccagatggaatgatgatctggccaggaactttgcgaggggtagatagctatggaatgatctgttccgctcgtgaattgcatttgccaaatgctccagcaaaaaaaggaatcttagtattgcctgaggatgccgtagtcggagaagcatttccaaaa

SEQ ID NO: 21544 - DNA, 1131 bp, Enterococcus faecium
atgaaagcagtcacttggcaaggaaaacagaaaatggaaatcagaaacgtagatgatccaaaaatattagaaccaacagatgcaatcatccgtatcacagcaacagccatttgcggctccgatctgcatctttaccatcatggtgaagcagttttggaaaaagggtatgttgtaggacacgaaccaatgggaatcgttgaagaagtgggatctcaagttcaaacattgaaaaaagggcaacgtgtggttatcccttttaatattagttgtggtcattgtcatttctgcctgaatcacatggaaagccaatgtgatgaatcaaatccagatcagttatatggcgggcttttcggatttggcaagttgaacggtaatcattggggtggtcaagcggaatatctaagagttccttatgcagactctacttcatttgttgtaccagataatgatcttcctgatgaaaaagttttatttctatcagatattttgcccacagcttattggagcgttgaaaacgcaggagtaaaaaaaggcgatacagttgtgattctaggttctggtccagtcggtctattcgctcaaaaattcgctgttatggctggagcagagcgcgtaatcgcagtagatccagtacagcaccgtctagataaagcggctaattacaatggggttgaaacttatttcttagaagacacggcacaagctggaacagaattgtatgaactggctaaaggtggcgcagatgtcattatcgattgtgtaggaatggacggattagagcctgtcaaagaaaaagcgaaaaatttagtaagcttacaaagcggcacaatctctccattacagatggcatcgcaagctgtcaaaaaatttggaacagtccaagtaactggtgtttatatgactccagcttcttcttacccgctgcaagaattttttatgcgggatatcgctgtcaagcatggacaggcaccaattatccatctaatgccaaaaatttacgcaatgattgcagaaggactattcgatcctacacaaatcattactcattcgctgccactatcagaagcagcacaagcatatgagatctttgacaaaaaagaagataaaaatataaaagttgttttgaaacct

SEQ ID NO: 21545 - DNA, 891 bp, Enterococcus faecium
atgacagaaccaaaattaatcgacccgcgaaacttgtaccatacggagaaatttcctaaacaagatcaggatacaccagctttacagcagaatatgattcctgttcctgattgtggagaagaatcctatgaaggcaataatcaactagaaaaccgccgtgtactaatcactggtggagattcagggatcggtcgtgcagcagcgattgcatttgctagagaaggggcagatatcgctcttcaattcttcccaggagaagaaaaagatgcagaggaagtagcaaaatacgtgaaagatgcaggacgtaagattgtcttactaccttttgatcttcgtgacgaacaagcacctaaagaaatcatagataaagccgtgagtgaacttggcgggctagatacgatggtactaaacgcaggacagcaaatttcttgtcagtctattgctgagttaccacttgagcaagtcaaagacacatttatgataaacatcatcgctatgtttgctttagtgaaagaagctgttccgcatatcccagcaggaggagcaatcgtaacaacaacttctgttcaagcattcaatccaagcgaacatttattagattacgcagcaacaaaagcttcaatcgctaactttacgatcggtttagcaaaacagcttgcacctaaaggaatccgtgtaaatggtgtagcacctggtccaatctggacaccattacaactagacgaaggacaaccttctgattcgatccctgaatttggtcagcaaagtttactagaacgtgcaggtcagccaggagaattagcaccagtttatgttttcttagcatcgaataaagcaagttatgttacagcccaaatttacggagtaactggtggagaagcgatcaactta

SEQ ID NO: 21546 - DNA, 1374 bp, Enterococcus faecium
atggagattacgaagaagacatccaaaaataatagaaaagaggttctttcattgaaaatggtaaatgttgttggagcagggcttgccggaagtgaagctgcttggcagatcgcacaagcaggagtccctgtccgtttatatgaaatgcgtccagtcaaatcgactgaggcgcatcacacaagtaattttgctgaactagtatgttccaattcattaagaggaaacagtttggctaatgcagtagggttattgaaagaagaaatgcgccgattgaattcggtagtaatcacttcggcagatgaaacagcagtgccagctggtggtgccttagctgttgaccgcgattctttttctgaaacaattacccgaaaagtcaaagagcatccattagtaacagtgataaacgaagaaattactgaaataccggaaggaatcaccgtagtagcaacaggacctttgacttctcatccattagcagaaagcatcaaagcattcaatggttcagatggtttttatttctatgatgcagctgcaccaatcgtagacaaagctacgatcgatatggataaagtatatttgaagtcccgctatgacaaaggagaagcagcttacttgaactgtccgatgacagaagaggaattcaaagctttccatgaggcactaatcaatgccgaagtggcagaacttaaatcttttgagaaagaaaaatattttgaaggatgtatgccaattgaagtaatggcacagcgaggattcaaaacgatgcttttcggacctatgaaaccagttggattggaagatcctaaaactggcaaacgtccttatgctgttatccagctgcgtcaagacaatgctgcagcttctttatacaacatcgtgggctttcagactcacttgaaatggggcgagcaaaaacgtgttttccggatgattcctgggttagaaaatgctgaattcgttcgctatggtgtgatgcaccgaaacagctttatgaattcgccagaattgctgaaaccgacttaccaatcaacgaaacgcgaagatctgttctttgcaggtcagatgactggtgtagaaggctatgttgaaagtgcagcgagcggactacttgctggaatcaacgccgcacgcttagcaaaagaaatggaaccagtcgagtttccacaagaaacagctattggaagtatggcttactacattactcatgcggaaggaaaacatttccaaccgatgaatgccaactatggtctgtttcctgaactgccagagcgcattcgagacaaaaaagcaagatatgaagcaattgcacaacgagctttaaaagctaatgaggcaataaaaacagaattagaaaaaactgcaatcccaaatgag

SEQ ID NO: 21547 - DNA, 1761 bp, Enterococcus faecium
atgagtacagtattacatgtattggatgcaatcaatagccccgcagatgtcaaaaaattatctgttgaggaaatgaaacagttggcagaagagatgcgccaaaaaatcttgcaaaaggacagcgatgtaggtgggcacgttggtccgaatctaggtgtagtagaattaacgattgcgtttcattatgtatttgattcaccaaaggataaaatcgtttgggatgtttcccatcagtcttatggtcataagcttttaactggtcgaaaaaatggttttgaaaaaggacattaccgtgaagtgagcggatattccaaccaacatgaaagtaaacatgactattttacagtggggcacacatctacatctatcagcttagcaacaggtttagctaaagcgagagatctgaagaaagaatcaggaaatgtggtagcatttatcggtgacggctccctaagtggtggcttagcttttgaaggattgaacaatggtggtgttttacaatccaatctaatcgtattagtaaacgataatgagatgtctattgatgagaatcatggcagtttatataaaaacttagctgagcttcgtcaaaccaacggtaaaagcagcaataacctatttaaagcaatgggatttgattatcgttacgtggataatggaaacgatctggaaacggtgatccgtttatttgaagaagtaaaagatattgatcatccgattgtacttcacgtccatacggaaaaaggtcgcggttatcagccggcaatcgataataaaatgaaatatcattggcatgtaccatttgatctgtccaccggggaggcaaagcaagtaacttctggagaaacatttaatatgatcatcatggattatttggataagaaaatgcaaacaagtacagctcctattgccgcagtcaatgcagcgataccaggcgcctttggactgaaaacattccaagaaaaacatccagatcattattttgacgtggggatcgctgaacagcactctatcactttcgcttctgctttggcttctcagggagtacgtccagtcgtcttccaatcaagtactttcttgcaacgggcatatgatcaattatcacatgatttagcgatcaacgagaatccagtgattattttagtcggtggcggaacgatctcagctagtgaccgaacacaccaaggaacatttgacattccttacttatcaagtatcccgaacatcaaatatcttgctccagcaacaaaagaggatatgatctctatgctagattgggcgttcgaacaaacagcgcagcctgtagcaatccgaattcctacacatggtgtagaacatggtacagctatcgcaaatgattatagtattccagcctatcaaacagtaaataatggaggaaaagtagcaattttagctttaggcggttttcttgaattaggaaaagaaacagtaaaagcttttagaaaaaaaggaatcgaagcaacgttgatcaatccaggaacgatcacagaaaatgacgtagaaacattagataaattaaaagaaacacacgaattagtcatcacattagaagatggtagtttgtcaggaggatttggcgaaaatatcagtcgttattatggtgattcttcaatgaacgtattaaattttggtgcagagaaagaattcacggatagcgttcctgtagggcagctttatgaacgttatcatttaacaccaaaacaaatcgttgaagatagtctgcgtgtcttgaatattcaa

SEQ ID NO: 21548 - DNA, 2040 bp, Enterococcus faecium
atgctgtataaactagccgttaaaagtttttttcggcagtcacgaggctatcttgtttattttttcagtttgactttatccgtaatgatctattattccttcagcgcaatgacctacgatcaatctttagtcagaagagcaagtcaagatacttcgatagatggtggattgagttttggtggatttatcattactgttgttttgctttttttcgtattcagtgccaaccgatttttcttgaatagaaggcaaaaggaaataggcatctatcagctttttggtatgaataaactgcagatatcaggtatatatgtgttagaaatcatgataattggattgttcgcctgtatttctgggatattactcggtattattttttccaaactcttttcaatgattttggttcgaatgatggatatggatcttactagtccattttttatctccattccatcagtagtagatactttatttgcttttttcatcatccttttagcagtatctgtatattcaatatggaaaatatggcgctatccaatgattcgaagttttggagaaaaagaacaagcagatagttcaacaatgcgcttcaggacaaggcaccgattactcgcagtcatcgggttactacttttaacgagcggatattttggagctagtcattttagggaaatcacttcatggatgatcagttatcattatcttgatacattagttttcttttttccttttttaatttttttcgtttgtgtggtcggtacttatttgtttttctgttatacatttcggttatttttgatcatattgagtaaatggaagatttattactatggtatcaattttttgataatgggtaacacgcaagttcatttgctcaaaagttggcgtacaaattctctgattacagtcattctcggaatttctttaatgacaattggcggcacggctagtatctctactattttatcctaccaggagaaagtttcctccccgatggactatcagtttgatgttgagacagagaaaaaaatcaagccgattctagcagaggaagggcagaagataactaaagaaatcaccttgcattataaagtcattgggagtatctatagtcaaaatctcgaagaacctatgtttcaaactgctaatctgatcacggaaacacaatatcaagccttcagaaaagttaatccagatttgccgaacatttctttgaaatcacctggtcatactgttttgcttgatcaaatgcaaactctttttcggaatatttcattatatggatctagtattggactgccagataatcaagaattgaagattcaacaaatgcttccaagtgtattaggtgacgaaacaatggtatatctaagtcctgtactgattgtagatgataccgtttttgaaaaagcaaaaggtgtggattatcaagtagtcaatgtagatgtatcaggtggaaataatgaaaaaatagatgaacgactgagcaatgacctgtcgataaagtggctcaatgctgtttattattcttatgatatcgtaaatggaagtctacaaggagaaattagcacaaagaaacttccggatgaccaaatgaaggaagcacaatttagccaagaaagctctcgtttgaatttctcttccagctattcgaaattgcgtgcagttaatcggcgaatcggtatcaatatttttgtcacactatttgtcgggatgatcgtgattattgctactggtagtattttgacagtccggcaattagcagaagcagaggaagaaaaagaaaattatcacctattgactaagctggggattccacaaagaaggatcagacggatgatcttcgagcaaaacgcacttaccttctttccacccatgatattagggatcactcacgcagtatttgcaatcaatgtcttcactcagtatataaaaactgccgattactggttggcttatcttgtgagtggcttattgatccttatctatcttttgctttatgtcattacgagtcagttatattgtcggattatcgaggaa

SEQ ID NO: 21549 - DNA, 831 bp, Enterococcus faecium
ttgaaaaaaaggatgatacgattgacagataatcgccctatcggatttattgattcaggtgtcggcggcttgactgtagtaaaagaagccctgaaacaattaccgaatgaaaatattttatttgtaggagacacagcacgctgcccatatggccctagacccgcggaacaggtaatccagtatacttgggaaatgacggattatctggtggagcaaggaatcaagatgctggtgatcgcctgcaataccgcaactgcggtggctttagaagaaatcaaagctgctctttctattccagtcatcggtgtgatccttcccggtactagagcggcagtaaaaaaaacacaaaataaacaagttggcattatcggtacgattggtacggtaaaaagtcaagcttatgaaaaagcactgaaagagaaagtaccagaattgactgtgacaagtcttgcttgtccaaaatttgtttcagttgtcgaaagtaatgaataccattcatcggtggcgaaaaaaattgtggcagaaacattagctcctttaaccactaaaaaaatcgatacattgattttgggatgcacccattatccattattacgccccatcattcaaaatgtaatgggagaaaatgttcaactgatcgattctggagcagaaacagtaggtgaagtatctatgctgttagattatttcaatctgagcaattcaccgcaaaatggtcggacattatgccagttttatacaactggctctgccaaacttttcgaggaaatagctgaagactggcttggaatcggacacttaaatgtagaacatatcgaattgggaggaaaa

SEQ ID NO: 21550 - DNA, 1689 bp, Enterococcus faecium
atgaataataaagatcttgtcgcaaaagctgtctatgacgctgtcaaagatgatttaacactggaacaagtcgagcaattactagaaaatccaaaatcagctgaacacggagatgttgcatttccagccttttcattagcaaaagtttaccgaaaagcgccacagcaaatcgctgcagatttagcagaaaaaatcgattctgccaactttgaaaaaatcgaagttgtcggaccttacttgaactttttcatgaataaagaacttatcagcaaaaaagttttgcaaacagtagtgaaagaaaaagaacattatggggatagcaacatcgggaatcaaggaacagtaccaatcgacatgtcttctcctaatattgccaaaccaatctcaatgggacatttgcgttcgacagttatcggtaattcgatcggtttcattatggaaaaaatcggttatcagccaatccgcatcaaccatttaggtgactggggaacacagtttggaaaactgatcgtcgcttacaaaaaatggggtacagaagaagctgttaaagcagaaccaatcaatgaattgcttcgtttatacgtccaattccatgaagtagctgaaacagaaccagaattaaatgaagaagctcgtgcttggttcaaacgtctggaagaaggcgataaagaggctattcaattatggcaatggttccgtgatgaatcgatgaaagaattcaataaaatctatgatctgctggaagtacgtttcgattcgttgaacggtgaagctttctacaatgacaagatggatgaaatcgtcaaacttttagaagaaaaacatttgctgaacgaggataaaggtgcagagatcgttgacctatctgcttatgacctgaatccagcgttgattaagaagtcagacggtgcgacactatacattacacgtgacttagctgctgcattgtaccgtaaacgtacttacgacttcaaacaatctctatatgtagtagggaatgaacaaagctatcattttaaacagttgaaagctgtcttgaaggaaatgggctttgactggtctgacgacatgcaccatattccatttggtttgatcacgcaaggtggtaaaaaattatcaactcgtaaaggaaagatcgtcttattagaagaagtattaaatgaagcaatccaatctgctaaagaacaaatcagcgagaaaaaccctgatttggaaaacaaagatgctgtagctaaacaagttggggttggggcagtcattttccacgatttgaaaaacgatcgactgaatacatttgactttaacctggaagaagttgttcgatttgaaggagaaactggaccttatgtgcaatatacacatgctcgtgcagtcagcctgttggaaaaagcaggatttgtcccttcagaaacagcagactatgcattgaatgacgataccagctgggaagtggttaaattagttcaaaaataccctgaaacggtcttgtctgctggggaaaaatacgaaccgtcagtgattgcgaaacatgcaatcaaattagcacaagcattcaacaaatactatgctcatacgaagattttagctgatgatgaacaaaaagaagcacgcttagctctagtttatgcagtgactgtattattgaaagaagaccttcgtttgctaggacttcatgcaccagataagatg

SEQ ID NO: 21551 - DNA, 1087 bp, Enterococcus faecium
atgcgtcatgacgggagaaaagctcaagagcttcgcaaactggagcttcaaacaaatgttttcaaatatccagaaggatcggtagtgatccgttttggtgatacaacagttatttgttctgcaacaatagaagattctgtacctccctttttgagagaaacaggaacagggtgggtgacagcagaatatagtatgctgcctcgagcaacgagtacgagaaatcgtagagaaagcagcaaaggaaaactttctggtagaacaatggaaatccagcgtcttattggtcgttccttgcgtgcagtagtagacttggaatatattaggagaacgtagtatcatcgtagactgcgatgtgatccaagcggatggcggtactagaacagcaagtatcactggggcattcgtggcattgaaattagccattgaaaaacttttaagagaaaaagaattgtcagaagatccaatcaaagaacatcttgctgcagttagcgtaggaatcttaccagatgggacttgcgtcacagatttggattaccaagaagattccgcagcacttgtagacatgaatcttgtaatgacagaatctggaaaattcgtggagattcaaggaactggagaagaagcaacgtttgatggtgaacagttgaatgaaatgctcttttttggaaaaaacgcgattgaagatttgatcaaagagcaaaaacatgctttgctaacagagtttgctcaaaatgatgagcggatagaagaaacaaaaacaatcatcattgcgacaagaaatccaggaaaagcagaagagtttcgaaatatgttcaaagaagcgggatatcatgtaaaaacattacttgactatcctgaattgccagatgtggaagaaactggcagcacatttgaagaaaatgcccgattaaaagcagaaacgattgcacaattgcttgatcagccagtcttagcagatgattcaggtttgaaagtggatgctttaggcggtatgccaggaatctattctgcacgttttgcaggggaacaaaaaagtgatgcggggaataacgccaaattattatatgaattgacagatgtgccggat

SEQ ID NO: 21552 - DNA, 1404 bp, Enterococcus faecium
atggtagttggagattttgctgtagaattagatacagttgtaattggtgcgggacctggtggctatgtagctgccatccgcgctgctgaaatgggacaaaaagtagcaatcattgaaagagagtatattggcggtgtttgtttgaatgtcggctgtattccttcaaaagcactgatagctgcaggacaccattatcaagagtcactagattctgaaatgtttggagtaactagtgaaaacgtcaaactagattttgcaaaaacacaagaatggaaagaaaacaaagttgtccatacgttgacttctggtgttggtttcctattaaaaaaacataaggttgaaacaatcgaaggagaagcgttcttcgtagatgatcacacactacgcgtcattcatccagattcagctcaaacttattcgttcaataacgcaatcatcgcaacaggttcccgtccaatcgagattccaggatttaaattcggaggacgtgtgttagattctactggcggattagcattgaaagaagtacctaagaaatttgtgatcatcggtggcggtgtgattggtgccgaattgggcggagcgtacgcaaacttaggagcagaagtaacgattcttgaaggctcaccacaaattttaccaacttacgaaaaagatctagtaaaattagtagaagatgatttcaagaaaaaaggcgtaacagtcgtaacgaatgcaatggcgaaagaagcagtcgataacggtgacagcgtgacagtgaaatatgcagtggacgggaaagaagaatccgttactgctgattatgtgatggtcactgtaggtcgtcgtccgaatacagatgatatgggcttagaacaagcgggtgtcgaagtaggagaacgaggattgatcacggtggataaacaaggacgtacgaacgtacctaacatctatgccatcggtgatatcgttccaggggcggcattagcacacaaagccagttatgaagcaaaaatcgctgctgaagcaatctctggcaaaaaagtagctgtagattataaagcaatgccggcagtagccttcactgatcctgaattggcttctgtaggtatgacgatcaaagaagcaaaagatgctggtatcgaagcaaaagcatataaattcccattttcagggaacggtcgggcattatcgcttggtaaaacagaaggattcatccgtctagttacgacgatcgaagataacgtgcttattggcgcgcaaatcggtggagtcggcgcaagtgatatggtctctgaattagctttagcaatcgaatcaggaatgaatgctgaagatatcgccttgacgattcatcctcatccatctcttggcgaaatcgtcatggatgcttcggaattagcattaggtttaccaatccatatt

SEQ ID NO: 21553 - DNA, 1292 bp, Enterococcus faecium
ggtctatttttggtgctggaaatcttatctttcccgttcatttgggtcaagaagcaggcgctgctaccttttgggcgaatctaggtttcttggttaccggtatcggtcttcccttcttaggggtgattgccattggtgtatcgaaaagctcaggtgtatatgaattagcaaaacggataaatcaaacatatgcgatggtttttaccatcttgctttacttagttatcggaccgttttttgctttacctcgccttgcaaccacatctttcgagattggtttagcaccatttatcgatcctagcagacagacgctatatctagcaattttcagtattgtattttttgtgctggcttggtggttttcaagaaaaccgacaaagatattagattatgttggaaagttcctgaatcctgcatttttggttttattaggtgctttgcttctccttgcttttttgaatccactaggttctgtaaatcaagcgcctattcagccaaattatcaagagcatgcttttttcacagggtttactcaaggatataacacattagatgcgcttgctgctttagcatttgggatcatcattgtcacaacaatccaaaacatgggtgtaacaaaacctgctgaaatcgctaaagacacgatcaaatctggtgcgatcagcattatattgatgggaatcatttatactttgctcgcttatttaggtgctatgagcttaggtagctttgctctaagtgaaaatggcgggatcacgctggctcagattgctgatcattatttaggtacttatggcagtatcttattagcatttatcgttatattagcttgcttgaagaccggtattggtttgattacagcttttgcagaaacattcacagatttgtttccgcaaagaaattacgcattctttgttgcacttgctagtatccttccttgtttagcggcaaacgtaggcttgacgaatatcattcaattttcgttgcctgttttgatgttcatctatccattagcaatgacactgattttactagtgttagttggtcctttgtttaagcagcgtacggctgtttatcgaatgactacttattttacattgattgcttcgatttttgatgggttgaacgcttgcccagaaactatcaaacaaacacctattgttcaaaatcttttatatgttgcggaaagctacttgccgtttttcaaattggggatggggtggatcgtaccagcagttatcggttttgttatcggactgatttggagtttcgctaagaaagaagaagtagca

SEQ ID NO: 21554 - DNA, 1191 bp, Enterococcus faecium
atggaaaatcaaaatgaaagtttaatcaagcagtatgttaagcgtcgtgcaaagcgacgcttatttttgtggttgtttggtacttctgcaggtttgattactgtgttcgtgaccctttttctaatacttgcggcgggttcgattgataattctgattcagattcaagtagtggtggcgaagcttttacaggagaatattcggaaggcttaccgatttataaagaaatcaaaggaagaggccctttttctgatgagattgcgcaatatgctgtaggtgcagcagtgaaatataaattattaccaagtgtgatcctttcgcaatacggttatgaatcagcgtttggtacgtcggcgtccgcaagaaatgatctcaactattttgggattacttggtttgatggttgtctgtttcctaaaggaactgcacgaggaattggtggcattgaaggtggctggtacatgaagtttcccaactcaaaagctgccttctcatattacggctttatggtagccacacaatccaattttaatgcatgtgtaggaaataaaagccctggcgcaagtttattgatcttaggacgaggcggttatgccgctgcaggaattacggaagatagtccgtattatacaggatgtatgtccattatcacttctaataaattaaccgaatatgatgaattcgccatcaaacattggggtgaaggtggcaataacaacggcacgatcactggtgaatggacgaatccattccctggcagcagtttagataaaaattccttcagtggtggtcaattatttggaacaaatccaggcggtgaattccgtccgaatggcttccatgatggattagactttggttcagtcgatcatccaggaagtgaaattcacgcggtgcatggaggaaaagtcgtgtacgttggcaatcctggtatttcaggtttaggtgcatgtgtgatcgtgattaattacgacggtttgaatatggtatatcaagaatttgcgaatagtacaggaaattctcgtgtgaaggttggcgatcaagtgaaagttggtcaagtaatcgggatacgagatacagcacacttgcatttaggtttcactcgaatggattggcgtcaagcacaaggacacgcattcacagacgatggtacatggattgatccattaccatttttgaatagcagcaaaaaa

SEQ ID NO: 21555 - DNA, 646 bp, Enterococcus faecium
gttatgggtcttgaagttgctgtaacagatgttaatgaagcaataggtaggatatttgaaaatttgaatgcctggaagggtcactatatctgtattgcagatatggaagcggtagctcaaggtttcaaaaatagttcatttcagattttaaaaaatcaggtaatcatgacgataccatcaggtaacgcattgaaaaatgcataatagagagcaagggaatatcaaggcagaacaattctctggtgttgaacttatgaaatgttgcttgtcatcaaatgaaggagaaattgtcgtcactttttctatggttcgtgttggaaaattttagatgaattagaaaaccagttgcgaaaagaatatccccatatacaaattgcaggtaaatatgctccgccaatggatttaaatatgaatgaggatcaattagttatggaaagtattattggttccggcgcagatattgtttgggtaaatttaccgtcaccagaacaagaatgttggatggcatcatgagaattcgctccaatccttaatgataggagttggagattcatttgaatatttaacgggtaacataaaaaaggcataatttgtaaagagattggatttgctatgtagaaaacagttgcttcctaaattgagccat

SEQ ID NO: 21556 - DNA, 801 bp, Enterococcus faecium
atgcgctttttgcatctctctgatatccattttagagaaaactatcaaactaacttgtttactgctgaactatttccaacaattaaaaatccacagttggcattggaaaaattgttacaagaactctcgttaacagtgtacgattttattctattaacaggtgatttagtacatgaaggggggatttctgattatcaagtcttacggaaaatgttggatcaatatttcccaaccacaccttactatttttgtcgtgggaatcatgatcgtcgcagtgttttctttgaaggaatgagtgttgaaagcaatgaaacgggagagtatatccattgtacgaatcaaaatgggttacgaattatttccttggattctgctcaagatacccagcacgaaggaaaaatatcgataggacagatgattcaattacaagagtggttgggtacacctgctgaaaagggaacgattttattggttcatcatccattgtcgtgggaagatccatctattgtaactgaagttccggaaggttttgctgaattgattgccgaaagtgatattttaggtatttttgtaggccatatccatcaaggtagcagtgctgaatttgctgataaaaaacagtttatggctgaatctttatcatttggtgtagatgaatacccagactattctctttttaccaatagaacaggattcactagtggcagtttaattgacggaaaaatttttacttatcagcattatttaactccacatcaaatagaaatagggcgcatgaaaaaaccaattactggtaatcat

SEQ ID NO: 21557 - DNA, 2137 bp, Enterococcus faecium
gttcaaaaacccaagcacgaaacaacaagctgcacaacaagcaagcagaaaaccagccaatcaacagccgaacgatcaacgtaaaaaagaaacaacgaacaatcaacaaaaaaataaaaataaccgcagttatcaagatcgcggtcaagggagcggtcaagtgaatcaaggaaaaaaaccaacaacaaaccaaaataatacgggaaataccagcagccaaaatcgtcaaggaacgagccaaggcggcaatcaaaaccgtactaacaataacaacaaaccaaacaataacaatcgcggcaaatttaataataataaccgtaatcgttataataaaaaaggtaaaaaaggcaaacagcaacaatcaactaaaccagctgtaccaccacgcaaattccgtgaattgccagatgtattagagtatactgaaggtatgaacgtagcagatattgcgaaaaaaattcatcgtgagccagcagaaatcattaaaaaattatttatgcttggtgtcatggtcaatcaaaaccaagcactggataaagatacgattgaactgttagcgacggactatggcatggaaccacaagaaaaagtccaagttgacattgctgatatcgataaattcttcgaggcagaagaagtcgatccagataaattagtctcacgtccgccagtcgtaacgattatgggacacgtagaccatgggaaaacaactttattggatacattacgccattcacgtgtaacaagcggcgaagccggcggaatcacacagcatatcggtgcctaccagatcgatattgatggtaaaccaatcactttcttggatacaccaggacatgcggcctttacaagtatgcgtgcacgtggagcaagtatcacagatatcacgatcttagttgttgctgcagatgatggcgtcatgccacaaacagttgaagcaatcaaccatgccaaagctgcaggcgttccaatcatcgtcgctgtaaataaaattgataaaccaggtgcaaaccctcaacatgttatgcaagaattaagtgagtatgagttaattcctgaagcatggggtggagaaacgatctttgttgagatctcagcgaaattcggccaaaacatcgaagaattgctggaaatgatcctgttagtcgcagaagtagaagatttaaaagcagatccaacacaacgcgcaatcggaacagtgatcgaagcacgtcttgataaaggtaaaggtcctgtgtcaaccttacttgtccaagaaggaacacttcatgttggtgacccaatcgttgtcggtaatacttacggacgtgtccgtgtaatgacaaacgatcttggccgtcgcgataaagaagcaggacctgcaacgccagtagaaatcactggcttgaatgatgtacctcaagcaggtgaccgtttcgtagtcttcgaagacgaaaagacagcacgtgcagcgggtgaagaacgcgcgaaacgtgcattattagaaaaccgtgctgccacaagccgtgtgactttggataacttatttgaaagcctgaaagaaggcgaattgaaagaagttaacgtaatcatcaaagcagatgtacaaggttcagcagaagcactggctgcatcattgaagaagattgatgtggaaggtgtccgtgtaaaaatcgtccattcagctgtcggagcaatcaatgaaagtgatgtaaccttagcagcagccagcaacgctattatcatcggtttcaacgttcgtcctacaccgcaggcaaaagtgcaagctgatactgaagaagtcgatattcgtcttcaccgtatcatctataaagccatcgaagaaatcgaaactgcgatgaaagggatgctagaccctgaatttgaagaaaaaatcaccggtcaaatgatcgttcgtgaaaccttcaaagtttctaaagttggtacgattgcaggtgcctatgtaacagaaggatatattcgtagagatagcggtgtccgtgtaatccgtgacggaatcgtaatctatgaaggccaacttgcaagtctgaaacgattcaaagatgacgtgaaagaagtcaaaatgggttatgaatgtggtgcaatgattgaaaaattcaatgacatcaaagtagatgacgtaattgaaggatttatc

SEQ ID NO: 21558 - DNA, 804 bp, Enterococcus faecium
ttgaatctattactttcaattgcacaattagcgaagtcaacttattattactgggtaaaaaaattagataagccagataaatatagcaagataaagcaagaaattacagcgattgtaaaagaatcaagaaactcttatggttatcgtagagtcactttagcgttaaagatgaaaggatatacaatcaatcataaaacagttagaaaattaatgtcccaaatgggacttacctgtcaaatccgaataaagcgatataaatcttataaaggaacagtaggaaaaattgccaagaatgtgttaaaacgaaatttttcagtagatacacccaataaaaaatgggtgacagacgtcactgaattcaagataaaaggaagaaaaatctatctatctcctatacttgatttatttaacggagaaataattagttatagtatatcaactagtccaacatataaactgattgaagaaatgcttcaacaagcaattaaaaaaaagggaactgagggttcactgattctacattcagatcaaggatggcagtatcagatgccacaatatcaaaaaaaattaaaagagaataacattattcaaagcatgtctagaaaaggaaattgcttagataattctgtaatagaaaatttttttggtgtgcttaaatcagagtttttttatcgagaaaaattccgatcaattgagatatttcaaagtaaattaaatgagtatattaggtggtataataacaaaaggataaaactaaagttaaatggactatctccagtagaatatcggaaacagtccattaaa

SEQ ID NO: 21559 - DNA, 882 bp, Enterococcus faecium
gtggcttttgaaaccatcggagaaaaattacggcaagcacgcctgaataaaaaaatatctttagatgaattacagcagattacaaaaattcaaaaacgttatttggaagcaatcgacaatgatgattttgaccaattgcctggtaaattttacgtgcgggcatttattcggcaatacgctgaagctgtaggagaagatggagaccatttagtcgatgtttttgatgggaaaagcaaattgacaggatcggtccctgaacgtccgcagcctgaaacagtaagtacttctagaaaagcaatgcatcaggaagaatcgcatccaagtcgcttttggacaagtcttcctgtcattttattaggattggttgctttggcgattgtcgttgtcgtgggctatatgacttggcaagatcgtcaagctgatccaataatcggagacacagcttcttcgcttaaagtagaaggatcagtcgaggagtcctcttcctcagagcaaagcacgcagaccaaagagtcttctacagtagaatcaacaacaaaatcaagtgaagaaaagaaaatggcaatagctacaggagaagattctggcagtgccatcgcagtaaatatcacagacgctaccaagcctgtaacccttgaatttactgctgtcaatcgtgtatggttaggtgtgctagtagacaatgcctatgtttatcaagggacactggcagcaaatgaaacacagagtaccgtgttaccggaaacagcaacaaatgcgaccatcacgattggtgcagcaagcaatgcaacgatcaaagcgaatggagaatccgtaccagttaatccaggggaaaacaatcagagtccaaaaaatgtgaaccttactcttcaatacgcagaa

SEQ ID NO: 21560 - DNA, 327 bp, Enterococcus faecium
gtggtagaattgacgaaagaaaatcgacttacaccaggcggtgtcgtgttgacaaagatcgatgaccaaagcggagaagtcctgcaaggagctgtttttgagttacaagatgccaatggaaccgttctgcagtcaggtctaaccacaggagcagatggaaaactggcgatagatggcttagcaccaggagcatatcagctggtagaaactcaagcgccaacggggtatgaattggatgcgacaccagtaactttcaagatcgaaaaagaacaagaagtggcgatctttttaacaaagagaatagaaaagttgctgatagctcagata

SEQ ID NO: 21561 - DNA, 630 bp, Enterococcus faecium
atgatttttcctaaagttaatgaagcaagcttgaataaaggatccttttttcatatctatgaaaacgaagattttgaactgtataatatcctttcacaaaaagaggtcatcgaaaaccaaataatctgccatccaattatttacaaatctattttcaagtatgcattttttgcttccaatgattttcaaagaatggagattaccgactgtatattcgaaaactgtgatttttcaggctgtatattgacaaaaagcatgttgcatcgcgtgaaatttgtcaattgtaaattaacaggtactaaattgatggaaagttatattgggaacacgttattcgagaattgtaaaatggactatgtaaatttatctggttcaaacataaaagaaagtacctttgagcactctgtcttatcaagcgcagattttgtagactgttccctcactaaaataatgttttctactaatgatttagaaaatgctagcttttttgatactgatttaaaaaatatcgatttaagtagcaactcctttgaaatgattgaagtacgctcggaacatctaaaaaattgtacgcttaatcagttgcaagcacttggttttgctagaaaatttttacaaataaaagtagta

SEQ ID NO: 21562 - DNA, 2319 bp, Enterococcus faecium
atgattaagaaaactcaaaataaaatccaacgtatatgtcaaaaacattttgtttctagactcaaagctgtatctaaaagaaaatacttacatcccattatgatttcgatcatcttgatttttactttcttagggagcttatcaagtatttatgtaaacgtttatacagaaacgtcaaattttgctaaccaaacgacagaggagacaaatagtccaccctattctgaaatacagtccatagaaagcaccaatcagtctagcaacaacgagacaacctcaaccacatcctcgactcaactgattgatccgacagaaaaagaaatcacagcagcaaaagcagcaggggagaaagcttattcagaaacaggtagaagccagacatttagtactgttgcggccactgcgaatttcaacggacataccataccagatggatatacagtgatatatgccaaagatggagtcattgttgcggttaacggatcgatgagtgcggataaaactgcgttacaaggcgtaaccaaagcaatcgcttttattgataaccgtccagatatccataatctgtttattggctccacagtaaatggtactactatcacattcccaaaaagtatctatatgggggtggctaccgctggaaatacgatcgattcagttacacccaatgcggataaaagttattcttttacaccctcaacatggggagggcttcctgccggaggaggtatgagtactttttcaatcggtatacagttagcaaatgatattccattcacggggtactcgatcaaaaatgggcagatcgttgatggtaagggaaatgtttcaaattttccaacctatcaagcagcaacggttcaggtcaatgcgaatcggacaggaactttttcttatacagtcaatggtggagcagcaaaaatcggaacgtacgggactacattatctggaatccatgtgggtgacaaagtggttatcactccaacagcagtaacgggctattcttttgcacaaacaaacggttctttcacagccctagaaagtaacgtcgatacggtgacctatacaggcaaacaaacaccaatcactattaagtatcaagactattttggacagatgattgctccttctaaaataatgaatcttacttacggaagtgctgcacaagacctgacgactaatacgcctactatcaacggatatacctttacagctgtttcagcgatagaaacaaagaaccaatcagcaatgagtgttttagctagtttagatacaaatggaaatgtaatcgtaaaggacgcaaatggaaaacagatttctgaagtcatcctatattataagacaaatgcaacagtatcaatcaatgcaaatggcagtaagtactatgatggtctttctgttgtaccgatcgttaaatatgcctttaatgataaaacagaatcaacatcccttttaaacaatgatctcagtattgatcaaatcacatggaatccaactgatttcaaagcgatgaatgaaaagggagttgaagtaactgcgcctactgaaattggaacctatacgtcttggcaattgacaaaaagcggactagctaaactagctgccagaacaaactatttatttactatcgtgcagacatctgatgtctatacgattaagcaaatcagcggtgcggtagagctcagtggcagtaagacatatgatggaaaagcaggtgtcccgtcaatccatgtcaagctagcagagggtgtcactagttcgcttactccagtacaagtggcacttagcagtatggattacacagcagatgcacaatcagcaaaaaatatggttaatgctggcagctatacaattaaactaacgaatagcggaatagacaaagtcaaagcagcaaatcccaagttgtcatttactgatatagccaacacatcaggaacttataccatctataaagctaacgcagtgattactgtcgatgacgctgcctttaattatgatgcccaaagtcactcgatttcggttggaaatctccacgttaccggtgttgtcttaggcgaatcattggattataccctaacagttaacagccggacagatattggatcacaaatagtaacgattagtttaggcgaaggaagtgtaaacaataattatacgattatcgcaacagataccgctaagttgacgatcaatccgactctcttgcttccttcgacaggtgggataggtctactgccctttgtctttttaggactgatctttattttttctggcttcttttattttatccatcgtaagaaaaaagcaggtgaacagcga

SEQ ID NO: 21563 - DNA, 534 bp, Enterococcus faecium; identical to SEQ ID NO: 21400

SEQ ID NO: 21564 - DNA, 2169 bp, Enterococcus faecium
atggattttcaaagcattttagaaaagataaaagctgctttgatcagtttttggcgttggatcagaccatatctcggacaattccatcgatggcgaaagcgcatctggaaaaaatatcatgtgaacaaattgattttgctgattggtttgatctgtgtcttagtgacaagtatctacctctttattttagcaaaacaagcaaatgtcgaaacgttaaaatcaggattaagccaatcgacagtcatttatgataagaaaaacgaagaagctggcacactgtacgcccaaaaaggaacatatgtagaattaaacgcgatttctccctatatccaagatgcagtaatctcgacagaagataggaatttttacgagcatcacgggtttgatatcaaagggattgcccgtgcagcagtccgaatggtcttgtctggcggaacatcagggggcggaggaagtacgatcactcagcagcttgccaaaaatgcgtatctgacattagaccaaacgtttgatcgaaaagcgaaggaattatttttggcaatcgagatcgaaaagaagtacagcaaagaagaaatcttgaccatgtatcttaacaatgcctattttggcaacggggtatggggtgtccaagacgcttccagaaagtattttggagtagatgcaacgaatgttacgctgtctgaggctgctactttggcaggaatgctgaaaggtcctggtatttataatccgatcgatcacccaaaaaatgcgaatgatcggaaaaacacagtactaagtgtaatggaagaaaacggaaaaatcacaaaagaacaagaacaagcagaaagccagacagatatcagcgcgtatcttaatgacacatacgataattcagattctggttatcgttatccttattattttgatgcagtgatcgatgaagcagttaacgagtatggtcttgatgaagaagatgtcatgaataaaggctataaaatctatacagctttagatcaggattatcaaaagcaattagaagctacttatcaaaacagtgcattattcccagcaaatgcttcagatggtgccatggtccaatctgcttcagtagctttagatccgaatacaggtggtgtacaagcactagtaggacgaagaggagatcatgtctttagaggattcagctttgctacacagatgcgtcgttcaccaggatcaacgatcaaaccattaagcgtatatacaccagcactggaagctggatacaagccttccagtatcttgaaagacgaaccgcaaagttattacgatgcgcataattttgacgggacataccaaggagaagtaccgatgtatcaagctgttgcacaaagtttgaatttgcctactgtatggcttttgcatgagatcggtttacaaaaaggatatgataaagcagaagaattcggcctgcctttagcaaaatctgataagtattatggcttagcccttggtggactggaaaaaggagtatctccattgatcatggcgggtgcttacagtgcatttgccaatgatggtcagatgtatacgccgcatcttatcacgaaaatcgttgattcgactggagcggtgatcgtcgataacacaaacaaaaaaccaaaacaggtcatatcaaaggaaacagccgatgaaatgaccagcatgcttcttggtacattttcaaatggaacagcggctgctgcgaatcctgcaggttatacgatagcagggaaaacaggaaccacagaaactaatttcgatgccacaaaagcaaatgaccaatggatgatcggttacacgccagacgtagtgatttcgacatggatgggttacgaagaatccagcaagctgcactatttggaagggacaagtggaaatgttgtcgggaaagtcttcaaatcagcggcagaaggcatccttccgtatacttcaaaaacaggatttagtgtagcagatgcctatgccacaggaggacaagtggtagctgcagatcaagttggaaacacaggaaattctaatggagagtctggaaattggcaagataacttgaatcaatatggtgaacaagcaaaagaagggctgaaaaacttcggcgatatggtgaaagaaggcgttcagggaattggtgaagcggctaaagacctctggcggaaatatcaaggagag

SEQ ID NO: 21565 - DNA, 2184 bp, Enterococcus faecium
atggcaacagcagaaaccaaaatggatacgttcgtcattacaggtatgacttgtgcaaattgttctgctaggatcgaaaaagagctgaacggacaacctggtgtggtcaatgccacagtcaacttggccactgaaaaagcaagtgtcaaatatgaagggacgaccactgaaaaattaatccaaagcgtagaaaacatcggctatggtgcaattttgtacgatgaagcccacaaacaaaaaattgcagaagaaaagcaagcgtatttgaaaaaaatgctattcgatcttatattgagtacggttttgactttgccgttgatgttgtcaatgattgctatgatgttaggaagccatgcggcgattgttcacttttttcattttccaatcgtccagttagtgctgtctgctcctgtccaattttatgtcggtgctcgtttttataaaggtgcgtaccatgcaatcaagacgaaagcaccaaatatggatgtattggtagcaattggaacatcggctgcctttgcattgagcatttacaacggatttttccgtggacacccccaagatctttattttgaaagcagcagtatgatcatcacgctgattttgctcggcaaatatttggaacatacagcaaaaacgaaaacaggtaatgcaatcaaacaattgatgtctcttcaaacaaaaaccgcccaagtgataagaaacgggaaagaagaaacgttagcgattgaagaagtagtcgttggtgatcaactagtcatccgtcctggtgagcagattccagcagatggtcgaattatttcaggaagcagtgcgatagatgaaagtatgcttactggtgaaaatcttcctgtagaaaagaatccggatgacacgctctttggcgggacaatcaatacgaatggtctacttcacatggaagttacacaagtcggcaagcagacagtattagcgcaaatcattcaaatggtggaagatgctcaagggagcaaagccccaatccaaaaaatcgcagatcggatctcagggatttttgttccgatcgtattagtcatcgcgtttatcacgctcatagctacaggtttgatcactggtgattggcaactcgcattgatccatagtgtctctgtattagtcattgcgtgtccatgtgcattaggtttagcgactccaacagctattatggtaggaacgggtgttggtgcacgaaatggaattttaattaaaggcggagaagcattagaagcagctgctcacttagacagcattgttttggataaaactggaacgattacagaaggaaagcccaaagttacagatctagtcggttctaaagaagtcctatctattttttatactttagaacaagcttctgaacatccactaggtaaagcaatcgtggaatacggaaaactgcaagaagcagcaacatacgatatgattgattttacagcccacccaggtgctggaatcagcggtacgattaacggagtacgctattttgcgggtacacgtaaacgattaattgaattgaacctatcatttgatgaataccaagaacacgcgttagaattagaacagcagggaaaaacagtcatgtttttagctgatgaaaagcaagtgatcgggttgattgccgtggctgatcaaatcaaactagaagtcaaacaagcaatcaagcagctccagaataaaggattagatgtttttatgctgacaggagacaacaaactggcagccgaaacgattggtaaacaagttggtattgatccaaagcatatctttgctgaagtacttccagaggataaagcagcctacgtagaaaaacttcagaaagatggcaaaaaagtcggtatggcaggcgatggaatcaatgatgcaccggccttagcattagctgatgtcggtatggcaatgggaagtggaacggacattgcgatggaaacagccgatgtgacgctgatgaatagcagtttggcatccattgcacaaacaatcgagttgtctaggttgacattgagaaaaatcaaacaaaatcttttctgggcttttgtctataatacgattggtattccttttgccgcactaggctttttgaatccaatcattgcaggaggagcgatggcgtttagttccgtcagtgtattgttgaactccctgtgcttaaatcgacacatgaaaaag

SEQ ID NO: 21566 - DNA, 951 bp, Enterococcus faecium
atgccaaataaactacttgaagttaaaggattgaaacagtatttcaatgtaggaaaaaagaatgaagtacatgctgtaaatgacatcagctttcacatttatgaaggagaaacattcggtttagttggagaatctggaagcggaaaatccactactggccgtacgatcattcgcttgaatgaacctactgatggtgagatattattcgacggtcaagatataacgaagatcaaagataaaaaaggtttgacgaaattccggcatgatgttcagatgatctttcaagatccatacgcttcgttgaatcctcgtatgaaagtcagagatatcattgccgaaggaattgatgttaatggactagctaaatcatctgaagagcgtgcaaaaaaagtcgatgatctattgagaactgttggattgaatccaagccacggtactcgttatcctcatgaattttcaggtgggcaacgccagcgtattggtattgcacgagcattggcagtaaaaccgcgttttatcatttgtgatgaaccaatttctgcactagatgtgtcgatccaagcccaagtggtcaatttgttgcaagatctccaaaaagaacatcaattgacctatctatttattgcacatgatttgtcgatggttaaacatattagtgaccgaatcggtgtaatgcataacggcttgttattagagatgggaacaagtgatgaaatctataatcacggtgttcatccttatacagaaagtttgttatctgctattcctctaccagatccagaccatgagagaaaacgcagaagaatcaaatatcaacctgaaccagatgacggacaagtacgtcaacttcgtgaaatcgcaccagaacattttgtctatgcaactgagcaggaagtcccatattacgcaaaaaaactaaaacgacaaaaggaatctcttctggttgctaac

SEQ ID NO: 21567 - DNA, 717 bp, Enterococcus faecium
atgaaaccaatcatcggcattgccgggaatcaactgattcgagcgacagatactttccaaggaaatcaagtaagctatacaccgcagggatttgtggatgcagttttagatgctcaaggattacctcttattctgccagtcatgtctccagattcagcgcctcaactaattgagaaaatcgacaaactcattcttgcaggcggtcaggatgttagtccgcaactttacatggaagaccctcatccaaaactgacggaaacaaatattcaacgagaccaattcgaacaggcattgatcttggaagcattgaaacaaagaaaaccgatttttgcagtctgccgaggacttcaactattgaatgtcgtgttggagggaacactttatcaagatctttcattatatccaaaatggtccgtaaaacacgaacaacagcccactgccccgcagtttgcaactcacgaagtcaaaatcgtttcggacagtttattaagtgaccttctccctgattcatactttgtgaattcctatcatcatcaggcagtcaaagatctttctcctttgttaaaagccatcgccttttccaacgatggactcattgaagcagtccaaagtaaagataatatgcacaaaatccttggtgtccaatggcatccggaactttctcatcgtgtagattcatctgaacagcgtttattcgatttctttgtgaatgaattt

SEQ ID NO: 21568 - DNA, 1314 bp, Enterococcus faecium
atgagaatctctgaaaaagtcgttcgtataggactcattttgatggttgcgttaagcatatacttctcttatgcaatctggctgagcccagcaggaaaaagttcaatcaacgtagatgagacaaacactcaaatgatcgagtctcaaagcaatcgaaaaacttccgaagtctttcttccgcttcatgttacatggcaccattcgggaatgatccaagaaaccaacagtgaaaatctcgtgtaccgattgcaattgatcatcgataaagcaagatttggaaagctttctgaagtagtttcaggagacaaatcacagtttgaacaggtgaaaaatctgaactctggttttgagttggcctataatgcgccttttttgctaagagaatacaaggaagcatttgatttagatttagatgtgtcgaacttggcaaaagaaagcgaaaatatgtattttactagaatacaattcgatcaaggaaataaaaaaatccgatttttgaattattcgaaccatctcgtatatgaagcaaatatttcgttgaattggacagatatcaataaagaattaacagcaaaagacacaaaatggacagaaatgacaacagaaccatcgacgatcgacacgcaatatgctacgaaacattcgatcaaactgaaaaagtatagttatatcctgtcacagcaaccctatacactttttagaaatgcttttttccagaaaccagatagcgtgaaaaataatgatgaaagcaatgaattgattttttacggtgggaatgaaacaatgtctatccattcggaaacgcaagtagttgattttcgtggagagctgccagagaaaaaagaaaatgctagtgtattttctgaaagtttcccctatattagcaaattaggcagttctttagggaacctcagatattttgaccgcagtgacaatacgatcgattatcggatattcgtggaaggcttcccggtttttgggacagacagcagaggacagattggtgtggaagttggcggtgaaacgaatggttctgtgcaagtgaatatccaaaccagtttgaatacgattcaagtgccgataccttcagacgaagaagtagaacttgcaagtacgaatgaaatcatccagcagttaaaagctaagggagcagatagcaacaagattggttcagtgatcgttggctatacatggcaaaatgtcaaagaaacgaatcgtgtcgttgatctcttacctgaatggtatgtgaaatataaagataactggtattcagctaacgaccttctggaaaaattacctggattggaggcgaat

SEQ ID NO: 21569 - DNA, 567 bp, Enterococcus faecium
atggataagatgaagatccaagagattatagtcgttgaaggaaaagacgatacaagaaggctgcgggaagtagttgatgcagatacgatagaaacaatagggtctgcaatcaatgaagagatcctgatgcaaattgaacatgcccaagagactcgtggagtgatcgtttttaccgatcctgatttttcaggagaaaaaataagaaaaatcattatggaagctgttcctcaggcaaaacatgcttttttgccgcgcacacaagctaaaccaaagaaaaagggaagccttggtgtcgagcatgcaagtgatgctgctattttagaagcattgaaaaaggtcgtgacgccagacatttcccaaacggctgtttctgaaatcactagacaagaccttttagactatggtttaatagctggggcacaagcaaaagaaaaacgagaaaaactaggtgacgagttgcgcatcggttacacgaacggcaaacaattggaaaaacgtttgaagatgtttcgtattacgccgaaagaactcgcccaagcaatgaaaatagtggaggaacaacatgag

SEQ ID NO: 21570 - DNA, 393 bp, Enterococcus faecium
atggactcaaaagataaaaacgtagagaaaaacaaacatttcctgatgtccgtggaatttgctgtccaaggagtcaaaaccgtttttgaggaagaacgcaatatgaggaaacatgttgcgttcggtatccttgctttatttatgggcgtgattttccagattgatcggatagagtggttatggctgcttttagctgtttttctcgtttggatagtagagatcatcaatactgtttttgaaaatgtagtggacatgtttacggattttcattttcatccgattgggaaaaaaatcaaagatatggcagctggagcagttttagtgaccgcttgttttgctgtcatcattgggttgattttatttgtccctaaaatatatcatttgttgtttaat

SEQ ID NO: 21571 - DNA, 2130 bp, Enterococcus faecium
atgaatcctcttttaatagtaggaacacgacaatggaaaggagtccattcagtaatggcgtataaatatttagtgattgtagaatcacctgcaaaagccaagacaattgagaaatatcttggacgaaactataaagtaatggccagtgttggccatataagagatttaccgaaaagtaaaatgggtatcgattttgaaaacaattatgaaccccattatatttctatacgcggaaaaggcgatgtcatcaaaagcctgaaagccgcagcaaaaaaagctcaaaaagtttacttggcaagtgacccggatagagaaggagaagcgattgcttggcatttagcgtacctacttgggttggatctgaaagaaaaaaatcgggtggtcttcaatgaaatcacaaaagacgcagtcaaagcagcttttaaggaaccaagaacgatcgatgtagatttagtagatgcacagcaagctcgtcgtaccttagacagaatcgttggttattcgatcagtcctattctctggcgtaaggtcaagaaagggttaagtgcaggacgtgtccaatctgtcgctttaaaaattattattgaccgtgaaaaagagatccgagaatttgttccagaagaatattggagcatcgacggtaattttaaaaaagctcgcaagaaattcaaagcaaatttctggggaatcgacggtaagaaaaagaaattaccagatgcacaaagtgtaaaagaagtcactgctagaattgatggaacagacttcgaagttaaaaaagtagaaaagaaagagcgcaaaagaaaccctgcgaatcctttcactacaagtagcctgcaacaagaagctgcccgtaagttaaactttcgaacaagaaaaaccatgatggtagcacagcaattatatgaaggaatcactttgggtaaacaaggaacagtcggcttgattacatacatgcgtactgattctacccggattgccgatacagcaaaagcagaggccgcagcatttattgaagatacgtatggaaaagaattttctagacatgatcaccgaaagatcaaaaatgctcaaggcgcacaagatgcccatgaagctgtgcgtccaacgagtgtgcttcgtacaccagatgaactcaaacaatatttagataaagatcaattgaaactttatacattgatctggtcacgttttgtggctagtcagatgacaccagctattttagatacaatgaaagtgacattagaacaaaatggtgtcatcttcattgcgaacggttcaaaaatcaaattcaaaggattcatgcaagtgtatgtggaaggtagagatgacggcaaagaagagaaagaaaatattcttccagaacttgaagaaggcgatgtagtccaatctgttgatattgaaccaaaacaacattttactcaaccaccagcacgttttagtgaggctacgttgattcgtgcactagaagaaaacggggtagggcgaccttccacttatgcaccaacacttgatacgatccaaagacgctactatgtaaaattgacacaaaaaagatttgagccgactgaactaggagaaattgtcaattcattaatctgtgaattcttccctcaaatcgtcgatatccatttcacagcagaaatggaaggagatttggataaaattgaagaaggcacggaagcgtgggtcaaagtggttgatcgtttctataaaccgtttgaaaaagaactgacgaatgcggaagaaaaaatcgaaaaaattcaaatcaaagatgaaccagcaggattcgattgtgatgtctgtggacatccgatggtgataaaattagggaaatatgggaagttttatgcttgcagtaattttcctgattgtcggaatacgaaaccaatcgtaaaagaaatcggtgtgacttgcccagtatgtcatgaaggacaagtcattgaacgaaaatctaagaaaaacagactattctatggttgttcccgtttcccagaatgtgaattcacttcttgggataaaccagtgggcagaaattgtccaaaatgtgacggatatctggtcgagaagaaagtcaaaggcggtaaacaagtagtctgtgtaaatggagattacgaagaagacatccaaaaa

SEQ ID NO: 21572 - DNA, 753 bp, Enterococcus faecium
gtgagacgagtgagacaattaccaaaacccctttatgcaaaacatggaaagcgagcggttttgctgcttcacgcttactcaggaagtccaaacgatgttcgaatgctcgcacgatttttggaaaaagcagattatacagtttatgcgccgctttttaaaggacacggaacaatggagccatatgatatcttgcaagaaaaagcagaaagctggtgggcagacactaaaaaagccatccattttttacagtctgagcagttttctgatattgccgtattaggattatcaatgggcggcatctttgctgtacgagcactagaagaagaatcagtgattggcggcggttttttctgttcgcctttgtctcctgtaaaaacaaacgtgcctgaaaactttgaaaaatacgtacgtcaagtgctgaagacagcaggtaaatcagagaaagaaatcaatgaaaaagcagttgcttaccgctcgttagctgaacaacaattaatggatatacaagatcaggcagcaatcgtagaaagtaggttgtcagatatccaacagccgatatttttagctcaagctgggaaagatgaaatgatcgaccctaatggcgtatttgaaactgcacgcaagttgagccgtcagcgagtgacacttcaatggtatcctgaaagtggtcatgtgattacagttggtacagcaagacgcgaattagaaaaagacgtcttggaatttttagaaaaattaccttggaatgaggaa

SEQ ID NO: 21573 - DNA, 1293 bp, Enterococcus faecium
atggtggatctgattgaaaaaaagagggatggaaacgagctgtcgaaagaggaaatcgagtacatcgtcacgaactatacgaatggaaagattccagattatcaagtcagtgcattattgatggcaattttttatcaagacatgacaaatgaagaaatcacgaacttaacattggcgattgctaattctggtgatgtcatcgatttgagttctcttgaaggaataaaggtagataagcattcgacaggtggcgttggtgacacgaccacattgattttagcccccctagtagctagtgtcggagtgacagtggctaaaatgtctggacgcggtctaggttacacaggtggtacactagacaagctagaagcaattcccggatttcagatcgagctttcggatgaagaatttgtacgcattgttaatgaaagtaaagtagcggtaattggtcaatcaggaaacttggcaccggcggacaaaaaattgtatgccttgcgtgacgtcacagcgaccgttgattctcttccgctgattgccagttcgattatgagtaaaaaaatcgcggcaggagcagatgcaatcgttttggatgtgaccactggagacggtgctttcatgaagaacatcgaagatgcaagacgtctggcaaagaccatgacgagcattgggaaactggctaaccgagaaacagtggcggttatctcagatatgtcagaacctcttggcgaagctatcggaaatagtctagaagttgtcgaggcaatcgaaacattacaaggaaatggtccagaagatctagtagaaatgtgctacgccttaggaagccaaatggttgttcttgctggcaaagctaagacaaccgatgaagcaagaacgttgcttcaagaagctctggaatcaggtaaagcgttagcaaaattcaaagaaatgatccaaaatcaagggggagacccagcgatcgtggaacatccagaacgaattttgactgcacgctacacaatggagcttcctgctaaacaaagcggagttgtgtcaaaaatcgtggcaaatgaattaggaattgctgcaatgatgctaggtgctgggcgtaaaaccaaagaagaagatattgatcacgctgttggattgaaactgcataaaaaaattggtgacactgtgacaaaaggtgagtcactattgacgatctatagtaacgacgaagaaatcacttctgtcattgaattattatataaaaatattgaaattggtgaatcggcaatgaagccaacgttgattcatgacatcatcacagaa

SEQ ID NO: 21574 - DNA, 1146 bp, Enterococcus faecium
atgaaaaaaatacttatagtaagtggaacacgagctgattatggaatatataaacctgttgctgagaatttactacaagataattgggatgtatcatttgttgtttctggaatgcatttatcccataaatatggatttactaaagaattgatcttagctgacggatttagaattagtggagaagttcaaagtttgtttttagagaacaataagggaaacatggctcggtctgtggcattagagataaatggtttcacaaatatatttgaacaaactagccctgattttgtattattactaggggatagaggagaaatgttggcagctgcgatagcttgtttgtatcttggaatcaaaacagcacatattcacggaggcgaagtgtctggtactgtagatgaatcaataagacatgccataacgaaaatagcatctgttcattttgctgctacggaaaaaagcaaagagcgtttaataaaaatgggggaagattcttggagagtttttcccgtcggagctcctagaatagatactattttaaataatagattacctagttttagagatataaaagaaaaatatcatctaaaatttgaaaagaaaaaatacgttttgcaagtatttcatccagttgtaaccgaactagaaaatatagaaaaacaaattttagctttgatcaattcaatggaacaacaatctcaaccaattatttgcattttacctaatagtgatgctggtagcgaaattatcagaaaaatgtaccagaaatatttaaaaacggatattatttatattacgaatttagagccggaggaatacctgactatattaaaagagtgcaaatttatgatcggaaattcttcttctgggataattgaagctgcatcattcaaaataccagtaataaatttaggaaccagacaaaatggacgagaacaatctaaaaatattataaatgcaaatctaaatgaaaatgaaattgaaactgctttgaataaaatacaagatcctcagtttataaaaagcttgaaaaatgttaagaacatctacggtgacggcaacagttctagaagaataacaaaaacattgaatcaaatattgaatgatggggaagatattaagtggattcaaaaacaaatagcttat

SEQ ID NO: 21575 - DNA, 1068 bp, Enterococcus faecium
atgacgaaaattttagaagtgaaagacttagaaatctcttttgatacgtatgctggaaaggtacgagcgattcgcggtgtcaattttcatttgaataaaggagaaacattggcgatcgttggggaatctggaagtggaaaatcagtgacgaccagaagcatcatgcgcttgctgtcaagcaacgccaatatagatgctggtcaaatcctctttaaaggtaacgatatcgttggaaaatcagaaagagagatgcaaaaaatccgtggtaaagaaatagcgatgattttccaagatccaatgacctctttagatccgacgatgcccattgggaagcaagtcgctgagtcccttagaaagcataataaagtttcaaaaaaagagggacaaaaagctgcattagaattgcttaaattagttggaatacccgaagctgagaaacgtatcaacagttatccgcatcagttctcaggaggtcagcgtcaacggatcgtgatcgcgattgcactggtatgttatccggaaatcctgattgctgatgaacctacaacagcgcttgatgtgactattcaagcacagattttggagctgctgaaagaaattcagacaaaaatcgatacatcaattatctttatcactcatgaccttggtgtagtagcgaatgtcgctgatcgtgtcgctgtcatgtatggaggaagaatcgttgaagttggaacatcggaagaaattttctacaacccgcaacatccctatacttggggactgcttggttcaatgccgacattagatagtgcgaacgatcgattgtatgctattcctggttctccaccggatttattgaacccgccaaaaggagacgcattctatccaagaaatgaattcgcgatgaaaatcgatgcagaacaagaaccaccattttttgaactatcaaaaacacacaaggcagcaacttggctacttgctccgcaggcacccaaagtgacaccgccagaagaaatccaacgtcgctgggctatctttaaagagaaacaaaaacatacttacggtcaaggaggaattgctgatgccaaa

SEQ ID NO: 21576 - DNA, 1512 bp, Enterococcus faecium
atggaaatcaaaacgattattgaagcaatcgatgattggggaataaatgaacctgatcgagttgcttatcaggcggatgagacgcatacttttggtgaattgaaacaagcatcagacgcacttgcttattatttagaaaaaaaggtagaaggcgatggaccaattgtcgtttttggcaatttggagtttgaaatgattgtctcatttctaggggttgtcaaatctggccatgcctatttgccgattgaagagcatacacccaaggagcgtatcctatcgatctttcgggtggctaaaccatctatggtcatcagtatcggggactggatagaagatattccttcggttcctgtcataacaaaaaaagaatttcaagaaatcaagaagataccagtaggattttatcccagaaatagcgtaaaaggtacagaaaatttttatattatttttacttctggtactactggagaaccaaaaggcgtacaaatcagtcatgataatctagtcagctttgttcaatggacgatggaagactttgggatcaagcctggtatgcatttcttagcccaagcgccattttcttttgatttatcggtattttctatttatcctgcattagtttctggcggaatgctgaagccgttaaataaagcagttgttcaagactttcgtcaattattcgcgacattgccagccttgaagttgaatgtgtgggtttctactccatcatttatggatatttgcttgatggaacctacattcaatggagaaaatgtgccggaattggacatgtttttattttgcggagaagaattgacgaaaaaaactgcagaaagtctacttgatcgattcccaaatgcacggatatataatacttacggtccaacagaagcaactgtagctatttcaagtattcagattgaccagcatgtactagatagttatgaccgactaccgattggctacgtaaaaaaagacacgaaagtttctattgtccaagaaggtaaacctgtttcaaaaggagaaacgggtgaaatcattattgcaggaccaagcgtatcaaaaggttacctgaacaatcccgaaaagacagctgctgcgttcttttgtcaaaatgacttagcaagttaccatacaggggatgcaggtagactagatgaatatgggcttttattttatgaaggacgtatggatcagcaggtcaaattacatggataccggattgaactcggggatatcgaacattatctgctccaagacaaccgaatcaaacaagctgtcgtcgtaccaaaataccaaggaacaaaagtacagcagctggttgcttttgtcgtattagaaaacaaaacgaaacagccggattttcagttgactaaatctatcaaagaacaattactagaagttgtaatggattatatgattcctcagaagttccattatgtcgatctgctgcctcagacagttaatggaaaaatcgatcgaaaaaaattaacagctgaggtgaatcctgaa

SEQ ID NO: 21577 - DNA, 546 bp, Enterococcus faecium
atggtcgaatcaccatttcattcaaccactatctgtgccgtcgaaaaagacgggaaatttgctatggctggagatggccaagtaacaatgggtgaatctgttgtcatgaaaggcactgcaaagaaagtacgacgtatctacaatggagaagttgttgtaggtttcgccggaagtgttgcagatgcgtttactttagaagaaaaatttgaaggcaaactaaacgaatataacgggaatctacaacgcgcagctgtcgaattagctcaagaatggcggacacagcaatctatgcaaaaacttgaagcgatgctgatcgtaatgaatgataaagaaatgcttcttgtttcaggtacaggagaagttatcacaccagatgatggtatcttagctatcggatcaggagggaattttgcgttggctgcagcccgagcaatgaaaaactatgctcaaaacgacatgagtgcgaaagaaattgcagaaaatgcgttaaatattgccgcagatatctgtatctttactaatcataatattatcgtagaagaactg
